United States Patent Application Publication US 2018/0305689 A1 - sequence listing, part 28

SEQ ID NO: 345210 - RNA, 19 nt, Artificial Sequence
  Description of Artificial Sequence: Synthetic oligonucleotide
  Antisense Strand to SEQ ID NO: 345209
auccucacacccaacucca

SEQ ID NO: 345211 - RNA, 19 nt, Artificial Sequence
  Description of Artificial Sequence: Synthetic oligonucleotide
  Sense Strand Starting at position 335 of SEQ ID NO: 317374
cggugacagagaugauagu

SEQ ID NO: 345212 - RNA, 19 nt, Artificial Sequence
  Description of Artificial Sequence: Synthetic oligonucleotide
  Antisense Strand to SEQ ID NO: 345211
acuaucaucucugucaccg

SEQ ID NO: 345213 - RNA, 19 nt, Artificial Sequence
  Description of Artificial Sequence: Synthetic oligonucleotide
  Sense Strand Starting at position 335 of SEQ ID NO: 317494
aaaggugaagccugaaguu

SEQ ID NO: 345214 - RNA, 19 nt, Artificial Sequence
  Description of Artificial Sequence: Synthetic oligonucleotide
  Antisense Strand to SEQ ID NO: 345213
aacuucaggcuucaccuuu

SEQ ID NO: 345215 - RNA, 19 nt, Artificial Sequence
  Description of Artificial Sequence: Synthetic oligonucleotide
  Sense Strand Starting at position 335 of SEQ ID NO: 317506
ugaaguuuccaugacgaug

SEQ ID NO: 345216 - RNA, 19 nt, Artificial Sequence
  Description of Artificial Sequence: Synthetic oligonucleotide
  Antisense Strand to SEQ ID NO: 345215
caucgucauggaaacuuca

SEQ ID NO: 345217 - RNA, 19 nt, Artificial Sequence
  Description of Artificial Sequence: Synthetic oligonucleotide
  Sense Strand Starting at position 335 of SEQ ID NO: 317794
ugucuuagggcacacagaa

SEQ ID NO: 345218 - RNA, 19 nt, Artificial Sequence
  Description of Artificial Sequence: Synthetic oligonucleotide
  Antisense Strand to SEQ ID NO: 345217
uucugugugcccuaagaca

SEQ ID NO: 345219 - RNA, 19 nt, Artificial Sequence
  Description of Artificial Sequence: Synthetic oligonucleotide
  Sense Strand Starting at position 335 of SEQ ID NO: 317948
ggcagugugcagaggaguu

SEQ ID NO: 345220 - RNA, 19 nt, Artificial Sequence
  Description of Artificial Sequence: Synthetic oligonucleotide
  Antisense Strand to SEQ ID NO: 345219
aacuccucugcacacugcc

SEQ ID NO: 345221 - RNA, 19 nt, Artificial Sequence
  Description of Artificial Sequence: Synthetic oligonucleotide
  Sense Strand Starting at position 335 of SEQ ID NO: 318383
agcugauggagccgauuaa

SEQ ID NO: 345222 - RNA, 19 nt, Artificial Sequence
  Description of Artificial Sequence: Synthetic oligonucleotide
  Antisense Strand to SEQ ID NO: 345221
uuaaucggcuccaucagcu

SEQ ID NO: 345223 - RNA, 19 nt, Artificial Sequence
  Description of Artificial Sequence: Synthetic oligonucleotide
  Sense Strand Starting at position 335 of SEQ ID NO: 318449
uaauuaauggaguggcuuu

SEQ ID NO: 345224 - RNA, 19 nt, Artificial Sequence
  Description of Artificial Sequence: Synthetic oligonucleotide
  Antisense Strand to SEQ ID NO: 345223
aaagccacuccauuaauua

SEQ ID NO: 345225 - RNA, 19 nt, Artificial Sequence
  Description of Artificial Sequence: Synthetic oligonucleotide
  Sense Strand Starting at position 335 of SEQ ID NO: 318497
aucugcuuaucacuagagu

SEQ ID NO: 345226 - RNA, 19 nt, Artificial Sequence
  Description of Artificial Sequence: Synthetic oligonucleotide
  Antisense Strand to SEQ ID NO: 345225
acucuagugauaagcagau

SEQ ID NO: 345227 - RNA, 19 nt, Artificial Sequence
  Description of Artificial Sequence: Synthetic oligonucleotide
  Sense Strand Starting at position 335 of SEQ ID NO: 318498
ucugcuuaucacuagaguu

SEQ ID NO: 345228 - RNA, 19 nt, Artificial Sequence
  Description of Artificial Sequence: Synthetic oligonucleotide
  Antisense Strand to SEQ ID NO: 345227
aacucuagugauaagcaga

SEQ ID NO: 345229 - RNA, 19 nt, Artificial Sequence
  Description of Artificial Sequence: Synthetic oligonucleotide
  Sense Strand Starting at position 335 of SEQ ID NO: 318510
uagaguuccuaauuagaug

SEQ ID NO: 345230 - RNA, 19 nt, Artificial Sequence
  Description of Artificial Sequence: Synthetic oligonucleotide
  Antisense Strand to SEQ ID NO: 345229
caucuaauuaggaacucua

SEQ ID NO: 345231 - RNA, 19 nt, Artificial Sequence
  Description of Artificial Sequence: Synthetic oligonucleotide
  Sense Strand Starting at position 335 of SEQ ID NO: 318674
gcauuagcuccaggaugga

SEQ ID NO: 345232 - RNA, 19 nt, Artificial Sequence
  Description of Artificial Sequence: Synthetic oligonucleotide
  Antisense Strand to SEQ ID NO: 345231
uccauccuggagcuaaugc

SEQ ID NO: 345233 - RNA, 19 nt, Artificial Sequence
  Description of Artificial Sequence: Synthetic oligonucleotide
  Sense Strand Starting at position 336 of SEQ ID NO: 315290
guauguguagcagaaaccu

SEQ ID NO: 345234 - RNA, 19 nt, Artificial Sequence
  Description of Artificial Sequence: Synthetic oligonucleotide
  Antisense Strand to SEQ ID NO: 345233
agguuucugcuacacauac

SEQ ID NO: 345235 - RNA, 19 nt, Artificial Sequence
  Description of Artificial Sequence: Synthetic oligonucleotide
  Sense Strand Starting at position 336 of SEQ ID NO: 315382
acccuaauuugggaccuau

SEQ ID NO: 345236 - RNA, 19 nt, Artificial Sequence
  Description of Artificial Sequence: Synthetic oligonucleotide
  Antisense Strand to SEQ ID NO: 345235
auaggucccaaauuagggu

SEQ ID NO: 345237 - RNA, 19 nt, Artificial Sequence
  Description of Artificial Sequence: Synthetic oligonucleotide
  Sense Strand Starting at position 336 of SEQ ID NO: 315664
guggaauacaaaugcugau

SEQ ID NO: 345238 - RNA, 19 nt, Artificial Sequence
  Description of Artificial Sequence: Synthetic oligonucleotide
  Antisense Strand to SEQ ID NO: 345237
aucagcauuuguauuccac

SEQ ID NO: 345239 - RNA, 19 nt, Artificial Sequence
  Description of Artificial Sequence: Synthetic oligonucleotide
  Sense Strand Starting at position 336 of SEQ ID NO: 315697
gaacucuagccuuaagguu

SEQ ID NO: 345240 - RNA, 19 nt, Artificial Sequence
  Description of Artificial Sequence: Synthetic oligonucleotide
  Antisense Strand to SEQ ID NO: 345239
aaccuuaaggcuagaguuc

SEQ ID NO: 345241 - RNA, 19 nt, Artificial Sequence
  Description of Artificial Sequence: Synthetic oligonucleotide
  Sense Strand Starting at position 336 of SEQ ID NO: 315861
acaagccaagucugagaua

SEQ ID NO: 345242 - RNA, 19 nt, Artificial Sequence
  Description of Artificial Sequence: Synthetic oligonucleotide
  Antisense Strand to SEQ ID NO: 345241
uaucucagacuuggcuugu

SEQ ID NO: 345243 - RNA, 19 nt, Artificial Sequence
  Description of Artificial Sequence: Synthetic oligonucleotide
  Sense Strand Starting at position 336 of SEQ ID NO: 315972
aaagaacuguguucuggau

SEQ ID NO: 345244 - RNA, 19 nt, Artificial Sequence
  Description of Artificial Sequence: Synthetic oligonucleotide
  Antisense Strand to SEQ ID NO: 345243
auccagaacacaguucuuu

SEQ ID NO: 345245 - RNA, 19 nt, Artificial Sequence
  Description of Artificial Sequence: Synthetic oligonucleotide
  Sense Strand Starting at position 336 of SEQ ID NO: 315978
cuguguucuggauaccgaa

SEQ ID NO: 345246 - RNA, 19 nt, Artificial Sequence
  Description of Artificial Sequence: Synthetic oligonucleotide
  Antisense Strand to SEQ ID NO: 345245
uucgguauccagaacacag

SEQ ID NO: 345247 - RNA, 19 nt, Artificial Sequence
  Description of Artificial Sequence: Synthetic oligonucleotide
  Sense Strand Starting at position 336 of SEQ ID NO: 316384
gccacauuagggugaaauc

SEQ ID NO: 345248 - RNA, 19 nt, Artificial Sequence
  Description of Artificial Sequence: Synthetic oligonucleotide
  Antisense Strand to SEQ ID NO: 345247
gauuucacccuaauguggc

SEQ ID NO: 345249 - RNA, 19 nt, Artificial Sequence
  Description of Artificial Sequence: Synthetic oligonucleotide
  Sense Strand Starting at position 336 of SEQ ID NO: 316447
uuaagacaaacgugguuaa

SEQ ID NO: 345250 - RNA, 19 nt, Artificial Sequence
  Description of Artificial Sequence: Synthetic oligonucleotide
  Antisense Strand to SEQ ID NO: 345249
uuaaccacguuugucuuaa

SEQ ID NO: 345251 - RNA, 19 nt, Artificial Sequence
  Description of Artificial Sequence: Synthetic oligonucleotide
  Sense Strand Starting at position 336 of SEQ ID NO: 316613
gaggaaaggccacgugaau

SEQ ID NO: 345252 - RNA, 19 nt, Artificial Sequence
  Description of Artificial Sequence: Synthetic oligonucleotide
  Antisense Strand to SEQ ID NO: 345251
auucacguggccuuuccuc

SEQ ID NO: 345253 - RNA, 19 nt, Artificial Sequence
  Description of Artificial Sequence: Synthetic oligonucleotide
  Sense Strand Starting at position 336 of SEQ ID NO: 316977
gagcuaaugucacucaaag

SEQ ID NO: 345254 - RNA, 19 nt, Artificial Sequence
  Description of Artificial Sequence: Synthetic oligonucleotide
  Antisense Strand to SEQ ID NO: 345253
cuuugagugacauuagcuc

SEQ ID NO: 345255 - RNA, 19 nt, Artificial Sequence
  Description of Artificial Sequence: Synthetic oligonucleotide
  Sense Strand Starting at position 336 of SEQ ID NO: 317429
gagcgagcgcgcucuaaua

SEQ ID NO: 345256 - RNA, 19 nt, Artificial Sequence
  Description of Artificial Sequence: Synthetic oligonucleotide
  Antisense Strand to SEQ ID NO: 345255
uauuagagcgcgcucgcuc

SEQ ID NO: 345257 - RNA, 19 nt, Artificial Sequence
  Description of Artificial Sequence: Synthetic oligonucleotide
  Sense Strand Starting at position 336 of SEQ ID NO: 317781
cgcuuauguccugcggaga

SEQ ID NO: 345258 - RNA, 19 nt, Artificial Sequence
  Description of Artificial Sequence: Synthetic oligonucleotide
  Antisense Strand to SEQ ID NO: 345257
ucuccgcaggacauaagcg

SEQ ID NO: 345259 - RNA, 19 nt, Artificial Sequence
  Description of Artificial Sequence: Synthetic oligonucleotide
  Sense Strand Starting at position 336 of SEQ ID NO: 317822
aagcuuuaaguccgaggaa

SEQ ID NO: 345260 - RNA, 19 nt, Artificial Sequence
  Description of Artificial Sequence: Synthetic oligonucleotide
  Antisense Strand to SEQ ID NO: 345259
uuccucggacuuaaagcuu

SEQ ID NO: 345261 - RNA, 19 nt, Artificial Sequence
  Description of Artificial Sequence: Synthetic oligonucleotide
  Sense Strand Starting at position 336 of SEQ ID NO: 317825
cuuuaaguccgaggaaauc

SEQ ID NO: 345262 - RNA, 19 nt, Artificial Sequence
  Description of Artificial Sequence: Synthetic oligonucleotide
  Antisense Strand to SEQ ID NO: 345261
gauuuccucggacuuaaag

SEQ ID NO: 345263 - RNA, 19 nt, Artificial Sequence
  Description of Artificial Sequence: Synthetic oligonucleotide
  Sense Strand Starting at position 336 of SEQ ID NO: 317988
cagagcaggguuuaaguua

SEQ ID NO: 345264 - RNA, 19 nt, Artificial Sequence
  Description of Artificial Sequence: Synthetic oligonucleotide
  Antisense Strand to SEQ ID NO: 345263
uaacuuaaacccugcucug

SEQ ID NO: 345265 - RNA, 19 nt, Artificial Sequence
  Description of Artificial Sequence: Synthetic oligonucleotide
  Sense Strand Starting at position 336 of SEQ ID NO: 317993
caggguuuaaguuauggau

SEQ ID NO: 345266 - RNA, 19 nt, Artificial Sequence
  Description of Artificial Sequence: Synthetic oligonucleotide
  Antisense Strand to SEQ ID NO: 345265
auccauaacuuaaacccug

SEQ ID NO: 345267 - RNA, 19 nt, Artificial Sequence
  Description of Artificial Sequence: Synthetic oligonucleotide
  Sense Strand Starting at position 336 of SEQ ID NO: 318002
aguuauggaugcucuggaa

SEQ ID NO: 345268 - RNA, 19 nt, Artificial Sequence
  Description of Artificial Sequence: Synthetic oligonucleotide
  Antisense Strand to SEQ ID NO: 345267
uuccagagcauccauaacu

SEQ ID NO: 345269 - RNA, 19 nt, Artificial Sequence
  Description of Artificial Sequence: Synthetic oligonucleotide
  Sense Strand Starting at position 336 of SEQ ID NO: 318096
cccauuuauuguguccgga

SEQ ID NO: 345270 - RNA, 19 nt, Artificial Sequence
  Description of Artificial Sequence: Synthetic oligonucleotide
  Antisense Strand to SEQ ID NO: 345269
uccggacacaauaaauggg

SEQ ID NO: 345271 - RNA, 19 nt, Artificial Sequence
  Description of Artificial Sequence: Synthetic oligonucleotide
  Sense Strand Starting at position 336 of SEQ ID NO: 318098
cauuuauuguguccggauc

SEQ ID NO: 345272 - RNA, 19 nt, Artificial Sequence
  Description of Artificial Sequence: Synthetic oligonucleotide
  Antisense Strand to SEQ ID NO: 345271
gauccggacacaauaaaug

SEQ ID NO: 345273 - RNA, 19 nt, Artificial Sequence
  Description of Artificial Sequence: Synthetic oligonucleotide
  Sense Strand Starting at position 336 of SEQ ID NO: 318099
auuuauuguguccggauca

SEQ ID NO: 345274 - RNA, 19 nt, Artificial Sequence
  Description of Artificial Sequence: Synthetic oligonucleotide
  Antisense Strand to SEQ ID NO: 345273
ugauccggacacaauaaau

SEQ ID NO: 345275 - RNA, 19 nt, Artificial Sequence
  Description of Artificial Sequence: Synthetic oligonucleotide
  Sense Strand Starting at position 336 of SEQ ID NO: 318111
cggaucaaguguuuagaag

SEQ ID NO: 345276 - RNA, 19 nt, Artificial Sequence
  Description of Artificial Sequence: Synthetic oligonucleotide
  Antisense Strand to SEQ ID NO: 345275
cuucuaaacacuugauccg

SEQ ID NO: 345277 - RNA, 19 nt, Artificial Sequence
  Description of Artificial Sequence: Synthetic oligonucleotide
  Sense Strand Starting at position 336 of SEQ ID NO: 318112
ggaucaaguguuuagaagu

SEQ ID NO: 345278 - RNA, 19 nt, Artificial Sequence
  Description of Artificial Sequence: Synthetic oligonucleotide
  Antisense Strand to SEQ ID NO: 345277
acuucuaaacacuugaucc

SEQ ID NO: 345279 - RNA, 19 nt, Artificial Sequence
  Description of Artificial Sequence: Synthetic oligonucleotide
  Sense Strand Starting at position 336 of SEQ ID NO: 318254
accugugcccucuagauaa

SEQ ID NO: 345280 - RNA, 19 nt, Artificial Sequence
  Description of Artificial Sequence: Synthetic oligonucleotide
  Antisense Strand to SEQ ID NO: 345279
uuaucuagagggcacaggu

SEQ ID NO: 345281 - RNA, 19 nt, Artificial Sequence
  Description of Artificial Sequence: Synthetic oligonucleotide
  Sense Strand Starting at position 336 of SEQ ID NO: 318408
agaucugagccguaaagac

SEQ ID NO: 345282 - RNA, 19 nt, Artificial Sequence
  Description of Artificial Sequence: Synthetic oligonucleotide
  Antisense Strand to SEQ ID NO: 345281
gucuuuacggcucagaucu

SEQ ID NO: 345283 - RNA, 19 nt, Artificial Sequence
  Description of Artificial Sequence: Synthetic oligonucleotide
  Sense Strand Starting at position 336 of SEQ ID NO: 318417
ccguaaagaccacaguuua

SEQ ID NO: 345284 - RNA, 19 nt, Artificial Sequence
  Description of Artificial Sequence: Synthetic oligonucleotide
  Antisense Strand to SEQ ID NO: 345283
uaaacuguggucuuuacgg

SEQ ID NO: 345285 - RNA, 19 nt, Artificial Sequence
  Description of Artificial Sequence: Synthetic oligonucleotide
  Sense Strand Starting at position 336 of SEQ ID NO: 318521
uuguauaaggguuaaaggu

SEQ ID NO: 345286 - RNA, 19 nt, Artificial Sequence
  Description of Artificial Sequence: Synthetic oligonucleotide
  Antisense Strand to SEQ ID NO: 345285
accuuuaacccuuauacaa

SEQ ID NO: 345287 - RNA, 19 nt, Artificial Sequence
  Description of Artificial Sequence: Synthetic oligonucleotide
  Sense Strand Starting at position 336 of SEQ ID NO: 318530
gguuaaaggucucugauaa

SEQ ID NO: 345288 - RNA, 19 nt, Artificial Sequence
  Description of Artificial Sequence: Synthetic oligonucleotide
  Antisense Strand to SEQ ID NO: 345287
uuaucagagaccuuuaacc

SEQ ID NO: 345289 - RNA, 19 nt, Artificial Sequence
  Description of Artificial Sequence: Synthetic oligonucleotide
  Sense Strand Starting at position 336 of SEQ ID NO: 318531
guuaaaggucucugauaag

SEQ ID NO: 345290 - RNA, 19 nt, Artificial Sequence
  Description of Artificial Sequence: Synthetic oligonucleotide
  Antisense Strand to SEQ ID NO: 345289
cuuaucagagaccuuuaac

SEQ ID NO: 345291 - RNA, 19 nt, Artificial Sequence
  Description of Artificial Sequence: Synthetic oligonucleotide
  Sense Strand Starting at position 336 of SEQ ID NO: 318538
gucucugauaaggaguuga

SEQ ID NO: 345292 - RNA, 19 nt, Artificial Sequence
  Description of Artificial Sequence: Synthetic oligonucleotide
  Antisense Strand to SEQ ID NO: 345291
ucaacuccuuaucagagac

SEQ ID NO: 345293 - RNA, 19 nt, Artificial Sequence
  Description of Artificial Sequence: Synthetic oligonucleotide
  Sense Strand Starting at position 336 of SEQ ID NO: 318549
ggaguugaauacucauucu

SEQ ID NO: 345294 - RNA, 19 nt, Artificial Sequence
  Description of Artificial Sequence: Synthetic oligonucleotide
  Antisense Strand to SEQ ID NO: 345293
agaaugaguauucaacucc

SEQ ID NO: 345295 - RNA, 19 nt, Artificial Sequence
  Description of Artificial Sequence: Synthetic oligonucleotide
  Sense Strand Starting at position 336 of SEQ ID NO: 318569
cauggcaguccugaaauug

SEQ ID NO: 345296 - RNA, 19 nt, Artificial Sequence
  Description of Artificial Sequence: Synthetic oligonucleotide
  Antisense Strand to SEQ ID NO: 345295
caauuucaggacugccaug

SEQ ID NO: 345297 - RNA, 19 nt, Artificial Sequence
  Description of Artificial Sequence: Synthetic oligonucleotide
  Sense Strand Starting at position 336 of SEQ ID NO: 318632
cagcgauugcaggaugaaa

SEQ ID NO: 345298 - RNA, 19 nt, Artificial Sequence
  Description of Artificial Sequence: Synthetic oligonucleotide
  Antisense Strand to SEQ ID NO: 345297
uuucauccugcaaucgcug

SEQ ID NO: 345299 - RNA, 19 nt, Artificial Sequence
  Description of Artificial Sequence: Synthetic oligonucleotide
  Sense Strand Starting at position 336 of SEQ ID NO: 318734
uguguuuauccuuagacuu

SEQ ID NO: 345300 - RNA, 19 nt, Artificial Sequence
  Description of Artificial Sequence: Synthetic oligonucleotide
  Antisense Strand to SEQ ID NO: 345299
aagucuaaggauaaacaca

SEQ ID NO: 345301 - RNA, 19 nt, Artificial Sequence
  Description of Artificial Sequence: Synthetic oligonucleotide
  Sense Strand Starting at position 336 of SEQ ID NO: 318769
uaagauaaggugcauguaa

SEQ ID NO: 345302 - RNA, 19 nt, Artificial Sequence
  Description of Artificial Sequence: Synthetic oligonucleotide
  Antisense Strand to SEQ ID NO: 345301
uuacaugcaccuuaucuua

SEQ ID NO: 345303 - RNA, 19 nt, Artificial Sequence
  Description of Artificial Sequence: Synthetic oligonucleotide
  Sense Strand Starting at position 336 of SEQ ID NO: 318865
acaggagggcuguguuaag

SEQ ID NO: 345304 - RNA, 19 nt, Artificial Sequence
  Description of Artificial Sequence: Synthetic oligonucleotide
  Antisense Strand to SEQ ID NO: 345303
cuuaacacagcccuccugu

SEQ ID NO: 345305 - RNA, 19 nt, Artificial Sequence
  Description of Artificial Sequence: Synthetic oligonucleotide
  Sense Strand Starting at position 336 of SEQ ID NO: 318893
uggcuuaucccauggaaac

SEQ ID NO: 345306 - RNA, 19 nt, Artificial Sequence
  Description of Artificial Sequence: Synthetic oligonucleotide
  Antisense Strand to SEQ ID NO: 345305
guuuccaugggauaagcca

SEQ ID NO: 345307 - RNA, 19 nt, Artificial Sequence
  Description of Artificial Sequence: Synthetic oligonucleotide
  Sense Strand Starting at position 336 of SEQ ID NO: 318894
ggcuuaucccauggaaaca

SEQ ID NO: 345308 - RNA, 19 nt, Artificial Sequence
  Description of Artificial Sequence: Synthetic oligonucleotide
  Antisense Strand to SEQ ID NO: 345307
uguuuccaugggauaagcc

SEQ ID NO: 345309 - RNA, 19 nt, Artificial Sequence
  Description of Artificial Sequence: Synthetic oligonucleotide
  Sense Strand Starting at position 336 of SEQ ID NO: 318919
uguuuaugugguuacaaag

SEQ ID NO: 345310 - RNA, 19 nt, Artificial Sequence
  Description of Artificial Sequence: Synthetic oligonucleotide
  Antisense Strand to SEQ ID NO: 345309
cuuuguaaccacauaaaca

SEQ ID NO: 345311 - RNA, 19 nt, Artificial Sequence
  Description of Artificial Sequence: Synthetic oligonucleotide
  Sense Strand Starting at position 336 of SEQ ID NO: 319168
agccuuaggcaucaugaau

SEQ ID NO: 345312 - RNA, 19 nt, Artificial Sequence
  Description of Artificial Sequence: Synthetic oligonucleotide
  Antisense Strand to SEQ ID NO: 345311
auucaugaugccuaaggcu

SEQ ID NO: 345313 - RNA, 19 nt, Artificial Sequence
  Description of Artificial Sequence: Synthetic oligonucleotide
  Sense Strand Starting at position 337 of SEQ ID NO: 315276
ucuuaacugugaccacaga

SEQ ID NO: 345314 - RNA, 19 nt, Artificial Sequence
  Description of Artificial Sequence: Synthetic oligonucleotide
  Antisense Strand to SEQ ID NO: 345313
ucuguggucacaguuaaga

SEQ ID NO: 345315 - RNA, 19 nt, Artificial Sequence
  Description of Artificial Sequence: Synthetic oligonucleotide
  Sense Strand Starting at position 337 of SEQ ID NO: 315385
gucagaucggaucacuuua

SEQ ID NO: 345316 - RNA, 19 nt, Artificial Sequence
  Description of Artificial Sequence: Synthetic oligonucleotide
  Antisense Strand to SEQ ID NO: 345315
uaaagugauccgaucugac

SEQ ID NO: 345317 - RNA, 19 nt, Artificial Sequence
  Description of Artificial Sequence: Synthetic oligonucleotide
  Sense Strand Starting at position 337 of SEQ ID NO: 315387
cagaucggaucacuuuaga

SEQ ID NO: 345318 - RNA, 19 nt, Artificial Sequence
  Description of Artificial Sequence: Synthetic oligonucleotide
  Antisense Strand to SEQ ID NO: 345317
ucuaaagugauccgaucug

SEQ ID NO: 345319 - RNA, 19 nt, Artificial Sequence
  Description of Artificial Sequence: Synthetic oligonucleotide
  Sense Strand Starting at position 337 of SEQ ID NO: 315494
agugaaacuugggucuagu

SEQ ID NO: 345320 - RNA, 19 nt, Artificial Sequence
  Description of Artificial Sequence: Synthetic oligonucleotide
  Antisense Strand to SEQ ID NO: 345319
acuagacccaaguuucacu

SEQ ID NO: 345321 - RNA, 19 nt, Artificial Sequence
  Description of Artificial Sequence: Synthetic oligonucleotide
  Sense Strand Starting at position 337 of SEQ ID NO: 315514
ggguacuagaauugucaaa

SEQ ID NO: 345322 - RNA, 19 nt, Artificial Sequence
  Description of Artificial Sequence: Synthetic oligonucleotide
  Antisense Strand to SEQ ID NO: 345321
uuugacaauucuaguaccc

SEQ ID NO: 345323 - RNA, 19 nt, Artificial Sequence
  Description of Artificial Sequence: Synthetic oligonucleotide
  Sense Strand Starting at position 337 of SEQ ID NO: 315622
gcaggagaauggguccaaa

SEQ ID NO: 345324 - RNA, 19 nt, Artificial Sequence
  Description of Artificial Sequence: Synthetic oligonucleotide
  Antisense Strand to SEQ ID NO: 345323
uuuggacccauucuccugc

SEQ ID NO: 345325 - RNA, 19 nt, Artificial Sequence
  Description of Artificial Sequence: Synthetic oligonucleotide
  Sense Strand Starting at position 337 of SEQ ID NO: 316271
ugcugaaugcauuaaaguu

SEQ ID NO: 345326 - RNA, 19 nt, Artificial Sequence
  Description of Artificial Sequence: Synthetic oligonucleotide
  Antisense Strand to SEQ ID NO: 345325
aacuuuaaugcauucagca

SEQ ID NO: 345327 - RNA, 19 nt, Artificial Sequence
  Description of Artificial Sequence: Synthetic oligonucleotide
  Sense Strand Starting at position 337 of SEQ ID NO: 316320
guucgacuugcuuauuuau

SEQ ID NO: 345328 - RNA, 19 nt, Artificial Sequence
  Description of Artificial Sequence: Synthetic oligonucleotide
  Antisense Strand to SEQ ID NO: 345327
auaaauaagcaagucgaac

SEQ ID NO: 345329 - RNA, 19 nt, Artificial Sequence
  Description of Artificial Sequence: Synthetic oligonucleotide
  Sense Strand Starting at position 337 of SEQ ID NO: 316322
ucgacuugcuuauuuaucu

SEQ ID NO: 345330 - RNA, 19 nt, Artificial Sequence
  Description of Artificial Sequence: Synthetic oligonucleotide
  Antisense Strand to SEQ ID NO: 345329
agauaaauaagcaagucga

SEQ ID NO: 345331 - RNA, 19 nt, Artificial Sequence
  Description of Artificial Sequence: Synthetic oligonucleotide
  Sense Strand Starting at position 337 of SEQ ID NO: 316323
cgacuugcuuauuuaucuu

SEQ ID NO: 345332 - RNA, 19 nt, Artificial Sequence
  Description of Artificial Sequence: Synthetic oligonucleotide
  Antisense Strand to SEQ ID NO: 345331
aagauaaauaagcaagucg

SEQ ID NO: 345333 - RNA, 19 nt, Artificial Sequence
  Description of Artificial Sequence: Synthetic oligonucleotide
  Sense Strand Starting at position 337 of SEQ ID NO: 316746
gaaauaagguuucugcuac

SEQ ID NO: 345334 - RNA, 19 nt, Artificial Sequence
  Description of Artificial Sequence: Synthetic oligonucleotide
  Antisense Strand to SEQ ID NO: 345333
guagcagaaaccuuauuuc

SEQ ID NO: 345335 - RNA, 19 nt, Artificial Sequence
  Description of Artificial Sequence: Synthetic oligonucleotide
  Sense Strand Starting at position 337 of SEQ ID NO: 316754
guuucugcuacagaaggaa

SEQ ID NO: 345336 - RNA, 19 nt, Artificial Sequence
  Description of Artificial Sequence: Synthetic oligonucleotide
  Antisense Strand to SEQ ID NO: 345335
uuccuucuguagcagaaac

SEQ ID NO: 345337 - RNA, 19 nt, Artificial Sequence
  Description of Artificial Sequence: Synthetic oligonucleotide
  Sense Strand Starting at position 337 of SEQ ID NO: 316992
gggcacuuauaaucaaaua

SEQ ID NO: 345338 - RNA, 19 nt, Artificial Sequence
  Description of Artificial Sequence: Synthetic oligonucleotide
  Antisense Strand to SEQ ID NO: 345337
uauuugauuauaagugccc

SEQ ID NO: 345339 - RNA, 19 nt, Artificial Sequence
  Description of Artificial Sequence: Synthetic oligonucleotide
  Sense Strand Starting at position 337 of SEQ ID NO: 317054
aggaguuccaggcaagcaa

SEQ ID NO: 345340 - RNA, 19 nt, Artificial Sequence
  Description of Artificial Sequence: Synthetic oligonucleotide
  Antisense Strand to SEQ ID NO: 345339
uugcuugccuggaacuccu

SEQ ID NO: 345341 - RNA, 19 nt, Artificial Sequence
  Description of Artificial Sequence: Synthetic oligonucleotide
  Sense Strand Starting at position 337 of SEQ ID NO: 317581
ucuuuauuucuggguguag

SEQ ID NO: 345342 - RNA, 19 nt, Artificial Sequence
  Description of Artificial Sequence: Synthetic oligonucleotide
  Antisense Strand to SEQ ID NO: 345341
cuacacccagaaauaaaga

SEQ ID NO: 345343 - RNA, 19 nt, Artificial Sequence
  Description of Artificial Sequence: Synthetic oligonucleotide
  Sense Strand Starting at position 337 of SEQ ID NO: 317745
aauaauugucaaggguaau

SEQ ID NO: 345344 - RNA, 19 nt, Artificial Sequence
  Description of Artificial Sequence: Synthetic oligonucleotide
  Antisense Strand to SEQ ID NO: 345343
auuacccuugacaauuauu

SEQ ID NO: 345345 - RNA, 19 nt, Artificial Sequence
  Description of Artificial Sequence: Synthetic oligonucleotide
  Sense Strand Starting at position 337 of SEQ ID NO: 317746
auaauugucaaggguaaug

SEQ ID NO: 345346 - RNA, 19 nt, Artificial Sequence
  Description of Artificial Sequence: Synthetic oligonucleotide
  Antisense Strand to SEQ ID NO: 345345
cauuacccuugacaauuau

SEQ ID NO: 345347 - RNA, 19 nt, Artificial Sequence
  Description of Artificial Sequence: Synthetic oligonucleotide
  Sense Strand Starting at position 337 of SEQ ID NO: 317755
aaggguaaugaauguaguu

SEQ ID NO: 345348 - RNA, 19 nt, Artificial Sequence
  Description of Artificial Sequence: Synthetic oligonucleotide
  Antisense Strand to SEQ ID NO: 345347
aacuacauucauuacccuu

SEQ ID NO: 345349 - RNA, 19 nt, Artificial Sequence
  Description of Artificial Sequence: Synthetic oligonucleotide
  Sense Strand Starting at position 337 of SEQ ID NO: 317757
ggguaaugaauguaguuaa

SEQ ID NO: 345350 - RNA, 19 nt, Artificial Sequence
  Description of Artificial Sequence: Synthetic oligonucleotide
  Antisense Strand to SEQ ID NO: 345349
uuaacuacauucauuaccc

SEQ ID NO: 345351 - RNA, 19 nt, Artificial Sequence
  Description of Artificial Sequence: Synthetic oligonucleotide
  Sense Strand Starting at position 337 of SEQ ID NO: 317935
uugacaagacuuugugaau

SEQ ID NO: 345352 - RNA, 19 nt, Artificial Sequence
  Description of Artificial Sequence: Synthetic oligonucleotide
  Antisense Strand to SEQ ID NO: 345351
auucacaaagucuugucaa

SEQ ID NO: 345353 - RNA, 19 nt, Artificial Sequence
  Description of Artificial Sequence: Synthetic oligonucleotide
  Sense Strand Starting at position 337 of SEQ ID NO: 317936
ugacaagacuuugugaaua

SEQ ID NO: 345354 - RNA, 19 nt, Artificial Sequence
  Description of Artificial Sequence: Synthetic oligonucleotide
  Antisense Strand to SEQ ID NO: 345353
uauucacaaagucuuguca

SEQ ID NO: 345355 - RNA, 19 nt, Artificial Sequence
  Description of Artificial Sequence: Synthetic oligonucleotide
  Sense Strand Starting at position 337 of SEQ ID NO: 318120
cuacauaaaugcuugagaa

SEQ ID NO: 345356 - RNA, 19 nt, Artificial Sequence
  Description of Artificial Sequence: Synthetic oligonucleotide
  Antisense Strand to SEQ ID NO: 345355
uucucaagcauuuauguag

SEQ ID NO: 345357 - RNA, 19 nt, Artificial Sequence
  Description of Artificial Sequence: Synthetic oligonucleotide
  Sense Strand Starting at position 337 of SEQ ID NO: 318177
caacguuugcaugaucaaa

SEQ ID NO: 345358 - RNA, 19 nt, Artificial Sequence
  Description of Artificial Sequence: Synthetic oligonucleotide
  Antisense Strand to SEQ ID NO: 345357
uuugaucaugcaaacguug

SEQ ID NO: 345359 - RNA, 19 nt, Artificial Sequence
  Description of Artificial Sequence: Synthetic oligonucleotide
  Sense Strand Starting at position 337 of SEQ ID NO: 318203
uggaguuacuucccacuca

SEQ ID NO: 345360 - RNA, 19 nt, Artificial Sequence
  Description of Artificial Sequence: Synthetic oligonucleotide
  Antisense Strand to SEQ ID NO: 345359
ugagugggaaguaacucca

SEQ ID NO: 345361 - RNA, 19 nt, Artificial Sequence
  Description of Artificial Sequence: Synthetic oligonucleotide
  Sense Strand Starting at position 337 of SEQ ID NO: 318347
uugauaauccaagagcucu

SEQ ID NO: 345362 - RNA, 19 nt, Artificial Sequence
  Description of Artificial Sequence: Synthetic oligonucleotide
  Antisense Strand to SEQ ID NO: 345361
agagcucuuggauuaucaa

SEQ ID NO: 345363 - RNA, 19 nt, Artificial Sequence
  Description of Artificial Sequence: Synthetic oligonucleotide
  Sense Strand Starting at position 337 of SEQ ID NO: 318427
gcacuaagacacuagcauu

SEQ ID NO: 345364 - RNA, 19 nt, Artificial Sequence
  Description of Artificial Sequence: Synthetic oligonucleotide
  Antisense Strand to SEQ ID NO: 345363
aaugcuagugucuuagugc

SEQ ID NO: 345365 - RNA, 19 nt, Artificial Sequence
  Description of Artificial Sequence: Synthetic oligonucleotide
  Sense Strand Starting at position 337 of SEQ ID NO: 318433
agacacuagcauuaaguuu

SEQ ID NO: 345366 - RNA, 19 nt, Artificial Sequence
  Description of Artificial Sequence: Synthetic oligonucleotide
  Antisense Strand to SEQ ID NO: 345365
aaacuuaaugcuagugucu

SEQ ID NO: 345367 - RNA, 19 nt, Artificial Sequence
  Description of Artificial Sequence: Synthetic oligonucleotide
  Sense Strand Starting at position 337 of SEQ ID NO: 318557
cuagaaugcuaucuggaaa

SEQ ID NO: 345368 - RNA, 19 nt, Artificial Sequence
  Description of Artificial Sequence: Synthetic oligonucleotide
  Antisense Strand to SEQ ID NO: 345367
uuuccagauagcauucuag

SEQ ID NO: 345369 - RNA, 19 nt, Artificial Sequence
  Description of Artificial Sequence: Synthetic oligonucleotide
  Sense Strand Starting at position 337 of SEQ ID NO: 318601
guacaaacuguguaaugca

SEQ ID NO: 345370 - RNA, 19 nt, Artificial Sequence
  Description of Artificial Sequence: Synthetic oligonucleotide
  Antisense Strand to SEQ ID NO: 345369
ugcauuacacaguuuguac

SEQ ID NO: 345371 - RNA, 19 nt, Artificial Sequence
  Description of Artificial Sequence: Synthetic oligonucleotide
  Sense Strand Starting at position 337 of SEQ ID NO: 318617
gcaguuucuggaggaauag

SEQ ID NO: 345372 - RNA, 19 nt, Artificial Sequence
  Description of Artificial Sequence: Synthetic oligonucleotide
  Antisense Strand to SEQ ID NO: 345371
cuauuccuccagaaacugc

SEQ ID NO: 345373 - RNA, 19 nt, Artificial Sequence
  Description of Artificial Sequence: Synthetic oligonucleotide
  Sense Strand Starting at position 337 of SEQ ID NO: 318642
aguagacucuaauuagcuu

SEQ ID NO: 345374 - RNA, 19 nt, Artificial Sequence
  Description of Artificial Sequence: Synthetic oligonucleotide
  Antisense Strand to SEQ ID NO: 345373
aagcuaauuagagucuacu

SEQ ID NO: 345375 - RNA, 19 nt, Artificial Sequence
  Description of Artificial Sequence: Synthetic oligonucleotide
  Sense Strand Starting at position 337 of SEQ ID NO: 318649
ucuaauuagcuuugagacu

SEQ ID NO: 345376 - RNA, 19 nt, Artificial Sequence
  Description of Artificial Sequence: Synthetic oligonucleotide
  Antisense Strand to SEQ ID NO: 345375
agucucaaagcuaauuaga

SEQ ID NO: 345377 - RNA, 19 nt, Artificial Sequence
  Description of Artificial Sequence: Synthetic oligonucleotide
  Sense Strand Starting at position 337 of SEQ ID NO: 318784
uuacuaauacugugacuug

SEQ ID NO: 345378 - RNA, 19 nt, Artificial Sequence
  Description of Artificial Sequence: Synthetic oligonucleotide
  Antisense Strand to SEQ ID NO: 345377
caagucacaguauuaguaa

SEQ ID NO: 345379 - RNA, 19 nt, Artificial Sequence
  Description of Artificial Sequence: Synthetic oligonucleotide
  Sense Strand Starting at position 337 of SEQ ID NO: 318787
cuaauacugugacuuggaa

SEQ ID NO: 345380 - RNA, 19 nt, Artificial Sequence
  Description of Artificial Sequence: Synthetic oligonucleotide
  Antisense Strand to SEQ ID NO: 345379
uuccaagucacaguauuag

SEQ ID NO: 345381 - RNA, 19 nt, Artificial Sequence
  Description of Artificial Sequence: Synthetic oligonucleotide
  Sense Strand Starting at position 337 of SEQ ID NO: 318805
aaaguuauuucugauugag

SEQ ID NO: 345382 - RNA, 19 nt, Artificial Sequence
  Description of Artificial Sequence: Synthetic oligonucleotide
  Antisense Strand to SEQ ID NO: 345381
cucaaucagaaauaacuuu

SEQ ID NO: 345383 - RNA, 19 nt, Artificial Sequence
  Description of Artificial Sequence: Synthetic oligonucleotide
  Sense Strand Starting at position 337 of SEQ ID NO: 318823
guuucuuccucauuuguaa

SEQ ID NO: 345384 - RNA, 19 nt, Artificial Sequence
  Description of Artificial Sequence: Synthetic oligonucleotide
  Antisense Strand to SEQ ID NO: 345383
uuacaaaugaggaagaaac

SEQ ID NO: 345385 - RNA, 19 nt, Artificial Sequence
  Description of Artificial Sequence: Synthetic oligonucleotide
  Sense Strand Starting at position 337 of SEQ ID NO: 318960
ugcaaauuggaguguagaa

SEQ ID NO: 345386 - RNA, 19 nt, Artificial Sequence
  Description of Artificial Sequence: Synthetic oligonucleotide
  Antisense Strand to SEQ ID NO: 345385
uucuacacuccaauuugca

SEQ ID NO: 345387 - RNA, 19 nt, Artificial Sequence
  Description of Artificial Sequence: Synthetic oligonucleotide
  Sense Strand Starting at position 337 of SEQ ID NO: 319079
uuaaauguccacugacuga

SEQ ID NO: 345388 - RNA, 19 nt, Artificial Sequence
  Description of Artificial Sequence: Synthetic oligonucleotide
  Antisense Strand to SEQ ID NO: 345387
ucagucaguggacauuuaa

SEQ ID NO: 345389 - RNA, 19 nt, Artificial Sequence
  Description of Artificial Sequence: Synthetic oligonucleotide
  Sense Strand Starting at position 337 of SEQ ID NO: 319151
cuugacuugugacugaauc

SEQ ID NO: 345390 - RNA, 19 nt, Artificial Sequence
  Description of Artificial Sequence: Synthetic oligonucleotide
  Antisense Strand to SEQ ID NO: 345389
gauucagucacaagucaag

SEQ ID NO: 345391 - RNA, 19 nt, Artificial Sequence
  Description of Artificial Sequence: Synthetic oligonucleotide
  Sense Strand Starting at position 337 of SEQ ID NO: 319152
uugacuugugacugaauca

SEQ ID NO: 345392 - RNA, 19 nt, Artificial Sequence
  Description of Artificial Sequence: Synthetic oligonucleotide
  Antisense Strand to SEQ ID NO: 345391
ugauucagucacaagucaa

SEQ ID NO: 345393 - RNA, 19 nt, Artificial Sequence
  Description of Artificial Sequence: Synthetic oligonucleotide
  Sense Strand Starting at position 338 of SEQ ID NO: 315238
agugaaacuugggucuagu

SEQ ID NO: 345394 - RNA, 19 nt, Artificial Sequence
  Description of Artificial Sequence: Synthetic oligonucleotide
  Antisense Strand to SEQ ID NO: 345393
acuagacccaaguuucacu

SEQ ID NO: 345395 - RNA, 19 nt, Artificial Sequence
  Description of Artificial Sequence: Synthetic oligonucleotide
  Sense Strand Starting at position 338 of SEQ ID NO: 315258
ggguacuagaauugucaaa

SEQ ID NO: 345396 - RNA, 19 nt, Artificial Sequence
  Description of Artificial Sequence: Synthetic oligonucleotide
  Antisense Strand to SEQ ID NO: 345395
uuugacaauucuaguaccc

SEQ ID NO: 345397 - RNA, 19 nt, Artificial Sequence
  Description of Artificial Sequence: Synthetic oligonucleotide
  Sense Strand Starting at position 338 of SEQ ID NO: 315366
gcaggagaauggguccaaa

SEQ ID NO: 345398 - RNA, 19 nt, Artificial Sequence
  Description of Artificial Sequence: Synthetic oligonucleotide
  Antisense Strand to SEQ ID NO: 345397
uuuggacccauucuccugc

SEQ ID NO: 345399 - RNA, 19 nt, Artificial Sequence
  Description of Artificial Sequence: Synthetic oligonucleotide
  Sense Strand Starting at position 338 of SEQ ID NO: 316015
ugcugaaugcauuaaaguu

SEQ ID NO: 345400 - RNA, 19 nt, Artificial Sequence
  Description of Artificial Sequence: Synthetic oligonucleotide
  Antisense Strand to SEQ ID NO: 345399
aacuuuaaugcauucagca

SEQ ID NO: 345401 - RNA, 19 nt, Artificial Sequence
  Description of Artificial Sequence: Synthetic oligonucleotide
  Sense Strand Starting at position 338 of SEQ ID NO: 316064
guucgacuugcuuauuuau

SEQ ID NO: 345402 - RNA, 19 nt, Artificial Sequence
  Description of Artificial Sequence: Synthetic oligonucleotide
  Antisense Strand to SEQ ID NO: 345401
auaaauaagcaagucgaac

SEQ ID NO: 345403 - RNA, 19 nt, Artificial Sequence
  Description of Artificial Sequence: Synthetic oligonucleotide
  Sense Strand Starting at position 338 of SEQ ID NO: 316066
ucgacuugcuuauuuaucu

SEQ ID NO: 345404 - RNA, 19 nt, Artificial Sequence
  Description of Artificial Sequence: Synthetic oligonucleotide
  Antisense Strand to SEQ ID NO: 345403
agauaaauaagcaagucga

SEQ ID NO: 345405 - RNA, 19 nt, Artificial Sequence
  Description of Artificial Sequence: Synthetic oligonucleotide
  Sense Strand Starting at position 338 of SEQ ID NO: 316067
cgacuugcuuauuuaucuu

SEQ ID NO: 345406 - RNA, 19 nt, Artificial Sequence
  Description of Artificial Sequence: Synthetic oligonucleotide
  Antisense Strand to SEQ ID NO: 345405
aagauaaauaagcaagucg

SEQ ID NO: 345407 - RNA, 19 nt, Artificial Sequence
  Description of Artificial Sequence: Synthetic oligonucleotide
  Sense Strand Starting at position 338 of SEQ ID NO: 316490
gaaauaagguuucugcuac

SEQ ID NO: 345408 - RNA, 19 nt, Artificial Sequence
  Description of Artificial Sequence: Synthetic oligonucleotide
  Antisense Strand to SEQ ID NO: 345407
guagcagaaaccuuauuuc

SEQ ID NO: 345409 - RNA, 19 nt, Artificial Sequence
  Description of Artificial Sequence: Synthetic oligonucleotide
  Sense Strand Starting at position 338 of SEQ ID NO: 316498
guuucugcuacagaaggaa

SEQ ID NO: 345410 - RNA, 19 nt, Artificial Sequence
  Description of Artificial Sequence: Synthetic oligonucleotide
  Antisense Strand to SEQ ID NO: 345409
uuccuucuguagcagaaac

SEQ ID NO: 345411 - RNA, 19 nt, Artificial Sequence
  Description of Artificial Sequence: Synthetic oligonucleotide
  Sense Strand Starting at position 338 of SEQ ID NO: 316736
gggcacuuauaaucaaaua

SEQ ID NO: 345412 - RNA, 19 nt, Artificial Sequence
  Description of Artificial Sequence: Synthetic oligonucleotide
  Antisense Strand to SEQ ID NO: 345411
uauuugauuauaagugccc

SEQ ID NO: 345413 - RNA, 19 nt, Artificial Sequence
  Description of Artificial Sequence: Synthetic oligonucleotide
  Sense Strand Starting at position 338 of SEQ ID NO: 316798
aggaguuccaggcaagcaa

SEQ ID NO: 345414 - RNA, 19 nt, Artificial Sequence
  Description of Artificial Sequence: Synthetic oligonucleotide
  Antisense Strand to SEQ ID NO: 345413
uugcuugccuggaacuccu

SEQ ID NO: 345415 - RNA, 19 nt, Artificial Sequence
  Description of Artificial Sequence: Synthetic oligonucleotide
  Sense Strand Starting at position 338 of SEQ ID NO: 317325
ucuuuauuucuggguguag

SEQ ID NO: 345416 - RNA, 19 nt, Artificial Sequence
  Description of Artificial Sequence: Synthetic oligonucleotide
  Antisense Strand to SEQ ID NO: 345415
cuacacccagaaauaaaga

SEQ ID NO: 345417 - RNA, 19 nt, Artificial Sequence
  Description of Artificial Sequence: Synthetic oligonucleotide
  Sense Strand Starting at position 338 of SEQ ID NO: 317489
aauaauugucaaggguaau

SEQ ID NO: 345418 - RNA, 19 nt, Artificial Sequence
  Description of Artificial Sequence: Synthetic oligonucleotide
  Antisense Strand to SEQ ID NO: 345417
auuacccuugacaauuauu

SEQ ID NO: 345419 - RNA, 19 nt, Artificial Sequence
  Description of Artificial Sequence: Synthetic oligonucleotide
  Sense Strand Starting at position 338 of SEQ ID NO: 317490
auaauugucaaggguaaug

SEQ ID NO: 345420 - RNA, 19 nt, Artificial Sequence
  Description of Artificial Sequence: Synthetic oligonucleotide
  Antisense Strand to SEQ ID NO: 345419
cauuacccuugacaauuau

SEQ ID NO: 345421 - RNA, 19 nt, Artificial Sequence
  Description of Artificial Sequence: Synthetic oligonucleotide
  Sense Strand Starting at position 338 of SEQ ID NO: 317499
aaggguaaugaauguaguu

SEQ ID NO: 345422 - RNA, 19 nt, Artificial Sequence
  Description of Artificial Sequence: Synthetic oligonucleotide
  Antisense Strand to SEQ ID NO: 345421
aacuacauucauuacccuu

SEQ ID NO: 345423 - RNA, 19 nt, Artificial Sequence
  Description of Artificial Sequence: Synthetic oligonucleotide
  Sense Strand Starting at position 338 of SEQ ID NO: 317501
ggguaaugaauguaguuaa

SEQ ID NO: 345424 - RNA, 19 nt, Artificial Sequence
  Description of Artificial Sequence: Synthetic oligonucleotide
  Antisense Strand to SEQ ID NO: 345423
uuaacuacauucauuaccc

SEQ ID NO: 345425 - RNA, 19 nt, Artificial Sequence
  Description of Artificial Sequence: Synthetic oligonucleotide
  Sense Strand Starting at position 338 of SEQ ID NO: 317516
uuaaacaugcugugacauu

SEQ ID NO: 345426 - RNA, 19 nt, Artificial Sequence
  Description of Artificial Sequence: Synthetic oligonucleotide
  Antisense Strand to SEQ ID NO: 345425
aaugucacagcauguuuaa

SEQ ID NO: 345427 - RNA, 19 nt, Artificial Sequence
  Description of Artificial Sequence: Synthetic oligonucleotide
  Sense Strand Starting at position 338 of SEQ ID NO: 317679
uugacaagacuuugugaau

SEQ ID NO: 345428 - RNA, 19 nt, Artificial Sequence
  Description of Artificial Sequence: Synthetic oligonucleotide
  Antisense Strand to SEQ ID NO: 345427
auucacaaagucuugucaa

SEQ ID NO: 345429 - RNA, 19 nt, Artificial Sequence
  Description of Artificial Sequence: Synthetic oligonucleotide
  Sense Strand Starting at position 338 of SEQ ID NO: 317680
ugacaagacuuugugaaua

SEQ ID NO: 345430 - RNA, 19 nt, Artificial Sequence
  Description of Artificial Sequence: Synthetic oligonucleotide
  Antisense Strand to SEQ ID NO: 345429
uauucacaaagucuuguca

SEQ ID NO: 345431 - RNA, 19 nt, Artificial Sequence
  Description of Artificial Sequence: Synthetic oligonucleotide
  Sense Strand Starting at position 338 of SEQ ID NO: 317864
cuacauaaaugcuugagaa

SEQ ID NO: 345432 - RNA, 19 nt, Artificial Sequence
  Description of Artificial Sequence: Synthetic oligonucleotide
  Antisense Strand to SEQ ID NO: 345431
uucucaagcauuuauguag

SEQ ID NO: 345433 - RNA, 19 nt, Artificial Sequence
  Description of Artificial Sequence: Synthetic oligonucleotide
  Sense Strand Starting at position 338 of SEQ ID NO: 317921
caacguuugcaugaucaaa

SEQ ID NO: 345434 - RNA, 19 nt, Artificial Sequence
  Description of Artificial Sequence: Synthetic oligonucleotide
  Antisense Strand to SEQ ID NO: 345433
uuugaucaugcaaacguug

SEQ ID NO: 345435 - RNA, 19 nt, Artificial Sequence
  Description of Artificial Sequence: Synthetic oligonucleotide
  Sense Strand Starting at position 338 of SEQ ID NO: 317947
uggaguuacuucccacuca

SEQ ID NO: 345436 - RNA, 19 nt, Artificial Sequence
  Description of Artificial Sequence: Synthetic oligonucleotide
  Antisense Strand to SEQ ID NO: 345435
ugagugggaaguaacucca

SEQ ID NO: 345437 - RNA, 19 nt, Artificial Sequence
  Description of Artificial Sequence: Synthetic oligonucleotide
  Sense Strand Starting at position 338 of SEQ ID NO: 318091
uugauaauccaagagcucu

SEQ ID NO: 345438 - RNA, 19 nt, Artificial Sequence
  Description of Artificial Sequence: Synthetic oligonucleotide
  Antisense Strand to SEQ ID NO: 345437
agagcucuuggauuaucaa

SEQ ID NO: 345439 - RNA, 19 nt, Artificial Sequence
  Description of Artificial Sequence: Synthetic oligonucleotide
  Sense Strand Starting at position 338 of SEQ ID NO: 318171
gcacuaagacacuagcauu

SEQ ID NO: 345440 - RNA, 19 nt, Artificial Sequence
  Description of Artificial Sequence: Synthetic oligonucleotide
  Antisense Strand to SEQ ID NO: 345439
aaugcuagugucuuagugc

SEQ ID NO: 345441 - RNA, 19 nt, Artificial Sequence
  Description of Artificial Sequence: Synthetic oligonucleotide
  Sense Strand Starting at position 338 of SEQ ID NO: 318177
agacacuagcauuaaguuu

SEQ ID NO: 345442 - RNA, 19 nt, Artificial Sequence
  Description of Artificial Sequence: Synthetic oligonucleotide
  Antisense Strand to SEQ ID NO: 345441
aaacuuaaugcuagugucu

SEQ ID NO: 345443 - RNA, 19 nt, Artificial Sequence
  Description of Artificial Sequence: Synthetic oligonucleotide
  Sense Strand Starting at position 338 of SEQ ID NO: 318301
cuagaaugcuaucuggaaa

SEQ ID NO: 345444 - RNA, 19 nt, Artificial Sequence
  Description of Artificial Sequence: Synthetic oligonucleotide
  Antisense Strand to SEQ ID NO: 345443
uuuccagauagcauucuag

SEQ ID NO: 345445 - RNA, 19 nt, Artificial Sequence
  Description of Artificial Sequence: Synthetic oligonucleotide
  Sense Strand Starting at position 338 of SEQ ID NO: 318345
guacaaacuguguaaugca

SEQ ID NO: 345446 - RNA, 19 nt, Artificial Sequence
  Description of Artificial Sequence: Synthetic oligonucleotide
  Antisense Strand to SEQ ID NO: 345445
ugcauuacacaguuuguac

SEQ ID NO: 345447 - RNA, 19 nt, Artificial Sequence
  Description of Artificial Sequence: Synthetic oligonucleotide
  Sense Strand Starting at position 338 of SEQ ID NO: 318361
gcaguuucuggaggaauag

SEQ ID NO: 345448 - RNA, 19 nt, Artificial Sequence
  Description of Artificial Sequence: Synthetic oligonucleotide
  Antisense Strand to SEQ ID NO: 345447
cuauuccuccagaaacugc

SEQ ID NO: 345449 - RNA, 19 nt, Artificial Sequence
  Description of Artificial Sequence: Synthetic oligonucleotide
  Sense Strand Starting at position 338 of SEQ ID NO: 318386
aguagacucuaauuagcuu

SEQ ID NO: 345450 - RNA, 19 nt, Artificial Sequence
  Description of Artificial Sequence: Synthetic oligonucleotide
  Antisense Strand to SEQ ID NO: 345449
aagcuaauuagagucuacu

SEQ ID NO: 345451 - RNA, 19 nt, Artificial Sequence
  Description of Artificial Sequence: Synthetic oligonucleotide
  Sense Strand Starting at position 338 of SEQ ID NO: 318393
ucuaauuagcuuugagacu

SEQ ID NO: 345452 - RNA, 19 nt, Artificial Sequence
  Description of Artificial Sequence: Synthetic oligonucleotide
  Antisense Strand to SEQ ID NO: 345451
agucucaaagcuaauuaga

SEQ ID NO: 345453 - RNA, 19 nt, Artificial Sequence
  Description of Artificial Sequence: Synthetic oligonucleotide
  Sense Strand Starting at position 338 of SEQ ID NO: 318528
uuacuaauacugugacuug

SEQ ID NO: 345454 - RNA, 19 nt, Artificial Sequence
  Description of Artificial Sequence: Synthetic oligonucleotide
  Antisense Strand to SEQ ID NO: 345453
caagucacaguauuaguaa

SEQ ID NO: 345455 - RNA, 19 nt, Artificial Sequence
  Description of Artificial Sequence: Synthetic oligonucleotide
  Sense Strand Starting at position 338 of SEQ ID NO: 318531
cuaauacugugacuuggaa

SEQ ID NO: 345456 - RNA, 19 nt, Artificial Sequence
  Description of Artificial Sequence: Synthetic oligonucleotide
  Antisense Strand to SEQ ID NO: 345455
uuccaagucacaguauuag

SEQ ID NO: 345457 - RNA, 19 nt, Artificial Sequence
  Description of Artificial Sequence: Synthetic oligonucleotide
  Sense Strand Starting at position 338 of SEQ ID NO: 318549
aaaguuauuucugauugag

SEQ ID NO: 345458 - RNA, 19 nt, Artificial Sequence
  Description of Artificial Sequence: Synthetic oligonucleotide
  Antisense Strand to SEQ ID NO: 345457
cucaaucagaaauaacuuu

SEQ ID NO: 345459 - RNA, 19 nt, Artificial Sequence
  Description of Artificial Sequence: Synthetic oligonucleotide
  Sense Strand Starting at position 338 of SEQ ID NO: 318567
guuucuuccucauuuguaa

SEQ ID NO: 345460 - RNA, 19 nt, Artificial Sequence
  Description of Artificial Sequence: Synthetic oligonucleotide
  Antisense Strand to SEQ ID NO: 345459
uuacaaaugaggaagaaac

SEQ ID NO: 345461 - RNA, 19 nt, Artificial Sequence
  Description of Artificial Sequence: Synthetic oligonucleotide
  Sense Strand Starting at position 338 of SEQ ID NO: 318626
cguagagauuaugcacaua

SEQ ID NO: 345462 - RNA, 19 nt, Artificial Sequence
  Description of Artificial Sequence: Synthetic oligonucleotide
  Antisense Strand to SEQ ID NO: 345461
uaugugcauaaucucuacg

SEQ ID NO: 345463 - RNA, 19 nt, Artificial Sequence
  Description of Artificial Sequence: Synthetic oligonucleotide
  Sense Strand Starting at position 338 of SEQ ID NO: 318704
ugcaaauuggaguguagaa

SEQ ID NO: 345464 - RNA, 19 nt, Artificial Sequence
  Description of Artificial Sequence: Synthetic oligonucleotide
  Antisense Strand to SEQ ID NO: 345463
uucuacacuccaauuugca

SEQ ID NO: 345465 - RNA, 19 nt, Artificial Sequence
  Description of Artificial Sequence: Synthetic oligonucleotide
  Sense Strand Starting at position 338 of SEQ ID NO: 318823
uuaaauguccacugacuga

SEQ ID NO: 345466 - RNA, 19 nt, Artificial Sequence
  Description of Artificial Sequence: Synthetic oligonucleotide
  Antisense Strand to SEQ ID NO: 345465
ucagucaguggacauuuaa

SEQ ID NO: 345467 - RNA, 19 nt, Artificial Sequence
  Description of Artificial Sequence: Synthetic oligonucleotide
  Sense Strand Starting at position 338 of SEQ ID NO: 318895
cuugacuugugacugaauc

SEQ ID NO: 345468 - RNA, 19 nt, Artificial Sequence
  Description of Artificial Sequence: Synthetic oligonucleotide
  Antisense Strand to SEQ ID NO: 345467
gauucagucacaagucaag

SEQ ID NO: 345469 - RNA, 19 nt, Artificial Sequence
  Description of Artificial Sequence: Synthetic oligonucleotide
  Sense Strand Starting at position 338 of SEQ ID NO: 318896
uugacuugugacugaauca

SEQ ID NO: 345470 - RNA, 19 nt, Artificial Sequence
  Description of Artificial Sequence: Synthetic oligonucleotide
  Antisense Strand to SEQ ID NO: 345469
ugauucagucacaagucaa

SEQ ID NO: 345471 - RNA, 19 nt, Artificial Sequence
  Description of Artificial Sequence: Synthetic oligonucleotide
  Sense Strand Starting at position 338 of SEQ ID NO: 319024
ggauauauguaauugcauu

SEQ ID NO: 345472 - RNA, 19 nt, Artificial Sequence
  Description of Artificial Sequence: Synthetic oligonucleotide
  Antisense Strand to SEQ ID NO: 345471
aaugcaauuacauauaucc

SEQ ID NO: 345473 - RNA, 19 nt, Artificial Sequence
  Description of Artificial Sequence: Synthetic oligonucleotide
  Sense Strand Starting at position 339 of SEQ ID NO: 315576
ggguuucaucagugaggaa

SEQ ID NO: 345474 - RNA, 19 nt, Artificial Sequence
  Description of Artificial Sequence: Synthetic oligonucleotide
  Antisense Strand to SEQ ID NO: 345473
uuccucacugaugaaaccc

SEQ ID NO: 345475 - RNA, 19 nt, Artificial Sequence
  Description of Artificial Sequence: Synthetic oligonucleotide
  Sense Strand Starting at position 339 of SEQ ID NO: 315670
aggguuucccauugaacaa

SEQ ID NO: 345476 - RNA, 19 nt, Artificial Sequence
  Description of Artificial Sequence: Synthetic oligonucleotide
  Antisense Strand to SEQ ID NO: 345475
uuguucaaugggaaacccu

SEQ ID NO: 345477 - RNA, 19 nt, Artificial Sequence
  Description of Artificial Sequence: Synthetic oligonucleotide
  Sense Strand Starting at position 339 of SEQ ID NO: 315718
ugcuauccuggcuaaacaa

SEQ ID NO: 345478 - RNA, 19 nt, Artificial Sequence
  Description of Artificial Sequence: Synthetic oligonucleotide
  Antisense Strand to SEQ ID NO: 345477
uuguuuagccaggauagca

SEQ ID NO: 345479 - RNA, 19 nt, Artificial Sequence
  Description of Artificial Sequence: Synthetic oligonucleotide
  Sense Strand Starting at position 339 of SEQ ID NO: 316178
ggagucaauugacuccaga

SEQ ID NO: 345480 - RNA, 19 nt, Artificial Sequence
  Description of Artificial Sequence: Synthetic oligonucleotide
  Antisense Strand to SEQ ID NO: 345479
ucuggagucaauugacucc

SEQ ID NO: 345481 - RNA, 19 nt, Artificial Sequence
  Description of Artificial Sequence: Synthetic oligonucleotide
  Sense Strand Starting at position 339 of SEQ ID NO: 316214
ccggacauuggguauauca

SEQ ID NO: 345482 - RNA, 19 nt, Artificial Sequence
  Description of Artificial Sequence: Synthetic oligonucleotide
  Antisense Strand to SEQ ID NO: 345481
ugauauacccaauguccgg

SEQ ID NO: 345483 - RNA, 19 nt, Artificial Sequence
  Description of Artificial Sequence: Synthetic oligonucleotide
  Sense Strand Starting at position 339 of SEQ ID NO: 316663
cuuauagugccugauacag

SEQ ID NO: 345484 - RNA, 19 nt, Artificial Sequence
  Description of Artificial Sequence: Synthetic oligonucleotide
  Antisense Strand to SEQ ID NO: 345483
cuguaucaggcacuauaag

SEQ ID NO: 345485 - RNA, 19 nt, Artificial Sequence
  Description of Artificial Sequence: Synthetic oligonucleotide
  Sense Strand Starting at position 339 of SEQ ID NO: 316713
ggcuaacccuuaucuggaa

SEQ ID NO: 345486 - RNA, 19 nt, Artificial Sequence
  Description of Artificial Sequence: Synthetic oligonucleotide
  Antisense Strand to SEQ ID NO: 345485
uuccagauaaggguuagcc

SEQ ID NO: 345487 - RNA, 19 nt, Artificial Sequence
  Description of Artificial Sequence: Synthetic oligonucleotide
  Sense Strand Starting at position 339 of SEQ ID NO: 316717
aacccuuaucuggaacgua

SEQ ID NO: 345488 - RNA, 19 nt, Artificial Sequence
  Description of Artificial Sequence: Synthetic oligonucleotide
  Antisense Strand to SEQ ID NO: 345487
uacguuccagauaaggguu

SEQ ID NO: 345489 - RNA, 19 nt, Artificial Sequence
  Description of Artificial Sequence: Synthetic oligonucleotide
  Sense Strand Starting at position 339 of SEQ ID NO: 316732
cguauaaugagccagauac

SEQ ID NO: 345490 - RNA, 19 nt, Artificial Sequence
  Description of Artificial Sequence: Synthetic oligonucleotide
  Antisense Strand to SEQ ID NO: 345489
guaucuggcucauuauacg

SEQ ID NO: 345491 - RNA, 19 nt, Artificial Sequence
  Description of Artificial Sequence: Synthetic oligonucleotide
  Sense Strand Starting at position 339 of SEQ ID NO: 317214
aggcuccacugacuuauaa

SEQ ID NO: 345492 - RNA, 19 nt, Artificial Sequence
  Description of Artificial Sequence: Synthetic oligonucleotide
  Antisense Strand to SEQ ID NO: 345491
uuauaagucaguggagccu

SEQ ID NO: 345493 - RNA, 19 nt, Artificial Sequence
  Description of Artificial Sequence: Synthetic oligonucleotide
  Sense Strand Starting at position 339 of SEQ ID NO: 317227
uuauaaagccugcagauaa

SEQ ID NO: 345494 - RNA, 19 nt, Artificial Sequence
  Description of Artificial Sequence: Synthetic oligonucleotide
  Antisense Strand to SEQ ID NO: 345493
uuaucugcaggcuuuauaa

SEQ ID NO: 345495 - RNA, 19 nt, Artificial Sequence
  Description of Artificial Sequence: Synthetic oligonucleotide
  Sense Strand Starting at position 339 of SEQ ID NO: 317328
gauacauugggcuagccuu

SEQ ID NO: 345496 - RNA, 19 nt, Artificial Sequence
  Description of Artificial Sequence: Synthetic oligonucleotide
  Antisense Strand to SEQ ID NO: 345495
aaggcuagcccaauguauc

SEQ ID NO: 345497 - RNA, 19 nt, Artificial Sequence
  Description of Artificial Sequence: Synthetic oligonucleotide
  Sense Strand Starting at position 339 of SEQ ID NO: 317499
aguggaugaacucggaagu

SEQ ID NO: 345498 - RNA, 19 nt, Artificial Sequence
  Description of Artificial Sequence: Synthetic oligonucleotide
  Antisense Strand to SEQ ID NO: 345497
acuuccgaguucauccacu

SEQ ID NO: 345499 - RNA, 19 nt, Artificial Sequence
  Description of Artificial Sequence: Synthetic oligonucleotide
  Sense Strand Starting at position 339 of SEQ ID NO: 317573
gcaggaggcaugggaaauu

SEQ ID NO: 345500 - RNA, 19 nt, Artificial Sequence
  Description of Artificial Sequence: Synthetic oligonucleotide
  Antisense Strand to SEQ ID NO: 345499
aauuucccaugccuccugc

SEQ ID NO: 345501 - RNA, 19 nt, Artificial Sequence
  Description of Artificial Sequence: Synthetic oligonucleotide
  Sense Strand Starting at position 339 of SEQ ID NO: 317602
uucucuaaaucacugggau

SEQ ID NO: 345502 - RNA, 19 nt, Artificial Sequence
  Description of Artificial Sequence: Synthetic oligonucleotide
  Antisense Strand to SEQ ID NO: 345501
aucccagugauuuagagaa

SEQ ID NO: 345503 - RNA, 19 nt, Artificial Sequence
  Description of Artificial Sequence: Synthetic oligonucleotide
  Sense Strand Starting at position 339 of SEQ ID NO: 317603
ucucuaaaucacugggauu

SEQ ID NO: 345504 - RNA, 19 nt, Artificial Sequence
  Description of Artificial Sequence: Synthetic oligonucleotide
  Antisense Strand to SEQ ID NO: 345503
aaucccagugauuuagaga

SEQ ID NO: 345505 - RNA, 19 nt, Artificial Sequence
  Description of Artificial Sequence: Synthetic oligonucleotide
  Sense Strand Starting at position 339 of SEQ ID NO: 317681
aaguaaggucaagaguagu

SEQ ID NO: 345506 - RNA, 19 nt, Artificial Sequence
  Description of Artificial Sequence: Synthetic oligonucleotide
  Antisense Strand to SEQ ID NO: 345505
acuacucuugaccuuacuu

SEQ ID NO: 345507 - RNA, 19 nt, Artificial Sequence
  Description of Artificial Sequence: Synthetic oligonucleotide
  Sense Strand Starting at position 339 of SEQ ID NO: 317687
ggucaagaguaguuugaau

SEQ ID NO: 345508 - RNA, 19 nt, Artificial Sequence
  Description of Artificial Sequence: Synthetic oligonucleotide
  Antisense Strand to SEQ ID NO: 345507
auucaaacuacucuugacc

SEQ ID NO: 345509 - RNA, 19 nt, Artificial Sequence
  Description of Artificial Sequence: Synthetic oligonucleotide
  Sense Strand Starting at position 339 of SEQ ID NO: 317689
ucaagaguaguuugaauua

SEQ ID NO: 345510 - RNA, 19 nt, Artificial Sequence
  Description of Artificial Sequence: Synthetic oligonucleotide
  Antisense Strand to SEQ ID NO: 345509
uaauucaaacuacucuuga

SEQ ID NO: 345511 - RNA, 19 nt, Artificial Sequence
  Description of Artificial Sequence: Synthetic oligonucleotide
  Sense Strand Starting at position 339 of SEQ ID NO: 317733
guacaaauacuaggagugu

SEQ ID NO: 345512 - RNA, 19 nt, Artificial Sequence
  Description of Artificial Sequence: Synthetic oligonucleotide
  Antisense Strand to SEQ ID NO: 345511
acacuccuaguauuuguac

SEQ ID NO: 345513 - RNA, 19 nt, Artificial Sequence
  Description of Artificial Sequence: Synthetic oligonucleotide
  Sense Strand Starting at position 339 of SEQ ID NO: 317836
cauggagagacccgugauu

SEQ ID NO: 345514 - RNA, 19 nt, Artificial Sequence
  Description of Artificial Sequence: Synthetic oligonucleotide
  Antisense Strand to SEQ ID NO: 345513
aaucacgggucucuccaug

SEQ ID NO: 345515 - RNA, 19 nt, Artificial Sequence
  Description of Artificial Sequence: Synthetic oligonucleotide
  Sense Strand Starting at position 339 of SEQ ID NO: 317838
uggagagacccgugauuga

SEQ ID NO: 345516 - RNA, 19 nt, Artificial Sequence
  Description of Artificial Sequence: Synthetic oligonucleotide
  Antisense Strand to SEQ ID NO: 345515
ucaaucacgggucucucca

SEQ ID NO: 345517 - RNA, 19 nt, Artificial Sequence
  Description of Artificial Sequence: Synthetic oligonucleotide
  Sense Strand Starting at position 339 of SEQ ID NO: 317849
gugauugaagcugauauua

SEQ ID NO: 345518 - RNA, 19 nt, Artificial Sequence
  Description of Artificial Sequence: Synthetic oligonucleotide
  Antisense Strand to SEQ ID NO: 345517
uaauaucagcuucaaucac

SEQ ID NO: 345519 - RNA, 19 nt, Artificial Sequence
  Description of Artificial Sequence: Synthetic oligonucleotide
  Sense Strand Starting at position 339 of SEQ ID NO: 317869
uuuaauauuggcgagaguu

SEQ ID NO: 345520 - RNA, 19 nt, Artificial Sequence
  Description of Artificial Sequence: Synthetic oligonucleotide
  Antisense Strand to SEQ ID NO: 345519
aacucucgccaauauuaaa

SEQ ID NO: 345521 - RNA, 19 nt, Artificial Sequence
  Description of Artificial Sequence: Synthetic oligonucleotide
  Sense Strand Starting at position 339 of SEQ ID NO: 317910
ucuuguaagaacuguagga

SEQ ID NO: 345522 - RNA, 19 nt, Artificial Sequence
  Description of Artificial Sequence: Synthetic oligonucleotide
  Antisense Strand to SEQ ID NO: 345521
uccuacaguucuuacaaga

SEQ ID NO: 345523 - RNA, 19 nt, Artificial Sequence
  Description of Artificial Sequence: Synthetic oligonucleotide
  Sense Strand Starting at position 339 of SEQ ID NO: 317914
guaagaacuguaggauauc

SEQ ID NO: 345524 - RNA, 19 nt, Artificial Sequence
  Description of Artificial Sequence: Synthetic oligonucleotide
  Antisense Strand to SEQ ID NO: 345523
gauauccuacaguucuuac

SEQ ID NO: 345525 - RNA, 19 nt, Artificial Sequence
  Description of Artificial Sequence: Synthetic oligonucleotide
  Sense Strand Starting at position 339 of SEQ ID NO: 317972
cuaugaagaucuguaaagc

SEQ ID NO: 345526 - RNA, 19 nt, Artificial Sequence
  Description of Artificial Sequence: Synthetic oligonucleotide
  Antisense Strand to SEQ ID NO: 345525
gcuuuacagaucuucauag

SEQ ID NO: 345527 - RNA, 19 nt, Artificial Sequence
  Description of Artificial Sequence: Synthetic oligonucleotide
  Sense Strand Starting at position 339 of SEQ ID NO: 318032
auuaauggacuuuggcaaa

SEQ ID NO: 345528 - RNA, 19 nt, Artificial Sequence
  Description of Artificial Sequence: Synthetic oligonucleotide
  Antisense Strand to SEQ ID NO: 345527
uuugccaaaguccauuaau

SEQ ID NO: 345529 - RNA, 19 nt, Artificial Sequence
  Description of Artificial Sequence: Synthetic oligonucleotide
  Sense Strand Starting at position 339 of SEQ ID NO: 318249
aggaaaugguuuccugagu

SEQ ID NO: 345530 - RNA, 19 nt, Artificial Sequence
  Description of Artificial Sequence: Synthetic oligonucleotide
  Antisense Strand to SEQ ID NO: 345529
acucaggaaaccauuuccu

SEQ ID NO: 345531 - RNA, 19 nt, Artificial Sequence
  Description of Artificial Sequence: Synthetic oligonucleotide
  Sense Strand Starting at position 339 of SEQ ID NO: 318260
uccugaguucgugcugcaa

SEQ ID NO: 345532 - RNA, 19 nt, Artificial Sequence
  Description of Artificial Sequence: Synthetic oligonucleotide
  Antisense Strand to SEQ ID NO: 345531
uugcagcacgaacucagga

SEQ ID NO: 345533 - RNA, 19 nt, Artificial Sequence
  Description of Artificial Sequence: Synthetic oligonucleotide
  Sense Strand Starting at position 339 of SEQ ID NO: 318655
agcucuagggaaugguuaa

SEQ ID NO: 345534 - RNA, 19 nt, Artificial Sequence
  Description of Artificial Sequence: Synthetic oligonucleotide
  Antisense Strand to SEQ ID NO: 345533
uuaaccauucccuagagcu

SEQ ID NO: 345535 - RNA, 19 nt, Artificial Sequence
  Description of Artificial Sequence: Synthetic oligonucleotide
  Sense Strand Starting at position 339 of SEQ ID NO: 318747
gacucagagccaugguaua

SEQ ID NO: 345536 - RNA, 19 nt, Artificial Sequence
  Description of Artificial Sequence: Synthetic oligonucleotide
  Antisense Strand to SEQ ID NO: 345535
uauaccauggcucugaguc

SEQ ID NO: 345537 - RNA, 19 nt, Artificial Sequence
  Description of Artificial Sequence: Synthetic oligonucleotide
  Sense Strand Starting at position 339 of SEQ ID NO: 318795
gcgguauuucauggacuua

SEQ ID NO: 345538 - RNA, 19 nt, Artificial Sequence
  Description of Artificial Sequence: Synthetic oligonucleotide
  Antisense Strand to SEQ ID NO: 345537
uaaguccaugaaauaccgc

SEQ ID NO: 345539 - RNA, 19 nt, Artificial Sequence
  Description of Artificial Sequence: Synthetic oligonucleotide
  Sense Strand Starting at position 339 of SEQ ID NO: 318897
ugacuuuacguugaaaccu

SEQ ID NO: 345540 - RNA, 19 nt, Artificial Sequence
  Description of Artificial Sequence: Synthetic oligonucleotide
  Antisense Strand to SEQ ID NO: 345539
agguuucaacguaaaguca

SEQ ID NO: 345541 - RNA, 19 nt, Artificial Sequence
  Description of Artificial Sequence: Synthetic oligonucleotide
  Sense Strand Starting at position 339 of SEQ ID NO: 318907
uugaaaccuuugucugaau

SEQ ID NO: 345542 - RNA, 19 nt, Artificial Sequence
  Description of Artificial Sequence: Synthetic oligonucleotide
  Antisense Strand to SEQ ID NO: 345541
auucagacaaagguuucaa

SEQ ID NO: 345543 - RNA, 19 nt, Artificial Sequence
  Description of Artificial Sequence: Synthetic oligonucleotide
  Sense Strand Starting at position 339 of SEQ ID NO: 318908
ugaaaccuuugucugaaua

SEQ ID NO: 345544 - RNA, 19 nt, Artificial Sequence
  Description of Artificial Sequence: Synthetic oligonucleotide
  Antisense Strand to SEQ ID NO: 345543
uauucagacaaagguuuca

SEQ ID NO: 345545 - RNA, 19 nt, Artificial Sequence
  Description of Artificial Sequence: Synthetic oligonucleotide
  Sense Strand Starting at position 339 of SEQ ID NO: 318952
uuagguuaucaucaauguu

SEQ ID NO: 345546 - RNA, 19 nt, Artificial Sequence
  Description of Artificial Sequence: Synthetic oligonucleotide
  Antisense Strand to SEQ ID NO: 345545
aacauugaugauaaccuaa

SEQ ID NO: 345547 - RNA, 19 nt, Artificial Sequence
  Description of Artificial Sequence: Synthetic oligonucleotide
  Sense Strand Starting at position 339 of SEQ ID NO: 319093
guuuauaaauuggccacaa

SEQ ID NO: 345548 - RNA, 19 nt, Artificial Sequence
  Description of Artificial Sequence: Synthetic oligonucleotide
  Antisense Strand to SEQ ID NO: 345547
uuguggccaauuuauaaac

SEQ ID NO: 345549 - RNA, 19 nt, Artificial Sequence
  Description of Artificial Sequence: Synthetic oligonucleotide
  Sense Strand Starting at position 339 of SEQ ID NO: 319141
uggguuuaggauuggcaga

SEQ ID NO: 345550 - RNA, 19 nt, Artificial Sequence
  Description of Artificial Sequence: Synthetic oligonucleotide
  Antisense Strand to SEQ ID NO: 345549
ucugccaauccuaaaccca

SEQ ID NO: 345551 - RNA, 19 nt, Artificial Sequence
  Description of Artificial Sequence: Synthetic oligonucleotide
  Sense Strand Starting at position 339 of SEQ ID NO: 319142
ggguuuaggauuggcagau

SEQ ID NO: 345552 - RNA, 19 nt, Artificial Sequence
  Description of Artificial Sequence: Synthetic oligonucleotide
  Antisense Strand to SEQ ID NO: 345551
aucugccaauccuaaaccc

SEQ ID NO: 345553 - RNA, 19 nt, Artificial Sequence
  Description of Artificial Sequence: Synthetic oligonucleotide
  Sense Strand Starting at position 340 of SEQ ID NO: 315238
uugcuugguuugguagaaa

SEQ ID NO: 345554 - RNA, 19 nt, Artificial Sequence
  Description of Artificial Sequence: Synthetic oligonucleotide
  Antisense Strand to SEQ ID NO: 345553
uuucuaccaaaccaagcaa

SEQ ID NO: 345555 - RNA, 19 nt, Artificial Sequence
  Description of Artificial Sequence: Synthetic oligonucleotide
  Sense Strand Starting at position 340 of SEQ ID NO: 315416
gcaagaauuucguugcauc

SEQ ID NO: 345556 - RNA, 19 nt, Artificial Sequence
  Description of Artificial Sequence: Synthetic oligonucleotide
  Antisense Strand to SEQ ID NO: 345555
gaugcaacgaaauucuugc

SEQ ID NO: 345557 - RNA, 19 nt, Artificial Sequence
  Description of Artificial Sequence: Synthetic oligonucleotide
  Sense Strand Starting at position 340 of SEQ ID NO: 315417
caagaauuucguugcaucu

SEQ ID NO: 345558 - RNA, 19 nt, Artificial Sequence
  Description of Artificial Sequence: Synthetic oligonucleotide
  Antisense Strand to SEQ ID NO: 345557
agaugcaacgaaauucuug

SEQ ID NO: 345559 - RNA, 19 nt, Artificial Sequence
  Description of Artificial Sequence: Synthetic oligonucleotide
  Sense Strand Starting at position 340 of SEQ ID NO: 315456
aaauccuagugcuuugaga

SEQ ID NO: 345560 - RNA, 19 nt, Artificial Sequence
  Description of Artificial Sequence: Synthetic oligonucleotide
  Antisense Strand to SEQ ID NO: 345559
ucucaaagcacuaggauuu

SEQ ID NO: 345561 - RNA, 19 nt, Artificial Sequence
  Description of Artificial Sequence: Synthetic oligonucleotide
  Sense Strand Starting at position 340 of SEQ ID NO: 315478
acauguaccuaucuugauu

SEQ ID NO: 345562 - RNA, 19 nt, Artificial Sequence
  Description of Artificial Sequence: Synthetic oligonucleotide
  Antisense Strand to SEQ ID NO: 345561
aaucaagauagguacaugu

SEQ ID NO: 345563 - RNA, 19 nt, Artificial Sequence
  Description of Artificial Sequence: Synthetic oligonucleotide
  Sense Strand Starting at position 340 of SEQ ID NO: 315518
agaacacacuuaguguuau

SEQ ID NO: 345564 - RNA, 19 nt, Artificial Sequence
  Description of Artificial Sequence: Synthetic oligonucleotide
  Antisense Strand to SEQ ID NO: 345563
auaacacuaaguguguucu

SEQ ID NO: 345565 - RNA, 19 nt, Artificial Sequence
  Description of Artificial Sequence: Synthetic oligonucleotide
  Sense Strand Starting at position 340 of SEQ ID NO: 315606
ccuguaagauagguaaaca

SEQ ID NO: 345566 - RNA, 19 nt, Artificial Sequence
  Description of Artificial Sequence: Synthetic oligonucleotide
  Antisense Strand to SEQ ID NO: 345565
uguuuaccuaucuuacagg

SEQ ID NO: 345567 - RNA, 19 nt, Artificial Sequence
  Description of Artificial Sequence: Synthetic oligonucleotide
  Sense Strand Starting at position 340 of SEQ ID NO: 315859
agcaguucugggagcgagu

SEQ ID NO: 345568 - RNA, 19 nt, Artificial Sequence
  Description of Artificial Sequence: Synthetic oligonucleotide
  Antisense Strand to SEQ ID NO: 345567
acucgcucccagaacugcu

SEQ ID NO: 345569 - RNA, 19 nt, Artificial Sequence
  Description of Artificial Sequence: Synthetic oligonucleotide
  Sense Strand Starting at position 340 of SEQ ID NO: 315862
aguucugggagcgaguuau

SEQ ID NO: 345570 - RNA, 19 nt, Artificial Sequence
  Description of Artificial Sequence: Synthetic oligonucleotide
  Antisense Strand to SEQ ID NO: 345569
auaacucgcucccagaacu

SEQ ID NO: 345571 - RNA, 19 nt, Artificial Sequence
  Description of Artificial Sequence: Synthetic oligonucleotide
  Sense Strand Starting at position 340 of SEQ ID NO: 315872
gcgaguuauggagaagaua

SEQ ID NO: 345572 - RNA, 19 nt, Artificial Sequence
  Description of Artificial Sequence: Synthetic oligonucleotide
  Antisense Strand to SEQ ID NO: 345571
uaucuucuccauaacucgc

SEQ ID NO: 345573 - RNA, 19 nt, Artificial Sequence
  Description of Artificial Sequence: Synthetic oligonucleotide
  Sense Strand Starting at position 340 of SEQ ID NO: 315933
ggaauacucuaagagaagg

SEQ ID NO: 345574 - RNA, 19 nt, Artificial Sequence
  Description of Artificial Sequence: Synthetic oligonucleotide
  Antisense Strand to SEQ ID NO: 345573
ccuucucuuagaguauucc

SEQ ID NO: 345575 - RNA, 19 nt, Artificial Sequence
  Description of Artificial Sequence: Synthetic oligonucleotide
  Sense Strand Starting at position 340 of SEQ ID NO: 316120
ucugcugguccucgaauuu

SEQ ID NO: 345576 - RNA, 19 nt, Artificial Sequence
  Description of Artificial Sequence: Synthetic oligonucleotide
  Antisense Strand to SEQ ID NO: 345575
aaauucgaggaccagcaga

SEQ ID NO: 345577 - RNA, 19 nt, Artificial Sequence
  Description of Artificial Sequence: Synthetic oligonucleotide
  Sense Strand Starting at position 340 of SEQ ID NO: 316216
uuuguagugaauugugaac

SEQ ID NO: 345578 - RNA, 19 nt, Artificial Sequence
  Description of Artificial Sequence: Synthetic oligonucleotide
  Antisense Strand to SEQ ID NO: 345577
guucacaauucacuacaaa

SEQ ID NO: 345579 - RNA, 19 nt, Artificial Sequence
  Description of Artificial Sequence: Synthetic oligonucleotide
  Sense Strand Starting at position 340 of SEQ ID NO: 316239
ucuugauuaaauugcggua

SEQ ID NO: 345580 - RNA, 19 nt, Artificial Sequence
  Description of Artificial Sequence: Synthetic oligonucleotide
  Antisense Strand to SEQ ID NO: 345579
uaccgcaauuuaaucaaga

SEQ ID NO: 345581 - RNA, 19 nt, Artificial Sequence
  Description of Artificial Sequence: Synthetic oligonucleotide
  Sense Strand Starting at position 340 of SEQ ID NO: 316244
auuaaauugcgguaaagau

SEQ ID NO: 345582 - RNA, 19 nt, Artificial Sequence
  Description of Artificial Sequence: Synthetic oligonucleotide
  Antisense Strand to SEQ ID NO: 345581
aucuuuaccgcaauuuaau

SEQ ID NO: 345583 - RNA, 19 nt, Artificial Sequence
  Description of Artificial Sequence: Synthetic oligonucleotide
  Sense Strand Starting at position 340 of SEQ ID NO: 316252
gcgguaaagaugggaaaca

SEQ ID NO: 345584 - RNA, 19 nt, Artificial Sequence
  Description of Artificial Sequence: Synthetic oligonucleotide
  Antisense Strand to SEQ ID NO: 345583
uguuucccaucuuuaccgc

SEQ ID NO: 345585 - RNA, 19 nt, Artificial Sequence
  Description of Artificial Sequence: Synthetic oligonucleotide
  Sense Strand Starting at position 340 of SEQ ID NO: 316309
ccauuacgagcuuaggaaa

SEQ ID NO: 345586 - RNA, 19 nt, Artificial Sequence
  Description of Artificial Sequence: Synthetic oligonucleotide
  Antisense Strand to SEQ ID NO: 345585
uuuccuaagcucguaaugg

SEQ ID NO: 345587 - RNA, 19 nt, Artificial Sequence
  Description of Artificial Sequence: Synthetic oligonucleotide
  Sense Strand Starting at position 340 of SEQ ID NO: 316507
gcuucuggaguuuaacacu

SEQ ID NO: 345588 - RNA, 19 nt, Artificial Sequence
  Description of Artificial Sequence: Synthetic oligonucleotide
  Antisense Strand to SEQ ID NO: 345587
aguguuaaacuccagaagc

SEQ ID NO: 345589 - RNA, 19 nt, Artificial Sequence
  Description of Artificial Sequence: Synthetic oligonucleotide
  Sense Strand Starting at position 340 of SEQ ID NO: 316539
aaagguuucuaagaggaau

SEQ ID NO: 345590 - RNA, 19 nt, Artificial Sequence
  Description of Artificial Sequence: Synthetic oligonucleotide
  Antisense Strand to SEQ ID NO: 345589
auuccucuuagaaaccuuu

SEQ ID NO: 345591 - RNA, 19 nt, Artificial Sequence
  Description of Artificial Sequence: Synthetic oligonucleotide
  Sense Strand Starting at position 340 of SEQ ID NO: 316593
ccguauaaacauugauaca

SEQ ID NO: 345592 - RNA, 19 nt, Artificial Sequence
  Description of Artificial Sequence: Synthetic oligonucleotide
  Antisense Strand to SEQ ID NO: 345591
uguaucaauguuuauacgg

SEQ ID NO: 345593 - RNA, 19 nt, Artificial Sequence
  Description of Artificial Sequence: Synthetic oligonucleotide
  Sense Strand Starting at position 340 of SEQ ID NO: 316689
gcagucaaauguccaaauu

SEQ ID NO: 345594 - RNA, 19 nt, Artificial Sequence
  Description of Artificial Sequence: Synthetic oligonucleotide
  Antisense Strand to SEQ ID NO: 345593
aauuuggacauuugacugc

SEQ ID NO: 345595 - RNA, 19 nt, Artificial Sequence
  Description of Artificial Sequence: Synthetic oligonucleotide
  Sense Strand Starting at position 340 of SEQ ID NO: 316777
agccaucgggcucaucaau

SEQ ID NO: 345596 - RNA, 19 nt, Artificial Sequence
  Description of Artificial Sequence: Synthetic oligonucleotide
  Antisense Strand to SEQ ID NO: 345595
auugaugagcccgauggcu

SEQ ID NO: 345597 - RNA, 19 nt, Artificial Sequence
  Description of Artificial Sequence: Synthetic oligonucleotide
  Sense Strand Starting at position 340 of SEQ ID NO: 317661
ggagggaaauccgcgagaa

SEQ ID NO: 345598 - RNA, 19 nt, Artificial Sequence
  Description of Artificial Sequence: Synthetic oligonucleotide
  Antisense Strand to SEQ ID NO: 345597
uucucgcggauuucccucc

SEQ ID NO: 345599 - RNA, 19 nt, Artificial Sequence
  Description of Artificial Sequence: Synthetic oligonucleotide
  Sense Strand Starting at position 340 of SEQ ID NO: 317662
gagggaaauccgcgagaag

SEQ ID NO: 345600 - RNA, 19 nt, Artificial Sequence
  Description of Artificial Sequence: Synthetic oligonucleotide
  Antisense Strand to SEQ ID NO: 345599
cuucucgcggauuucccuc

SEQ ID NO: 345601 - RNA, 19 nt, Artificial Sequence
  Description of Artificial Sequence: Synthetic oligonucleotide
  Sense Strand Starting at position 340 of SEQ ID NO: 317665
ggaaauccgcgagaagcua

SEQ ID NO: 345602 - RNA, 19 nt, Artificial Sequence
  Description of Artificial Sequence: Synthetic oligonucleotide
  Antisense Strand to SEQ ID NO: 345601
uagcuucucgcggauuucc

SEQ ID NO: 345603 - RNA, 19 nt, Artificial Sequence
  Description of Artificial Sequence: Synthetic oligonucleotide
  Sense Strand Starting at position 340 of SEQ ID NO: 318070
gguucuugcuucucugaga

SEQ ID NO: 345604 - RNA, 19 nt, Artificial Sequence
  Description of Artificial Sequence: Synthetic oligonucleotide
  Antisense Strand to SEQ ID NO: 345603
ucucagagaagcaagaacc

SEQ ID NO: 345605 - RNA, 19 nt, Artificial Sequence
  Description of Artificial Sequence: Synthetic oligonucleotide
  Sense Strand Starting at position 340 of SEQ ID NO: 318087
gauggccugaguggugaau

SEQ ID NO: 345606 - RNA, 19 nt, Artificial Sequence
  Description of Artificial Sequence: Synthetic oligonucleotide
  Antisense Strand to SEQ ID NO: 345605
auucaccacucaggccauc

SEQ ID NO: 345607 - RNA, 19 nt, Artificial Sequence
  Description of Artificial Sequence: Synthetic oligonucleotide
  Sense Strand Starting at position 340 of SEQ ID NO: 318283
ucauucugaugccuguaaa

SEQ ID NO: 345608 - RNA, 19 nt, Artificial Sequence
  Description of Artificial Sequence: Synthetic oligonucleotide
  Antisense Strand to SEQ ID NO: 345607
uuuacaggcaucagaauga

SEQ ID NO: 345609 - RNA, 19 nt, Artificial Sequence
  Description of Artificial Sequence: Synthetic oligonucleotide
  Sense Strand Starting at position 340 of SEQ ID NO: 318286
uucugaugccuguaaaugu

SEQ ID NO: 345610 - RNA, 19 nt, Artificial Sequence
  Description of Artificial Sequence: Synthetic oligonucleotide
  Antisense Strand to SEQ ID NO: 345609
acauuuacaggcaucagaa

SEQ ID NO: 345611 - RNA, 19 nt, Artificial Sequence
  Description of Artificial Sequence: Synthetic oligonucleotide
  Sense Strand Starting at position 340 of SEQ ID NO: 318541
uuuccuucuuugucuggaa

SEQ ID NO: 345612 - RNA, 19 nt, Artificial Sequence
  Description of Artificial Sequence: Synthetic oligonucleotide
  Antisense Strand to SEQ ID NO: 345611
uuccagacaaagaaggaaa

SEQ ID NO: 345613 - RNA, 19 nt, Artificial Sequence
  Description of Artificial Sequence: Synthetic oligonucleotide
  Sense Strand Starting at position 340 of SEQ ID NO: 318542
uuccuucuuugucuggaau

SEQ ID NO: 345614 - RNA, 19 nt, Artificial Sequence
  Description of Artificial Sequence: Synthetic oligonucleotide
  Antisense Strand to SEQ ID NO: 345613
auuccagacaaagaaggaa

SEQ ID NO: 345615 - RNA, 19 nt, Artificial Sequence
  Description of Artificial Sequence: Synthetic oligonucleotide
  Sense Strand Starting at position 340 of SEQ ID NO: 318543
uccuucuuugucuggaauu

SEQ ID NO: 345616 - RNA, 19 nt, Artificial Sequence
  Description of Artificial Sequence: Synthetic oligonucleotide
  Antisense Strand to SEQ ID NO: 345615
aauuccagacaaagaagga

SEQ ID NO: 345617 - RNA, 19 nt, Artificial Sequence
  Description of Artificial Sequence: Synthetic oligonucleotide
  Sense Strand Starting at position 340 of SEQ ID NO: 318675
auaguuguugcaugggaag

SEQ ID NO: 345618 - RNA, 19 nt, Artificial Sequence
  Description of Artificial Sequence: Synthetic oligonucleotide
  Antisense Strand to SEQ ID NO: 345617
cuucccaugcaacaacuau

SEQ ID NO: 345619 - RNA, 19 nt, Artificial Sequence
  Description of Artificial Sequence: Synthetic oligonucleotide
  Sense Strand Starting at position 340 of SEQ ID NO: 318749
aagugucaugauugguaac

SEQ ID NO: 345620 - RNA, 19 nt, Artificial Sequence
  Description of Artificial Sequence: Synthetic oligonucleotide
  Antisense Strand to SEQ ID NO: 345619
guuaccaaucaugacacuu

SEQ ID NO: 345621 - RNA, 19 nt, Artificial Sequence
  Description of Artificial Sequence: Synthetic oligonucleotide
  Sense Strand Starting at position 340 of SEQ ID NO: 318750
agugucaugauugguaacu

SEQ ID NO: 345622 - RNA, 19 nt, Artificial Sequence
  Description of Artificial Sequence: Synthetic oligonucleotide
  Antisense Strand to SEQ ID NO: 345621
aguuaccaaucaugacacu

SEQ ID NO: 345623 - RNA, 19 nt, Artificial Sequence
  Description of Artificial Sequence: Synthetic oligonucleotide
  Sense Strand Starting at position 340 of SEQ ID NO: 318751
gugucaugauugguaacuc

SEQ ID NO: 345624 - RNA, 19 nt, Artificial Sequence
  Description of Artificial Sequence: Synthetic oligonucleotide
  Antisense Strand to SEQ ID NO: 345623
gaguuaccaaucaugacac

SEQ ID NO: 345625 - RNA, 19 nt, Artificial Sequence
  Description of Artificial Sequence: Synthetic oligonucleotide
  Sense Strand Starting at position 340 of SEQ ID NO: 318876
aaugucuguucugugaaug

SEQ ID NO: 345626 - RNA, 19 nt, Artificial Sequence
  Description of Artificial Sequence: Synthetic oligonucleotide
  Antisense Strand to SEQ ID NO: 345625
cauucacagaacagacauu

SEQ ID NO: 345627 - RNA, 19 nt, Artificial Sequence
  Description of Artificial Sequence: Synthetic oligonucleotide
  Sense Strand Starting at position 340 of SEQ ID NO: 318877
augucuguucugugaauga

SEQ ID NO: 345628 - RNA, 19 nt, Artificial Sequence
  Description of Artificial Sequence: Synthetic oligonucleotide
  Antisense Strand to SEQ ID NO: 345627
ucauucacagaacagacau

SEQ ID NO: 345629 - RNA, 19 nt, Artificial Sequence
  Description of Artificial Sequence: Synthetic oligonucleotide
  Sense Strand Starting at position 340 of SEQ ID NO: 318881
cuguucugugaaugauaga

SEQ ID NO: 345630 - RNA, 19 nt, Artificial Sequence
  Description of Artificial Sequence: Synthetic oligonucleotide
  Antisense Strand to SEQ ID NO: 345629
ucuaucauucacagaacag

SEQ ID NO: 345631 - RNA, 19 nt, Artificial Sequence
  Description of Artificial Sequence: Synthetic oligonucleotide
  Sense Strand Starting at position 340 of SEQ ID NO: 318963
agagcuaacuguuccaaga

SEQ ID NO: 345632 - RNA, 19 nt, Artificial Sequence
  Description of Artificial Sequence: Synthetic oligonucleotide
  Antisense Strand to SEQ ID NO: 345631
ucuuggaacaguuagcucu

SEQ ID NO: 345633 - RNA, 19 nt, Artificial Sequence
  Description of Artificial Sequence: Synthetic oligonucleotide
  Sense Strand Starting at position 341 of SEQ ID NO: 315376
agccuaaguccuuaaagug

SEQ ID NO: 345634 - RNA, 19 nt, Artificial Sequence
  Description of Artificial Sequence: Synthetic oligonucleotide
  Antisense Strand to SEQ ID NO: 345633
cacuuuaaggacuuaggcu

SEQ ID NO: 345635 - RNA, 19 nt, Artificial Sequence
  Description of Artificial Sequence: Synthetic oligonucleotide
  Sense Strand Starting at position 341 of SEQ ID NO: 315674
guuugcuuucuguugcaga

SEQ ID NO: 345636 - RNA, 19 nt, Artificial Sequence
  Description of Artificial Sequence: Synthetic oligonucleotide
  Antisense Strand to SEQ ID NO: 345635
ucugcaacagaaagcaaac

SEQ ID NO: 345637 - RNA, 19 nt, Artificial Sequence
  Description of Artificial Sequence: Synthetic oligonucleotide
  Sense Strand Starting at position 341 of SEQ ID NO: 315811
cauccuugagaguguuaag

SEQ ID NO: 345638 - RNA, 19 nt, Artificial Sequence
  Description of Artificial Sequence: Synthetic oligonucleotide
  Antisense Strand to SEQ ID NO: 345637
cuuaacacucucaaggaug

SEQ ID NO: 345639 - RNA, 19 nt, Artificial Sequence
  Description of Artificial Sequence: Synthetic oligonucleotide
  Sense Strand Starting at position 341 of SEQ ID NO: 315823
uguuaagguccuuaccuaa

SEQ ID NO: 345640 - RNA, 19 nt, Artificial Sequence
  Description of Artificial Sequence: Synthetic oligonucleotide
  Antisense Strand to SEQ ID NO: 345639
uuagguaaggaccuuaaca

SEQ ID NO: 345641 - RNA, 19 nt, Artificial Sequence
  Description of Artificial Sequence: Synthetic oligonucleotide
  Sense Strand Starting at position 341 of SEQ ID NO: 315873
gguaggagugggcaguaau

SEQ ID NO: 345642 - RNA, 19 nt, Artificial Sequence
  Description of Artificial Sequence: Synthetic oligonucleotide
  Antisense Strand to SEQ ID NO: 345641
auuacugcccacuccuacc

SEQ ID NO: 345643 - RNA, 19 nt, Artificial Sequence
  Description of Artificial Sequence: Synthetic oligonucleotide
  Sense Strand Starting at position 341 of SEQ ID NO: 315910
ugucaacauccuuggguga

SEQ ID NO: 345644 - RNA, 19 nt, Artificial Sequence
  Description of Artificial Sequence: Synthetic oligonucleotide
  Antisense Strand to SEQ ID NO: 345643
ucacccaaggauguugaca

SEQ ID NO: 345645 - RNA, 19 nt, Artificial Sequence
  Description of Artificial Sequence: Synthetic oligonucleotide
  Sense Strand Starting at position 341 of SEQ ID NO: 315911
gucaacauccuugggugaa

SEQ ID NO: 345646 - RNA, 19 nt, Artificial Sequence
  Description of Artificial Sequence: Synthetic oligonucleotide
  Antisense Strand to SEQ ID NO: 345645
uucacccaaggauguugac

SEQ ID NO: 345647 - RNA, 19 nt, Artificial Sequence
  Description of Artificial Sequence: Synthetic oligonucleotide
  Sense Strand Starting at position 341 of SEQ ID NO: 316004
gcagaauucuguguauaag

SEQ ID NO: 345648 - RNA, 19 nt, Artificial Sequence
  Description of Artificial Sequence: Synthetic oligonucleotide
  Antisense Strand to SEQ ID NO: 345647
cuuauacacagaauucugc

SEQ ID NO: 345649 - RNA, 19 nt, Artificial Sequence
  Description of Artificial Sequence: Synthetic oligonucleotide
  Sense Strand Starting at position 341 of SEQ ID NO: 316005
cagaauucuguguauaagc

SEQ ID NO: 345650 - RNA, 19 nt, Artificial Sequence
  Description of Artificial Sequence: Synthetic oligonucleotide
  Antisense Strand to SEQ ID NO: 345649
gcuuauacacagaauucug

SEQ ID NO: 345651 - RNA, 19 nt, Artificial Sequence
  Description of Artificial Sequence: Synthetic oligonucleotide
  Sense Strand Starting at position 341 of SEQ ID NO: 316007
gaauucuguguauaagcca

SEQ ID NO: 345652 - RNA, 19 nt, Artificial Sequence
  Description of Artificial Sequence: Synthetic oligonucleotide
  Antisense Strand to SEQ ID NO: 345651
uggcuuauacacagaauuc

SEQ ID NO: 345653 - RNA, 19 nt, Artificial Sequence
  Description of Artificial Sequence: Synthetic oligonucleotide
  Sense Strand Starting at position 341 of SEQ ID NO: 316015
uguauaagccagcacgaaa

SEQ ID NO: 345654 - RNA, 19 nt, Artificial Sequence
  Description of Artificial Sequence: Synthetic oligonucleotide
  Antisense Strand to SEQ ID NO: 345653
uuucgugcuggcuuauaca

SEQ ID NO: 345655 - RNA, 19 nt, Artificial Sequence
  Description of Artificial Sequence: Synthetic oligonucleotide
  Sense Strand Starting at position 341 of SEQ ID NO: 316329
cugacaagcugaucuaagu

SEQ ID NO: 345656 - RNA, 19 nt, Artificial Sequence
  Description of Artificial Sequence: Synthetic oligonucleotide
  Antisense Strand to SEQ ID NO: 345655
acuuagaucagcuugucag

SEQ ID NO: 345657 - RNA, 19 nt, Artificial Sequence
  Description of Artificial Sequence: Synthetic oligonucleotide
  Sense Strand Starting at position 341 of SEQ ID NO: 316614
gcgagaaaugccgacauca

SEQ ID NO: 345658 - RNA, 19 nt, Artificial Sequence
  Description of Artificial Sequence: Synthetic oligonucleotide
  Antisense Strand to SEQ ID NO: 345657
ugaugucggcauuucucgc

SEQ ID NO: 345659 - RNA, 19 nt, Artificial Sequence
  Description of Artificial Sequence: Synthetic oligonucleotide
  Sense Strand Starting at position 341 of SEQ ID NO: 316616
gagaaaugccgacaucauu

SEQ ID NO: 345660 - RNA, 19 nt, Artificial Sequence
  Description of Artificial Sequence: Synthetic oligonucleotide
  Antisense Strand to SEQ ID NO: 345659
aaugaugucggcauuucuc

SEQ ID NO: 345661 - RNA, 19 nt, Artificial Sequence
  Description of Artificial Sequence: Synthetic oligonucleotide
  Sense Strand Starting at position 341 of SEQ ID NO: 316842
gagagagcucagggcauua

SEQ ID NO: 345662 - RNA, 19 nt, Artificial Sequence
  Description of Artificial Sequence: Synthetic oligonucleotide
  Antisense Strand to SEQ ID NO: 345661
uaaugcccugagcucucuc

SEQ ID NO: 345663 - RNA, 19 nt, Artificial Sequence
  Description of Artificial Sequence: Synthetic oligonucleotide
  Sense Strand Starting at position 341 of SEQ ID NO: 316844
gagagcucagggcauuagu

SEQ ID NO: 345664 - RNA, 19 nt, Artificial Sequence
  Description of Artificial Sequence: Synthetic oligonucleotide
  Antisense Strand to SEQ ID NO: 345663
acuaaugcccugagcucuc

SEQ ID NO: 345665 - RNA, 19 nt, Artificial Sequence
  Description of Artificial Sequence: Synthetic oligonucleotide
  Sense Strand Starting at position 341 of SEQ ID NO: 317006
ugaaguuaccuuggugaug

SEQ ID NO: 345666 - RNA, 19 nt, Artificial Sequence
  Description of Artificial Sequence: Synthetic oligonucleotide
  Antisense Strand to SEQ ID NO: 345665
caucaccaagguaacuuca

SEQ ID NO: 345667 - RNA, 19 nt, Artificial Sequence
  Description of Artificial Sequence: Synthetic oligonucleotide
  Sense Strand Starting at position 341 of SEQ ID NO: 317023
uggagaaguuaucuccaca

SEQ ID NO: 345668 - RNA, 19 nt, Artificial Sequence
  Description of Artificial Sequence: Synthetic oligonucleotide
  Antisense Strand to SEQ ID NO: 345667
uguggagauaacuucucca

SEQ ID NO: 345669 - RNA, 19 nt, Artificial Sequence
  Description of Artificial Sequence: Synthetic oligonucleotide
  Sense Strand Starting at position 341 of SEQ ID NO: 317095
uuuccaccucgucaugaaa

SEQ ID NO: 345670 - RNA, 19 nt, Artificial Sequence
  Description of Artificial Sequence: Synthetic oligonucleotide
  Antisense Strand to SEQ ID NO: 345669
uuucaugacgagguggaaa

SEQ ID NO: 345671 - RNA, 19 nt, Artificial Sequence
  Description of Artificial Sequence: Synthetic oligonucleotide
  Sense Strand Starting at position 341 of SEQ ID NO: 317311
cauggagauggcugaacua

SEQ ID NO: 345672 - RNA, 19 nt, Artificial Sequence
  Description of Artificial Sequence: Synthetic oligonucleotide
  Antisense Strand to SEQ ID NO: 345671
uaguucagccaucuccaug

SEQ ID NO: 345673 - RNA, 19 nt, Artificial Sequence
  Description of Artificial Sequence: Synthetic oligonucleotide
  Sense Strand Starting at position 341 of SEQ ID NO: 317795
uaaauuguguugcugaaag

SEQ ID NO: 345674 - RNA, 19 nt, Artificial Sequence
  Description of Artificial Sequence: Synthetic oligonucleotide
  Antisense Strand to SEQ ID NO: 345673
cuuucagcaacacaauuua

SEQ ID NO: 345675 - RNA, 19 nt, Artificial Sequence
  Description of Artificial Sequence: Synthetic oligonucleotide
  Sense Strand Starting at position 341 of SEQ ID NO: 317797
aauuguguugcugaaagga

SEQ ID NO: 345676 - RNA, 19 nt, Artificial Sequence
  Description of Artificial Sequence: Synthetic oligonucleotide
  Antisense Strand to SEQ ID NO: 345675
uccuuucagcaacacaauu

SEQ ID NO: 345677 - RNA, 19 nt, Artificial Sequence
  Description of Artificial Sequence: Synthetic oligonucleotide
  Sense Strand Starting at position 341 of SEQ ID NO: 317871
cauuauuaacgacgaugau

SEQ ID NO: 345678 - RNA, 19 nt, Artificial Sequence
  Description of Artificial Sequence: Synthetic oligonucleotide
  Antisense Strand to SEQ ID NO: 345677
aucaucgucguuaauaaug

SEQ ID NO: 345679 - RNA, 19 nt, Artificial Sequence
  Description of Artificial Sequence: Synthetic oligonucleotide
  Sense Strand Starting at position 341 of SEQ ID NO: 317872
auuauuaacgacgaugauu

SEQ ID NO: 345680 - RNA, 19 nt, Artificial Sequence
  Description of Artificial Sequence: Synthetic oligonucleotide
  Antisense Strand to SEQ ID NO: 345679
aaucaucgucguuaauaau

SEQ ID NO: 345681 - RNA, 19 nt, Artificial Sequence
  Description of Artificial Sequence: Synthetic oligonucleotide
  Sense Strand Starting at position 341 of SEQ ID NO: 317958
aauugucaacucuaggagu

SEQ ID NO: 345682 - RNA, 19 nt, Artificial Sequence
  Description of Artificial Sequence: Synthetic oligonucleotide
  Antisense Strand to SEQ ID NO: 345681
acuccuagaguugacaauu

SEQ ID NO: 345683 - RNA, 19 nt, Artificial Sequence
  Description of Artificial Sequence: Synthetic oligonucleotide
  Sense Strand Starting at position 341 of SEQ ID NO: 318099
uacuuaugugaguaccagu

SEQ ID NO: 345684 - RNA, 19 nt, Artificial Sequence
  Description of Artificial Sequence: Synthetic oligonucleotide
  Antisense Strand to SEQ ID NO: 345683
acugguacucacauaagua

SEQ ID NO: 345685 - RNA, 19 nt, Artificial Sequence
  Description of Artificial Sequence: Synthetic oligonucleotide
  Sense Strand Starting at position 341 of SEQ ID NO: 318139
gugucaguaggcagguuua

SEQ ID NO: 345686 - RNA, 19 nt, Artificial Sequence
  Description of Artificial Sequence: Synthetic oligonucleotide
  Antisense Strand to SEQ ID NO: 345685
uaaaccugccuacugacac

SEQ ID NO: 345687 - RNA, 19 nt, Artificial Sequence
  Description of Artificial Sequence: Synthetic oligonucleotide
  Sense Strand Starting at position 341 of SEQ ID NO: 318300
gaagaaaugcauuguagug

SEQ ID NO: 345688 - RNA, 19 nt, Artificial Sequence
  Description of Artificial Sequence: Synthetic oligonucleotide
  Antisense Strand to SEQ ID NO: 345687
cacuacaaugcauuucuuc

SEQ ID NO: 345689 - RNA, 19 nt, Artificial Sequence
  Description of Artificial Sequence: Synthetic oligonucleotide
  Sense Strand Starting at position 341 of SEQ ID NO: 318324
gcacuuucgagagaagauc

SEQ ID NO: 345690 - RNA, 19 nt, Artificial Sequence
  Description of Artificial Sequence: Synthetic oligonucleotide
  Antisense Strand to SEQ ID NO: 345689
gaucuucucucgaaagugc

SEQ ID NO: 345691 - RNA, 19 nt, Artificial Sequence
  Description of Artificial Sequence: Synthetic oligonucleotide
  Sense Strand Starting at position 341 of SEQ ID NO: 318350
ggaaucuugaguuguugau

SEQ ID NO: 345692 - RNA, 19 nt, Artificial Sequence
  Description of Artificial Sequence: Synthetic oligonucleotide
  Antisense Strand to SEQ ID NO: 345691
aucaacaacucaagauucc

SEQ ID NO: 345693 - RNA, 19 nt, Artificial Sequence
  Description of Artificial Sequence: Synthetic oligonucleotide
  Sense Strand Starting at position 341 of SEQ ID NO: 318352
aaucuugaguuguugauua

SEQ ID NO: 345694 - RNA, 19 nt, Artificial Sequence
  Description of Artificial Sequence: Synthetic oligonucleotide
  Antisense Strand to SEQ ID NO: 345693
uaaucaacaacucaagauu

SEQ ID NO: 345695 - RNA, 19 nt, Artificial Sequence
  Description of Artificial Sequence: Synthetic oligonucleotide
  Sense Strand Starting at position 341 of SEQ ID NO: 318481
cggaaauuaugagcuuuac

SEQ ID NO: 345696 - RNA, 19 nt, Artificial Sequence
  Description of Artificial Sequence: Synthetic oligonucleotide
  Antisense Strand to SEQ ID NO: 345695
guaaagcucauaauuuccg

SEQ ID NO: 345697 - RNA, 19 nt, Artificial Sequence
  Description of Artificial Sequence: Synthetic oligonucleotide
  Sense Strand Starting at position 341 of SEQ ID NO: 318880
gucauaauuguauaaugca

SEQ ID NO: 345698 - RNA, 19 nt, Artificial Sequence
  Description of Artificial Sequence: Synthetic oligonucleotide
  Antisense Strand to SEQ ID NO: 345697
ugcauuauacaauuaugac

SEQ ID NO: 345699 - RNA, 19 nt, Artificial Sequence
  Description of Artificial Sequence: Synthetic oligonucleotide
  Sense Strand Starting at position 341 of SEQ ID NO: 318903
auauuugaugagugcuguu

SEQ ID NO: 345700 - RNA, 19 nt, Artificial Sequence
  Description of Artificial Sequence: Synthetic oligonucleotide
  Antisense Strand to SEQ ID NO: 345699
aacagcacucaucaaauau

SEQ ID NO: 345701 - RNA, 19 nt, Artificial Sequence
  Description of Artificial Sequence: Synthetic oligonucleotide
  Sense Strand Starting at position 341 of SEQ ID NO: 318944
guuuauuggcaauaccaaa

SEQ ID NO: 345702 - RNA, 19 nt, Artificial Sequence
  Description of Artificial Sequence: Synthetic oligonucleotide
  Antisense Strand to SEQ ID NO: 345701
uuugguauugccaauaaac

SEQ ID NO: 345703 - RNA, 19 nt, Artificial Sequence
  Description of Artificial Sequence: Synthetic oligonucleotide
  Sense Strand Starting at position 341 of SEQ ID NO: 318971
ucucuagguuguuugacaa

SEQ ID NO: 345704 - RNA, 19 nt, Artificial Sequence
  Description of Artificial Sequence: Synthetic oligonucleotide
  Antisense Strand to SEQ ID NO: 345703
uugucaaacaaccuagaga

SEQ ID NO: 345705 - RNA, 19 nt, Artificial Sequence
  Description of Artificial Sequence: Synthetic oligonucleotide
  Sense Strand Starting at position 341 of SEQ ID NO: 319042
ccagguacuuugguagaca

SEQ ID NO: 345706 - RNA, 19 nt, Artificial Sequence
  Description of Artificial Sequence: Synthetic oligonucleotide
  Antisense Strand to SEQ ID NO: 345705
ugucuaccaaaguaccugg

SEQ ID NO: 345707 - RNA, 19 nt, Artificial Sequence
  Description of Artificial Sequence: Synthetic oligonucleotide
  Sense Strand Starting at position 341 of SEQ ID NO: 319076
ucaguaauccagugaggug

SEQ ID NO: 345708 - RNA, 19 nt, Artificial Sequence
  Description of Artificial Sequence: Synthetic oligonucleotide
  Antisense Strand to SEQ ID NO: 345707
caccucacuggauuacuga

SEQ ID NO: 345709 - RNA, 19 nt, Artificial Sequence
  Description of Artificial Sequence: Synthetic oligonucleotide
  Sense Strand Starting at position 341 of SEQ ID NO: 319091
gguggcguggguaauguua

SEQ ID NO: 345710 - RNA, 19 nt, Artificial Sequence
  Description of Artificial Sequence: Synthetic oligonucleotide
  Antisense Strand to SEQ ID NO: 345709
uaacauuacccacgccacc

SEQ ID NO: 345711 - RNA, 19 nt, Artificial Sequence
  Description of Artificial Sequence: Synthetic oligonucleotide
  Sense Strand Starting at position 341 of SEQ ID NO: 319187
ucaaauacucuguguauac

SEQ ID NO: 345712 - RNA, 19 nt, Artificial Sequence
  Description of Artificial Sequence: Synthetic oligonucleotide
  Antisense Strand to SEQ ID NO: 345711
guauacacagaguauuuga

SEQ ID NO: 345713 - RNA, 19 nt, Artificial Sequence
  Description of Artificial Sequence: Synthetic oligonucleotide
  Sense Strand Starting at position 342 of SEQ ID NO: 315295
auguuaaggauaugguagu

SEQ ID NO: 345714 - RNA, 19 nt, Artificial Sequence
  Description of Artificial Sequence: Synthetic oligonucleotide
  Antisense Strand to SEQ ID NO: 345713
acuaccauauccuuaacau

SEQ ID NO: 345715 - RNA, 19 nt, Artificial Sequence
  Description of Artificial Sequence: Synthetic oligonucleotide
  Sense Strand Starting at position 342 of SEQ ID NO: 315301
aggauaugguaguuuacuu

SEQ ID NO: 345716 - RNA, 19 nt, Artificial Sequence
  Description of Artificial Sequence: Synthetic oligonucleotide
  Antisense Strand to SEQ ID NO: 345715
aaguaaacuaccauauccu

SEQ ID NO: 345717 - RNA, 19 nt, Artificial Sequence
  Description of Artificial Sequence: Synthetic oligonucleotide
  Sense Strand Starting at position 342 of SEQ ID NO: 315309
guaguuuacuucucuuaac

SEQ ID NO: 345718 - RNA, 19 nt, Artificial Sequence
  Description of Artificial Sequence: Synthetic oligonucleotide
  Antisense Strand to SEQ ID NO: 345717
guuaagagaaguaaacuac

SEQ ID NO: 345719 - RNA, 19 nt, Artificial Sequence
  Description of Artificial Sequence: Synthetic oligonucleotide
  Sense Strand Starting at position 342 of SEQ ID NO: 315892
guuauaagacgauauuggu

SEQ ID NO: 345720 - RNA, 19 nt, Artificial Sequence
  Description of Artificial Sequence: Synthetic oligonucleotide
  Antisense Strand to SEQ ID NO: 345719
accaauaucgucuuauaac

SEQ ID NO: 345721 - RNA, 19 nt, Artificial Sequence
  Description of Artificial Sequence: Synthetic oligonucleotide
  Sense Strand Starting at position 342 of SEQ ID NO: 315992
ggguauguuacucacugaa

SEQ ID NO: 345722 - RNA, 19 nt, Artificial Sequence
  Description of Artificial Sequence: Synthetic oligonucleotide
  Antisense Strand to SEQ ID NO: 345721
uucagugaguaacauaccc

SEQ ID NO: 345723 - RNA, 19 nt, Artificial Sequence
  Description of Artificial Sequence: Synthetic oligonucleotide
  Sense Strand Starting at position 342 of SEQ ID NO: 315994
guauguuacucacugaaag

SEQ ID NO: 345724 - RNA, 19 nt, Artificial Sequence
  Description of Artificial Sequence: Synthetic oligonucleotide
  Antisense Strand to SEQ ID NO: 345723
cuuucagugaguaacauac

SEQ ID NO: 345725 - RNA, 19 nt, Artificial Sequence
  Description of Artificial Sequence: Synthetic oligonucleotide
  Sense Strand Starting at position 342 of SEQ ID NO: 316005
acugaaagauuccagauuu

SEQ ID NO: 345726 - RNA, 19 nt, Artificial Sequence
  Description of Artificial Sequence: Synthetic oligonucleotide
  Antisense Strand to SEQ ID NO: 345725
aaaucuggaaucuuucagu

SEQ ID NO: 345727 - RNA, 19 nt, Artificial Sequence
  Description of Artificial Sequence: Synthetic oligonucleotide
  Sense Strand Starting at position 342 of SEQ ID NO: 316089
caauaauauugagcugguu

SEQ ID NO: 345728 - RNA, 19 nt, Artificial Sequence
  Description of Artificial Sequence: Synthetic oligonucleotide
  Antisense Strand to SEQ ID NO: 345727
aaccagcucaauauuauug

SEQ ID NO: 345729 - RNA, 19 nt, Artificial Sequence
  Description of Artificial Sequence: Synthetic oligonucleotide
  Sense Strand Starting at position 342 of SEQ ID NO: 316092
uaauauugagcugguugga

SEQ ID NO: 345730 - RNA, 19 nt, Artificial Sequence
  Description of Artificial Sequence: Synthetic oligonucleotide
  Antisense Strand to SEQ ID NO: 345729
uccaaccagcucaauauua

SEQ ID NO: 345731 - RNA, 19 nt, Artificial Sequence
  Description of Artificial Sequence: Synthetic oligonucleotide
  Sense Strand Starting at position 342 of SEQ ID NO: 316200
uaggaauugcuggagccua

SEQ ID NO: 345732 - RNA, 19 nt, Artificial Sequence
  Description of Artificial Sequence: Synthetic oligonucleotide
  Antisense Strand to SEQ ID NO: 345731
uaggcuccagcaauuccua

SEQ ID NO: 345733 - RNA, 19 nt, Artificial Sequence
  Description of Artificial Sequence: Synthetic oligonucleotide
  Sense Strand Starting at position 342 of SEQ ID NO: 316246
ugaagcagguguucucaua

SEQ ID NO: 345734 - RNA, 19 nt, Artificial Sequence
  Description of Artificial Sequence: Synthetic oligonucleotide
  Antisense Strand to SEQ ID NO: 345733
uaugagaacaccugcuuca

SEQ ID NO: 345735 - RNA, 19 nt, Artificial Sequence
  Description of Artificial Sequence: Synthetic oligonucleotide
  Sense Strand Starting at position 342 of SEQ ID NO: 316745
ugaggaaucugugcuucca

SEQ ID NO: 345736 - RNA, 19 nt, Artificial Sequence
  Description of Artificial Sequence: Synthetic oligonucleotide
  Antisense Strand to SEQ ID NO: 345735
uggaagcacagauuccuca

SEQ ID NO: 345737 - RNA, 19 nt, Artificial Sequence
  Description of Artificial Sequence: Synthetic oligonucleotide
  Sense Strand Starting at position 342 of SEQ ID NO: 316747
aggaaucugugcuuccaca

SEQ ID NO: 345738 - RNA, 19 nt, Artificial Sequence
  Description of Artificial Sequence: Synthetic oligonucleotide
  Antisense Strand to SEQ ID NO: 345737
uguggaagcacagauuccu

SEQ ID NO: 345739 - RNA, 19 nt, Artificial Sequence
  Description of Artificial Sequence: Synthetic oligonucleotide
  Sense Strand Starting at position 342 of SEQ ID NO: 316929
acuccaguaguugggauua

SEQ ID NO: 345740 - RNA, 19 nt, Artificial Sequence
  Description of Artificial Sequence: Synthetic oligonucleotide
  Antisense Strand to SEQ ID NO: 345739
uaaucccaacuacuggagu

SEQ ID NO: 345741 - RNA, 19 nt, Artificial Sequence
  Description of Artificial Sequence: Synthetic oligonucleotide
  Sense Strand Starting at position 342 of SEQ ID NO: 317072
ucuugaauuccuggcugag

SEQ ID NO: 345742 - RNA, 19 nt, Artificial Sequence
  Description of Artificial Sequence: Synthetic oligonucleotide
  Antisense Strand to SEQ ID NO: 345741
cucagccaggaauucaaga

SEQ ID NO: 345743 - RNA, 19 nt, Artificial Sequence
  Description of Artificial Sequence: Synthetic oligonucleotide
  Sense Strand Starting at position 342 of SEQ ID NO: 317074
uugaauuccuggcugaguu

SEQ ID NO: 345744 - RNA, 19 nt, Artificial Sequence
  Description of Artificial Sequence: Synthetic oligonucleotide
  Antisense Strand to SEQ ID NO: 345743
aacucagccaggaauucaa

SEQ ID NO: 345745 - RNA, 19 nt, Artificial Sequence
  Description of Artificial Sequence: Synthetic oligonucleotide
  Sense Strand Starting at position 342 of SEQ ID NO: 317197
cuagaagccuuagcuagau

SEQ ID NO: 345746 - RNA, 19 nt, Artificial Sequence
  Description of Artificial Sequence: Synthetic oligonucleotide
  Antisense Strand to SEQ ID NO: 345745
aucuagcuaaggcuucuag

SEQ ID NO: 345747 - RNA, 19 nt, Artificial Sequence
  Description of Artificial Sequence: Synthetic oligonucleotide
  Sense Strand Starting at position 342 of SEQ ID NO: 317209
gcuagaucaggccauaaac

SEQ ID NO: 345748 - RNA, 19 nt, Artificial Sequence
  Description of Artificial Sequence: Synthetic oligonucleotide
  Antisense Strand to SEQ ID NO: 345747
guuuauggccugaucuagc

SEQ ID NO: 345749 - RNA, 19 nt, Artificial Sequence
  Description of Artificial Sequence: Synthetic oligonucleotide
  Sense Strand Starting at position 342 of SEQ ID NO: 317246
gcaguccgcggcagauaau

SEQ ID NO: 345750 - RNA, 19 nt, Artificial Sequence
  Description of Artificial Sequence: Synthetic oligonucleotide
  Antisense Strand to SEQ ID NO: 345749
auuaucugccgcggacugc

SEQ ID NO: 345751 - RNA, 19 nt, Artificial Sequence
  Description of Artificial Sequence: Synthetic oligonucleotide
  Sense Strand Starting at position 342 of SEQ ID NO: 317255
ggcagauaaugaucggaau

SEQ ID NO: 345752 - RNA, 19 nt, Artificial Sequence
  Description of Artificial Sequence: Synthetic oligonucleotide
  Antisense Strand to SEQ ID NO: 345751
auuccgaucauuaucugcc

SEQ ID NO: 345753 - RNA, 19 nt, Artificial Sequence
  Description of Artificial Sequence: Synthetic oligonucleotide
  Sense Strand Starting at position 342 of SEQ ID NO: 317256
gcagauaaugaucggaauu

SEQ ID NO: 345754 - RNA, 19 nt, Artificial Sequence
  Description of Artificial Sequence: Synthetic oligonucleotide
  Antisense Strand to SEQ ID NO: 345753
aauuccgaucauuaucugc

SEQ ID NO: 345755 - RNA, 19 nt, Artificial Sequence
  Description of Artificial Sequence: Synthetic oligonucleotide
  Sense Strand Starting at position 342 of SEQ ID NO: 317366
ggugcuuugaaugggcaau

SEQ ID NO: 345756 - RNA, 19 nt, Artificial Sequence
  Description of Artificial Sequence: Synthetic oligonucleotide
  Antisense Strand to SEQ ID NO: 345755
auugcccauucaaagcacc

SEQ ID NO: 345757 - RNA, 19 nt, Artificial Sequence
  Description of Artificial Sequence: Synthetic oligonucleotide
  Sense Strand Starting at position 342 of SEQ ID NO: 317376
augggcaauuuagaggaaa

SEQ ID NO: 345758 - RNA, 19 nt, Artificial Sequence
  Description of Artificial Sequence: Synthetic oligonucleotide
  Antisense Strand to SEQ ID NO: 345757
uuuccucuaaauugcccau

SEQ ID NO: 345759 - RNA, 19 nt, Artificial Sequence
  Description of Artificial Sequence: Synthetic oligonucleotide
  Sense Strand Starting at position 342 of SEQ ID NO: 317398
gaccuaauggccugaguug

SEQ ID NO: 345760 - RNA, 19 nt, Artificial Sequence
  Description of Artificial Sequence: Synthetic oligonucleotide
  Antisense Strand to SEQ ID NO: 345759
caacucaggccauuagguc

SEQ ID NO: 345761 - RNA, 19 nt, Artificial Sequence
  Description of Artificial Sequence: Synthetic oligonucleotide
  Sense Strand Starting at position 342 of SEQ ID NO: 317399
accuaauggccugaguuga

SEQ ID NO: 345762 - RNA, 19 nt, Artificial Sequence
  Description of Artificial Sequence: Synthetic oligonucleotide
  Antisense Strand to SEQ ID NO: 345761
ucaacucaggccauuaggu

SEQ ID NO: 345763 - RNA, 19 nt, Artificial Sequence
  Description of Artificial Sequence: Synthetic oligonucleotide
  Sense Strand Starting at position 342 of SEQ ID NO: 317847
ucuauauuggaauagcuua

SEQ ID NO: 345764 - RNA, 19 nt, Artificial Sequence
  Description of Artificial Sequence: Synthetic oligonucleotide
  Antisense Strand to SEQ ID NO: 345763
uaagcuauuccaauauaga

SEQ ID NO: 345765 - RNA, 19 nt, Artificial Sequence
  Description of Artificial Sequence: Synthetic oligonucleotide
  Sense Strand Starting at position 342 of SEQ ID NO: 317865
agggaaacuuuagagaaga

SEQ ID NO: 345766 - RNA, 19 nt, Artificial Sequence
  Description of Artificial Sequence: Synthetic oligonucleotide
  Antisense Strand to SEQ ID NO: 345765
ucuucucuaaaguuucccu

SEQ ID NO: 345767 - RNA, 19 nt, Artificial Sequence
  Description of Artificial Sequence: Synthetic oligonucleotide
  Sense Strand Starting at position 342 of SEQ ID NO: 317913
cguggaaguagucaauaca

SEQ ID NO: 345768 - RNA, 19 nt, Artificial Sequence
  Description of Artificial Sequence: Synthetic oligonucleotide
  Antisense Strand to SEQ ID NO: 345767
uguauugacuacuuccacg

SEQ ID NO: 345769 - RNA, 19 nt, Artificial Sequence
  Description of Artificial Sequence: Synthetic oligonucleotide
  Sense Strand Starting at position 342 of SEQ ID NO: 317937
ggaacagacucccuagcua

SEQ ID NO: 345770 - RNA, 19 nt, Artificial Sequence
  Description of Artificial Sequence: Synthetic oligonucleotide
  Antisense Strand to SEQ ID NO: 345769
uagcuagggagucuguucc

SEQ ID NO: 345771 - RNA, 19 nt, Artificial Sequence
  Description of Artificial Sequence: Synthetic oligonucleotide
  Sense Strand Starting at position 342 of SEQ ID NO: 318231
auuccuccuccauggguua

SEQ ID NO: 345772 - RNA, 19 nt, Artificial Sequence
  Description of Artificial Sequence: Synthetic oligonucleotide
  Antisense Strand to SEQ ID NO: 345771
uaacccauggaggaggaau

SEQ ID NO: 345773 - RNA, 19 nt, Artificial Sequence
  Description of Artificial Sequence: Synthetic oligonucleotide
  Sense Strand Starting at position 342 of SEQ ID NO: 318264
ccagaucgccuaugauuuc

SEQ ID NO: 345774 - RNA, 19 nt, Artificial Sequence
  Description of Artificial Sequence: Synthetic oligonucleotide
  Antisense Strand to SEQ ID NO: 345773
gaaaucauaggcgaucugg

SEQ ID NO: 345775 - RNA, 19 nt, Artificial Sequence
  Description of Artificial Sequence: Synthetic oligonucleotide
  Sense Strand Starting at position 342 of SEQ ID NO: 318403
gugagaucucauuguuacc

SEQ ID NO: 345776 - RNA, 19 nt, Artificial Sequence
  Description of Artificial Sequence: Synthetic oligonucleotide
  Antisense Strand to SEQ ID NO: 345775
gguaacaaugagaucucac

SEQ ID NO: 345777 - RNA, 19 nt, Artificial Sequence
  Description of Artificial Sequence: Synthetic oligonucleotide
  Sense Strand Starting at position 342 of SEQ ID NO: 318548
cagugaggcugucucaaua

SEQ ID NO: 345778 - RNA, 19 nt, Artificial Sequence
  Description of Artificial Sequence: Synthetic oligonucleotide
  Antisense Strand to SEQ ID NO: 345777
uauugagacagccucacug

SEQ ID NO: 345779 - RNA, 19 nt, Artificial Sequence
  Description of Artificial Sequence: Synthetic oligonucleotide
  Sense Strand Starting at position 342 of SEQ ID NO: 318722
ccaauuaucuggcugggca

SEQ ID NO: 345780 - RNA, 19 nt, Artificial Sequence
  Description of Artificial Sequence: Synthetic oligonucleotide
  Antisense Strand to SEQ ID NO: 345779
ugcccagccagauaauugg

SEQ ID NO: 345781 - RNA, 19 nt, Artificial Sequence
  Description of Artificial Sequence: Synthetic oligonucleotide
  Sense Strand Starting at position 342 of SEQ ID NO: 319034
ugaaucagcguccaaucaa

SEQ ID NO: 345782 - RNA, 19 nt, Artificial Sequence
  Description of Artificial Sequence: Synthetic oligonucleotide
  Antisense Strand to SEQ ID NO: 345781
uugauuggacgcugauuca

SEQ ID NO: 345783 - RNA, 19 nt, Artificial Sequence
  Description of Artificial Sequence: Synthetic oligonucleotide
  Sense Strand Starting at position 342 of SEQ ID NO: 319045
ccaaucaaggucugugaua

SEQ ID NO: 345784 - RNA, 19 nt, Artificial Sequence
  Description of Artificial Sequence: Synthetic oligonucleotide
  Antisense Strand to SEQ ID NO: 345783
uaucacagaccuugauugg

SEQ ID NO: 345785 - RNA, 19 nt, Artificial Sequence
  Description of Artificial Sequence: Synthetic oligonucleotide
  Sense Strand Starting at position 342 of SEQ ID NO: 319046
caaucaaggucugugauaa

SEQ ID NO: 345786 - RNA, 19 nt, Artificial Sequence
  Description of Artificial Sequence: Synthetic oligonucleotide
  Antisense Strand to SEQ ID NO: 345785
uuaucacagaccuugauug

SEQ ID NO: 345787 - RNA, 19 nt, Artificial Sequence
  Description of Artificial Sequence: Synthetic oligonucleotide
  Sense Strand Starting at position 342 of SEQ ID NO: 319047
aaucaaggucugugauaaa

SEQ ID NO: 345788 - RNA, 19 nt, Artificial Sequence
  Description of Artificial Sequence: Synthetic oligonucleotide
  Antisense Strand to SEQ ID NO: 345787
uuuaucacagaccuugauu

SEQ ID NO: 345789 - RNA, 19 nt, Artificial Sequence
  Description of Artificial Sequence: Synthetic oligonucleotide
  Sense Strand Starting at position 342 of SEQ ID NO: 319092
auaaguuaucuccaucugu

SEQ ID NO: 345790 - RNA, 19 nt, Artificial Sequence
  Description of Artificial Sequence: Synthetic oligonucleotide
  Antisense Strand to SEQ ID NO: 345789
acagauggagauaacuuau

SEQ ID NO: 345791 - RNA, 19 nt, Artificial Sequence
  Description of Artificial Sequence: Synthetic oligonucleotide
  Sense Strand Starting at position 342 of SEQ ID NO: 319128
aggaucucacuauguuaca

SEQ ID NO: 345792 - RNA, 19 nt, Artificial Sequence
  Description of Artificial Sequence: Synthetic oligonucleotide
  Antisense Strand to SEQ ID NO: 345791
uguaacauagugagauccu

SEQ ID NO: 345793 - RNA, 19 nt, Artificial Sequence
  Description of Artificial Sequence: Synthetic oligonucleotide
  Sense Strand Starting at position 343 of SEQ ID NO: 315461
agcugagaaucagagguaa

SEQ ID NO: 345794 - RNA, 19 nt, Artificial Sequence
  Description of Artificial Sequence: Synthetic oligonucleotide
  Antisense Strand to SEQ ID NO: 345793
uuaccucugauucucagcu

SEQ ID NO: 345795 - RNA, 19 nt, Artificial Sequence
  Description of Artificial Sequence: Synthetic oligonucleotide
  Sense Strand Starting at position 343 of SEQ ID NO: 315911
uuuacaucucuauagcagu

SEQ ID NO: 345796 - RNA, 19 nt, Artificial Sequence
  Description of Artificial Sequence: Synthetic oligonucleotide
  Antisense Strand to SEQ ID NO: 345795
acugcuauagagauguaaa

SEQ ID NO: 345797 - RNA, 19 nt, Artificial Sequence
  Description of Artificial Sequence: Synthetic oligonucleotide
  Sense Strand Starting at position 343 of SEQ ID NO: 316049
cugagagcgcucggauaug

SEQ ID NO: 345798 - RNA, 19 nt, Artificial Sequence
  Description of Artificial Sequence: Synthetic oligonucleotide
  Antisense Strand to SEQ ID NO: 345797
cauauccgagcgcucucag

SEQ ID NO: 345799 - RNA, 19 nt, Artificial Sequence
  Description of Artificial Sequence: Synthetic oligonucleotide
  Sense Strand Starting at position 343 of SEQ ID NO: 316078
gccugugcaacgucuuaaa

SEQ ID NO: 345800 - RNA, 19 nt, Artificial Sequence
  Description of Artificial Sequence: Synthetic oligonucleotide
  Antisense Strand to SEQ ID NO: 345799
uuuaagacguugcacaggc

SEQ ID NO: 345801 - RNA, 19 nt, Artificial Sequence
  Description of Artificial Sequence: Synthetic oligonucleotide
  Sense Strand Starting at position 343 of SEQ ID NO: 316119
ucugcauuguucccaaugu

SEQ ID NO: 345802 - RNA, 19 nt, Artificial Sequence
  Description of Artificial Sequence: Synthetic oligonucleotide
  Antisense Strand to SEQ ID NO: 345801
acauugggaacaaugcaga

SEQ ID NO: 345803 - RNA, 19 nt, Artificial Sequence
  Description of Artificial Sequence: Synthetic oligonucleotide
  Sense Strand Starting at position 343 of SEQ ID NO: 316130
cccaaugucuggcuucuga

SEQ ID NO: 345804 - RNA, 19 nt, Artificial Sequence
  Description of Artificial Sequence: Synthetic oligonucleotide
  Antisense Strand to SEQ ID NO: 345803
ucagaagccagacauuggg

SEQ ID NO: 345805 - RNA, 19 nt, Artificial Sequence
  Description of Artificial Sequence: Synthetic oligonucleotide
  Sense Strand Starting at position 343 of SEQ ID NO: 316146
ugauuacuccuagguccua

SEQ ID NO: 345806 - RNA, 19 nt, Artificial Sequence
  Description of Artificial Sequence: Synthetic oligonucleotide
  Antisense Strand to SEQ ID NO: 345805
uaggaccuaggaguaauca

SEQ ID NO: 345807 - RNA, 19 nt, Artificial Sequence
  Description of Artificial Sequence: Synthetic oligonucleotide
  Sense Strand Starting at position 343 of SEQ ID NO: 316212
aggaucuguguccgucuaa

SEQ ID NO: 345808 - RNA, 19 nt, Artificial Sequence
  Description of Artificial Sequence: Synthetic oligonucleotide
  Antisense Strand to SEQ ID NO: 345807
uuagacggacacagauccu

SEQ ID NO: 345809 - RNA, 19 nt, Artificial Sequence
  Description of Artificial Sequence: Synthetic oligonucleotide
  Sense Strand Starting at position 343 of SEQ ID NO: 316213
ggaucuguguccgucuaaa

SEQ ID NO: 345810 - RNA, 19 nt, Artificial Sequence
  Description of Artificial Sequence: Synthetic oligonucleotide
  Antisense Strand to SEQ ID NO: 345809
uuuagacggacacagaucc

SEQ ID NO: 345811 - RNA, 19 nt, Artificial Sequence
  Description of Artificial Sequence: Synthetic oligonucleotide
  Sense Strand Starting at position 343 of SEQ ID NO: 316221
guccgucuaaaggaaauua

SEQ ID NO: 345812 - RNA, 19 nt, Artificial Sequence
  Description of Artificial Sequence: Synthetic oligonucleotide
  Antisense Strand to SEQ ID NO: 345811
uaauuuccuuuagacggac

SEQ ID NO: 345813 - RNA, 19 nt, Artificial Sequence
  Description of Artificial Sequence: Synthetic oligonucleotide
  Sense Strand Starting at position 343 of SEQ ID NO: 316341
ucaguuaguucuuucugac

SEQ ID NO: 345814 - RNA, 19 nt, Artificial Sequence
  Description of Artificial Sequence: Synthetic oligonucleotide
  Antisense Strand to SEQ ID NO: 345813
gucagaaagaacuaacuga

SEQ ID NO: 345815 - RNA, 19 nt, Artificial Sequence
  Description of Artificial Sequence: Synthetic oligonucleotide
  Sense Strand Starting at position 343 of SEQ ID NO: 316469
ggcgguuacagugaauagu

SEQ ID NO: 345816 - RNA, 19 nt, Artificial Sequence
  Description of Artificial Sequence: Synthetic oligonucleotide
  Antisense Strand to SEQ ID NO: 345815
acuauucacuguaaccgcc

SEQ ID NO: 345817 - RNA, 19 nt, Artificial Sequence
  Description of Artificial Sequence: Synthetic oligonucleotide
  Sense Strand Starting at position 343 of SEQ ID NO: 316472
gguuacagugaauagugau

SEQ ID NO: 345818 - RNA, 19 nt, Artificial Sequence
  Description of Artificial Sequence: Synthetic oligonucleotide
  Antisense Strand to SEQ ID NO: 345817
aucacuauucacuguaacc

SEQ ID NO: 345819 - RNA, 19 nt, Artificial Sequence
  Description of Artificial Sequence: Synthetic oligonucleotide
  Sense Strand Starting at position 343 of SEQ ID NO: 317138
uugccuucuccauacuugu

SEQ ID NO: 345820 - RNA, 19 nt, Artificial Sequence
  Description of Artificial Sequence: Synthetic oligonucleotide
  Antisense Strand to SEQ ID NO: 345819
acaaguauggagaaggcaa

SEQ ID NO: 345821 - RNA, 19 nt, Artificial Sequence
  Description of Artificial Sequence: Synthetic oligonucleotide
  Sense Strand Starting at position 343 of SEQ ID NO: 317141
ccuucuccauacuuguaga

SEQ ID NO: 345822 - RNA, 19 nt, Artificial Sequence
  Description of Artificial Sequence: Synthetic oligonucleotide
  Antisense Strand to SEQ ID NO: 345821
ucuacaaguauggagaagg

SEQ ID NO: 345823 - RNA, 19 nt, Artificial Sequence
  Description of Artificial Sequence: Synthetic oligonucleotide
  Sense Strand Starting at position 343 of SEQ ID NO: 317171
cucgcaacaugcuuccaaa

SEQ ID NO: 345824 - RNA, 19 nt, Artificial Sequence
  Description of Artificial Sequence: Synthetic oligonucleotide
  Antisense Strand to SEQ ID NO: 345823
uuuggaagcauguugcgag

SEQ ID NO: 345825 - RNA, 19 nt, Artificial Sequence
  Description of Artificial Sequence: Synthetic oligonucleotide
  Sense Strand Starting at position 343 of SEQ ID NO: 317426
uaugguuccggagacauug

SEQ ID NO: 345826 - RNA, 19 nt, Artificial Sequence
  Description of Artificial Sequence: Synthetic oligonucleotide
  Antisense Strand to SEQ ID NO: 345825
caaugucuccggaaccaua

SEQ ID NO: 345827 - RNA, 19 nt, Artificial Sequence
  Description of Artificial Sequence: Synthetic oligonucleotide
  Sense Strand Starting at position 343 of SEQ ID NO: 317432
uccggagacauugggagau

SEQ ID NO: 345828 - RNA, 19 nt, Artificial Sequence
  Description of Artificial Sequence: Synthetic oligonucleotide
  Antisense Strand to SEQ ID NO: 345827
aucucccaaugucuccgga

SEQ ID NO: 345829 - RNA, 19 nt, Artificial Sequence
  Description of Artificial Sequence: Synthetic oligonucleotide
  Sense Strand Starting at position 343 of SEQ ID NO: 317543
gggauuuaauaauggaacu

SEQ ID NO: 345830 - RNA, 19 nt, Artificial Sequence
  Description of Artificial Sequence: Synthetic oligonucleotide
  Antisense Strand to SEQ ID NO: 345829
aguuccauuauuaaauccc

SEQ ID NO: 345831 - RNA, 19 nt, Artificial Sequence
  Description of Artificial Sequence: Synthetic oligonucleotide
  Sense Strand Starting at position 343 of SEQ ID NO: 317669
ccagguuucucuguacuaa

SEQ ID NO: 345832 - RNA, 19 nt, Artificial Sequence
  Description of Artificial Sequence: Synthetic oligonucleotide
  Antisense Strand to SEQ ID NO: 345831
uuaguacagagaaaccugg

SEQ ID NO: 345833 - RNA, 19 nt, Artificial Sequence
  Description of Artificial Sequence: Synthetic oligonucleotide
  Sense Strand Starting at position 343 of SEQ ID NO: 317958
augacuaaaguugguauaa

SEQ ID NO: 345834 - RNA, 19 nt, Artificial Sequence
  Description of Artificial Sequence: Synthetic oligonucleotide
  Antisense Strand to SEQ ID NO: 345833
uuauaccaacuuuagucau

SEQ ID NO: 345835 - RNA, 19 nt, Artificial Sequence
  Description of Artificial Sequence: Synthetic oligonucleotide
  Sense Strand Starting at position 343 of SEQ ID NO: 317959
ugacuaaaguugguauaaa

SEQ ID NO: 345836 - RNA, 19 nt, Artificial Sequence
  Description of Artificial Sequence: Synthetic oligonucleotide
  Antisense Strand to SEQ ID NO: 345835
uuuauaccaacuuuaguca

SEQ ID NO: 345837 - RNA, 19 nt, Artificial Sequence
  Description of Artificial Sequence: Synthetic oligonucleotide
  Sense Strand Starting at position 343 of SEQ ID NO: 317960
gacuaaaguugguauaaau

SEQ ID NO: 345838 - RNA, 19 nt, Artificial Sequence
  Description of Artificial Sequence: Synthetic oligonucleotide
  Antisense Strand to SEQ ID NO: 345837
auuuauaccaacuuuaguc

SEQ ID NO: 345839 - RNA, 19 nt, Artificial Sequence
  Description of Artificial Sequence: Synthetic oligonucleotide
  Sense Strand Starting at position 343 of SEQ ID NO: 318087
aucagugcucccugucaga

SEQ ID NO: 345840 - RNA, 19 nt, Artificial Sequence
  Description of Artificial Sequence: Synthetic oligonucleotide
  Antisense Strand to SEQ ID NO: 345839
ucugacagggagcacugau

SEQ ID NO: 345841 - RNA, 19 nt, Artificial Sequence
  Description of Artificial Sequence: Synthetic oligonucleotide
  Sense Strand Starting at position 343 of SEQ ID NO: 318246
auaagagacugucuuuauc

SEQ ID NO: 345842 - RNA, 19 nt, Artificial Sequence
  Description of Artificial Sequence: Synthetic oligonucleotide
  Antisense Strand to SEQ ID NO: 345841
gauaaagacagucucuuau

SEQ ID NO: 345843 - RNA, 19 nt, Artificial Sequence
  Description of Artificial Sequence: Synthetic oligonucleotide
  Sense Strand Starting at position 343 of SEQ ID NO: 318282
cugcucacaggcuagaaau

SEQ ID NO: 345844 - RNA, 19 nt, Artificial Sequence
  Description of Artificial Sequence: Synthetic oligonucleotide
  Antisense Strand to SEQ ID NO: 345843
auuucuagccugugagcag

SEQ ID NO: 345845 - RNA, 19 nt, Artificial Sequence
  Description of Artificial Sequence: Synthetic oligonucleotide
  Sense Strand Starting at position 343 of SEQ ID NO: 318292
gcuagaaauccacggacag

SEQ ID NO: 345846 - RNA, 19 nt, Artificial Sequence
  Description of Artificial Sequence: Synthetic oligonucleotide
  Antisense Strand to SEQ ID NO: 345845
cuguccguggauuucuagc

SEQ ID NO: 345847 - RNA, 19 nt, Artificial Sequence
  Description of Artificial Sequence: Synthetic oligonucleotide
  Sense Strand Starting at position 343 of SEQ ID NO: 318404
ugaggucaucugggagaua

SEQ ID NO: 345848 - RNA, 19 nt, Artificial Sequence
  Description of Artificial Sequence: Synthetic oligonucleotide
  Antisense Strand to SEQ ID NO: 345847
uaucucccagaugaccuca

SEQ ID NO: 345849 - RNA, 19 nt, Artificial Sequence
  Description of Artificial Sequence: Synthetic oligonucleotide
  Sense Strand Starting at position 343 of SEQ ID NO: 318405
gaggucaucugggagauau

SEQ ID NO: 345850 - RNA, 19 nt, Artificial Sequence
  Description of Artificial Sequence: Synthetic oligonucleotide
  Antisense Strand to SEQ ID NO: 345849
auaucucccagaugaccuc

SEQ ID NO: 345851 - RNA, 19 nt, Artificial Sequence
  Description of Artificial Sequence: Synthetic oligonucleotide
  Sense Strand Starting at position 343 of SEQ ID NO: 318474
aggacuuucuaauuaaggu

SEQ ID NO: 345852 - RNA, 19 nt, Artificial Sequence
  Description of Artificial Sequence: Synthetic oligonucleotide
  Antisense Strand to SEQ ID NO: 345851
accuuaauuagaaaguccu

SEQ ID NO: 345853 - RNA, 19 nt, Artificial Sequence
  Description of Artificial Sequence: Synthetic oligonucleotide
  Sense Strand Starting at position 343 of SEQ ID NO: 318482
cuaauuaagguuuguguau

SEQ ID NO: 345854 - RNA, 19 nt, Artificial Sequence
  Description of Artificial Sequence: Synthetic oligonucleotide
  Antisense Strand to SEQ ID NO: 345853
auacacaaaccuuaauuag

SEQ ID NO: 345855 - RNA, 19 nt, Artificial Sequence
  Description of Artificial Sequence: Synthetic oligonucleotide
  Sense Strand Starting at position 343 of SEQ ID NO: 318488
aagguuuguguauaaagug

SEQ ID NO: 345856 - RNA, 19 nt, Artificial Sequence
  Description of Artificial Sequence: Synthetic oligonucleotide
  Antisense Strand to SEQ ID NO: 345855
cacuuuauacacaaaccuu

SEQ ID NO: 345857 - RNA, 19 nt, Artificial Sequence
  Description of Artificial Sequence: Synthetic oligonucleotide
  Sense Strand Starting at position 343 of SEQ ID NO: 318495
guguauaaaguguauaacu

SEQ ID NO: 345858 - RNA, 19 nt, Artificial Sequence
  Description of Artificial Sequence: Synthetic oligonucleotide
  Antisense Strand to SEQ ID NO: 345857
aguuauacacuuuauacac

SEQ ID NO: 345859 - RNA, 19 nt, Artificial Sequence
  Description of Artificial Sequence: Synthetic oligonucleotide
  Sense Strand Starting at position 343 of SEQ ID NO: 318497
guauaaaguguauaacuga

SEQ ID NO: 345860 - RNA, 19 nt, Artificial Sequence
  Description of Artificial Sequence: Synthetic oligonucleotide
  Antisense Strand to SEQ ID NO: 345859
ucaguuauacacuuuauac

SEQ ID NO: 345861 - RNA, 19 nt, Artificial Sequence
  Description of Artificial Sequence: Synthetic oligonucleotide
  Sense Strand Starting at position 343 of SEQ ID NO: 318530
gucaguguaauugaacgua

SEQ ID NO: 345862 - RNA, 19 nt, Artificial Sequence
  Description of Artificial Sequence: Synthetic oligonucleotide
  Antisense Strand to SEQ ID NO: 345861
uacguucaauuacacugac

SEQ ID NO: 345863 - RNA, 19 nt, Artificial Sequence
  Description of Artificial Sequence: Synthetic oligonucleotide
  Sense Strand Starting at position 343 of SEQ ID NO: 318533
aguguaauugaacguaaca

SEQ ID NO: 345864 - RNA, 19 nt, Artificial Sequence
  Description of Artificial Sequence: Synthetic oligonucleotide
  Antisense Strand to SEQ ID NO: 345863
uguuacguucaauuacacu

SEQ ID NO: 345865 - RNA, 19 nt, Artificial Sequence
  Description of Artificial Sequence: Synthetic oligonucleotide
  Sense Strand Starting at position 343 of SEQ ID NO: 318564
ggaguucugggcugggcau

SEQ ID NO: 345866 - RNA, 19 nt, Artificial Sequence
  Description of Artificial Sequence: Synthetic oligonucleotide
  Antisense Strand to SEQ ID NO: 345865
augcccagcccagaacucc

SEQ ID NO: 345867 - RNA, 19 nt, Artificial Sequence
  Description of Artificial Sequence: Synthetic oligonucleotide
  Sense Strand Starting at position 343 of SEQ ID NO: 318985
cugugugaccugggcaaua

SEQ ID NO: 345868 - RNA, 19 nt, Artificial Sequence
  Description of Artificial Sequence: Synthetic oligonucleotide
  Antisense Strand to SEQ ID NO: 345867
uauugcccaggucacacag

SEQ ID NO: 345869 - RNA, 19 nt, Artificial Sequence
  Description of Artificial Sequence: Synthetic oligonucleotide
  Sense Strand Starting at position 343 of SEQ ID NO: 318996
gggcaauaacguuaggucu

SEQ ID NO: 345870 - RNA, 19 nt, Artificial Sequence
  Description of Artificial Sequence: Synthetic oligonucleotide
  Antisense Strand to SEQ ID NO: 345869
agaccuaacguuauugccc

SEQ ID NO: 345871 - RNA, 19 nt, Artificial Sequence
  Description of Artificial Sequence: Synthetic oligonucleotide
  Sense Strand Starting at position 343 of SEQ ID NO: 319003
aacguuaggucucuuuguu

SEQ ID NO: 345872 - RNA, 19 nt, Artificial Sequence
  Description of Artificial Sequence: Synthetic oligonucleotide
  Antisense Strand to SEQ ID NO: 345871
aacaaagagaccuaacguu

SEQ ID NO: 345873 - RNA, 19 nt, Artificial Sequence
  Description of Artificial Sequence: Synthetic oligonucleotide
  Sense Strand Starting at position 344 of SEQ ID NO: 315260
ggcagacaaaugugaaaug

SEQ ID NO: 345874 - RNA, 19 nt, Artificial Sequence
  Description of Artificial Sequence: Synthetic oligonucleotide
  Antisense Strand to SEQ ID NO: 345873
cauuucacauuugucugcc

SEQ ID NO: 345875 - RNA, 19 nt, Artificial Sequence
  Description of Artificial Sequence: Synthetic oligonucleotide
  Sense Strand Starting at position 344 of SEQ ID NO: 315307
agaguaugugaacauguca

SEQ ID NO: 345876 - RNA, 19 nt, Artificial Sequence
  Description of Artificial Sequence: Synthetic oligonucleotide
  Antisense Strand to SEQ ID NO: 345875
ugacauguucacauacucu

SEQ ID NO: 345877 - RNA, 19 nt, Artificial Sequence
  Description of Artificial Sequence: Synthetic oligonucleotide
  Sense Strand Starting at position 344 of SEQ ID NO: 315407
agagauagucuuuagcauu

SEQ ID NO: 345878 - RNA, 19 nt, Artificial Sequence
  Description of Artificial Sequence: Synthetic oligonucleotide
  Antisense Strand to SEQ ID NO: 345877
aaugcuaaagacuaucucu

SEQ ID NO: 345879 - RNA, 19 nt, Artificial Sequence
  Description of Artificial Sequence: Synthetic oligonucleotide
  Sense Strand Starting at position 344 of SEQ ID NO: 315476
ucacaaauggauugcaaua

SEQ ID NO: 345880 - RNA, 19 nt, Artificial Sequence
  Description of Artificial Sequence: Synthetic oligonucleotide
  Antisense Strand to SEQ ID NO: 345879
uauugcaauccauuuguga

SEQ ID NO: 345881 - RNA, 19 nt, Artificial Sequence
  Description of Artificial Sequence: Synthetic oligonucleotide
  Sense Strand Starting at position 344 of SEQ ID NO: 315608
acuaguaaagcagagcaua

SEQ ID NO: 345882 - RNA, 19 nt, Artificial Sequence
  Description of Artificial Sequence: Synthetic oligonucleotide
  Antisense Strand to SEQ ID NO: 345881
uaugcucugcuuuacuagu

SEQ ID NO: 345883 - RNA, 19 nt, Artificial Sequence
  Description of Artificial Sequence: Synthetic oligonucleotide
  Sense Strand Starting at position 344 of SEQ ID NO: 315783
uucgguauuugcuuuaaug

SEQ ID NO: 345884 - RNA, 19 nt, Artificial Sequence
  Description of Artificial Sequence: Synthetic oligonucleotide
  Antisense Strand to SEQ ID NO: 345883
cauuaaagcaaauaccgaa

SEQ ID NO: 345885 - RNA, 19 nt, Artificial Sequence
  Description of Artificial Sequence: Synthetic oligonucleotide
  Sense Strand Starting at position 344 of SEQ ID NO: 315785
cgguauuugcuuuaaugua

SEQ ID NO: 345886 - RNA, 19 nt, Artificial Sequence
  Description of Artificial Sequence: Synthetic oligonucleotide
  Antisense Strand to SEQ ID NO: 345885
uacauuaaagcaaauaccg

SEQ ID NO: 345887 - RNA, 19 nt, Artificial Sequence
  Description of Artificial Sequence: Synthetic oligonucleotide
  Sense Strand Starting at position 344 of SEQ ID NO: 315816
aauagccuucuguauggau

SEQ ID NO: 345888 - RNA, 19 nt, Artificial Sequence
  Description of Artificial Sequence: Synthetic oligonucleotide
  Antisense Strand to SEQ ID NO: 345887
auccauacagaaggcuauu

SEQ ID NO: 345889 - RNA, 19 nt, Artificial Sequence
  Description of Artificial Sequence: Synthetic oligonucleotide
  Sense Strand Starting at position 344 of SEQ ID NO: 315941
augagugccgaguaagaau

SEQ ID NO: 345890 - RNA, 19 nt, Artificial Sequence
  Description of Artificial Sequence: Synthetic oligonucleotide
  Antisense Strand to SEQ ID NO: 345889
auucuuacucggcacucau

SEQ ID NO: 345891 - RNA, 19 nt, Artificial Sequence
  Description of Artificial Sequence: Synthetic oligonucleotide
  Sense Strand Starting at position 344 of SEQ ID NO: 316110
gcacaaugaguuuagaauc

SEQ ID NO: 345892 - RNA, 19 nt, Artificial Sequence
  Description of Artificial Sequence: Synthetic oligonucleotide
  Antisense Strand to SEQ ID NO: 345891
gauucuaaacucauugugc

SEQ ID NO: 345893 - RNA, 19 nt, Artificial Sequence
  Description of Artificial Sequence: Synthetic oligonucleotide
  Sense Strand Starting at position 344 of SEQ ID NO: 316351
auaucucugcugggaauaa

SEQ ID NO: 345894 - RNA, 19 nt, Artificial Sequence
  Description of Artificial Sequence: Synthetic oligonucleotide
  Antisense Strand to SEQ ID NO: 345893
uuauucccagcagagauau

SEQ ID NO: 345895 - RNA, 19 nt, Artificial Sequence
  Description of Artificial Sequence: Synthetic oligonucleotide
  Sense Strand Starting at position 344 of SEQ ID NO: 316382
uuagaaacagccugacuuu

SEQ ID NO: 345896 - RNA, 19 nt, Artificial Sequence
  Description of Artificial Sequence: Synthetic oligonucleotide
  Antisense Strand to SEQ ID NO: 345895
aaagucaggcuguuucuaa

SEQ ID NO: 345897 - RNA, 19 nt, Artificial Sequence
  Description of Artificial Sequence: Synthetic oligonucleotide
  Sense Strand Starting at position 344 of SEQ ID NO: 316456
ugcugaauugaggaguuua

SEQ ID NO: 345898 - RNA, 19 nt, Artificial Sequence
  Description of Artificial Sequence: Synthetic oligonucleotide
  Antisense Strand to SEQ ID NO: 345897
uaaacuccucaauucagca

SEQ ID NO: 345899 - RNA, 19 nt, Artificial Sequence
  Description of Artificial Sequence: Synthetic oligonucleotide
  Sense Strand Starting at position 344 of SEQ ID NO: 316993
ugccucuaaggugaaauua

SEQ ID NO: 345900 - RNA, 19 nt, Artificial Sequence
  Description of Artificial Sequence: Synthetic oligonucleotide
  Antisense Strand to SEQ ID NO: 345899
uaauuucaccuuagaggca

SEQ ID NO: 345901 - RNA, 19 nt, Artificial Sequence
  Description of Artificial Sequence: Synthetic oligonucleotide
  Sense Strand Starting at position 344 of SEQ ID NO: 317001
aggugaaauuacuugagug

SEQ ID NO: 345902 - RNA, 19 nt, Artificial Sequence
  Description of Artificial Sequence: Synthetic oligonucleotide
  Antisense Strand to SEQ ID NO: 345901
cacucaaguaauuucaccu

SEQ ID NO: 345903 - RNA, 19 nt, Artificial Sequence
  Description of Artificial Sequence: Synthetic oligonucleotide
  Sense Strand Starting at position 344 of SEQ ID NO: 317385
ggguguaaagaugauuagu

SEQ ID NO: 345904 - RNA, 19 nt, Artificial Sequence
  Description of Artificial Sequence: Synthetic oligonucleotide
  Antisense Strand to SEQ ID NO: 345903
acuaaucaucuuuacaccc

SEQ ID NO: 345905 - RNA, 19 nt, Artificial Sequence
  Description of Artificial Sequence: Synthetic oligonucleotide
  Sense Strand Starting at position 344 of SEQ ID NO: 317484
auugaacuuggagguguaa

SEQ ID NO: 345906 - RNA, 19 nt, Artificial Sequence
  Description of Artificial Sequence: Synthetic oligonucleotide
  Antisense Strand to SEQ ID NO: 345905
uuacaccuccaaguucaau

SEQ ID NO: 345907 - RNA, 19 nt, Artificial Sequence
  Description of Artificial Sequence: Synthetic oligonucleotide
  Sense Strand Starting at position 344 of SEQ ID NO: 317756
ggacaauaucagugaaagu

SEQ ID NO: 345908 - RNA, 19 nt, Artificial Sequence
  Description of Artificial Sequence: Synthetic oligonucleotide
  Antisense Strand to SEQ ID NO: 345907
acuuucacugauauugucc

SEQ ID NO: 345909 - RNA, 19 nt, Artificial Sequence
  Description of Artificial Sequence: Synthetic oligonucleotide
  Sense Strand Starting at position 344 of SEQ ID NO: 317766
agugaaagucagcaguaga

SEQ ID NO: 345910 - RNA, 19 nt, Artificial Sequence
  Description of Artificial Sequence: Synthetic oligonucleotide
  Antisense Strand to SEQ ID NO: 345909
ucuacugcugacuuucacu

SEQ ID NO: 345911 - RNA, 19 nt, Artificial Sequence
  Description of Artificial Sequence: Synthetic oligonucleotide
  Sense Strand Starting at position 344 of SEQ ID NO: 317948
ugcaguuauagggaagcua

SEQ ID NO: 345912 - RNA, 19 nt, Artificial Sequence
  Description of Artificial Sequence: Synthetic oligonucleotide
  Antisense Strand to SEQ ID NO: 345911
uagcuucccuauaacugca

SEQ ID NO: 345913 - RNA, 19 nt, Artificial Sequence
  Description of Artificial Sequence: Synthetic oligonucleotide
  Sense Strand Starting at position 344 of SEQ ID NO: 317970
cuuguuugacuaugaugga

SEQ ID NO: 345914 - RNA, 19 nt, Artificial Sequence
  Description of Artificial Sequence: Synthetic oligonucleotide
  Antisense Strand to SEQ ID NO: 345913
uccaucauagucaaacaag

SEQ ID NO: 345915 - RNA, 19 nt, Artificial Sequence
  Description of Artificial Sequence: Synthetic oligonucleotide
  Sense Strand Starting at position 344 of SEQ ID NO: 318182
gcuuauggagguuaguaua

SEQ ID NO: 345916 - RNA, 19 nt, Artificial Sequence
  Description of Artificial Sequence: Synthetic oligonucleotide
  Antisense Strand to SEQ ID NO: 345915
uauacuaaccuccauaagc

SEQ ID NO: 345917 - RNA, 19 nt, Artificial Sequence
  Description of Artificial Sequence: Synthetic oligonucleotide
  Sense Strand Starting at position 344 of SEQ ID NO: 318193
uuaguauaaugucugaaag

SEQ ID NO: 345918 - RNA, 19 nt, Artificial Sequence
  Description of Artificial Sequence: Synthetic oligonucleotide
  Antisense Strand to SEQ ID NO: 345917
cuuucagacauuauacuaa

SEQ ID NO: 345919 - RNA, 19 nt, Artificial Sequence
  Description of Artificial Sequence: Synthetic oligonucleotide
  Sense Strand Starting at position 344 of SEQ ID NO: 318234
acccaagauuuggaucuaa

SEQ ID NO: 345920 - RNA, 19 nt, Artificial Sequence
  Description of Artificial Sequence: Synthetic oligonucleotide
  Antisense Strand to SEQ ID NO: 345919
uuagauccaaaucuugggu

SEQ ID NO: 345921 - RNA, 19 nt, Artificial Sequence
  Description of Artificial Sequence: Synthetic oligonucleotide
  Sense Strand Starting at position 344 of SEQ ID NO: 318548
gauguaagaucuuugaagu

SEQ ID NO: 345922 - RNA, 19 nt, Artificial Sequence
  Description of Artificial Sequence: Synthetic oligonucleotide
  Antisense Strand to SEQ ID NO: 345921
acuucaaagaucuuacauc

SEQ ID NO: 345923 - RNA, 19 nt, Artificial Sequence
  Description of Artificial Sequence: Synthetic oligonucleotide
  Sense Strand Starting at position 344 of SEQ ID NO: 318549
auguaagaucuuugaagug

SEQ ID NO: 345924 - RNA, 19 nt, Artificial Sequence
  Description of Artificial Sequence: Synthetic oligonucleotide
  Antisense Strand to SEQ ID NO: 345923
cacuucaaagaucuuacau

SEQ ID NO: 345925 - RNA, 19 nt, Artificial Sequence
  Description of Artificial Sequence: Synthetic oligonucleotide
  Sense Strand Starting at position 344 of SEQ ID NO: 318613
augacugguuuccuauaag

SEQ ID NO: 345926 - RNA, 19 nt, Artificial Sequence
  Description of Artificial Sequence: Synthetic oligonucleotide
  Antisense Strand to SEQ ID NO: 345925
cuuauaggaaaccagucau

SEQ ID NO: 345927 - RNA, 19 nt, Artificial Sequence
  Description of Artificial Sequence: Synthetic oligonucleotide
  Sense Strand Starting at position 344 of SEQ ID NO: 318856
uagagagguuagguuccau

SEQ ID NO: 345928 - RNA, 19 nt, Artificial Sequence
  Description of Artificial Sequence: Synthetic oligonucleotide
  Antisense Strand to SEQ ID NO: 345927
auggaaccuaaccucucua

SEQ ID NO: 345929 - RNA, 19 nt, Artificial Sequence
  Description of Artificial Sequence: Synthetic oligonucleotide
  Sense Strand Starting at position 344 of SEQ ID NO: 318889
auaacuuauugggcauaaa

SEQ ID NO: 345930 - RNA, 19 nt, Artificial Sequence
  Description of Artificial Sequence: Synthetic oligonucleotide
  Antisense Strand to SEQ ID NO: 345929
uuuaugcccaauaaguuau

SEQ ID NO: 345931 - RNA, 19 nt, Artificial Sequence
  Description of Artificial Sequence: Synthetic oligonucleotide
  Sense Strand Starting at position 344 of SEQ ID NO: 318892
acuuauugggcauaaaugu

SEQ ID NO: 345932 - RNA, 19 nt, Artificial Sequence
  Description of Artificial Sequence: Synthetic oligonucleotide
  Antisense Strand to SEQ ID NO: 345931
acauuuaugcccaauaagu

SEQ ID NO: 345933 - RNA, 19 nt, Artificial Sequence
  Description of Artificial Sequence: Synthetic oligonucleotide
  Sense Strand Starting at position 344 of SEQ ID NO: 318898
ugggcauaaauguauuagu

SEQ ID NO: 345934 - RNA, 19 nt, Artificial Sequence
  Description of Artificial Sequence: Synthetic oligonucleotide
  Antisense Strand to SEQ ID NO: 345933
acuaauacauuuaugccca

SEQ ID NO: 345935 - RNA, 19 nt, Artificial Sequence
  Description of Artificial Sequence: Synthetic oligonucleotide
  Sense Strand Starting at position 344 of SEQ ID NO: 318934
uugaacaugcccuaagacu

SEQ ID NO: 345936 - RNA, 19 nt, Artificial Sequence
  Description of Artificial Sequence: Synthetic oligonucleotide
  Antisense Strand to SEQ ID NO: 345935
agucuuagggcauguucaa

SEQ ID NO: 345937 - RNA, 19 nt, Artificial Sequence
  Description of Artificial Sequence: Synthetic oligonucleotide
  Sense Strand Starting at position 344 of SEQ ID NO: 318950
acuagaacuccuggguuga

SEQ ID NO: 345938 - RNA, 19 nt, Artificial Sequence
  Description of Artificial Sequence: Synthetic oligonucleotide
  Antisense Strand to SEQ ID NO: 345937
ucaacccaggaguucuagu

SEQ ID NO: 345939 - RNA, 19 nt, Artificial Sequence
  Description of Artificial Sequence: Synthetic oligonucleotide
  Sense Strand Starting at position 344 of SEQ ID NO: 318951
cuagaacuccuggguugaa

SEQ ID NO: 345940 - RNA, 19 nt, Artificial Sequence
  Description of Artificial Sequence: Synthetic oligonucleotide
  Antisense Strand to SEQ ID NO: 345939
uucaacccaggaguucuag

SEQ ID NO: 345941 - RNA, 19 nt, Artificial Sequence
  Description of Artificial Sequence: Synthetic oligonucleotide
  Sense Strand Starting at position 344 of SEQ ID NO: 318952
uagaacuccuggguugaau

SEQ ID NO: 345942 - RNA, 19 nt, Artificial Sequence
  Description of Artificial Sequence: Synthetic oligonucleotide
  Antisense Strand to SEQ ID NO: 345941
auucaacccaggaguucua

SEQ ID NO: 345943 - RNA, 19 nt, Artificial Sequence
  Description of Artificial Sequence: Synthetic oligonucleotide
  Sense Strand Starting at position 344 of SEQ ID NO: 319073
cuguuaugugagcagaaug

SEQ ID NO: 345944 - RNA, 19 nt, Artificial Sequence
  Description of Artificial Sequence: Synthetic oligonucleotide
  Antisense Strand to SEQ ID NO: 345943
cauucugcucacauaacag

SEQ ID NO: 345945 - RNA, 19 nt, Artificial Sequence
  Description of Artificial Sequence: Synthetic oligonucleotide
  Sense Strand Starting at position 344 of SEQ ID NO: 319098
aggccuucuaaggaguuaa

SEQ ID NO: 345946 - RNA, 19 nt, Artificial Sequence
  Description of Artificial Sequence: Synthetic oligonucleotide
  Antisense Strand to SEQ ID NO: 345945
uuaacuccuuagaaggccu

SEQ ID NO: 345947 - RNA, 19 nt, Artificial Sequence
  Description of Artificial Sequence: Synthetic oligonucleotide
  Sense Strand Starting at position 344 of SEQ ID NO: 319192
aagacauugugccuaauga

SEQ ID NO: 345948 - RNA, 19 nt, Artificial Sequence
  Description of Artificial Sequence: Synthetic oligonucleotide
  Antisense Strand to SEQ ID NO: 345947
ucauuaggcacaaugucuu

SEQ ID NO: 345949 - RNA, 19 nt, Artificial Sequence
  Description of Artificial Sequence: Synthetic oligonucleotide
  Sense Strand Starting at position 344 of SEQ ID NO: 319193
agacauugugccuaaugau

SEQ ID NO: 345950 - RNA, 19 nt, Artificial Sequence
  Description of Artificial Sequence: Synthetic oligonucleotide
  Antisense Strand to SEQ ID NO: 345949
aucauuaggcacaaugucu

SEQ ID NO: 345951 - RNA, 19 nt, Artificial Sequence
  Description of Artificial Sequence: Synthetic oligonucleotide
  Sense Strand Starting at position 344 of SEQ ID NO: 319208
ugauaaugcuaucuugaua

SEQ ID NO: 345952 - RNA, 19 nt, Artificial Sequence
  Description of Artificial Sequence: Synthetic oligonucleotide
  Antisense Strand to SEQ ID NO: 345951
uaucaagauagcauuauca

SEQ ID NO: 345953 - RNA, 19 nt, Artificial Sequence
  Description of Artificial Sequence: Synthetic oligonucleotide
  Sense Strand Starting at position 345 of SEQ ID NO: 315236
acugcaucuggccaauagu

SEQ ID NO: 345954 - RNA, 19 nt, Artificial Sequence
  Description of Artificial Sequence: Synthetic oligonucleotide
  Antisense Strand to SEQ ID NO: 345953
acuauuggccagaugcagu

SEQ ID NO: 345955 - RNA, 19 nt, Artificial Sequence
  Description of Artificial Sequence: Synthetic oligonucleotide
  Sense Strand Starting at position 345 of SEQ ID NO: 315245
ggccaauagugucuucuaa

SEQ ID NO: 345956 - RNA, 19 nt, Artificial Sequence
  Description of Artificial Sequence: Synthetic oligonucleotide
  Antisense Strand to SEQ ID NO: 345955
uuagaagacacuauuggcc

SEQ ID NO: 345957 - RNA, 19 nt, Artificial Sequence
  Description of Artificial Sequence: Synthetic oligonucleotide
  Sense Strand Starting at position 345 of SEQ ID NO: 315247
ccaauagugucuucuaaag

SEQ ID NO: 345958 - RNA, 19 nt, Artificial Sequence
  Description of Artificial Sequence: Synthetic oligonucleotide
  Antisense Strand to SEQ ID NO: 345957
cuuuagaagacacuauugg

SEQ ID NO: 345959 - RNA, 19 nt, Artificial Sequence
  Description of Artificial Sequence: Synthetic oligonucleotide
  Sense Strand Starting at position 345 of SEQ ID NO: 315253
gugucuucuaaagggcaua

SEQ ID NO: 345960 - RNA, 19 nt, Artificial Sequence
  Description of Artificial Sequence: Synthetic oligonucleotide
  Antisense Strand to SEQ ID NO: 345959
uaugcccuuuagaagacac

SEQ ID NO: 345961 - RNA, 19 nt, Artificial Sequence
  Description of Artificial Sequence: Synthetic oligonucleotide
  Sense Strand Starting at position 345 of SEQ ID NO: 315258
uucuaaagggcauaaguau

SEQ ID NO: 345962 - RNA, 19 nt, Artificial Sequence
  Description of Artificial Sequence: Synthetic oligonucleotide
  Antisense Strand to SEQ ID NO: 345961
auacuuaugcccuuuagaa

SEQ ID NO: 345963 - RNA, 19 nt, Artificial Sequence
  Description of Artificial Sequence: Synthetic oligonucleotide
  Sense Strand Starting at position 345 of SEQ ID NO: 315265
gggcauaaguauuaaauuu

SEQ ID NO: 345964 - RNA, 19 nt, Artificial Sequence
  Description of Artificial Sequence: Synthetic oligonucleotide
  Antisense Strand to SEQ ID NO: 345963
aaauuuaauacuuaugccc

SEQ ID NO: 345965 - RNA, 19 nt, Artificial Sequence
  Description of Artificial Sequence: Synthetic oligonucleotide
  Sense Strand Starting at position 345 of SEQ ID NO: 315389
aguuuaguauuaucagguu

SEQ ID NO: 345966 - RNA, 19 nt, Artificial Sequence
  Description of Artificial Sequence: Synthetic oligonucleotide
  Antisense Strand to SEQ ID NO: 345965
aaccugauaauacuaaacu

SEQ ID NO: 345967 - RNA, 19 nt, Artificial Sequence
  Description of Artificial Sequence: Synthetic oligonucleotide
  Sense Strand Starting at position 345 of SEQ ID NO: 315444
uuguuuauaguacaagaca

SEQ ID NO: 345968 - RNA, 19 nt, Artificial Sequence
  Description of Artificial Sequence: Synthetic oligonucleotide
  Antisense Strand to SEQ ID NO: 345967
ugucuuguacuauaaacaa

SEQ ID NO: 345969 - RNA, 19 nt, Artificial Sequence
  Description of Artificial Sequence: Synthetic oligonucleotide
  Sense Strand Starting at position 345 of SEQ ID NO: 315453
guacaagacauggguugaa

SEQ ID NO: 345970 - RNA, 19 nt, Artificial Sequence
  Description of Artificial Sequence: Synthetic oligonucleotide
  Antisense Strand to SEQ ID NO: 345969
uucaacccaugucuuguac

SEQ ID NO: 345971 - RNA, 19 nt, Artificial Sequence
  Description of Artificial Sequence: Synthetic oligonucleotide
  Sense Strand Starting at position 345 of SEQ ID NO: 315456
caagacauggguugaaguu

SEQ ID NO: 345972 - RNA, 19 nt, Artificial Sequence
  Description of Artificial Sequence: Synthetic oligonucleotide
  Antisense Strand to SEQ ID NO: 345971
aacuucaacccaugucuug

SEQ ID NO: 345973 - RNA, 19 nt, Artificial Sequence
  Description of Artificial Sequence: Synthetic oligonucleotide
  Sense Strand Starting at position 345 of SEQ ID NO: 315574
guccauaucuaucuaggua

SEQ ID NO: 345974 - RNA, 19 nt, Artificial Sequence
  Description of Artificial Sequence: Synthetic oligonucleotide
  Antisense Strand to SEQ ID NO: 345973
uaccuagauagauauggac

SEQ ID NO: 345975 - RNA, 19 nt, Artificial Sequence
  Description of Artificial Sequence: Synthetic oligonucleotide
  Sense Strand Starting at position 345 of SEQ ID NO: 315661
guuuacuguggcuauauau

SEQ ID NO: 345976 - RNA, 19 nt, Artificial Sequence
  Description of Artificial Sequence: Synthetic oligonucleotide
  Antisense Strand to SEQ ID NO: 345975
auauauagccacaguaaac

SEQ ID NO: 345977 - RNA, 19 nt, Artificial Sequence
  Description of Artificial Sequence: Synthetic oligonucleotide
  Sense Strand Starting at position 345 of SEQ ID NO: 315911
ucuauuuauuuaggucuca

SEQ ID NO: 345978 - RNA, 19 nt, Artificial Sequence
  Description of Artificial Sequence: Synthetic oligonucleotide
  Antisense Strand to SEQ ID NO: 345977
ugagaccuaaauaaauaga

SEQ ID NO: 345979 - RNA, 19 nt, Artificial Sequence
  Description of Artificial Sequence: Synthetic oligonucleotide
  Sense Strand Starting at position 345 of SEQ ID NO: 315985
ucagauguaucuuuaagaa

SEQ ID NO: 345980 - RNA, 19 nt, Artificial Sequence
  Description of Artificial Sequence: Synthetic oligonucleotide
  Antisense Strand to SEQ ID NO: 345979
uucuuaaagauacaucuga

SEQ ID NO: 345981 - RNA, 19 nt, Artificial Sequence
  Description of Artificial Sequence: Synthetic oligonucleotide
  Sense Strand Starting at position 345 of SEQ ID NO: 316258
cucagccugguuuauaauu

SEQ ID NO: 345982 - RNA, 19 nt, Artificial Sequence
  Description of Artificial Sequence: Synthetic oligonucleotide
  Antisense Strand to SEQ ID NO: 345981
aauuauaaaccaggcugag

SEQ ID NO: 345983 - RNA, 19 nt, Artificial Sequence
  Description of Artificial Sequence: Synthetic oligonucleotide
  Sense Strand Starting at position 345 of SEQ ID NO: 316346
gcaccuuacuuauuuaguu

SEQ ID NO: 345984 - RNA, 19 nt, Artificial Sequence
  Description of Artificial Sequence: Synthetic oligonucleotide
  Antisense Strand to SEQ ID NO: 345983
aacuaaauaaguaaggugc

SEQ ID NO: 345985 - RNA, 19 nt, Artificial Sequence
  Description of Artificial Sequence: Synthetic oligonucleotide
  Sense Strand Starting at position 345 of SEQ ID NO: 316481
aucugucuauagcuauaga

SEQ ID NO: 345986 - RNA, 19 nt, Artificial Sequence
  Description of Artificial Sequence: Synthetic oligonucleotide
  Antisense Strand to SEQ ID NO: 345985
ucuauagcuauagacagau

SEQ ID NO: 345987 - RNA, 19 nt, Artificial Sequence
  Description of Artificial Sequence: Synthetic oligonucleotide
  Sense Strand Starting at position 345 of SEQ ID NO: 316484
ugucuauagcuauagauac

SEQ ID NO: 345988 - RNA, 19 nt, Artificial Sequence
  Description of Artificial Sequence: Synthetic oligonucleotide
  Antisense Strand to SEQ ID NO: 345987
guaucuauagcuauagaca

SEQ ID NO: 345989 - RNA, 19 nt, Artificial Sequence
  Description of Artificial Sequence: Synthetic oligonucleotide
  Sense Strand Starting at position 345 of SEQ ID NO: 316753
uuguaaauacagugucuca

SEQ ID NO: 345990 - RNA, 19 nt, Artificial Sequence
  Description of Artificial Sequence: Synthetic oligonucleotide
  Antisense Strand to SEQ ID NO: 345989
ugagacacuguauuuacaa

SEQ ID NO: 345991 - RNA, 19 nt, Artificial Sequence
  Description of Artificial Sequence: Synthetic oligonucleotide
  Sense Strand Starting at position 345 of SEQ ID NO: 316963
uuccaugaugucuaacaug

SEQ ID NO: 345992 - RNA, 19 nt, Artificial Sequence
  Description of Artificial Sequence: Synthetic oligonucleotide
  Antisense Strand to SEQ ID NO: 345991
cauguuagacaucauggaa

SEQ ID NO: 345993 - RNA, 19 nt, Artificial Sequence
  Description of Artificial Sequence: Synthetic oligonucleotide
  Sense Strand Starting at position 345 of SEQ ID NO: 317014
ccauauugucuugguccau

SEQ ID NO: 345994 - RNA, 19 nt, Artificial Sequence
  Description of Artificial Sequence: Synthetic oligonucleotide
  Antisense Strand to SEQ ID NO: 345993
auggaccaagacaauaugg

SEQ ID NO: 345995 - RNA, 19 nt, Artificial Sequence
  Description of Artificial Sequence: Synthetic oligonucleotide
  Sense Strand Starting at position 345 of SEQ ID NO: 317123
aagaguguggcacagacau

SEQ ID NO: 345996 - RNA, 19 nt, Artificial Sequence
  Description of Artificial Sequence: Synthetic oligonucleotide
  Antisense Strand to SEQ ID NO: 345995
augucugugccacacucuu

SEQ ID NO: 345997 - RNA, 19 nt, Artificial Sequence
  Description of Artificial Sequence: Synthetic oligonucleotide
  Sense Strand Starting at position 345 of SEQ ID NO: 317131
ggcacagacaucuggcaaa

SEQ ID NO: 345998 - RNA, 19 nt, Artificial Sequence
  Description of Artificial Sequence: Synthetic oligonucleotide
  Antisense Strand to SEQ ID NO: 345997
uuugccagaugucugugcc

SEQ ID NO: 345999 - RNA, 19 nt, Artificial Sequence
  Description of Artificial Sequence: Synthetic oligonucleotide
  Sense Strand Starting at position 345 of SEQ ID NO: 317529
uuuaauaucugugucaguu

SEQ ID NO: 346000 - RNA, 19 nt, Artificial Sequence
  Description of Artificial Sequence: Synthetic oligonucleotide
  Antisense Strand to SEQ ID NO: 345999
aacugacacagauauuaaa

SEQ ID NO: 346001 - RNA, 19 nt, Artificial Sequence
  Description of Artificial Sequence: Synthetic oligonucleotide
  Sense Strand Starting at position 345 of SEQ ID NO: 317533
auaucugugucaguucuaa

SEQ ID NO: 346002 - RNA, 19 nt, Artificial Sequence
  Description of Artificial Sequence: Synthetic oligonucleotide
  Antisense Strand to SEQ ID NO: 346001
uuagaacugacacagauau

SEQ ID NO: 346003 - RNA, 19 nt, Artificial Sequence
  Description of Artificial Sequence: Synthetic oligonucleotide
  Sense Strand Starting at position 345 of SEQ ID NO: 317772
agguauacuauuggugaga

SEQ ID NO: 346004 - RNA, 19 nt, Artificial Sequence
  Description of Artificial Sequence: Synthetic oligonucleotide
  Antisense Strand to SEQ ID NO: 346003
ucucaccaauaguauaccu

SEQ ID NO: 346005 - RNA, 19 nt, Artificial Sequence
  Description of Artificial Sequence: Synthetic oligonucleotide
  Sense Strand Starting at position 345 of SEQ ID NO: 317773
gguauacuauuggugagag

SEQ ID NO: 346006 - RNA, 19 nt, Artificial Sequence
  Description of Artificial Sequence: Synthetic oligonucleotide
  Antisense Strand to SEQ ID NO: 346005
cucucaccaauaguauacc

SEQ ID NO: 346007 - RNA, 19 nt, Artificial Sequence
  Description of Artificial Sequence: Synthetic oligonucleotide
  Sense Strand Starting at position 345 of SEQ ID NO: 317933
gcaugauaugagcaauuga

SEQ ID NO: 346008 - RNA, 19 nt, Artificial Sequence
  Description of Artificial Sequence: Synthetic oligonucleotide
  Antisense Strand to SEQ ID NO: 346007
ucaauugcucauaucaugc

SEQ ID NO: 346009 - RNA, 19 nt, Artificial Sequence
  Description of Artificial Sequence: Synthetic oligonucleotide
  Sense Strand Starting at position 345 of SEQ ID NO: 318023
acaacuaaugcuugguauu

SEQ ID NO: 346010 - RNA, 19 nt, Artificial Sequence
  Description of Artificial Sequence: Synthetic oligonucleotide
  Antisense Strand to SEQ ID NO: 346009
aauaccaagcauuaguugu

SEQ ID NO: 346011 - RNA, 19 nt, Artificial Sequence
  Description of Artificial Sequence: Synthetic oligonucleotide
  Sense Strand Starting at position 345 of SEQ ID NO: 318034
uugguauucguguauacuu

SEQ ID NO: 346012 - RNA, 19 nt, Artificial Sequence
  Description of Artificial Sequence: Synthetic oligonucleotide
  Antisense Strand to SEQ ID NO: 346011
aaguauacacgaauaccaa

SEQ ID NO: 346013 - RNA, 19 nt, Artificial Sequence
  Description of Artificial Sequence: Synthetic oligonucleotide
  Sense Strand Starting at position 345 of SEQ ID NO: 318045
guauacuuucuuuaggcuu

SEQ ID NO: 346014 - RNA, 19 nt, Artificial Sequence
  Description of Artificial Sequence: Synthetic oligonucleotide
  Antisense Strand to SEQ ID NO: 346013
aagccuaaagaaaguauac

SEQ ID NO: 346015 - RNA, 19 nt, Artificial Sequence
  Description of Artificial Sequence: Synthetic oligonucleotide
  Sense Strand Starting at position 345 of SEQ ID NO: 318053
ucuuuaggcuugucauaau

SEQ ID NO: 346016 - RNA, 19 nt, Artificial Sequence
  Description of Artificial Sequence: Synthetic oligonucleotide
  Antisense Strand to SEQ ID NO: 346015
auuaugacaagccuaaaga

SEQ ID NO: 346017 - RNA, 19 nt, Artificial Sequence
  Description of Artificial Sequence: Synthetic oligonucleotide
  Sense Strand Starting at position 345 of SEQ ID NO: 318083
aucauauuccugugaugua

SEQ ID NO: 346018 - RNA, 19 nt, Artificial Sequence
  Description of Artificial Sequence: Synthetic oligonucleotide
  Antisense Strand to SEQ ID NO: 346017
uacaucacaggaauaugau

SEQ ID NO: 346019 - RNA, 19 nt, Artificial Sequence
  Description of Artificial Sequence: Synthetic oligonucleotide
  Sense Strand Starting at position 345 of SEQ ID NO: 318157
auaggagcuugucccuauu

SEQ ID NO: 346020 - RNA, 19 nt, Artificial Sequence
  Description of Artificial Sequence: Synthetic oligonucleotide
  Antisense Strand to SEQ ID NO: 346019
aauagggacaagcuccuau

SEQ ID NO: 346021 - RNA, 19 nt, Artificial Sequence
  Description of Artificial Sequence: Synthetic oligonucleotide
  Sense Strand Starting at position 345 of SEQ ID NO: 318868
uguguuggaugagaaauuu

SEQ ID NO: 346022 - RNA, 19 nt, Artificial Sequence
  Description of Artificial Sequence: Synthetic oligonucleotide
  Antisense Strand to SEQ ID NO: 346021
aaauuucucauccaacaca

SEQ ID NO: 346023 - RNA, 19 nt, Artificial Sequence
  Description of Artificial Sequence: Synthetic oligonucleotide
  Sense Strand Starting at position 345 of SEQ ID NO: 319008
uuaagaguuaccuguggca

SEQ ID NO: 346024 - RNA, 19 nt, Artificial Sequence
  Description of Artificial Sequence: Synthetic oligonucleotide
  Antisense Strand to SEQ ID NO: 346023
ugccacagguaacucuuaa

SEQ ID NO: 346025 - RNA, 19 nt, Artificial Sequence
  Description of Artificial Sequence: Synthetic oligonucleotide
  Sense Strand Starting at position 345 of SEQ ID NO: 319010
aagaguuaccuguggcauu

SEQ ID NO: 346026 - RNA, 19 nt, Artificial Sequence
  Description of Artificial Sequence: Synthetic oligonucleotide
  Antisense Strand to SEQ ID NO: 346025
aaugccacagguaacucuu

SEQ ID NO: 346027 - RNA, 19 nt, Artificial Sequence
  Description of Artificial Sequence: Synthetic oligonucleotide
  Sense Strand Starting at position 345 of SEQ ID NO: 319072
uaagguauuguagguagua

SEQ ID NO: 346028 - RNA, 19 nt, Artificial Sequence
  Description of Artificial Sequence: Synthetic oligonucleotide
  Antisense Strand to SEQ ID NO: 346027
uacuaccuacaauaccuua

SEQ ID NO: 346029 - RNA, 19 nt, Artificial Sequence
  Description of Artificial Sequence: Synthetic oligonucleotide
  Sense Strand Starting at position 345 of SEQ ID NO: 319086
uaguacuuccugugaagca

SEQ ID NO: 346030 - RNA, 19 nt, Artificial Sequence
  Description of Artificial Sequence: Synthetic oligonucleotide
  Antisense Strand to SEQ ID NO: 346029
ugcuucacaggaaguacua

SEQ ID NO: 346031 - RNA, 19 nt, Artificial Sequence
  Description of Artificial Sequence: Synthetic oligonucleotide
  Sense Strand Starting at position 345 of SEQ ID NO: 319190
aggguuguccucuaguacu

SEQ ID NO: 346032 - RNA, 19 nt, Artificial Sequence
  Description of Artificial Sequence: Synthetic oligonucleotide
  Antisense Strand to SEQ ID NO: 346031
aguacuagaggacaacccu

SEQ ID NO: 346033 - RNA, 19 nt, Artificial Sequence
  Description of Artificial Sequence: Synthetic oligonucleotide
  Sense Strand Starting at position 346 of SEQ ID NO: 315355
gaagguaagcacuauuauc

SEQ ID NO: 346034 - RNA, 19 nt, Artificial Sequence
  Description of Artificial Sequence: Synthetic oligonucleotide
  Antisense Strand to SEQ ID NO: 346033
gauaauagugcuuaccuuc

SEQ ID NO: 346035 - RNA, 19 nt, Artificial Sequence
  Description of Artificial Sequence: Synthetic oligonucleotide
  Sense Strand Starting at position 346 of SEQ ID NO: 315399
gugagucacagagagguua

SEQ ID NO: 346036 - RNA, 19 nt, Artificial Sequence
  Description of Artificial Sequence: Synthetic oligonucleotide
  Antisense Strand to SEQ ID NO: 346035
uaaccucucugugacucac

SEQ ID NO: 346037 - RNA, 19 nt, Artificial Sequence
  Description of Artificial Sequence: Synthetic oligonucleotide
  Sense Strand Starting at position 346 of SEQ ID NO: 315415
uuaaauaucuugcugagau

SEQ ID NO: 346038 - RNA, 19 nt, Artificial Sequence
  Description of Artificial Sequence: Synthetic oligonucleotide
  Antisense Strand to SEQ ID NO: 346037
aucucagcaagauauuuaa

SEQ ID NO: 346039 - RNA, 19 nt, Artificial Sequence
  Description of Artificial Sequence: Synthetic oligonucleotide
  Sense Strand Starting at position 346 of SEQ ID NO: 315536
ggcagacaaaugugaaaug

SEQ ID NO: 346040 - RNA, 19 nt, Artificial Sequence
  Description of Artificial Sequence: Synthetic oligonucleotide
  Antisense Strand to SEQ ID NO: 346039
cauuucacauuugucugcc

SEQ ID NO: 346041 - RNA, 19 nt, Artificial Sequence
  Description of Artificial Sequence: Synthetic oligonucleotide
  Sense Strand Starting at position 346 of SEQ ID NO: 315583
agaguaugugaacauguca

SEQ ID NO: 346042 - RNA, 19 nt, Artificial Sequence
  Description of Artificial Sequence: Synthetic oligonucleotide
  Antisense Strand to SEQ ID NO: 346041
ugacauguucacauacucu

SEQ ID NO: 346043 - RNA, 19 nt, Artificial Sequence
  Description of Artificial Sequence: Synthetic oligonucleotide
  Sense Strand Starting at position 346 of SEQ ID NO: 315683
agagauagucuuuagcauu

SEQ ID NO: 346044 - RNA, 19 nt, Artificial Sequence
  Description of Artificial Sequence: Synthetic oligonucleotide
  Antisense Strand to SEQ ID NO: 346043
aaugcuaaagacuaucucu

SEQ ID NO: 346045 - RNA, 19 nt, Artificial Sequence
  Description of Artificial Sequence: Synthetic oligonucleotide
  Sense Strand Starting at position 346 of SEQ ID NO: 315752
ucacaaauggauugcaaua

SEQ ID NO: 346046 - RNA, 19 nt, Artificial Sequence
  Description of Artificial Sequence: Synthetic oligonucleotide
  Antisense Strand to SEQ ID NO: 346045
uauugcaauccauuuguga

SEQ ID NO: 346047 - RNA, 19 nt, Artificial Sequence
  Description of Artificial Sequence: Synthetic oligonucleotide
  Sense Strand Starting at position 346 of SEQ ID NO: 315835
cugguuacugaguagcuaa

SEQ ID NO: 346048 - RNA, 19 nt, Artificial Sequence
  Description of Artificial Sequence: Synthetic oligonucleotide
  Antisense Strand to SEQ ID NO: 346047
uuagcuacucaguaaccag

SEQ ID NO: 346049 - RNA, 19 nt, Artificial Sequence
  Description of Artificial Sequence: Synthetic oligonucleotide
  Sense Strand Starting at position 346 of SEQ ID NO: 315884
acuaguaaagcagagcaua

SEQ ID NO: 346050 - RNA, 19 nt, Artificial Sequence
  Description of Artificial Sequence: Synthetic oligonucleotide
  Antisense Strand to SEQ ID NO: 346049
uaugcucugcuuuacuagu

SEQ ID NO: 346051 - RNA, 19 nt, Artificial Sequence
  Description of Artificial Sequence: Synthetic oligonucleotide
  Sense Strand Starting at position 346 of SEQ ID NO: 316059
uucgguauuugcuuuaaug

SEQ ID NO: 346052 - RNA, 19 nt, Artificial Sequence
  Description of Artificial Sequence: Synthetic oligonucleotide
  Antisense Strand to SEQ ID NO: 346051
cauuaaagcaaauaccgaa

SEQ ID NO: 346053 - RNA, 19 nt, Artificial Sequence
  Description of Artificial Sequence: Synthetic oligonucleotide
  Sense Strand Starting at position 346 of SEQ ID NO: 316061
cgguauuugcuuuaaugua

SEQ ID NO: 346054 - RNA, 19 nt, Artificial Sequence
  Description of Artificial Sequence: Synthetic oligonucleotide
  Antisense Strand to SEQ ID NO: 346053
uacauuaaagcaaauaccg

SEQ ID NO: 346055 - RNA, 19 nt, Artificial Sequence
  Description of Artificial Sequence: Synthetic oligonucleotide
  Sense Strand Starting at position 346 of SEQ ID NO: 316092
aauagccuucuguauggau

SEQ ID NO: 346056 - RNA, 19 nt, Artificial Sequence
  Description of Artificial Sequence: Synthetic oligonucleotide
  Antisense Strand to SEQ ID NO: 346055
auccauacagaaggcuauu

SEQ ID NO: 346057 - RNA, 19 nt, Artificial Sequence
  Description of Artificial Sequence: Synthetic oligonucleotide
  Sense Strand Starting at position 346 of SEQ ID NO: 316217
augagugccgaguaagaau

SEQ ID NO: 346058 - RNA, 19 nt, Artificial Sequence
  Description of Artificial Sequence: Synthetic oligonucleotide
  Antisense Strand to SEQ ID NO: 346057
auucuuacucggcacucau

SEQ ID NO: 346059 - RNA, 19 nt, Artificial Sequence
  Description of Artificial Sequence: Synthetic oligonucleotide
  Sense Strand Starting at position 346 of SEQ ID NO: 316386
gcacaaugaguuuagaauc

SEQ ID NO: 346060 - RNA, 19 nt, Artificial Sequence
  Description of Artificial Sequence: Synthetic oligonucleotide
  Antisense Strand to SEQ ID NO: 346059
gauucuaaacucauugugc

SEQ ID NO: 346061 - RNA, 19 nt, Artificial Sequence
  Description of Artificial Sequence: Synthetic oligonucleotide
  Sense Strand Starting at position 346 of SEQ ID NO: 316627
auaucucugcugggaauaa

SEQ ID NO: 346062 - RNA, 19 nt, Artificial Sequence
  Description of Artificial Sequence: Synthetic oligonucleotide
  Antisense Strand to SEQ ID NO: 346061
uuauucccagcagagauau

SEQ ID NO: 346063 - RNA, 19 nt, Artificial Sequence
  Description of Artificial Sequence: Synthetic oligonucleotide
  Sense Strand Starting at position 346 of SEQ ID NO: 316658
uuagaaacagccugacuuu

SEQ ID NO: 346064 - RNA, 19 nt, Artificial Sequence
  Description of Artificial Sequence: Synthetic oligonucleotide
  Antisense Strand to SEQ ID NO: 346063
aaagucaggcuguuucuaa

SEQ ID NO: 346065 - RNA, 19 nt, Artificial Sequence
  Description of Artificial Sequence: Synthetic oligonucleotide
  Sense Strand Starting at position 346 of SEQ ID NO: 316732
ugcugaauugaggaguuua

SEQ ID NO: 346066 - RNA, 19 nt, Artificial Sequence
  Description of Artificial Sequence: Synthetic oligonucleotide
  Antisense Strand to SEQ ID NO: 346065
uaaacuccucaauucagca

SEQ ID NO: 346067 - RNA, 19 nt, Artificial Sequence
  Description of Artificial Sequence: Synthetic oligonucleotide
  Sense Strand Starting at position 346 of SEQ ID NO: 317136
ucuggagaccgaggaguuu

SEQ ID NO: 346068 - RNA, 19 nt, Artificial Sequence
  Description of Artificial Sequence: Synthetic oligonucleotide
  Antisense Strand to SEQ ID NO: 346067
aaacuccucggucuccaga

SEQ ID NO: 346069 - RNA, 19 nt, Artificial Sequence
  Description of Artificial Sequence: Synthetic oligonucleotide
  Sense Strand Starting at position 346 of SEQ ID NO: 317269
ugccucuaaggugaaauua

SEQ ID NO: 346070 - RNA, 19 nt, Artificial Sequence
  Description of Artificial Sequence: Synthetic oligonucleotide
  Antisense Strand to SEQ ID NO: 346069
uaauuucaccuuagaggca

SEQ ID NO: 346071 - RNA, 19 nt, Artificial Sequence
  Description of Artificial Sequence: Synthetic oligonucleotide
  Sense Strand Starting at position 346 of SEQ ID NO: 317277
aggugaaauuacuugagug

SEQ ID NO: 346072 - RNA, 19 nt, Artificial Sequence
  Description of Artificial Sequence: Synthetic oligonucleotide
  Antisense Strand to SEQ ID NO: 346071
cacucaaguaauuucaccu

SEQ ID NO: 346073 - RNA, 19 nt, Artificial Sequence
  Description of Artificial Sequence: Synthetic oligonucleotide
  Sense Strand Starting at position 346 of SEQ ID NO: 317279
gugaaauuacuugagugcu

SEQ ID NO: 346074 - RNA, 19 nt, Artificial Sequence
  Description of Artificial Sequence: Synthetic oligonucleotide
  Antisense Strand to SEQ ID NO: 346073
agcacucaaguaauuucac

SEQ ID NO: 346075 - RNA, 19 nt, Artificial Sequence
  Description of Artificial Sequence: Synthetic oligonucleotide
  Sense Strand Starting at position 346 of SEQ ID NO: 317312
ccuauuagaccuuagugca

SEQ ID NO: 346076 - RNA, 19 nt, Artificial Sequence
  Description of Artificial Sequence: Synthetic oligonucleotide
  Antisense Strand to SEQ ID NO: 346075
ugcacuaaggucuaauagg

SEQ ID NO: 346077 - RNA, 19 nt, Artificial Sequence
  Description of Artificial Sequence: Synthetic oligonucleotide
  Sense Strand Starting at position 346 of SEQ ID NO: 317661
ggguguaaagaugauuagu

SEQ ID NO: 346078 - RNA, 19 nt, Artificial Sequence
  Description of Artificial Sequence: Synthetic oligonucleotide
  Antisense Strand to SEQ ID NO: 346077
acuaaucaucuuuacaccc

SEQ ID NO: 346079 - RNA, 19 nt, Artificial Sequence
  Description of Artificial Sequence: Synthetic oligonucleotide
  Sense Strand Starting at position 346 of SEQ ID NO: 317760
auugaacuuggagguguaa

SEQ ID NO: 346080 - RNA, 19 nt, Artificial Sequence
  Description of Artificial Sequence: Synthetic oligonucleotide
  Antisense Strand to SEQ ID NO: 346079
uuacaccuccaaguucaau

SEQ ID NO: 346081 - RNA, 19 nt, Artificial Sequence
  Description of Artificial Sequence: Synthetic oligonucleotide
  Sense Strand Starting at position 346 of SEQ ID NO: 318032
ggacaauaucagugaaagu

SEQ ID NO: 346082 - RNA, 19 nt, Artificial Sequence
  Description of Artificial Sequence: Synthetic oligonucleotide
  Antisense Strand to SEQ ID NO: 346081
acuuucacugauauugucc

SEQ ID NO: 346083 - RNA, 19 nt, Artificial Sequence
  Description of Artificial Sequence: Synthetic oligonucleotide
  Sense Strand Starting at position 346 of SEQ ID NO: 318042
agugaaagucagcaguaga

SEQ ID NO: 346084 - RNA, 19 nt, Artificial Sequence
  Description of Artificial Sequence: Synthetic oligonucleotide
  Antisense Strand to SEQ ID NO: 346083
ucuacugcugacuuucacu

SEQ ID NO: 346085 - RNA, 19 nt, Artificial Sequence
  Description of Artificial Sequence: Synthetic oligonucleotide
  Sense Strand Starting at position 346 of SEQ ID NO: 318224
ugcaguuauagggaagcua

SEQ ID NO: 346086 - RNA, 19 nt, Artificial Sequence
  Description of Artificial Sequence: Synthetic oligonucleotide
  Antisense Strand to SEQ ID NO: 346085
uagcuucccuauaacugca

SEQ ID NO: 346087 - RNA, 19 nt, Artificial Sequence
  Description of Artificial Sequence: Synthetic oligonucleotide
  Sense Strand Starting at position 346 of SEQ ID NO: 318246
cuuguuugacuaugaugga

SEQ ID NO: 346088 - RNA, 19 nt, Artificial Sequence
  Description of Artificial Sequence: Synthetic oligonucleotide
  Antisense Strand to SEQ ID NO: 346087
uccaucauagucaaacaag

SEQ ID NO: 346089 - RNA, 19 nt, Artificial Sequence
  Description of Artificial Sequence: Synthetic oligonucleotide
  Sense Strand Starting at position 346 of SEQ ID NO: 318458
gcuuauggagguuaguaua

SEQ ID NO: 346090 - RNA, 19 nt, Artificial Sequence
  Description of Artificial Sequence: Synthetic oligonucleotide
  Antisense Strand to SEQ ID NO: 346089
uauacuaaccuccauaagc

SEQ ID NO: 346091 - RNA, 19 nt, Artificial Sequence
  Description of Artificial Sequence: Synthetic oligonucleotide
  Sense Strand Starting at position 346 of SEQ ID NO: 318469
uuaguauaaugucugaaag

SEQ ID NO: 346092 - RNA, 19 nt, Artificial Sequence
  Description of Artificial Sequence: Synthetic oligonucleotide
  Antisense Strand to SEQ ID NO: 346091
cuuucagacauuauacuaa

SEQ ID NO: 346093 - RNA, 19 nt, Artificial Sequence
  Description of Artificial Sequence: Synthetic oligonucleotide
  Sense Strand Starting at position 346 of SEQ ID NO: 318510
acccaagauuuggaucuaa

SEQ ID NO: 346094 - RNA, 19 nt, Artificial Sequence
  Description of Artificial Sequence: Synthetic oligonucleotide
  Antisense Strand to SEQ ID NO: 346093
uuagauccaaaucuugggu

SEQ ID NO: 346095 - RNA, 19 nt, Artificial Sequence
  Description of Artificial Sequence: Synthetic oligonucleotide
  Sense Strand Starting at position 346 of SEQ ID NO: 318824
gauguaagaucuuugaagu

SEQ ID NO: 346096 - RNA, 19 nt, Artificial Sequence
  Description of Artificial Sequence: Synthetic oligonucleotide
  Antisense Strand to SEQ ID NO: 346095
acuucaaagaucuuacauc

SEQ ID NO: 346097 - RNA, 19 nt, Artificial Sequence
  Description of Artificial Sequence: Synthetic oligonucleotide
  Sense Strand Starting at position 346 of SEQ ID NO: 318825
auguaagaucuuugaagug

SEQ ID NO: 346098 - RNA, 19 nt, Artificial Sequence
  Description of Artificial Sequence: Synthetic oligonucleotide
  Antisense Strand to SEQ ID NO: 346097
cacuucaaagaucuuacau

SEQ ID NO: 346099 - RNA, 19 nt, Artificial Sequence
  Description of Artificial Sequence: Synthetic oligonucleotide
  Sense Strand Starting at position 346 of SEQ ID NO: 318837
ugaagugugaguuaaguua

SEQ ID NO: 346100 - RNA, 19 nt, Artificial Sequence
  Description of Artificial Sequence: Synthetic oligonucleotide
  Antisense Strand to SEQ ID NO: 346099
uaacuuaacucacacuuca

SEQ ID NO: 346101 - RNA, 19 nt, Artificial Sequence
  Description of Artificial Sequence: Synthetic oligonucleotide
  Sense Strand Starting at position 346 of SEQ ID NO: 318889
augacugguuuccuauaag

SEQ ID NO: 346102 - RNA, 19 nt, Artificial Sequence
  Description of Artificial Sequence: Synthetic oligonucleotide
  Antisense Strand to SEQ ID NO: 346101
cuuauaggaaaccagucau

SEQ ID NO: 346103 - RNA, 19 nt, Artificial Sequence
  Description of Artificial Sequence: Synthetic oligonucleotide
  Sense Strand Starting at position 346 of SEQ ID NO: 319132
uagagagguuagguuccau

SEQ ID NO: 346104 - RNA, 19 nt, Artificial Sequence
  Description of Artificial Sequence: Synthetic oligonucleotide
  Antisense Strand to SEQ ID NO: 346103
auggaaccuaaccucucua

SEQ ID NO: 346105 - RNA, 19 nt, Artificial Sequence
  Description of Artificial Sequence: Synthetic oligonucleotide
  Sense Strand Starting at position 346 of SEQ ID NO: 319165
auaacuuauugggcauaaa

SEQ ID NO: 346106 - RNA, 19 nt, Artificial Sequence
  Description of Artificial Sequence: Synthetic oligonucleotide
  Antisense Strand to SEQ ID NO: 346105
uuuaugcccaauaaguuau

SEQ ID NO: 346107 - RNA, 19 nt, Artificial Sequence
  Description of Artificial Sequence: Synthetic oligonucleotide
  Sense Strand Starting at position 346 of SEQ ID NO: 319168
acuuauugggcauaaaugu

SEQ ID NO: 346108 - RNA, 19 nt, Artificial Sequence
  Description of Artificial Sequence: Synthetic oligonucleotide
  Antisense Strand to SEQ ID NO: 346107
acauuuaugcccaauaagu

SEQ ID NO: 346109 - RNA, 19 nt, Artificial Sequence
  Description of Artificial Sequence: Synthetic oligonucleotide
  Sense Strand Starting at position 346 of SEQ ID NO: 319174
ugggcauaaauguauuagu

SEQ ID NO: 346110 - RNA, 19 nt, Artificial Sequence
  Description of Artificial Sequence: Synthetic oligonucleotide
  Antisense Strand to SEQ ID NO: 346109
acuaauacauuuaugccca

SEQ ID NO: 346111 - RNA, 19 nt, Artificial Sequence
  Description of Artificial Sequence: Synthetic oligonucleotide
  Sense Strand Starting at position 346 of SEQ ID NO: 319210
uugaacaugcccuaagacu

SEQ ID NO: 346112 - RNA, 19 nt, Artificial Sequence
  Description of Artificial Sequence: Synthetic oligonucleotide
  Antisense Strand to SEQ ID NO: 346111
agucuuagggcauguucaa

SEQ ID NO: 346113 - RNA, 19 nt, Artificial Sequence
  Description of Artificial Sequence: Synthetic oligonucleotide
  Sense Strand Starting at position 347 of SEQ ID NO: 315848
guggguuggcgauggagaa

SEQ ID NO: 346114 - RNA, 19 nt, Artificial Sequence
  Description of Artificial Sequence: Synthetic oligonucleotide
  Antisense Strand to SEQ ID NO: 346113
uucuccaucgccaacccac

SEQ ID NO: 346115 - RNA, 19 nt, Artificial Sequence
  Description of Artificial Sequence: Synthetic oligonucleotide
  Sense Strand Starting at position 347 of SEQ ID NO: 315849
uggguuggcgauggagaaa

SEQ ID NO: 346116 - RNA, 19 nt, Artificial Sequence
  Description of Artificial Sequence: Synthetic oligonucleotide
  Antisense Strand to SEQ ID NO: 346115
uuucuccaucgccaaccca

SEQ ID NO: 346117 - RNA, 19 nt, Artificial Sequence
  Description of Artificial Sequence: Synthetic oligonucleotide
  Sense Strand Starting at position 347 of SEQ ID NO: 315878
uauuaagagcucuaaagug

SEQ ID NO: 346118 - RNA, 19 nt, Artificial Sequence
  Description of Artificial Sequence: Synthetic oligonucleotide
  Antisense Strand to SEQ ID NO: 346117
cacuuuagagcucuuaaua

SEQ ID NO: 346119 - RNA, 19 nt, Artificial Sequence
  Description of Artificial Sequence: Synthetic oligonucleotide
  Sense Strand Starting at position 347 of SEQ ID NO: 315887
cucuaaagugugcggauua

SEQ ID NO: 346120 - RNA, 19 nt, Artificial Sequence
  Description of Artificial Sequence: Synthetic oligonucleotide
  Antisense Strand to SEQ ID NO: 346119
uaauccgcacacuuuagag

SEQ ID NO: 346121 - RNA, 19 nt, Artificial Sequence
  Description of Artificial Sequence: Synthetic oligonucleotide
  Sense Strand Starting at position 347 of SEQ ID NO: 315892
aagugugcggauuaaguuu

SEQ ID NO: 346122 - RNA, 19 nt, Artificial Sequence
  Description of Artificial Sequence: Synthetic oligonucleotide
  Antisense Strand to SEQ ID NO: 346121
aaacuuaauccgcacacuu

SEQ ID NO: 346123 - RNA, 19 nt, Artificial Sequence
  Description of Artificial Sequence: Synthetic oligonucleotide
  Sense Strand Starting at position 347 of SEQ ID NO: 315927
gcuuaaugacaauggaaca

SEQ ID NO: 346124 - RNA, 19 nt, Artificial Sequence
  Description of Artificial Sequence: Synthetic oligonucleotide
  Antisense Strand to SEQ ID NO: 346123
uguuccauugucauuaagc

SEQ ID NO: 346125 - RNA, 19 nt, Artificial Sequence
  Description of Artificial Sequence: Synthetic oligonucleotide
  Sense Strand Starting at position 347 of SEQ ID NO: 315946
uuguccaccgauuaaacau

SEQ ID NO: 346126 - RNA, 19 nt, Artificial Sequence
  Description of Artificial Sequence: Synthetic oligonucleotide
  Antisense Strand to SEQ ID NO: 346125
auguuuaaucgguggacaa

SEQ ID NO: 346127 - RNA, 19 nt, Artificial Sequence
  Description of Artificial Sequence: Synthetic oligonucleotide
  Sense Strand Starting at position 347 of SEQ ID NO: 315953
ccgauuaaacaucauguuu

SEQ ID NO: 346128 - RNA, 19 nt, Artificial Sequence
  Description of Artificial Sequence: Synthetic oligonucleotide
  Antisense Strand to SEQ ID NO: 346127
aaacaugauguuuaaucgg

SEQ ID NO: 346129 - RNA, 19 nt, Artificial Sequence
  Description of Artificial Sequence: Synthetic oligonucleotide
  Sense Strand Starting at position 347 of SEQ ID NO: 316477
uggucacauuguuuaucuu

SEQ ID NO: 346130 - RNA, 19 nt, Artificial Sequence
  Description of Artificial Sequence: Synthetic oligonucleotide
  Antisense Strand to SEQ ID NO: 346129
aagauaaacaaugugacca

SEQ ID NO: 346131 - RNA, 19 nt, Artificial Sequence
  Description of Artificial Sequence: Synthetic oligonucleotide
  Sense Strand Starting at position 347 of SEQ ID NO: 316692
gaaauuaaguuagaaugag

SEQ ID NO: 346132 - RNA, 19 nt, Artificial Sequence
  Description of Artificial Sequence: Synthetic oligonucleotide
  Antisense Strand to SEQ ID NO: 346131
cucauucuaacuuaauuuc

SEQ ID NO: 346133 - RNA, 19 nt, Artificial Sequence
  Description of Artificial Sequence: Synthetic oligonucleotide
  Sense Strand Starting at position 347 of SEQ ID NO: 317435
cucccuugugaguagacua

SEQ ID NO: 346134 - RNA, 19 nt, Artificial Sequence
  Description of Artificial Sequence: Synthetic oligonucleotide
  Antisense Strand to SEQ ID NO: 346133
uagucuacucacaagggag

SEQ ID NO: 346135 - RNA, 19 nt, Artificial Sequence
  Description of Artificial Sequence: Synthetic oligonucleotide
  Sense Strand Starting at position 347 of SEQ ID NO: 317440
uugugaguagacuaugcaa

SEQ ID NO: 346136 - RNA, 19 nt, Artificial Sequence
  Description of Artificial Sequence: Synthetic oligonucleotide
  Antisense Strand to SEQ ID NO: 346135
uugcauagucuacucacaa

SEQ ID NO: 346137 - RNA, 19 nt, Artificial Sequence
  Description of Artificial Sequence: Synthetic oligonucleotide
  Sense Strand Starting at position 347 of SEQ ID NO: 317442
gugaguagacuaugcaaag

SEQ ID NO: 346138 - RNA, 19 nt, Artificial Sequence
  Description of Artificial Sequence: Synthetic oligonucleotide
  Antisense Strand to SEQ ID NO: 346137
cuuugcauagucuacucac

SEQ ID NO: 346139 - RNA, 19 nt, Artificial Sequence
  Description of Artificial Sequence: Synthetic oligonucleotide
  Sense Strand Starting at position 347 of SEQ ID NO: 317443
ugaguagacuaugcaaaga

SEQ ID NO: 346140 - RNA, 19 nt, Artificial Sequence
  Description of Artificial Sequence: Synthetic oligonucleotide
  Antisense Strand to SEQ ID NO: 346139
ucuuugcauagucuacuca

SEQ ID NO: 346141 - RNA, 19 nt, Artificial Sequence
  Description of Artificial Sequence: Synthetic oligonucleotide
  Sense Strand Starting at position 347 of SEQ ID NO: 317460
gaaaguaaguuucuccugu

SEQ ID NO: 346142 - RNA, 19 nt, Artificial Sequence
  Description of Artificial Sequence: Synthetic oligonucleotide
  Antisense Strand to SEQ ID NO: 346141
acaggagaaacuuacuuuc

SEQ ID NO: 346143 - RNA, 19 nt, Artificial Sequence
  Description of Artificial Sequence: Synthetic oligonucleotide
  Sense Strand Starting at position 347 of SEQ ID NO: 317462
aaguaaguuucuccugugu

SEQ ID NO: 346144 - RNA, 19 nt, Artificial Sequence
  Description of Artificial Sequence: Synthetic oligonucleotide
  Antisense Strand to SEQ ID NO: 346143
acacaggagaaacuuacuu

SEQ ID NO: 346145 - RNA, 19 nt, Artificial Sequence
  Description of Artificial Sequence: Synthetic oligonucleotide
  Sense Strand Starting at position 347 of SEQ ID NO: 317479
guuucuuauucuuuguaac

SEQ ID NO: 346146 - RNA, 19 nt, Artificial Sequence
  Description of Artificial Sequence: Synthetic oligonucleotide
  Antisense Strand to SEQ ID NO: 346145
guuacaaagaauaagaaac

SEQ ID NO: 346147 - RNA, 19 nt, Artificial Sequence
  Description of Artificial Sequence: Synthetic oligonucleotide
  Sense Strand Starting at position 347 of SEQ ID NO: 317504
ugcuguuaccacuauuauu

SEQ ID NO: 346148 - RNA, 19 nt, Artificial Sequence
  Description of Artificial Sequence: Synthetic oligonucleotide
  Antisense Strand to SEQ ID NO: 346147
aauaauagugguaacagca

SEQ ID NO: 346149 - RNA, 19 nt, Artificial Sequence
  Description of Artificial Sequence: Synthetic oligonucleotide
  Sense Strand Starting at position 347 of SEQ ID NO: 317597
ugguaauugugaccuguua

SEQ ID NO: 346150 - RNA, 19 nt, Artificial Sequence
  Description of Artificial Sequence: Synthetic oligonucleotide
  Antisense Strand to SEQ ID NO: 346149
uaacaggucacaauuacca

SEQ ID NO: 346151 - RNA, 19 nt, Artificial Sequence
  Description of Artificial Sequence: Synthetic oligonucleotide
  Sense Strand Starting at position 347 of SEQ ID NO: 317599
guaauugugaccuguuacc

SEQ ID NO: 346152 - RNA, 19 nt, Artificial Sequence
  Description of Artificial Sequence: Synthetic oligonucleotide
  Antisense Strand to SEQ ID NO: 346151
gguaacaggucacaauuac

SEQ ID NO: 346153 - RNA, 19 nt, Artificial Sequence
  Description of Artificial Sequence: Synthetic oligonucleotide
  Sense Strand Starting at position 347 of SEQ ID NO: 317704
guuucuugcugcccaaaga

SEQ ID NO: 346154 - RNA, 19 nt, Artificial Sequence
  Description of Artificial Sequence: Synthetic oligonucleotide
  Antisense Strand to SEQ ID NO: 346153
ucuuugggcagcaagaaac

SEQ ID NO: 346155 - RNA, 19 nt, Artificial Sequence
  Description of Artificial Sequence: Synthetic oligonucleotide
  Sense Strand Starting at position 347 of SEQ ID NO: 317894
ggaccacuguggucugaag

SEQ ID NO: 346156 - RNA, 19 nt, Artificial Sequence
  Description of Artificial Sequence: Synthetic oligonucleotide
  Antisense Strand to SEQ ID NO: 346155
cuucagaccacaguggucc

SEQ ID NO: 346157 - RNA, 19 nt, Artificial Sequence
  Description of Artificial Sequence: Synthetic oligonucleotide
  Sense Strand Starting at position 347 of SEQ ID NO: 317986
ggcacuguccagcagaaau

SEQ ID NO: 346158 - RNA, 19 nt, Artificial Sequence
  Description of Artificial Sequence: Synthetic oligonucleotide
  Antisense Strand to SEQ ID NO: 346157
auuucugcuggacagugcc

SEQ ID NO: 346159 - RNA, 19 nt, Artificial Sequence
  Description of Artificial Sequence: Synthetic oligonucleotide
  Sense Strand Starting at position 347 of SEQ ID NO: 318349
cuugaagagcagugaagau

SEQ ID NO: 346160 - RNA, 19 nt, Artificial Sequence
  Description of Artificial Sequence: Synthetic oligonucleotide
  Antisense Strand to SEQ ID NO: 346159
aucuucacugcucuucaag

SEQ ID NO: 346161 - RNA, 19 nt, Artificial Sequence
  Description of Artificial Sequence: Synthetic oligonucleotide
  Sense Strand Starting at position 347 of SEQ ID NO: 318482
ggcagagaggccugagaua

SEQ ID NO: 346162 - RNA, 19 nt, Artificial Sequence
  Description of Artificial Sequence: Synthetic oligonucleotide
  Antisense Strand to SEQ ID NO: 346161
uaucucaggccucucugcc

SEQ ID NO: 346163 - RNA, 19 nt, Artificial Sequence
  Description of Artificial Sequence: Synthetic oligonucleotide
  Sense Strand Starting at position 347 of SEQ ID NO: 318516
gcugguaagacuggaaaug

SEQ ID NO: 346164 - RNA, 19 nt, Artificial Sequence
  Description of Artificial Sequence: Synthetic oligonucleotide
  Antisense Strand to SEQ ID NO: 346163
cauuuccagucuuaccagc

SEQ ID NO: 346165 - RNA, 19 nt, Artificial Sequence
  Description of Artificial Sequence: Synthetic oligonucleotide
  Sense Strand Starting at position 347 of SEQ ID NO: 318527
uggaaaugggcccgucuuu

SEQ ID NO: 346166 - RNA, 19 nt, Artificial Sequence
  Description of Artificial Sequence: Synthetic oligonucleotide
  Antisense Strand to SEQ ID NO: 346165
aaagacgggcccauuucca

SEQ ID NO: 346167 - RNA, 19 nt, Artificial Sequence
  Description of Artificial Sequence: Synthetic oligonucleotide
  Sense Strand Starting at position 347 of SEQ ID NO: 318538
ccgucuuuacugugaacaa

SEQ ID NO: 346168 - RNA, 19 nt, Artificial Sequence
  Description of Artificial Sequence: Synthetic oligonucleotide
  Antisense Strand to SEQ ID NO: 346167
uuguucacaguaaagacgg

SEQ ID NO: 346169 - RNA, 19 nt, Artificial Sequence
  Description of Artificial Sequence: Synthetic oligonucleotide
  Sense Strand Starting at position 347 of SEQ ID NO: 318548
ugugaacaauuuggcaaua

SEQ ID NO: 346170 - RNA, 19 nt, Artificial Sequence
  Description of Artificial Sequence: Synthetic oligonucleotide
  Antisense Strand to SEQ ID NO: 346169
uauugccaaauuguucaca

SEQ ID NO: 346171 - RNA, 19 nt, Artificial Sequence
  Description of Artificial Sequence: Synthetic oligonucleotide
  Sense Strand Starting at position 347 of SEQ ID NO: 318550
ugaacaauuuggcaauacu

SEQ ID NO: 346172 - RNA, 19 nt, Artificial Sequence
  Description of Artificial Sequence: Synthetic oligonucleotide
  Antisense Strand to SEQ ID NO: 346171
aguauugccaaauuguuca

SEQ ID NO: 346173 - RNA, 19 nt, Artificial Sequence
  Description of Artificial Sequence: Synthetic oligonucleotide
  Sense Strand Starting at position 347 of SEQ ID NO: 318604
gaguuccauuucuaggaau

SEQ ID NO: 346174 - RNA, 19 nt, Artificial Sequence
  Description of Artificial Sequence: Synthetic oligonucleotide
  Antisense Strand to SEQ ID NO: 346173
auuccuagaaauggaacuc

SEQ ID NO: 346175 - RNA, 19 nt, Artificial Sequence
  Description of Artificial Sequence: Synthetic oligonucleotide
  Sense Strand Starting at position 347 of SEQ ID NO: 318617
aggaauuugucccauugau

SEQ ID NO: 346176 - RNA, 19 nt, Artificial Sequence
  Description of Artificial Sequence: Synthetic oligonucleotide
  Antisense Strand to SEQ ID NO: 346175
aucaaugggacaaauuccu

SEQ ID NO: 346177 - RNA, 19 nt, Artificial Sequence
  Description of Artificial Sequence: Synthetic oligonucleotide
  Sense Strand Starting at position 347 of SEQ ID NO: 318649
ugugaagugaccuguguac

SEQ ID NO: 346178 - RNA, 19 nt, Artificial Sequence
  Description of Artificial Sequence: Synthetic oligonucleotide
  Antisense Strand to SEQ ID NO: 346177
guacacaggucacuucaca

SEQ ID NO: 346179 - RNA, 19 nt, Artificial Sequence
  Description of Artificial Sequence: Synthetic oligonucleotide
  Sense Strand Starting at position 347 of SEQ ID NO: 318651
ugaagugaccuguguacaa

SEQ ID NO: 346180 - RNA, 19 nt, Artificial Sequence
  Description of Artificial Sequence: Synthetic oligonucleotide
  Antisense Strand to SEQ ID NO: 346179
uuguacacaggucacuuca

SEQ ID NO: 346181 - RNA, 19 nt, Artificial Sequence
  Description of Artificial Sequence: Synthetic oligonucleotide
  Sense Strand Starting at position 347 of SEQ ID NO: 318655
gugaccuguguacaaagau

SEQ ID NO: 346182 - RNA, 19 nt, Artificial Sequence
  Description of Artificial Sequence: Synthetic oligonucleotide
  Antisense Strand to SEQ ID NO: 346181
aucuuuguacacaggucac

SEQ ID NO: 346183 - RNA, 19 nt, Artificial Sequence
  Description of Artificial Sequence: Synthetic oligonucleotide
  Sense Strand Starting at position 347 of SEQ ID NO: 318664
guacaaagauguucuuuac

SEQ ID NO: 346184 - RNA, 19 nt, Artificial Sequence
  Description of Artificial Sequence: Synthetic oligonucleotide
  Antisense Strand to SEQ ID NO: 346183
guaaagaacaucuuuguac

SEQ ID NO: 346185 - RNA, 19 nt, Artificial Sequence
  Description of Artificial Sequence: Synthetic oligonucleotide
  Sense Strand Starting at position 347 of SEQ ID NO: 318737
ggacuagcaguuuaauaau

SEQ ID NO: 346186 - RNA, 19 nt, Artificial Sequence
  Description of Artificial Sequence: Synthetic oligonucleotide
  Antisense Strand to SEQ ID NO: 346185
auuauuaaacugcuagucc

SEQ ID NO: 346187 - RNA, 19 nt, Artificial Sequence
  Description of Artificial Sequence: Synthetic oligonucleotide
  Sense Strand Starting at position 347 of SEQ ID NO: 318885
cuacuaccuuucguguaaa

SEQ ID NO: 346188 - RNA, 19 nt, Artificial Sequence
  Description of Artificial Sequence: Synthetic oligonucleotide
  Antisense Strand to SEQ ID NO: 346187
uuuacacgaaagguaguag

SEQ ID NO: 346189 - RNA, 19 nt, Artificial Sequence
  Description of Artificial Sequence: Synthetic oligonucleotide
  Sense Strand Starting at position 347 of SEQ ID NO: 318933
gcugauugacucuggacag

SEQ ID NO: 346190 - RNA, 19 nt, Artificial Sequence
  Description of Artificial Sequence: Synthetic oligonucleotide
  Antisense Strand to SEQ ID NO: 346189
cuguccagagucaaucagc

SEQ ID NO: 346191 - RNA, 19 nt, Artificial Sequence
  Description of Artificial Sequence: Synthetic oligonucleotide
  Sense Strand Starting at position 347 of SEQ ID NO: 319037
augucaaacuagguacauu

SEQ ID NO: 346192 - RNA, 19 nt, Artificial Sequence
  Description of Artificial Sequence: Synthetic oligonucleotide
  Antisense Strand to SEQ ID NO: 346191
aauguaccuaguuugacau

SEQ ID NO: 346193 - RNA, 19 nt, Artificial Sequence
  Description of Artificial Sequence: Synthetic oligonucleotide
  Sense Strand Starting at position 348 of SEQ ID NO: 315319
ucguguucucuccaucuaa

SEQ ID NO: 346194 - RNA, 19 nt, Artificial Sequence
  Description of Artificial Sequence: Synthetic oligonucleotide
  Antisense Strand to SEQ ID NO: 346193
uuagauggagagaacacga

SEQ ID NO: 346195 - RNA, 19 nt, Artificial Sequence
  Description of Artificial Sequence: Synthetic oligonucleotide
  Sense Strand Starting at position 348 of SEQ ID NO: 315527
guaacagcuaagugguaaa

SEQ ID NO: 346196 - RNA, 19 nt, Artificial Sequence
  Description of Artificial Sequence: Synthetic oligonucleotide
  Antisense Strand to SEQ ID NO: 346195
uuuaccacuuagcuguuac

SEQ ID NO: 346197 - RNA, 19 nt, Artificial Sequence
  Description of Artificial Sequence: Synthetic oligonucleotide
  Sense Strand Starting at position 348 of SEQ ID NO: 315530
acagcuaagugguaaagaa

SEQ ID NO: 346198 - RNA, 19 nt, Artificial Sequence
  Description of Artificial Sequence: Synthetic oligonucleotide
  Antisense Strand to SEQ ID NO: 346197
uucuuuaccacuuagcugu

SEQ ID NO: 346199 - RNA, 19 nt, Artificial Sequence
  Description of Artificial Sequence: Synthetic oligonucleotide
  Sense Strand Starting at position 348 of SEQ ID NO: 315573
gcaccucuggguuggcaaa

SEQ ID NO: 346200 - RNA, 19 nt, Artificial Sequence
  Description of Artificial Sequence: Synthetic oligonucleotide
  Antisense Strand to SEQ ID NO: 346199
uuugccaacccagaggugc

SEQ ID NO: 346201 - RNA, 19 nt, Artificial Sequence
  Description of Artificial Sequence: Synthetic oligonucleotide
  Sense Strand Starting at position 348 of SEQ ID NO: 315777
uggcuccacuucucuagaa

SEQ ID NO: 346202 - RNA, 19 nt, Artificial Sequence
  Description of Artificial Sequence: Synthetic oligonucleotide
  Antisense Strand to SEQ ID NO: 346201
uucuagagaaguggagcca

SEQ ID NO: 346203 - RNA, 19 nt, Artificial Sequence
  Description of Artificial Sequence: Synthetic oligonucleotide
  Sense Strand Starting at position 348 of SEQ ID NO: 316139
gcggcaauucuccggugga

SEQ ID NO: 346204 - RNA, 19 nt, Artificial Sequence
  Description of Artificial Sequence: Synthetic oligonucleotide
  Antisense Strand to SEQ ID NO: 346203
uccaccggagaauugccgc

SEQ ID NO: 346205 - RNA, 19 nt, Artificial Sequence
  Description of Artificial Sequence: Synthetic oligonucleotide
  Sense Strand Starting at position 348 of SEQ ID NO: 316140
cggcaauucuccgguggaa

SEQ ID NO: 346206 - RNA, 19 nt, Artificial Sequence
  Description of Artificial Sequence: Synthetic oligonucleotide
  Antisense Strand to SEQ ID NO: 346205
uuccaccggagaauugccg

SEQ ID NO: 346207 - RNA, 19 nt, Artificial Sequence
  Description of Artificial Sequence: Synthetic oligonucleotide
  Sense Strand Starting at position 348 of SEQ ID NO: 316142
gcaauucuccgguggaaga

SEQ ID NO: 346208 - RNA, 19 nt, Artificial Sequence
  Description of Artificial Sequence: Synthetic oligonucleotide
  Antisense Strand to SEQ ID NO: 346207
ucuuccaccggagaauugc

SEQ ID NO: 346209 - RNA, 19 nt, Artificial Sequence
  Description of Artificial Sequence: Synthetic oligonucleotide
  Sense Strand Starting at position 348 of SEQ ID NO: 316143
caauucuccgguggaagaa

SEQ ID NO: 346210 - RNA, 19 nt, Artificial Sequence
  Description of Artificial Sequence: Synthetic oligonucleotide
  Antisense Strand to SEQ ID NO: 346209
uucuuccaccggagaauug

SEQ ID NO: 346211 - RNA, 19 nt, Artificial Sequence
  Description of Artificial Sequence: Synthetic oligonucleotide
  Sense Strand Starting at position 348 of SEQ ID NO: 316159
gaagcaauucccggaucca

SEQ ID NO: 346212 - RNA, 19 nt, Artificial Sequence
  Description of Artificial Sequence: Synthetic oligonucleotide
  Antisense Strand to SEQ ID NO: 346211
uggauccgggaauugcuuc

SEQ ID NO: 346213 - RNA, 19 nt, Artificial Sequence
  Description of Artificial Sequence: Synthetic oligonucleotide
  Sense Strand Starting at position 348 of SEQ ID NO: 316215
ugaggauggugcuaugaaa

SEQ ID NO: 346214 - RNA, 19 nt, Artificial Sequence
  Description of Artificial Sequence: Synthetic oligonucleotide
  Antisense Strand to SEQ ID NO: 346213
uuucauagcaccauccuca

SEQ ID NO: 346215 - RNA, 19 nt, Artificial Sequence
  Description of Artificial Sequence: Synthetic oligonucleotide
  Sense Strand Starting at position 348 of SEQ ID NO: 316264
acacgaauucuaggcugga

SEQ ID NO: 346216 - RNA, 19 nt, Artificial Sequence
  Description of Artificial Sequence: Synthetic oligonucleotide
  Antisense Strand to SEQ ID NO: 346215
uccagccuagaauucgugu

SEQ ID NO: 346217 - RNA, 19 nt, Artificial Sequence
  Description of Artificial Sequence: Synthetic oligonucleotide
  Sense Strand Starting at position 348 of SEQ ID NO: 316267
cgaauucuaggcuggacuu

SEQ ID NO: 346218 - RNA, 19 nt, Artificial Sequence
  Description of Artificial Sequence: Synthetic oligonucleotide
  Antisense Strand to SEQ ID NO: 346217
aaguccagccuagaauucg

SEQ ID NO: 346219 - RNA, 19 nt, Artificial Sequence
  Description of Artificial Sequence: Synthetic oligonucleotide
  Sense Strand Starting at position 348 of SEQ ID NO: 316425
cucgaaucgugccgagaaa

SEQ ID NO: 346220 - RNA, 19 nt, Artificial Sequence
  Description of Artificial Sequence: Synthetic oligonucleotide
  Antisense Strand to SEQ ID NO: 346219
uuucucggcacgauucgag

SEQ ID NO: 346221 - RNA, 19 nt, Artificial Sequence
  Description of Artificial Sequence: Synthetic oligonucleotide
  Sense Strand Starting at position 348 of SEQ ID NO: 316426
ucgaaucgugccgagaaag

SEQ ID NO: 346222 - RNA, 19 nt, Artificial Sequence
  Description of Artificial Sequence: Synthetic oligonucleotide
  Antisense Strand to SEQ ID NO: 346221
cuuucucggcacgauucga

SEQ ID NO: 346223 - RNA, 19 nt, Artificial Sequence
  Description of Artificial Sequence: Synthetic oligonucleotide
  Sense Strand Starting at position 348 of SEQ ID NO: 316865
ccgggauggccagguugau

SEQ ID NO: 346224 - RNA, 19 nt, Artificial Sequence
  Description of Artificial Sequence: Synthetic oligonucleotide
  Antisense Strand to SEQ ID NO: 346223
aucaaccuggccaucccgg

SEQ ID NO: 346225 - RNA, 19 nt, Artificial Sequence
  Description of Artificial Sequence: Synthetic oligonucleotide
  Sense Strand Starting at position 348 of SEQ ID NO: 316877
gguugauggccgucucgau

SEQ ID NO: 346226 - RNA, 19 nt, Artificial Sequence
  Description of Artificial Sequence: Synthetic oligonucleotide
  Antisense Strand to SEQ ID NO: 346225
aucgagacggccaucaacc

SEQ ID NO: 346227 - RNA, 19 nt, Artificial Sequence
  Description of Artificial Sequence: Synthetic oligonucleotide
  Sense Strand Starting at position 348 of SEQ ID NO: 318006
ugggcagguguggagaaau

SEQ ID NO: 346228 - RNA, 19 nt, Artificial Sequence
  Description of Artificial Sequence: Synthetic oligonucleotide
  Antisense Strand to SEQ ID NO: 346227
auuucuccacaccugccca

SEQ ID NO: 346229 - RNA, 19 nt, Artificial Sequence
  Description of Artificial Sequence: Synthetic oligonucleotide
  Sense Strand Starting at position 348 of SEQ ID NO: 318053
ucgcgagcccuuuaagaaa

SEQ ID NO: 346230 - RNA, 19 nt, Artificial Sequence
  Description of Artificial Sequence: Synthetic oligonucleotide
  Antisense Strand to SEQ ID NO: 346229
uuucuuaaagggcucgcga

SEQ ID NO: 346231 - RNA, 19 nt, Artificial Sequence
  Description of Artificial Sequence: Synthetic oligonucleotide
  Sense Strand Starting at position 348 of SEQ ID NO: 318237
gccaauccuggccgaaaga

SEQ ID NO: 346232 - RNA, 19 nt, Artificial Sequence
  Description of Artificial Sequence: Synthetic oligonucleotide
  Antisense Strand to SEQ ID NO: 346231
ucuuucggccaggauuggc

SEQ ID NO: 346233 - RNA, 19 nt, Artificial Sequence
  Description of Artificial Sequence: Synthetic oligonucleotide
  Sense Strand Starting at position 348 of SEQ ID NO: 318557
gcuggucggcucugagaca

SEQ ID NO: 346234 - RNA, 19 nt, Artificial Sequence
  Description of Artificial Sequence: Synthetic oligonucleotide
  Antisense Strand to SEQ ID NO: 346233
ugucucagagccgaccagc

SEQ ID NO: 346235 - RNA, 19 nt, Artificial Sequence
  Description of Artificial Sequence: Synthetic oligonucleotide
  Sense Strand Starting at position 348 of SEQ ID NO: 318640
auuugagcuuuccgcuaac

SEQ ID NO: 346236 - RNA, 19 nt, Artificial Sequence
  Description of Artificial Sequence: Synthetic oligonucleotide
  Antisense Strand to SEQ ID NO: 346235
guuagcggaaagcucaaau

SEQ ID NO: 346237 - RNA, 19 nt, Artificial Sequence
  Description of Artificial Sequence: Synthetic oligonucleotide
  Sense Strand Starting at position 348 of SEQ ID NO: 318651
ccgcuaaccucugaccaga

SEQ ID NO: 346238 - RNA, 19 nt, Artificial Sequence
  Description of Artificial Sequence: Synthetic oligonucleotide
  Antisense Strand to SEQ ID NO: 346237
ucuggucagagguuagcgg

SEQ ID NO: 346239 - RNA, 19 nt, Artificial Sequence
  Description of Artificial Sequence: Synthetic oligonucleotide
  Sense Strand Starting at position 348 of SEQ ID NO: 318710
cuuucaagcgagggauagu

SEQ ID NO: 346240 - RNA, 19 nt, Artificial Sequence
  Description of Artificial Sequence: Synthetic oligonucleotide
  Antisense Strand to SEQ ID NO: 346239
acuaucccucgcuugaaag

SEQ ID NO: 346241 - RNA, 19 nt, Artificial Sequence
  Description of Artificial Sequence: Synthetic oligonucleotide
  Sense Strand Starting at position 348 of SEQ ID NO: 318719
gagggauagucuuucggaa

SEQ ID NO: 346242 - RNA, 19 nt, Artificial Sequence
  Description of Artificial Sequence: Synthetic oligonucleotide
  Antisense Strand to SEQ ID NO: 346241
uuccgaaagacuaucccuc

SEQ ID NO: 346243 - RNA, 19 nt, Artificial Sequence
  Description of Artificial Sequence: Synthetic oligonucleotide
  Sense Strand Starting at position 348 of SEQ ID NO: 318721
gggauagucuuucggaaga

SEQ ID NO: 346244 - RNA, 19 nt, Artificial Sequence
  Description of Artificial Sequence: Synthetic oligonucleotide
  Antisense Strand to SEQ ID NO: 346243
ucuuccgaaagacuauccc

SEQ ID NO: 346245 - RNA, 19 nt, Artificial Sequence
  Description of Artificial Sequence: Synthetic oligonucleotide
  Sense Strand Starting at position 348 of SEQ ID NO: 318723
gauagucuuucggaagagu

SEQ ID NO: 346246 - RNA, 19 nt, Artificial Sequence
  Description of Artificial Sequence: Synthetic oligonucleotide
  Antisense Strand to SEQ ID NO: 346245
acucuuccgaaagacuauc

SEQ ID NO: 346247 - RNA, 19 nt, Artificial Sequence
  Description of Artificial Sequence: Synthetic oligonucleotide
  Sense Strand Starting at position 348 of SEQ ID NO: 318726
agucuuucggaagaguuuc

SEQ ID NO: 346248 - RNA, 19 nt, Artificial Sequence
  Description of Artificial Sequence: Synthetic oligonucleotide
  Antisense Strand to SEQ ID NO: 346247
gaaacucuuccgaaagacu

SEQ ID NO: 346249 - RNA, 19 nt, Artificial Sequence
  Description of Artificial Sequence: Synthetic oligonucleotide
  Sense Strand Starting at position 348 of SEQ ID NO: 318757
agggcuguaucccaaagga

SEQ ID NO: 346250 - RNA, 19 nt, Artificial Sequence
  Description of Artificial Sequence: Synthetic oligonucleotide
  Antisense Strand to SEQ ID NO: 346249
uccuuugggauacagcccu

SEQ ID NO: 346251 - RNA, 19 nt, Artificial Sequence
  Description of Artificial Sequence: Synthetic oligonucleotide
  Sense Strand Starting at position 348 of SEQ ID NO: 318797
acauucucagagugugaaa

SEQ ID NO: 346252 - RNA, 19 nt, Artificial Sequence
  Description of Artificial Sequence: Synthetic oligonucleotide
  Antisense Strand to SEQ ID NO: 346251
uuucacacucugagaaugu

SEQ ID NO: 346253 - RNA, 19 nt, Artificial Sequence
  Description of Artificial Sequence: Synthetic oligonucleotide
  Sense Strand Starting at position 348 of SEQ ID NO: 318920
agguguguccugugaccuu

SEQ ID NO: 346254 - RNA, 19 nt, Artificial Sequence
  Description of Artificial Sequence: Synthetic oligonucleotide
  Antisense Strand to SEQ ID NO: 346253
aaggucacaggacacaccu

SEQ ID NO: 346255 - RNA, 19 nt, Artificial Sequence
  Description of Artificial Sequence: Synthetic oligonucleotide
  Sense Strand Starting at position 348 of SEQ ID NO: 318929
cugugaccuuaguaugguu

SEQ ID NO: 346256 - RNA, 19 nt, Artificial Sequence
  Description of Artificial Sequence: Synthetic oligonucleotide
  Antisense Strand to SEQ ID NO: 346255
aaccauacuaaggucacag

SEQ ID NO: 346257 - RNA, 19 nt, Artificial Sequence
  Description of Artificial Sequence: Synthetic oligonucleotide
  Sense Strand Starting at position 348 of SEQ ID NO: 319001
gcccaauccgucuaugaau

SEQ ID NO: 346258 - RNA, 19 nt, Artificial Sequence
  Description of Artificial Sequence: Synthetic oligonucleotide
  Antisense Strand to SEQ ID NO: 346257
auucauagacggauugggc

SEQ ID NO: 346259 - RNA, 19 nt, Artificial Sequence
  Description of Artificial Sequence: Synthetic oligonucleotide
  Sense Strand Starting at position 348 of SEQ ID NO: 319072
ggaugcugcuugucaggga

SEQ ID NO: 346260 - RNA, 19 nt, Artificial Sequence
  Description of Artificial Sequence: Synthetic oligonucleotide
  Antisense Strand to SEQ ID NO: 346259
ucccugacaagcagcaucc

SEQ ID NO: 346261 - RNA, 19 nt, Artificial Sequence
  Description of Artificial Sequence: Synthetic oligonucleotide
  Sense Strand Starting at position 348 of SEQ ID NO: 319073
gaugcugcuugucagggau

SEQ ID NO: 346262 - RNA, 19 nt, Artificial Sequence
  Description of Artificial Sequence: Synthetic oligonucleotide
  Antisense Strand to SEQ ID NO: 346261
aucccugacaagcagcauc

SEQ ID NO: 346263 - RNA, 19 nt, Artificial Sequence
  Description of Artificial Sequence: Synthetic oligonucleotide
  Sense Strand Starting at position 348 of SEQ ID NO: 319076
gcugcuugucagggaugga

SEQ ID NO: 346264 - RNA, 19 nt, Artificial Sequence
  Description of Artificial Sequence: Synthetic oligonucleotide
  Antisense Strand to SEQ ID NO: 346263
uccaucccugacaagcagc

SEQ ID NO: 346265 - RNA, 19 nt, Artificial Sequence
  Description of Artificial Sequence: Synthetic oligonucleotide
  Sense Strand Starting at position 349 of SEQ ID NO: 315256
cccagaguuguccaggcuu

SEQ ID NO: 346266 - RNA, 19 nt, Artificial Sequence
  Description of Artificial Sequence: Synthetic oligonucleotide
  Antisense Strand to SEQ ID NO: 346265
aagccuggacaacucuggg

SEQ ID NO: 346267 - RNA, 19 nt, Artificial Sequence
  Description of Artificial Sequence: Synthetic oligonucleotide
  Sense Strand Starting at position 349 of SEQ ID NO: 315258
cagaguuguccaggcuuag

SEQ ID NO: 346268 - RNA, 19 nt, Artificial Sequence
  Description of Artificial Sequence: Synthetic oligonucleotide
  Antisense Strand to SEQ ID NO: 346267
cuaagccuggacaacucug

SEQ ID NO: 346269 - RNA, 19 nt, Artificial Sequence
  Description of Artificial Sequence: Synthetic oligonucleotide
  Sense Strand Starting at position 349 of SEQ ID NO: 315421
guagcuugaucccuucuaa

SEQ ID NO: 346270 - RNA, 19 nt, Artificial Sequence
  Description of Artificial Sequence: Synthetic oligonucleotide
  Antisense Strand to SEQ ID NO: 346269
uuagaagggaucaagcuac

SEQ ID NO: 346271 - RNA, 19 nt, Artificial Sequence
  Description of Artificial Sequence: Synthetic oligonucleotide
  Sense Strand Starting at position 349 of SEQ ID NO: 315518
uccaauuagaggugucugu

SEQ ID NO: 346272 - RNA, 19 nt, Artificial Sequence
  Description of Artificial Sequence: Synthetic oligonucleotide
  Antisense Strand to SEQ ID NO: 346271
acagacaccucuaauugga

SEQ ID NO: 346273 - RNA, 19 nt, Artificial Sequence
  Description of Artificial Sequence: Synthetic oligonucleotide
  Sense Strand Starting at position 349 of SEQ ID NO: 315549
ggcagacaaucauuaucac

SEQ ID NO: 346274 - RNA, 19 nt, Artificial Sequence
  Description of Artificial Sequence: Synthetic oligonucleotide
  Antisense Strand to SEQ ID NO: 346273
gugauaaugauugucugcc

SEQ ID NO: 346275 - RNA, 19 nt, Artificial Sequence
  Description of Artificial Sequence: Synthetic oligonucleotide
  Sense Strand Starting at position 349 of SEQ ID NO: 315687
cccugaguuccagggcaga

SEQ ID NO: 346276 - RNA, 19 nt, Artificial Sequence
  Description of Artificial Sequence: Synthetic oligonucleotide
  Antisense Strand to SEQ ID NO: 346275
ucugcccuggaacucaggg

SEQ ID NO: 346277 - RNA, 19 nt, Artificial Sequence
  Description of Artificial Sequence: Synthetic oligonucleotide
  Sense Strand Starting at position 349 of SEQ ID NO: 315809
agaagaaugucuccucuug

SEQ ID NO: 346278 - RNA, 19 nt, Artificial Sequence
  Description of Artificial Sequence: Synthetic oligonucleotide
  Antisense Strand to SEQ ID NO: 346277
caagaggagacauucuucu

SEQ ID NO: 346279 - RNA, 19 nt, Artificial Sequence
  Description of Artificial Sequence: Synthetic oligonucleotide
  Sense Strand Starting at position 349 of SEQ ID NO: 316087
gaaagugacugcuuccaaa

SEQ ID NO: 346280 - RNA, 19 nt, Artificial Sequence
  Description of Artificial Sequence: Synthetic oligonucleotide
  Antisense Strand to SEQ ID NO: 346279
uuuggaagcagucacuuuc

SEQ ID NO: 346281 - RNA, 19 nt, Artificial Sequence
  Description of Artificial Sequence: Synthetic oligonucleotide
  Sense Strand Starting at position 349 of SEQ ID NO: 316259
gcccgaauuggaggaaaga

SEQ ID NO: 346282 - RNA, 19 nt, Artificial Sequence
  Description of Artificial Sequence: Synthetic oligonucleotide
  Antisense Strand to SEQ ID NO: 346281
ucuuuccuccaauucgggc

SEQ ID NO: 346283 - RNA, 19 nt, Artificial Sequence
  Description of Artificial Sequence: Synthetic oligonucleotide
  Sense Strand Starting at position 349 of SEQ ID NO: 316321
cucuguuccggugacaaca

SEQ ID NO: 346284 - RNA, 19 nt, Artificial Sequence
  Description of Artificial Sequence: Synthetic oligonucleotide
  Antisense Strand to SEQ ID NO: 346283
uguugucaccggaacagag

SEQ ID NO: 346285 - RNA, 19 nt, Artificial Sequence
  Description of Artificial Sequence: Synthetic oligonucleotide
  Sense Strand Starting at position 349 of SEQ ID NO: 316544
gacccaagucugugcggaa

SEQ ID NO: 346286 - RNA, 19 nt, Artificial Sequence
  Description of Artificial Sequence: Synthetic oligonucleotide
  Antisense Strand to SEQ ID NO: 346285
uuccgcacagacuuggguc

SEQ ID NO: 346287 - RNA, 19 nt, Artificial Sequence
  Description of Artificial Sequence: Synthetic oligonucleotide
  Sense Strand Starting at position 349 of SEQ ID NO: 316545
acccaagucugugcggaaa

SEQ ID NO: 346288 - RNA, 19 nt, Artificial Sequence
  Description of Artificial Sequence: Synthetic oligonucleotide
  Antisense Strand to SEQ ID NO: 346287
uuuccgcacagacuugggu

SEQ ID NO: 346289 - RNA, 19 nt, Artificial Sequence
  Description of Artificial Sequence: Synthetic oligonucleotide
  Sense Strand Starting at position 349 of SEQ ID NO: 316649
ggccacuggucucugaaga

SEQ ID NO: 346290 - RNA, 19 nt, Artificial Sequence
  Description of Artificial Sequence: Synthetic oligonucleotide
  Antisense Strand to SEQ ID NO: 346289
ucuucagagaccaguggcc

SEQ ID NO: 346291 - RNA, 19 nt, Artificial Sequence
  Description of Artificial Sequence: Synthetic oligonucleotide
  Sense Strand Starting at position 349 of SEQ ID NO: 316650
gccacuggucucugaagag

SEQ ID NO: 346292 - RNA, 19 nt, Artificial Sequence
  Description of Artificial Sequence: Synthetic oligonucleotide
  Antisense Strand to SEQ ID NO: 346291
cucuucagagaccaguggc

SEQ ID NO: 346293 - RNA, 19 nt, Artificial Sequence
  Description of Artificial Sequence: Synthetic oligonucleotide
  Sense Strand Starting at position 349 of SEQ ID NO: 316654
cuggucucugaagagguaa

SEQ ID NO: 346294 - RNA, 19 nt, Artificial Sequence
  Description of Artificial Sequence: Synthetic oligonucleotide
  Antisense Strand to SEQ ID NO: 346293
uuaccucuucagagaccag

SEQ ID NO: 346295 - RNA, 19 nt, Artificial Sequence
  Description of Artificial Sequence: Synthetic oligonucleotide
  Sense Strand Starting at position 349 of SEQ ID NO: 316688
aggaacucugauugcuagu

SEQ ID NO: 346296 - RNA, 19 nt, Artificial Sequence
  Description of Artificial Sequence: Synthetic oligonucleotide
  Antisense Strand to SEQ ID NO: 346295
acuagcaaucagaguuccu

SEQ ID NO: 346297 - RNA, 19 nt, Artificial Sequence
  Description of Artificial Sequence: Synthetic oligonucleotide
  Sense Strand Starting at position 349 of SEQ ID NO: 316923
gggccauccucacccgaaa

SEQ ID NO: 346298 - RNA, 19 nt, Artificial Sequence
  Description of Artificial Sequence: Synthetic oligonucleotide
  Antisense Strand to SEQ ID NO: 346297
uuucgggugaggauggccc

SEQ ID NO: 346299 - RNA, 19 nt, Artificial Sequence
  Description of Artificial Sequence: Synthetic oligonucleotide
  Sense Strand Starting at position 349 of SEQ ID NO: 317600
ucugcaguccaggaagagu

SEQ ID NO: 346300 - RNA, 19 nt, Artificial Sequence
  Description of Artificial Sequence: Synthetic oligonucleotide
  Antisense Strand to SEQ ID NO: 346299
acucuuccuggacugcaga

SEQ ID NO: 346301 - RNA, 19 nt, Artificial Sequence
  Description of Artificial Sequence: Synthetic oligonucleotide
  Sense Strand Starting at position 349 of SEQ ID NO: 317743
ugucacugagucuacuaaa

SEQ ID NO: 346302 - RNA, 19 nt, Artificial Sequence
  Description of Artificial Sequence: Synthetic oligonucleotide
  Antisense Strand to SEQ ID NO: 346301
uuuaguagacucagugaca

SEQ ID NO: 346303 - RNA, 19 nt, Artificial Sequence
  Description of Artificial Sequence: Synthetic oligonucleotide
  Sense Strand Starting at position 349 of SEQ ID NO: 317788
aguucugauuccucccuau

SEQ ID NO: 346304 - RNA, 19 nt, Artificial Sequence
  Description of Artificial Sequence: Synthetic oligonucleotide
  Antisense Strand to SEQ ID NO: 346303
auagggaggaaucagaacu

SEQ ID NO: 346305 - RNA, 19 nt, Artificial Sequence
  Description of Artificial Sequence: Synthetic oligonucleotide
  Sense Strand Starting at position 349 of SEQ ID NO: 317822
uugcaagguagugguuuaa

SEQ ID NO: 346306 - RNA, 19 nt, Artificial Sequence
  Description of Artificial Sequence: Synthetic oligonucleotide
  Antisense Strand to SEQ ID NO: 346305
uuaaaccacuaccuugcaa

SEQ ID NO: 346307 - RNA, 19 nt, Artificial Sequence
  Description of Artificial Sequence: Synthetic oligonucleotide
  Sense Strand Starting at position 349 of SEQ ID NO: 317834
gguuuaauaaauggguuga

SEQ ID NO: 346308 - RNA, 19 nt, Artificial Sequence
  Description of Artificial Sequence: Synthetic oligonucleotide
  Antisense Strand to SEQ ID NO: 346307
ucaacccauuuauuaaacc

SEQ ID NO: 346309 - RNA, 19 nt, Artificial Sequence
  Description of Artificial Sequence: Synthetic oligonucleotide
  Sense Strand Starting at position 349 of SEQ ID NO: 317835
guuuaauaaauggguugaa

SEQ ID NO: 346310 - RNA, 19 nt, Artificial Sequence
  Description of Artificial Sequence: Synthetic oligonucleotide
  Antisense Strand to SEQ ID NO: 346309
uucaacccauuuauuaaac

SEQ ID NO: 346311 - RNA, 19 nt, Artificial Sequence
  Description of Artificial Sequence: Synthetic oligonucleotide
  Sense Strand Starting at position 349 of SEQ ID NO: 317844
auggguugaaugcggaaua

SEQ ID NO: 346312 - RNA, 19 nt, Artificial Sequence
  Description of Artificial Sequence: Synthetic oligonucleotide
  Antisense Strand to SEQ ID NO: 346311
uauuccgcauucaacccau

SEQ ID NO: 346313 - RNA, 19 nt, Artificial Sequence
  Description of Artificial Sequence: Synthetic oligonucleotide
  Sense Strand Starting at position 349 of SEQ ID NO: 318114
ucgagauccugccuuugca

SEQ ID NO: 346314 - RNA, 19 nt, Artificial Sequence
  Description of Artificial Sequence: Synthetic oligonucleotide
  Antisense Strand to SEQ ID NO: 346313
ugcaaaggcaggaucucga

SEQ ID NO: 346315 - RNA, 19 nt, Artificial Sequence
  Description of Artificial Sequence: Synthetic oligonucleotide
  Sense Strand Starting at position 349 of SEQ ID NO: 318312
gaaggccuacuguguauaa

SEQ ID NO: 346316 - RNA, 19 nt, Artificial Sequence
  Description of Artificial Sequence: Synthetic oligonucleotide
  Antisense Strand to SEQ ID NO: 346315
uuauacacaguaggccuuc

SEQ ID NO: 346317 - RNA, 19 nt, Artificial Sequence
  Description of Artificial Sequence: Synthetic oligonucleotide
  Sense Strand Starting at position 349 of SEQ ID NO: 318323
guguauaaggcauaucgca

SEQ ID NO: 346318 - RNA, 19 nt, Artificial Sequence
  Description of Artificial Sequence: Synthetic oligonucleotide
  Antisense Strand to SEQ ID NO: 346317
ugcgauaugccuuauacac

SEQ ID NO: 346319 - RNA, 19 nt, Artificial Sequence
  Description of Artificial Sequence: Synthetic oligonucleotide
  Sense Strand Starting at position 349 of SEQ ID NO: 318330
aggcauaucgcaugagaua

SEQ ID NO: 346320 - RNA, 19 nt, Artificial Sequence
  Description of Artificial Sequence: Synthetic oligonucleotide
  Antisense Strand to SEQ ID NO: 346319
uaucucaugcgauaugccu

SEQ ID NO: 346321 - RNA, 19 nt, Artificial Sequence
  Description of Artificial Sequence: Synthetic oligonucleotide
  Sense Strand Starting at position 349 of SEQ ID NO: 318331
ggcauaucgcaugagauau

SEQ ID NO: 346322 - RNA, 19 nt, Artificial Sequence
  Description of Artificial Sequence: Synthetic oligonucleotide
  Antisense Strand to SEQ ID NO: 346321
auaucucaugcgauaugcc

SEQ ID NO: 346323 - RNA, 19 nt, Artificial Sequence
  Description of Artificial Sequence: Synthetic oligonucleotide
  Sense Strand Starting at position 349 of SEQ ID NO: 318337
ucgcaugagauauagcgau

SEQ ID NO: 346324 - RNA, 19 nt, Artificial Sequence
  Description of Artificial Sequence: Synthetic oligonucleotide
  Antisense Strand to SEQ ID NO: 346323
aucgcuauaucucaugcga

SEQ ID NO: 346325 - RNA, 19 nt, Artificial Sequence
  Description of Artificial Sequence: Synthetic oligonucleotide
  Sense Strand Starting at position 349 of SEQ ID NO: 318343
gagauauagcgauagcgag

SEQ ID NO: 346326 - RNA, 19 nt, Artificial Sequence
  Description of Artificial Sequence: Synthetic oligonucleotide
  Antisense Strand to SEQ ID NO: 346325
cucgcuaucgcuauaucuc

SEQ ID NO: 346327 - RNA, 19 nt, Artificial Sequence
  Description of Artificial Sequence: Synthetic oligonucleotide
  Sense Strand Starting at position 349 of SEQ ID NO: 318404
agcacauaggcuuguaaau

SEQ ID NO: 346328 - RNA, 19 nt, Artificial Sequence
  Description of Artificial Sequence: Synthetic oligonucleotide
  Antisense Strand to SEQ ID NO: 346327
auuuacaagccuaugugcu

SEQ ID NO: 346329 - RNA, 19 nt, Artificial Sequence
  Description of Artificial Sequence: Synthetic oligonucleotide
  Sense Strand Starting at position 349 of SEQ ID NO: 318437
ugaccacugcuaugaagaa

SEQ ID NO: 346330 - RNA, 19 nt, Artificial Sequence
  Description of Artificial Sequence: Synthetic oligonucleotide
  Antisense Strand to SEQ ID NO: 346329
uucuucauagcagugguca

SEQ ID NO: 346331 - RNA, 19 nt, Artificial Sequence
  Description of Artificial Sequence: Synthetic oligonucleotide
  Sense Strand Starting at position 349 of SEQ ID NO: 318811
agagguuucugauugguua

SEQ ID NO: 346332 - RNA, 19 nt, Artificial Sequence
  Description of Artificial Sequence: Synthetic oligonucleotide
  Antisense Strand to SEQ ID NO: 346331
uaaccaaucagaaaccucu

SEQ ID NO: 346333 - RNA, 19 nt, Artificial Sequence
  Description of Artificial Sequence: Synthetic oligonucleotide
  Sense Strand Starting at position 349 of SEQ ID NO: 318812
gagguuucugauugguuag

SEQ ID NO: 346334 - RNA, 19 nt, Artificial Sequence
  Description of Artificial Sequence: Synthetic oligonucleotide
  Antisense Strand to SEQ ID NO: 346333
cuaaccaaucagaaaccuc

SEQ ID NO: 346335 - RNA, 19 nt, Artificial Sequence
  Description of Artificial Sequence: Synthetic oligonucleotide
  Sense Strand Starting at position 349 of SEQ ID NO: 318813
agguuucugauugguuaga

SEQ ID NO: 346336 - RNA, 19 nt, Artificial Sequence
  Description of Artificial Sequence: Synthetic oligonucleotide
  Antisense Strand to SEQ ID NO: 346335
ucuaaccaaucagaaaccu

SEQ ID NO: 346337 - RNA, 19 nt, Artificial Sequence
  Description of Artificial Sequence: Synthetic oligonucleotide
  Sense Strand Starting at position 349 of SEQ ID NO: 318814
gguuucugauugguuagag

SEQ ID NO: 346338 - RNA, 19 nt, Artificial Sequence
  Description of Artificial Sequence: Synthetic oligonucleotide
  Antisense Strand to SEQ ID NO: 346337
cucuaaccaaucagaaacc

SEQ ID NO: 346339 - RNA, 19 nt, Artificial Sequence
  Description of Artificial Sequence: Synthetic oligonucleotide
  Sense Strand Starting at position 349 of SEQ ID NO: 318815
guuucugauugguuagaga

SEQ ID NO: 346340 - RNA, 19 nt, Artificial Sequence
  Description of Artificial Sequence: Synthetic oligonucleotide
  Antisense Strand to SEQ ID NO: 346339
ucucuaaccaaucagaaac

SEQ ID NO: 346341 - RNA, 19 nt, Artificial Sequence
  Description of Artificial Sequence: Synthetic oligonucleotide
  Sense Strand Starting at position 349 of SEQ ID NO: 318955
cauguuacauuugaggaau

SEQ ID NO: 346342 - RNA, 19 nt, Artificial Sequence
  Description of Artificial Sequence: Synthetic oligonucleotide
  Antisense Strand to SEQ ID NO: 346341
auuccucaaauguaacaug

SEQ ID NO: 346343 - RNA, 19 nt, Artificial Sequence
  Description of Artificial Sequence: Synthetic oligonucleotide
  Sense Strand Starting at position 349 of SEQ ID NO: 318993
aaggaacaguccuagguga

SEQ ID NO: 346344 - RNA, 19 nt, Artificial Sequence
  Description of Artificial Sequence: Synthetic oligonucleotide
  Antisense Strand to SEQ ID NO: 346343
ucaccuaggacuguuccuu

SEQ ID NO: 346345 - RNA, 19 nt, Artificial Sequence
  Description of Artificial Sequence: Synthetic oligonucleotide
  Sense Strand Starting at position 350 of SEQ ID NO: 315372
ucuaaugcaguuuaagaua

SEQ ID NO: 346346 - RNA, 19 nt, Artificial Sequence
  Description of Artificial Sequence: Synthetic oligonucleotide
  Antisense Strand to SEQ ID NO: 346345
uaucuuaaacugcauuaga

SEQ ID NO: 346347 - RNA, 19 nt, Artificial Sequence
  Description of Artificial Sequence: Synthetic oligonucleotide
  Sense Strand Starting at position 350 of SEQ ID NO: 315517
gagguuuauagaugucaag

SEQ ID NO: 346348 - RNA, 19 nt, Artificial Sequence
  Description of Artificial Sequence: Synthetic oligonucleotide
  Antisense Strand to SEQ ID NO: 346347
cuugacaucuauaaaccuc

SEQ ID NO: 346349 - RNA, 19 nt, Artificial Sequence
  Description of Artificial Sequence: Synthetic oligonucleotide
  Sense Strand Starting at position 350 of SEQ ID NO: 315548
gauccuagggcuuauaugu

SEQ ID NO: 346350 - RNA, 19 nt, Artificial Sequence
  Description of Artificial Sequence: Synthetic oligonucleotide
  Antisense Strand to SEQ ID NO: 346349
acauauaagcccuaggauc

SEQ ID NO: 346351 - RNA, 19 nt, Artificial Sequence
  Description of Artificial Sequence: Synthetic oligonucleotide
  Sense Strand Starting at position 350 of SEQ ID NO: 315577
ugacucaauccaggcuaau

SEQ ID NO: 346352 - RNA, 19 nt, Artificial Sequence
  Description of Artificial Sequence: Synthetic oligonucleotide
  Antisense Strand to SEQ ID NO: 346351
auuagccuggauugaguca

SEQ ID NO: 346353 - RNA, 19 nt, Artificial Sequence
  Description of Artificial Sequence: Synthetic oligonucleotide
  Sense Strand Starting at position 350 of SEQ ID NO: 315698
uuggcagcagucuauuaaa

SEQ ID NO: 346354 - RNA, 19 nt, Artificial Sequence
  Description of Artificial Sequence: Synthetic oligonucleotide
  Antisense Strand to SEQ ID NO: 346353
uuuaauagacugcugccaa

SEQ ID NO: 346355 - RNA, 19 nt, Artificial Sequence
  Description of Artificial Sequence: Synthetic oligonucleotide
  Sense Strand Starting at position 350 of SEQ ID NO: 315771
guauuugacuucuuguuuc

SEQ ID NO: 346356 - RNA, 19 nt, Artificial Sequence
  Description of Artificial Sequence: Synthetic oligonucleotide
  Antisense Strand to SEQ ID NO: 346355
gaaacaagaagucaaauac

SEQ ID NO: 346357 - RNA, 19 nt, Artificial Sequence
  Description of Artificial Sequence: Synthetic oligonucleotide
  Sense Strand Starting at position 350 of SEQ ID NO: 315879
uuaaucaucguauaagcca

SEQ ID NO: 346358 - RNA, 19 nt, Artificial Sequence
  Description of Artificial Sequence: Synthetic oligonucleotide
  Antisense Strand to SEQ ID NO: 346357
uggcuuauacgaugauuaa

SEQ ID NO: 346359 - RNA, 19 nt, Artificial Sequence
  Description of Artificial Sequence: Synthetic oligonucleotide
  Sense Strand Starting at position 350 of SEQ ID NO: 316176
ucagaauuauaugugacag

SEQ ID NO: 346360 - RNA, 19 nt, Artificial Sequence
  Description of Artificial Sequence: Synthetic oligonucleotide
  Antisense Strand to SEQ ID NO: 346359
cugucacauauaauucuga

SEQ ID NO: 346361 - RNA, 19 nt, Artificial Sequence
  Description of Artificial Sequence: Synthetic oligonucleotide
  Sense Strand Starting at position 350 of SEQ ID NO: 316184
auaugugacaguuaaggua

SEQ ID NO: 346362 - RNA, 19 nt, Artificial Sequence
  Description of Artificial Sequence: Synthetic oligonucleotide
  Antisense Strand to SEQ ID NO: 346361
uaccuuaacugucacauau

SEQ ID NO: 346363 - RNA, 19 nt, Artificial Sequence
  Description of Artificial Sequence: Synthetic oligonucleotide
  Sense Strand Starting at position 350 of SEQ ID NO: 316224
accagagaacgcugaauca

SEQ ID NO: 346364 - RNA, 19 nt, Artificial Sequence
  Description of Artificial Sequence: Synthetic oligonucleotide
  Antisense Strand to SEQ ID NO: 346363
ugauucagcguucucuggu

SEQ ID NO: 346365 - RNA, 19 nt, Artificial Sequence
  Description of Artificial Sequence: Synthetic oligonucleotide
  Sense Strand Starting at position 350 of SEQ ID NO: 316244
gaacauuuaucgccagguc

SEQ ID NO: 346366 - RNA, 19 nt, Artificial Sequence
  Description of Artificial Sequence: Synthetic oligonucleotide
  Antisense Strand to SEQ ID NO: 346365
gaccuggcgauaaauguuc

SEQ ID NO: 346367 - RNA, 19 nt, Artificial Sequence
  Description of Artificial Sequence: Synthetic oligonucleotide
  Sense Strand Starting at position 350 of SEQ ID NO: 316247
cauuuaucgccaggucuua

SEQ ID NO: 346368 - RNA, 19 nt, Artificial Sequence
  Description of Artificial Sequence: Synthetic oligonucleotide
  Antisense Strand to SEQ ID NO: 346367
uaagaccuggcgauaaaug

SEQ ID NO: 346369 - RNA, 19 nt, Artificial Sequence
  Description of Artificial Sequence: Synthetic oligonucleotide
  Sense Strand Starting at position 350 of SEQ ID NO: 316328
gcugcagcucucgcaaaga

SEQ ID NO: 346370 - RNA, 19 nt, Artificial Sequence
  Description of Artificial Sequence: Synthetic oligonucleotide
  Antisense Strand to SEQ ID NO: 346369
ucuuugcgagagcugcagc

SEQ ID NO: 346371 - RNA, 19 nt, Artificial Sequence
  Description of Artificial Sequence: Synthetic oligonucleotide
  Sense Strand Starting at position 350 of SEQ ID NO: 316408
ccacgagaaucccucagau

SEQ ID NO: 346372 - RNA, 19 nt, Artificial Sequence
  Description of Artificial Sequence: Synthetic oligonucleotide
  Antisense Strand to SEQ ID NO: 346371
aucugagggauucucgugg

SEQ ID NO: 346373 - RNA, 19 nt, Artificial Sequence
  Description of Artificial Sequence: Synthetic oligonucleotide
  Sense Strand Starting at position 350 of SEQ ID NO: 316423
agaugagcgaucgaauucu

SEQ ID NO: 346374 - RNA, 19 nt, Artificial Sequence
  Description of Artificial Sequence: Synthetic oligonucleotide
  Antisense Strand to SEQ ID NO: 346373
agaauucgaucgcucaucu

SEQ ID NO: 346375 - RNA, 19 nt, Artificial Sequence
  Description of Artificial Sequence: Synthetic oligonucleotide
  Sense Strand Starting at position 350 of SEQ ID NO: 317067
guguaagucgaggauaauc

SEQ ID NO: 346376 - RNA, 19 nt, Artificial Sequence
  Description of Artificial Sequence: Synthetic oligonucleotide
  Antisense Strand to SEQ ID NO: 346375
gauuauccucgacuuacac

SEQ ID NO: 346377 - RNA, 19 nt, Artificial Sequence
  Description of Artificial Sequence: Synthetic oligonucleotide
  Sense Strand Starting at position 350 of SEQ ID NO: 317078
ggauaaucccggcggagaa

SEQ ID NO: 346378 - RNA, 19 nt, Artificial Sequence
  Description of Artificial Sequence: Synthetic oligonucleotide
  Antisense Strand to SEQ ID NO: 346377
uucuccgccgggauuaucc

SEQ ID NO: 346379 - RNA, 19 nt, Artificial Sequence
  Description of Artificial Sequence: Synthetic oligonucleotide
  Sense Strand Starting at position 350 of SEQ ID NO: 317525
cgcggaauuccugcauugu

SEQ ID NO: 346380 - RNA, 19 nt, Artificial Sequence
  Description of Artificial Sequence: Synthetic oligonucleotide
  Antisense Strand to SEQ ID NO: 346379
acaaugcaggaauuccgcg

SEQ ID NO: 346381 - RNA, 19 nt, Artificial Sequence
  Description of Artificial Sequence: Synthetic oligonucleotide
  Sense Strand Starting at position 350 of SEQ ID NO: 317694
gacuuuauuugcguucuca

SEQ ID NO: 346382 - RNA, 19 nt, Artificial Sequence
  Description of Artificial Sequence: Synthetic oligonucleotide
  Antisense Strand to SEQ ID NO: 346381
ugagaacgcaaauaaaguc

SEQ ID NO: 346383 - RNA, 19 nt, Artificial Sequence
  Description of Artificial Sequence: Synthetic oligonucleotide
  Sense Strand Starting at position 350 of SEQ ID NO: 317780
gugacaaaguaauuguuua

SEQ ID NO: 346384 - RNA, 19 nt, Artificial Sequence
  Description of Artificial Sequence: Synthetic oligonucleotide
  Antisense Strand to SEQ ID NO: 346383
uaaacaauuacuuugucac

SEQ ID NO: 346385 - RNA, 19 nt, Artificial Sequence
  Description of Artificial Sequence: Synthetic oligonucleotide
  Sense Strand Starting at position 350 of SEQ ID NO: 317788
guaauuguuuacccuggaa

SEQ ID NO: 346386 - RNA, 19 nt, Artificial Sequence
  Description of Artificial Sequence: Synthetic oligonucleotide
  Antisense Strand to SEQ ID NO: 346385
uuccaggguaaacaauuac

SEQ ID NO: 346387 - RNA, 19 nt, Artificial Sequence
  Description of Artificial Sequence: Synthetic oligonucleotide
  Sense Strand Starting at position 350 of SEQ ID NO: 317791
auuguuuacccuggaaaua

SEQ ID NO: 346388 - RNA, 19 nt, Artificial Sequence
  Description of Artificial Sequence: Synthetic oligonucleotide
  Antisense Strand to SEQ ID NO: 346387
uauuuccaggguaaacaau

SEQ ID NO: 346389 - RNA, 19 nt, Artificial Sequence
  Description of Artificial Sequence: Synthetic oligonucleotide
  Sense Strand Starting at position 350 of SEQ ID NO: 317801
cuggaaauagacuguuauu

SEQ ID NO: 346390 - RNA, 19 nt, Artificial Sequence
  Description of Artificial Sequence: Synthetic oligonucleotide
  Antisense Strand to SEQ ID NO: 346389
aauaacagucuauuuccag

SEQ ID NO: 346391 - RNA, 19 nt, Artificial Sequence
  Description of Artificial Sequence: Synthetic oligonucleotide
  Sense Strand Starting at position 350 of SEQ ID NO: 317870
ugagauccuccaugugaga

SEQ ID NO: 346392 - RNA, 19 nt, Artificial Sequence
  Description of Artificial Sequence: Synthetic oligonucleotide
  Antisense Strand to SEQ ID NO: 346391
ucucacauggaggaucuca

SEQ ID NO: 346393 - RNA, 19 nt, Artificial Sequence
  Description of Artificial Sequence: Synthetic oligonucleotide
  Sense Strand Starting at position 350 of SEQ ID NO: 317913
caucuaaccggucacuaga

SEQ ID NO: 346394 - RNA, 19 nt, Artificial Sequence
  Description of Artificial Sequence: Synthetic oligonucleotide
  Antisense Strand to SEQ ID NO: 346393
ucuagugaccgguuagaug

SEQ ID NO: 346395 - RNA, 19 nt, Artificial Sequence
  Description of Artificial Sequence: Synthetic oligonucleotide
  Sense Strand Starting at position 350 of SEQ ID NO: 317920
ccggucacuagacauugau

SEQ ID NO: 346396 - RNA, 19 nt, Artificial Sequence
  Description of Artificial Sequence: Synthetic oligonucleotide
  Antisense Strand to SEQ ID NO: 346395
aucaaugucuagugaccgg

SEQ ID NO: 346397 - RNA, 19 nt, Artificial Sequence
  Description of Artificial Sequence: Synthetic oligonucleotide
  Sense Strand Starting at position 350 of SEQ ID NO: 317959
cacaguugacacugggaau

SEQ ID NO: 346398 - RNA, 19 nt, Artificial Sequence
  Description of Artificial Sequence: Synthetic oligonucleotide
  Antisense Strand to SEQ ID NO: 346397
auucccagugucaacugug

SEQ ID NO: 346399 - RNA, 19 nt, Artificial Sequence
  Description of Artificial Sequence: Synthetic oligonucleotide
  Sense Strand Starting at position 350 of SEQ ID NO: 318020
auuagaacuuuacuaggua

SEQ ID NO: 346400 - RNA, 19 nt, Artificial Sequence
  Description of Artificial Sequence: Synthetic oligonucleotide
  Antisense Strand to SEQ ID NO: 346399
uaccuaguaaaguucuaau

SEQ ID NO: 346401 - RNA, 19 nt, Artificial Sequence
  Description of Artificial Sequence: Synthetic oligonucleotide
  Sense Strand Starting at position 350 of SEQ ID NO: 318050
augucugaacuccauguuu

SEQ ID NO: 346402 - RNA, 19 nt, Artificial Sequence
  Description of Artificial Sequence: Synthetic oligonucleotide
  Antisense Strand to SEQ ID NO: 346401
aaacauggaguucagacau

SEQ ID NO: 346403 - RNA, 19 nt, Artificial Sequence
  Description of Artificial Sequence: Synthetic oligonucleotide
  Sense Strand Starting at position 350 of SEQ ID NO: 318061
ccauguuuagaaggaguca

SEQ ID NO: 346404 - RNA, 19 nt, Artificial Sequence
  Description of Artificial Sequence: Synthetic oligonucleotide
  Antisense Strand to SEQ ID NO: 346403
ugacuccuucuaaacaugg

SEQ ID NO: 346405 - RNA, 19 nt, Artificial Sequence
  Description of Artificial Sequence: Synthetic oligonucleotide
  Sense Strand Starting at position 350 of SEQ ID NO: 318066
uuuagaaggagucauuggu

SEQ ID NO: 346406 - RNA, 19 nt, Artificial Sequence
  Description of Artificial Sequence: Synthetic oligonucleotide
  Antisense Strand to SEQ ID NO: 346405
accaaugacuccuucuaaa

SEQ ID NO: 346407 - RNA, 19 nt, Artificial Sequence
  Description of Artificial Sequence: Synthetic oligonucleotide
  Sense Strand Starting at position 350 of SEQ ID NO: 318247
auauauuagcauuacgguu

SEQ ID NO: 346408 - RNA, 19 nt, Artificial Sequence
  Description of Artificial Sequence: Synthetic oligonucleotide
  Antisense Strand to SEQ ID NO: 346407
aaccguaaugcuaauauau

SEQ ID NO: 346409 - RNA, 19 nt, Artificial Sequence
  Description of Artificial Sequence: Synthetic oligonucleotide
  Sense Strand Starting at position 350 of SEQ ID NO: 318263
guuagaagucuggaagccu

SEQ ID NO: 346410 - RNA, 19 nt, Artificial Sequence
  Description of Artificial Sequence: Synthetic oligonucleotide
  Antisense Strand to SEQ ID NO: 346409
aggcuuccagacuucuaac

SEQ ID NO: 346411 - RNA, 19 nt, Artificial Sequence
  Description of Artificial Sequence: Synthetic oligonucleotide
  Sense Strand Starting at position 350 of SEQ ID NO: 318403
aacuuagaguuguuauuga

SEQ ID NO: 346412 - RNA, 19 nt, Artificial Sequence
  Description of Artificial Sequence: Synthetic oligonucleotide
  Antisense Strand to SEQ ID NO: 346411
ucaauaacaacucuaaguu

SEQ ID NO: 346413 - RNA, 19 nt, Artificial Sequence
  Description of Artificial Sequence: Synthetic oligonucleotide
  Sense Strand Starting at position 350 of SEQ ID NO: 318453
uagaauaacgacuggcaaa

SEQ ID NO: 346414 - RNA, 19 nt, Artificial Sequence
  Description of Artificial Sequence: Synthetic oligonucleotide
  Antisense Strand to SEQ ID NO: 346413
uuugccagucguuauucua

SEQ ID NO: 346415 - RNA, 19 nt, Artificial Sequence
  Description of Artificial Sequence: Synthetic oligonucleotide
  Sense Strand Starting at position 350 of SEQ ID NO: 318547
ucuagaagugaugggccua

SEQ ID NO: 346416 - RNA, 19 nt, Artificial Sequence
  Description of Artificial Sequence: Synthetic oligonucleotide
  Antisense Strand to SEQ ID NO: 346415
uaggcccaucacuucuaga

SEQ ID NO: 346417 - RNA, 19 nt, Artificial Sequence
  Description of Artificial Sequence: Synthetic oligonucleotide
  Sense Strand Starting at position 350 of SEQ ID NO: 318548
cuagaagugaugggccuaa

SEQ ID NO: 346418 - RNA, 19 nt, Artificial Sequence
  Description of Artificial Sequence: Synthetic oligonucleotide
  Antisense Strand to SEQ ID NO: 346417
uuaggcccaucacuucuag

SEQ ID NO: 346419 - RNA, 19 nt, Artificial Sequence
  Description of Artificial Sequence: Synthetic oligonucleotide
  Sense Strand Starting at position 350 of SEQ ID NO: 318974
aggagaagcugagucuuua

SEQ ID NO: 346420 - RNA, 19 nt, Artificial Sequence
  Description of Artificial Sequence: Synthetic oligonucleotide
  Antisense Strand to SEQ ID NO: 346419
uaaagacucagcuucuccu

SEQ ID NO: 346421 - RNA, 19 nt, Artificial Sequence
  Description of Artificial Sequence: Synthetic oligonucleotide
  Sense Strand Starting at position 350 of SEQ ID NO: 319070
agucaucuuccucagagca

SEQ ID NO: 346422 - RNA, 19 nt, Artificial Sequence
  Description of Artificial Sequence: Synthetic oligonucleotide
  Antisense Strand to SEQ ID NO: 346421
ugcucugaggaagaugacu

SEQ ID NO: 346423 - RNA, 19 nt, Artificial Sequence
  Description of Artificial Sequence: Synthetic oligonucleotide
  Sense Strand Starting at position 350 of SEQ ID NO: 319106
uugucaguuccauaucaua

SEQ ID NO: 346424 - RNA, 19 nt, Artificial Sequence
  Description of Artificial Sequence: Synthetic oligonucleotide
  Antisense Strand to SEQ ID NO: 346423
uaugauauggaacugacaa

SEQ ID NO: 346425 - RNA, 19 nt, Artificial Sequence
  Description of Artificial Sequence: Synthetic oligonucleotide
  Sense Strand Starting at position 351 of SEQ ID NO: 315248
ggagcuugcuuccugagca

SEQ ID NO: 346426 - RNA, 19 nt, Artificial Sequence
  Description of Artificial Sequence: Synthetic oligonucleotide
  Antisense Strand to SEQ ID NO: 346425
ugcucaggaagcaagcucc

SEQ ID NO: 346427 - RNA, 19 nt, Artificial Sequence
  Description of Artificial Sequence: Synthetic oligonucleotide
  Sense Strand Starting at position 351 of SEQ ID NO: 315353
gucugaguucaugagguuu

SEQ ID NO: 346428 - RNA, 19 nt, Artificial Sequence
  Description of Artificial Sequence: Synthetic oligonucleotide
  Antisense Strand to SEQ ID NO: 346427
aaaccucaugaacucagac

SEQ ID NO: 346429 - RNA, 19 nt, Artificial Sequence
  Description of Artificial Sequence: Synthetic oligonucleotide
  Sense Strand Starting at position 351 of SEQ ID NO: 315435
guccuagagcucuggcauu

SEQ ID NO: 346430 - RNA, 19 nt, Artificial Sequence
  Description of Artificial Sequence: Synthetic oligonucleotide
  Antisense Strand to SEQ ID NO: 346429
aaugccagagcucuaggac

SEQ ID NO: 346431 - RNA, 19 nt, Artificial Sequence
  Description of Artificial Sequence: Synthetic oligonucleotide
  Sense Strand Starting at position 351 of SEQ ID NO: 315441
gagcucuggcauuauaaga

SEQ ID NO: 346432 - RNA, 19 nt, Artificial Sequence
  Description of Artificial Sequence: Synthetic oligonucleotide
  Antisense Strand to SEQ ID NO: 346431
ucuuauaaugccagagcuc

SEQ ID NO: 346433 - RNA, 19 nt, Artificial Sequence
  Description of Artificial Sequence: Synthetic oligonucleotide
  Sense Strand Starting at position 351 of SEQ ID NO: 315798
agaugauuaugaugauaug

SEQ ID NO: 346434 - RNA, 19 nt, Artificial Sequence
  Description of Artificial Sequence: Synthetic oligonucleotide
  Antisense Strand to SEQ ID NO: 346433
cauaucaucauaaucaucu

SEQ ID NO: 346435 - RNA, 19 nt, Artificial Sequence
  Description of Artificial Sequence: Synthetic oligonucleotide
  Sense Strand Starting at position 351 of SEQ ID NO: 315801
ugauuaugaugauaugaug

SEQ ID NO: 346436 - RNA, 19 nt, Artificial Sequence
  Description of Artificial Sequence: Synthetic oligonucleotide
  Antisense Strand to SEQ ID NO: 346435
caucauaucaucauaauca

SEQ ID NO: 346437 - RNA, 19 nt, Artificial Sequence
  Description of Artificial Sequence: Synthetic oligonucleotide
  Sense Strand Starting at position 351 of SEQ ID NO: 315896
cucauauagccuuguagau

SEQ ID NO: 346438 - RNA, 19 nt, Artificial Sequence
  Description of Artificial Sequence: Synthetic oligonucleotide
  Antisense Strand to SEQ ID NO: 346437
aucuacaaggcuauaugag

SEQ ID NO: 346439 - RNA, 19 nt, Artificial Sequence
  Description of Artificial Sequence: Synthetic oligonucleotide
  Sense Strand Starting at position 351 of SEQ ID NO: 315920
ugguucgucucaucucaca

SEQ ID NO: 346440 - RNA, 19 nt, Artificial Sequence
  Description of Artificial Sequence: Synthetic oligonucleotide
  Antisense Strand to SEQ ID NO: 346439
ugugagaugagacgaacca

SEQ ID NO: 346441 - RNA, 19 nt, Artificial Sequence
  Description of Artificial Sequence: Synthetic oligonucleotide
  Sense Strand Starting at position 351 of SEQ ID NO: 316017
aguucuaucugacuccaga

SEQ ID NO: 346442 - RNA, 19 nt, Artificial Sequence
  Description of Artificial Sequence: Synthetic oligonucleotide
  Antisense Strand to SEQ ID NO: 346441
ucuggagucagauagaacu

SEQ ID NO: 346443 - RNA, 19 nt, Artificial Sequence
  Description of Artificial Sequence: Synthetic oligonucleotide
  Sense Strand Starting at position 351 of SEQ ID NO: 316243
cacagcuugcguccugauu

SEQ ID NO: 346444 - RNA, 19 nt, Artificial Sequence
  Description of Artificial Sequence: Synthetic oligonucleotide
  Antisense Strand to SEQ ID NO: 346443
aaucaggacgcaagcugug

SEQ ID NO: 346445 - RNA, 19 nt, Artificial Sequence
  Description of Artificial Sequence: Synthetic oligonucleotide
  Sense Strand Starting at position 351 of SEQ ID NO: 316249
uugcguccugauuaggaua

SEQ ID NO: 346446 - RNA, 19 nt, Artificial Sequence
  Description of Artificial Sequence: Synthetic oligonucleotide
  Antisense Strand to SEQ ID NO: 346445
uauccuaaucaggacgcaa

SEQ ID NO: 346447 - RNA, 19 nt, Artificial Sequence
  Description of Artificial Sequence: Synthetic oligonucleotide
  Sense Strand Starting at position 351 of SEQ ID NO: 316280
gccaaaugagaguguugca

SEQ ID NO: 346448 - RNA, 19 nt, Artificial Sequence
  Description of Artificial Sequence: Synthetic oligonucleotide
  Antisense Strand to SEQ ID NO: 346447
ugcaacacucucauuuggc

SEQ ID NO: 346449 - RNA, 19 nt, Artificial Sequence
  Description of Artificial Sequence: Synthetic oligonucleotide
  Sense Strand Starting at position 351 of SEQ ID NO: 316293
guugcauguuaccuggaaa

SEQ ID NO: 346450 - RNA, 19 nt, Artificial Sequence
  Description of Artificial Sequence: Synthetic oligonucleotide
  Antisense Strand to SEQ ID NO: 346449
uuuccagguaacaugcaac

SEQ ID NO: 346451 - RNA, 19 nt, Artificial Sequence
  Description of Artificial Sequence: Synthetic oligonucleotide
  Sense Strand Starting at position 351 of SEQ ID NO: 316350
gacgaauugugagcagacu

SEQ ID NO: 346452 - RNA, 19 nt, Artificial Sequence
  Description of Artificial Sequence: Synthetic oligonucleotide
  Antisense Strand to SEQ ID NO: 346451
agucugcucacaauucguc

SEQ ID NO: 346453 - RNA, 19 nt, Artificial Sequence
  Description of Artificial Sequence: Synthetic oligonucleotide
  Sense Strand Starting at position 351 of SEQ ID NO: 316374
ucccacaucugggaauaaa

SEQ ID NO: 346454 - RNA, 19 nt, Artificial Sequence
  Description of Artificial Sequence: Synthetic oligonucleotide
  Antisense Strand to SEQ ID NO: 346453
uuuauucccagauguggga

SEQ ID NO: 346455 - RNA, 19 nt, Artificial Sequence
  Description of Artificial Sequence: Synthetic oligonucleotide
  Sense Strand Starting at position 351 of SEQ ID NO: 316719
agaaaugacucacugucau

SEQ ID NO: 346456 - RNA, 19 nt, Artificial Sequence
  Description of Artificial Sequence: Synthetic oligonucleotide
  Antisense Strand to SEQ ID NO: 346455
augacagugagucauuucu

SEQ ID NO: 346457 - RNA, 19 nt, Artificial Sequence
  Description of Artificial Sequence: Synthetic oligonucleotide
  Sense Strand Starting at position 351 of SEQ ID NO: 316725
gacucacugucauuaggaa

SEQ ID NO: 346458 - RNA, 19 nt, Artificial Sequence
  Description of Artificial Sequence: Synthetic oligonucleotide
  Antisense Strand to SEQ ID NO: 346457
uuccuaaugacagugaguc

SEQ ID NO: 346459 - RNA, 19 nt, Artificial Sequence
  Description of Artificial Sequence: Synthetic oligonucleotide
  Sense Strand Starting at position 351 of SEQ ID NO: 316751
gcuguuuaaucaccuuuag

SEQ ID NO: 346460 - RNA, 19 nt, Artificial Sequence
  Description of Artificial Sequence: Synthetic oligonucleotide
  Antisense Strand to SEQ ID NO: 346459
cuaaaggugauuaaacagc

SEQ ID NO: 346461 - RNA, 19 nt, Artificial Sequence
  Description of Artificial Sequence: Synthetic oligonucleotide
  Sense Strand Starting at position 351 of SEQ ID NO: 316767
uagauauauugacaggguu

SEQ ID NO: 346462 - RNA, 19 nt, Artificial Sequence
  Description of Artificial Sequence: Synthetic oligonucleotide
  Antisense Strand to SEQ ID NO: 346461
aacccugucaauauaucua

SEQ ID NO: 346463 - RNA, 19 nt, Artificial Sequence
  Description of Artificial Sequence: Synthetic oligonucleotide
  Sense Strand Starting at position 351 of SEQ ID NO: 316878
uugguuucugccugggaca

SEQ ID NO: 346464 - RNA, 19 nt, Artificial Sequence
  Description of Artificial Sequence: Synthetic oligonucleotide
  Antisense Strand to SEQ ID NO: 346463
ugucccaggcagaaaccaa

SEQ ID NO: 346465 - RNA, 19 nt, Artificial Sequence
  Description of Artificial Sequence: Synthetic oligonucleotide
  Sense Strand Starting at position 351 of SEQ ID NO: 316879
ugguuucugccugggacaa

SEQ ID NO: 346466 - RNA, 19 nt, Artificial Sequence
  Description of Artificial Sequence: Synthetic oligonucleotide
  Antisense Strand to SEQ ID NO: 346465
uugucccaggcagaaacca

SEQ ID NO: 346467 - RNA, 19 nt, Artificial Sequence
  Description of Artificial Sequence: Synthetic oligonucleotide
  Sense Strand Starting at position 351 of SEQ ID NO: 316880
gguuucugccugggacaau

SEQ ID NO: 346468 - RNA, 19 nt, Artificial Sequence
  Description of Artificial Sequence: Synthetic oligonucleotide
  Antisense Strand to SEQ ID NO: 346467
auugucccaggcagaaacc

SEQ ID NO: 346469 - RNA, 19 nt, Artificial Sequence
  Description of Artificial Sequence: Synthetic oligonucleotide
  Sense Strand Starting at position 351 of SEQ ID NO: 317013
gagacuuuaugguucuucu

SEQ ID NO: 346470 - RNA, 19 nt, Artificial Sequence
  Description of Artificial Sequence: Synthetic oligonucleotide
  Antisense Strand to SEQ ID NO: 346469
agaagaaccauaaagucuc

SEQ ID NO: 346471 - RNA, 19 nt, Artificial Sequence
  Description of Artificial Sequence: Synthetic oligonucleotide
  Sense Strand Starting at position 351 of SEQ ID NO: 317152
cugcuuccucaagaaugca

SEQ ID NO: 346472 - RNA, 19 nt, Artificial Sequence
  Description of Artificial Sequence: Synthetic oligonucleotide
  Antisense Strand to SEQ ID NO: 346471
ugcauucuugaggaagcag

SEQ ID NO: 346473 - RNA, 19 nt, Artificial Sequence
  Description of Artificial Sequence: Synthetic oligonucleotide
  Sense Strand Starting at position 351 of SEQ ID NO: 317405
gggagcucuccugaaguac

SEQ ID NO: 346474 - RNA, 19 nt, Artificial Sequence
  Description of Artificial Sequence: Synthetic oligonucleotide
  Antisense Strand to SEQ ID NO: 346473
guacuucaggagagcuccc

SEQ ID NO: 346475 - RNA, 19 nt, Artificial Sequence
  Description of Artificial Sequence: Synthetic oligonucleotide
  Sense Strand Starting at position 351 of SEQ ID NO: 317430
ugcagagcuuagccuuauu

SEQ ID NO: 346476 - RNA, 19 nt, Artificial Sequence
  Description of Artificial Sequence: Synthetic oligonucleotide
  Antisense Strand to SEQ ID NO: 346475
aauaaggcuaagcucugca

SEQ ID NO: 346477 - RNA, 19 nt, Artificial Sequence
  Description of Artificial Sequence: Synthetic oligonucleotide
  Sense Strand Starting at position 351 of SEQ ID NO: 317449
cucagauuccaugguguuc

SEQ ID NO: 346478 - RNA, 19 nt, Artificial Sequence
  Description of Artificial Sequence: Synthetic oligonucleotide
  Antisense Strand to SEQ ID NO: 346477
gaacaccauggaaucugag

SEQ ID NO: 346479 - RNA, 19 nt, Artificial Sequence
  Description of Artificial Sequence: Synthetic oligonucleotide
  Sense Strand Starting at position 351 of SEQ ID NO: 317745
uguccuaucuucccagaug

SEQ ID NO: 346480 - RNA, 19 nt, Artificial Sequence
  Description of Artificial Sequence: Synthetic oligonucleotide
  Antisense Strand to SEQ ID NO: 346479
caucugggaagauaggaca

SEQ ID NO: 346481 - RNA, 19 nt, Artificial Sequence
  Description of Artificial Sequence: Synthetic oligonucleotide
  Sense Strand Starting at position 351 of SEQ ID NO: 317909
agacauugccagugcuuag

SEQ ID NO: 346482 - RNA, 19 nt, Artificial Sequence
  Description of Artificial Sequence: Synthetic oligonucleotide
  Antisense Strand to SEQ ID NO: 346481
cuaagcacuggcaaugucu

SEQ ID NO: 346483 - RNA, 19 nt, Artificial Sequence
  Description of Artificial Sequence: Synthetic oligonucleotide
  Sense Strand Starting at position 351 of SEQ ID NO: 317996
uccuaucaauuugaguuga

SEQ ID NO: 346484 - RNA, 19 nt, Artificial Sequence
  Description of Artificial Sequence: Synthetic oligonucleotide
  Antisense Strand to SEQ ID NO: 346483
ucaacucaaauugauagga

SEQ ID NO: 346485 - RNA, 19 nt, Artificial Sequence
  Description of Artificial Sequence: Synthetic oligonucleotide
  Sense Strand Starting at position 351 of SEQ ID NO: 318058
caguuauggugcccacaug

SEQ ID NO: 346486 - RNA, 19 nt, Artificial Sequence
  Description of Artificial Sequence: Synthetic oligonucleotide
  Antisense Strand to SEQ ID NO: 346485
caugugggcaccauaacug

SEQ ID NO: 346487 - RNA, 19 nt, Artificial Sequence
  Description of Artificial Sequence: Synthetic oligonucleotide
  Sense Strand Starting at position 351 of SEQ ID NO: 318059
aguuauggugcccacauga

SEQ ID NO: 346488 - RNA, 19 nt, Artificial Sequence
  Description of Artificial Sequence: Synthetic oligonucleotide
  Antisense Strand to SEQ ID NO: 346487
ucaugugggcaccauaacu

SEQ ID NO: 346489 - RNA, 19 nt, Artificial Sequence
  Description of Artificial Sequence: Synthetic oligonucleotide
  Sense Strand Starting at position 351 of SEQ ID NO: 318163
gagggaggugucugaccaa

SEQ ID NO: 346490 - RNA, 19 nt, Artificial Sequence
  Description of Artificial Sequence: Synthetic oligonucleotide
  Antisense Strand to SEQ ID NO: 346489
uuggucagacaccucccuc

SEQ ID NO: 346491 - RNA, 19 nt, Artificial Sequence
  Description of Artificial Sequence: Synthetic oligonucleotide
  Sense Strand Starting at position 351 of SEQ ID NO: 318166
ggaggugucugaccaagac

SEQ ID NO: 346492 - RNA, 19 nt, Artificial Sequence
  Description of Artificial Sequence: Synthetic oligonucleotide
  Antisense Strand to SEQ ID NO: 346491
gucuuggucagacaccucc

SEQ ID NO: 346493 - RNA, 19 nt, Artificial Sequence
  Description of Artificial Sequence: Synthetic oligonucleotide
  Sense Strand Starting at position 351 of SEQ ID NO: 318452
uaggaagugcuccgugaac

SEQ ID NO: 346494 - RNA, 19 nt, Artificial Sequence
  Description of Artificial Sequence: Synthetic oligonucleotide
  Antisense Strand to SEQ ID NO: 346493
guucacggagcacuuccua

SEQ ID NO: 346495 - RNA, 19 nt, Artificial Sequence
  Description of Artificial Sequence: Synthetic oligonucleotide
  Sense Strand Starting at position 351 of SEQ ID NO: 318454
ggaagugcuccgugaacua

SEQ ID NO: 346496 - RNA, 19 nt, Artificial Sequence
  Description of Artificial Sequence: Synthetic oligonucleotide
  Antisense Strand to SEQ ID NO: 346495
uaguucacggagcacuucc

SEQ ID NO: 346497 - RNA, 19 nt, Artificial Sequence
  Description of Artificial Sequence: Synthetic oligonucleotide
  Sense Strand Starting at position 351 of SEQ ID NO: 318538
gcaggucuucgguggacuu

SEQ ID NO: 346498 - RNA, 19 nt, Artificial Sequence
  Description of Artificial Sequence: Synthetic oligonucleotide
  Antisense Strand to SEQ ID NO: 346497
aaguccaccgaagaccugc

SEQ ID NO: 346499 - RNA, 19 nt, Artificial Sequence
  Description of Artificial Sequence: Synthetic oligonucleotide
  Sense Strand Starting at position 351 of SEQ ID NO: 318635
gaaagaugccaaugcgauu

SEQ ID NO: 346500 - RNA, 19 nt, Artificial Sequence
  Description of Artificial Sequence: Synthetic oligonucleotide
  Antisense Strand to SEQ ID NO: 346499
aaucgcauuggcaucuuuc

SEQ ID NO: 346501 - RNA, 19 nt, Artificial Sequence
  Description of Artificial Sequence: Synthetic oligonucleotide
  Sense Strand Starting at position 351 of SEQ ID NO: 319042
ggacgaauuccuggcauag

SEQ ID NO: 346502 - RNA, 19 nt, Artificial Sequence
  Description of Artificial Sequence: Synthetic oligonucleotide
  Antisense Strand to SEQ ID NO: 346501
cuaugccaggaauucgucc

SEQ ID NO: 346503 - RNA, 19 nt, Artificial Sequence
  Description of Artificial Sequence: Synthetic oligonucleotide
  Sense Strand Starting at position 351 of SEQ ID NO: 319190
cagagaugguucccggaau

SEQ ID NO: 346504 - RNA, 19 nt, Artificial Sequence
  Description of Artificial Sequence: Synthetic oligonucleotide
  Antisense Strand to SEQ ID NO: 346503
auuccgggaaccaucucug

SEQ ID NO: 346505 - RNA, 19 nt, Artificial Sequence
  Description of Artificial Sequence: Synthetic oligonucleotide
  Sense Strand Starting at position 352 of SEQ ID NO: 315276
gggagcucuccugaaguac

SEQ ID NO: 346506 - RNA, 19 nt, Artificial Sequence
  Description of Artificial Sequence: Synthetic oligonucleotide
  Antisense Strand to SEQ ID NO: 346505
guacuucaggagagcuccc

SEQ ID NO: 346507 - RNA, 19 nt, Artificial Sequence
  Description of Artificial Sequence: Synthetic oligonucleotide
  Sense Strand Starting at position 352 of SEQ ID NO: 315301
ugcagagcuuagccuuauu

SEQ ID NO: 346508 - RNA, 19 nt, Artificial Sequence
  Description of Artificial Sequence: Synthetic oligonucleotide
  Antisense Strand to SEQ ID NO: 346507
aauaaggcuaagcucugca

SEQ ID NO: 346509 - RNA, 19 nt, Artificial Sequence
  Description of Artificial Sequence: Synthetic oligonucleotide
  Sense Strand Starting at position 352 of SEQ ID NO: 315320
cucagauuccaugguguuc

SEQ ID NO: 346510 - RNA, 19 nt, Artificial Sequence
  Description of Artificial Sequence: Synthetic oligonucleotide
  Antisense Strand to SEQ ID NO: 346509
gaacaccauggaaucugag

SEQ ID NO: 346511 - RNA, 19 nt, Artificial Sequence
  Description of Artificial Sequence: Synthetic oligonucleotide
  Sense Strand Starting at position 352 of SEQ ID NO: 315616
uguccuaucuucccagaug

SEQ ID NO: 346512 - RNA, 19 nt, Artificial Sequence
  Description of Artificial Sequence: Synthetic oligonucleotide
  Antisense Strand to SEQ ID NO: 346511
caucugggaagauaggaca

SEQ ID NO: 346513 - RNA, 19 nt, Artificial Sequence
  Description of Artificial Sequence: Synthetic oligonucleotide
  Sense Strand Starting at position 352 of SEQ ID NO: 315780
agacauugccagugcuuag

SEQ ID NO: 346514 - RNA, 19 nt, Artificial Sequence
  Description of Artificial Sequence: Synthetic oligonucleotide
  Antisense Strand to SEQ ID NO: 346513
cuaagcacuggcaaugucu

SEQ ID NO: 346515 - RNA, 19 nt, Artificial Sequence
  Description of Artificial Sequence: Synthetic oligonucleotide
  Sense Strand Starting at position 352 of SEQ ID NO: 315867
uccuaucaauuugaguuga

SEQ ID NO: 346516 - RNA, 19 nt, Artificial Sequence
  Description of Artificial Sequence: Synthetic oligonucleotide
  Antisense Strand to SEQ ID NO: 346515
ucaacucaaauugauagga

SEQ ID NO: 346517 - RNA, 19 nt, Artificial Sequence
  Description of Artificial Sequence: Synthetic oligonucleotide
  Sense Strand Starting at position 352 of SEQ ID NO: 315929
caguuauggugcccacaug

SEQ ID NO: 346518 - RNA, 19 nt, Artificial Sequence
  Description of Artificial Sequence: Synthetic oligonucleotide
  Antisense Strand to SEQ ID NO: 346517
caugugggcaccauaacug

SEQ ID NO: 346519 - RNA, 19 nt, Artificial Sequence
  Description of Artificial Sequence: Synthetic oligonucleotide
  Sense Strand Starting at position 352 of SEQ ID NO: 315930
aguuauggugcccacauga

SEQ ID NO: 346520 - RNA, 19 nt, Artificial Sequence
  Description of Artificial Sequence: Synthetic oligonucleotide
  Antisense Strand to SEQ ID NO: 346519
ucaugugggcaccauaacu

SEQ ID NO: 346521 - RNA, 19 nt, Artificial Sequence
  Description of Artificial Sequence: Synthetic oligonucleotide
  Sense Strand Starting at position 352 of SEQ ID NO: 316034
gagggaggugucugaccaa

SEQ ID NO: 346522 - RNA, 19 nt, Artificial Sequence
  Description of Artificial Sequence: Synthetic oligonucleotide
  Antisense Strand to SEQ ID NO: 346521
uuggucagacaccucccuc

SEQ ID NO: 346523 - RNA, 19 nt, Artificial Sequence
  Description of Artificial Sequence: Synthetic oligonucleotide
  Sense Strand Starting at position 352 of SEQ ID NO: 316037
ggaggugucugaccaagac

SEQ ID NO: 346524 - RNA, 19 nt, Artificial Sequence
  Description of Artificial Sequence: Synthetic oligonucleotide
  Antisense Strand to SEQ ID NO: 346523
gucuuggucagacaccucc

SEQ ID NO: 346525 - RNA, 19 nt, Artificial Sequence
  Description of Artificial Sequence: Synthetic oligonucleotide
  Sense Strand Starting at position 352 of SEQ ID NO: 316323
uaggaagugcuccgugaac

SEQ ID NO: 346526 - RNA, 19 nt, Artificial Sequence
  Description of Artificial Sequence: Synthetic oligonucleotide
  Antisense Strand to SEQ ID NO: 346525
guucacggagcacuuccua

SEQ ID NO: 346527 - RNA, 19 nt, Artificial Sequence
  Description of Artificial Sequence: Synthetic oligonucleotide
  Sense Strand Starting at position 352 of SEQ ID NO: 316325
ggaagugcuccgugaacua

SEQ ID NO: 346528 - RNA, 19 nt, Artificial Sequence
  Description of Artificial Sequence: Synthetic oligonucleotide
  Antisense Strand to SEQ ID NO: 346527
uaguucacggagcacuucc

SEQ ID NO: 346529 - RNA, 19 nt, Artificial Sequence
  Description of Artificial Sequence: Synthetic oligonucleotide
  Sense Strand Starting at position 352 of SEQ ID NO: 316409
gcaggucuucgguggacuu

SEQ ID NO: 346530 - RNA, 19 nt, Artificial Sequence
  Description of Artificial Sequence: Synthetic oligonucleotide
  Antisense Strand to SEQ ID NO: 346529
aaguccaccgaagaccugc

SEQ ID NO: 346531 - RNA, 19 nt, Artificial Sequence
  Description of Artificial Sequence: Synthetic oligonucleotide
  Sense Strand Starting at position 352 of SEQ ID NO: 316506
gaaagaugccaaugcgauu

SEQ ID NO: 346532 - RNA, 19 nt, Artificial Sequence
  Description of Artificial Sequence: Synthetic oligonucleotide
  Antisense Strand to SEQ ID NO: 346531
aaucgcauuggcaucuuuc

SEQ ID NO: 346533 - RNA, 19 nt, Artificial Sequence
  Description of Artificial Sequence: Synthetic oligonucleotide
  Sense Strand Starting at position 352 of SEQ ID NO: 316913
ggacgaauuccuggcauag

SEQ ID NO: 346534 - RNA, 19 nt, Artificial Sequence
  Description of Artificial Sequence: Synthetic oligonucleotide
  Antisense Strand to SEQ ID NO: 346533
cuaugccaggaauucgucc

SEQ ID NO: 346535 - RNA, 19 nt, Artificial Sequence
  Description of Artificial Sequence: Synthetic oligonucleotide
  Sense Strand Starting at position 352 of SEQ ID NO: 317061
cagagaugguucccggaau

SEQ ID NO: 346536 - RNA, 19 nt, Artificial Sequence
  Description of Artificial Sequence: Synthetic oligonucleotide
  Antisense Strand to SEQ ID NO: 346535
auuccgggaaccaucucug

SEQ ID NO: 346537 - RNA, 19 nt, Artificial Sequence
  Description of Artificial Sequence: Synthetic oligonucleotide
  Sense Strand Starting at position 352 of SEQ ID NO: 317354
gcgggaaugccacguuuaa

SEQ ID NO: 346538 - RNA, 19 nt, Artificial Sequence
  Description of Artificial Sequence: Synthetic oligonucleotide
  Antisense Strand to SEQ ID NO: 346537
uuaaacguggcauucccgc

SEQ ID NO: 346539 - RNA, 19 nt, Artificial Sequence
  Description of Artificial Sequence: Synthetic oligonucleotide
  Sense Strand Starting at position 352 of SEQ ID NO: 317366
cguuuaauccguuaguaaa

SEQ ID NO: 346540 - RNA, 19 nt, Artificial Sequence
  Description of Artificial Sequence: Synthetic oligonucleotide
  Antisense Strand to SEQ ID NO: 346539
uuuacuaacggauuaaacg

SEQ ID NO: 346541 - RNA, 19 nt, Artificial Sequence
  Description of Artificial Sequence: Synthetic oligonucleotide
  Sense Strand Starting at position 352 of SEQ ID NO: 317544
ugguuucuuccugaccgga

SEQ ID NO: 346542 - RNA, 19 nt, Artificial Sequence
  Description of Artificial Sequence: Synthetic oligonucleotide
  Antisense Strand to SEQ ID NO: 346541
uccggucaggaagaaacca

SEQ ID NO: 346543 - RNA, 19 nt, Artificial Sequence
  Description of Artificial Sequence: Synthetic oligonucleotide
  Sense Strand Starting at position 352 of SEQ ID NO: 317572
aggagaguucuuugggugu

SEQ ID NO: 346544 - RNA, 19 nt, Artificial Sequence
  Description of Artificial Sequence: Synthetic oligonucleotide
  Antisense Strand to SEQ ID NO: 346543
acacccaaagaacucuccu

SEQ ID NO: 346545 - RNA, 19 nt, Artificial Sequence
  Description of Artificial Sequence: Synthetic oligonucleotide
  Sense Strand Starting at position 352 of SEQ ID NO: 317726
uccugauauuagucccuga

SEQ ID NO: 346546 - RNA, 19 nt, Artificial Sequence
  Description of Artificial Sequence: Synthetic oligonucleotide
  Antisense Strand to SEQ ID NO: 346545
ucagggacuaauaucagga

SEQ ID NO: 346547 - RNA, 19 nt, Artificial Sequence
  Description of Artificial Sequence: Synthetic oligonucleotide
  Sense Strand Starting at position 352 of SEQ ID NO: 317729
ugauauuagucccugaucu

SEQ ID NO: 346548 - RNA, 19 nt, Artificial Sequence
  Description of Artificial Sequence: Synthetic oligonucleotide
  Antisense Strand to SEQ ID NO: 346547
agaucagggacuaauauca

SEQ ID NO: 346549 - RNA, 19 nt, Artificial Sequence
  Description of Artificial Sequence: Synthetic oligonucleotide
  Sense Strand Starting at position 352 of SEQ ID NO: 317731
auauuagucccugaucucu

SEQ ID NO: 346550 - RNA, 19 nt, Artificial Sequence
  Description of Artificial Sequence: Synthetic oligonucleotide
  Antisense Strand to SEQ ID NO: 346549
agagaucagggacuaauau

SEQ ID NO: 346551 - RNA, 19 nt, Artificial Sequence
  Description of Artificial Sequence: Synthetic oligonucleotide
  Sense Strand Starting at position 352 of SEQ ID NO: 317740
ccugaucucuucccauagu

SEQ ID NO: 346552 - RNA, 19 nt, Artificial Sequence
  Description of Artificial Sequence: Synthetic oligonucleotide
  Antisense Strand to SEQ ID NO: 346551
acuaugggaagagaucagg

SEQ ID NO: 346553 - RNA, 19 nt, Artificial Sequence
  Description of Artificial Sequence: Synthetic oligonucleotide
  Sense Strand Starting at position 352 of SEQ ID NO: 317757
guaguaguugcuuugcuga

SEQ ID NO: 346554 - RNA, 19 nt, Artificial Sequence
  Description of Artificial Sequence: Synthetic oligonucleotide
  Antisense Strand to SEQ ID NO: 346553
ucagcaaagcaacuacuac

SEQ ID NO: 346555 - RNA, 19 nt, Artificial Sequence
  Description of Artificial Sequence: Synthetic oligonucleotide
  Sense Strand Starting at position 352 of SEQ ID NO: 317759
aguaguugcuuugcugaga

SEQ ID NO: 346556 - RNA, 19 nt, Artificial Sequence
  Description of Artificial Sequence: Synthetic oligonucleotide
  Antisense Strand to SEQ ID NO: 346555
ucucagcaaagcaacuacu

SEQ ID NO: 346557 - RNA, 19 nt, Artificial Sequence
  Description of Artificial Sequence: Synthetic oligonucleotide
  Sense Strand Starting at position 352 of SEQ ID NO: 317760
guaguugcuuugcugagau

SEQ ID NO: 346558 - RNA, 19 nt, Artificial Sequence
  Description of Artificial Sequence: Synthetic oligonucleotide
  Antisense Strand to SEQ ID NO: 346557
aucucagcaaagcaacuac

SEQ ID NO: 346559 - RNA, 19 nt, Artificial Sequence
  Description of Artificial Sequence: Synthetic oligonucleotide
  Sense Strand Starting at position 352 of SEQ ID NO: 317803
ugaguugugccauagagcu

SEQ ID NO: 346560 - RNA, 19 nt, Artificial Sequence
  Description of Artificial Sequence: Synthetic oligonucleotide
  Antisense Strand to SEQ ID NO: 346559
agcucuauggcacaacuca

SEQ ID NO: 346561 - RNA, 19 nt, Artificial Sequence
  Description of Artificial Sequence: Synthetic oligonucleotide
  Sense Strand Starting at position 352 of SEQ ID NO: 317809
gugccauagagcugauauu

SEQ ID NO: 346562 - RNA, 19 nt, Artificial Sequence
  Description of Artificial Sequence: Synthetic oligonucleotide
  Antisense Strand to SEQ ID NO: 346561
aauaucagcucuauggcac

SEQ ID NO: 346563 - RNA, 19 nt, Artificial Sequence
  Description of Artificial Sequence: Synthetic oligonucleotide
  Sense Strand Starting at position 352 of SEQ ID NO: 317836
auguuuguugcucaacuca

SEQ ID NO: 346564 - RNA, 19 nt, Artificial Sequence
  Description of Artificial Sequence: Synthetic oligonucleotide
  Antisense Strand to SEQ ID NO: 346563
ugaguugagcaacaaacau

SEQ ID NO: 346565 - RNA, 19 nt, Artificial Sequence
  Description of Artificial Sequence: Synthetic oligonucleotide
  Sense Strand Starting at position 352 of SEQ ID NO: 317985
uggcuuagucacugaaggu

SEQ ID NO: 346566 - RNA, 19 nt, Artificial Sequence
  Description of Artificial Sequence: Synthetic oligonucleotide
  Antisense Strand to SEQ ID NO: 346565
accuucagugacuaagcca

SEQ ID NO: 346567 - RNA, 19 nt, Artificial Sequence
  Description of Artificial Sequence: Synthetic oligonucleotide
  Sense Strand Starting at position 352 of SEQ ID NO: 317986
ggcuuagucacugaaggug

SEQ ID NO: 346568 - RNA, 19 nt, Artificial Sequence
  Description of Artificial Sequence: Synthetic oligonucleotide
  Antisense Strand to SEQ ID NO: 346567
caccuucagugacuaagcc

SEQ ID NO: 346569 - RNA, 19 nt, Artificial Sequence
  Description of Artificial Sequence: Synthetic oligonucleotide
  Sense Strand Starting at position 352 of SEQ ID NO: 318024
aaacgcuaguauguucuaa

SEQ ID NO: 346570 - RNA, 19 nt, Artificial Sequence
  Description of Artificial Sequence: Synthetic oligonucleotide
  Antisense Strand to SEQ ID NO: 346569
uuagaacauacuagcguuu

SEQ ID NO: 346571 - RNA, 19 nt, Artificial Sequence
  Description of Artificial Sequence: Synthetic oligonucleotide
  Sense Strand Starting at position 352 of SEQ ID NO: 318101
gaagauaggacaugucagu

SEQ ID NO: 346572 - RNA, 19 nt, Artificial Sequence
  Description of Artificial Sequence: Synthetic oligonucleotide
  Antisense Strand to SEQ ID NO: 346571
acugacauguccuaucuuc

SEQ ID NO: 346573 - RNA, 19 nt, Artificial Sequence
  Description of Artificial Sequence: Synthetic oligonucleotide
  Sense Strand Starting at position 352 of SEQ ID NO: 318256
cuuaaaguugcugggaaua

SEQ ID NO: 346574 - RNA, 19 nt, Artificial Sequence
  Description of Artificial Sequence: Synthetic oligonucleotide
  Antisense Strand to SEQ ID NO: 346573
uauucccagcaacuuuaag

SEQ ID NO: 346575 - RNA, 19 nt, Artificial Sequence
  Description of Artificial Sequence: Synthetic oligonucleotide
  Sense Strand Starting at position 352 of SEQ ID NO: 318537
gggaacaagcguugucaag

SEQ ID NO: 346576 - RNA, 19 nt, Artificial Sequence
  Description of Artificial Sequence: Synthetic oligonucleotide
  Antisense Strand to SEQ ID NO: 346575
cuugacaacgcuuguuccc

SEQ ID NO: 346577 - RNA, 19 nt, Artificial Sequence
  Description of Artificial Sequence: Synthetic oligonucleotide
  Sense Strand Starting at position 352 of SEQ ID NO: 318539
gaacaagcguugucaagga

SEQ ID NO: 346578 - RNA, 19 nt, Artificial Sequence
  Description of Artificial Sequence: Synthetic oligonucleotide
  Antisense Strand to SEQ ID NO: 346577
uccuugacaacgcuuguuc

SEQ ID NO: 346579 - RNA, 19 nt, Artificial Sequence
  Description of Artificial Sequence: Synthetic oligonucleotide
  Sense Strand Starting at position 352 of SEQ ID NO: 318608
guaccauuacuguggauac

SEQ ID NO: 346580 - RNA, 19 nt, Artificial Sequence
  Description of Artificial Sequence: Synthetic oligonucleotide
  Antisense Strand to SEQ ID NO: 346579
guauccacaguaaugguac

SEQ ID NO: 346581 - RNA, 19 nt, Artificial Sequence
  Description of Artificial Sequence: Synthetic oligonucleotide
  Sense Strand Starting at position 352 of SEQ ID NO: 318793
aaugucuaucgacagauua

SEQ ID NO: 346582 - RNA, 19 nt, Artificial Sequence
  Description of Artificial Sequence: Synthetic oligonucleotide
  Antisense Strand to SEQ ID NO: 346581
uaaucugucgauagacauu

SEQ ID NO: 346583 - RNA, 19 nt, Artificial Sequence
  Description of Artificial Sequence: Synthetic oligonucleotide
  Sense Strand Starting at position 352 of SEQ ID NO: 318942
guggguagcauauaaacaa

SEQ ID NO: 346584 - RNA, 19 nt, Artificial Sequence
  Description of Artificial Sequence: Synthetic oligonucleotide
  Antisense Strand to SEQ ID NO: 346583
uuguuuauaugcuacccac

SEQ ID NO: 346585 - RNA, 19 nt, Artificial Sequence
  Description of Artificial Sequence: Synthetic oligonucleotide
  Sense Strand Starting at position 353 of SEQ ID NO: 315303
gcugacacaucaucacaga

SEQ ID NO: 346586 - RNA, 19 nt, Artificial Sequence
  Description of Artificial Sequence: Synthetic oligonucleotide
  Antisense Strand to SEQ ID NO: 346585
ucugugaugaugugucagc

SEQ ID NO: 346587 - RNA, 19 nt, Artificial Sequence
  Description of Artificial Sequence: Synthetic oligonucleotide
  Sense Strand Starting at position 353 of SEQ ID NO: 315518
uuguuucuggcauacagua

SEQ ID NO: 346588 - RNA, 19 nt, Artificial Sequence
  Description of Artificial Sequence: Synthetic oligonucleotide
  Antisense Strand to SEQ ID NO: 346587
uacuguaugccagaaacaa

SEQ ID NO: 346589 - RNA, 19 nt, Artificial Sequence
  Description of Artificial Sequence: Synthetic oligonucleotide
  Sense Strand Starting at position 353 of SEQ ID NO: 315547
gggucuuucuuugccauuu

SEQ ID NO: 346590 - RNA, 19 nt, Artificial Sequence
  Description of Artificial Sequence: Synthetic oligonucleotide
  Antisense Strand to SEQ ID NO: 346589
aaauggcaaagaaagaccc

SEQ ID NO: 346591 - RNA, 19 nt, Artificial Sequence
  Description of Artificial Sequence: Synthetic oligonucleotide
  Sense Strand Starting at position 353 of SEQ ID NO: 315814
agucuauugugucuagaaa

SEQ ID NO: 346592 - RNA, 19 nt, Artificial Sequence
  Description of Artificial Sequence: Synthetic oligonucleotide
  Antisense Strand to SEQ ID NO: 346591
uuucuagacacaauagacu

SEQ ID NO: 346593 - RNA, 19 nt, Artificial Sequence
  Description of Artificial Sequence: Synthetic oligonucleotide
  Sense Strand Starting at position 353 of SEQ ID NO: 315848
guagauucucaaugaacua

SEQ ID NO: 346594 - RNA, 19 nt, Artificial Sequence
  Description of Artificial Sequence: Synthetic oligonucleotide
  Antisense Strand to SEQ ID NO: 346593
uaguucauugagaaucuac

SEQ ID NO: 346595 - RNA, 19 nt, Artificial Sequence
  Description of Artificial Sequence: Synthetic oligonucleotide
  Sense Strand Starting at position 353 of SEQ ID NO: 315940
gugagaacuugccuagagu

SEQ ID NO: 346596 - RNA, 19 nt, Artificial Sequence
  Description of Artificial Sequence: Synthetic oligonucleotide
  Antisense Strand to SEQ ID NO: 346595
acucuaggcaaguucucac

SEQ ID NO: 346597 - RNA, 19 nt, Artificial Sequence
  Description of Artificial Sequence: Synthetic oligonucleotide
  Sense Strand Starting at position 353 of SEQ ID NO: 315941
ugagaacuugccuagaguc

SEQ ID NO: 346598 - RNA, 19 nt, Artificial Sequence
  Description of Artificial Sequence: Synthetic oligonucleotide
  Antisense Strand to SEQ ID NO: 346597
gacucuaggcaaguucuca

SEQ ID NO: 346599 - RNA, 19 nt, Artificial Sequence
  Description of Artificial Sequence: Synthetic oligonucleotide
  Sense Strand Starting at position 353 of SEQ ID NO: 315975
gagcuagaaucuguaagca

SEQ ID NO: 346600 - RNA, 19 nt, Artificial Sequence
  Description of Artificial Sequence: Synthetic oligonucleotide
  Antisense Strand to SEQ ID NO: 346599
ugcuuacagauucuagcuc

SEQ ID NO: 346601 - RNA, 19 nt, Artificial Sequence
  Description of Artificial Sequence: Synthetic oligonucleotide
  Sense Strand Starting at position 353 of SEQ ID NO: 316044
ucauuuauguggugaauuu

SEQ ID NO: 346602 - RNA, 19 nt, Artificial Sequence
  Description of Artificial Sequence: Synthetic oligonucleotide
  Antisense Strand to SEQ ID NO: 346601
aaauucaccacauaaauga

SEQ ID NO: 346603 - RNA, 19 nt, Artificial Sequence
  Description of Artificial Sequence: Synthetic oligonucleotide
  Sense Strand Starting at position 353 of SEQ ID NO: 316078
guauguuucccuuacuaga

SEQ ID NO: 346604 - RNA, 19 nt, Artificial Sequence
  Description of Artificial Sequence: Synthetic oligonucleotide
  Antisense Strand to SEQ ID NO: 346603
ucuaguaagggaaacauac

SEQ ID NO: 346605 - RNA, 19 nt, Artificial Sequence
  Description of Artificial Sequence: Synthetic oligonucleotide
  Sense Strand Starting at position 353 of SEQ ID NO: 316080
auguuucccuuacuagaca

SEQ ID NO: 346606 - RNA, 19 nt, Artificial Sequence
  Description of Artificial Sequence: Synthetic oligonucleotide
  Antisense Strand to SEQ ID NO: 346605
ugucuaguaagggaaacau

SEQ ID NO: 346607 - RNA, 19 nt, Artificial Sequence
  Description of Artificial Sequence: Synthetic oligonucleotide
  Sense Strand Starting at position 353 of SEQ ID NO: 316169
cucuauaauuguuuacgga

SEQ ID NO: 346608 - RNA, 19 nt, Artificial Sequence
  Description of Artificial Sequence: Synthetic oligonucleotide
  Antisense Strand to SEQ ID NO: 346607
uccguaaacaauuauagag

SEQ ID NO: 346609 - RNA, 19 nt, Artificial Sequence
  Description of Artificial Sequence: Synthetic oligonucleotide
  Sense Strand Starting at position 353 of SEQ ID NO: 316170
ucuauaauuguuuacggaa

SEQ ID NO: 346610 - RNA, 19 nt, Artificial Sequence
  Description of Artificial Sequence: Synthetic oligonucleotide
  Antisense Strand to SEQ ID NO: 346609
uuccguaaacaauuauaga

SEQ ID NO: 346611 - RNA, 19 nt, Artificial Sequence
  Description of Artificial Sequence: Synthetic oligonucleotide
  Sense Strand Starting at position 353 of SEQ ID NO: 316177
uuguuuacggaaugaauga

SEQ ID NO: 346612 - RNA, 19 nt, Artificial Sequence
  Description of Artificial Sequence: Synthetic oligonucleotide
  Antisense Strand to SEQ ID NO: 346611
ucauucauuccguaaacaa

SEQ ID NO: 346613 - RNA, 19 nt, Artificial Sequence
  Description of Artificial Sequence: Synthetic oligonucleotide
  Sense Strand Starting at position 353 of SEQ ID NO: 316241
gucccaacugguuaaauca

SEQ ID NO: 346614 - RNA, 19 nt, Artificial Sequence
  Description of Artificial Sequence: Synthetic oligonucleotide
  Antisense Strand to SEQ ID NO: 346613
ugauuuaaccaguugggac

SEQ ID NO: 346615 - RNA, 19 nt, Artificial Sequence
  Description of Artificial Sequence: Synthetic oligonucleotide
  Sense Strand Starting at position 353 of SEQ ID NO: 316393
ggaaauguacccuauucuu

SEQ ID NO: 346616 - RNA, 19 nt, Artificial Sequence
  Description of Artificial Sequence: Synthetic oligonucleotide
  Antisense Strand to SEQ ID NO: 346615
aagaauaggguacauuucc

SEQ ID NO: 346617 - RNA, 19 nt, Artificial Sequence
  Description of Artificial Sequence: Synthetic oligonucleotide
  Sense Strand Starting at position 353 of SEQ ID NO: 316440
uuuauucgacguuaggaaa

SEQ ID NO: 346618 - RNA, 19 nt, Artificial Sequence
  Description of Artificial Sequence: Synthetic oligonucleotide
  Antisense Strand to SEQ ID NO: 346617
uuuccuaacgucgaauaaa

SEQ ID NO: 346619 - RNA, 19 nt, Artificial Sequence
  Description of Artificial Sequence: Synthetic oligonucleotide
  Sense Strand Starting at position 353 of SEQ ID NO: 316519
auauuaagcuaucuccgau

SEQ ID NO: 346620 - RNA, 19 nt, Artificial Sequence
  Description of Artificial Sequence: Synthetic oligonucleotide
  Antisense Strand to SEQ ID NO: 346619
aucggagauagcuuaauau

SEQ ID NO: 346621 - RNA, 19 nt, Artificial Sequence
  Description of Artificial Sequence: Synthetic oligonucleotide
  Sense Strand Starting at position 353 of SEQ ID NO: 316564
uuucguagacaucgagaau

SEQ ID NO: 346622 - RNA, 19 nt, Artificial Sequence
  Description of Artificial Sequence: Synthetic oligonucleotide
  Antisense Strand to SEQ ID NO: 346621
auucucgaugucuacgaaa

SEQ ID NO: 346623 - RNA, 19 nt, Artificial Sequence
  Description of Artificial Sequence: Synthetic oligonucleotide
  Sense Strand Starting at position 353 of SEQ ID NO: 316565
uucguagacaucgagaauu

SEQ ID NO: 346624 - RNA, 19 nt, Artificial Sequence
  Description of Artificial Sequence: Synthetic oligonucleotide
  Antisense Strand to SEQ ID NO: 346623
aauucucgaugucuacgaa

SEQ ID NO: 346625 - RNA, 19 nt, Artificial Sequence
  Description of Artificial Sequence: Synthetic oligonucleotide
  Sense Strand Starting at position 353 of SEQ ID NO: 316567
cguagacaucgagaauuau

SEQ ID NO: 346626 - RNA, 19 nt, Artificial Sequence
  Description of Artificial Sequence: Synthetic oligonucleotide
  Antisense Strand to SEQ ID NO: 346625
auaauucucgaugucuacg

SEQ ID NO: 346627 - RNA, 19 nt, Artificial Sequence
  Description of Artificial Sequence: Synthetic oligonucleotide
  Sense Strand Starting at position 353 of SEQ ID NO: 316688
gagguagucuucucgaaua

SEQ ID NO: 346628 - RNA, 19 nt, Artificial Sequence
  Description of Artificial Sequence: Synthetic oligonucleotide
  Antisense Strand to SEQ ID NO: 346627
uauucgagaagacuaccuc

SEQ ID NO: 346629 - RNA, 19 nt, Artificial Sequence
  Description of Artificial Sequence: Synthetic oligonucleotide
  Sense Strand Starting at position 353 of SEQ ID NO: 316690
gguagucuucucgaauaaa

SEQ ID NO: 346630 - RNA, 19 nt, Artificial Sequence
  Description of Artificial Sequence: Synthetic oligonucleotide
  Antisense Strand to SEQ ID NO: 346629
uuuauucgagaagacuacc

SEQ ID NO: 346631 - RNA, 19 nt, Artificial Sequence
  Description of Artificial Sequence: Synthetic oligonucleotide
  Sense Strand Starting at position 353 of SEQ ID NO: 316693
agucuucucgaauaaaugu

SEQ ID NO: 346632 - RNA, 19 nt, Artificial Sequence
  Description of Artificial Sequence: Synthetic oligonucleotide
  Antisense Strand to SEQ ID NO: 346631
acauuuauucgagaagacu

SEQ ID NO: 346633 - RNA, 19 nt, Artificial Sequence
  Description of Artificial Sequence: Synthetic oligonucleotide
  Sense Strand Starting at position 353 of SEQ ID NO: 316723
uggucagggcaugacuaau

SEQ ID NO: 346634 - RNA, 19 nt, Artificial Sequence
  Description of Artificial Sequence: Synthetic oligonucleotide
  Antisense Strand to SEQ ID NO: 346633
auuagucaugcccugacca

SEQ ID NO: 346635 - RNA, 19 nt, Artificial Sequence
  Description of Artificial Sequence: Synthetic oligonucleotide
  Sense Strand Starting at position 353 of SEQ ID NO: 317386
gacugucagucaguacaaa

SEQ ID NO: 346636 - RNA, 19 nt, Artificial Sequence
  Description of Artificial Sequence: Synthetic oligonucleotide
  Antisense Strand to SEQ ID NO: 346635
uuuguacugacugacaguc

SEQ ID NO: 346637 - RNA, 19 nt, Artificial Sequence
  Description of Artificial Sequence: Synthetic oligonucleotide
  Sense Strand Starting at position 353 of SEQ ID NO: 317398
guacaaagccgugaaguca

SEQ ID NO: 346638 - RNA, 19 nt, Artificial Sequence
  Description of Artificial Sequence: Synthetic oligonucleotide
  Antisense Strand to SEQ ID NO: 346637
ugacuucacggcuuuguac

SEQ ID NO: 346639 - RNA, 19 nt, Artificial Sequence
  Description of Artificial Sequence: Synthetic oligonucleotide
  Sense Strand Starting at position 353 of SEQ ID NO: 317789
aacuauucucagugacgga

SEQ ID NO: 346640 - RNA, 19 nt, Artificial Sequence
  Description of Artificial Sequence: Synthetic oligonucleotide
  Antisense Strand to SEQ ID NO: 346639
uccgucacugagaauaguu

SEQ ID NO: 346641 - RNA, 19 nt, Artificial Sequence
  Description of Artificial Sequence: Synthetic oligonucleotide
  Sense Strand Starting at position 353 of SEQ ID NO: 317790
acuauucucagugacggaa

SEQ ID NO: 346642 - RNA, 19 nt, Artificial Sequence
  Description of Artificial Sequence: Synthetic oligonucleotide
  Antisense Strand to SEQ ID NO: 346641
uuccgucacugagaauagu

SEQ ID NO: 346643 - RNA, 19 nt, Artificial Sequence
  Description of Artificial Sequence: Synthetic oligonucleotide
  Sense Strand Starting at position 353 of SEQ ID NO: 317836
uucgguaaucuauaauuga

SEQ ID NO: 346644 - RNA, 19 nt, Artificial Sequence
  Description of Artificial Sequence: Synthetic oligonucleotide
  Antisense Strand to SEQ ID NO: 346643
ucaauuauagauuaccgaa

SEQ ID NO: 346645 - RNA, 19 nt, Artificial Sequence
  Description of Artificial Sequence: Synthetic oligonucleotide
  Sense Strand Starting at position 353 of SEQ ID NO: 317883
ucggguugaacucaaacuu

SEQ ID NO: 346646 - RNA, 19 nt, Artificial Sequence
  Description of Artificial Sequence: Synthetic oligonucleotide
  Antisense Strand to SEQ ID NO: 346645
aaguuugaguucaacccga

SEQ ID NO: 346647 - RNA, 19 nt, Artificial Sequence
  Description of Artificial Sequence: Synthetic oligonucleotide
  Sense Strand Starting at position 353 of SEQ ID NO: 317991
uuaaucuuagaaugcugaa

SEQ ID NO: 346648 - RNA, 19 nt, Artificial Sequence
  Description of Artificial Sequence: Synthetic oligonucleotide
  Antisense Strand to SEQ ID NO: 346647
uucagcauucuaagauuaa

SEQ ID NO: 346649 - RNA, 19 nt, Artificial Sequence
  Description of Artificial Sequence: Synthetic oligonucleotide
  Sense Strand Starting at position 353 of SEQ ID NO: 318030
gugauauguguccagacga

SEQ ID NO: 346650 - RNA, 19 nt, Artificial Sequence
  Description of Artificial Sequence: Synthetic oligonucleotide
  Antisense Strand to SEQ ID NO: 346649
ucgucuggacacauaucac

SEQ ID NO: 346651 - RNA, 19 nt, Artificial Sequence
  Description of Artificial Sequence: Synthetic oligonucleotide
  Sense Strand Starting at position 353 of SEQ ID NO: 318483
cuguuaaaugcuuaaggcu

SEQ ID NO: 346652 - RNA, 19 nt, Artificial Sequence
  Description of Artificial Sequence: Synthetic oligonucleotide
  Antisense Strand to SEQ ID NO: 346651
agccuuaagcauuuaacag

SEQ ID NO: 346653 - RNA, 19 nt, Artificial Sequence
  Description of Artificial Sequence: Synthetic oligonucleotide
  Sense Strand Starting at position 353 of SEQ ID NO: 318628
aagguugugcacugaaaga

SEQ ID NO: 346654 - RNA, 19 nt, Artificial Sequence
  Description of Artificial Sequence: Synthetic oligonucleotide
  Antisense Strand to SEQ ID NO: 346653
ucuuucagugcacaaccuu

SEQ ID NO: 346655 - RNA, 19 nt, Artificial Sequence
  Description of Artificial Sequence: Synthetic oligonucleotide
  Sense Strand Starting at position 353 of SEQ ID NO: 318860
gagguugcauaaguagaga

SEQ ID NO: 346656 - RNA, 19 nt, Artificial Sequence
  Description of Artificial Sequence: Synthetic oligonucleotide
  Antisense Strand to SEQ ID NO: 346655
ucucuacuuaugcaaccuc

SEQ ID NO: 346657 - RNA, 19 nt, Artificial Sequence
  Description of Artificial Sequence: Synthetic oligonucleotide
  Sense Strand Starting at position 353 of SEQ ID NO: 318873
uagagaucgcuccacugca

SEQ ID NO: 346658 - RNA, 19 nt, Artificial Sequence
  Description of Artificial Sequence: Synthetic oligonucleotide
  Antisense Strand to SEQ ID NO: 346657
ugcaguggagcgaucucua

SEQ ID NO: 346659 - RNA, 19 nt, Artificial Sequence
  Description of Artificial Sequence: Synthetic oligonucleotide
  Sense Strand Starting at position 353 of SEQ ID NO: 319108
gagcauaaagugcauuaau

SEQ ID NO: 346660 - RNA, 19 nt, Artificial Sequence
  Description of Artificial Sequence: Synthetic oligonucleotide
  Antisense Strand to SEQ ID NO: 346659
auuaaugcacuuuaugcuc

SEQ ID NO: 346661 - RNA, 19 nt, Artificial Sequence
  Description of Artificial Sequence: Synthetic oligonucleotide
  Sense Strand Starting at position 353 of SEQ ID NO: 319174
ccauauugguagcuaacau

SEQ ID NO: 346662 - RNA, 19 nt, Artificial Sequence
  Description of Artificial Sequence: Synthetic oligonucleotide
  Antisense Strand to SEQ ID NO: 346661
auguuagcuaccaauaugg

SEQ ID NO: 346663 - RNA, 19 nt, Artificial Sequence
  Description of Artificial Sequence: Synthetic oligonucleotide
  Sense Strand Starting at position 353 of SEQ ID NO: 319185
gcuaacauauagguagagu

SEQ ID NO: 346664 - RNA, 19 nt, Artificial Sequence
  Description of Artificial Sequence: Synthetic oligonucleotide
  Antisense Strand to SEQ ID NO: 346663
acucuaccuauauguuagc

SEQ ID NO: 346665 - RNA, 19 nt, Artificial Sequence
  Description of Artificial Sequence: Synthetic oligonucleotide
  Sense Strand Starting at position 354 of SEQ ID NO: 315313
cagauucugugacuguaaa

SEQ ID NO: 346666 - RNA, 19 nt, Artificial Sequence
  Description of Artificial Sequence: Synthetic oligonucleotide
  Antisense Strand to SEQ ID NO: 346665
uuuacagucacagaaucug

SEQ ID NO: 346667 - RNA, 19 nt, Artificial Sequence
  Description of Artificial Sequence: Synthetic oligonucleotide
  Sense Strand Starting at position 354 of SEQ ID NO: 315314
agauucugugacuguaaac

SEQ ID NO: 346668 - RNA, 19 nt, Artificial Sequence
  Description of Artificial Sequence: Synthetic oligonucleotide
  Antisense Strand to SEQ ID NO: 346667
guuuacagucacagaaucu

SEQ ID NO: 346669 - RNA, 19 nt, Artificial Sequence
  Description of Artificial Sequence: Synthetic oligonucleotide
  Sense Strand Starting at position 354 of SEQ ID NO: 315591
caaagacacuucguagaug

SEQ ID NO: 346670 - RNA, 19 nt, Artificial Sequence
  Description of Artificial Sequence: Synthetic oligonucleotide
  Antisense Strand to SEQ ID NO: 346669
caucuacgaagugucuuug

SEQ ID NO: 346671 - RNA, 19 nt, Artificial Sequence
  Description of Artificial Sequence: Synthetic oligonucleotide
  Sense Strand Starting at position 354 of SEQ ID NO: 315639
gcaaguuauccugcucgug

SEQ ID NO: 346672 - RNA, 19 nt, Artificial Sequence
  Description of Artificial Sequence: Synthetic oligonucleotide
  Antisense Strand to SEQ ID NO: 346671
cacgagcaggauaacuugc

SEQ ID NO: 346673 - RNA, 19 nt, Artificial Sequence
  Description of Artificial Sequence: Synthetic oligonucleotide
  Sense Strand Starting at position 354 of SEQ ID NO: 315640
caaguuauccugcucgugu

SEQ ID NO: 346674 - RNA, 19 nt, Artificial Sequence
  Description of Artificial Sequence: Synthetic oligonucleotide
  Antisense Strand to SEQ ID NO: 346673
acacgagcaggauaacuug

SEQ ID NO: 346675 - RNA, 19 nt, Artificial Sequence
  Description of Artificial Sequence: Synthetic oligonucleotide
  Sense Strand Starting at position 354 of SEQ ID NO: 315645
uauccugcucguguuucua

SEQ ID NO: 346676 - RNA, 19 nt, Artificial Sequence
  Description of Artificial Sequence: Synthetic oligonucleotide
  Antisense Strand to SEQ ID NO: 346675
uagaaacacgagcaggaua

SEQ ID NO: 346677 - RNA, 19 nt, Artificial Sequence
  Description of Artificial Sequence: Synthetic oligonucleotide
  Sense Strand Starting at position 354 of SEQ ID NO: 315810
aggaaaugauguucuuauc

SEQ ID NO: 346678 - RNA, 19 nt, Artificial Sequence
  Description of Artificial Sequence: Synthetic oligonucleotide
  Antisense Strand to SEQ ID NO: 346677
gauaagaacaucauuuccu

SEQ ID NO: 346679 - RNA, 19 nt, Artificial Sequence
  Description of Artificial Sequence: Synthetic oligonucleotide
  Sense Strand Starting at position 354 of SEQ ID NO: 315961
ucuauuagguccucugaca

SEQ ID NO: 346680 - RNA, 19 nt, Artificial Sequence
  Description of Artificial Sequence: Synthetic oligonucleotide
  Antisense Strand to SEQ ID NO: 346679
ugucagaggaccuaauaga

SEQ ID NO: 346681 - RNA, 19 nt, Artificial Sequence
  Description of Artificial Sequence: Synthetic oligonucleotide
  Sense Strand Starting at position 354 of SEQ ID NO: 316107
cucaacagcgucuauaauu

SEQ ID NO: 346682 - RNA, 19 nt, Artificial Sequence
  Description of Artificial Sequence: Synthetic oligonucleotide
  Antisense Strand to SEQ ID NO: 346681
aauuauagacgcuguugag

SEQ ID NO: 346683 - RNA, 19 nt, Artificial Sequence
  Description of Artificial Sequence: Synthetic oligonucleotide
  Sense Strand Starting at position 354 of SEQ ID NO: 316283
ugguauaggugaccucaaa

SEQ ID NO: 346684 - RNA, 19 nt, Artificial Sequence
  Description of Artificial Sequence: Synthetic oligonucleotide
  Antisense Strand to SEQ ID NO: 346683
uuugaggucaccuauacca

SEQ ID NO: 346685 - RNA, 19 nt, Artificial Sequence
  Description of Artificial Sequence: Synthetic oligonucleotide
  Sense Strand Starting at position 354 of SEQ ID NO: 316655
gccaaagaccuuuggaacu

SEQ ID NO: 346686 - RNA, 19 nt, Artificial Sequence
  Description of Artificial Sequence: Synthetic oligonucleotide
  Antisense Strand to SEQ ID NO: 346685
aguuccaaaggucuuuggc

SEQ ID NO: 346687 - RNA, 19 nt, Artificial Sequence
  Description of Artificial Sequence: Synthetic oligonucleotide
  Sense Strand Starting at position 354 of SEQ ID NO: 316668
ggaacuaguguuugagacu

SEQ ID NO: 346688 - RNA, 19 nt, Artificial Sequence
  Description of Artificial Sequence: Synthetic oligonucleotide
  Antisense Strand to SEQ ID NO: 346687
agucucaaacacuaguucc

SEQ ID NO: 346689 - RNA, 19 nt, Artificial Sequence
  Description of Artificial Sequence: Synthetic oligonucleotide
  Sense Strand Starting at position 354 of SEQ ID NO: 316711
ugacgaagauuugggagaa

SEQ ID NO: 346690 - RNA, 19 nt, Artificial Sequence
  Description of Artificial Sequence: Synthetic oligonucleotide
  Antisense Strand to SEQ ID NO: 346689
uucucccaaaucuucguca

SEQ ID NO: 346691 - RNA, 19 nt, Artificial Sequence
  Description of Artificial Sequence: Synthetic oligonucleotide
  Sense Strand Starting at position 354 of SEQ ID NO: 316748
gggacaaaucgauguccca

SEQ ID NO: 346692 - RNA, 19 nt, Artificial Sequence
  Description of Artificial Sequence: Synthetic oligonucleotide
  Antisense Strand to SEQ ID NO: 346691
ugggacaucgauuuguccc

SEQ ID NO: 346693 - RNA, 19 nt, Artificial Sequence
  Description of Artificial Sequence: Synthetic oligonucleotide
  Sense Strand Starting at position 354 of SEQ ID NO: 316846
aggagucaagguugauaug

SEQ ID NO: 346694 - RNA, 19 nt, Artificial Sequence
  Description of Artificial Sequence: Synthetic oligonucleotide
  Antisense Strand to SEQ ID NO: 346693
cauaucaaccuugacuccu

SEQ ID NO: 346695 - RNA, 19 nt, Artificial Sequence
  Description of Artificial Sequence: Synthetic oligonucleotide
  Sense Strand Starting at position 354 of SEQ ID NO: 316847
ggagucaagguugauaugu

SEQ ID NO: 346696 - RNA, 19 nt, Artificial Sequence
  Description of Artificial Sequence: Synthetic oligonucleotide
  Antisense Strand to SEQ ID NO: 346695
acauaucaaccuugacucc

SEQ ID NO: 346697 - RNA, 19 nt, Artificial Sequence
  Description of Artificial Sequence: Synthetic oligonucleotide
  Sense Strand Starting at position 354 of SEQ ID NO: 317307
auucgugguccucagaauu

SEQ ID NO: 346698 - RNA, 19 nt, Artificial Sequence
  Description of Artificial Sequence: Synthetic oligonucleotide
  Antisense Strand to SEQ ID NO: 346697
aauucugaggaccacgaau

SEQ ID NO: 346699 - RNA, 19 nt, Artificial Sequence
  Description of Artificial Sequence: Synthetic oligonucleotide
  Sense Strand Starting at position 354 of SEQ ID NO: 317313
gguccucagaauugguuua

SEQ ID NO: 346700 - RNA, 19 nt, Artificial Sequence
  Description of Artificial Sequence: Synthetic oligonucleotide
  Antisense Strand to SEQ ID NO: 346699
uaaaccaauucugaggacc

SEQ ID NO: 346701 - RNA, 19 nt, Artificial Sequence
  Description of Artificial Sequence: Synthetic oligonucleotide
  Sense Strand Starting at position 354 of SEQ ID NO: 317318
ucagaauugguuuaggguu

SEQ ID NO: 346702 - RNA, 19 nt, Artificial Sequence
  Description of Artificial Sequence: Synthetic oligonucleotide
  Antisense Strand to SEQ ID NO: 346701
aacccuaaaccaauucuga

SEQ ID NO: 346703 - RNA, 19 nt, Artificial Sequence
  Description of Artificial Sequence: Synthetic oligonucleotide
  Sense Strand Starting at position 354 of SEQ ID NO: 317418
aggugaauuuaggaacuga

SEQ ID NO: 346704 - RNA, 19 nt, Artificial Sequence
  Description of Artificial Sequence: Synthetic oligonucleotide
  Antisense Strand to SEQ ID NO: 346703
ucaguuccuaaauucaccu

SEQ ID NO: 346705 - RNA, 19 nt, Artificial Sequence
  Description of Artificial Sequence: Synthetic oligonucleotide
  Sense Strand Starting at position 354 of SEQ ID NO: 317575
cgcgucauugggucucuuu

SEQ ID NO: 346706 - RNA, 19 nt, Artificial Sequence
  Description of Artificial Sequence: Synthetic oligonucleotide
  Antisense Strand to SEQ ID NO: 346705
aaagagacccaaugacgcg

SEQ ID NO: 346707 - RNA, 19 nt, Artificial Sequence
  Description of Artificial Sequence: Synthetic oligonucleotide
  Sense Strand Starting at position 354 of SEQ ID NO: 317674
uugugagugugaucaggaa

SEQ ID NO: 346708 - RNA, 19 nt, Artificial Sequence
  Description of Artificial Sequence: Synthetic oligonucleotide
  Antisense Strand to SEQ ID NO: 346707
uuccugaucacacucacaa

SEQ ID NO: 346709 - RNA, 19 nt, Artificial Sequence
  Description of Artificial Sequence: Synthetic oligonucleotide
  Sense Strand Starting at position 354 of SEQ ID NO: 317920
auuguaauaguugacucau

SEQ ID NO: 346710 - RNA, 19 nt, Artificial Sequence
  Description of Artificial Sequence: Synthetic oligonucleotide
  Antisense Strand to SEQ ID NO: 346709
augagucaacuauuacaau

SEQ ID NO: 346711 - RNA, 19 nt, Artificial Sequence
  Description of Artificial Sequence: Synthetic oligonucleotide
  Sense Strand Starting at position 354 of SEQ ID NO: 317931
ugacucaucugguuugaau

SEQ ID NO: 346712 - RNA, 19 nt, Artificial Sequence
  Description of Artificial Sequence: Synthetic oligonucleotide
  Antisense Strand to SEQ ID NO: 346711
auucaaaccagaugaguca

SEQ ID NO: 346713 - RNA, 19 nt, Artificial Sequence
  Description of Artificial Sequence: Synthetic oligonucleotide
  Sense Strand Starting at position 354 of SEQ ID NO: 317952
aaguauggugcaugagaua

SEQ ID NO: 346714 - RNA, 19 nt, Artificial Sequence
  Description of Artificial Sequence: Synthetic oligonucleotide
  Antisense Strand to SEQ ID NO: 346713
uaucucaugcaccauacuu

SEQ ID NO: 346715 - RNA, 19 nt, Artificial Sequence
  Description of Artificial Sequence: Synthetic oligonucleotide
  Sense Strand Starting at position 354 of SEQ ID NO: 317965
gagauagucuggccacuga

SEQ ID NO: 346716 - RNA, 19 nt, Artificial Sequence
  Description of Artificial Sequence: Synthetic oligonucleotide
  Antisense Strand to SEQ ID NO: 346715
ucaguggccagacuaucuc

SEQ ID NO: 346717 - RNA, 19 nt, Artificial Sequence
  Description of Artificial Sequence: Synthetic oligonucleotide
  Sense Strand Starting at position 354 of SEQ ID NO: 317969
uagucuggccacugaaaug

SEQ ID NO: 346718 - RNA, 19 nt, Artificial Sequence
  Description of Artificial Sequence: Synthetic oligonucleotide
  Antisense Strand to SEQ ID NO: 346717
cauuucaguggccagacua

SEQ ID NO: 346719 - RNA, 19 nt, Artificial Sequence
  Description of Artificial Sequence: Synthetic oligonucleotide
  Sense Strand Starting at position 354 of SEQ ID NO: 318164
gugcuguuugaggcgugaa

SEQ ID NO: 346720 - RNA, 19 nt, Artificial Sequence
  Description of Artificial Sequence: Synthetic oligonucleotide
  Antisense Strand to SEQ ID NO: 346719
uucacgccucaaacagcac

SEQ ID NO: 346721 - RNA, 19 nt, Artificial Sequence
  Description of Artificial Sequence: Synthetic oligonucleotide
  Sense Strand Starting at position 354 of SEQ ID NO: 318496
cauguagagagguaagcua

SEQ ID NO: 346722 - RNA, 19 nt, Artificial Sequence
  Description of Artificial Sequence: Synthetic oligonucleotide
  Antisense Strand to SEQ ID NO: 346721
uagcuuaccucucuacaug

SEQ ID NO: 346723 - RNA, 19 nt, Artificial Sequence
  Description of Artificial Sequence: Synthetic oligonucleotide
  Sense Strand Starting at position 354 of SEQ ID NO: 318855
aggugugcuguauugcauu

SEQ ID NO: 346724 - RNA, 19 nt, Artificial Sequence
  Description of Artificial Sequence: Synthetic oligonucleotide
  Antisense Strand to SEQ ID NO: 346723
aaugcaauacagcacaccu

SEQ ID NO: 346725 - RNA, 19 nt, Artificial Sequence
  Description of Artificial Sequence: Synthetic oligonucleotide
  Sense Strand Starting at position 354 of SEQ ID NO: 318866
auugcauuccuagggagag

SEQ ID NO: 346726 - RNA, 19 nt, Artificial Sequence
  Description of Artificial Sequence: Synthetic oligonucleotide
  Antisense Strand to SEQ ID NO: 346725
cucucccuaggaaugcaau

SEQ ID NO: 346727 - RNA, 19 nt, Artificial Sequence
  Description of Artificial Sequence: Synthetic oligonucleotide
  Sense Strand Starting at position 354 of SEQ ID NO: 318937
gaaauauacuguuuggucu

SEQ ID NO: 346728 - RNA, 19 nt, Artificial Sequence
  Description of Artificial Sequence: Synthetic oligonucleotide
  Antisense Strand to SEQ ID NO: 346727
agaccaaacaguauauuuc

SEQ ID NO: 346729 - RNA, 19 nt, Artificial Sequence
  Description of Artificial Sequence: Synthetic oligonucleotide
  Sense Strand Starting at position 354 of SEQ ID NO: 318940
auauacuguuuggucuuaa

SEQ ID NO: 346730 - RNA, 19 nt, Artificial Sequence
  Description of Artificial Sequence: Synthetic oligonucleotide
  Antisense Strand to SEQ ID NO: 346729
uuaagaccaaacaguauau

SEQ ID NO: 346731 - RNA, 19 nt, Artificial Sequence
  Description of Artificial Sequence: Synthetic oligonucleotide
  Sense Strand Starting at position 354 of SEQ ID NO: 318950
uggucuuaacaccaaaguu

SEQ ID NO: 346732 - RNA, 19 nt, Artificial Sequence
  Description of Artificial Sequence: Synthetic oligonucleotide
  Antisense Strand to SEQ ID NO: 346731
aacuuugguguuaagacca

SEQ ID NO: 346733 - RNA, 19 nt, Artificial Sequence
  Description of Artificial Sequence: Synthetic oligonucleotide
  Sense Strand Starting at position 354 of SEQ ID NO: 319027
uuucuuuaagcugaucuga

SEQ ID NO: 346734 - RNA, 19 nt, Artificial Sequence
  Description of Artificial Sequence: Synthetic oligonucleotide
  Antisense Strand to SEQ ID NO: 346733
ucagaucagcuuaaagaaa

SEQ ID NO: 346735 - RNA, 19 nt, Artificial Sequence
  Description of Artificial Sequence: Synthetic oligonucleotide
  Sense Strand Starting at position 354 of SEQ ID NO: 319029
ucuuuaagcugaucugaua

SEQ ID NO: 346736 - RNA, 19 nt, Artificial Sequence
  Description of Artificial Sequence: Synthetic oligonucleotide
  Antisense Strand to SEQ ID NO: 346735
uaucagaucagcuuaaaga

SEQ ID NO: 346737 - RNA, 19 nt, Artificial Sequence
  Description of Artificial Sequence: Synthetic oligonucleotide
  Sense Strand Starting at position 354 of SEQ ID NO: 319037
cugaucugauaguuguaaa

SEQ ID NO: 346738 - RNA, 19 nt, Artificial Sequence
  Description of Artificial Sequence: Synthetic oligonucleotide
  Antisense Strand to SEQ ID NO: 346737
uuuacaacuaucagaucag

SEQ ID NO: 346739 - RNA, 19 nt, Artificial Sequence
  Description of Artificial Sequence: Synthetic oligonucleotide
  Sense Strand Starting at position 354 of SEQ ID NO: 319123
cggcuugugccugugaaua

SEQ ID NO: 346740 - RNA, 19 nt, Artificial Sequence
  Description of Artificial Sequence: Synthetic oligonucleotide
  Antisense Strand to SEQ ID NO: 346739
uauucacaggcacaagccg

SEQ ID NO: 346741 - RNA, 19 nt, Artificial Sequence
  Description of Artificial Sequence: Synthetic oligonucleotide
  Sense Strand Starting at position 354 of SEQ ID NO: 319175
gugagacccuauguucuga

SEQ ID NO: 346742 - RNA, 19 nt, Artificial Sequence
  Description of Artificial Sequence: Synthetic oligonucleotide
  Antisense Strand to SEQ ID NO: 346741
ucagaacauagggucucac

SEQ ID NO: 346743 - RNA, 19 nt, Artificial Sequence
  Description of Artificial Sequence: Synthetic oligonucleotide
  Sense Strand Starting at position 354 of SEQ ID NO: 319177
gagacccuauguucugaau

SEQ ID NO: 346744 - RNA, 19 nt, Artificial Sequence
  Description of Artificial Sequence: Synthetic oligonucleotide
  Antisense Strand to SEQ ID NO: 346743
auucagaacauagggucuc

SEQ ID NO: 346745 - RNA, 19 nt, Artificial Sequence
  Description of Artificial Sequence: Synthetic oligonucleotide
  Sense Strand Starting at position 355 of SEQ ID NO: 315617
acuauugcauaccugagaa

SEQ ID NO: 346746 - RNA, 19 nt, Artificial Sequence
  Description of Artificial Sequence: Synthetic oligonucleotide
  Antisense Strand to SEQ ID NO: 346745
uucucagguaugcaauagu

SEQ ID NO: 346747 - RNA, 19 nt, Artificial Sequence
  Description of Artificial Sequence: Synthetic oligonucleotide
  Sense Strand Starting at position 355 of SEQ ID NO: 315650
gagaguagauacuauuuga

SEQ ID NO: 346748 - RNA, 19 nt, Artificial Sequence
  Description of Artificial Sequence: Synthetic oligonucleotide
  Antisense Strand to SEQ ID NO: 346747
ucaaauaguaucuacucuc

SEQ ID NO: 346749 - RNA, 19 nt, Artificial Sequence
  Description of Artificial Sequence: Synthetic oligonucleotide
  Sense Strand Starting at position 355 of SEQ ID NO: 315864
cuaccaauuggauguuaau

SEQ ID NO: 346750 - RNA, 19 nt, Artificial Sequence
  Description of Artificial Sequence: Synthetic oligonucleotide
  Antisense Strand to SEQ ID NO: 346749
auuaacauccaauugguag

SEQ ID NO: 346751 - RNA, 19 nt, Artificial Sequence
  Description of Artificial Sequence: Synthetic oligonucleotide
  Sense Strand Starting at position 355 of SEQ ID NO: 315912
auauucuugcaggguuaaa

SEQ ID NO: 346752 - RNA, 19 nt, Artificial Sequence
  Description of Artificial Sequence: Synthetic oligonucleotide
  Antisense Strand to SEQ ID NO: 346751
uuuaacccugcaagaauau

SEQ ID NO: 346753 - RNA, 19 nt, Artificial Sequence
  Description of Artificial Sequence: Synthetic oligonucleotide
  Sense Strand Starting at position 355 of SEQ ID NO: 316000
gggagaauguaugcuuuaa

SEQ ID NO: 346754 - RNA, 19 nt, Artificial Sequence
  Description of Artificial Sequence: Synthetic oligonucleotide
  Antisense Strand to SEQ ID NO: 346753
uuaaagcauacauucuccc

SEQ ID NO: 346755 - RNA, 19 nt, Artificial Sequence
  Description of Artificial Sequence: Synthetic oligonucleotide
  Sense Strand Starting at position 355 of SEQ ID NO: 316002
gagaauguaugcuuuaauu

SEQ ID NO: 346756 - RNA, 19 nt, Artificial Sequence
  Description of Artificial Sequence: Synthetic oligonucleotide
  Antisense Strand to SEQ ID NO: 346755
aauuaaagcauacauucuc

SEQ ID NO: 346757 - RNA, 19 nt, Artificial Sequence
  Description of Artificial Sequence: Synthetic oligonucleotide
  Sense Strand Starting at position 355 of SEQ ID NO: 316004
gaauguaugcuuuaauuag

SEQ ID NO: 346758 - RNA, 19 nt, Artificial Sequence
  Description of Artificial Sequence: Synthetic oligonucleotide
  Antisense Strand to SEQ ID NO: 346757
cuaauuaaagcauacauuc

SEQ ID NO: 346759 - RNA, 19 nt, Artificial Sequence
  Description of Artificial Sequence: Synthetic oligonucleotide
  Sense Strand Starting at position 355 of SEQ ID NO: 316417
guagaaaucauagggaggu

SEQ ID NO: 346760 - RNA, 19 nt, Artificial Sequence
  Description of Artificial Sequence: Synthetic oligonucleotide
  Antisense Strand to SEQ ID NO: 346759
accucccuaugauuucuac

SEQ ID NO: 346761 - RNA, 19 nt, Artificial Sequence
  Description of Artificial Sequence: Synthetic oligonucleotide
  Sense Strand Starting at position 355 of SEQ ID NO: 316432
agguaagcaucuuccaaau

SEQ ID NO: 346762 - RNA, 19 nt, Artificial Sequence
  Description of Artificial Sequence: Synthetic oligonucleotide
  Antisense Strand to SEQ ID NO: 346761
auuuggaagaugcuuaccu

SEQ ID NO: 346763 - RNA, 19 nt, Artificial Sequence
  Description of Artificial Sequence: Synthetic oligonucleotide
  Sense Strand Starting at position 355 of SEQ ID NO: 316468
acccucgaauacuuugaua

SEQ ID NO: 346764 - RNA, 19 nt, Artificial Sequence
  Description of Artificial Sequence: Synthetic oligonucleotide
  Antisense Strand to SEQ ID NO: 346763
uaucaaaguauucgagggu

SEQ ID NO: 346765 - RNA, 19 nt, Artificial Sequence
  Description of Artificial Sequence: Synthetic oligonucleotide
  Sense Strand Starting at position 355 of SEQ ID NO: 316470
ccucgaauacuuugauaau

SEQ ID NO: 346766 - RNA, 19 nt, Artificial Sequence
  Description of Artificial Sequence: Synthetic oligonucleotide
  Antisense Strand to SEQ ID NO: 346765
auuaucaaaguauucgagg

SEQ ID NO: 346767 - RNA, 19 nt, Artificial Sequence
  Description of Artificial Sequence: Synthetic oligonucleotide
  Sense Strand Starting at position 355 of SEQ ID NO: 316494
uuugauaacugagugaaau

SEQ ID NO: 346768 - RNA, 19 nt, Artificial Sequence
  Description of Artificial Sequence: Synthetic oligonucleotide
  Antisense Strand to SEQ ID NO: 346767
auuucacucaguuaucaaa

SEQ ID NO: 346769 - RNA, 19 nt, Artificial Sequence
  Description of Artificial Sequence: Synthetic oligonucleotide
  Sense Strand Starting at position 355 of SEQ ID NO: 316495
uugauaacugagugaaauc

SEQ ID NO: 346770 - RNA, 19 nt, Artificial Sequence
  Description of Artificial Sequence: Synthetic oligonucleotide
  Antisense Strand to SEQ ID NO: 346769
gauuucacucaguuaucaa

SEQ ID NO: 346771 - RNA, 19 nt, Artificial Sequence
  Description of Artificial Sequence: Synthetic oligonucleotide
  Sense Strand Starting at position 355 of SEQ ID NO: 316534
agaucauugggaugguuga

SEQ ID NO: 346772 - RNA, 19 nt, Artificial Sequence
  Description of Artificial Sequence: Synthetic oligonucleotide
  Antisense Strand to SEQ ID NO: 346771
ucaaccaucccaaugaucu

SEQ ID NO: 346773 - RNA, 19 nt, Artificial Sequence
  Description of Artificial Sequence: Synthetic oligonucleotide
  Sense Strand Starting at position 355 of SEQ ID NO: 317274
gagcgucucacguucugau

SEQ ID NO: 346774 - RNA, 19 nt, Artificial Sequence
  Description of Artificial Sequence: Synthetic oligonucleotide
  Antisense Strand to SEQ ID NO: 346773
aucagaacgugagacgcuc

SEQ ID NO: 346775 - RNA, 19 nt, Artificial Sequence
  Description of Artificial Sequence: Synthetic oligonucleotide
  Sense Strand Starting at position 355 of SEQ ID NO: 317275
agcgucucacguucugauu

SEQ ID NO: 346776 - RNA, 19 nt, Artificial Sequence
  Description of Artificial Sequence: Synthetic oligonucleotide
  Antisense Strand to SEQ ID NO: 346775
aaucagaacgugagacgcu

SEQ ID NO: 346777 - RNA, 19 nt, Artificial Sequence
  Description of Artificial Sequence: Synthetic oligonucleotide
  Sense Strand Starting at position 355 of SEQ ID NO: 317422
agguucuuuaguggaagaa

SEQ ID NO: 346778 - RNA, 19 nt, Artificial Sequence
  Description of Artificial Sequence: Synthetic oligonucleotide
  Antisense Strand to SEQ ID NO: 346777
uucuuccacuaaagaaccu

SEQ ID NO: 346779 - RNA, 19 nt, Artificial Sequence
  Description of Artificial Sequence: Synthetic oligonucleotide
  Sense Strand Starting at position 355 of SEQ ID NO: 317423
gguucuuuaguggaagaac

SEQ ID NO: 346780 - RNA, 19 nt, Artificial Sequence
  Description of Artificial Sequence: Synthetic oligonucleotide
  Antisense Strand to SEQ ID NO: 346779
guucuuccacuaaagaacc

SEQ ID NO: 346781 - RNA, 19 nt, Artificial Sequence
  Description of Artificial Sequence: Synthetic oligonucleotide
  Sense Strand Starting at position 355 of SEQ ID NO: 317455
gagguaacuuaucugaggu

SEQ ID NO: 346782 - RNA, 19 nt, Artificial Sequence
  Description of Artificial Sequence: Synthetic oligonucleotide
  Antisense Strand to SEQ ID NO: 346781
accucagauaaguuaccuc

SEQ ID NO: 346783 - RNA, 19 nt, Artificial Sequence
  Description of Artificial Sequence: Synthetic oligonucleotide
  Sense Strand Starting at position 355 of SEQ ID NO: 317456
agguaacuuaucugaggug

SEQ ID NO: 346784 - RNA, 19 nt, Artificial Sequence
  Description of Artificial Sequence: Synthetic oligonucleotide
  Antisense Strand to SEQ ID NO: 346783
caccucagauaaguuaccu

SEQ ID NO: 346785 - RNA, 19 nt, Artificial Sequence
  Description of Artificial Sequence: Synthetic oligonucleotide
  Sense Strand Starting at position 355 of SEQ ID NO: 317538
cgaagucagccggcuugua

SEQ ID NO: 346786 - RNA, 19 nt, Artificial Sequence
  Description of Artificial Sequence: Synthetic oligonucleotide
  Antisense Strand to SEQ ID NO: 346785
uacaagccggcugacuucg

SEQ ID NO: 346787 - RNA, 19 nt, Artificial Sequence
  Description of Artificial Sequence: Synthetic oligonucleotide
  Sense Strand Starting at position 355 of SEQ ID NO: 317557
agagcucuuaacgggagaa

SEQ ID NO: 346788 - RNA, 19 nt, Artificial Sequence
  Description of Artificial Sequence: Synthetic oligonucleotide
  Antisense Strand to SEQ ID NO: 346787
uucucccguuaagagcucu

SEQ ID NO: 346789 - RNA, 19 nt, Artificial Sequence
  Description of Artificial Sequence: Synthetic oligonucleotide
  Sense Strand Starting at position 355 of SEQ ID NO: 317558
gagcucuuaacgggagaau

SEQ ID NO: 346790 - RNA, 19 nt, Artificial Sequence
  Description of Artificial Sequence: Synthetic oligonucleotide
  Antisense Strand to SEQ ID NO: 346789
auucucccguuaagagcuc

SEQ ID NO: 346791 - RNA, 19 nt, Artificial Sequence
  Description of Artificial Sequence: Synthetic oligonucleotide
  Sense Strand Starting at position 355 of SEQ ID NO: 317559
agcucuuaacgggagaauc

SEQ ID NO: 346792 - RNA, 19 nt, Artificial Sequence
  Description of Artificial Sequence: Synthetic oligonucleotide
  Antisense Strand to SEQ ID NO: 346791
gauucucccguuaagagcu

SEQ ID NO: 346793 - RNA, 19 nt, Artificial Sequence
  Description of Artificial Sequence: Synthetic oligonucleotide
  Sense Strand Starting at position 355 of SEQ ID NO: 317589
acgcccacucuguagagau

SEQ ID NO: 346794 - RNA, 19 nt, Artificial Sequence
  Description of Artificial Sequence: Synthetic oligonucleotide
  Antisense Strand to SEQ ID NO: 346793
aucucuacagagugggcgu

SEQ ID NO: 346795 - RNA, 19 nt, Artificial Sequence
  Description of Artificial Sequence: Synthetic oligonucleotide
  Sense Strand Starting at position 355 of SEQ ID NO: 317602
agagaucugguguggaaac

SEQ ID NO: 346796 - RNA, 19 nt, Artificial Sequence
  Description of Artificial Sequence: Synthetic oligonucleotide
  Antisense Strand to SEQ ID NO: 346795
guuuccacaccagaucucu

SEQ ID NO: 346797 - RNA, 19 nt, Artificial Sequence
  Description of Artificial Sequence: Synthetic oligonucleotide
  Sense Strand Starting at position 355 of SEQ ID NO: 317693
gggucuagaaucuggagua

SEQ ID NO: 346798 - RNA, 19 nt, Artificial Sequence
  Description of Artificial Sequence: Synthetic oligonucleotide
  Antisense Strand to SEQ ID NO: 346797
uacuccagauucuagaccc

SEQ ID NO: 346799 - RNA, 19 nt, Artificial Sequence
  Description of Artificial Sequence: Synthetic oligonucleotide
  Sense Strand Starting at position 355 of SEQ ID NO: 318172
aggguaauuacgcaaucca

SEQ ID NO: 346800 - RNA, 19 nt, Artificial Sequence
  Description of Artificial Sequence: Synthetic oligonucleotide
  Antisense Strand to SEQ ID NO: 346799
uggauugcguaauuacccu

SEQ ID NO: 346801 - RNA, 19 nt, Artificial Sequence
  Description of Artificial Sequence: Synthetic oligonucleotide
  Sense Strand Starting at position 355 of SEQ ID NO: 318399
uuacauucuccagaguuua

SEQ ID NO: 346802 - RNA, 19 nt, Artificial Sequence
  Description of Artificial Sequence: Synthetic oligonucleotide
  Antisense Strand to SEQ ID NO: 346801
uaaacucuggagaauguaa

SEQ ID NO: 346803 - RNA, 19 nt, Artificial Sequence
  Description of Artificial Sequence: Synthetic oligonucleotide
  Sense Strand Starting at position 355 of SEQ ID NO: 318404
uucuccagaguuuaaguau

SEQ ID NO: 346804 - RNA, 19 nt, Artificial Sequence
  Description of Artificial Sequence: Synthetic oligonucleotide
  Antisense Strand to SEQ ID NO: 346803
auacuuaaacucuggagaa

SEQ ID NO: 346805 - RNA, 19 nt, Artificial Sequence
  Description of Artificial Sequence: Synthetic oligonucleotide
  Sense Strand Starting at position 355 of SEQ ID NO: 318462
uccuuagaguuguuggaau

SEQ ID NO: 346806 - RNA, 19 nt, Artificial Sequence
  Description of Artificial Sequence: Synthetic oligonucleotide
  Antisense Strand to SEQ ID NO: 346805
auuccaacaacucuaagga

SEQ ID NO: 346807 - RNA, 19 nt, Artificial Sequence
  Description of Artificial Sequence: Synthetic oligonucleotide
  Sense Strand Starting at position 355 of SEQ ID NO: 318511
agaacaauuccuggagcau

SEQ ID NO: 346808 - RNA, 19 nt, Artificial Sequence
  Description of Artificial Sequence: Synthetic oligonucleotide
  Antisense Strand to SEQ ID NO: 346807
augcuccaggaauuguucu

SEQ ID NO: 346809 - RNA, 19 nt, Artificial Sequence
  Description of Artificial Sequence: Synthetic oligonucleotide
  Sense Strand Starting at position 355 of SEQ ID NO: 318633
ggagguaggaauugcuauu

SEQ ID NO: 346810 - RNA, 19 nt, Artificial Sequence
  Description of Artificial Sequence: Synthetic oligonucleotide
  Antisense Strand to SEQ ID NO: 346809
aauagcaauuccuaccucc

SEQ ID NO: 346811 - RNA, 19 nt, Artificial Sequence
  Description of Artificial Sequence: Synthetic oligonucleotide
  Sense Strand Starting at position 355 of SEQ ID NO: 318714
uuaucugugucaucuauuu

SEQ ID NO: 346812 - RNA, 19 nt, Artificial Sequence
  Description of Artificial Sequence: Synthetic oligonucleotide
  Antisense Strand to SEQ ID NO: 346811
aaauagaugacacagauaa

SEQ ID NO: 346813 - RNA, 19 nt, Artificial Sequence
  Description of Artificial Sequence: Synthetic oligonucleotide
  Sense Strand Starting at position 355 of SEQ ID NO: 318719
ugugucaucuauuuagcau

SEQ ID NO: 346814 - RNA, 19 nt, Artificial Sequence
  Description of Artificial Sequence: Synthetic oligonucleotide
  Antisense Strand to SEQ ID NO: 346813
augcuaaauagaugacaca

SEQ ID NO: 346815 - RNA, 19 nt, Artificial Sequence
  Description of Artificial Sequence: Synthetic oligonucleotide
  Sense Strand Starting at position 355 of SEQ ID NO: 319054
cucagaaugccugagguuu

SEQ ID NO: 346816 - RNA, 19 nt, Artificial Sequence
  Description of Artificial Sequence: Synthetic oligonucleotide
  Antisense Strand to SEQ ID NO: 346815
aaaccucaggcauucugag

SEQ ID NO: 346817 - RNA, 19 nt, Artificial Sequence
  Description of Artificial Sequence: Synthetic oligonucleotide
  Sense Strand Starting at position 355 of SEQ ID NO: 319071
uugugcauuuacucauacu

SEQ ID NO: 346818 - RNA, 19 nt, Artificial Sequence
  Description of Artificial Sequence: Synthetic oligonucleotide
  Antisense Strand to SEQ ID NO: 346817
aguaugaguaaaugcacaa

SEQ ID NO: 346819 - RNA, 19 nt, Artificial Sequence
  Description of Artificial Sequence: Synthetic oligonucleotide
  Sense Strand Starting at position 355 of SEQ ID NO: 319131
agucuagccacugggaaua

SEQ ID NO: 346820 - RNA, 19 nt, Artificial Sequence
  Description of Artificial Sequence: Synthetic oligonucleotide
  Antisense Strand to SEQ ID NO: 346819
uauucccaguggcuagacu

SEQ ID NO: 346821 - RNA, 19 nt, Artificial Sequence
  Description of Artificial Sequence: Synthetic oligonucleotide
  Sense Strand Starting at position 355 of SEQ ID NO: 319142
ugggaauacaguugugaac

SEQ ID NO: 346822 - RNA, 19 nt, Artificial Sequence
  Description of Artificial Sequence: Synthetic oligonucleotide
  Antisense Strand to SEQ ID NO: 346821
guucacaacuguauuccca

SEQ ID NO: 346823 - RNA, 19 nt, Artificial Sequence
  Description of Artificial Sequence: Synthetic oligonucleotide
  Sense Strand Starting at position 355 of SEQ ID NO: 319181
cagcaaagauggucuuaaa

SEQ ID NO: 346824 - RNA, 19 nt, Artificial Sequence
  Description of Artificial Sequence: Synthetic oligonucleotide
  Antisense Strand to SEQ ID NO: 346823
uuuaagaccaucuuugcug

SEQ ID NO: 346825 - RNA, 19 nt, Artificial Sequence
  Description of Artificial Sequence: Synthetic oligonucleotide
  Sense Strand Starting at position 356 of SEQ ID NO: 315239
uacacuuguggaugacuua

SEQ ID NO: 346826 - RNA, 19 nt, Artificial Sequence
  Description of Artificial Sequence: Synthetic oligonucleotide
  Antisense Strand to SEQ ID NO: 346825
uaagucauccacaagugua

SEQ ID NO: 346827 - RNA, 19 nt, Artificial Sequence
  Description of Artificial Sequence: Synthetic oligonucleotide
  Sense Strand Starting at position 356 of SEQ ID NO: 315242
acuuguggaugacuuaauu

SEQ ID NO: 346828 - RNA, 19 nt, Artificial Sequence
  Description of Artificial Sequence: Synthetic oligonucleotide
  Antisense Strand to SEQ ID NO: 346827
aauuaagucauccacaagu

SEQ ID NO: 346829 - RNA, 19 nt, Artificial Sequence
  Description of Artificial Sequence: Synthetic oligonucleotide
  Sense Strand Starting at position 356 of SEQ ID NO: 315388
ggaugacagacgugugaug

SEQ ID NO: 346830 - RNA, 19 nt, Artificial Sequence
  Description of Artificial Sequence: Synthetic oligonucleotide
  Antisense Strand to SEQ ID NO: 346829
caucacacgucugucaucc

SEQ ID NO: 346831 - RNA, 19 nt, Artificial Sequence
  Description of Artificial Sequence: Synthetic oligonucleotide
  Sense Strand Starting at position 356 of SEQ ID NO: 317284
gaacacuacuggcauaagu

SEQ ID NO: 346832 - RNA, 19 nt, Artificial Sequence
  Description of Artificial Sequence: Synthetic oligonucleotide
  Antisense Strand to SEQ ID NO: 346831
acuuaugccaguaguguuc

SEQ ID NO: 346833 - RNA, 19 nt, Artificial Sequence
  Description of Artificial Sequence: Synthetic oligonucleotide
  Sense Strand Starting at position 356 of SEQ ID NO: 317310
ggucaaggacagugcuaaa

SEQ ID NO: 346834 - RNA, 19 nt, Artificial Sequence
  Description of Artificial Sequence: Synthetic oligonucleotide
  Antisense Strand to SEQ ID NO: 346833
uuuagcacuguccuugacc

SEQ ID NO: 346835 - RNA, 19 nt, Artificial Sequence
  Description of Artificial Sequence: Synthetic oligonucleotide
  Sense Strand Starting at position 356 of SEQ ID NO: 317360
acagaauuaucugguacaa

SEQ ID NO: 346836 - RNA, 19 nt, Artificial Sequence
  Description of Artificial Sequence: Synthetic oligonucleotide
  Antisense Strand to SEQ ID NO: 346835
uuguaccagauaauucugu

SEQ ID NO: 346837 - RNA, 19 nt, Artificial Sequence
  Description of Artificial Sequence: Synthetic oligonucleotide
  Sense Strand Starting at position 356 of SEQ ID NO: 317381
uguccauaguuccaagguu

SEQ ID NO: 346838 - RNA, 19 nt, Artificial Sequence
  Description of Artificial Sequence: Synthetic oligonucleotide
  Antisense Strand to SEQ ID NO: 346837
aaccuuggaacuauggaca

SEQ ID NO: 346839 - RNA, 19 nt, Artificial Sequence
  Description of Artificial Sequence: Synthetic oligonucleotide
  Sense Strand Starting at position 356 of SEQ ID NO: 317487
ucaaguaguuauuccaaac

SEQ ID NO: 346840 - RNA, 19 nt, Artificial Sequence
  Description of Artificial Sequence: Synthetic oligonucleotide
  Antisense Strand to SEQ ID NO: 346839
guuuggaauaacuacuuga

SEQ ID NO: 346841 - RNA, 19 nt, Artificial Sequence
  Description of Artificial Sequence: Synthetic oligonucleotide
  Sense Strand Starting at position 356 of SEQ ID NO: 317498
uuccaaacaugggaauuau

SEQ ID NO: 346842 - RNA, 19 nt, Artificial Sequence
  Description of Artificial Sequence: Synthetic oligonucleotide
  Antisense Strand to SEQ ID NO: 346841
auaauucccauguuuggaa

SEQ ID NO: 346843 - RNA, 19 nt, Artificial Sequence
  Description of Artificial Sequence: Synthetic oligonucleotide
  Sense Strand Starting at position 356 of SEQ ID NO: 317507
ugggaauuaugcccuagag

SEQ ID NO: 346844 - RNA, 19 nt, Artificial Sequence
  Description of Artificial Sequence: Synthetic oligonucleotide
  Antisense Strand to SEQ ID NO: 346843
cucuagggcauaauuccca

SEQ ID NO: 346845 - RNA, 19 nt, Artificial Sequence
  Description of Artificial Sequence: Synthetic oligonucleotide
  Sense Strand Starting at position 356 of SEQ ID NO: 317706
ucacaaguauguuaucaca

SEQ ID NO: 346846 - RNA, 19 nt, Artificial Sequence
  Description of Artificial Sequence: Synthetic oligonucleotide
  Antisense Strand to SEQ ID NO: 346845
ugugauaacauacuuguga

SEQ ID NO: 346847 - RNA, 19 nt, Artificial Sequence
  Description of Artificial Sequence: Synthetic oligonucleotide
  Sense Strand Starting at position 356 of SEQ ID NO: 317708
acaaguauguuaucacacu

SEQ ID NO: 346848 - RNA, 19 nt, Artificial Sequence
  Description of Artificial Sequence: Synthetic oligonucleotide
  Antisense Strand to SEQ ID NO: 346847
agugugauaacauacuugu

SEQ ID NO: 346849 - RNA, 19 nt, Artificial Sequence
  Description of Artificial Sequence: Synthetic oligonucleotide
  Sense Strand Starting at position 356 of SEQ ID NO: 317891
gugauuuaguaugaagaaa

SEQ ID NO: 346850 - RNA, 19 nt, Artificial Sequence
  Description of Artificial Sequence: Synthetic oligonucleotide
  Antisense Strand to SEQ ID NO: 346849
uuucuucauacuaaaucac

SEQ ID NO: 346851 - RNA, 19 nt, Artificial Sequence
  Description of Artificial Sequence: Synthetic oligonucleotide
  Sense Strand Starting at position 356 of SEQ ID NO: 317947
aaaucacucugguggguua

SEQ ID NO: 346852 - RNA, 19 nt, Artificial Sequence
  Description of Artificial Sequence: Synthetic oligonucleotide
  Antisense Strand to SEQ ID NO: 346851
uaacccaccagagugauuu

SEQ ID NO: 346853 - RNA, 19 nt, Artificial Sequence
  Description of Artificial Sequence: Synthetic oligonucleotide
  Sense Strand Starting at position 356 of SEQ ID NO: 317949
aucacucugguggguuaaa

SEQ ID NO: 346854 - RNA, 19 nt, Artificial Sequence
  Description of Artificial Sequence: Synthetic oligonucleotide
  Antisense Strand to SEQ ID NO: 346853
uuuaacccaccagagugau

SEQ ID NO: 346855 - RNA, 19 nt, Artificial Sequence
  Description of Artificial Sequence: Synthetic oligonucleotide
  Sense Strand Starting at position 356 of SEQ ID NO: 317950
ucacucugguggguuaaau

SEQ ID NO: 346856 - RNA, 19 nt, Artificial Sequence
  Description of Artificial Sequence: Synthetic oligonucleotide
  Antisense Strand to SEQ ID NO: 346855
auuuaacccaccagaguga

SEQ ID NO: 346857 - RNA, 19 nt, Artificial Sequence
  Description of Artificial Sequence: Synthetic oligonucleotide
  Sense Strand Starting at position 356 of SEQ ID NO: 317959
uggguuaaauucccauuga

SEQ ID NO: 346858 - RNA, 19 nt, Artificial Sequence
  Description of Artificial Sequence: Synthetic oligonucleotide
  Antisense Strand to SEQ ID NO: 346857
ucaaugggaauuuaaccca

SEQ ID NO: 346859 - RNA, 19 nt, Artificial Sequence
  Description of Artificial Sequence: Synthetic oligonucleotide
  Sense Strand Starting at position 356 of SEQ ID NO: 317960
ggguuaaauucccauugau

SEQ ID NO: 346860 - RNA, 19 nt, Artificial Sequence
  Description of Artificial Sequence: Synthetic oligonucleotide
  Antisense Strand to SEQ ID NO: 346859
aucaaugggaauuuaaccc

SEQ ID NO: 346861 - RNA, 19 nt, Artificial Sequence
  Description of Artificial Sequence: Synthetic oligonucleotide
  Sense Strand Starting at position 356 of SEQ ID NO: 318120
cuaguuauucuagacccgu

SEQ ID NO: 346862 - RNA, 19 nt, Artificial Sequence
  Description of Artificial Sequence: Synthetic oligonucleotide
  Antisense Strand to SEQ ID NO: 346861
acgggucuagaauaacuag

SEQ ID NO: 346863 - RNA, 19 nt, Artificial Sequence
  Description of Artificial Sequence: Synthetic oligonucleotide
  Sense Strand Starting at position 356 of SEQ ID NO: 318126
auucuagacccguaacauc

SEQ ID NO: 346864 - RNA, 19 nt, Artificial Sequence
  Description of Artificial Sequence: Synthetic oligonucleotide
  Antisense Strand to SEQ ID NO: 346863
gauguuacgggucuagaau

SEQ ID NO: 346865 - RNA, 19 nt, Artificial Sequence
  Description of Artificial Sequence: Synthetic oligonucleotide
  Sense Strand Starting at position 356 of SEQ ID NO: 318148
cacuauacguaguagagua

SEQ ID NO: 346866 - RNA, 19 nt, Artificial Sequence
  Description of Artificial Sequence: Synthetic oligonucleotide
  Antisense Strand to SEQ ID NO: 346865
uacucuacuacguauagug

SEQ ID NO: 346867 - RNA, 19 nt, Artificial Sequence
  Description of Artificial Sequence: Synthetic oligonucleotide
  Sense Strand Starting at position 356 of SEQ ID NO: 318153
uacguaguagaguaacuaa

SEQ ID NO: 346868 - RNA, 19 nt, Artificial Sequence
  Description of Artificial Sequence: Synthetic oligonucleotide
  Antisense Strand to SEQ ID NO: 346867
uuaguuacucuacuacgua

SEQ ID NO: 346869 - RNA, 19 nt, Artificial Sequence
  Description of Artificial Sequence: Synthetic oligonucleotide
  Sense Strand Starting at position 356 of SEQ ID NO: 318160
uagaguaacuaagcucaga

SEQ ID NO: 346870 - RNA, 19 nt, Artificial Sequence
  Description of Artificial Sequence: Synthetic oligonucleotide
  Antisense Strand to SEQ ID NO: 346869
ucugagcuuaguuacucua

SEQ ID NO: 346871 - RNA, 19 nt, Artificial Sequence
  Description of Artificial Sequence: Synthetic oligonucleotide
  Sense Strand Starting at position 356 of SEQ ID NO: 318188
caaagauguugagagauug

SEQ ID NO: 346872 - RNA, 19 nt, Artificial Sequence
  Description of Artificial Sequence: Synthetic oligonucleotide
  Antisense Strand to SEQ ID NO: 346871
caaucucucaacaucuuug

SEQ ID NO: 346873 - RNA, 19 nt, Artificial Sequence
  Description of Artificial Sequence: Synthetic oligonucleotide
  Sense Strand Starting at position 356 of SEQ ID NO: 318205
ugaaguacuuaagacauau

SEQ ID NO: 346874 - RNA, 19 nt, Artificial Sequence
  Description of Artificial Sequence: Synthetic oligonucleotide
  Antisense Strand to SEQ ID NO: 346873
auaugucuuaaguacuuca

SEQ ID NO: 346875 - RNA, 19 nt, Artificial Sequence
  Description of Artificial Sequence: Synthetic oligonucleotide
  Sense Strand Starting at position 356 of SEQ ID NO: 318262
gcuuguuguguugcaucau

SEQ ID NO: 346876 - RNA, 19 nt, Artificial Sequence
  Description of Artificial Sequence: Synthetic oligonucleotide
  Antisense Strand to SEQ ID NO: 346875
augaugcaacacaacaagc

SEQ ID NO: 346877 - RNA, 19 nt, Artificial Sequence
  Description of Artificial Sequence: Synthetic oligonucleotide
  Sense Strand Starting at position 356 of SEQ ID NO: 318263
cuuguuguguugcaucaua

SEQ ID NO: 346878 - RNA, 19 nt, Artificial Sequence
  Description of Artificial Sequence: Synthetic oligonucleotide
  Antisense Strand to SEQ ID NO: 346877
uaugaugcaacacaacaag

SEQ ID NO: 346879 - RNA, 19 nt, Artificial Sequence
  Description of Artificial Sequence: Synthetic oligonucleotide
  Sense Strand Starting at position 356 of SEQ ID NO: 318368
cugaaaguuuaguaugagu

SEQ ID NO: 346880 - RNA, 19 nt, Artificial Sequence
  Description of Artificial Sequence: Synthetic oligonucleotide
  Antisense Strand to SEQ ID NO: 346879
acucauacuaaacuuucag

SEQ ID NO: 346881 - RNA, 19 nt, Artificial Sequence
  Description of Artificial Sequence: Synthetic oligonucleotide
  Sense Strand Starting at position 356 of SEQ ID NO: 318370
gaaaguuuaguaugaguca

SEQ ID NO: 346882 - RNA, 19 nt, Artificial Sequence
  Description of Artificial Sequence: Synthetic oligonucleotide
  Antisense Strand to SEQ ID NO: 346881
ugacucauacuaaacuuuc

SEQ ID NO: 346883 - RNA, 19 nt, Artificial Sequence
  Description of Artificial Sequence: Synthetic oligonucleotide
  Sense Strand Starting at position 356 of SEQ ID NO: 318377
uaguaugagucacaguaag

SEQ ID NO: 346884 - RNA, 19 nt, Artificial Sequence
  Description of Artificial Sequence: Synthetic oligonucleotide
  Antisense Strand to SEQ ID NO: 346883
cuuacugugacucauacua

SEQ ID NO: 346885 - RNA, 19 nt, Artificial Sequence
  Description of Artificial Sequence: Synthetic oligonucleotide
  Sense Strand Starting at position 356 of SEQ ID NO: 318518
ugguaugacuacuguaaca

SEQ ID NO: 346886 - RNA, 19 nt, Artificial Sequence
  Description of Artificial Sequence: Synthetic oligonucleotide
  Antisense Strand to SEQ ID NO: 346885
uguuacaguagucauacca

SEQ ID NO: 346887 - RNA, 19 nt, Artificial Sequence
  Description of Artificial Sequence: Synthetic oligonucleotide
  Sense Strand Starting at position 356 of SEQ ID NO: 318520
guaugacuacuguaacaua

SEQ ID NO: 346888 - RNA, 19 nt, Artificial Sequence
  Description of Artificial Sequence: Synthetic oligonucleotide
  Antisense Strand to SEQ ID NO: 346887
uauguuacaguagucauac

SEQ ID NO: 346889 - RNA, 19 nt, Artificial Sequence
  Description of Artificial Sequence: Synthetic oligonucleotide
  Sense Strand Starting at position 356 of SEQ ID NO: 318705
uguaaaucacuauguaaug

SEQ ID NO: 346890 - RNA, 19 nt, Artificial Sequence
  Description of Artificial Sequence: Synthetic oligonucleotide
  Antisense Strand to SEQ ID NO: 346889
cauuacauagugauuuaca

SEQ ID NO: 346891 - RNA, 19 nt, Artificial Sequence
  Description of Artificial Sequence: Synthetic oligonucleotide
  Sense Strand Starting at position 356 of SEQ ID NO: 318730
gauuccuguucccagggua

SEQ ID NO: 346892 - RNA, 19 nt, Artificial Sequence
  Description of Artificial Sequence: Synthetic oligonucleotide
  Antisense Strand to SEQ ID NO: 346891
uacccugggaacaggaauc

SEQ ID NO: 346893 - RNA, 19 nt, Artificial Sequence
  Description of Artificial Sequence: Synthetic oligonucleotide
  Sense Strand Starting at position 356 of SEQ ID NO: 318787
gggaguguuuccggaccaa

SEQ ID NO: 346894 - RNA, 19 nt, Artificial Sequence
  Description of Artificial Sequence: Synthetic oligonucleotide
  Antisense Strand to SEQ ID NO: 346893
uugguccggaaacacuccc

SEQ ID NO: 346895 - RNA, 19 nt, Artificial Sequence
  Description of Artificial Sequence: Synthetic oligonucleotide
  Sense Strand Starting at position 356 of SEQ ID NO: 318832
aguccaaucuugguucuca

SEQ ID NO: 346896 - RNA, 19 nt, Artificial Sequence
  Description of Artificial Sequence: Synthetic oligonucleotide
  Antisense Strand to SEQ ID NO: 346895
ugagaaccaagauuggacu

SEQ ID NO: 346897 - RNA, 19 nt, Artificial Sequence
  Description of Artificial Sequence: Synthetic oligonucleotide
  Sense Strand Starting at position 357 of SEQ ID NO: 315337
acaggauccagguggcaau

SEQ ID NO: 346898 - RNA, 19 nt, Artificial Sequence
  Description of Artificial Sequence: Synthetic oligonucleotide
  Antisense Strand to SEQ ID NO: 346897
auugccaccuggauccugu

SEQ ID NO: 346899 - RNA, 19 nt, Artificial Sequence
  Description of Artificial Sequence: Synthetic oligonucleotide
  Sense Strand Starting at position 357 of SEQ ID NO: 315401
cuccuugccuugucaauga

SEQ ID NO: 346900 - RNA, 19 nt, Artificial Sequence
  Description of Artificial Sequence: Synthetic oligonucleotide
  Antisense Strand to SEQ ID NO: 346899
ucauugacaaggcaaggag

SEQ ID NO: 346901 - RNA, 19 nt, Artificial Sequence
  Description of Artificial Sequence: Synthetic oligonucleotide
  Sense Strand Starting at position 357 of SEQ ID NO: 315441
caggaagagugucugaaac

SEQ ID NO: 346902 - RNA, 19 nt, Artificial Sequence
  Description of Artificial Sequence: Synthetic oligonucleotide
  Antisense Strand to SEQ ID NO: 346901
guuucagacacucuuccug

SEQ ID NO: 346903 - RNA, 19 nt, Artificial Sequence
  Description of Artificial Sequence: Synthetic oligonucleotide
  Sense Strand Starting at position 357 of SEQ ID NO: 315443
ggaagagugucugaaacag

SEQ ID NO: 346904 - RNA, 19 nt, Artificial Sequence
  Description of Artificial Sequence: Synthetic oligonucleotide
  Antisense Strand to SEQ ID NO: 346903
cuguuucagacacucuucc

SEQ ID NO: 346905 - RNA, 19 nt, Artificial Sequence
  Description of Artificial Sequence: Synthetic oligonucleotide
  Sense Strand Starting at position 357 of SEQ ID NO: 315576
ccuccauuguacccagagu

SEQ ID NO: 346906 - RNA, 19 nt, Artificial Sequence
  Description of Artificial Sequence: Synthetic oligonucleotide
  Antisense Strand to SEQ ID NO: 346905
acucuggguacaauggagg

SEQ ID NO: 346907 - RNA, 19 nt, Artificial Sequence
  Description of Artificial Sequence: Synthetic oligonucleotide
  Sense Strand Starting at position 357 of SEQ ID NO: 315986
gugggaugggucuguggua

SEQ ID NO: 346908 - RNA, 19 nt, Artificial Sequence
  Description of Artificial Sequence: Synthetic oligonucleotide
  Antisense Strand to SEQ ID NO: 346907
uaccacagacccaucccac

SEQ ID NO: 346909 - RNA, 19 nt, Artificial Sequence
  Description of Artificial Sequence: Synthetic oligonucleotide
  Sense Strand Starting at position 357 of SEQ ID NO: 315991
augggucugugguagggaa

SEQ ID NO: 346910 - RNA, 19 nt, Artificial Sequence
  Description of Artificial Sequence: Synthetic oligonucleotide
  Antisense Strand to SEQ ID NO: 346909
uucccuaccacagacccau

SEQ ID NO: 346911 - RNA, 19 nt, Artificial Sequence
  Description of Artificial Sequence: Synthetic oligonucleotide
  Sense Strand Starting at position 357 of SEQ ID NO: 316128
aggcuugguucccacaagu

SEQ ID NO: 346912 - RNA, 19 nt, Artificial Sequence
  Description of Artificial Sequence: Synthetic oligonucleotide
  Antisense Strand to SEQ ID NO: 346911
acuugugggaaccaagccu

SEQ ID NO: 346913 - RNA, 19 nt, Artificial Sequence
  Description of Artificial Sequence: Synthetic oligonucleotide
  Sense Strand Starting at position 357 of SEQ ID NO: 316183
aguuaugaauacugacgaa

SEQ ID NO: 346914 - RNA, 19 nt, Artificial Sequence
  Description of Artificial Sequence: Synthetic oligonucleotide
  Antisense Strand to SEQ ID NO: 346913
uucgucaguauucauaacu

SEQ ID NO: 346915 - RNA, 19 nt, Artificial Sequence
  Description of Artificial Sequence: Synthetic oligonucleotide
  Sense Strand Starting at position 357 of SEQ ID NO: 316488
ugaguugagccuugagucu

SEQ ID NO: 346916 - RNA, 19 nt, Artificial Sequence
  Description of Artificial Sequence: Synthetic oligonucleotide
  Antisense Strand to SEQ ID NO: 346915
agacucaaggcucaacuca

SEQ ID NO: 346917 - RNA, 19 nt, Artificial Sequence
  Description of Artificial Sequence: Synthetic oligonucleotide
  Sense Strand Starting at position 357 of SEQ ID NO: 317457
cccagacguugcuaauacu

SEQ ID NO: 346918 - RNA, 19 nt, Artificial Sequence
  Description of Artificial Sequence: Synthetic oligonucleotide
  Antisense Strand to SEQ ID NO: 346917
aguauuagcaacgucuggg

SEQ ID NO: 346919 - RNA, 19 nt, Artificial Sequence
  Description of Artificial Sequence: Synthetic oligonucleotide
  Sense Strand Starting at position 357 of SEQ ID NO: 317467
gcuaauacuccuuggccua

SEQ ID NO: 346920 - RNA, 19 nt, Artificial Sequence
  Description of Artificial Sequence: Synthetic oligonucleotide
  Antisense Strand to SEQ ID NO: 346919
uaggccaaggaguauuagc

SEQ ID NO: 346921 - RNA, 19 nt, Artificial Sequence
  Description of Artificial Sequence: Synthetic oligonucleotide
  Sense Strand Starting at position 357 of SEQ ID NO: 317519
uuaagcacuuuagagaaau

SEQ ID NO: 346922 - RNA, 19 nt, Artificial Sequence
  Description of Artificial Sequence: Synthetic oligonucleotide
  Antisense Strand to SEQ ID NO: 346921
auuucucuaaagugcuuaa

SEQ ID NO: 346923 - RNA, 19 nt, Artificial Sequence
  Description of Artificial Sequence: Synthetic oligonucleotide
  Sense Strand Starting at position 357 of SEQ ID NO: 317816
cacuguguuucuguaugua

SEQ ID NO: 346924 - RNA, 19 nt, Artificial Sequence
  Description of Artificial Sequence: Synthetic oligonucleotide
  Antisense Strand to SEQ ID NO: 346923
uacauacagaaacacagug

SEQ ID NO: 346925 - RNA, 19 nt, Artificial Sequence
  Description of Artificial Sequence: Synthetic oligonucleotide
  Sense Strand Starting at position 357 of SEQ ID NO: 317934
gauaacugcugucaucaga

SEQ ID NO: 346926 - RNA, 19 nt, Artificial Sequence
  Description of Artificial Sequence: Synthetic oligonucleotide
  Antisense Strand to SEQ ID NO: 346925
ucugaugacagcaguuauc

SEQ ID NO: 346927 - RNA, 19 nt, Artificial Sequence
  Description of Artificial Sequence: Synthetic oligonucleotide
  Sense Strand Starting at position 357 of SEQ ID NO: 317944
gucaucagaucgucucaua

SEQ ID NO: 346928 - RNA, 19 nt, Artificial Sequence
  Description of Artificial Sequence: Synthetic oligonucleotide
  Antisense Strand to SEQ ID NO: 346927
uaugagacgaucugaugac

SEQ ID NO: 346929 - RNA, 19 nt, Artificial Sequence
  Description of Artificial Sequence: Synthetic oligonucleotide
  Sense Strand Starting at position 357 of SEQ ID NO: 317947
aucagaucgucucauaaag

SEQ ID NO: 346930 - RNA, 19 nt, Artificial Sequence
  Description of Artificial Sequence: Synthetic oligonucleotide
  Antisense Strand to SEQ ID NO: 346929
cuuuaugagacgaucugau

SEQ ID NO: 346931 - RNA, 19 nt, Artificial Sequence
  Description of Artificial Sequence: Synthetic oligonucleotide
  Sense Strand Starting at position 357 of SEQ ID NO: 317970
gguuacagauggugacaaa

SEQ ID NO: 346932 - RNA, 19 nt, Artificial Sequence
  Description of Artificial Sequence: Synthetic oligonucleotide
  Antisense Strand to SEQ ID NO: 346931
uuugucaccaucuguaacc

SEQ ID NO: 346933 - RNA, 19 nt, Artificial Sequence
  Description of Artificial Sequence: Synthetic oligonucleotide
  Sense Strand Starting at position 357 of SEQ ID NO: 317981
gugacaaauuggcagggaa

SEQ ID NO: 346934 - RNA, 19 nt, Artificial Sequence
  Description of Artificial Sequence: Synthetic oligonucleotide
  Antisense Strand to SEQ ID NO: 346933
uucccugccaauuugucac

SEQ ID NO: 346935 - RNA, 19 nt, Artificial Sequence
  Description of Artificial Sequence: Synthetic oligonucleotide
  Sense Strand Starting at position 357 of SEQ ID NO: 318130
gcaauaguguggcacccau

SEQ ID NO: 346936 - RNA, 19 nt, Artificial Sequence
  Description of Artificial Sequence: Synthetic oligonucleotide
  Antisense Strand to SEQ ID NO: 346935
augggugccacacuauugc

SEQ ID NO: 346937 - RNA, 19 nt, Artificial Sequence
  Description of Artificial Sequence: Synthetic oligonucleotide
  Sense Strand Starting at position 357 of SEQ ID NO: 318161
ugccuuccauauugucauu

SEQ ID NO: 346938 - RNA, 19 nt, Artificial Sequence
  Description of Artificial Sequence: Synthetic oligonucleotide
  Antisense Strand to SEQ ID NO: 346937
aaugacaauauggaaggca

SEQ ID NO: 346939 - RNA, 19 nt, Artificial Sequence
  Description of Artificial Sequence: Synthetic oligonucleotide
  Sense Strand Starting at position 357 of SEQ ID NO: 318182
uuaaucaggccugguguua

SEQ ID NO: 346940 - RNA, 19 nt, Artificial Sequence
  Description of Artificial Sequence: Synthetic oligonucleotide
  Antisense Strand to SEQ ID NO: 346939
uaacaccaggccugauuaa

SEQ ID NO: 346941 - RNA, 19 nt, Artificial Sequence
  Description of Artificial Sequence: Synthetic oligonucleotide
  Sense Strand Starting at position 357 of SEQ ID NO: 318194
gguguuauugcagucuguu

SEQ ID NO: 346942 - RNA, 19 nt, Artificial Sequence
  Description of Artificial Sequence: Synthetic oligonucleotide
  Antisense Strand to SEQ ID NO: 346941
aacagacugcaauaacacc

SEQ ID NO: 346943 - RNA, 19 nt, Artificial Sequence
  Description of Artificial Sequence: Synthetic oligonucleotide
  Sense Strand Starting at position 357 of SEQ ID NO: 318195
guguuauugcagucuguug

SEQ ID NO: 346944 - RNA, 19 nt, Artificial Sequence
  Description of Artificial Sequence: Synthetic oligonucleotide
  Antisense Strand to SEQ ID NO: 346943
caacagacugcaauaacac

SEQ ID NO: 346945 - RNA, 19 nt, Artificial Sequence
  Description of Artificial Sequence: Synthetic oligonucleotide
  Sense Strand Starting at position 357 of SEQ ID NO: 318315
guacaagaauuugaccuga

SEQ ID NO: 346946 - RNA, 19 nt, Artificial Sequence
  Description of Artificial Sequence: Synthetic oligonucleotide
  Antisense Strand to SEQ ID NO: 346945
ucaggucaaauucuuguac

SEQ ID NO: 346947 - RNA, 19 nt, Artificial Sequence
  Description of Artificial Sequence: Synthetic oligonucleotide
  Sense Strand Starting at position 357 of SEQ ID NO: 318856
agagaagggugucucacuu

SEQ ID NO: 346948 - RNA, 19 nt, Artificial Sequence
  Description of Artificial Sequence: Synthetic oligonucleotide
  Antisense Strand to SEQ ID NO: 346947
aagugagacacccuucucu

SEQ ID NO: 346949 - RNA, 19 nt, Artificial Sequence
  Description of Artificial Sequence: Synthetic oligonucleotide
  Sense Strand Starting at position 357 of SEQ ID NO: 318860
aagggugucucacuuuguu

SEQ ID NO: 346950 - RNA, 19 nt, Artificial Sequence
  Description of Artificial Sequence: Synthetic oligonucleotide
  Antisense Strand to SEQ ID NO: 346949
aacaaagugagacacccuu

SEQ ID NO: 346951 - RNA, 19 nt, Artificial Sequence
  Description of Artificial Sequence: Synthetic oligonucleotide
  Sense Strand Starting at position 357 of SEQ ID NO: 319108
cugggauuauggcguaagu

SEQ ID NO: 346952 - RNA, 19 nt, Artificial Sequence
  Description of Artificial Sequence: Synthetic oligonucleotide
  Antisense Strand to SEQ ID NO: 346951
acuuacgccauaaucccag

SEQ ID NO: 346953 - RNA, 19 nt, Artificial Sequence
  Description of Artificial Sequence: Synthetic oligonucleotide
  Sense Strand Starting at position 357 of SEQ ID NO: 319110
gggauuauggcguaaguca

SEQ ID NO: 346954 - RNA, 19 nt, Artificial Sequence
  Description of Artificial Sequence: Synthetic oligonucleotide
  Antisense Strand to SEQ ID NO: 346953
ugacuuacgccauaauccc

SEQ ID NO: 346955 - RNA, 19 nt, Artificial Sequence
  Description of Artificial Sequence: Synthetic oligonucleotide
  Sense Strand Starting at position 357 of SEQ ID NO: 319161
ucaccucaguucucagaca

SEQ ID NO: 346956 - RNA, 19 nt, Artificial Sequence
  Description of Artificial Sequence: Synthetic oligonucleotide
  Antisense Strand to SEQ ID NO: 346955
ugucugagaacugagguga

SEQ ID NO: 346957 - RNA, 19 nt, Artificial Sequence
  Description of Artificial Sequence: Synthetic oligonucleotide
  Sense Strand Starting at position 357 of SEQ ID NO: 319192
ggaucuaaugcagaauguu

SEQ ID NO: 346958 - RNA, 19 nt, Artificial Sequence
  Description of Artificial Sequence: Synthetic oligonucleotide
  Antisense Strand to SEQ ID NO: 346957
aacauucugcauuagaucc

SEQ ID NO: 346959 - RNA, 19 nt, Artificial Sequence
  Description of Artificial Sequence: Synthetic oligonucleotide
  Sense Strand Starting at position 357 of SEQ ID NO: 319201
gcagaauguucuugcggcu

SEQ ID NO: 346960 - RNA, 19 nt, Artificial Sequence
  Description of Artificial Sequence: Synthetic oligonucleotide
  Antisense Strand to SEQ ID NO: 346959
agccgcaagaacauucugc

SEQ ID NO: 346961 - RNA, 19 nt, Artificial Sequence
  Description of Artificial Sequence: Synthetic oligonucleotide
  Sense Strand Starting at position 357 of SEQ ID NO: 319207
uguucuugcggcugagaaa

SEQ ID NO: 346962 - RNA, 19 nt, Artificial Sequence
  Description of Artificial Sequence: Synthetic oligonucleotide
  Antisense Strand to SEQ ID NO: 346961
uuucucagccgcaagaaca

SEQ ID NO: 346963 - RNA, 19 nt, Artificial Sequence
  Description of Artificial Sequence: Synthetic oligonucleotide
  Sense Strand Starting at position 357 of SEQ ID NO: 319208
guucuugcggcugagaaag

SEQ ID NO: 346964 - RNA, 19 nt, Artificial Sequence
  Description of Artificial Sequence: Synthetic oligonucleotide
  Antisense Strand to SEQ ID NO: 346963
cuuucucagccgcaagaac

SEQ ID NO: 346965 - RNA, 19 nt, Artificial Sequence
  Description of Artificial Sequence: Synthetic oligonucleotide
  Sense Strand Starting at position 358 of SEQ ID NO: 315294
ucuugaguaacucggacua

SEQ ID NO: 346966 - RNA, 19 nt, Artificial Sequence
  Description of Artificial Sequence: Synthetic oligonucleotide
  Antisense Strand to SEQ ID NO: 346965
uaguccgaguuacucaaga

SEQ ID NO: 346967 - RNA, 19 nt, Artificial Sequence
  Description of Artificial Sequence: Synthetic oligonucleotide
  Sense Strand Starting at position 358 of SEQ ID NO: 315296
uugaguaacucggacuaug

SEQ ID NO: 346968 - RNA, 19 nt, Artificial Sequence
  Description of Artificial Sequence: Synthetic oligonucleotide
  Antisense Strand to SEQ ID NO: 346967
cauaguccgaguuacucaa

SEQ ID NO: 346969 - RNA, 19 nt, Artificial Sequence
  Description of Artificial Sequence: Synthetic oligonucleotide
  Sense Strand Starting at position 358 of SEQ ID NO: 315697
cugcgaucaagugauccuu

SEQ ID NO: 346970 - RNA, 19 nt, Artificial Sequence
  Description of Artificial Sequence: Synthetic oligonucleotide
  Antisense Strand to SEQ ID NO: 346969
aaggaucacuugaucgcag

SEQ ID NO: 346971 - RNA, 19 nt, Artificial Sequence
  Description of Artificial Sequence: Synthetic oligonucleotide
  Sense Strand Starting at position 358 of SEQ ID NO: 316145
uucucaaacugaguggaau

SEQ ID NO: 346972 - RNA, 19 nt, Artificial Sequence
  Description of Artificial Sequence: Synthetic oligonucleotide
  Antisense Strand to SEQ ID NO: 346971
auuccacucaguuugagaa

SEQ ID NO: 346973 - RNA, 19 nt, Artificial Sequence
  Description of Artificial Sequence: Synthetic oligonucleotide
  Sense Strand Starting at position 358 of SEQ ID NO: 316146
ucucaaacugaguggaaua

SEQ ID NO: 346974 - RNA, 19 nt, Artificial Sequence
  Description of Artificial Sequence: Synthetic oligonucleotide
  Antisense Strand to SEQ ID NO: 346973
uauuccacucaguuugaga

SEQ ID NO: 346975 - RNA, 19 nt, Artificial Sequence
  Description of Artificial Sequence: Synthetic oligonucleotide
  Sense Strand Starting at position 358 of SEQ ID NO: 316277
aaacgacaauuggaagaaa

SEQ ID NO: 346976 - RNA, 19 nt, Artificial Sequence
  Description of Artificial Sequence: Synthetic oligonucleotide
  Antisense Strand to SEQ ID NO: 346975
uuucuuccaauugucguuu

SEQ ID NO: 346977 - RNA, 19 nt, Artificial Sequence
  Description of Artificial Sequence: Synthetic oligonucleotide
  Sense Strand Starting at position 358 of SEQ ID NO: 316556
ugggcauuauucucgaggu

SEQ ID NO: 346978 - RNA, 19 nt, Artificial Sequence
  Description of Artificial Sequence: Synthetic oligonucleotide
  Antisense Strand to SEQ ID NO: 346977
accucgagaauaaugccca

SEQ ID NO: 346979 - RNA, 19 nt, Artificial Sequence
  Description of Artificial Sequence: Synthetic oligonucleotide
  Sense Strand Starting at position 358 of SEQ ID NO: 316597
gugaacucgcaguaccauu

SEQ ID NO: 346980 - RNA, 19 nt, Artificial Sequence
  Description of Artificial Sequence: Synthetic oligonucleotide
  Antisense Strand to SEQ ID NO: 346979
aaugguacugcgaguucac

SEQ ID NO: 346981 - RNA, 19 nt, Artificial Sequence
  Description of Artificial Sequence: Synthetic oligonucleotide
  Sense Strand Starting at position 358 of SEQ ID NO: 316672
gucaauuagcgcuaggacu

SEQ ID NO: 346982 - RNA, 19 nt, Artificial Sequence
  Description of Artificial Sequence: Synthetic oligonucleotide
  Antisense Strand to SEQ ID NO: 346981
aguccuagcgcuaauugac

SEQ ID NO: 346983 - RNA, 19 nt, Artificial Sequence
  Description of Artificial Sequence: Synthetic oligonucleotide
  Sense Strand Starting at position 358 of SEQ ID NO: 316783
gagggacugucuuucucca

SEQ ID NO: 346984 - RNA, 19 nt, Artificial Sequence
  Description of Artificial Sequence: Synthetic oligonucleotide
  Antisense Strand to SEQ ID NO: 346983
uggagaaagacagucccuc

SEQ ID NO: 346985 - RNA, 19 nt, Artificial Sequence
  Description of Artificial Sequence: Synthetic oligonucleotide
  Sense Strand Starting at position 358 of SEQ ID NO: 316785
gggacugucuuucuccaga

SEQ ID NO: 346986 - RNA, 19 nt, Artificial Sequence
  Description of Artificial Sequence: Synthetic oligonucleotide
  Antisense Strand to SEQ ID NO: 346985
ucuggagaaagacaguccc

SEQ ID NO: 346987 - RNA, 19 nt, Artificial Sequence
  Description of Artificial Sequence: Synthetic oligonucleotide
  Sense Strand Starting at position 358 of SEQ ID NO: 316830
uccuguuagccuugacuaa

SEQ ID NO: 346988 - RNA, 19 nt, Artificial Sequence
  Description of Artificial Sequence: Synthetic oligonucleotide
  Antisense Strand to SEQ ID NO: 346987
uuagucaaggcuaacagga

SEQ ID NO: 346989 - RNA, 19 nt, Artificial Sequence
  Description of Artificial Sequence: Synthetic oligonucleotide
  Sense Strand Starting at position 358 of SEQ ID NO: 316831
ccuguuagccuugacuaaa

SEQ ID NO: 346990 - RNA, 19 nt, Artificial Sequence
  Description of Artificial Sequence: Synthetic oligonucleotide
  Antisense Strand to SEQ ID NO: 346989
uuuagucaaggcuaacagg

SEQ ID NO: 346991 - RNA, 19 nt, Artificial Sequence
  Description of Artificial Sequence: Synthetic oligonucleotide
  Sense Strand Starting at position 358 of SEQ ID NO: 316871
gcuggaucucgcgucccaa

SEQ ID NO: 346992 - RNA, 19 nt, Artificial Sequence
  Description of Artificial Sequence: Synthetic oligonucleotide
  Antisense Strand to SEQ ID NO: 346991
uugggacgcgagauccagc

SEQ ID NO: 346993 - RNA, 19 nt, Artificial Sequence
  Description of Artificial Sequence: Synthetic oligonucleotide
  Sense Strand Starting at position 358 of SEQ ID NO: 317335
cuaagcgcucuucgaagaa

SEQ ID NO: 346994 - RNA, 19 nt, Artificial Sequence
  Description of Artificial Sequence: Synthetic oligonucleotide
  Antisense Strand to SEQ ID NO: 346993
uucuucgaagagcgcuuag

SEQ ID NO: 346995 - RNA, 19 nt, Artificial Sequence
  Description of Artificial Sequence: Synthetic oligonucleotide
  Sense Strand Starting at position 358 of SEQ ID NO: 317339
gcgcucuucgaagaauccu

SEQ ID NO: 346996 - RNA, 19 nt, Artificial Sequence
  Description of Artificial Sequence: Synthetic oligonucleotide
  Antisense Strand to SEQ ID NO: 346995
aggauucuucgaagagcgc

SEQ ID NO: 346997 - RNA, 19 nt, Artificial Sequence
  Description of Artificial Sequence: Synthetic oligonucleotide
  Sense Strand Starting at position 358 of SEQ ID NO: 317351
gaauccuccggcugggaaa

SEQ ID NO: 346998 - RNA, 19 nt, Artificial Sequence
  Description of Artificial Sequence: Synthetic oligonucleotide
  Antisense Strand to SEQ ID NO: 346997
uuucccagccggaggauuc

SEQ ID NO: 346999 - RNA, 19 nt, Artificial Sequence
  Description of Artificial Sequence: Synthetic oligonucleotide
  Sense Strand Starting at position 358 of SEQ ID NO: 317424
ccgcacucaaggugucaga

SEQ ID NO: 347000 - RNA, 19 nt, Artificial Sequence
  Description of Artificial Sequence: Synthetic oligonucleotide
  Antisense Strand to SEQ ID NO: 346999
ucugacaccuugagugcgg

SEQ ID NO: 347001 - RNA, 19 nt, Artificial Sequence
  Description of Artificial Sequence: Synthetic oligonucleotide
  Sense Strand Starting at position 358 of SEQ ID NO: 317456
aucacugcguccucucaua

SEQ ID NO: 347002 - RNA, 19 nt, Artificial Sequence
  Description of Artificial Sequence: Synthetic oligonucleotide
  Antisense Strand to SEQ ID NO: 347001
uaugagaggacgcagugau

SEQ ID NO: 347003 - RNA, 19 nt, Artificial Sequence
  Description of Artificial Sequence: Synthetic oligonucleotide
  Sense Strand Starting at position 358 of SEQ ID NO: 317688
ucuggacauucguucuaaa

SEQ ID NO: 347004 - RNA, 19 nt, Artificial Sequence
  Description of Artificial Sequence: Synthetic oligonucleotide
  Antisense Strand to SEQ ID NO: 347003
uuuagaacgaauguccaga

SEQ ID NO: 347005 - RNA, 19 nt, Artificial Sequence
  Description of Artificial Sequence: Synthetic oligonucleotide
  Sense Strand Starting at position 358 of SEQ ID NO: 317691
ggacauucguucuaaauua

SEQ ID NO: 347006 - RNA, 19 nt, Artificial Sequence
  Description of Artificial Sequence: Synthetic oligonucleotide
  Antisense Strand to SEQ ID NO: 347005
uaauuuagaacgaaugucc

SEQ ID NO: 347007 - RNA, 19 nt, Artificial Sequence
  Description of Artificial Sequence: Synthetic oligonucleotide
  Sense Strand Starting at position 358 of SEQ ID NO: 317702
cuaaauuagcgccugugua

SEQ ID NO: 347008 - RNA, 19 nt, Artificial Sequence
  Description of Artificial Sequence: Synthetic oligonucleotide
  Antisense Strand to SEQ ID NO: 347007
uacacaggcgcuaauuuag

SEQ ID NO: 347009 - RNA, 19 nt, Artificial Sequence
  Description of Artificial Sequence: Synthetic oligonucleotide
  Sense Strand Starting at position 358 of SEQ ID NO: 317731
gguauaaacugaggaguaa

SEQ ID NO: 347010 - RNA, 19 nt, Artificial Sequence
  Description of Artificial Sequence: Synthetic oligonucleotide
  Antisense Strand to SEQ ID NO: 347009
uuacuccucaguuuauacc

SEQ ID NO: 347011 - RNA, 19 nt, Artificial Sequence
  Description of Artificial Sequence: Synthetic oligonucleotide
  Sense Strand Starting at position 358 of SEQ ID NO: 317743
ggaguaagacauugucccu

SEQ ID NO: 347012 - RNA, 19 nt, Artificial Sequence
  Description of Artificial Sequence: Synthetic oligonucleotide
  Antisense Strand to SEQ ID NO: 347011
agggacaaugucuuacucc

SEQ ID NO: 347013 - RNA, 19 nt, Artificial Sequence
  Description of Artificial Sequence: Synthetic oligonucleotide
  Sense Strand Starting at position 358 of SEQ ID NO: 317888
aaccuaagugucgaagguu

SEQ ID NO: 347014 - RNA, 19 nt, Artificial Sequence
  Description of Artificial Sequence: Synthetic oligonucleotide
  Antisense Strand to SEQ ID NO: 347013
aaccuucgacacuuagguu

SEQ ID NO: 347015 - RNA, 19 nt, Artificial Sequence
  Description of Artificial Sequence: Synthetic oligonucleotide
  Sense Strand Starting at position 358 of SEQ ID NO: 318361
ggccuucugcacugaacuu

SEQ ID NO: 347016 - RNA, 19 nt, Artificial Sequence
  Description of Artificial Sequence: Synthetic oligonucleotide
  Antisense Strand to SEQ ID NO: 347015
aaguucagugcagaaggcc

SEQ ID NO: 347017 - RNA, 19 nt, Artificial Sequence
  Description of Artificial Sequence: Synthetic oligonucleotide
  Sense Strand Starting at position 358 of SEQ ID NO: 318400
gaagucagauuugagccaa

SEQ ID NO: 347018 - RNA, 19 nt, Artificial Sequence
  Description of Artificial Sequence: Synthetic oligonucleotide
  Antisense Strand to SEQ ID NO: 347017
uuggcucaaaucugacuuc

SEQ ID NO: 347019 - RNA, 19 nt, Artificial Sequence
  Description of Artificial Sequence: Synthetic oligonucleotide
  Sense Strand Starting at position 358 of SEQ ID NO: 318501
guguucaguucugugaucu

SEQ ID NO: 347020 - RNA, 19 nt, Artificial Sequence
  Description of Artificial Sequence: Synthetic oligonucleotide
  Antisense Strand to SEQ ID NO: 347019
agaucacagaacugaacac

SEQ ID NO: 347021 - RNA, 19 nt, Artificial Sequence
  Description of Artificial Sequence: Synthetic oligonucleotide
  Sense Strand Starting at position 358 of SEQ ID NO: 318505
ucaguucugugaucuuuga

SEQ ID NO: 347022 - RNA, 19 nt, Artificial Sequence
  Description of Artificial Sequence: Synthetic oligonucleotide
  Antisense Strand to SEQ ID NO: 347021
ucaaagaucacagaacuga

SEQ ID NO: 347023 - RNA, 19 nt, Artificial Sequence
  Description of Artificial Sequence: Synthetic oligonucleotide
  Sense Strand Starting at position 358 of SEQ ID NO: 318509
uucugugaucuuugaacgu

SEQ ID NO: 347024 - RNA, 19 nt, Artificial Sequence
  Description of Artificial Sequence: Synthetic oligonucleotide
  Antisense Strand to SEQ ID NO: 347023
acguucaaagaucacagaa

SEQ ID NO: 347025 - RNA, 19 nt, Artificial Sequence
  Description of Artificial Sequence: Synthetic oligonucleotide
  Sense Strand Starting at position 358 of SEQ ID NO: 318522
gaacgucccuucucaauga

SEQ ID NO: 347026 - RNA, 19 nt, Artificial Sequence
  Description of Artificial Sequence: Synthetic oligonucleotide
  Antisense Strand to SEQ ID NO: 347025
ucauugagaagggacguuc

SEQ ID NO: 347027 - RNA, 19 nt, Artificial Sequence
  Description of Artificial Sequence: Synthetic oligonucleotide
  Sense Strand Starting at position 358 of SEQ ID NO: 318543
gcaucuugugaccacuuga

SEQ ID NO: 347028 - RNA, 19 nt, Artificial Sequence
  Description of Artificial Sequence: Synthetic oligonucleotide
  Antisense Strand to SEQ ID NO: 347027
ucaaguggucacaagaugc

SEQ ID NO: 347029 - RNA, 19 nt, Artificial Sequence
  Description of Artificial Sequence: Synthetic oligonucleotide
  Sense Strand Starting at position 358 of SEQ ID NO: 318556
acuugaguccauuaggcau

SEQ ID NO: 347030 - RNA, 19 nt, Artificial Sequence
  Description of Artificial Sequence: Synthetic oligonucleotide
  Antisense Strand to SEQ ID NO: 347029
augccuaauggacucaagu

SEQ ID NO: 347031 - RNA, 19 nt, Artificial Sequence
  Description of Artificial Sequence: Synthetic oligonucleotide
  Sense Strand Starting at position 358 of SEQ ID NO: 318624
uuggcuuucuugcuaaaga

SEQ ID NO: 347032 - RNA, 19 nt, Artificial Sequence
  Description of Artificial Sequence: Synthetic oligonucleotide
  Antisense Strand to SEQ ID NO: 347031
ucuuuagcaagaaagccaa

SEQ ID NO: 347033 - RNA, 19 nt, Artificial Sequence
  Description of Artificial Sequence: Synthetic oligonucleotide
  Sense Strand Starting at position 358 of SEQ ID NO: 318687
gcauuaugcugguuaccag

SEQ ID NO: 347034 - RNA, 19 nt, Artificial Sequence
  Description of Artificial Sequence: Synthetic oligonucleotide
  Antisense Strand to SEQ ID NO: 347033
cugguaaccagcauaaugc

SEQ ID NO: 347035 - RNA, 19 nt, Artificial Sequence
  Description of Artificial Sequence: Synthetic oligonucleotide
  Sense Strand Starting at position 358 of SEQ ID NO: 318688
cauuaugcugguuaccaga

SEQ ID NO: 347036 - RNA, 19 nt, Artificial Sequence
  Description of Artificial Sequence: Synthetic oligonucleotide
  Antisense Strand to SEQ ID NO: 347035
ucugguaaccagcauaaug

SEQ ID NO: 347037 - RNA, 19 nt, Artificial Sequence
  Description of Artificial Sequence: Synthetic oligonucleotide
  Sense Strand Starting at position 358 of SEQ ID NO: 318709
gagguacaguggugaauaa

SEQ ID NO: 347038 - RNA, 19 nt, Artificial Sequence
  Description of Artificial Sequence: Synthetic oligonucleotide
  Antisense Strand to SEQ ID NO: 347037
uuauucaccacuguaccuc

SEQ ID NO: 347039 - RNA, 19 nt, Artificial Sequence
  Description of Artificial Sequence: Synthetic oligonucleotide
  Sense Strand Starting at position 358 of SEQ ID NO: 319087
aggcaauuauaaugcauca

SEQ ID NO: 347040 - RNA, 19 nt, Artificial Sequence
  Description of Artificial Sequence: Synthetic oligonucleotide
  Antisense Strand to SEQ ID NO: 347039
ugaugcauuauaauugccu

SEQ ID NO: 347041 - RNA, 19 nt, Artificial Sequence
  Description of Artificial Sequence: Synthetic oligonucleotide
  Sense Strand Starting at position 358 of SEQ ID NO: 319103
ucauaaucaugguaguagu

SEQ ID NO: 347042 - RNA, 19 nt, Artificial Sequence
  Description of Artificial Sequence: Synthetic oligonucleotide
  Antisense Strand to SEQ ID NO: 347041
acuacuaccaugauuauga

SEQ ID NO: 347043 - RNA, 19 nt, Artificial Sequence
  Description of Artificial Sequence: Synthetic oligonucleotide
  Sense Strand Starting at position 358 of SEQ ID NO: 319215
uuagcuauuuaaggaaaga

SEQ ID NO: 347044 - RNA, 19 nt, Artificial Sequence
  Description of Artificial Sequence: Synthetic oligonucleotide
  Antisense Strand to SEQ ID NO: 347043
ucuuuccuuaaauagcuaa

SEQ ID NO: 347045 - RNA, 19 nt, Artificial Sequence
  Description of Artificial Sequence: Synthetic oligonucleotide
  Sense Strand Starting at position 359 of SEQ ID NO: 315266
aaaggagcgguccaauagu

SEQ ID NO: 347046 - RNA, 19 nt, Artificial Sequence
  Description of Artificial Sequence: Synthetic oligonucleotide
  Antisense Strand to SEQ ID NO: 347045
acuauuggaccgcuccuuu

SEQ ID NO: 347047 - RNA, 19 nt, Artificial Sequence
  Description of Artificial Sequence: Synthetic oligonucleotide
  Sense Strand Starting at position 359 of SEQ ID NO: 315757
agagguagacuccgucuaa

SEQ ID NO: 347048 - RNA, 19 nt, Artificial Sequence
  Description of Artificial Sequence: Synthetic oligonucleotide
  Antisense Strand to SEQ ID NO: 347047
uuagacggagucuaccucu

SEQ ID NO: 347049 - RNA, 19 nt, Artificial Sequence
  Description of Artificial Sequence: Synthetic oligonucleotide
  Sense Strand Starting at position 359 of SEQ ID NO: 315758
gagguagacuccgucuaaa

SEQ ID NO: 347050 - RNA, 19 nt, Artificial Sequence
  Description of Artificial Sequence: Synthetic oligonucleotide
  Antisense Strand to SEQ ID NO: 347049
uuuagacggagucuaccuc

SEQ ID NO: 347051 - RNA, 19 nt, Artificial Sequence
  Description of Artificial Sequence: Synthetic oligonucleotide
  Sense Strand Starting at position 359 of SEQ ID NO: 316106
gcacaauaggaucaguguu

SEQ ID NO: 347052 - RNA, 19 nt, Artificial Sequence
  Description of Artificial Sequence: Synthetic oligonucleotide
  Antisense Strand to SEQ ID NO: 347051
aacacugauccuauugugc

SEQ ID NO: 347053 - RNA, 19 nt, Artificial Sequence
  Description of Artificial Sequence: Synthetic oligonucleotide
  Sense Strand Starting at position 359 of SEQ ID NO: 316163
aggagcuucuaacuaaaca

SEQ ID NO: 347054 - RNA, 19 nt, Artificial Sequence
  Description of Artificial Sequence: Synthetic oligonucleotide
  Antisense Strand to SEQ ID NO: 347053
uguuuaguuagaagcuccu

SEQ ID NO: 347055 - RNA, 19 nt, Artificial Sequence
  Description of Artificial Sequence: Synthetic oligonucleotide
  Sense Strand Starting at position 359 of SEQ ID NO: 316310
agauauaauggugguguua

SEQ ID NO: 347056 - RNA, 19 nt, Artificial Sequence
  Description of Artificial Sequence: Synthetic oligonucleotide
  Antisense Strand to SEQ ID NO: 347055
uaacaccaccauuauaucu

SEQ ID NO: 347057 - RNA, 19 nt, Artificial Sequence
  Description of Artificial Sequence: Synthetic oligonucleotide
  Sense Strand Starting at position 359 of SEQ ID NO: 316381
ggcagacauuguccuaaac

SEQ ID NO: 347058 - RNA, 19 nt, Artificial Sequence
  Description of Artificial Sequence: Synthetic oligonucleotide
  Antisense Strand to SEQ ID NO: 347057
guuuaggacaaugucugcc

SEQ ID NO: 347059 - RNA, 19 nt, Artificial Sequence
  Description of Artificial Sequence: Synthetic oligonucleotide
  Sense Strand Starting at position 359 of SEQ ID NO: 316614
gggcggauggccuggauuu

SEQ ID NO: 347060 - RNA, 19 nt, Artificial Sequence
  Description of Artificial Sequence: Synthetic oligonucleotide
  Antisense Strand to SEQ ID NO: 347059
aaauccaggccauccgccc

SEQ ID NO: 347061 - RNA, 19 nt, Artificial Sequence
  Description of Artificial Sequence: Synthetic oligonucleotide
  Sense Strand Starting at position 359 of SEQ ID NO: 316615
ggcggauggccuggauuua

SEQ ID NO: 347062 - RNA, 19 nt, Artificial Sequence
  Description of Artificial Sequence: Synthetic oligonucleotide
  Antisense Strand to SEQ ID NO: 347061
uaaauccaggccauccgcc

SEQ ID NO: 347063 - RNA, 19 nt, Artificial Sequence
  Description of Artificial Sequence: Synthetic oligonucleotide
  Sense Strand Starting at position 359 of SEQ ID NO: 316652
uuaaacuucccgcaaagaa

SEQ ID NO: 347064 - RNA, 19 nt, Artificial Sequence
  Description of Artificial Sequence: Synthetic oligonucleotide
  Antisense Strand to SEQ ID NO: 347063
uucuuugcgggaaguuuaa

SEQ ID NO: 347065 - RNA, 19 nt, Artificial Sequence
  Description of Artificial Sequence: Synthetic oligonucleotide
  Sense Strand Starting at position 359 of SEQ ID NO: 316836
ggcgaagaugcccagcaau

SEQ ID NO: 347066 - RNA, 19 nt, Artificial Sequence
  Description of Artificial Sequence: Synthetic oligonucleotide
  Antisense Strand to SEQ ID NO: 347065
auugcugggcaucuucgcc

SEQ ID NO: 347067 - RNA, 19 nt, Artificial Sequence
  Description of Artificial Sequence: Synthetic oligonucleotide
  Sense Strand Starting at position 359 of SEQ ID NO: 317245
ggugauuggucgacgcucu

SEQ ID NO: 347068 - RNA, 19 nt, Artificial Sequence
  Description of Artificial Sequence: Synthetic oligonucleotide
  Antisense Strand to SEQ ID NO: 347067
agagcgucgaccaaucacc

SEQ ID NO: 347069 - RNA, 19 nt, Artificial Sequence
  Description of Artificial Sequence: Synthetic oligonucleotide
  Sense Strand Starting at position 359 of SEQ ID NO: 317431
accgcauauuuacucagua

SEQ ID NO: 347070 - RNA, 19 nt, Artificial Sequence
  Description of Artificial Sequence: Synthetic oligonucleotide
  Antisense Strand to SEQ ID NO: 347069
uacugaguaaauaugcggu

SEQ ID NO: 347071 - RNA, 19 nt, Artificial Sequence
  Description of Artificial Sequence: Synthetic oligonucleotide
  Sense Strand Starting at position 359 of SEQ ID NO: 317432
ccgcauauuuacucaguaa

SEQ ID NO: 347072 - RNA, 19 nt, Artificial Sequence
  Description of Artificial Sequence: Synthetic oligonucleotide
  Antisense Strand to SEQ ID NO: 347071
uuacugaguaaauaugcgg

SEQ ID NO: 347073 - RNA, 19 nt, Artificial Sequence
  Description of Artificial Sequence: Synthetic oligonucleotide
  Sense Strand Starting at position 359 of SEQ ID NO: 317466
aggaaaguuuggguggauu

SEQ ID NO: 347074 - RNA, 19 nt, Artificial Sequence
  Description of Artificial Sequence: Synthetic oligonucleotide
  Antisense Strand to SEQ ID NO: 347073
aauccacccaaacuuuccu

SEQ ID NO: 347075 - RNA, 19 nt, Artificial Sequence
  Description of Artificial Sequence: Synthetic oligonucleotide
  Sense Strand Starting at position 359 of SEQ ID NO: 317468
gaaaguuuggguggauucu

SEQ ID NO: 347076 - RNA, 19 nt, Artificial Sequence
  Description of Artificial Sequence: Synthetic oligonucleotide
  Antisense Strand to SEQ ID NO: 347075
agaauccacccaaacuuuc

SEQ ID NO: 347077 - RNA, 19 nt, Artificial Sequence
  Description of Artificial Sequence: Synthetic oligonucleotide
  Sense Strand Starting at position 359 of SEQ ID NO: 317548
agugccgccagagauaaau

SEQ ID NO: 347078 - RNA, 19 nt, Artificial Sequence
  Description of Artificial Sequence: Synthetic oligonucleotide
  Antisense Strand to SEQ ID NO: 347077
auuuaucucuggcggcacu

SEQ ID NO: 347079 - RNA, 19 nt, Artificial Sequence
  Description of Artificial Sequence: Synthetic oligonucleotide
  Sense Strand Starting at position 359 of SEQ ID NO: 317612
ugcuuucugcuuuaggaau

SEQ ID NO: 347080 - RNA, 19 nt, Artificial Sequence
  Description of Artificial Sequence: Synthetic oligonucleotide
  Antisense Strand to SEQ ID NO: 347079
auuccuaaagcagaaagca

SEQ ID NO: 347081 - RNA, 19 nt, Artificial Sequence
  Description of Artificial Sequence: Synthetic oligonucleotide
  Sense Strand Starting at position 359 of SEQ ID NO: 317735
ucagcagccgcuuauuuaa

SEQ ID NO: 347082 - RNA, 19 nt, Artificial Sequence
  Description of Artificial Sequence: Synthetic oligonucleotide
  Antisense Strand to SEQ ID NO: 347081
uuaaauaagcggcugcuga

SEQ ID NO: 347083 - RNA, 19 nt, Artificial Sequence
  Description of Artificial Sequence: Synthetic oligonucleotide
  Sense Strand Starting at position 359 of SEQ ID NO: 317737
agcagccgcuuauuuaaau

SEQ ID NO: 347084 - RNA, 19 nt, Artificial Sequence
  Description of Artificial Sequence: Synthetic oligonucleotide
  Antisense Strand to SEQ ID NO: 347083
auuuaaauaagcggcugcu

SEQ ID NO: 347085 - RNA, 19 nt, Artificial Sequence
  Description of Artificial Sequence: Synthetic oligonucleotide
  Sense Strand Starting at position 359 of SEQ ID NO: 317796
gcggguuagaaucaauucu

SEQ ID NO: 347086 - RNA, 19 nt, Artificial Sequence
  Description of Artificial Sequence: Synthetic oligonucleotide
  Antisense Strand to SEQ ID NO: 347085
agaauugauucuaacccgc

SEQ ID NO: 347087 - RNA, 19 nt, Artificial Sequence
  Description of Artificial Sequence: Synthetic oligonucleotide
  Sense Strand Starting at position 359 of SEQ ID NO: 317952
ccuaaagucuagucaagaa

SEQ ID NO: 347088 - RNA, 19 nt, Artificial Sequence
  Description of Artificial Sequence: Synthetic oligonucleotide
  Antisense Strand to SEQ ID NO: 347087
uucuugacuagacuuuagg

SEQ ID NO: 347089 - RNA, 19 nt, Artificial Sequence
  Description of Artificial Sequence: Synthetic oligonucleotide
  Sense Strand Starting at position 359 of SEQ ID NO: 317956
aagucuagucaagaaugua

SEQ ID NO: 347090 - RNA, 19 nt, Artificial Sequence
  Description of Artificial Sequence: Synthetic oligonucleotide
  Antisense Strand to SEQ ID NO: 347089
uacauucuugacuagacuu

SEQ ID NO: 347091 - RNA, 19 nt, Artificial Sequence
  Description of Artificial Sequence: Synthetic oligonucleotide
  Sense Strand Starting at position 359 of SEQ ID NO: 317959
ucuagucaagaauguauca

SEQ ID NO: 347092 - RNA, 19 nt, Artificial Sequence
  Description of Artificial Sequence: Synthetic oligonucleotide
  Antisense Strand to SEQ ID NO: 347091
ugauacauucuugacuaga

SEQ ID NO: 347093 - RNA, 19 nt, Artificial Sequence
  Description of Artificial Sequence: Synthetic oligonucleotide
  Sense Strand Starting at position 359 of SEQ ID NO: 317986
cugugauuagcguugcuau

SEQ ID NO: 347094 - RNA, 19 nt, Artificial Sequence
  Description of Artificial Sequence: Synthetic oligonucleotide
  Antisense Strand to SEQ ID NO: 347093
auagcaacgcuaaucacag

SEQ ID NO: 347095 - RNA, 19 nt, Artificial Sequence
  Description of Artificial Sequence: Synthetic oligonucleotide
  Sense Strand Starting at position 359 of SEQ ID NO: 317988
gugauuagcguugcuauua

SEQ ID NO: 347096 - RNA, 19 nt, Artificial Sequence
  Description of Artificial Sequence: Synthetic oligonucleotide
  Antisense Strand to SEQ ID NO: 347095
uaauagcaacgcuaaucac

SEQ ID NO: 347097 - RNA, 19 nt, Artificial Sequence
  Description of Artificial Sequence: Synthetic oligonucleotide
  Sense Strand Starting at position 359 of SEQ ID NO: 318179
uguacuuugggauggaaca

SEQ ID NO: 347098 - RNA, 19 nt, Artificial Sequence
  Description of Artificial Sequence: Synthetic oligonucleotide
  Antisense Strand to SEQ ID NO: 347097
uguuccaucccaaaguaca

SEQ ID NO: 347099 - RNA, 19 nt, Artificial Sequence
  Description of Artificial Sequence: Synthetic oligonucleotide
  Sense Strand Starting at position 359 of SEQ ID NO: 318255
gcaaucuuagaaugccuga

SEQ ID NO: 347100 - RNA, 19 nt, Artificial Sequence
  Description of Artificial Sequence: Synthetic oligonucleotide
  Antisense Strand to SEQ ID NO: 347099
ucaggcauucuaagauugc

SEQ ID NO: 347101 - RNA, 19 nt, Artificial Sequence
  Description of Artificial Sequence: Synthetic oligonucleotide
  Sense Strand Starting at position 359 of SEQ ID NO: 318314
gguaauuauugguuucccu

SEQ ID NO: 347102 - RNA, 19 nt, Artificial Sequence
  Description of Artificial Sequence: Synthetic oligonucleotide
  Antisense Strand to SEQ ID NO: 347101
agggaaaccaauaauuacc

SEQ ID NO: 347103 - RNA, 19 nt, Artificial Sequence
  Description of Artificial Sequence: Synthetic oligonucleotide
  Sense Strand Starting at position 359 of SEQ ID NO: 318329
cccugcuugucaguauuua

SEQ ID NO: 347104 - RNA, 19 nt, Artificial Sequence
  Description of Artificial Sequence: Synthetic oligonucleotide
  Antisense Strand to SEQ ID NO: 347103
uaaauacugacaagcaggg

SEQ ID NO: 347105 - RNA, 19 nt, Artificial Sequence
  Description of Artificial Sequence: Synthetic oligonucleotide
  Sense Strand Starting at position 359 of SEQ ID NO: 318333
gcuugucaguauuuaaguc

SEQ ID NO: 347106 - RNA, 19 nt, Artificial Sequence
  Description of Artificial Sequence: Synthetic oligonucleotide
  Antisense Strand to SEQ ID NO: 347105
gacuuaaauacugacaagc

SEQ ID NO: 347107 - RNA, 19 nt, Artificial Sequence
  Description of Artificial Sequence: Synthetic oligonucleotide
  Sense Strand Starting at position 359 of SEQ ID NO: 318423
uggaaugugcuugcguauu

SEQ ID NO: 347108 - RNA, 19 nt, Artificial Sequence
  Description of Artificial Sequence: Synthetic oligonucleotide
  Antisense Strand to SEQ ID NO: 347107
aauacgcaagcacauucca

SEQ ID NO: 347109 - RNA, 19 nt, Artificial Sequence
  Description of Artificial Sequence: Synthetic oligonucleotide
  Sense Strand Starting at position 359 of SEQ ID NO: 318494
uaagcuauugugggaagca

SEQ ID NO: 347110 - RNA, 19 nt, Artificial Sequence
  Description of Artificial Sequence: Synthetic oligonucleotide
  Antisense Strand to SEQ ID NO: 347109
ugcuucccacaauagcuua

SEQ ID NO: 347111 - RNA, 19 nt, Artificial Sequence
  Description of Artificial Sequence: Synthetic oligonucleotide
  Sense Strand Starting at position 359 of SEQ ID NO: 318560
gcuaaugauuaacugugua

SEQ ID NO: 347112 - RNA, 19 nt, Artificial Sequence
  Description of Artificial Sequence: Synthetic oligonucleotide
  Antisense Strand to SEQ ID NO: 347111
uacacaguuaaucauuagc

SEQ ID NO: 347113 - RNA, 19 nt, Artificial Sequence
  Description of Artificial Sequence: Synthetic oligonucleotide
  Sense Strand Starting at position 359 of SEQ ID NO: 318564
augauuaacuguguauggu

SEQ ID NO: 347114 - RNA, 19 nt, Artificial Sequence
  Description of Artificial Sequence: Synthetic oligonucleotide
  Antisense Strand to SEQ ID NO: 347113
accauacacaguuaaucau

SEQ ID NO: 347115 - RNA, 19 nt, Artificial Sequence
  Description of Artificial Sequence: Synthetic oligonucleotide
  Sense Strand Starting at position 359 of SEQ ID NO: 318565
ugauuaacuguguauggua

SEQ ID NO: 347116 - RNA, 19 nt, Artificial Sequence
  Description of Artificial Sequence: Synthetic oligonucleotide
  Antisense Strand to SEQ ID NO: 347115
uaccauacacaguuaauca

SEQ ID NO: 347117 - RNA, 19 nt, Artificial Sequence
  Description of Artificial Sequence: Synthetic oligonucleotide
  Sense Strand Starting at position 359 of SEQ ID NO: 318578
augguaucauugccaugaa

SEQ ID NO: 347118 - RNA, 19 nt, Artificial Sequence
  Description of Artificial Sequence: Synthetic oligonucleotide
  Antisense Strand to SEQ ID NO: 347117
uucauggcaaugauaccau

SEQ ID NO: 347119 - RNA, 19 nt, Artificial Sequence
  Description of Artificial Sequence: Synthetic oligonucleotide
  Sense Strand Starting at position 359 of SEQ ID NO: 318642
auguguggcaguuagauua

SEQ ID NO: 347120 - RNA, 19 nt, Artificial Sequence
  Description of Artificial Sequence: Synthetic oligonucleotide
  Antisense Strand to SEQ ID NO: 347119
uaaucuaacugccacacau

SEQ ID NO: 347121 - RNA, 19 nt, Artificial Sequence
  Description of Artificial Sequence: Synthetic oligonucleotide
  Sense Strand Starting at position 359 of SEQ ID NO: 319119
gugugcauaggugaucaua

SEQ ID NO: 347122 - RNA, 19 nt, Artificial Sequence
  Description of Artificial Sequence: Synthetic oligonucleotide
  Antisense Strand to SEQ ID NO: 347121
uaugaucaccuaugcacac

SEQ ID NO: 347123 - RNA, 19 nt, Artificial Sequence
  Description of Artificial Sequence: Synthetic oligonucleotide
  Sense Strand Starting at position 359 of SEQ ID NO: 319121
gugcauaggugaucauaug

SEQ ID NO: 347124 - RNA, 19 nt, Artificial Sequence
  Description of Artificial Sequence: Synthetic oligonucleotide
  Antisense Strand to SEQ ID NO: 347123
cauaugaucaccuaugcac

SEQ ID NO: 347125 - RNA, 19 nt, Artificial Sequence
  Description of Artificial Sequence: Synthetic oligonucleotide
  Sense Strand Starting at position 360 of SEQ ID NO: 315391
aaacgcuaugguuaagcaa

SEQ ID NO: 347126 - RNA, 19 nt, Artificial Sequence
  Description of Artificial Sequence: Synthetic oligonucleotide
  Antisense Strand to SEQ ID NO: 347125
uugcuuaaccauagcguuu

SEQ ID NO: 347127 - RNA, 19 nt, Artificial Sequence
  Description of Artificial Sequence: Synthetic oligonucleotide
  Sense Strand Starting at position 360 of SEQ ID NO: 315394
cgcuaugguuaagcaagaa

SEQ ID NO: 347128 - RNA, 19 nt, Artificial Sequence
  Description of Artificial Sequence: Synthetic oligonucleotide
  Antisense Strand to SEQ ID NO: 347127
uucuugcuuaaccauagcg

SEQ ID NO: 347129 - RNA, 19 nt, Artificial Sequence
  Description of Artificial Sequence: Synthetic oligonucleotide
  Sense Strand Starting at position 360 of SEQ ID NO: 315415
acucaucgguuuccuagaa

SEQ ID NO: 347130 - RNA, 19 nt, Artificial Sequence
  Description of Artificial Sequence: Synthetic oligonucleotide
  Antisense Strand to SEQ ID NO: 347129
uucuaggaaaccgaugagu

SEQ ID NO: 347131 - RNA, 19 nt, Artificial Sequence
  Description of Artificial Sequence: Synthetic oligonucleotide
  Sense Strand Starting at position 360 of SEQ ID NO: 315416
cucaucgguuuccuagaau

SEQ ID NO: 347132 - RNA, 19 nt, Artificial Sequence
  Description of Artificial Sequence: Synthetic oligonucleotide
  Antisense Strand to SEQ ID NO: 347131
auucuaggaaaccgaugag

SEQ ID NO: 347133 - RNA, 19 nt, Artificial Sequence
  Description of Artificial Sequence: Synthetic oligonucleotide
  Sense Strand Starting at position 360 of SEQ ID NO: 315441
aaggcucaguccuuugaau

SEQ ID NO: 347134 - RNA, 19 nt, Artificial Sequence
  Description of Artificial Sequence: Synthetic oligonucleotide
  Antisense Strand to SEQ ID NO: 347133
auucaaaggacugagccuu

SEQ ID NO: 347135 - RNA, 19 nt, Artificial Sequence
  Description of Artificial Sequence: Synthetic oligonucleotide
  Sense Strand Starting at position 360 of SEQ ID NO: 315443
ggcucaguccuuugaauuu

SEQ ID NO: 347136 - RNA, 19 nt, Artificial Sequence
  Description of Artificial Sequence: Synthetic oligonucleotide
  Antisense Strand to SEQ ID NO: 347135
aaauucaaaggacugagcc

SEQ ID NO: 347137 - RNA, 19 nt, Artificial Sequence
  Description of Artificial Sequence: Synthetic oligonucleotide
  Sense Strand Starting at position 360 of SEQ ID NO: 315477
cuugcuucgguagaaauca

SEQ ID NO: 347138 - RNA, 19 nt, Artificial Sequence
  Description of Artificial Sequence: Synthetic oligonucleotide
  Antisense Strand to SEQ ID NO: 347137
ugauuucuaccgaagcaag

SEQ ID NO: 347139 - RNA, 19 nt, Artificial Sequence
  Description of Artificial Sequence: Synthetic oligonucleotide
  Sense Strand Starting at position 360 of SEQ ID NO: 315607
acugcuuuccuccagguga

SEQ ID NO: 347140 - RNA, 19 nt, Artificial Sequence
  Description of Artificial Sequence: Synthetic oligonucleotide
  Antisense Strand to SEQ ID NO: 347139
ucaccuggaggaaagcagu

SEQ ID NO: 347141 - RNA, 19 nt, Artificial Sequence
  Description of Artificial Sequence: Synthetic oligonucleotide
  Sense Strand Starting at position 360 of SEQ ID NO: 315699
agucaacuauuuggacuaa

SEQ ID NO: 347142 - RNA, 19 nt, Artificial Sequence
  Description of Artificial Sequence: Synthetic oligonucleotide
  Antisense Strand to SEQ ID NO: 347141
uuaguccaaauaguugacu

SEQ ID NO: 347143 - RNA, 19 nt, Artificial Sequence
  Description of Artificial Sequence: Synthetic oligonucleotide
  Sense Strand Starting at position 360 of SEQ ID NO: 316087
gacggcuuuggagaaguca

SEQ ID NO: 347144 - RNA, 19 nt, Artificial Sequence
  Description of Artificial Sequence: Synthetic oligonucleotide
  Antisense Strand to SEQ ID NO: 347143
ugacuucuccaaagccguc

SEQ ID NO: 347145 - RNA, 19 nt, Artificial Sequence
  Description of Artificial Sequence: Synthetic oligonucleotide
  Sense Strand Starting at position 360 of SEQ ID NO: 316166
gagguaaaggcuuguucug

SEQ ID NO: 347146 - RNA, 19 nt, Artificial Sequence
  Description of Artificial Sequence: Synthetic oligonucleotide
  Antisense Strand to SEQ ID NO: 347145
cagaacaagccuuuaccuc

SEQ ID NO: 347147 - RNA, 19 nt, Artificial Sequence
  Description of Artificial Sequence: Synthetic oligonucleotide
  Sense Strand Starting at position 360 of SEQ ID NO: 316168
gguaaaggcuuguucugag

SEQ ID NO: 347148 - RNA, 19 nt, Artificial Sequence
  Description of Artificial Sequence: Synthetic oligonucleotide
  Antisense Strand to SEQ ID NO: 347147
cucagaacaagccuuuacc

SEQ ID NO: 347149 - RNA, 19 nt, Artificial Sequence
  Description of Artificial Sequence: Synthetic oligonucleotide
  Sense Strand Starting at position 360 of SEQ ID NO: 316325
uauccucacgcguaagaca

SEQ ID NO: 347150 - RNA, 19 nt, Artificial Sequence
  Description of Artificial Sequence: Synthetic oligonucleotide
  Antisense Strand to SEQ ID NO: 347149
ugucuuacgcgugaggaua

SEQ ID NO: 347151 - RNA, 19 nt, Artificial Sequence
  Description of Artificial Sequence: Synthetic oligonucleotide
  Sense Strand Starting at position 360 of SEQ ID NO: 316358
aguucugaaguuuggagau

SEQ ID NO: 347152 - RNA, 19 nt, Artificial Sequence
  Description of Artificial Sequence: Synthetic oligonucleotide
  Antisense Strand to SEQ ID NO: 347151
aucuccaaacuucagaacu

SEQ ID NO: 347153 - RNA, 19 nt, Artificial Sequence
  Description of Artificial Sequence: Synthetic oligonucleotide
  Sense Strand Starting at position 360 of SEQ ID NO: 317644
ccacucuaggucuagguua

SEQ ID NO: 347154 - RNA, 19 nt, Artificial Sequence
  Description of Artificial Sequence: Synthetic oligonucleotide
  Antisense Strand to SEQ ID NO: 347153
uaaccuagaccuagagugg

SEQ ID NO: 347155 - RNA, 19 nt, Artificial Sequence
  Description of Artificial Sequence: Synthetic oligonucleotide
  Sense Strand Starting at position 360 of SEQ ID NO: 317697
gaaggaaaggaucguuucu

SEQ ID NO: 347156 - RNA, 19 nt, Artificial Sequence
  Description of Artificial Sequence: Synthetic oligonucleotide
  Antisense Strand to SEQ ID NO: 347155
agaaacgauccuuuccuuc

SEQ ID NO: 347157 - RNA, 19 nt, Artificial Sequence
  Description of Artificial Sequence: Synthetic oligonucleotide
  Sense Strand Starting at position 360 of SEQ ID NO: 317699
aggaaaggaucguuucugu

SEQ ID NO: 347158 - RNA, 19 nt, Artificial Sequence
  Description of Artificial Sequence: Synthetic oligonucleotide
  Antisense Strand to SEQ ID NO: 347157
acagaaacgauccuuuccu

SEQ ID NO: 347159 - RNA, 19 nt, Artificial Sequence
  Description of Artificial Sequence: Synthetic oligonucleotide
  Sense Strand Starting at position 360 of SEQ ID NO: 317702
aaaggaucguuucuguaua

SEQ ID NO: 347160 - RNA, 19 nt, Artificial Sequence
  Description of Artificial Sequence: Synthetic oligonucleotide
  Antisense Strand to SEQ ID NO: 347159
uauacagaaacgauccuuu

SEQ ID NO: 347161 - RNA, 19 nt, Artificial Sequence
  Description of Artificial Sequence: Synthetic oligonucleotide
  Sense Strand Starting at position 360 of SEQ ID NO: 317704
aggaucguuucuguauaaa

SEQ ID NO: 347162 - RNA, 19 nt, Artificial Sequence
  Description of Artificial Sequence: Synthetic oligonucleotide
  Antisense Strand to SEQ ID NO: 347161
uuuauacagaaacgauccu

SEQ ID NO: 347163 - RNA, 19 nt, Artificial Sequence
  Description of Artificial Sequence: Synthetic oligonucleotide
  Sense Strand Starting at position 360 of SEQ ID NO: 317733
uuugcauaucgagcgcaua

SEQ ID NO: 347164 - RNA, 19 nt, Artificial Sequence
  Description of Artificial Sequence: Synthetic oligonucleotide
  Antisense Strand to SEQ ID NO: 347163
uaugcgcucgauaugcaaa

SEQ ID NO: 347165 - RNA, 19 nt, Artificial Sequence
  Description of Artificial Sequence: Synthetic oligonucleotide
  Sense Strand Starting at position 360 of SEQ ID NO: 317759
uaacuuaggugucuguuua

SEQ ID NO: 347166 - RNA, 19 nt, Artificial Sequence
  Description of Artificial Sequence: Synthetic oligonucleotide
  Antisense Strand to SEQ ID NO: 347165
uaaacagacaccuaaguua

SEQ ID NO: 347167 - RNA, 19 nt, Artificial Sequence
  Description of Artificial Sequence: Synthetic oligonucleotide
  Sense Strand Starting at position 360 of SEQ ID NO: 317763
uuaggugucuguuuaugga

SEQ ID NO: 347168 - RNA, 19 nt, Artificial Sequence
  Description of Artificial Sequence: Synthetic oligonucleotide
  Antisense Strand to SEQ ID NO: 347167
uccauaaacagacaccuaa

SEQ ID NO: 347169 - RNA, 19 nt, Artificial Sequence
  Description of Artificial Sequence: Synthetic oligonucleotide
  Sense Strand Starting at position 360 of SEQ ID NO: 317865
ugaagaaucgcucauggug

SEQ ID NO: 347170 - RNA, 19 nt, Artificial Sequence
  Description of Artificial Sequence: Synthetic oligonucleotide
  Antisense Strand to SEQ ID NO: 347169
caccaugagcgauucuuca

SEQ ID NO: 347171 - RNA, 19 nt, Artificial Sequence
  Description of Artificial Sequence: Synthetic oligonucleotide
  Sense Strand Starting at position 360 of SEQ ID NO: 317956
guaaguacucuuggacagu

SEQ ID NO: 347172 - RNA, 19 nt, Artificial Sequence
  Description of Artificial Sequence: Synthetic oligonucleotide
  Antisense Strand to SEQ ID NO: 347171
acuguccaagaguacuuac

SEQ ID NO: 347173 - RNA, 19 nt, Artificial Sequence
  Description of Artificial Sequence: Synthetic oligonucleotide
  Sense Strand Starting at position 360 of SEQ ID NO: 317965
cuuggacaguucuuagaaa

SEQ ID NO: 347174 - RNA, 19 nt, Artificial Sequence
  Description of Artificial Sequence: Synthetic oligonucleotide
  Antisense Strand to SEQ ID NO: 347173
uuucuaagaacuguccaag

SEQ ID NO: 347175 - RNA, 19 nt, Artificial Sequence
  Description of Artificial Sequence: Synthetic oligonucleotide
  Sense Strand Starting at position 360 of SEQ ID NO: 317973
guucuuagaaacuggaagu

SEQ ID NO: 347176 - RNA, 19 nt, Artificial Sequence
  Description of Artificial Sequence: Synthetic oligonucleotide
  Antisense Strand to SEQ ID NO: 347175
acuuccaguuucuaagaac

SEQ ID NO: 347177 - RNA, 19 nt, Artificial Sequence
  Description of Artificial Sequence: Synthetic oligonucleotide
  Sense Strand Starting at position 360 of SEQ ID NO: 318024
uugucucggaaauaggauu

SEQ ID NO: 347178 - RNA, 19 nt, Artificial Sequence
  Description of Artificial Sequence: Synthetic oligonucleotide
  Antisense Strand to SEQ ID NO: 347177
aauccuauuuccgagacaa

SEQ ID NO: 347179 - RNA, 19 nt, Artificial Sequence
  Description of Artificial Sequence: Synthetic oligonucleotide
  Sense Strand Starting at position 360 of SEQ ID NO: 318259
ugcaaauguuagcucuaaa

SEQ ID NO: 347180 - RNA, 19 nt, Artificial Sequence
  Description of Artificial Sequence: Synthetic oligonucleotide
  Antisense Strand to SEQ ID NO: 347179
uuuagagcuaacauuugca

SEQ ID NO: 347181 - RNA, 19 nt, Artificial Sequence
  Description of Artificial Sequence: Synthetic oligonucleotide
  Sense Strand Starting at position 360 of SEQ ID NO: 318307
gguuuaggcgcuuauuuau

SEQ ID NO: 347182 - RNA, 19 nt, Artificial Sequence
  Description of Artificial Sequence: Synthetic oligonucleotide
  Antisense Strand to SEQ ID NO: 347181
auaaauaagcgccuaaacc

SEQ ID NO: 347183 - RNA, 19 nt, Artificial Sequence
  Description of Artificial Sequence: Synthetic oligonucleotide
  Sense Strand Starting at position 360 of SEQ ID NO: 318453
ggcugaauggccgaccaau

SEQ ID NO: 347184 - RNA, 19 nt, Artificial Sequence
  Description of Artificial Sequence: Synthetic oligonucleotide
  Antisense Strand to SEQ ID NO: 347183
auuggucggccauucagcc

SEQ ID NO: 347185 - RNA, 19 nt, Artificial Sequence
  Description of Artificial Sequence: Synthetic oligonucleotide
  Sense Strand Starting at position 360 of SEQ ID NO: 318464
cgaccaauggagugcauaa

SEQ ID NO: 347186 - RNA, 19 nt, Artificial Sequence
  Description of Artificial Sequence: Synthetic oligonucleotide
  Antisense Strand to SEQ ID NO: 347185
uuaugcacuccauuggucg

SEQ ID NO: 347187 - RNA, 19 nt, Artificial Sequence
  Description of Artificial Sequence: Synthetic oligonucleotide
  Sense Strand Starting at position 360 of SEQ ID NO: 318483
gaagguaaguugucaugug

SEQ ID NO: 347188 - RNA, 19 nt, Artificial Sequence
  Description of Artificial Sequence: Synthetic oligonucleotide
  Antisense Strand to SEQ ID NO: 347187
cacaugacaacuuaccuuc

SEQ ID NO: 347189 - RNA, 19 nt, Artificial Sequence
  Description of Artificial Sequence: Synthetic oligonucleotide
  Sense Strand Starting at position 360 of SEQ ID NO: 318499
guggcacucucaucacauu

SEQ ID NO: 347190 - RNA, 19 nt, Artificial Sequence
  Description of Artificial Sequence: Synthetic oligonucleotide
  Antisense Strand to SEQ ID NO: 347189
aaugugaugagagugccac

SEQ ID NO: 347191 - RNA, 19 nt, Artificial Sequence
  Description of Artificial Sequence: Synthetic oligonucleotide
  Sense Strand Starting at position 360 of SEQ ID NO: 318603
auaggaagguccuuacugu

SEQ ID NO: 347192 - RNA, 19 nt, Artificial Sequence
  Description of Artificial Sequence: Synthetic oligonucleotide
  Antisense Strand to SEQ ID NO: 347191
acaguaaggaccuuccuau

SEQ ID NO: 347193 - RNA, 19 nt, Artificial Sequence
  Description of Artificial Sequence: Synthetic oligonucleotide
  Sense Strand Starting at position 360 of SEQ ID NO: 318604
uaggaagguccuuacuguu

SEQ ID NO: 347194 - RNA, 19 nt, Artificial Sequence
  Description of Artificial Sequence: Synthetic oligonucleotide
  Antisense Strand to SEQ ID NO: 347193
aacaguaaggaccuuccua

SEQ ID NO: 347195 - RNA, 19 nt, Artificial Sequence
  Description of Artificial Sequence: Synthetic oligonucleotide
  Sense Strand Starting at position 360 of SEQ ID NO: 318698
gagccagggucuuuagacu

SEQ ID NO: 347196 - RNA, 19 nt, Artificial Sequence
  Description of Artificial Sequence: Synthetic oligonucleotide
  Antisense Strand to SEQ ID NO: 347195
agucuaaagacccuggcuc

SEQ ID NO: 347197 - RNA, 19 nt, Artificial Sequence
  Description of Artificial Sequence: Synthetic oligonucleotide
  Sense Strand Starting at position 360 of SEQ ID NO: 318815
uugcaaacugaaugugaau

SEQ ID NO: 347198 - RNA, 19 nt, Artificial Sequence
  Description of Artificial Sequence: Synthetic oligonucleotide
  Antisense Strand to SEQ ID NO: 347197
auucacauucaguuugcaa

SEQ ID NO: 347199 - RNA, 19 nt, Artificial Sequence
  Description of Artificial Sequence: Synthetic oligonucleotide
  Sense Strand Starting at position 360 of SEQ ID NO: 318925
gacagcuucugucuugaug

SEQ ID NO: 347200 - RNA, 19 nt, Artificial Sequence
  Description of Artificial Sequence: Synthetic oligonucleotide
  Antisense Strand to SEQ ID NO: 347199
caucaagacagaagcuguc

SEQ ID NO: 347201 - RNA, 19 nt, Artificial Sequence
  Description of Artificial Sequence: Synthetic oligonucleotide
  Sense Strand Starting at position 360 of SEQ ID NO: 318928
agcuucugucuugauguua

SEQ ID NO: 347202 - RNA, 19 nt, Artificial Sequence
  Description of Artificial Sequence: Synthetic oligonucleotide
  Antisense Strand to SEQ ID NO: 347201
uaacaucaagacagaagcu

SEQ ID NO: 347203 - RNA, 19 nt, Artificial Sequence
  Description of Artificial Sequence: Synthetic oligonucleotide
  Sense Strand Starting at position 360 of SEQ ID NO: 319049
ugacaugugugcuuauuua

SEQ ID NO: 347204 - RNA, 19 nt, Artificial Sequence
  Description of Artificial Sequence: Synthetic oligonucleotide
  Antisense Strand to SEQ ID NO: 347203
uaaauaagcacacauguca

SEQ ID NO: 347205 - RNA, 19 nt, Artificial Sequence
  Description of Artificial Sequence: Synthetic oligonucleotide
  Sense Strand Starting at position 361 of SEQ ID NO: 315242
ggaguuaaaugggucugga

SEQ ID NO: 347206 - RNA, 19 nt, Artificial Sequence
  Description of Artificial Sequence: Synthetic oligonucleotide
  Antisense Strand to SEQ ID NO: 347205
uccagacccauuuaacucc

SEQ ID NO: 347207 - RNA, 19 nt, Artificial Sequence
  Description of Artificial Sequence: Synthetic oligonucleotide
  Sense Strand Starting at position 361 of SEQ ID NO: 315667
gaauguuugucuuauuugu

SEQ ID NO: 347208 - RNA, 19 nt, Artificial Sequence
  Description of Artificial Sequence: Synthetic oligonucleotide
  Antisense Strand to SEQ ID NO: 347207
acaaauaagacaaacauuc

SEQ ID NO: 347209 - RNA, 19 nt, Artificial Sequence
  Description of Artificial Sequence: Synthetic oligonucleotide
  Sense Strand Starting at position 361 of SEQ ID NO: 315671
guuugucuuauuugugaug

SEQ ID NO: 347210 - RNA, 19 nt, Artificial Sequence
  Description of Artificial Sequence: Synthetic oligonucleotide
  Antisense Strand to SEQ ID NO: 347209
caucacaaauaagacaaac

SEQ ID NO: 347211 - RNA, 19 nt, Artificial Sequence
  Description of Artificial Sequence: Synthetic oligonucleotide
  Sense Strand Starting at position 361 of SEQ ID NO: 315815
gccaguuauuaucuauuau

SEQ ID NO: 347212 - RNA, 19 nt, Artificial Sequence
  Description of Artificial Sequence: Synthetic oligonucleotide
  Antisense Strand to SEQ ID NO: 347211
auaauagauaauaacuggc

SEQ ID NO: 347213 - RNA, 19 nt, Artificial Sequence
  Description of Artificial Sequence: Synthetic oligonucleotide
  Sense Strand Starting at position 361 of SEQ ID NO: 315860
aguucuguucuagaauauu

SEQ ID NO: 347214 - RNA, 19 nt, Artificial Sequence
  Description of Artificial Sequence: Synthetic oligonucleotide
  Antisense Strand to SEQ ID NO: 347213
aauauucuagaacagaacu

SEQ ID NO: 347215 - RNA, 19 nt, Artificial Sequence
  Description of Artificial Sequence: Synthetic oligonucleotide
  Sense Strand Starting at position 361 of SEQ ID NO: 315910
agcauaaacguccaucauu

SEQ ID NO: 347216 - RNA, 19 nt, Artificial Sequence
  Description of Artificial Sequence: Synthetic oligonucleotide
  Antisense Strand to SEQ ID NO: 347215
aaugauggacguuuaugcu

SEQ ID NO: 347217 - RNA, 19 nt, Artificial Sequence
  Description of Artificial Sequence: Synthetic oligonucleotide
  Sense Strand Starting at position 361 of SEQ ID NO: 316286
aguugaauucuaugugagc

SEQ ID NO: 347218 - RNA, 19 nt, Artificial Sequence
  Description of Artificial Sequence: Synthetic oligonucleotide
  Antisense Strand to SEQ ID NO: 347217
gcucacauagaauucaacu

SEQ ID NO: 347219 - RNA, 19 nt, Artificial Sequence
  Description of Artificial Sequence: Synthetic oligonucleotide
  Sense Strand Starting at position 361 of SEQ ID NO: 316287
guugaauucuaugugagcu

SEQ ID NO: 347220 - RNA, 19 nt, Artificial Sequence
  Description of Artificial Sequence: Synthetic oligonucleotide
  Antisense Strand to SEQ ID NO: 347219
agcucacauagaauucaac

SEQ ID NO: 347221 - RNA, 19 nt, Artificial Sequence
  Description of Artificial Sequence: Synthetic oligonucleotide
  Sense Strand Starting at position 361 of SEQ ID NO: 316316
ugauguagcuuuguguaca

SEQ ID NO: 347222 - RNA, 19 nt, Artificial Sequence
  Description of Artificial Sequence: Synthetic oligonucleotide
  Antisense Strand to SEQ ID NO: 347221
uguacacaaagcuacauca

SEQ ID NO: 347223 - RNA, 19 nt, Artificial Sequence
  Description of Artificial Sequence: Synthetic oligonucleotide
  Sense Strand Starting at position 361 of SEQ ID NO: 316319
uguagcuuuguguacagau

SEQ ID NO: 347224 - RNA, 19 nt, Artificial Sequence
  Description of Artificial Sequence: Synthetic oligonucleotide
  Antisense Strand to SEQ ID NO: 347223
aucuguacacaaagcuaca

SEQ ID NO: 347225 - RNA, 19 nt, Artificial Sequence
  Description of Artificial Sequence: Synthetic oligonucleotide
  Sense Strand Starting at position 361 of SEQ ID NO: 316321
uagcuuuguguacagauau

SEQ ID NO: 347226 - RNA, 19 nt, Artificial Sequence
  Description of Artificial Sequence: Synthetic oligonucleotide
  Antisense Strand to SEQ ID NO: 347225
auaucuguacacaaagcua

SEQ ID NO: 347227 - RNA, 19 nt, Artificial Sequence
  Description of Artificial Sequence: Synthetic oligonucleotide
  Sense Strand Starting at position 361 of SEQ ID NO: 316354
acacaauguugagugaaau

SEQ ID NO: 347228 - RNA, 19 nt, Artificial Sequence
  Description of Artificial Sequence: Synthetic oligonucleotide
  Antisense Strand to SEQ ID NO: 347227
auuucacucaacauugugu

SEQ ID NO: 347229 - RNA, 19 nt, Artificial Sequence
  Description of Artificial Sequence: Synthetic oligonucleotide
  Sense Strand Starting at position 361 of SEQ ID NO: 316355
cacaauguugagugaaauc

SEQ ID NO: 347230 - RNA, 19 nt, Artificial Sequence
  Description of Artificial Sequence: Synthetic oligonucleotide
  Antisense Strand to SEQ ID NO: 347229
gauuucacucaacauugug

SEQ ID NO: 347231 - RNA, 19 nt, Artificial Sequence
  Description of Artificial Sequence: Synthetic oligonucleotide
  Sense Strand Starting at position 361 of SEQ ID NO: 316414
cacagauaugcuuguauug

SEQ ID NO: 347232 - RNA, 19 nt, Artificial Sequence
  Description of Artificial Sequence: Synthetic oligonucleotide
  Antisense Strand to SEQ ID NO: 347231
caauacaagcauaucugug

SEQ ID NO: 347233 - RNA, 19 nt, Artificial Sequence
  Description of Artificial Sequence: Synthetic oligonucleotide
  Sense Strand Starting at position 361 of SEQ ID NO: 316434
cguggagccuuucugaaau

SEQ ID NO: 347234 - RNA, 19 nt, Artificial Sequence
  Description of Artificial Sequence: Synthetic oligonucleotide
  Antisense Strand to SEQ ID NO: 347233
auuucagaaaggcuccacg

SEQ ID NO: 347235 - RNA, 19 nt, Artificial Sequence
  Description of Artificial Sequence: Synthetic oligonucleotide
  Sense Strand Starting at position 361 of SEQ ID NO: 316519
gaagacagccuuuguaugu

SEQ ID NO: 347236 - RNA, 19 nt, Artificial Sequence
  Description of Artificial Sequence: Synthetic oligonucleotide
  Antisense Strand to SEQ ID NO: 347235
acauacaaaggcugucuuc

SEQ ID NO: 347237 - RNA, 19 nt, Artificial Sequence
  Description of Artificial Sequence: Synthetic oligonucleotide
  Sense Strand Starting at position 361 of SEQ ID NO: 316520
aagacagccuuuguaugua

SEQ ID NO: 347238 - RNA, 19 nt, Artificial Sequence
  Description of Artificial Sequence: Synthetic oligonucleotide
  Antisense Strand to SEQ ID NO: 347237
uacauacaaaggcugucuu

SEQ ID NO: 347239 - RNA, 19 nt, Artificial Sequence
  Description of Artificial Sequence: Synthetic oligonucleotide
  Sense Strand Starting at position 361 of SEQ ID NO: 316579
ucuuuacuugaccauguau

SEQ ID NO: 347240 - RNA, 19 nt, Artificial Sequence
  Description of Artificial Sequence: Synthetic oligonucleotide
  Antisense Strand to SEQ ID NO: 347239
auacauggucaaguaaaga

SEQ ID NO: 347241 - RNA, 19 nt, Artificial Sequence
  Description of Artificial Sequence: Synthetic oligonucleotide
  Sense Strand Starting at position 361 of SEQ ID NO: 316581
uuuacuugaccauguauua

SEQ ID NO: 347242 - RNA, 19 nt, Artificial Sequence
  Description of Artificial Sequence: Synthetic oligonucleotide
  Antisense Strand to SEQ ID NO: 347241
uaauacauggucaaguaaa

SEQ ID NO: 347243 - RNA, 19 nt, Artificial Sequence
  Description of Artificial Sequence: Synthetic oligonucleotide
  Sense Strand Starting at position 361 of SEQ ID NO: 316601
aaacacauuugguagggau

SEQ ID NO: 347244 - RNA, 19 nt, Artificial Sequence
  Description of Artificial Sequence: Synthetic oligonucleotide
  Antisense Strand to SEQ ID NO: 347243
aucccuaccaaauguguuu

SEQ ID NO: 347245 - RNA, 19 nt, Artificial Sequence
  Description of Artificial Sequence: Synthetic oligonucleotide
  Sense Strand Starting at position 361 of SEQ ID NO: 317463
gagggauccuucugagaag

SEQ ID NO: 347246 - RNA, 19 nt, Artificial Sequence
  Description of Artificial Sequence: Synthetic oligonucleotide
  Antisense Strand to SEQ ID NO: 347245
cuucucagaaggaucccuc

SEQ ID NO: 347247 - RNA, 19 nt, Artificial Sequence
  Description of Artificial Sequence: Synthetic oligonucleotide
  Sense Strand Starting at position 361 of SEQ ID NO: 317464
agggauccuucugagaagu

SEQ ID NO: 347248 - RNA, 19 nt, Artificial Sequence
  Description of Artificial Sequence: Synthetic oligonucleotide
  Antisense Strand to SEQ ID NO: 347247
acuucucagaaggaucccu

SEQ ID NO: 347249 - RNA, 19 nt, Artificial Sequence
  Description of Artificial Sequence: Synthetic oligonucleotide
  Sense Strand Starting at position 361 of SEQ ID NO: 317466
ggauccuucugagaaguga

SEQ ID NO: 347250 - RNA, 19 nt, Artificial Sequence
  Description of Artificial Sequence: Synthetic oligonucleotide
  Antisense Strand to SEQ ID NO: 347249
ucacuucucagaaggaucc

SEQ ID NO: 347251 - RNA, 19 nt, Artificial Sequence
  Description of Artificial Sequence: Synthetic oligonucleotide
  Sense Strand Starting at position 361 of SEQ ID NO: 317491
uuggacuuucugggugagu

SEQ ID NO: 347252 - RNA, 19 nt, Artificial Sequence
  Description of Artificial Sequence: Synthetic oligonucleotide
  Antisense Strand to SEQ ID NO: 347251
acucacccagaaaguccaa

SEQ ID NO: 347253 - RNA, 19 nt, Artificial Sequence
  Description of Artificial Sequence: Synthetic oligonucleotide
  Sense Strand Starting at position 361 of SEQ ID NO: 317586
aucagugcucuguaacaug

SEQ ID NO: 347254 - RNA, 19 nt, Artificial Sequence
  Description of Artificial Sequence: Synthetic oligonucleotide
  Antisense Strand to SEQ ID NO: 347253
cauguuacagagcacugau

SEQ ID NO: 347255 - RNA, 19 nt, Artificial Sequence
  Description of Artificial Sequence: Synthetic oligonucleotide
  Sense Strand Starting at position 361 of SEQ ID NO: 317878
ugcccuuucgcauugcaga

SEQ ID NO: 347256 - RNA, 19 nt, Artificial Sequence
  Description of Artificial Sequence: Synthetic oligonucleotide
  Antisense Strand to SEQ ID NO: 347255
ucugcaaugcgaaagggca

SEQ ID NO: 347257 - RNA, 19 nt, Artificial Sequence
  Description of Artificial Sequence: Synthetic oligonucleotide
  Sense Strand Starting at position 361 of SEQ ID NO: 318070
ucagcaagaucuuaccaag

SEQ ID NO: 347258 - RNA, 19 nt, Artificial Sequence
  Description of Artificial Sequence: Synthetic oligonucleotide
  Antisense Strand to SEQ ID NO: 347257
cuugguaagaucuugcuga

SEQ ID NO: 347259 - RNA, 19 nt, Artificial Sequence
  Description of Artificial Sequence: Synthetic oligonucleotide
  Sense Strand Starting at position 361 of SEQ ID NO: 318109
gcuacagugcccgcuaaua

SEQ ID NO: 347260 - RNA, 19 nt, Artificial Sequence
  Description of Artificial Sequence: Synthetic oligonucleotide
  Antisense Strand to SEQ ID NO: 347259
uauuagcgggcacuguagc

SEQ ID NO: 347261 - RNA, 19 nt, Artificial Sequence
  Description of Artificial Sequence: Synthetic oligonucleotide
  Sense Strand Starting at position 361 of SEQ ID NO: 318111
uacagugcccgcuaauauu

SEQ ID NO: 347262 - RNA, 19 nt, Artificial Sequence
  Description of Artificial Sequence: Synthetic oligonucleotide
  Antisense Strand to SEQ ID NO: 347261
aauauuagcgggcacugua

SEQ ID NO: 347263 - RNA, 19 nt, Artificial Sequence
  Description of Artificial Sequence: Synthetic oligonucleotide
  Sense Strand Starting at position 361 of SEQ ID NO: 318190
cgagaagucuccuagggaa

SEQ ID NO: 347264 - RNA, 19 nt, Artificial Sequence
  Description of Artificial Sequence: Synthetic oligonucleotide
  Antisense Strand to SEQ ID NO: 347263
uucccuaggagacuucucg

SEQ ID NO: 347265 - RNA, 19 nt, Artificial Sequence
  Description of Artificial Sequence: Synthetic oligonucleotide
  Sense Strand Starting at position 361 of SEQ ID NO: 318284
aggaguugcuguuugaguu

SEQ ID NO: 347266 - RNA, 19 nt, Artificial Sequence
  Description of Artificial Sequence: Synthetic oligonucleotide
  Antisense Strand to SEQ ID NO: 347265
aacucaaacagcaacuccu

SEQ ID NO: 347267 - RNA, 19 nt, Artificial Sequence
  Description of Artificial Sequence: Synthetic oligonucleotide
  Sense Strand Starting at position 361 of SEQ ID NO: 318288
guugcuguuugaguugaaa

SEQ ID NO: 347268 - RNA, 19 nt, Artificial Sequence
  Description of Artificial Sequence: Synthetic oligonucleotide
  Antisense Strand to SEQ ID NO: 347267
uuucaacucaaacagcaac

SEQ ID NO: 347269 - RNA, 19 nt, Artificial Sequence
  Description of Artificial Sequence: Synthetic oligonucleotide
  Sense Strand Starting at position 361 of SEQ ID NO: 318290
ugcuguuugaguugaaacu

SEQ ID NO: 347270 - RNA, 19 nt, Artificial Sequence
  Description of Artificial Sequence: Synthetic oligonucleotide
  Antisense Strand to SEQ ID NO: 347269
aguuucaacucaaacagca

SEQ ID NO: 347271 - RNA, 19 nt, Artificial Sequence
  Description of Artificial Sequence: Synthetic oligonucleotide
  Sense Strand Starting at position 361 of SEQ ID NO: 318301
uugaaacuccaguguugag

SEQ ID NO: 347272 - RNA, 19 nt, Artificial Sequence
  Description of Artificial Sequence: Synthetic oligonucleotide
  Antisense Strand to SEQ ID NO: 347271
cucaacacuggaguuucaa

SEQ ID NO: 347273 - RNA, 19 nt, Artificial Sequence
  Description of Artificial Sequence: Synthetic oligonucleotide
  Sense Strand Starting at position 361 of SEQ ID NO: 318457
uugugaugugcucuugcua

SEQ ID NO: 347274 - RNA, 19 nt, Artificial Sequence
  Description of Artificial Sequence: Synthetic oligonucleotide
  Antisense Strand to SEQ ID NO: 347273
uagcaagagcacaucacaa

SEQ ID NO: 347275 - RNA, 19 nt, Artificial Sequence
  Description of Artificial Sequence: Synthetic oligonucleotide
  Sense Strand Starting at position 361 of SEQ ID NO: 318486
cgacaacucucacuagauu

SEQ ID NO: 347276 - RNA, 19 nt, Artificial Sequence
  Description of Artificial Sequence: Synthetic oligonucleotide
  Antisense Strand to SEQ ID NO: 347275
aaucuagugagaguugucg

SEQ ID NO: 347277 - RNA, 19 nt, Artificial Sequence
  Description of Artificial Sequence: Synthetic oligonucleotide
  Sense Strand Starting at position 361 of SEQ ID NO: 318846
agaccaugugcggauguau

SEQ ID NO: 347278 - RNA, 19 nt, Artificial Sequence
  Description of Artificial Sequence: Synthetic oligonucleotide
  Antisense Strand to SEQ ID NO: 347277
auacauccgcacauggucu

SEQ ID NO: 347279 - RNA, 19 nt, Artificial Sequence
  Description of Artificial Sequence: Synthetic oligonucleotide
  Sense Strand Starting at position 361 of SEQ ID NO: 319000
ggacguuugggagguuaga

SEQ ID NO: 347280 - RNA, 19 nt, Artificial Sequence
  Description of Artificial Sequence: Synthetic oligonucleotide
  Antisense Strand to SEQ ID NO: 347279
ucuaaccucccaaacgucc

SEQ ID NO: 347281 - RNA, 19 nt, Artificial Sequence
  Description of Artificial Sequence: Synthetic oligonucleotide
  Sense Strand Starting at position 361 of SEQ ID NO: 319073
acagaaucuuuguuuccgu

SEQ ID NO: 347282 - RNA, 19 nt, Artificial Sequence
  Description of Artificial Sequence: Synthetic oligonucleotide
  Antisense Strand to SEQ ID NO: 347281
acggaaacaaagauucugu

SEQ ID NO: 347283 - RNA, 19 nt, Artificial Sequence
  Description of Artificial Sequence: Synthetic oligonucleotide
  Sense Strand Starting at position 361 of SEQ ID NO: 319218
auguaccucugagaaauau

SEQ ID NO: 347284 - RNA, 19 nt, Artificial Sequence
  Description of Artificial Sequence: Synthetic oligonucleotide
  Antisense Strand to SEQ ID NO: 347283
auauuucucagagguacau

SEQ ID NO: 347285 - RNA, 19 nt, Artificial Sequence
  Description of Artificial Sequence: Synthetic oligonucleotide
  Sense Strand Starting at position 362 of SEQ ID NO: 315409
ugccauuaagccuagcuaa

SEQ ID NO: 347286 - RNA, 19 nt, Artificial Sequence
  Description of Artificial Sequence: Synthetic oligonucleotide
  Antisense Strand to SEQ ID NO: 347285
uuagcuaggcuuaauggca

SEQ ID NO: 347287 - RNA, 19 nt, Artificial Sequence
  Description of Artificial Sequence: Synthetic oligonucleotide
  Sense Strand Starting at position 362 of SEQ ID NO: 315726
aggccuggcuaacuuuaaa

SEQ ID NO: 347288 - RNA, 19 nt, Artificial Sequence
  Description of Artificial Sequence: Synthetic oligonucleotide
  Antisense Strand to SEQ ID NO: 347287
uuuaaaguuagccaggccu

SEQ ID NO: 347289 - RNA, 19 nt, Artificial Sequence
  Description of Artificial Sequence: Synthetic oligonucleotide
  Sense Strand Starting at position 362 of SEQ ID NO: 315958
uucucuuaucucuguggaa

SEQ ID NO: 347290 - RNA, 19 nt, Artificial Sequence
  Description of Artificial Sequence: Synthetic oligonucleotide
  Antisense Strand to SEQ ID NO: 347289
uuccacagagauaagagaa

SEQ ID NO: 347291 - RNA, 19 nt, Artificial Sequence
  Description of Artificial Sequence: Synthetic oligonucleotide
  Sense Strand Starting at position 362 of SEQ ID NO: 315959
ucucuuaucucuguggaag

SEQ ID NO: 347292 - RNA, 19 nt, Artificial Sequence
  Description of Artificial Sequence: Synthetic oligonucleotide
  Antisense Strand to SEQ ID NO: 347291
cuuccacagagauaagaga

SEQ ID NO: 347293 - RNA, 19 nt, Artificial Sequence
  Description of Artificial Sequence: Synthetic oligonucleotide
  Sense Strand Starting at position 362 of SEQ ID NO: 315960
cucuuaucucuguggaaga

SEQ ID NO: 347294 - RNA, 19 nt, Artificial Sequence
  Description of Artificial Sequence: Synthetic oligonucleotide
  Antisense Strand to SEQ ID NO: 347293
ucuuccacagagauaagag

SEQ ID NO: 347295 - RNA, 19 nt, Artificial Sequence
  Description of Artificial Sequence: Synthetic oligonucleotide
  Sense Strand Starting at position 362 of SEQ ID NO: 316039
uguguuuccugaccaacca

SEQ ID NO: 347296 - RNA, 19 nt, Artificial Sequence
  Description of Artificial Sequence: Synthetic oligonucleotide
  Antisense Strand to SEQ ID NO: 347295
ugguuggucaggaaacaca

SEQ ID NO: 347297 - RNA, 19 nt, Artificial Sequence
  Description of Artificial Sequence: Synthetic oligonucleotide
  Sense Strand Starting at position 362 of SEQ ID NO: 316439
accagaccucuugggucau

SEQ ID NO: 347298 - RNA, 19 nt, Artificial Sequence
  Description of Artificial Sequence: Synthetic oligonucleotide
  Antisense Strand to SEQ ID NO: 347297
augacccaagaggucuggu

SEQ ID NO: 347299 - RNA, 19 nt, Artificial Sequence
  Description of Artificial Sequence: Synthetic oligonucleotide
  Sense Strand Starting at position 362 of SEQ ID NO: 316457
ugcuguuuccuugcccgaa

SEQ ID NO: 347300 - RNA, 19 nt, Artificial Sequence
  Description of Artificial Sequence: Synthetic oligonucleotide
  Antisense Strand to SEQ ID NO: 347299
uucgggcaaggaaacagca

SEQ ID NO: 347301 - RNA, 19 nt, Artificial Sequence
  Description of Artificial Sequence: Synthetic oligonucleotide
  Sense Strand Starting at position 362 of SEQ ID NO: 316517
uccuuuaagcuccagugua

SEQ ID NO: 347302 - RNA, 19 nt, Artificial Sequence
  Description of Artificial Sequence: Synthetic oligonucleotide
  Antisense Strand to SEQ ID NO: 347301
uacacuggagcuuaaagga

SEQ ID NO: 347303 - RNA, 19 nt, Artificial Sequence
  Description of Artificial Sequence: Synthetic oligonucleotide
  Sense Strand Starting at position 362 of SEQ ID NO: 316522
uaagcuccaguguaaagau

SEQ ID NO: 347304 - RNA, 19 nt, Artificial Sequence
  Description of Artificial Sequence: Synthetic oligonucleotide
  Antisense Strand to SEQ ID NO: 347303
aucuuuacacuggagcuua

SEQ ID NO: 347305 - RNA, 19 nt, Artificial Sequence
  Description of Artificial Sequence: Synthetic oligonucleotide
  Sense Strand Starting at position 362 of SEQ ID NO: 316777
auuaauguccugcagagaa

SEQ ID NO: 347306 - RNA, 19 nt, Artificial Sequence
  Description of Artificial Sequence: Synthetic oligonucleotide
  Antisense Strand to SEQ ID NO: 347305
uucucugcaggacauuaau

SEQ ID NO: 347307 - RNA, 19 nt, Artificial Sequence
  Description of Artificial Sequence: Synthetic oligonucleotide
  Sense Strand Starting at position 362 of SEQ ID NO: 316779
uaauguccugcagagaaac

SEQ ID NO: 347308 - RNA, 19 nt, Artificial Sequence
  Description of Artificial Sequence: Synthetic oligonucleotide
  Antisense Strand to SEQ ID NO: 347307
guuucucugcaggacauua

SEQ ID NO: 347309 - RNA, 19 nt, Artificial Sequence
  Description of Artificial Sequence: Synthetic oligonucleotide
  Sense Strand Starting at position 362 of SEQ ID NO: 316931
caauaucuguggcugaguu

SEQ ID NO: 347310 - RNA, 19 nt, Artificial Sequence
  Description of Artificial Sequence: Synthetic oligonucleotide
  Antisense Strand to SEQ ID NO: 347309
aacucagccacagauauug

SEQ ID NO: 347311 - RNA, 19 nt, Artificial Sequence
  Description of Artificial Sequence: Synthetic oligonucleotide
  Sense Strand Starting at position 362 of SEQ ID NO: 317108
ugugaaugugugucgaugu

SEQ ID NO: 347312 - RNA, 19 nt, Artificial Sequence
  Description of Artificial Sequence: Synthetic oligonucleotide
  Antisense Strand to SEQ ID NO: 347311
acaucgacacacauucaca

SEQ ID NO: 347313 - RNA, 19 nt, Artificial Sequence
  Description of Artificial Sequence: Synthetic oligonucleotide
  Sense Strand Starting at position 362 of SEQ ID NO: 317254
gagcgcugucacguguuaa

SEQ ID NO: 347314 - RNA, 19 nt, Artificial Sequence
  Description of Artificial Sequence: Synthetic oligonucleotide
  Antisense Strand to SEQ ID NO: 347313
uuaacacgugacagcgcuc

SEQ ID NO: 347315 - RNA, 19 nt, Artificial Sequence
  Description of Artificial Sequence: Synthetic oligonucleotide
  Sense Strand Starting at position 362 of SEQ ID NO: 317257
cgcugucacguguuaagag

SEQ ID NO: 347316 - RNA, 19 nt, Artificial Sequence
  Description of Artificial Sequence: Synthetic oligonucleotide
  Antisense Strand to SEQ ID NO: 347315
cucuuaacacgugacagcg

SEQ ID NO: 347317 - RNA, 19 nt, Artificial Sequence
  Description of Artificial Sequence: Synthetic oligonucleotide
  Sense Strand Starting at position 362 of SEQ ID NO: 317361
caguucugggcuuggugaa

SEQ ID NO: 347318 - RNA, 19 nt, Artificial Sequence
  Description of Artificial Sequence: Synthetic oligonucleotide
  Antisense Strand to SEQ ID NO: 347317
uucaccaagcccagaacug

SEQ ID NO: 347319 - RNA, 19 nt, Artificial Sequence
  Description of Artificial Sequence: Synthetic oligonucleotide
  Sense Strand Starting at position 362 of SEQ ID NO: 317362
aguucugggcuuggugaaa

SEQ ID NO: 347320 - RNA, 19 nt, Artificial Sequence
  Description of Artificial Sequence: Synthetic oligonucleotide
  Antisense Strand to SEQ ID NO: 347319
uuucaccaagcccagaacu

SEQ ID NO: 347321 - RNA, 19 nt, Artificial Sequence
  Description of Artificial Sequence: Synthetic oligonucleotide
  Sense Strand Starting at position 362 of SEQ ID NO: 317389
uucuuuguucggcccagua

SEQ ID NO: 347322 - RNA, 19 nt, Artificial Sequence
  Description of Artificial Sequence: Synthetic oligonucleotide
  Antisense Strand to SEQ ID NO: 347321
uacugggccgaacaaagaa

SEQ ID NO: 347323 - RNA, 19 nt, Artificial Sequence
  Description of Artificial Sequence: Synthetic oligonucleotide
  Sense Strand Starting at position 362 of SEQ ID NO: 317402
ccaguagucccugaaucca

SEQ ID NO: 347324 - RNA, 19 nt, Artificial Sequence
  Description of Artificial Sequence: Synthetic oligonucleotide
  Antisense Strand to SEQ ID NO: 347323
uggauucagggacuacugg

SEQ ID NO: 347325 - RNA, 19 nt, Artificial Sequence
  Description of Artificial Sequence: Synthetic oligonucleotide
  Sense Strand Starting at position 362 of SEQ ID NO: 317410
cccugaauccaguguagaa

SEQ ID NO: 347326 - RNA, 19 nt, Artificial Sequence
  Description of Artificial Sequence: Synthetic oligonucleotide
  Antisense Strand to SEQ ID NO: 347325
uucuacacuggauucaggg

SEQ ID NO: 347327 - RNA, 19 nt, Artificial Sequence
  Description of Artificial Sequence: Synthetic oligonucleotide
  Sense Strand Starting at position 362 of SEQ ID NO: 317443
ccgugaaaugugggaucuu

SEQ ID NO: 347328 - RNA, 19 nt, Artificial Sequence
  Description of Artificial Sequence: Synthetic oligonucleotide
  Antisense Strand to SEQ ID NO: 347327
aagaucccacauuucacgg

SEQ ID NO: 347329 - RNA, 19 nt, Artificial Sequence
  Description of Artificial Sequence: Synthetic oligonucleotide
  Sense Strand Starting at position 362 of SEQ ID NO: 317651
ccuugaaaugugcaucaac

SEQ ID NO: 347330 - RNA, 19 nt, Artificial Sequence
  Description of Artificial Sequence: Synthetic oligonucleotide
  Antisense Strand to SEQ ID NO: 347329
guugaugcacauuucaagg

SEQ ID NO: 347331 - RNA, 19 nt, Artificial Sequence
  Description of Artificial Sequence: Synthetic oligonucleotide
  Sense Strand Starting at position 362 of SEQ ID NO: 317654
ugaaaugugcaucaacuga

SEQ ID NO: 347332 - RNA, 19 nt, Artificial Sequence
  Description of Artificial Sequence: Synthetic oligonucleotide
  Antisense Strand to SEQ ID NO: 347331
ucaguugaugcacauuuca

SEQ ID NO: 347333 - RNA, 19 nt, Artificial Sequence
  Description of Artificial Sequence: Synthetic oligonucleotide
  Sense Strand Starting at position 362 of SEQ ID NO: 317751
acaguaugcuaagcaagaa

SEQ ID NO: 347334 - RNA, 19 nt, Artificial Sequence
  Description of Artificial Sequence: Synthetic oligonucleotide
  Antisense Strand to SEQ ID NO: 347333
uucuugcuuagcauacugu

SEQ ID NO: 347335 - RNA, 19 nt, Artificial Sequence
  Description of Artificial Sequence: Synthetic oligonucleotide
  Sense Strand Starting at position 362 of SEQ ID NO: 317948
ggaauuagugaugauggcu

SEQ ID NO: 347336 - RNA, 19 nt, Artificial Sequence
  Description of Artificial Sequence: Synthetic oligonucleotide
  Antisense Strand to SEQ ID NO: 347335
agccaucaucacuaauucc

SEQ ID NO: 347337 - RNA, 19 nt, Artificial Sequence
  Description of Artificial Sequence: Synthetic oligonucleotide
  Sense Strand Starting at position 362 of SEQ ID NO: 317961
auggcugcacacuguaaau

SEQ ID NO: 347338 - RNA, 19 nt, Artificial Sequence
  Description of Artificial Sequence: Synthetic oligonucleotide
  Antisense Strand to SEQ ID NO: 347337
auuuacagugugcagccau

SEQ ID NO: 347339 - RNA, 19 nt, Artificial Sequence
  Description of Artificial Sequence: Synthetic oligonucleotide
  Sense Strand Starting at position 362 of SEQ ID NO: 318068
ccuuauuccuuugcugaga

SEQ ID NO: 347340 - RNA, 19 nt, Artificial Sequence
  Description of Artificial Sequence: Synthetic oligonucleotide
  Antisense Strand to SEQ ID NO: 347339
ucucagcaaaggaauaagg

SEQ ID NO: 347341 - RNA, 19 nt, Artificial Sequence
  Description of Artificial Sequence: Synthetic oligonucleotide
  Sense Strand Starting at position 362 of SEQ ID NO: 318171
gcacuacaugucugaacuu

SEQ ID NO: 347342 - RNA, 19 nt, Artificial Sequence
  Description of Artificial Sequence: Synthetic oligonucleotide
  Antisense Strand to SEQ ID NO: 347341
aaguucagacauguagugc

SEQ ID NO: 347343 - RNA, 19 nt, Artificial Sequence
  Description of Artificial Sequence: Synthetic oligonucleotide
  Sense Strand Starting at position 362 of SEQ ID NO: 318197
accaucauugugugaggua

SEQ ID NO: 347344 - RNA, 19 nt, Artificial Sequence
  Description of Artificial Sequence: Synthetic oligonucleotide
  Antisense Strand to SEQ ID NO: 347343
uaccucacacaaugauggu

SEQ ID NO: 347345 - RNA, 19 nt, Artificial Sequence
  Description of Artificial Sequence: Synthetic oligonucleotide
  Sense Strand Starting at position 362 of SEQ ID NO: 318638
ggcuuuacacuuugugaau

SEQ ID NO: 347346 - RNA, 19 nt, Artificial Sequence
  Description of Artificial Sequence: Synthetic oligonucleotide
  Antisense Strand to SEQ ID NO: 347345
auucacaaaguguaaagcc

SEQ ID NO: 347347 - RNA, 19 nt, Artificial Sequence
  Description of Artificial Sequence: Synthetic oligonucleotide
  Sense Strand Starting at position 362 of SEQ ID NO: 318639
gcuuuacacuuugugaaug

SEQ ID NO: 347348 - RNA, 19 nt, Artificial Sequence
  Description of Artificial Sequence: Synthetic oligonucleotide
  Antisense Strand to SEQ ID NO: 347347
cauucacaaaguguaaagc

SEQ ID NO: 347349 - RNA, 19 nt, Artificial Sequence
  Description of Artificial Sequence: Synthetic oligonucleotide
  Sense Strand Starting at position 362 of SEQ ID NO: 318644
acacuuugugaaugcuacu

SEQ ID NO: 347350 - RNA, 19 nt, Artificial Sequence
  Description of Artificial Sequence: Synthetic oligonucleotide
  Antisense Strand to SEQ ID NO: 347349
aguagcauucacaaagugu

SEQ ID NO: 347351 - RNA, 19 nt, Artificial Sequence
  Description of Artificial Sequence: Synthetic oligonucleotide
  Sense Strand Starting at position 362 of SEQ ID NO: 318651
gugaaugcuacuuggaugu

SEQ ID NO: 347352 - RNA, 19 nt, Artificial Sequence
  Description of Artificial Sequence: Synthetic oligonucleotide
  Antisense Strand to SEQ ID NO: 347351
acauccaaguagcauucac

SEQ ID NO: 347353 - RNA, 19 nt, Artificial Sequence
  Description of Artificial Sequence: Synthetic oligonucleotide
  Sense Strand Starting at position 362 of SEQ ID NO: 318658
cuacuuggauguuuguuaa

SEQ ID NO: 347354 - RNA, 19 nt, Artificial Sequence
  Description of Artificial Sequence: Synthetic oligonucleotide
  Antisense Strand to SEQ ID NO: 347353
uuaacaaacauccaaguag

SEQ ID NO: 347355 - RNA, 19 nt, Artificial Sequence
  Description of Artificial Sequence: Synthetic oligonucleotide
  Sense Strand Starting at position 362 of SEQ ID NO: 318930
gguaguugguaauuaagac

SEQ ID NO: 347356 - RNA, 19 nt, Artificial Sequence
  Description of Artificial Sequence: Synthetic oligonucleotide
  Antisense Strand to SEQ ID NO: 347355
gucuuaauuaccaacuacc

SEQ ID NO: 347357 - RNA, 19 nt, Artificial Sequence
  Description of Artificial Sequence: Synthetic oligonucleotide
  Sense Strand Starting at position 362 of SEQ ID NO: 318931
guaguugguaauuaagaca

SEQ ID NO: 347358 - RNA, 19 nt, Artificial Sequence
  Description of Artificial Sequence: Synthetic oligonucleotide
  Antisense Strand to SEQ ID NO: 347357
ugucuuaauuaccaacuac

SEQ ID NO: 347359 - RNA, 19 nt, Artificial Sequence
  Description of Artificial Sequence: Synthetic oligonucleotide
  Sense Strand Starting at position 362 of SEQ ID NO: 318968
cuugguuucuuucuaauag

SEQ ID NO: 347360 - RNA, 19 nt, Artificial Sequence
  Description of Artificial Sequence: Synthetic oligonucleotide
  Antisense Strand to SEQ ID NO: 347359
cuauuagaaagaaaccaag

SEQ ID NO: 347361 - RNA, 19 nt, Artificial Sequence
  Description of Artificial Sequence: Synthetic oligonucleotide
  Sense Strand Starting at position 362 of SEQ ID NO: 318982
aauaguaaaugcuuuggua

SEQ ID NO: 347362 - RNA, 19 nt, Artificial Sequence
  Description of Artificial Sequence: Synthetic oligonucleotide
  Antisense Strand to SEQ ID NO: 347361
uaccaaagcauuuacuauu

SEQ ID NO: 347363 - RNA, 19 nt, Artificial Sequence
  Description of Artificial Sequence: Synthetic oligonucleotide
  Sense Strand Starting at position 362 of SEQ ID NO: 318984
uaguaaaugcuuugguauu

SEQ ID NO: 347364 - RNA, 19 nt, Artificial Sequence
  Description of Artificial Sequence: Synthetic oligonucleotide
  Antisense Strand to SEQ ID NO: 347363
aauaccaaagcauuuacua

SEQ ID NO: 347365 - RNA, 19 nt, Artificial Sequence
  Description of Artificial Sequence: Synthetic oligonucleotide
  Sense Strand Starting at position 363 of SEQ ID NO: 315344
guauucuguucccucuaua

SEQ ID NO: 347366 - RNA, 19 nt, Artificial Sequence
  Description of Artificial Sequence: Synthetic oligonucleotide
  Antisense Strand to SEQ ID NO: 347365
uauagagggaacagaauac

SEQ ID NO: 347367 - RNA, 19 nt, Artificial Sequence
  Description of Artificial Sequence: Synthetic oligonucleotide
  Sense Strand Starting at position 363 of SEQ ID NO: 315347
uucuguucccucuauagua

SEQ ID NO: 347368 - RNA, 19 nt, Artificial Sequence
  Description of Artificial Sequence: Synthetic oligonucleotide
  Antisense Strand to SEQ ID NO: 347367
uacuauagagggaacagaa

SEQ ID NO: 347369 - RNA, 19 nt, Artificial Sequence
  Description of Artificial Sequence: Synthetic oligonucleotide
  Sense Strand Starting at position 363 of SEQ ID NO: 315625
caguacguuacuugggauu

SEQ ID NO: 347370 - RNA, 19 nt, Artificial Sequence
  Description of Artificial Sequence: Synthetic oligonucleotide
  Antisense Strand to SEQ ID NO: 347369
aaucccaaguaacguacug

SEQ ID NO: 347371 - RNA, 19 nt, Artificial Sequence
  Description of Artificial Sequence: Synthetic oligonucleotide
  Sense Strand Starting at position 363 of SEQ ID NO: 316051
cccauaagucuuugcugau

SEQ ID NO: 347372 - RNA, 19 nt, Artificial Sequence
  Description of Artificial Sequence: Synthetic oligonucleotide
  Antisense Strand to SEQ ID NO: 347371
aucagcaaagacuuauggg

SEQ ID NO: 347373 - RNA, 19 nt, Artificial Sequence
  Description of Artificial Sequence: Synthetic oligonucleotide
  Sense Strand Starting at position 363 of SEQ ID NO: 316052
ccauaagucuuugcugauu

SEQ ID NO: 347374 - RNA, 19 nt, Artificial Sequence
  Description of Artificial Sequence: Synthetic oligonucleotide
  Antisense Strand to SEQ ID NO: 347373
aaucagcaaagacuuaugg

SEQ ID NO: 347375 - RNA, 19 nt, Artificial Sequence
  Description of Artificial Sequence: Synthetic oligonucleotide
  Sense Strand Starting at position 363 of SEQ ID NO: 316057
agucuuugcugauugacag

SEQ ID NO: 347376 - RNA, 19 nt, Artificial Sequence
  Description of Artificial Sequence: Synthetic oligonucleotide
  Antisense Strand to SEQ ID NO: 347375
cugucaaucagcaaagacu

SEQ ID NO: 347377 - RNA, 19 nt, Artificial Sequence
  Description of Artificial Sequence: Synthetic oligonucleotide
  Sense Strand Starting at position 363 of SEQ ID NO: 316058
gucuuugcugauugacaga

SEQ ID NO: 347378 - RNA, 19 nt, Artificial Sequence
  Description of Artificial Sequence: Synthetic oligonucleotide
  Antisense Strand to SEQ ID NO: 347377
ucugucaaucagcaaagac

SEQ ID NO: 347379 - RNA, 19 nt, Artificial Sequence
  Description of Artificial Sequence: Synthetic oligonucleotide
  Sense Strand Starting at position 363 of SEQ ID NO: 316071
gacagaaggagcugucagu

SEQ ID NO: 347380 - RNA, 19 nt, Artificial Sequence
  Description of Artificial Sequence: Synthetic oligonucleotide
  Antisense Strand to SEQ ID NO: 347379
acugacagcuccuucuguc

SEQ ID NO: 347381 - RNA, 19 nt, Artificial Sequence
  Description of Artificial Sequence: Synthetic oligonucleotide
  Sense Strand Starting at position 363 of SEQ ID NO: 316184
agagaaagaugcuuguuga

SEQ ID NO: 347382 - RNA, 19 nt, Artificial Sequence
  Description of Artificial Sequence: Synthetic oligonucleotide
  Antisense Strand to SEQ ID NO: 347381
ucaacaagcaucuuucucu

SEQ ID NO: 347383 - RNA, 19 nt, Artificial Sequence
  Description of Artificial Sequence: Synthetic oligonucleotide
  Sense Strand Starting at position 363 of SEQ ID NO: 316185
gagaaagaugcuuguugaa

SEQ ID NO: 347384 - RNA, 19 nt, Artificial Sequence
  Description of Artificial Sequence: Synthetic oligonucleotide
  Antisense Strand to SEQ ID NO: 347383
uucaacaagcaucuuucuc

SEQ ID NO: 347385 - RNA, 19 nt, Artificial Sequence
  Description of Artificial Sequence: Synthetic oligonucleotide
  Sense Strand Starting at position 363 of SEQ ID NO: 316187
gaaagaugcuuguugaaag

SEQ ID NO: 347386 - RNA, 19 nt, Artificial Sequence
  Description of Artificial Sequence: Synthetic oligonucleotide
  Antisense Strand to SEQ ID NO: 347385
cuuucaacaagcaucuuuc

SEQ ID NO: 347387 - RNA, 19 nt, Artificial Sequence
  Description of Artificial Sequence: Synthetic oligonucleotide
  Sense Strand Starting at position 363 of SEQ ID NO: 316194
gcuuguugaaagggaauau

SEQ ID NO: 347388 - RNA, 19 nt, Artificial Sequence
  Description of Artificial Sequence: Synthetic oligonucleotide
  Antisense Strand to SEQ ID NO: 347387
auauucccuuucaacaagc

SEQ ID NO: 347389 - RNA, 19 nt, Artificial Sequence
  Description of Artificial Sequence: Synthetic oligonucleotide
  Sense Strand Starting at position 363 of SEQ ID NO: 316203
aagggaauaugugagacua

SEQ ID NO: 347390 - RNA, 19 nt, Artificial Sequence
  Description of Artificial Sequence: Synthetic oligonucleotide
  Antisense Strand to SEQ ID NO: 347389
uagucucacauauucccuu

SEQ ID NO: 347391 - RNA, 19 nt, Artificial Sequence
  Description of Artificial Sequence: Synthetic oligonucleotide
  Sense Strand Starting at position 363 of SEQ ID NO: 316231
gugcaauuccuagguuaaa

SEQ ID NO: 347392 - RNA, 19 nt, Artificial Sequence
  Description of Artificial Sequence: Synthetic oligonucleotide
  Antisense Strand to SEQ ID NO: 347391
uuuaaccuaggaauugcac

SEQ ID NO: 347393 - RNA, 19 nt, Artificial Sequence
  Description of Artificial Sequence: Synthetic oligonucleotide
  Sense Strand Starting at position 363 of SEQ ID NO: 316232
ugcaauuccuagguuaaag

SEQ ID NO: 347394 - RNA, 19 nt, Artificial Sequence
  Description of Artificial Sequence: Synthetic oligonucleotide
  Antisense Strand to SEQ ID NO: 347393
cuuuaaccuaggaauugca

SEQ ID NO: 347395 - RNA, 19 nt, Artificial Sequence
  Description of Artificial Sequence: Synthetic oligonucleotide
  Sense Strand Starting at position 363 of SEQ ID NO: 317907
ccaaguaguaacugggaaa

SEQ ID NO: 347396 - RNA, 19 nt, Artificial Sequence
  Description of Artificial Sequence: Synthetic oligonucleotide
  Antisense Strand to SEQ ID NO: 347395
uuucccaguuacuacuugg

SEQ ID NO: 347397 - RNA, 19 nt, Artificial Sequence
  Description of Artificial Sequence: Synthetic oligonucleotide
  Sense Strand Starting at position 363 of SEQ ID NO: 318148
agguuaacaggucgaugau

SEQ ID NO: 347398 - RNA, 19 nt, Artificial Sequence
  Description of Artificial Sequence: Synthetic oligonucleotide
  Antisense Strand to SEQ ID NO: 347397
aucaucgaccuguuaaccu

SEQ ID NO: 347399 - RNA, 19 nt, Artificial Sequence
  Description of Artificial Sequence: Synthetic oligonucleotide
  Sense Strand Starting at position 363 of SEQ ID NO: 318149
gguuaacaggucgaugauu

SEQ ID NO: 347400 - RNA, 19 nt, Artificial Sequence
  Description of Artificial Sequence: Synthetic oligonucleotide
  Antisense Strand to SEQ ID NO: 347399
aaucaucgaccuguuaacc

SEQ ID NO: 347401 - RNA, 19 nt, Artificial Sequence
  Description of Artificial Sequence: Synthetic oligonucleotide
  Sense Strand Starting at position 363 of SEQ ID NO: 318160
cgaugauuggcugauguuu

SEQ ID NO: 347402 - RNA, 19 nt, Artificial Sequence
  Description of Artificial Sequence: Synthetic oligonucleotide
  Antisense Strand to SEQ ID NO: 347401
aaacaucagccaaucaucg

SEQ ID NO: 347403 - RNA, 19 nt, Artificial Sequence
  Description of Artificial Sequence: Synthetic oligonucleotide
  Sense Strand Starting at position 363 of SEQ ID NO: 318193
agaacacauuucuggaaga

SEQ ID NO: 347404 - RNA, 19 nt, Artificial Sequence
  Description of Artificial Sequence: Synthetic oligonucleotide
  Antisense Strand to SEQ ID NO: 347403
ucuuccagaaauguguucu

SEQ ID NO: 347405 - RNA, 19 nt, Artificial Sequence
  Description of Artificial Sequence: Synthetic oligonucleotide
  Sense Strand Starting at position 363 of SEQ ID NO: 318287
ugugauauuguccaccugu

SEQ ID NO: 347406 - RNA, 19 nt, Artificial Sequence
  Description of Artificial Sequence: Synthetic oligonucleotide
  Antisense Strand to SEQ ID NO: 347405
acagguggacaauaucaca

SEQ ID NO: 347407 - RNA, 19 nt, Artificial Sequence
  Description of Artificial Sequence: Synthetic oligonucleotide
  Sense Strand Starting at position 363 of SEQ ID NO: 318376
uguuccuagcuaugacaga

SEQ ID NO: 347408 - RNA, 19 nt, Artificial Sequence
  Description of Artificial Sequence: Synthetic oligonucleotide
  Antisense Strand to SEQ ID NO: 347407
ucugucauagcuaggaaca

SEQ ID NO: 347409 - RNA, 19 nt, Artificial Sequence
  Description of Artificial Sequence: Synthetic oligonucleotide
  Sense Strand Starting at position 363 of SEQ ID NO: 318398
agaaucuugccuuguggau

SEQ ID NO: 347410 - RNA, 19 nt, Artificial Sequence
  Description of Artificial Sequence: Synthetic oligonucleotide
  Antisense Strand to SEQ ID NO: 347409
auccacaaggcaagauucu

SEQ ID NO: 347411 - RNA, 19 nt, Artificial Sequence
  Description of Artificial Sequence: Synthetic oligonucleotide
  Sense Strand Starting at position 363 of SEQ ID NO: 318410
uguggauaacucugugagu

SEQ ID NO: 347412 - RNA, 19 nt, Artificial Sequence
  Description of Artificial Sequence: Synthetic oligonucleotide
  Antisense Strand to SEQ ID NO: 347411
acucacagaguuauccaca

SEQ ID NO: 347413 - RNA, 19 nt, Artificial Sequence
  Description of Artificial Sequence: Synthetic oligonucleotide
  Sense Strand Starting at position 363 of SEQ ID NO: 318411
guggauaacucugugaguu

SEQ ID NO: 347414 - RNA, 19 nt, Artificial Sequence
  Description of Artificial Sequence: Synthetic oligonucleotide
  Antisense Strand to SEQ ID NO: 347413
aacucacagaguuauccac

SEQ ID NO: 347415 - RNA, 19 nt, Artificial Sequence
  Description of Artificial Sequence: Synthetic oligonucleotide
  Sense Strand Starting at position 363 of SEQ ID NO: 318412
uggauaacucugugaguuu

SEQ ID NO: 347416 - RNA, 19 nt, Artificial Sequence
  Description of Artificial Sequence: Synthetic oligonucleotide
  Antisense Strand to SEQ ID NO: 347415
aaacucacagaguuaucca

SEQ ID NO: 347417 - RNA, 19 nt, Artificial Sequence
  Description of Artificial Sequence: Synthetic oligonucleotide
  Sense Strand Starting at position 363 of SEQ ID NO: 318503
guuguccauuuggcaaauu

SEQ ID NO: 347418 - RNA, 19 nt, Artificial Sequence
  Description of Artificial Sequence: Synthetic oligonucleotide
  Antisense Strand to SEQ ID NO: 347417
aauuugccaaauggacaac

SEQ ID NO: 347419 - RNA, 19 nt, Artificial Sequence
  Description of Artificial Sequence: Synthetic oligonucleotide
  Sense Strand Starting at position 363 of SEQ ID NO: 318523
guacuuguucuugaaggcu

SEQ ID NO: 347420 - RNA, 19 nt, Artificial Sequence
  Description of Artificial Sequence: Synthetic oligonucleotide
  Antisense Strand to SEQ ID NO: 347419
agccuucaagaacaaguac

SEQ ID NO: 347421 - RNA, 19 nt, Artificial Sequence
  Description of Artificial Sequence: Synthetic oligonucleotide
  Sense Strand Starting at position 363 of SEQ ID NO: 318535
gaaggcuuugcccagagua

SEQ ID NO: 347422 - RNA, 19 nt, Artificial Sequence
  Description of Artificial Sequence: Synthetic oligonucleotide
  Antisense Strand to SEQ ID NO: 347421
uacucugggcaaagccuuc

SEQ ID NO: 347423 - RNA, 19 nt, Artificial Sequence
  Description of Artificial Sequence: Synthetic oligonucleotide
  Sense Strand Starting at position 363 of SEQ ID NO: 318537
aggcuuugcccagaguaca

SEQ ID NO: 347424 - RNA, 19 nt, Artificial Sequence
  Description of Artificial Sequence: Synthetic oligonucleotide
  Antisense Strand to SEQ ID NO: 347423
uguacucugggcaaagccu

SEQ ID NO: 347425 - RNA, 19 nt, Artificial Sequence
  Description of Artificial Sequence: Synthetic oligonucleotide
  Sense Strand Starting at position 363 of SEQ ID NO: 318553
acauaucugcugggaagga

SEQ ID NO: 347426 - RNA, 19 nt, Artificial Sequence
  Description of Artificial Sequence: Synthetic oligonucleotide
  Antisense Strand to SEQ ID NO: 347425
uccuucccagcagauaugu

SEQ ID NO: 347427 - RNA, 19 nt, Artificial Sequence
  Description of Artificial Sequence: Synthetic oligonucleotide
  Sense Strand Starting at position 363 of SEQ ID NO: 318637
auggcaauuugacaaaguu

SEQ ID NO: 347428 - RNA, 19 nt, Artificial Sequence
  Description of Artificial Sequence: Synthetic oligonucleotide
  Antisense Strand to SEQ ID NO: 347427
aacuuugucaaauugccau

SEQ ID NO: 347429 - RNA, 19 nt, Artificial Sequence
  Description of Artificial Sequence: Synthetic oligonucleotide
  Sense Strand Starting at position 363 of SEQ ID NO: 318715
acugcaucauuguuuauua

SEQ ID NO: 347430 - RNA, 19 nt, Artificial Sequence
  Description of Artificial Sequence: Synthetic oligonucleotide
  Antisense Strand to SEQ ID NO: 347429
uaauaaacaaugaugcagu

SEQ ID NO: 347431 - RNA, 19 nt, Artificial Sequence
  Description of Artificial Sequence: Synthetic oligonucleotide
  Sense Strand Starting at position 363 of SEQ ID NO: 318717
ugcaucauuguuuauuaca

SEQ ID NO: 347432 - RNA, 19 nt, Artificial Sequence
  Description of Artificial Sequence: Synthetic oligonucleotide
  Antisense Strand to SEQ ID NO: 347431
uguaauaaacaaugaugca

SEQ ID NO: 347433 - RNA, 19 nt, Artificial Sequence
  Description of Artificial Sequence: Synthetic oligonucleotide
  Sense Strand Starting at position 363 of SEQ ID NO: 318754
ccugguguccaucaaauca

SEQ ID NO: 347434 - RNA, 19 nt, Artificial Sequence
  Description of Artificial Sequence: Synthetic oligonucleotide
  Antisense Strand to SEQ ID NO: 347433
ugauuugauggacaccagg

SEQ ID NO: 347435 - RNA, 19 nt, Artificial Sequence
  Description of Artificial Sequence: Synthetic oligonucleotide
  Sense Strand Starting at position 363 of SEQ ID NO: 318818
gcugauuaugcacaacacu

SEQ ID NO: 347436 - RNA, 19 nt, Artificial Sequence
  Description of Artificial Sequence: Synthetic oligonucleotide
  Antisense Strand to SEQ ID NO: 347435
aguguugugcauaaucagc

SEQ ID NO: 347437 - RNA, 19 nt, Artificial Sequence
  Description of Artificial Sequence: Synthetic oligonucleotide
  Sense Strand Starting at position 363 of SEQ ID NO: 318890
cuaggacauguguauguga

SEQ ID NO: 347438 - RNA, 19 nt, Artificial Sequence
  Description of Artificial Sequence: Synthetic oligonucleotide
  Antisense Strand to SEQ ID NO: 347437
ucacauacacauguccuag

SEQ ID NO: 347439 - RNA, 19 nt, Artificial Sequence
  Description of Artificial Sequence: Synthetic oligonucleotide
  Sense Strand Starting at position 363 of SEQ ID NO: 318892
aggacauguguaugugagu

SEQ ID NO: 347440 - RNA, 19 nt, Artificial Sequence
  Description of Artificial Sequence: Synthetic oligonucleotide
  Antisense Strand to SEQ ID NO: 347439
acucacauacacauguccu

SEQ ID NO: 347441 - RNA, 19 nt, Artificial Sequence
  Description of Artificial Sequence: Synthetic oligonucleotide
  Sense Strand Starting at position 363 of SEQ ID NO: 318951
guucuuucugcagauggga

SEQ ID NO: 347442 - RNA, 19 nt, Artificial Sequence
  Description of Artificial Sequence: Synthetic oligonucleotide
  Antisense Strand to SEQ ID NO: 347441
ucccaucugcagaaagaac

SEQ ID NO: 347443 - RNA, 19 nt, Artificial Sequence
  Description of Artificial Sequence: Synthetic oligonucleotide
  Sense Strand Starting at position 363 of SEQ ID NO: 318990
uuguuaagauguucucaug

SEQ ID NO: 347444 - RNA, 19 nt, Artificial Sequence
  Description of Artificial Sequence: Synthetic oligonucleotide
  Antisense Strand to SEQ ID NO: 347443
caugagaacaucuuaacaa

SEQ ID NO: 347445 - RNA, 19 nt, Artificial Sequence
  Description of Artificial Sequence: Synthetic oligonucleotide
  Sense Strand Starting at position 364 of SEQ ID NO: 315242
uuuggaauguuguucuaac

SEQ ID NO: 347446 - RNA, 19 nt, Artificial Sequence
  Description of Artificial Sequence: Synthetic oligonucleotide
  Antisense Strand to SEQ ID NO: 347445
guuagaacaacauuccaaa

SEQ ID NO: 347447 - RNA, 19 nt, Artificial Sequence
  Description of Artificial Sequence: Synthetic oligonucleotide
  Sense Strand Starting at position 364 of SEQ ID NO: 315243
uuggaauguuguucuaacu

SEQ ID NO: 347448 - RNA, 19 nt, Artificial Sequence
  Description of Artificial Sequence: Synthetic oligonucleotide
  Antisense Strand to SEQ ID NO: 347447
aguuagaacaacauuccaa

SEQ ID NO: 347449 - RNA, 19 nt, Artificial Sequence
  Description of Artificial Sequence: Synthetic oligonucleotide
  Sense Strand Starting at position 364 of SEQ ID NO: 315400
ccuauauucugggccuuua

SEQ ID NO: 347450 - RNA, 19 nt, Artificial Sequence
  Description of Artificial Sequence: Synthetic oligonucleotide
  Antisense Strand to SEQ ID NO: 347449
uaaaggcccagaauauagg

SEQ ID NO: 347451 - RNA, 19 nt, Artificial Sequence
  Description of Artificial Sequence: Synthetic oligonucleotide
  Sense Strand Starting at position 364 of SEQ ID NO: 315511
gguugugcucuauaccuuu

SEQ ID NO: 347452 - RNA, 19 nt, Artificial Sequence
  Description of Artificial Sequence: Synthetic oligonucleotide
  Antisense Strand to SEQ ID NO: 347451
aaagguauagagcacaacc

SEQ ID NO: 347453 - RNA, 19 nt, Artificial Sequence
  Description of Artificial Sequence: Synthetic oligonucleotide
  Sense Strand Starting at position 364 of SEQ ID NO: 315582
uuucgauguuagcucaaau

SEQ ID NO: 347454 - RNA, 19 nt, Artificial Sequence
  Description of Artificial Sequence: Synthetic oligonucleotide
  Antisense Strand to SEQ ID NO: 347453
auuugagcuaacaucgaaa

SEQ ID NO: 347455 - RNA, 19 nt, Artificial Sequence
  Description of Artificial Sequence: Synthetic oligonucleotide
  Sense Strand Starting at position 364 of SEQ ID NO: 315677
aguguacuucuaugaagga

SEQ ID NO: 347456 - RNA, 19 nt, Artificial Sequence
  Description of Artificial Sequence: Synthetic oligonucleotide
  Antisense Strand to SEQ ID NO: 347455
uccuucauagaaguacacu

SEQ ID NO: 347457 - RNA, 19 nt, Artificial Sequence
  Description of Artificial Sequence: Synthetic oligonucleotide
  Sense Strand Starting at position 364 of SEQ ID NO: 315693
ggaagaaucauguguguuu

SEQ ID NO: 347458 - RNA, 19 nt, Artificial Sequence
  Description of Artificial Sequence: Synthetic oligonucleotide
  Antisense Strand to SEQ ID NO: 347457
aaacacacaugauucuucc

SEQ ID NO: 347459 - RNA, 19 nt, Artificial Sequence
  Description of Artificial Sequence: Synthetic oligonucleotide
  Sense Strand Starting at position 364 of SEQ ID NO: 315729
uguauacuauuccuuuagu

SEQ ID NO: 347460 - RNA, 19 nt, Artificial Sequence
  Description of Artificial Sequence: Synthetic oligonucleotide
  Antisense Strand to SEQ ID NO: 347459
acuaaaggaauaguauaca

SEQ ID NO: 347461 - RNA, 19 nt, Artificial Sequence
  Description of Artificial Sequence: Synthetic oligonucleotide
  Sense Strand Starting at position 364 of SEQ ID NO: 315730
guauacuauuccuuuaguu

SEQ ID NO: 347462 - RNA, 19 nt, Artificial Sequence
  Description of Artificial Sequence: Synthetic oligonucleotide
  Antisense Strand to SEQ ID NO: 347461
aacuaaaggaauaguauac

SEQ ID NO: 347463 - RNA, 19 nt, Artificial Sequence
  Description of Artificial Sequence: Synthetic oligonucleotide
  Sense Strand Starting at position 364 of SEQ ID NO: 315743
uuaguuaucugucuccauu

SEQ ID NO: 347464 - RNA, 19 nt, Artificial Sequence
  Description of Artificial Sequence: Synthetic oligonucleotide
  Antisense Strand to SEQ ID NO: 347463
aauggagacagauaacuaa

SEQ ID NO: 347465 - RNA, 19 nt, Artificial Sequence
  Description of Artificial Sequence: Synthetic oligonucleotide
  Sense Strand Starting at position 364 of SEQ ID NO: 315745
aguuaucugucuccauuac

SEQ ID NO: 347466 - RNA, 19 nt, Artificial Sequence
  Description of Artificial Sequence: Synthetic oligonucleotide
  Antisense Strand to SEQ ID NO: 347465
guaauggagacagauaacu

SEQ ID NO: 347467 - RNA, 19 nt, Artificial Sequence
  Description of Artificial Sequence: Synthetic oligonucleotide
  Sense Strand Starting at position 364 of SEQ ID NO: 315746
guuaucugucuccauuacu

SEQ ID NO: 347468 - RNA, 19 nt, Artificial Sequence
  Description of Artificial Sequence: Synthetic oligonucleotide
  Antisense Strand to SEQ ID NO: 347467
aguaauggagacagauaac

SEQ ID NO: 347469 - RNA, 19 nt, Artificial Sequence
  Description of Artificial Sequence: Synthetic oligonucleotide
  Sense Strand Starting at position 364 of SEQ ID NO: 315753
gucuccauuacuggaguga

SEQ ID NO: 347470 - RNA, 19 nt, Artificial Sequence
  Description of Artificial Sequence: Synthetic oligonucleotide
  Antisense Strand to SEQ ID NO: 347469
ucacuccaguaauggagac

SEQ ID NO: 347471 - RNA, 19 nt, Artificial Sequence
  Description of Artificial Sequence: Synthetic oligonucleotide
  Sense Strand Starting at position 364 of SEQ ID NO: 315840
ccacaagucuuugcugaaa

SEQ ID NO: 347472 - RNA, 19 nt, Artificial Sequence
  Description of Artificial Sequence: Synthetic oligonucleotide
  Antisense Strand to SEQ ID NO: 347471
uuucagcaaagacuugugg

SEQ ID NO: 347473 - RNA, 19 nt, Artificial Sequence
  Description of Artificial Sequence: Synthetic oligonucleotide
  Sense Strand Starting at position 364 of SEQ ID NO: 315965
augugagaggcuugaggaa

SEQ ID NO: 347474 - RNA, 19 nt, Artificial Sequence
  Description of Artificial Sequence: Synthetic oligonucleotide
  Antisense Strand to SEQ ID NO: 347473
uuccucaagccucucacau

SEQ ID NO: 347475 - RNA, 19 nt, Artificial Sequence
  Description of Artificial Sequence: Synthetic oligonucleotide
  Sense Strand Starting at position 364 of SEQ ID NO: 316214
acaguuuaguuccuaugga

SEQ ID NO: 347476 - RNA, 19 nt, Artificial Sequence
  Description of Artificial Sequence: Synthetic oligonucleotide
  Antisense Strand to SEQ ID NO: 347475
uccauaggaacuaaacugu

SEQ ID NO: 347477 - RNA, 19 nt, Artificial Sequence
  Description of Artificial Sequence: Synthetic oligonucleotide
  Sense Strand Starting at position 364 of SEQ ID NO: 316286
cagaguauaugggucugau

SEQ ID NO: 347478 - RNA, 19 nt, Artificial Sequence
  Description of Artificial Sequence: Synthetic oligonucleotide
  Antisense Strand to SEQ ID NO: 347477
aucagacccauauacucug

SEQ ID NO: 347479 - RNA, 19 nt, Artificial Sequence
  Description of Artificial Sequence: Synthetic oligonucleotide
  Sense Strand Starting at position 364 of SEQ ID NO: 316357
ucauguuguugggcaaacu

SEQ ID NO: 347480 - RNA, 19 nt, Artificial Sequence
  Description of Artificial Sequence: Synthetic oligonucleotide
  Antisense Strand to SEQ ID NO: 347479
aguuugcccaacaacauga

SEQ ID NO: 347481 - RNA, 19 nt, Artificial Sequence
  Description of Artificial Sequence: Synthetic oligonucleotide
  Sense Strand Starting at position 364 of SEQ ID NO: 316415
cuguauucuuagucucauc

SEQ ID NO: 347482 - RNA, 19 nt, Artificial Sequence
  Description of Artificial Sequence: Synthetic oligonucleotide
  Antisense Strand to SEQ ID NO: 347481
gaugagacuaagaauacag

SEQ ID NO: 347483 - RNA, 19 nt, Artificial Sequence
  Description of Artificial Sequence: Synthetic oligonucleotide
  Sense Strand Starting at position 364 of SEQ ID NO: 316448
ggguuaguccaauguccac

SEQ ID NO: 347484 - RNA, 19 nt, Artificial Sequence
  Description of Artificial Sequence: Synthetic oligonucleotide
  Antisense Strand to SEQ ID NO: 347483
guggacauuggacuaaccc

SEQ ID NO: 347485 - RNA, 19 nt, Artificial Sequence
  Description of Artificial Sequence: Synthetic oligonucleotide
  Sense Strand Starting at position 364 of SEQ ID NO: 316475
gaagcuuaaucucuguguu

SEQ ID NO: 347486 - RNA, 19 nt, Artificial Sequence
  Description of Artificial Sequence: Synthetic oligonucleotide
  Antisense Strand to SEQ ID NO: 347485
aacacagagauuaagcuuc

SEQ ID NO: 347487 - RNA, 19 nt, Artificial Sequence
  Description of Artificial Sequence: Synthetic oligonucleotide
  Sense Strand Starting at position 364 of SEQ ID NO: 316648
cccaaaggaggcuguauua

SEQ ID NO: 347488 - RNA, 19 nt, Artificial Sequence
  Description of Artificial Sequence: Synthetic oligonucleotide
  Antisense Strand to SEQ ID NO: 347487
uaauacagccuccuuuggg

SEQ ID NO: 347489 - RNA, 19 nt, Artificial Sequence
  Description of Artificial Sequence: Synthetic oligonucleotide
  Sense Strand Starting at position 364 of SEQ ID NO: 316661
guauuauccguucaugggu

SEQ ID NO: 347490 - RNA, 19 nt, Artificial Sequence
  Description of Artificial Sequence: Synthetic oligonucleotide
  Antisense Strand to SEQ ID NO: 347489
acccaugaacggauaauac

SEQ ID NO: 347491 - RNA, 19 nt, Artificial Sequence
  Description of Artificial Sequence: Synthetic oligonucleotide
  Sense Strand Starting at position 364 of SEQ ID NO: 316949
ccaacuccaugggaaauuu

SEQ ID NO: 347492 - RNA, 19 nt, Artificial Sequence
  Description of Artificial Sequence: Synthetic oligonucleotide
  Antisense Strand to SEQ ID NO: 347491
aaauuucccauggaguugg

SEQ ID NO: 347493 - RNA, 19 nt, Artificial Sequence
  Description of Artificial Sequence: Synthetic oligonucleotide
  Sense Strand Starting at position 364 of SEQ ID NO: 317093
agcuguaccuggcuacaaa

SEQ ID NO: 347494 - RNA, 19 nt, Artificial Sequence
  Description of Artificial Sequence: Synthetic oligonucleotide
  Antisense Strand to SEQ ID NO: 347493
uuuguagccagguacagcu

SEQ ID NO: 347495 - RNA, 19 nt, Artificial Sequence
  Description of Artificial Sequence: Synthetic oligonucleotide
  Sense Strand Starting at position 364 of SEQ ID NO: 317116
ccuccaaucccuugcggaa

SEQ ID NO: 347496 - RNA, 19 nt, Artificial Sequence
  Description of Artificial Sequence: Synthetic oligonucleotide
  Antisense Strand to SEQ ID NO: 347495
uuccgcaagggauuggagg

SEQ ID NO: 347497 - RNA, 19 nt, Artificial Sequence
  Description of Artificial Sequence: Synthetic oligonucleotide
  Sense Strand Starting at position 364 of SEQ ID NO: 317226
aaagauggagucuguuuau

SEQ ID NO: 347498 - RNA, 19 nt, Artificial Sequence
  Description of Artificial Sequence: Synthetic oligonucleotide
  Antisense Strand to SEQ ID NO: 347497
auaaacagacuccaucuuu

SEQ ID NO: 347499 - RNA, 19 nt, Artificial Sequence
  Description of Artificial Sequence: Synthetic oligonucleotide
  Sense Strand Starting at position 364 of SEQ ID NO: 317229
gauggagucuguuuaucag

SEQ ID NO: 347500 - RNA, 19 nt, Artificial Sequence
  Description of Artificial Sequence: Synthetic oligonucleotide
  Antisense Strand to SEQ ID NO: 347499
cugauaaacagacuccauc

SEQ ID NO: 347501 - RNA, 19 nt, Artificial Sequence
  Description of Artificial Sequence: Synthetic oligonucleotide
  Sense Strand Starting at position 364 of SEQ ID NO: 317232
ggagucuguuuaucagguu

SEQ ID NO: 347502 - RNA, 19 nt, Artificial Sequence
  Description of Artificial Sequence: Synthetic oligonucleotide
  Antisense Strand to SEQ ID NO: 347501
aaccugauaaacagacucc

SEQ ID NO: 347503 - RNA, 19 nt, Artificial Sequence
  Description of Artificial Sequence: Synthetic oligonucleotide
  Sense Strand Starting at position 364 of SEQ ID NO: 317244
ucagguuaccugggaaaca

SEQ ID NO: 347504 - RNA, 19 nt, Artificial Sequence
  Description of Artificial Sequence: Synthetic oligonucleotide
  Antisense Strand to SEQ ID NO: 347503
uguuucccagguaaccuga

SEQ ID NO: 347505 - RNA, 19 nt, Artificial Sequence
  Description of Artificial Sequence: Synthetic oligonucleotide
  Sense Strand Starting at position 364 of SEQ ID NO: 317292
uggacagaucccugcccau

SEQ ID NO: 347506 - RNA, 19 nt, Artificial Sequence
  Description of Artificial Sequence: Synthetic oligonucleotide
  Antisense Strand to SEQ ID NO: 347505
augggcagggaucugucca

SEQ ID NO: 347507 - RNA, 19 nt, Artificial Sequence
  Description of Artificial Sequence: Synthetic oligonucleotide
  Sense Strand Starting at position 364 of SEQ ID NO: 317597
auuugagugauguggcuuu

SEQ ID NO: 347508 - RNA, 19 nt, Artificial Sequence
  Description of Artificial Sequence: Synthetic oligonucleotide
  Antisense Strand to SEQ ID NO: 347507
aaagccacaucacucaaau

SEQ ID NO: 347509 - RNA, 19 nt, Artificial Sequence
  Description of Artificial Sequence: Synthetic oligonucleotide
  Sense Strand Starting at position 364 of SEQ ID NO: 317608
guggcuuucggcgcaucaa

SEQ ID NO: 347510 - RNA, 19 nt, Artificial Sequence
  Description of Artificial Sequence: Synthetic oligonucleotide
  Antisense Strand to SEQ ID NO: 347509
uugaugcgccgaaagccac

SEQ ID NO: 347511 - RNA, 19 nt, Artificial Sequence
  Description of Artificial Sequence: Synthetic oligonucleotide
  Sense Strand Starting at position 364 of SEQ ID NO: 317710
cucuuaauguuggugauga

SEQ ID NO: 347512 - RNA, 19 nt, Artificial Sequence
  Description of Artificial Sequence: Synthetic oligonucleotide
  Antisense Strand to SEQ ID NO: 347511
ucaucaccaacauuaagag

SEQ ID NO: 347513 - RNA, 19 nt, Artificial Sequence
  Description of Artificial Sequence: Synthetic oligonucleotide
  Sense Strand Starting at position 364 of SEQ ID NO: 317873
aucuuaaaguccuugagaa

SEQ ID NO: 347514 - RNA, 19 nt, Artificial Sequence
  Description of Artificial Sequence: Synthetic oligonucleotide
  Antisense Strand to SEQ ID NO: 347513
uucucaaggacuuuaagau

SEQ ID NO: 347515 - RNA, 19 nt, Artificial Sequence
  Description of Artificial Sequence: Synthetic oligonucleotide
  Sense Strand Starting at position 364 of SEQ ID NO: 317874
ucuuaaaguccuugagaac

SEQ ID NO: 347516 - RNA, 19 nt, Artificial Sequence
  Description of Artificial Sequence: Synthetic oligonucleotide
  Antisense Strand to SEQ ID NO: 347515
guucucaaggacuuuaaga

SEQ ID NO: 347517 - RNA, 19 nt, Artificial Sequence
  Description of Artificial Sequence: Synthetic oligonucleotide
  Sense Strand Starting at position 364 of SEQ ID NO: 318101
uuuguaucuugaguagaaa

SEQ ID NO: 347518 - RNA, 19 nt, Artificial Sequence
  Description of Artificial Sequence: Synthetic oligonucleotide
  Antisense Strand to SEQ ID NO: 347517
uuucuacucaagauacaaa

SEQ ID NO: 347519 - RNA, 19 nt, Artificial Sequence
  Description of Artificial Sequence: Synthetic oligonucleotide
  Sense Strand Starting at position 364 of SEQ ID NO: 318102
uuguaucuugaguagaaac

SEQ ID NO: 347520 - RNA, 19 nt, Artificial Sequence
  Description of Artificial Sequence: Synthetic oligonucleotide
  Antisense Strand to SEQ ID NO: 347519
guuucuacucaagauacaa

SEQ ID NO: 347521 - RNA, 19 nt, Artificial Sequence
  Description of Artificial Sequence: Synthetic oligonucleotide
  Sense Strand Starting at position 364 of SEQ ID NO: 318393
ugucauguucuacacauau

SEQ ID NO: 347522 - RNA, 19 nt, Artificial Sequence
  Description of Artificial Sequence: Synthetic oligonucleotide
  Antisense Strand to SEQ ID NO: 347521
auauguguagaacaugaca

SEQ ID NO: 347523 - RNA, 19 nt, Artificial Sequence
  Description of Artificial Sequence: Synthetic oligonucleotide
  Sense Strand Starting at position 364 of SEQ ID NO: 319199
auugcuuaacgccaagaau

SEQ ID NO: 347524 - RNA, 19 nt, Artificial Sequence
  Description of Artificial Sequence: Synthetic oligonucleotide
  Antisense Strand to SEQ ID NO: 347523
auucuuggcguuaagcaau

SEQ ID NO: 347525 - RNA, 19 nt, Artificial Sequence
  Description of Artificial Sequence: Synthetic oligonucleotide
  Sense Strand Starting at position 365 of SEQ ID NO: 315593
auuccuagucauggguauu

SEQ ID NO: 347526 - RNA, 19 nt, Artificial Sequence
  Description of Artificial Sequence: Synthetic oligonucleotide
  Antisense Strand to SEQ ID NO: 347525
aauacccaugacuaggaau

SEQ ID NO: 347527 - RNA, 19 nt, Artificial Sequence
  Description of Artificial Sequence: Synthetic oligonucleotide
  Sense Strand Starting at position 365 of SEQ ID NO: 315596
ccuagucauggguauuaga

SEQ ID NO: 347528 - RNA, 19 nt, Artificial Sequence
  Description of Artificial Sequence: Synthetic oligonucleotide
  Antisense Strand to SEQ ID NO: 347527
ucuaauacccaugacuagg

SEQ ID NO: 347529 - RNA, 19 nt, Artificial Sequence
  Description of Artificial Sequence: Synthetic oligonucleotide
  Sense Strand Starting at position 365 of SEQ ID NO: 315606
gguauuagaguauggaacu

SEQ ID NO: 347530 - RNA, 19 nt, Artificial Sequence
  Description of Artificial Sequence: Synthetic oligonucleotide
  Antisense Strand to SEQ ID NO: 347529
aguuccauacucuaauacc

SEQ ID NO: 347531 - RNA, 19 nt, Artificial Sequence
  Description of Artificial Sequence: Synthetic oligonucleotide
  Sense Strand Starting at position 365 of SEQ ID NO: 315770
guagacaugucauccuuau

SEQ ID NO: 347532 - RNA, 19 nt, Artificial Sequence
  Description of Artificial Sequence: Synthetic oligonucleotide
  Antisense Strand to SEQ ID NO: 347531
auaaggaugacaugucuac

SEQ ID NO: 347533 - RNA, 19 nt, Artificial Sequence
  Description of Artificial Sequence: Synthetic oligonucleotide
  Sense Strand Starting at position 365 of SEQ ID NO: 315774
acaugucauccuuauguga

SEQ ID NO: 347534 - RNA, 19 nt, Artificial Sequence
  Description of Artificial Sequence: Synthetic oligonucleotide
  Antisense Strand to SEQ ID NO: 347533
ucacauaaggaugacaugu

SEQ ID NO: 347535 - RNA, 19 nt, Artificial Sequence
  Description of Artificial Sequence: Synthetic oligonucleotide
  Sense Strand Starting at position 365 of SEQ ID NO: 315777
ugucauccuuaugugauuu

SEQ ID NO: 347536 - RNA, 19 nt, Artificial Sequence
  Description of Artificial Sequence: Synthetic oligonucleotide
  Antisense Strand to SEQ ID NO: 347535
aaaucacauaaggaugaca

SEQ ID NO: 347537 - RNA, 19 nt, Artificial Sequence
  Description of Artificial Sequence: Synthetic oligonucleotide
  Sense Strand Starting at position 365 of SEQ ID NO: 315905
auuagcaggucuucucauu

SEQ ID NO: 347538 - RNA, 19 nt, Artificial Sequence
  Description of Artificial Sequence: Synthetic oligonucleotide
  Antisense Strand to SEQ ID NO: 347537
aaugagaagaccugcuaau

SEQ ID NO: 347539 - RNA, 19 nt, Artificial Sequence
  Description of Artificial Sequence: Synthetic oligonucleotide
  Sense Strand Starting at position 365 of SEQ ID NO: 316021
ucuuauucccuguggauag

SEQ ID NO: 347540 - RNA, 19 nt, Artificial Sequence
  Description of Artificial Sequence: Synthetic oligonucleotide
  Antisense Strand to SEQ ID NO: 347539
cuauccacagggaauaaga

SEQ ID NO: 347541 - RNA, 19 nt, Artificial Sequence
  Description of Artificial Sequence: Synthetic oligonucleotide
  Sense Strand Starting at position 365 of SEQ ID NO: 316123
aggcaacauugaucucacu

SEQ ID NO: 347542 - RNA, 19 nt, Artificial Sequence
  Description of Artificial Sequence: Synthetic oligonucleotide
  Antisense Strand to SEQ ID NO: 347541
agugagaucaauguugccu

SEQ ID NO: 347543 - RNA, 19 nt, Artificial Sequence
  Description of Artificial Sequence: Synthetic oligonucleotide
  Sense Strand Starting at position 365 of SEQ ID NO: 316227
ugcauaggcuuagucugau

SEQ ID NO: 347544 - RNA, 19 nt, Artificial Sequence
  Description of Artificial Sequence: Synthetic oligonucleotide
  Antisense Strand to SEQ ID NO: 347543
aucagacuaagccuaugca

SEQ ID NO: 347545 - RNA, 19 nt, Artificial Sequence
  Description of Artificial Sequence: Synthetic oligonucleotide
  Sense Strand Starting at position 365 of SEQ ID NO: 316244
augugagucuuccuuggaa

SEQ ID NO: 347546 - RNA, 19 nt, Artificial Sequence
  Description of Artificial Sequence: Synthetic oligonucleotide
  Antisense Strand to SEQ ID NO: 347545
uuccaaggaagacucacau

SEQ ID NO: 347547 - RNA, 19 nt, Artificial Sequence
  Description of Artificial Sequence: Synthetic oligonucleotide
  Sense Strand Starting at position 365 of SEQ ID NO: 316264
caccaaaguccugagguuu

SEQ ID NO: 347548 - RNA, 19 nt, Artificial Sequence
  Description of Artificial Sequence: Synthetic oligonucleotide
  Antisense Strand to SEQ ID NO: 347547
aaaccucaggacuuuggug

SEQ ID NO: 347549 - RNA, 19 nt, Artificial Sequence
  Description of Artificial Sequence: Synthetic oligonucleotide
  Sense Strand Starting at position 365 of SEQ ID NO: 316281
uuaaacaaaucaggagaaa

SEQ ID NO: 347550 - RNA, 19 nt, Artificial Sequence
  Description of Artificial Sequence: Synthetic oligonucleotide
  Antisense Strand to SEQ ID NO: 347549
uuucuccugauuuguuuaa

SEQ ID NO: 347551 - RNA, 19 nt, Artificial Sequence
  Description of Artificial Sequence: Synthetic oligonucleotide
  Sense Strand Starting at position 365 of SEQ ID NO: 316404
gccagugauugcccuauuc

SEQ ID NO: 347552 - RNA, 19 nt, Artificial Sequence
  Description of Artificial Sequence: Synthetic oligonucleotide
  Antisense Strand to SEQ ID NO: 347551
gaauagggcaaucacuggc

SEQ ID NO: 347553 - RNA, 19 nt, Artificial Sequence
  Description of Artificial Sequence: Synthetic oligonucleotide
  Sense Strand Starting at position 365 of SEQ ID NO: 316471
gggagugaggcuggaucaa

SEQ ID NO: 347554 - RNA, 19 nt, Artificial Sequence
  Description of Artificial Sequence: Synthetic oligonucleotide
  Antisense Strand to SEQ ID NO: 347553
uugauccagccucacuccc

SEQ ID NO: 347555 - RNA, 19 nt, Artificial Sequence
  Description of Artificial Sequence: Synthetic oligonucleotide
  Sense Strand Starting at position 365 of SEQ ID NO: 316509
uuaagaccuuuggauuaga

SEQ ID NO: 347556 - RNA, 19 nt, Artificial Sequence
  Description of Artificial Sequence: Synthetic oligonucleotide
  Antisense Strand to SEQ ID NO: 347555
ucuaauccaaaggucuuaa

SEQ ID NO: 347557 - RNA, 19 nt, Artificial Sequence
  Description of Artificial Sequence: Synthetic oligonucleotide
  Sense Strand Starting at position 365 of SEQ ID NO: 316792
aggccaacucccuaagugu

SEQ ID NO: 347558 - RNA, 19 nt, Artificial Sequence
  Description of Artificial Sequence: Synthetic oligonucleotide
  Antisense Strand to SEQ ID NO: 347557
acacuuagggaguuggccu

SEQ ID NO: 347559 - RNA, 19 nt, Artificial Sequence
  Description of Artificial Sequence: Synthetic oligonucleotide
  Sense Strand Starting at position 365 of SEQ ID NO: 316858
acgagaguucccugcgaag

SEQ ID NO: 347560 - RNA, 19 nt, Artificial Sequence
  Description of Artificial Sequence: Synthetic oligonucleotide
  Antisense Strand to SEQ ID NO: 347559
cuucgcagggaacucucgu

SEQ ID NO: 347561 - RNA, 19 nt, Artificial Sequence
  Description of Artificial Sequence: Synthetic oligonucleotide
  Sense Strand Starting at position 365 of SEQ ID NO: 316860
gagaguucccugcgaagau

SEQ ID NO: 347562 - RNA, 19 nt, Artificial Sequence
  Description of Artificial Sequence: Synthetic oligonucleotide
  Antisense Strand to SEQ ID NO: 347561
aucuucgcagggaacucuc

SEQ ID NO: 347563 - RNA, 19 nt, Artificial Sequence
  Description of Artificial Sequence: Synthetic oligonucleotide
  Sense Strand Starting at position 365 of SEQ ID NO: 316981
guguccuucucgguuuaaa

SEQ ID NO: 347564 - RNA, 19 nt, Artificial Sequence
  Description of Artificial Sequence: Synthetic oligonucleotide
  Antisense Strand to SEQ ID NO: 347563
uuuaaaccgagaaggacac

SEQ ID NO: 347565 - RNA, 19 nt, Artificial Sequence
  Description of Artificial Sequence: Synthetic oligonucleotide
  Sense Strand Starting at position 365 of SEQ ID NO: 317144
gcguauacucggccauguu

SEQ ID NO: 347566 - RNA, 19 nt, Artificial Sequence
  Description of Artificial Sequence: Synthetic oligonucleotide
  Antisense Strand to SEQ ID NO: 347565
aacauggccgaguauacgc

SEQ ID NO: 347567 - RNA, 19 nt, Artificial Sequence
  Description of Artificial Sequence: Synthetic oligonucleotide
  Sense Strand Starting at position 365 of SEQ ID NO: 317154
ggccauguuuccucuauca

SEQ ID NO: 347568 - RNA, 19 nt, Artificial Sequence
  Description of Artificial Sequence: Synthetic oligonucleotide
  Antisense Strand to SEQ ID NO: 347567
ugauagaggaaacauggcc

SEQ ID NO: 347569 - RNA, 19 nt, Artificial Sequence
  Description of Artificial Sequence: Synthetic oligonucleotide
  Sense Strand Starting at position 365 of SEQ ID NO: 317419
cuguaauugccggcaaguc

SEQ ID NO: 347570 - RNA, 19 nt, Artificial Sequence
  Description of Artificial Sequence: Synthetic oligonucleotide
  Antisense Strand to SEQ ID NO: 347569
gacuugccggcaauuacag

SEQ ID NO: 347571 - RNA, 19 nt, Artificial Sequence
  Description of Artificial Sequence: Synthetic oligonucleotide
  Sense Strand Starting at position 365 of SEQ ID NO: 317483
aguucugaguucgcugaga

SEQ ID NO: 347572 - RNA, 19 nt, Artificial Sequence
  Description of Artificial Sequence: Synthetic oligonucleotide
  Antisense Strand to SEQ ID NO: 347571
ucucagcgaacucagaacu

SEQ ID NO: 347573 - RNA, 19 nt, Artificial Sequence
  Description of Artificial Sequence: Synthetic oligonucleotide
  Sense Strand Starting at position 365 of SEQ ID NO: 317512
guccucaucgcgguauuca

SEQ ID NO: 347574 - RNA, 19 nt, Artificial Sequence
  Description of Artificial Sequence: Synthetic oligonucleotide
  Antisense Strand to SEQ ID NO: 347573
ugaauaccgcgaugaggac

SEQ ID NO: 347575 - RNA, 19 nt, Artificial Sequence
  Description of Artificial Sequence: Synthetic oligonucleotide
  Sense Strand Starting at position 365 of SEQ ID NO: 317574
ccugacaguuaugugauau

SEQ ID NO: 347576 - RNA, 19 nt, Artificial Sequence
  Description of Artificial Sequence: Synthetic oligonucleotide
  Antisense Strand to SEQ ID NO: 347575
auaucacauaacugucagg

SEQ ID NO: 347577 - RNA, 19 nt, Artificial Sequence
  Description of Artificial Sequence: Synthetic oligonucleotide
  Sense Strand Starting at position 365 of SEQ ID NO: 317584
augugauauugauacacau

SEQ ID NO: 347578 - RNA, 19 nt, Artificial Sequence
  Description of Artificial Sequence: Synthetic oligonucleotide
  Antisense Strand to SEQ ID NO: 347577
auguguaucaauaucacau

SEQ ID NO: 347579 - RNA, 19 nt, Artificial Sequence
  Description of Artificial Sequence: Synthetic oligonucleotide
  Sense Strand Starting at position 365 of SEQ ID NO: 317642
ugaguaggguacuaaugaa

SEQ ID NO: 347580 - RNA, 19 nt, Artificial Sequence
  Description of Artificial Sequence: Synthetic oligonucleotide
  Antisense Strand to SEQ ID NO: 347579
uucauuaguacccuacuca

SEQ ID NO: 347581 - RNA, 19 nt, Artificial Sequence
  Description of Artificial Sequence: Synthetic oligonucleotide
  Sense Strand Starting at position 365 of SEQ ID NO: 317773
aguuaacuuugggagacau

SEQ ID NO: 347582 - RNA, 19 nt, Artificial Sequence
  Description of Artificial Sequence: Synthetic oligonucleotide
  Antisense Strand to SEQ ID NO: 347581
augucucccaaaguuaacu

SEQ ID NO: 347583 - RNA, 19 nt, Artificial Sequence
  Description of Artificial Sequence: Synthetic oligonucleotide
  Sense Strand Starting at position 365 of SEQ ID NO: 317877
gacagaggagugugaauuc

SEQ ID NO: 347584 - RNA, 19 nt, Artificial Sequence
  Description of Artificial Sequence: Synthetic oligonucleotide
  Antisense Strand to SEQ ID NO: 347583
gaauucacacuccucuguc

SEQ ID NO: 347585 - RNA, 19 nt, Artificial Sequence
  Description of Artificial Sequence: Synthetic oligonucleotide
  Sense Strand Starting at position 365 of SEQ ID NO: 317887
ugugaauucucucugcuaa

SEQ ID NO: 347586 - RNA, 19 nt, Artificial Sequence
  Description of Artificial Sequence: Synthetic oligonucleotide
  Antisense Strand to SEQ ID NO: 347585
uuagcagagagaauucaca

SEQ ID NO: 347587 - RNA, 19 nt, Artificial Sequence
  Description of Artificial Sequence: Synthetic oligonucleotide
  Sense Strand Starting at position 365 of SEQ ID NO: 317888
gugaauucucucugcuaag

SEQ ID NO: 347588 - RNA, 19 nt, Artificial Sequence
  Description of Artificial Sequence: Synthetic oligonucleotide
  Antisense Strand to SEQ ID NO: 347587
cuuagcagagagaauucac

SEQ ID NO: 347589 - RNA, 19 nt, Artificial Sequence
  Description of Artificial Sequence: Synthetic oligonucleotide
  Sense Strand Starting at position 365 of SEQ ID NO: 317929
gccauuauuccggaagcca

SEQ ID NO: 347590 - RNA, 19 nt, Artificial Sequence
  Description of Artificial Sequence: Synthetic oligonucleotide
  Antisense Strand to SEQ ID NO: 347589
uggcuuccggaauaauggc

SEQ ID NO: 347591 - RNA, 19 nt, Artificial Sequence
  Description of Artificial Sequence: Synthetic oligonucleotide
  Sense Strand Starting at position 365 of SEQ ID NO: 318213
acuagccuucgaugagauu

SEQ ID NO: 347592 - RNA, 19 nt, Artificial Sequence
  Description of Artificial Sequence: Synthetic oligonucleotide
  Antisense Strand to SEQ ID NO: 347591
aaucucaucgaaggcuagu

SEQ ID NO: 347593 - RNA, 19 nt, Artificial Sequence
  Description of Artificial Sequence: Synthetic oligonucleotide
  Sense Strand Starting at position 365 of SEQ ID NO: 318239
guaauaacuccauguccca

SEQ ID NO: 347594 - RNA, 19 nt, Artificial Sequence
  Description of Artificial Sequence: Synthetic oligonucleotide
  Antisense Strand to SEQ ID NO: 347593
ugggacauggaguuauuac

SEQ ID NO: 347595 - RNA, 19 nt, Artificial Sequence
  Description of Artificial Sequence: Synthetic oligonucleotide
  Sense Strand Starting at position 365 of SEQ ID NO: 318308
uguggucuuccugaauuga

SEQ ID NO: 347596 - RNA, 19 nt, Artificial Sequence
  Description of Artificial Sequence: Synthetic oligonucleotide
  Antisense Strand to SEQ ID NO: 347595
ucaauucaggaagaccaca

SEQ ID NO: 347597 - RNA, 19 nt, Artificial Sequence
  Description of Artificial Sequence: Synthetic oligonucleotide
  Sense Strand Starting at position 365 of SEQ ID NO: 318355
ccauccagugauuacucua

SEQ ID NO: 347598 - RNA, 19 nt, Artificial Sequence
  Description of Artificial Sequence: Synthetic oligonucleotide
  Antisense Strand to SEQ ID NO: 347597
uagaguaaucacuggaugg

SEQ ID NO: 347599 - RNA, 19 nt, Artificial Sequence
  Description of Artificial Sequence: Synthetic oligonucleotide
  Sense Strand Starting at position 365 of SEQ ID NO: 318632
ggguguacgcccuauguaa

SEQ ID NO: 347600 - RNA, 19 nt, Artificial Sequence
  Description of Artificial Sequence: Synthetic oligonucleotide
  Antisense Strand to SEQ ID NO: 347599
uuacauagggcguacaccc

SEQ ID NO: 347601 - RNA, 19 nt, Artificial Sequence
  Description of Artificial Sequence: Synthetic oligonucleotide
  Sense Strand Starting at position 365 of SEQ ID NO: 318757
ucuagaaagucuuuagguu

SEQ ID NO: 347602 - RNA, 19 nt, Artificial Sequence
  Description of Artificial Sequence: Synthetic oligonucleotide
  Antisense Strand to SEQ ID NO: 347601
aaccuaaagacuuucuaga

SEQ ID NO: 347603 - RNA, 19 nt, Artificial Sequence
  Description of Artificial Sequence: Synthetic oligonucleotide
  Sense Strand Starting at position 365 of SEQ ID NO: 318758
cuagaaagucuuuagguuc

SEQ ID NO: 347604 - RNA, 19 nt, Artificial Sequence
  Description of Artificial Sequence: Synthetic oligonucleotide
  Antisense Strand to SEQ ID NO: 347603
gaaccuaaagacuuucuag

SEQ ID NO: 347605 - RNA, 19 nt, Artificial Sequence
  Description of Artificial Sequence: Synthetic oligonucleotide
  Sense Strand Starting at position 366 of SEQ ID NO: 315481
agucaacuacuaugagguu

SEQ ID NO: 347606 - RNA, 19 nt, Artificial Sequence
  Description of Artificial Sequence: Synthetic oligonucleotide
  Antisense Strand to SEQ ID NO: 347605
aaccucauaguaguugacu

SEQ ID NO: 347607 - RNA, 19 nt, Artificial Sequence
  Description of Artificial Sequence: Synthetic oligonucleotide
  Sense Strand Starting at position 366 of SEQ ID NO: 315697
agaccacacugggagaaua

SEQ ID NO: 347608 - RNA, 19 nt, Artificial Sequence
  Description of Artificial Sequence: Synthetic oligonucleotide
  Antisense Strand to SEQ ID NO: 347607
uauucucccaguguggucu

SEQ ID NO: 347609 - RNA, 19 nt, Artificial Sequence
  Description of Artificial Sequence: Synthetic oligonucleotide
  Sense Strand Starting at position 366 of SEQ ID NO: 315753
acuuucuuggucuaguuau

SEQ ID NO: 347610 - RNA, 19 nt, Artificial Sequence
  Description of Artificial Sequence: Synthetic oligonucleotide
  Antisense Strand to SEQ ID NO: 347609
auaacuagaccaagaaagu

SEQ ID NO: 347611 - RNA, 19 nt, Artificial Sequence
  Description of Artificial Sequence: Synthetic oligonucleotide
  Sense Strand Starting at position 366 of SEQ ID NO: 315783
ccgauauaaaggugugaau

SEQ ID NO: 347612 - RNA, 19 nt, Artificial Sequence
  Description of Artificial Sequence: Synthetic oligonucleotide
  Antisense Strand to SEQ ID NO: 347611
auucacaccuuuauaucgg

SEQ ID NO: 347613 - RNA, 19 nt, Artificial Sequence
  Description of Artificial Sequence: Synthetic oligonucleotide
  Sense Strand Starting at position 366 of SEQ ID NO: 315785
gauauaaaggugugaauca

SEQ ID NO: 347614 - RNA, 19 nt, Artificial Sequence
  Description of Artificial Sequence: Synthetic oligonucleotide
  Antisense Strand to SEQ ID NO: 347613
ugauucacaccuuuauauc

SEQ ID NO: 347615 - RNA, 19 nt, Artificial Sequence
  Description of Artificial Sequence: Synthetic oligonucleotide
  Sense Strand Starting at position 366 of SEQ ID NO: 315795
ugugaaucauaauccaguu

SEQ ID NO: 347616 - RNA, 19 nt, Artificial Sequence
  Description of Artificial Sequence: Synthetic oligonucleotide
  Antisense Strand to SEQ ID NO: 347615
aacuggauuaugauucaca

SEQ ID NO: 347617 - RNA, 19 nt, Artificial Sequence
  Description of Artificial Sequence: Synthetic oligonucleotide
  Sense Strand Starting at position 366 of SEQ ID NO: 315815
agaggugugcaucaguaac

SEQ ID NO: 347618 - RNA, 19 nt, Artificial Sequence
  Description of Artificial Sequence: Synthetic oligonucleotide
  Antisense Strand to SEQ ID NO: 347617
guuacugaugcacaccucu

SEQ ID NO: 347619 - RNA, 19 nt, Artificial Sequence
  Description of Artificial Sequence: Synthetic oligonucleotide
  Sense Strand Starting at position 366 of SEQ ID NO: 316022
gggucugcgaauggauaaa

SEQ ID NO: 347620 - RNA, 19 nt, Artificial Sequence
  Description of Artificial Sequence: Synthetic oligonucleotide
  Antisense Strand to SEQ ID NO: 347619
uuuauccauucgcagaccc

SEQ ID NO: 347621 - RNA, 19 nt, Artificial Sequence
  Description of Artificial Sequence: Synthetic oligonucleotide
  Sense Strand Starting at position 366 of SEQ ID NO: 316112
uccagacagucaucaauga

SEQ ID NO: 347622 - RNA, 19 nt, Artificial Sequence
  Description of Artificial Sequence: Synthetic oligonucleotide
  Antisense Strand to SEQ ID NO: 347621
ucauugaugacugucugga

SEQ ID NO: 347623 - RNA, 19 nt, Artificial Sequence
  Description of Artificial Sequence: Synthetic oligonucleotide
  Sense Strand Starting at position 366 of SEQ ID NO: 316116
gacagucaucaaugaaggu

SEQ ID NO: 347624 - RNA, 19 nt, Artificial Sequence
  Description of Artificial Sequence: Synthetic oligonucleotide
  Antisense Strand to SEQ ID NO: 347623
accuucauugaugacuguc

SEQ ID NO: 347625 - RNA, 19 nt, Artificial Sequence
  Description of Artificial Sequence: Synthetic oligonucleotide
  Sense Strand Starting at position 366 of SEQ ID NO: 316120
gucaucaaugaagguucua

SEQ ID NO: 347626 - RNA, 19 nt, Artificial Sequence
  Description of Artificial Sequence: Synthetic oligonucleotide
  Antisense Strand to SEQ ID NO: 347625
uagaaccuucauugaugac

SEQ ID NO: 347627 - RNA, 19 nt, Artificial Sequence
  Description of Artificial Sequence: Synthetic oligonucleotide
  Sense Strand Starting at position 366 of SEQ ID NO: 316283
ucaauaugguccucuaaug

SEQ ID NO: 347628 - RNA, 19 nt, Artificial Sequence
  Description of Artificial Sequence: Synthetic oligonucleotide
  Antisense Strand to SEQ ID NO: 347627
cauuagaggaccauauuga

SEQ ID NO: 347629 - RNA, 19 nt, Artificial Sequence
  Description of Artificial Sequence: Synthetic oligonucleotide
  Sense Strand Starting at position 366 of SEQ ID NO: 316345
augugcgucaucucgauua

SEQ ID NO: 347630 - RNA, 19 nt, Artificial Sequence
  Description of Artificial Sequence: Synthetic oligonucleotide
  Antisense Strand to SEQ ID NO: 347629
uaaucgagaugacgcacau

SEQ ID NO: 347631 - RNA, 19 nt, Artificial Sequence
  Description of Artificial Sequence: Synthetic oligonucleotide
  Sense Strand Starting at position 366 of SEQ ID NO: 316943
uaccgaaagauuggagguu

SEQ ID NO: 347632 - RNA, 19 nt, Artificial Sequence
  Description of Artificial Sequence: Synthetic oligonucleotide
  Antisense Strand to SEQ ID NO: 347631
aaccuccaaucuuucggua

SEQ ID NO: 347633 - RNA, 19 nt, Artificial Sequence
  Description of Artificial Sequence: Synthetic oligonucleotide
  Sense Strand Starting at position 366 of SEQ ID NO: 317350
ccgcaauucccgucacgga

SEQ ID NO: 347634 - RNA, 19 nt, Artificial Sequence
  Description of Artificial Sequence: Synthetic oligonucleotide
  Antisense Strand to SEQ ID NO: 347633
uccgugacgggaauugcgg

SEQ ID NO: 347635 - RNA, 19 nt, Artificial Sequence
  Description of Artificial Sequence: Synthetic oligonucleotide
  Sense Strand Starting at position 366 of SEQ ID NO: 317555
agggcuaaucucuaugagu

SEQ ID NO: 347636 - RNA, 19 nt, Artificial Sequence
  Description of Artificial Sequence: Synthetic oligonucleotide
  Antisense Strand to SEQ ID NO: 347635
acucauagagauuagcccu

SEQ ID NO: 347637 - RNA, 19 nt, Artificial Sequence
  Description of Artificial Sequence: Synthetic oligonucleotide
  Sense Strand Starting at position 366 of SEQ ID NO: 317557
ggcuaaucucuaugaguca

SEQ ID NO: 347638 - RNA, 19 nt, Artificial Sequence
  Description of Artificial Sequence: Synthetic oligonucleotide
  Antisense Strand to SEQ ID NO: 347637
ugacucauagagauuagcc

SEQ ID NO: 347639 - RNA, 19 nt, Artificial Sequence
  Description of Artificial Sequence: Synthetic oligonucleotide
  Sense Strand Starting at position 366 of SEQ ID NO: 317933
ugggaucaggcuugagaau

SEQ ID NO: 347640 - RNA, 19 nt, Artificial Sequence
  Description of Artificial Sequence: Synthetic oligonucleotide
  Antisense Strand to SEQ ID NO: 347639
auucucaagccugauccca

SEQ ID NO: 347641 - RNA, 19 nt, Artificial Sequence
  Description of Artificial Sequence: Synthetic oligonucleotide
  Sense Strand Starting at position 366 of SEQ ID NO: 318116
agguuaauugauggaguca

SEQ ID NO: 347642 - RNA, 19 nt, Artificial Sequence
  Description of Artificial Sequence: Synthetic oligonucleotide
  Antisense Strand to SEQ ID NO: 347641
ugacuccaucaauuaaccu

SEQ ID NO: 347643 - RNA, 19 nt, Artificial Sequence
  Description of Artificial Sequence: Synthetic oligonucleotide
  Sense Strand Starting at position 366 of SEQ ID NO: 318117
gguuaauugauggagucau

SEQ ID NO: 347644 - RNA, 19 nt, Artificial Sequence
  Description of Artificial Sequence: Synthetic oligonucleotide
  Antisense Strand to SEQ ID NO: 347643
augacuccaucaauuaacc

SEQ ID NO: 347645 - RNA, 19 nt, Artificial Sequence
  Description of Artificial Sequence: Synthetic oligonucleotide
  Sense Strand Starting at position 366 of SEQ ID NO: 318130
agucauguaccagaccgua

SEQ ID NO: 347646 - RNA, 19 nt, Artificial Sequence
  Description of Artificial Sequence: Synthetic oligonucleotide
  Antisense Strand to SEQ ID NO: 347645
uacggucugguacaugacu

SEQ ID NO: 347647 - RNA, 19 nt, Artificial Sequence
  Description of Artificial Sequence: Synthetic oligonucleotide
  Sense Strand Starting at position 366 of SEQ ID NO: 318133
cauguaccagaccguaaua

SEQ ID NO: 347648 - RNA, 19 nt, Artificial Sequence
  Description of Artificial Sequence: Synthetic oligonucleotide
  Antisense Strand to SEQ ID NO: 347647
uauuacggucugguacaug

SEQ ID NO: 347649 - RNA, 19 nt, Artificial Sequence
  Description of Artificial Sequence: Synthetic oligonucleotide
  Sense Strand Starting at position 366 of SEQ ID NO: 318145
cguaauaucuuccuaucag

SEQ ID NO: 347650 - RNA, 19 nt, Artificial Sequence
  Description of Artificial Sequence: Synthetic oligonucleotide
  Antisense Strand to SEQ ID NO: 347649
cugauaggaagauauuacg

SEQ ID NO: 347651 - RNA, 19 nt, Artificial Sequence
  Description of Artificial Sequence: Synthetic oligonucleotide
  Sense Strand Starting at position 366 of SEQ ID NO: 318239
guuggcuuucuggaagcaa

SEQ ID NO: 347652 - RNA, 19 nt, Artificial Sequence
  Description of Artificial Sequence: Synthetic oligonucleotide
  Antisense Strand to SEQ ID NO: 347651
uugcuuccagaaagccaac

SEQ ID NO: 347653 - RNA, 19 nt, Artificial Sequence
  Description of Artificial Sequence: Synthetic oligonucleotide
  Sense Strand Starting at position 366 of SEQ ID NO: 318462
uagcaagauuaggucuaau

SEQ ID NO: 347654 - RNA, 19 nt, Artificial Sequence
  Description of Artificial Sequence: Synthetic oligonucleotide
  Antisense Strand to SEQ ID NO: 347653
auuagaccuaaucuugcua

SEQ ID NO: 347655 - RNA, 19 nt, Artificial Sequence
  Description of Artificial Sequence: Synthetic oligonucleotide
  Sense Strand Starting at position 366 of SEQ ID NO: 318549
augaaaguauguguaacuu

SEQ ID NO: 347656 - RNA, 19 nt, Artificial Sequence
  Description of Artificial Sequence: Synthetic oligonucleotide
  Antisense Strand to SEQ ID NO: 347655
aaguuacacauacuuucau

SEQ ID NO: 347657 - RNA, 19 nt, Artificial Sequence
  Description of Artificial Sequence: Synthetic oligonucleotide
  Sense Strand Starting at position 366 of SEQ ID NO: 318588
guccuucuaucacuaugau

SEQ ID NO: 347658 - RNA, 19 nt, Artificial Sequence
  Description of Artificial Sequence: Synthetic oligonucleotide
  Antisense Strand to SEQ ID NO: 347657
aucauagugauagaaggac

SEQ ID NO: 347659 - RNA, 19 nt, Artificial Sequence
  Description of Artificial Sequence: Synthetic oligonucleotide
  Sense Strand Starting at position 366 of SEQ ID NO: 318591
cuucuaucacuaugauguu

SEQ ID NO: 347660 - RNA, 19 nt, Artificial Sequence
  Description of Artificial Sequence: Synthetic oligonucleotide
  Antisense Strand to SEQ ID NO: 347659
aacaucauagugauagaag

SEQ ID NO: 347661 - RNA, 19 nt, Artificial Sequence
  Description of Artificial Sequence: Synthetic oligonucleotide
  Sense Strand Starting at position 366 of SEQ ID NO: 318643
uugcuuagagguuaaugaa

SEQ ID NO: 347662 - RNA, 19 nt, Artificial Sequence
  Description of Artificial Sequence: Synthetic oligonucleotide
  Antisense Strand to SEQ ID NO: 347661
uucauuaaccucuaagcaa

SEQ ID NO: 347663 - RNA, 19 nt, Artificial Sequence
  Description of Artificial Sequence: Synthetic oligonucleotide
  Sense Strand Starting at position 366 of SEQ ID NO: 318747
gguuaagaauaccuggauu

SEQ ID NO: 347664 - RNA, 19 nt, Artificial Sequence
  Description of Artificial Sequence: Synthetic oligonucleotide
  Antisense Strand to SEQ ID NO: 347663
aauccagguauucuuaacc

SEQ ID NO: 347665 - RNA, 19 nt, Artificial Sequence
  Description of Artificial Sequence: Synthetic oligonucleotide
  Sense Strand Starting at position 366 of SEQ ID NO: 318973
ccacauuuguggucuucca

SEQ ID NO: 347666 - RNA, 19 nt, Artificial Sequence
  Description of Artificial Sequence: Synthetic oligonucleotide
  Antisense Strand to SEQ ID NO: 347665
uggaagaccacaaaugugg

SEQ ID NO: 347667 - RNA, 19 nt, Artificial Sequence
  Description of Artificial Sequence: Synthetic oligonucleotide
  Sense Strand Starting at position 366 of SEQ ID NO: 319024
cccaaauugagguguaaag

SEQ ID NO: 347668 - RNA, 19 nt, Artificial Sequence
  Description of Artificial Sequence: Synthetic oligonucleotide
  Antisense Strand to SEQ ID NO: 347667
cuuuacaccucaauuuggg

SEQ ID NO: 347669 - RNA, 19 nt, Artificial Sequence
  Description of Artificial Sequence: Synthetic oligonucleotide
  Sense Strand Starting at position 366 of SEQ ID NO: 319026
caaauugagguguaaaguu

SEQ ID NO: 347670 - RNA, 19 nt, Artificial Sequence
  Description of Artificial Sequence: Synthetic oligonucleotide
  Antisense Strand to SEQ ID NO: 347669
aacuuuacaccucaauuug

SEQ ID NO: 347671 - RNA, 19 nt, Artificial Sequence
  Description of Artificial Sequence: Synthetic oligonucleotide
  Sense Strand Starting at position 366 of SEQ ID NO: 319080
cuaaauaagugugcuuuaa

SEQ ID NO: 347672 - RNA, 19 nt, Artificial Sequence
  Description of Artificial Sequence: Synthetic oligonucleotide
  Antisense Strand to SEQ ID NO: 347671
uuaaagcacacuuauuuag

SEQ ID NO: 347673 - RNA, 19 nt, Artificial Sequence
  Description of Artificial Sequence: Synthetic oligonucleotide
  Sense Strand Starting at position 366 of SEQ ID NO: 319082
aaauaagugugcuuuaaag

SEQ ID NO: 347674 - RNA, 19 nt, Artificial Sequence
  Description of Artificial Sequence: Synthetic oligonucleotide
  Antisense Strand to SEQ ID NO: 347673
cuuuaaagcacacuuauuu

SEQ ID NO: 347675 - RNA, 19 nt, Artificial Sequence
  Description of Artificial Sequence: Synthetic oligonucleotide
  Sense Strand Starting at position 366 of SEQ ID NO: 319084
auaagugugcuuuaaagua

SEQ ID NO: 347676 - RNA, 19 nt, Artificial Sequence
  Description of Artificial Sequence: Synthetic oligonucleotide
  Antisense Strand to SEQ ID NO: 347675
uacuuuaaagcacacuuau

SEQ ID NO: 347677 - RNA, 19 nt, Artificial Sequence
  Description of Artificial Sequence: Synthetic oligonucleotide
  Sense Strand Starting at position 366 of SEQ ID NO: 319197
cuuucuuucuuaguagaug

SEQ ID NO: 347678 - RNA, 19 nt, Artificial Sequence
  Description of Artificial Sequence: Synthetic oligonucleotide
  Antisense Strand to SEQ ID NO: 347677
caucuacuaagaaagaaag

SEQ ID NO: 347679 - RNA, 19 nt, Artificial Sequence
  Description of Artificial Sequence: Synthetic oligonucleotide
  Sense Strand Starting at position 366 of SEQ ID NO: 319206
uuaguagauguacaugagu

SEQ ID NO: 347680 - RNA, 19 nt, Artificial Sequence
  Description of Artificial Sequence: Synthetic oligonucleotide
  Antisense Strand to SEQ ID NO: 347679
acucauguacaucuacuaa

SEQ ID NO: 347681 - RNA, 19 nt, Artificial Sequence
  Description of Artificial Sequence: Synthetic oligonucleotide
  Sense Strand Starting at position 366 of SEQ ID NO: 319208
aguagauguacaugaguau

SEQ ID NO: 347682 - RNA, 19 nt, Artificial Sequence
  Description of Artificial Sequence: Synthetic oligonucleotide
  Antisense Strand to SEQ ID NO: 347681
auacucauguacaucuacu

SEQ ID NO: 347683 - RNA, 19 nt, Artificial Sequence
  Description of Artificial Sequence: Synthetic oligonucleotide
  Sense Strand Starting at position 366 of SEQ ID NO: 319209
guagauguacaugaguauu

SEQ ID NO: 347684 - RNA, 19 nt, Artificial Sequence
  Description of Artificial Sequence: Synthetic oligonucleotide
  Antisense Strand to SEQ ID NO: 347683
aauacucauguacaucuac

SEQ ID NO: 347685 - RNA, 19 nt, Artificial Sequence
  Description of Artificial Sequence: Synthetic oligonucleotide
  Sense Strand Starting at position 367 of SEQ ID NO: 315277
guaagacaauugucauccu

SEQ ID NO: 347686 - RNA, 19 nt, Artificial Sequence
  Description of Artificial Sequence: Synthetic oligonucleotide
  Antisense Strand to SEQ ID NO: 347685
aggaugacaauugucuuac

SEQ ID NO: 347687 - RNA, 19 nt, Artificial Sequence
  Description of Artificial Sequence: Synthetic oligonucleotide
  Sense Strand Starting at position 367 of SEQ ID NO: 315287
ugucauccuugguuaauuu

SEQ ID NO: 347688 - RNA, 19 nt, Artificial Sequence
  Description of Artificial Sequence: Synthetic oligonucleotide
  Antisense Strand to SEQ ID NO: 347687
aaauuaaccaaggaugaca

SEQ ID NO: 347689 - RNA, 19 nt, Artificial Sequence
  Description of Artificial Sequence: Synthetic oligonucleotide
  Sense Strand Starting at position 367 of SEQ ID NO: 315455
gugguaaugcuugcccagu

SEQ ID NO: 347690 - RNA, 19 nt, Artificial Sequence
  Description of Artificial Sequence: Synthetic oligonucleotide
  Antisense Strand to SEQ ID NO: 347689
acugggcaagcauuaccac

SEQ ID NO: 347691 - RNA, 19 nt, Artificial Sequence
  Description of Artificial Sequence: Synthetic oligonucleotide
  Sense Strand Starting at position 367 of SEQ ID NO: 315612
aaggcaagugaaugucuaa

SEQ ID NO: 347692 - RNA, 19 nt, Artificial Sequence
  Description of Artificial Sequence: Synthetic oligonucleotide
  Antisense Strand to SEQ ID NO: 347691
uuagacauucacuugccuu

SEQ ID NO: 347693 - RNA, 19 nt, Artificial Sequence
  Description of Artificial Sequence: Synthetic oligonucleotide
  Sense Strand Starting at position 367 of SEQ ID NO: 315615
gcaagugaaugucuaauua

SEQ ID NO: 347694 - RNA, 19 nt, Artificial Sequence
  Description of Artificial Sequence: Synthetic oligonucleotide
  Antisense Strand to SEQ ID NO: 347693
uaauuagacauucacuugc

SEQ ID NO: 347695 - RNA, 19 nt, Artificial Sequence
  Description of Artificial Sequence: Synthetic oligonucleotide
  Sense Strand Starting at position 367 of SEQ ID NO: 315619
gugaaugucuaauuauccu

SEQ ID NO: 347696 - RNA, 19 nt, Artificial Sequence
  Description of Artificial Sequence: Synthetic oligonucleotide
  Antisense Strand to SEQ ID NO: 347695
aggauaauuagacauucac

SEQ ID NO: 347697 - RNA, 19 nt, Artificial Sequence
  Description of Artificial Sequence: Synthetic oligonucleotide
  Sense Strand Starting at position 367 of SEQ ID NO: 315635
ccuacuuaguaagugaaau

SEQ ID NO: 347698 - RNA, 19 nt, Artificial Sequence
  Description of Artificial Sequence: Synthetic oligonucleotide
  Antisense Strand to SEQ ID NO: 347697
auuucacuuacuaaguagg

SEQ ID NO: 347699 - RNA, 19 nt, Artificial Sequence
  Description of Artificial Sequence: Synthetic oligonucleotide
  Sense Strand Starting at position 367 of SEQ ID NO: 315697
gacugacucuaucugggua

SEQ ID NO: 347700 - RNA, 19 nt, Artificial Sequence
  Description of Artificial Sequence: Synthetic oligonucleotide
  Antisense Strand to SEQ ID NO: 347699
uacccagauagagucaguc

SEQ ID NO: 347701 - RNA, 19 nt, Artificial Sequence
  Description of Artificial Sequence: Synthetic oligonucleotide
  Sense Strand Starting at position 367 of SEQ ID NO: 315701
gacucuaucuggguagagu

SEQ ID NO: 347702 - RNA, 19 nt, Artificial Sequence
  Description of Artificial Sequence: Synthetic oligonucleotide
  Antisense Strand to SEQ ID NO: 347701
acucuacccagauagaguc

SEQ ID NO: 347703 - RNA, 19 nt, Artificial Sequence
  Description of Artificial Sequence: Synthetic oligonucleotide
  Sense Strand Starting at position 367 of SEQ ID NO: 315961
gauggaaucuacccuguaa

SEQ ID NO: 347704 - RNA, 19 nt, Artificial Sequence
  Description of Artificial Sequence: Synthetic oligonucleotide
  Antisense Strand to SEQ ID NO: 347703
uuacaggguagauuccauc

SEQ ID NO: 347705 - RNA, 19 nt, Artificial Sequence
  Description of Artificial Sequence: Synthetic oligonucleotide
  Sense Strand Starting at position 367 of SEQ ID NO: 316161
ccugguauauuaucuagaa

SEQ ID NO: 347706 - RNA, 19 nt, Artificial Sequence
  Description of Artificial Sequence: Synthetic oligonucleotide
  Antisense Strand to SEQ ID NO: 347705
uucuagauaauauaccagg

SEQ ID NO: 347707 - RNA, 19 nt, Artificial Sequence
  Description of Artificial Sequence: Synthetic oligonucleotide
  Sense Strand Starting at position 367 of SEQ ID NO: 316162
cugguauauuaucuagaag

SEQ ID NO: 347708 - RNA, 19 nt, Artificial Sequence
  Description of Artificial Sequence: Synthetic oligonucleotide
  Antisense Strand to SEQ ID NO: 347707
cuucuagauaauauaccag

SEQ ID NO: 347709 - RNA, 19 nt, Artificial Sequence
  Description of Artificial Sequence: Synthetic oligonucleotide
  Sense Strand Starting at position 367 of SEQ ID NO: 316281
agaaauguagacuggcaaa

SEQ ID NO: 347710 - RNA, 19 nt, Artificial Sequence
  Description of Artificial Sequence: Synthetic oligonucleotide
  Antisense Strand to SEQ ID NO: 347709
uuugccagucuacauuucu

SEQ ID NO: 347711 - RNA, 19 nt, Artificial Sequence
  Description of Artificial Sequence: Synthetic oligonucleotide
  Sense Strand Starting at position 367 of SEQ ID NO: 316345
ggaauagccucccuccuua

SEQ ID NO: 347712 - RNA, 19 nt, Artificial Sequence
  Description of Artificial Sequence: Synthetic oligonucleotide
  Antisense Strand to SEQ ID NO: 347711
uaaggagggaggcuauucc

SEQ ID NO: 347713 - RNA, 19 nt, Artificial Sequence
  Description of Artificial Sequence: Synthetic oligonucleotide
  Sense Strand Starting at position 367 of SEQ ID NO: 316572
ucaagaguccucuaauguu

SEQ ID NO: 347714 - RNA, 19 nt, Artificial Sequence
  Description of Artificial Sequence: Synthetic oligonucleotide
  Antisense Strand to SEQ ID NO: 347713
aacauuagaggacucuuga

SEQ ID NO: 347715 - RNA, 19 nt, Artificial Sequence
  Description of Artificial Sequence: Synthetic oligonucleotide
  Sense Strand Starting at position 367 of SEQ ID NO: 316578
guccucuaauguucuauuu

SEQ ID NO: 347716 - RNA, 19 nt, Artificial Sequence
  Description of Artificial Sequence: Synthetic oligonucleotide
  Antisense Strand to SEQ ID NO: 347715
aaauagaacauuagaggac

SEQ ID NO: 347717 - RNA, 19 nt, Artificial Sequence
  Description of Artificial Sequence: Synthetic oligonucleotide
  Sense Strand Starting at position 367 of SEQ ID NO: 316784
guauuuaaagugcgugauc

SEQ ID NO: 347718 - RNA, 19 nt, Artificial Sequence
  Description of Artificial Sequence: Synthetic oligonucleotide
  Antisense Strand to SEQ ID NO: 347717
gaucacgcacuuuaaauac

SEQ ID NO: 347719 - RNA, 19 nt, Artificial Sequence
  Description of Artificial Sequence: Synthetic oligonucleotide
  Sense Strand Starting at position 367 of SEQ ID NO: 316785
uauuuaaagugcgugauca

SEQ ID NO: 347720 - RNA, 19 nt, Artificial Sequence
  Description of Artificial Sequence: Synthetic oligonucleotide
  Antisense Strand to SEQ ID NO: 347719
ugaucacgcacuuuaaaua

SEQ ID NO: 347721 - RNA, 19 nt, Artificial Sequence
  Description of Artificial Sequence: Synthetic oligonucleotide
  Sense Strand Starting at position 367 of SEQ ID NO: 316786
auuuaaagugcgugaucau

SEQ ID NO: 347722 - RNA, 19 nt, Artificial Sequence
  Description of Artificial Sequence: Synthetic oligonucleotide
  Antisense Strand to SEQ ID NO: 347721
augaucacgcacuuuaaau

SEQ ID NO: 347723 - RNA, 19 nt, Artificial Sequence
  Description of Artificial Sequence: Synthetic oligonucleotide
  Sense Strand Starting at position 367 of SEQ ID NO: 316833
guucuuauuguagaccuaa

SEQ ID NO: 347724 - RNA, 19 nt, Artificial Sequence
  Description of Artificial Sequence: Synthetic oligonucleotide
  Antisense Strand to SEQ ID NO: 347723
uuaggucuacaauaagaac

SEQ ID NO: 347725 - RNA, 19 nt, Artificial Sequence
  Description of Artificial Sequence: Synthetic oligonucleotide
  Sense Strand Starting at position 367 of SEQ ID NO: 316877
accaguauugcagacccau

SEQ ID NO: 347726 - RNA, 19 nt, Artificial Sequence
  Description of Artificial Sequence: Synthetic oligonucleotide
  Antisense Strand to SEQ ID NO: 347725
augggucugcaauacuggu

SEQ ID NO: 347727 - RNA, 19 nt, Artificial Sequence
  Description of Artificial Sequence: Synthetic oligonucleotide
  Sense Strand Starting at position 367 of SEQ ID NO: 316953
gaugaauccgcaggcaaga

SEQ ID NO: 347728 - RNA, 19 nt, Artificial Sequence
  Description of Artificial Sequence: Synthetic oligonucleotide
  Antisense Strand to SEQ ID NO: 347727
ucuugccugcggauucauc

SEQ ID NO: 347729 - RNA, 19 nt, Artificial Sequence
  Description of Artificial Sequence: Synthetic oligonucleotide
  Sense Strand Starting at position 367 of SEQ ID NO: 316955
ugaauccgcaggcaagaau

SEQ ID NO: 347730 - RNA, 19 nt, Artificial Sequence
  Description of Artificial Sequence: Synthetic oligonucleotide
  Antisense Strand to SEQ ID NO: 347729
auucuugccugcggauuca

SEQ ID NO: 347731 - RNA, 19 nt, Artificial Sequence
  Description of Artificial Sequence: Synthetic oligonucleotide
  Sense Strand Starting at position 367 of SEQ ID NO: 317118
guaguucucaaaggcaaag

SEQ ID NO: 347732 - RNA, 19 nt, Artificial Sequence
  Description of Artificial Sequence: Synthetic oligonucleotide
  Antisense Strand to SEQ ID NO: 347731
cuuugccuuugagaacuac

SEQ ID NO: 347733 - RNA, 19 nt, Artificial Sequence
  Description of Artificial Sequence: Synthetic oligonucleotide
  Sense Strand Starting at position 367 of SEQ ID NO: 317884
gaagauggucgccaagcaa

SEQ ID NO: 347734 - RNA, 19 nt, Artificial Sequence
  Description of Artificial Sequence: Synthetic oligonucleotide
  Antisense Strand to SEQ ID NO: 347733
uugcuuggcgaccaucuuc

SEQ ID NO: 347735 - RNA, 19 nt, Artificial Sequence
  Description of Artificial Sequence: Synthetic oligonucleotide
  Sense Strand Starting at position 367 of SEQ ID NO: 317901
aaaggauccguauggccaa

SEQ ID NO: 347736 - RNA, 19 nt, Artificial Sequence
  Description of Artificial Sequence: Synthetic oligonucleotide
  Antisense Strand to SEQ ID NO: 347735
uuggccauacggauccuuu

SEQ ID NO: 347737 - RNA, 19 nt, Artificial Sequence
  Description of Artificial Sequence: Synthetic oligonucleotide
  Sense Strand Starting at position 367 of SEQ ID NO: 318388
cggucaguagugaguccua

SEQ ID NO: 347738 - RNA, 19 nt, Artificial Sequence
  Description of Artificial Sequence: Synthetic oligonucleotide
  Antisense Strand to SEQ ID NO: 347737
uaggacucacuacugaccg

SEQ ID NO: 347739 - RNA, 19 nt, Artificial Sequence
  Description of Artificial Sequence: Synthetic oligonucleotide
  Sense Strand Starting at position 367 of SEQ ID NO: 318429
ugccgaggacuccacauaa

SEQ ID NO: 347740 - RNA, 19 nt, Artificial Sequence
  Description of Artificial Sequence: Synthetic oligonucleotide
  Antisense Strand to SEQ ID NO: 347739
uuauguggaguccucggca

SEQ ID NO: 347741 - RNA, 19 nt, Artificial Sequence
  Description of Artificial Sequence: Synthetic oligonucleotide
  Sense Strand Starting at position 367 of SEQ ID NO: 318494
gguggugcuccagaaacuu

SEQ ID NO: 347742 - RNA, 19 nt, Artificial Sequence
  Description of Artificial Sequence: Synthetic oligonucleotide
  Antisense Strand to SEQ ID NO: 347741
aaguuucuggagcaccacc

SEQ ID NO: 347743 - RNA, 19 nt, Artificial Sequence
  Description of Artificial Sequence: Synthetic oligonucleotide
  Sense Strand Starting at position 367 of SEQ ID NO: 318583
aaauguuaagaccggacaa

SEQ ID NO: 347744 - RNA, 19 nt, Artificial Sequence
  Description of Artificial Sequence: Synthetic oligonucleotide
  Antisense Strand to SEQ ID NO: 347743
uuguccggucuuaacauuu

SEQ ID NO: 347745 - RNA, 19 nt, Artificial Sequence
  Description of Artificial Sequence: Synthetic oligonucleotide
  Sense Strand Starting at position 367 of SEQ ID NO: 318631
uuguaacuccauuaucagu

SEQ ID NO: 347746 - RNA, 19 nt, Artificial Sequence
  Description of Artificial Sequence: Synthetic oligonucleotide
  Antisense Strand to SEQ ID NO: 347745
acugauaauggaguuacaa

SEQ ID NO: 347747 - RNA, 19 nt, Artificial Sequence
  Description of Artificial Sequence: Synthetic oligonucleotide
  Sense Strand Starting at position 367 of SEQ ID NO: 318641
auuaucagucuuugcaaag

SEQ ID NO: 347748 - RNA, 19 nt, Artificial Sequence
  Description of Artificial Sequence: Synthetic oligonucleotide
  Antisense Strand to SEQ ID NO: 347747
cuuugcaaagacugauaau

SEQ ID NO: 347749 - RNA, 19 nt, Artificial Sequence
  Description of Artificial Sequence: Synthetic oligonucleotide
  Sense Strand Starting at position 367 of SEQ ID NO: 318642
uuaucagucuuugcaaaga

SEQ ID NO: 347750 - RNA, 19 nt, Artificial Sequence
  Description of Artificial Sequence: Synthetic oligonucleotide
  Antisense Strand to SEQ ID NO: 347749
ucuuugcaaagacugauaa

SEQ ID NO: 347751 - RNA, 19 nt, Artificial Sequence
  Description of Artificial Sequence: Synthetic oligonucleotide
  Sense Strand Starting at position 367 of SEQ ID NO: 318710
agaaucuaaugucuuaaug

SEQ ID NO: 347752 - RNA, 19 nt, Artificial Sequence
  Description of Artificial Sequence: Synthetic oligonucleotide
  Antisense Strand to SEQ ID NO: 347751
cauuaagacauuagauucu

SEQ ID NO: 347753 - RNA, 19 nt, Artificial Sequence
  Description of Artificial Sequence: Synthetic oligonucleotide
  Sense Strand Starting at position 367 of SEQ ID NO: 319027
ugagauuucuguuuaacgu

SEQ ID NO: 347754 - RNA, 19 nt, Artificial Sequence
  Description of Artificial Sequence: Synthetic oligonucleotide
  Antisense Strand to SEQ ID NO: 347753
acguuaaacagaaaucuca

SEQ ID NO: 347755 - RNA, 19 nt, Artificial Sequence
  Description of Artificial Sequence: Synthetic oligonucleotide
  Sense Strand Starting at position 367 of SEQ ID NO: 319075
auuggaagcuuuccugaua

SEQ ID NO: 347756 - RNA, 19 nt, Artificial Sequence
  Description of Artificial Sequence: Synthetic oligonucleotide
  Antisense Strand to SEQ ID NO: 347755
uaucaggaaagcuuccaau

SEQ ID NO: 347757 - RNA, 19 nt, Artificial Sequence
  Description of Artificial Sequence: Synthetic oligonucleotide
  Sense Strand Starting at position 367 of SEQ ID NO: 319076
uuggaagcuuuccugauaa

SEQ ID NO: 347758 - RNA, 19 nt, Artificial Sequence
  Description of Artificial Sequence: Synthetic oligonucleotide
  Antisense Strand to SEQ ID NO: 347757
uuaucaggaaagcuuccaa

SEQ ID NO: 347759 - RNA, 19 nt, Artificial Sequence
  Description of Artificial Sequence: Synthetic oligonucleotide
  Sense Strand Starting at position 367 of SEQ ID NO: 319104
agccaagcaguuuauauaa

SEQ ID NO: 347760 - RNA, 19 nt, Artificial Sequence
  Description of Artificial Sequence: Synthetic oligonucleotide
  Antisense Strand to SEQ ID NO: 347759
uuauauaaacugcuuggcu

SEQ ID NO: 347761 - RNA, 19 nt, Artificial Sequence
  Description of Artificial Sequence: Synthetic oligonucleotide
  Sense Strand Starting at position 367 of SEQ ID NO: 319156
ugaggaaacaugcaugugu

SEQ ID NO: 347762 - RNA, 19 nt, Artificial Sequence
  Description of Artificial Sequence: Synthetic oligonucleotide
  Antisense Strand to SEQ ID NO: 347761
acacaugcauguuuccuca

SEQ ID NO: 347763 - RNA, 19 nt, Artificial Sequence
  Description of Artificial Sequence: Synthetic oligonucleotide
  Sense Strand Starting at position 367 of SEQ ID NO: 319158
aggaaacaugcauguguua

SEQ ID NO: 347764 - RNA, 19 nt, Artificial Sequence
  Description of Artificial Sequence: Synthetic oligonucleotide
  Antisense Strand to SEQ ID NO: 347763
uaacacaugcauguuuccu

SEQ ID NO: 347765 - RNA, 19 nt, Artificial Sequence
  Description of Artificial Sequence: Synthetic oligonucleotide
  Sense Strand Starting at position 368 of SEQ ID NO: 315778
acagguuccugccuuugau

SEQ ID NO: 347766 - RNA, 19 nt, Artificial Sequence
  Description of Artificial Sequence: Synthetic oligonucleotide
  Antisense Strand to SEQ ID NO: 347765
aucaaaggcaggaaccugu

SEQ ID NO: 347767 - RNA, 19 nt, Artificial Sequence
  Description of Artificial Sequence: Synthetic oligonucleotide
  Sense Strand Starting at position 368 of SEQ ID NO: 315817
cugagucugagacauugca

SEQ ID NO: 347768 - RNA, 19 nt, Artificial Sequence
  Description of Artificial Sequence: Synthetic oligonucleotide
  Antisense Strand to SEQ ID NO: 347767
ugcaaugucucagacucag

SEQ ID NO: 347769 - RNA, 19 nt, Artificial Sequence
  Description of Artificial Sequence: Synthetic oligonucleotide
  Sense Strand Starting at position 368 of SEQ ID NO: 315877
gacacagagcugugacaga

SEQ ID NO: 347770 - RNA, 19 nt, Artificial Sequence
  Description of Artificial Sequence: Synthetic oligonucleotide
  Antisense Strand to SEQ ID NO: 347769
ucugucacagcucuguguc

SEQ ID NO: 347771 - RNA, 19 nt, Artificial Sequence
  Description of Artificial Sequence: Synthetic oligonucleotide
  Sense Strand Starting at position 368 of SEQ ID NO: 316208
uuguccuuucgacagauag

SEQ ID NO: 347772 - RNA, 19 nt, Artificial Sequence
  Description of Artificial Sequence: Synthetic oligonucleotide
  Antisense Strand to SEQ ID NO: 347771
cuaucugucgaaaggacaa

SEQ ID NO: 347773 - RNA, 19 nt, Artificial Sequence
  Description of Artificial Sequence: Synthetic oligonucleotide
  Sense Strand Starting at position 368 of SEQ ID NO: 316210
guccuuucgacagauagca

SEQ ID NO: 347774 - RNA, 19 nt, Artificial Sequence
  Description of Artificial Sequence: Synthetic oligonucleotide
  Antisense Strand to SEQ ID NO: 347773
ugcuaucugucgaaaggac

SEQ ID NO: 347775 - RNA, 19 nt, Artificial Sequence
  Description of Artificial Sequence: Synthetic oligonucleotide
  Sense Strand Starting at position 368 of SEQ ID NO: 316218
gacagauagcaccggcuau

SEQ ID NO: 347776 - RNA, 19 nt, Artificial Sequence
  Description of Artificial Sequence: Synthetic oligonucleotide
  Antisense Strand to SEQ ID NO: 347775
auagccggugcuaucuguc

SEQ ID NO: 347777 - RNA, 19 nt, Artificial Sequence
  Description of Artificial Sequence: Synthetic oligonucleotide
  Sense Strand Starting at position 368 of SEQ ID NO: 316222
gauagcaccggcuaucauu

SEQ ID NO: 347778 - RNA, 19 nt, Artificial Sequence
  Description of Artificial Sequence: Synthetic oligonucleotide
  Antisense Strand to SEQ ID NO: 347777
aaugauagccggugcuauc

SEQ ID NO: 347779 - RNA, 19 nt, Artificial Sequence
  Description of Artificial Sequence: Synthetic oligonucleotide
  Sense Strand Starting at position 368 of SEQ ID NO: 316468
gguggacagcauuacgaau

SEQ ID NO: 347780 - RNA, 19 nt, Artificial Sequence
  Description of Artificial Sequence: Synthetic oligonucleotide
  Antisense Strand to SEQ ID NO: 347779
auucguaaugcuguccacc

SEQ ID NO: 347781 - RNA, 19 nt, Artificial Sequence
  Description of Artificial Sequence: Synthetic oligonucleotide
  Sense Strand Starting at position 368 of SEQ ID NO: 317237
uguaaucgcccagcaguuu

SEQ ID NO: 347782 - RNA, 19 nt, Artificial Sequence
  Description of Artificial Sequence: Synthetic oligonucleotide
  Antisense Strand to SEQ ID NO: 347781
aaacugcugggcgauuaca

SEQ ID NO: 347783 - RNA, 19 nt, Artificial Sequence
  Description of Artificial Sequence: Synthetic oligonucleotide
  Sense Strand Starting at position 368 of SEQ ID NO: 317265
gcgcaugugaaauauguag

SEQ ID NO: 347784 - RNA, 19 nt, Artificial Sequence
  Description of Artificial Sequence: Synthetic oligonucleotide
  Antisense Strand to SEQ ID NO: 347783
cuacauauuucacaugcgc

SEQ ID NO: 347785 - RNA, 19 nt, Artificial Sequence
  Description of Artificial Sequence: Synthetic oligonucleotide
  Sense Strand Starting at position 368 of SEQ ID NO: 317412
ggagaccaguaauuccauu

SEQ ID NO: 347786 - RNA, 19 nt, Artificial Sequence
  Description of Artificial Sequence: Synthetic oligonucleotide
  Antisense Strand to SEQ ID NO: 347785
aauggaauuacuggucucc

SEQ ID NO: 347787 - RNA, 19 nt, Artificial Sequence
  Description of Artificial Sequence: Synthetic oligonucleotide
  Sense Strand Starting at position 368 of SEQ ID NO: 317497
agcaaacguuucuugaacu

SEQ ID NO: 347788 - RNA, 19 nt, Artificial Sequence
  Description of Artificial Sequence: Synthetic oligonucleotide
  Antisense Strand to SEQ ID NO: 347787
aguucaagaaacguuugcu

SEQ ID NO: 347789 - RNA, 19 nt, Artificial Sequence
  Description of Artificial Sequence: Synthetic oligonucleotide
  Sense Strand Starting at position 368 of SEQ ID NO: 317528
aaggaaguuuacccagcua

SEQ ID NO: 347790 - RNA, 19 nt, Artificial Sequence
  Description of Artificial Sequence: Synthetic oligonucleotide
  Antisense Strand to SEQ ID NO: 347789
uagcuggguaaacuuccuu

SEQ ID NO: 347791 - RNA, 19 nt, Artificial Sequence
  Description of Artificial Sequence: Synthetic oligonucleotide
  Sense Strand Starting at position 368 of SEQ ID NO: 317587
ugcagaguuccacaaucuu

SEQ ID NO: 347792 - RNA, 19 nt, Artificial Sequence
  Description of Artificial Sequence: Synthetic oligonucleotide
  Antisense Strand to SEQ ID NO: 347791
aagauuguggaacucugca

SEQ ID NO: 347793 - RNA, 19 nt, Artificial Sequence
  Description of Artificial Sequence: Synthetic oligonucleotide
  Sense Strand Starting at position 368 of SEQ ID NO: 317672
gccuccugugucuuaagca

SEQ ID NO: 347794 - RNA, 19 nt, Artificial Sequence
  Description of Artificial Sequence: Synthetic oligonucleotide
  Antisense Strand to SEQ ID NO: 347793
ugcuuaagacacaggaggc

SEQ ID NO: 347795 - RNA, 19 nt, Artificial Sequence
  Description of Artificial Sequence: Synthetic oligonucleotide
  Sense Strand Starting at position 368 of SEQ ID NO: 317679
gugucuuaagcagagugga

SEQ ID NO: 347796 - RNA, 19 nt, Artificial Sequence
  Description of Artificial Sequence: Synthetic oligonucleotide
  Antisense Strand to SEQ ID NO: 347795
uccacucugcuuaagacac

SEQ ID NO: 347797 - RNA, 19 nt, Artificial Sequence
  Description of Artificial Sequence: Synthetic oligonucleotide
  Sense Strand Starting at position 368 of SEQ ID NO: 317723
guaaguuguacuggaguua

SEQ ID NO: 347798 - RNA, 19 nt, Artificial Sequence
  Description of Artificial Sequence: Synthetic oligonucleotide
  Antisense Strand to SEQ ID NO: 347797
uaacuccaguacaacuuac

SEQ ID NO: 347799 - RNA, 19 nt, Artificial Sequence
  Description of Artificial Sequence: Synthetic oligonucleotide
  Sense Strand Starting at position 368 of SEQ ID NO: 317724
uaaguuguacuggaguuaa

SEQ ID NO: 347800 - RNA, 19 nt, Artificial Sequence
  Description of Artificial Sequence: Synthetic oligonucleotide
  Antisense Strand to SEQ ID NO: 347799
uuaacuccaguacaacuua

SEQ ID NO: 347801 - RNA, 19 nt, Artificial Sequence
  Description of Artificial Sequence: Synthetic oligonucleotide
  Sense Strand Starting at position 368 of SEQ ID NO: 317735
ggaguuaagcaguaagcuu

SEQ ID NO: 347802 - RNA, 19 nt, Artificial Sequence
  Description of Artificial Sequence: Synthetic oligonucleotide
  Antisense Strand to SEQ ID NO: 347801
aagcuuacugcuuaacucc

SEQ ID NO: 347803 - RNA, 19 nt, Artificial Sequence
  Description of Artificial Sequence: Synthetic oligonucleotide
  Sense Strand Starting at position 368 of SEQ ID NO: 317748
aagcuuucugggcagagga

SEQ ID NO: 347804 - RNA, 19 nt, Artificial Sequence
  Description of Artificial Sequence: Synthetic oligonucleotide
  Antisense Strand to SEQ ID NO: 347803
uccucugcccagaaagcuu

SEQ ID NO: 347805 - RNA, 19 nt, Artificial Sequence
  Description of Artificial Sequence: Synthetic oligonucleotide
  Sense Strand Starting at position 368 of SEQ ID NO: 318128
gaccgaggaguuugucauu

SEQ ID NO: 347806 - RNA, 19 nt, Artificial Sequence
  Description of Artificial Sequence: Synthetic oligonucleotide
  Antisense Strand to SEQ ID NO: 347805
aaugacaaacuccucgguc

SEQ ID NO: 347807 - RNA, 19 nt, Artificial Sequence
  Description of Artificial Sequence: Synthetic oligonucleotide
  Sense Strand Starting at position 368 of SEQ ID NO: 318141
gucauuucuugccucguua

SEQ ID NO: 347808 - RNA, 19 nt, Artificial Sequence
  Description of Artificial Sequence: Synthetic oligonucleotide
  Antisense Strand to SEQ ID NO: 347807
uaacgaggcaagaaaugac

SEQ ID NO: 347809 - RNA, 19 nt, Artificial Sequence
  Description of Artificial Sequence: Synthetic oligonucleotide
  Sense Strand Starting at position 368 of SEQ ID NO: 318237
augaaugcacguuguagaa

SEQ ID NO: 347810 - RNA, 19 nt, Artificial Sequence
  Description of Artificial Sequence: Synthetic oligonucleotide
  Antisense Strand to SEQ ID NO: 347809
uucuacaacgugcauucau

SEQ ID NO: 347811 - RNA, 19 nt, Artificial Sequence
  Description of Artificial Sequence: Synthetic oligonucleotide
  Sense Strand Starting at position 368 of SEQ ID NO: 318370
gguguuuggguauggaaag

SEQ ID NO: 347812 - RNA, 19 nt, Artificial Sequence
  Description of Artificial Sequence: Synthetic oligonucleotide
  Antisense Strand to SEQ ID NO: 347811
cuuuccauacccaaacacc

SEQ ID NO: 347813 - RNA, 19 nt, Artificial Sequence
  Description of Artificial Sequence: Synthetic oligonucleotide
  Sense Strand Starting at position 368 of SEQ ID NO: 318461
ccgaaaggcauuugugcuu

SEQ ID NO: 347814 - RNA, 19 nt, Artificial Sequence
  Description of Artificial Sequence: Synthetic oligonucleotide
  Antisense Strand to SEQ ID NO: 347813
aagcacaaaugccuuucgg

SEQ ID NO: 347815 - RNA, 19 nt, Artificial Sequence
  Description of Artificial Sequence: Synthetic oligonucleotide
  Sense Strand Starting at position 368 of SEQ ID NO: 318466
aggcauuugugcuuauggu

SEQ ID NO: 347816 - RNA, 19 nt, Artificial Sequence
  Description of Artificial Sequence: Synthetic oligonucleotide
  Antisense Strand to SEQ ID NO: 347815
accauaagcacaaaugccu

SEQ ID NO: 347817 - RNA, 19 nt, Artificial Sequence
  Description of Artificial Sequence: Synthetic oligonucleotide
  Sense Strand Starting at position 368 of SEQ ID NO: 318467
ggcauuugugcuuauggua

SEQ ID NO: 347818 - RNA, 19 nt, Artificial Sequence
  Description of Artificial Sequence: Synthetic oligonucleotide
  Antisense Strand to SEQ ID NO: 347817
uaccauaagcacaaaugcc

SEQ ID NO: 347819 - RNA, 19 nt, Artificial Sequence
  Description of Artificial Sequence: Synthetic oligonucleotide
  Sense Strand Starting at position 368 of SEQ ID NO: 318480
augguaaauccaggucuua

SEQ ID NO: 347820 - RNA, 19 nt, Artificial Sequence
  Description of Artificial Sequence: Synthetic oligonucleotide
  Antisense Strand to SEQ ID NO: 347819
uaagaccuggauuuaccau

SEQ ID NO: 347821 - RNA, 19 nt, Artificial Sequence
  Description of Artificial Sequence: Synthetic oligonucleotide
  Sense Strand Starting at position 368 of SEQ ID NO: 318511
cugguagcuauauggauau

SEQ ID NO: 347822 - RNA, 19 nt, Artificial Sequence
  Description of Artificial Sequence: Synthetic oligonucleotide
  Antisense Strand to SEQ ID NO: 347821
auauccauauagcuaccag

SEQ ID NO: 347823 - RNA, 19 nt, Artificial Sequence
  Description of Artificial Sequence: Synthetic oligonucleotide
  Sense Strand Starting at position 368 of SEQ ID NO: 318600
ugaaauauauuggaaacca

SEQ ID NO: 347824 - RNA, 19 nt, Artificial Sequence
  Description of Artificial Sequence: Synthetic oligonucleotide
  Antisense Strand to SEQ ID NO: 347823
ugguuuccaauauauuuca

SEQ ID NO: 347825 - RNA, 19 nt, Artificial Sequence
  Description of Artificial Sequence: Synthetic oligonucleotide
  Sense Strand Starting at position 368 of SEQ ID NO: 318761
gaacuagagcuagagugua

SEQ ID NO: 347826 - RNA, 19 nt, Artificial Sequence
  Description of Artificial Sequence: Synthetic oligonucleotide
  Antisense Strand to SEQ ID NO: 347825
uacacucuagcucuaguuc

SEQ ID NO: 347827 - RNA, 19 nt, Artificial Sequence
  Description of Artificial Sequence: Synthetic oligonucleotide
  Sense Strand Starting at position 368 of SEQ ID NO: 318771
uagaguguaugccuacaua

SEQ ID NO: 347828 - RNA, 19 nt, Artificial Sequence
  Description of Artificial Sequence: Synthetic oligonucleotide
  Antisense Strand to SEQ ID NO: 347827
uauguaggcauacacucua

SEQ ID NO: 347829 - RNA, 19 nt, Artificial Sequence
  Description of Artificial Sequence: Synthetic oligonucleotide
  Sense Strand Starting at position 368 of SEQ ID NO: 318928
gcccuaguuggauagcuuu

SEQ ID NO: 347830 - RNA, 19 nt, Artificial Sequence
  Description of Artificial Sequence: Synthetic oligonucleotide
  Antisense Strand to SEQ ID NO: 347829
aaagcuauccaacuagggc

SEQ ID NO: 347831 - RNA, 19 nt, Artificial Sequence
  Description of Artificial Sequence: Synthetic oligonucleotide
  Sense Strand Starting at position 368 of SEQ ID NO: 318958
ccucuuuaugccuggacuu

SEQ ID NO: 347832 - RNA, 19 nt, Artificial Sequence
  Description of Artificial Sequence: Synthetic oligonucleotide
  Antisense Strand to SEQ ID NO: 347831
aaguccaggcauaaagagg

SEQ ID NO: 347833 - RNA, 19 nt, Artificial Sequence
  Description of Artificial Sequence: Synthetic oligonucleotide
  Sense Strand Starting at position 368 of SEQ ID NO: 319087
gguaauguauuagcuauuu

SEQ ID NO: 347834 - RNA, 19 nt, Artificial Sequence
  Description of Artificial Sequence: Synthetic oligonucleotide
  Antisense Strand to SEQ ID NO: 347833
aaauagcuaauacauuacc

SEQ ID NO: 347835 - RNA, 19 nt, Artificial Sequence
  Description of Artificial Sequence: Synthetic oligonucleotide
  Sense Strand Starting at position 368 of SEQ ID NO: 319143
uuaacauaugugggaaagu

SEQ ID NO: 347836 - RNA, 19 nt, Artificial Sequence
  Description of Artificial Sequence: Synthetic oligonucleotide
  Antisense Strand to SEQ ID NO: 347835
acuuucccacauauguuaa

SEQ ID NO: 347837 - RNA, 19 nt, Artificial Sequence
  Description of Artificial Sequence: Synthetic oligonucleotide
  Sense Strand Starting at position 368 of SEQ ID NO: 319195
uauuccauagcacgaguau

SEQ ID NO: 347838 - RNA, 19 nt, Artificial Sequence
  Description of Artificial Sequence: Synthetic oligonucleotide
  Antisense Strand to SEQ ID NO: 347837
auacucgugcuauggaaua

SEQ ID NO: 347839 - RNA, 19 nt, Artificial Sequence
  Description of Artificial Sequence: Synthetic oligonucleotide
  Sense Strand Starting at position 368 of SEQ ID NO: 319196
auuccauagcacgaguaua

SEQ ID NO: 347840 - RNA, 19 nt, Artificial Sequence
  Description of Artificial Sequence: Synthetic oligonucleotide
  Antisense Strand to SEQ ID NO: 347839
uauacucgugcuauggaau

SEQ ID NO: 347841 - RNA, 19 nt, Artificial Sequence
  Description of Artificial Sequence: Synthetic oligonucleotide
  Sense Strand Starting at position 368 of SEQ ID NO: 319207
cgaguauaccauuguuuau

SEQ ID NO: 347842 - RNA, 19 nt, Artificial Sequence
  Description of Artificial Sequence: Synthetic oligonucleotide
  Antisense Strand to SEQ ID NO: 347841
auaaacaaugguauacucg

SEQ ID NO: 347843 - RNA, 19 nt, Artificial Sequence
  Description of Artificial Sequence: Synthetic oligonucleotide
  Sense Strand Starting at position 368 of SEQ ID NO: 319210
guauaccauuguuuaucga

SEQ ID NO: 347844 - RNA, 19 nt, Artificial Sequence
  Description of Artificial Sequence: Synthetic oligonucleotide
  Antisense Strand to SEQ ID NO: 347843
ucgauaaacaaugguauac

SEQ ID NO: 347845 - RNA, 19 nt, Artificial Sequence
  Description of Artificial Sequence: Synthetic oligonucleotide
  Sense Strand Starting at position 369 of SEQ ID NO: 315268
gguauugugccuuauauaa

SEQ ID NO: 347846 - RNA, 19 nt, Artificial Sequence
  Description of Artificial Sequence: Synthetic oligonucleotide
  Antisense Strand to SEQ ID NO: 347845
uuauauaaggcacaauacc

SEQ ID NO: 347847 - RNA, 19 nt, Artificial Sequence
  Description of Artificial Sequence: Synthetic oligonucleotide
  Sense Strand Starting at position 369 of SEQ ID NO: 315304
ccuacagcuuuauuaggaa

SEQ ID NO: 347848 - RNA, 19 nt, Artificial Sequence
  Description of Artificial Sequence: Synthetic oligonucleotide
  Antisense Strand to SEQ ID NO: 347847
uuccuaauaaagcuguagg

SEQ ID NO: 347849 - RNA, 19 nt, Artificial Sequence
  Description of Artificial Sequence: Synthetic oligonucleotide
  Sense Strand Starting at position 369 of SEQ ID NO: 315911
guauuccauuuggaacauu

SEQ ID NO: 347850 - RNA, 19 nt, Artificial Sequence
  Description of Artificial Sequence: Synthetic oligonucleotide
  Antisense Strand to SEQ ID NO: 347849
aauguuccaaauggaauac

SEQ ID NO: 347851 - RNA, 19 nt, Artificial Sequence
  Description of Artificial Sequence: Synthetic oligonucleotide
  Sense Strand Starting at position 369 of SEQ ID NO: 315922
ggaacauuaugcccaaaua

SEQ ID NO: 347852 - RNA, 19 nt, Artificial Sequence
  Description of Artificial Sequence: Synthetic oligonucleotide
  Antisense Strand to SEQ ID NO: 347851
uauuugggcauaauguucc

SEQ ID NO: 347853 - RNA, 19 nt, Artificial Sequence
  Description of Artificial Sequence: Synthetic oligonucleotide
  Sense Strand Starting at position 369 of SEQ ID NO: 315938
auaaucaagugaucagcaa

SEQ ID NO: 347854 - RNA, 19 nt, Artificial Sequence
  Description of Artificial Sequence: Synthetic oligonucleotide
  Antisense Strand to SEQ ID NO: 347853
uugcugaucacuugauuau

SEQ ID NO: 347855 - RNA, 19 nt, Artificial Sequence
  Description of Artificial Sequence: Synthetic oligonucleotide
  Sense Strand Starting at position 369 of SEQ ID NO: 316322
guuucuuaccucgaugaca

SEQ ID NO: 347856 - RNA, 19 nt, Artificial Sequence
  Description of Artificial Sequence: Synthetic oligonucleotide
  Antisense Strand to SEQ ID NO: 347855
ugucaucgagguaagaaac

SEQ ID NO: 347857 - RNA, 19 nt, Artificial Sequence
  Description of Artificial Sequence: Synthetic oligonucleotide
  Sense Strand Starting at position 369 of SEQ ID NO: 316370
auguucucugcugacaaga

SEQ ID NO: 347858 - RNA, 19 nt, Artificial Sequence
  Description of Artificial Sequence: Synthetic oligonucleotide
  Antisense Strand to SEQ ID NO: 347857
ucuugucagcagagaacau

SEQ ID NO: 347859 - RNA, 19 nt, Artificial Sequence
  Description of Artificial Sequence: Synthetic oligonucleotide
  Sense Strand Starting at position 369 of SEQ ID NO: 316435
agcgcauagcccuuugcaa

SEQ ID NO: 347860 - RNA, 19 nt, Artificial Sequence
  Description of Artificial Sequence: Synthetic oligonucleotide
  Antisense Strand to SEQ ID NO: 347859
uugcaaagggcuaugcgcu

SEQ ID NO: 347861 - RNA, 19 nt, Artificial Sequence
  Description of Artificial Sequence: Synthetic oligonucleotide
  Sense Strand Starting at position 369 of SEQ ID NO: 317042
acaggagugcuguacccua

SEQ ID NO: 347862 - RNA, 19 nt, Artificial Sequence
  Description of Artificial Sequence: Synthetic oligonucleotide
  Antisense Strand to SEQ ID NO: 347861
uaggguacagcacuccugu

SEQ ID NO: 347863 - RNA, 19 nt, Artificial Sequence
  Description of Artificial Sequence: Synthetic oligonucleotide
  Sense Strand Starting at position 369 of SEQ ID NO: 317047
agugcuguacccuaagaaa

SEQ ID NO: 347864 - RNA, 19 nt, Artificial Sequence
  Description of Artificial Sequence: Synthetic oligonucleotide
  Antisense Strand to SEQ ID NO: 347863
uuucuuaggguacagcacu

SEQ ID NO: 347865 - RNA, 19 nt, Artificial Sequence
  Description of Artificial Sequence: Synthetic oligonucleotide
  Sense Strand Starting at position 369 of SEQ ID NO: 317279
cguuucuugcggaggaauu

SEQ ID NO: 347866 - RNA, 19 nt, Artificial Sequence
  Description of Artificial Sequence: Synthetic oligonucleotide
  Antisense Strand to SEQ ID NO: 347865
aauuccuccgcaagaaacg

SEQ ID NO: 347867 - RNA, 19 nt, Artificial Sequence
  Description of Artificial Sequence: Synthetic oligonucleotide
  Sense Strand Starting at position 369 of SEQ ID NO: 317280
guuucuugcggaggaauuu

SEQ ID NO: 347868 - RNA, 19 nt, Artificial Sequence
  Description of Artificial Sequence: Synthetic oligonucleotide
  Antisense Strand to SEQ ID NO: 347867
aaauuccuccgcaagaaac

SEQ ID NO: 347869 - RNA, 19 nt, Artificial Sequence
  Description of Artificial Sequence: Synthetic oligonucleotide
  Sense Strand Starting at position 369 of SEQ ID NO: 317388
ugugguaauuucucgauau

SEQ ID NO: 347870 - RNA, 19 nt, Artificial Sequence
  Description of Artificial Sequence: Synthetic oligonucleotide
  Antisense Strand to SEQ ID NO: 347869
auaucgagaaauuaccaca

SEQ ID NO: 347871 - RNA, 19 nt, Artificial Sequence
  Description of Artificial Sequence: Synthetic oligonucleotide
  Sense Strand Starting at position 369 of SEQ ID NO: 317479
ugcggaguuaguuaaaccu

SEQ ID NO: 347872 - RNA, 19 nt, Artificial Sequence
  Description of Artificial Sequence: Synthetic oligonucleotide
  Antisense Strand to SEQ ID NO: 347871
agguuuaacuaacuccgca

SEQ ID NO: 347873 - RNA, 19 nt, Artificial Sequence
  Description of Artificial Sequence: Synthetic oligonucleotide
  Sense Strand Starting at position 369 of SEQ ID NO: 317831
ccgguuuaccgguacauuu

SEQ ID NO: 347874 - RNA, 19 nt, Artificial Sequence
  Description of Artificial Sequence: Synthetic oligonucleotide
  Antisense Strand to SEQ ID NO: 347873
aaauguaccgguaaaccgg

SEQ ID NO: 347875 - RNA, 19 nt, Artificial Sequence
  Description of Artificial Sequence: Synthetic oligonucleotide
  Sense Strand Starting at position 369 of SEQ ID NO: 317870
uggagugucauuugcagau

SEQ ID NO: 347876 - RNA, 19 nt, Artificial Sequence
  Description of Artificial Sequence: Synthetic oligonucleotide
  Antisense Strand to SEQ ID NO: 347875
aucugcaaaugacacucca

SEQ ID NO: 347877 - RNA, 19 nt, Artificial Sequence
  Description of Artificial Sequence: Synthetic oligonucleotide
  Sense Strand Starting at position 369 of SEQ ID NO: 317874
gugucauuugcagaugucu

SEQ ID NO: 347878 - RNA, 19 nt, Artificial Sequence
  Description of Artificial Sequence: Synthetic oligonucleotide
  Antisense Strand to SEQ ID NO: 347877
agacaucugcaaaugacac

SEQ ID NO: 347879 - RNA, 19 nt, Artificial Sequence
  Description of Artificial Sequence: Synthetic oligonucleotide
  Sense Strand Starting at position 369 of SEQ ID NO: 318110
uuugauuccgucuauauug

SEQ ID NO: 347880 - RNA, 19 nt, Artificial Sequence
  Description of Artificial Sequence: Synthetic oligonucleotide
  Antisense Strand to SEQ ID NO: 347879
caauauagacggaaucaaa

SEQ ID NO: 347881 - RNA, 19 nt, Artificial Sequence
  Description of Artificial Sequence: Synthetic oligonucleotide
  Sense Strand Starting at position 369 of SEQ ID NO: 318117
ccgucuauauuggucauuu

SEQ ID NO: 347882 - RNA, 19 nt, Artificial Sequence
  Description of Artificial Sequence: Synthetic oligonucleotide
  Antisense Strand to SEQ ID NO: 347881
aaaugaccaauauagacgg

SEQ ID NO: 347883 - RNA, 19 nt, Artificial Sequence
  Description of Artificial Sequence: Synthetic oligonucleotide
  Sense Strand Starting at position 369 of SEQ ID NO: 318146
guagacuuugccgauauau

SEQ ID NO: 347884 - RNA, 19 nt, Artificial Sequence
  Description of Artificial Sequence: Synthetic oligonucleotide
  Antisense Strand to SEQ ID NO: 347883
auauaucggcaaagucuac

SEQ ID NO: 347885 - RNA, 19 nt, Artificial Sequence
  Description of Artificial Sequence: Synthetic oligonucleotide
  Sense Strand Starting at position 369 of SEQ ID NO: 318148
agacuuugccgauauauag

SEQ ID NO: 347886 - RNA, 19 nt, Artificial Sequence
  Description of Artificial Sequence: Synthetic oligonucleotide
  Antisense Strand to SEQ ID NO: 347885
cuauauaucggcaaagucu

SEQ ID NO: 347887 - RNA, 19 nt, Artificial Sequence
  Description of Artificial Sequence: Synthetic oligonucleotide
  Sense Strand Starting at position 369 of SEQ ID NO: 318156
ccgauauauagugaaaugu

SEQ ID NO: 347888 - RNA, 19 nt, Artificial Sequence
  Description of Artificial Sequence: Synthetic oligonucleotide
  Antisense Strand to SEQ ID NO: 347887
acauuucacuauauaucgg

SEQ ID NO: 347889 - RNA, 19 nt, Artificial Sequence
  Description of Artificial Sequence: Synthetic oligonucleotide
  Sense Strand Starting at position 369 of SEQ ID NO: 318228
cuuuaagcuccagacguuu

SEQ ID NO: 347890 - RNA, 19 nt, Artificial Sequence
  Description of Artificial Sequence: Synthetic oligonucleotide
  Antisense Strand to SEQ ID NO: 347889
aaacgucuggagcuuaaag

SEQ ID NO: 347891 - RNA, 19 nt, Artificial Sequence
  Description of Artificial Sequence: Synthetic oligonucleotide
  Sense Strand Starting at position 369 of SEQ ID NO: 318346
cgagacuaucaggguaaca

SEQ ID NO: 347892 - RNA, 19 nt, Artificial Sequence
  Description of Artificial Sequence: Synthetic oligonucleotide
  Antisense Strand to SEQ ID NO: 347891
uguuacccugauagucucg

SEQ ID NO: 347893 - RNA, 19 nt, Artificial Sequence
  Description of Artificial Sequence: Synthetic oligonucleotide
  Sense Strand Starting at position 369 of SEQ ID NO: 318395
gaaucauuacugggaaagc

SEQ ID NO: 347894 - RNA, 19 nt, Artificial Sequence
  Description of Artificial Sequence: Synthetic oligonucleotide
  Antisense Strand to SEQ ID NO: 347893
gcuuucccaguaaugauuc

SEQ ID NO: 347895 - RNA, 19 nt, Artificial Sequence
  Description of Artificial Sequence: Synthetic oligonucleotide
  Sense Strand Starting at position 369 of SEQ ID NO: 318405
ugggaaagcugacucaauu

SEQ ID NO: 347896 - RNA, 19 nt, Artificial Sequence
  Description of Artificial Sequence: Synthetic oligonucleotide
  Antisense Strand to SEQ ID NO: 347895
aauugagucagcuuuccca

SEQ ID NO: 347897 - RNA, 19 nt, Artificial Sequence
  Description of Artificial Sequence: Synthetic oligonucleotide
  Sense Strand Starting at position 369 of SEQ ID NO: 318435
agaagauauucgguucuaa

SEQ ID NO: 347898 - RNA, 19 nt, Artificial Sequence
  Description of Artificial Sequence: Synthetic oligonucleotide
  Antisense Strand to SEQ ID NO: 347897
uuagaaccgaauaucuucu

SEQ ID NO: 347899 - RNA, 19 nt, Artificial Sequence
  Description of Artificial Sequence: Synthetic oligonucleotide
  Sense Strand Starting at position 369 of SEQ ID NO: 318640
gagaaugauggucgucaga

SEQ ID NO: 347900 - RNA, 19 nt, Artificial Sequence
  Description of Artificial Sequence: Synthetic oligonucleotide
  Antisense Strand to SEQ ID NO: 347899
ucugacgaccaucauucuc

SEQ ID NO: 347901 - RNA, 19 nt, Artificial Sequence
  Description of Artificial Sequence: Synthetic oligonucleotide
  Sense Strand Starting at position 369 of SEQ ID NO: 318642
gaaugauggucgucagaca

SEQ ID NO: 347902 - RNA, 19 nt, Artificial Sequence
  Description of Artificial Sequence: Synthetic oligonucleotide
  Antisense Strand to SEQ ID NO: 347901
ugucugacgaccaucauuc

SEQ ID NO: 347903 - RNA, 19 nt, Artificial Sequence
  Description of Artificial Sequence: Synthetic oligonucleotide
  Sense Strand Starting at position 369 of SEQ ID NO: 318643
aaugauggucgucagacau

SEQ ID NO: 347904 - RNA, 19 nt, Artificial Sequence
  Description of Artificial Sequence: Synthetic oligonucleotide
  Antisense Strand to SEQ ID NO: 347903
augucugacgaccaucauu

SEQ ID NO: 347905 - RNA, 19 nt, Artificial Sequence
  Description of Artificial Sequence: Synthetic oligonucleotide
  Sense Strand Starting at position 369 of SEQ ID NO: 318892
aaggcuaaacucuauggua

SEQ ID NO: 347906 - RNA, 19 nt, Artificial Sequence
  Description of Artificial Sequence: Synthetic oligonucleotide
  Antisense Strand to SEQ ID NO: 347905
uaccauagaguuuagccuu

SEQ ID NO: 347907 - RNA, 19 nt, Artificial Sequence
  Description of Artificial Sequence: Synthetic oligonucleotide
  Sense Strand Starting at position 369 of SEQ ID NO: 318894
ggcuaaacucuaugguaua

SEQ ID NO: 347908 - RNA, 19 nt, Artificial Sequence
  Description of Artificial Sequence: Synthetic oligonucleotide
  Antisense Strand to SEQ ID NO: 347907
uauaccauagaguuuagcc

SEQ ID NO: 347909 - RNA, 19 nt, Artificial Sequence
  Description of Artificial Sequence: Synthetic oligonucleotide
  Sense Strand Starting at position 369 of SEQ ID NO: 318905
augguauagguuuacaagu

SEQ ID NO: 347910 - RNA, 19 nt, Artificial Sequence
  Description of Artificial Sequence: Synthetic oligonucleotide
  Antisense Strand to SEQ ID NO: 347909
acuuguaaaccuauaccau

SEQ ID NO: 347911 - RNA, 19 nt, Artificial Sequence
  Description of Artificial Sequence: Synthetic oligonucleotide
  Sense Strand Starting at position 369 of SEQ ID NO: 318991
cuuacaguguauuccuaau

SEQ ID NO: 347912 - RNA, 19 nt, Artificial Sequence
  Description of Artificial Sequence: Synthetic oligonucleotide
  Antisense Strand to SEQ ID NO: 347911
auuaggaauacacuguaag

SEQ ID NO: 347913 - RNA, 19 nt, Artificial Sequence
  Description of Artificial Sequence: Synthetic oligonucleotide
  Sense Strand Starting at position 369 of SEQ ID NO: 319028
auuugcgugugcuuacuaa

SEQ ID NO: 347914 - RNA, 19 nt, Artificial Sequence
  Description of Artificial Sequence: Synthetic oligonucleotide
  Antisense Strand to SEQ ID NO: 347913
uuaguaagcacacgcaaau

SEQ ID NO: 347915 - RNA, 19 nt, Artificial Sequence
  Description of Artificial Sequence: Synthetic oligonucleotide
  Sense Strand Starting at position 369 of SEQ ID NO: 319146
aagugauucugcuuaccug

SEQ ID NO: 347916 - RNA, 19 nt, Artificial Sequence
  Description of Artificial Sequence: Synthetic oligonucleotide
  Antisense Strand to SEQ ID NO: 347915
cagguaagcagaaucacuu

SEQ ID NO: 347917 - RNA, 19 nt, Artificial Sequence
  Description of Artificial Sequence: Synthetic oligonucleotide
  Sense Strand Starting at position 369 of SEQ ID NO: 319149
ugauucugcuuaccuggaa

SEQ ID NO: 347918 - RNA, 19 nt, Artificial Sequence
  Description of Artificial Sequence: Synthetic oligonucleotide
  Antisense Strand to SEQ ID NO: 347917
uuccagguaagcagaauca

SEQ ID NO: 347919 - RNA, 19 nt, Artificial Sequence
  Description of Artificial Sequence: Synthetic oligonucleotide
  Sense Strand Starting at position 369 of SEQ ID NO: 319176
aagauagccuucucaguga

SEQ ID NO: 347920 - RNA, 19 nt, Artificial Sequence
  Description of Artificial Sequence: Synthetic oligonucleotide
  Antisense Strand to SEQ ID NO: 347919
ucacugagaaggcuaucuu

SEQ ID NO: 347921 - RNA, 19 nt, Artificial Sequence
  Description of Artificial Sequence: Synthetic oligonucleotide
  Sense Strand Starting at position 369 of SEQ ID NO: 319179
auagccuucucagugaacu

SEQ ID NO: 347922 - RNA, 19 nt, Artificial Sequence
  Description of Artificial Sequence: Synthetic oligonucleotide
  Antisense Strand to SEQ ID NO: 347921
aguucacugagaaggcuau

SEQ ID NO: 347923 - RNA, 19 nt, Artificial Sequence
  Description of Artificial Sequence: Synthetic oligonucleotide
  Sense Strand Starting at position 369 of SEQ ID NO: 319216
accuuuaguguuugaaauc

SEQ ID NO: 347924 - RNA, 19 nt, Artificial Sequence
  Description of Artificial Sequence: Synthetic oligonucleotide
  Antisense Strand to SEQ ID NO: 347923
gauuucaaacacuaaaggu

SEQ ID NO: 347925 - RNA, 19 nt, Artificial Sequence
  Description of Artificial Sequence: Synthetic oligonucleotide
  Sense Strand Starting at position 370 of SEQ ID NO: 315366
gcauguaaucaguaggcaa

SEQ ID NO: 347926 - RNA, 19 nt, Artificial Sequence
  Description of Artificial Sequence: Synthetic oligonucleotide
  Antisense Strand to SEQ ID NO: 347925
uugccuacugauuacaugc

SEQ ID NO: 347927 - RNA, 19 nt, Artificial Sequence
  Description of Artificial Sequence: Synthetic oligonucleotide
  Sense Strand Starting at position 370 of SEQ ID NO: 315368
auguaaucaguaggcaaca

SEQ ID NO: 347928 - RNA, 19 nt, Artificial Sequence
  Description of Artificial Sequence: Synthetic oligonucleotide
  Antisense Strand to SEQ ID NO: 347927
uguugccuacugauuacau

SEQ ID NO: 347929 - RNA, 19 nt, Artificial Sequence
  Description of Artificial Sequence: Synthetic oligonucleotide
  Sense Strand Starting at position 370 of SEQ ID NO: 315414
aaaugagugugggugagaa

SEQ ID NO: 347930 - RNA, 19 nt, Artificial Sequence
  Description of Artificial Sequence: Synthetic oligonucleotide
  Antisense Strand to SEQ ID NO: 347929
uucucacccacacucauuu

SEQ ID NO: 347931 - RNA, 19 nt, Artificial Sequence
  Description of Artificial Sequence: Synthetic oligonucleotide
  Sense Strand Starting at position 370 of SEQ ID NO: 315430
gaaacaaugcguugcuuaa

SEQ ID NO: 347932 - RNA, 19 nt, Artificial Sequence
  Description of Artificial Sequence: Synthetic oligonucleotide
  Antisense Strand to SEQ ID NO: 347931
uuaagcaacgcauuguuuc

SEQ ID NO: 347933 - RNA, 19 nt, Artificial Sequence
  Description of Artificial Sequence: Synthetic oligonucleotide
  Sense Strand Starting at position 370 of SEQ ID NO: 315524
cuuagagccuaguuagaag

SEQ ID NO: 347934 - RNA, 19 nt, Artificial Sequence
  Description of Artificial Sequence: Synthetic oligonucleotide
  Antisense Strand to SEQ ID NO: 347933
cuucuaacuaggcucuaag

SEQ ID NO: 347935 - RNA, 19 nt, Artificial Sequence
  Description of Artificial Sequence: Synthetic oligonucleotide
  Sense Strand Starting at position 370 of SEQ ID NO: 315710
aagguccugcgagacaaau

SEQ ID NO: 347936 - RNA, 19 nt, Artificial Sequence
  Description of Artificial Sequence: Synthetic oligonucleotide
  Antisense Strand to SEQ ID NO: 347935
auuugucucgcaggaccuu

SEQ ID NO: 347937 - RNA, 19 nt, Artificial Sequence
  Description of Artificial Sequence: Synthetic oligonucleotide
  Sense Strand Starting at position 370 of SEQ ID NO: 315736
gucugagaaucauaacagg

SEQ ID NO: 347938 - RNA, 19 nt, Artificial Sequence
  Description of Artificial Sequence: Synthetic oligonucleotide
  Antisense Strand to SEQ ID NO: 347937
ccuguuaugauucucagac

SEQ ID NO: 347939 - RNA, 19 nt, Artificial Sequence
  Description of Artificial Sequence: Synthetic oligonucleotide
  Sense Strand Starting at position 370 of SEQ ID NO: 315783
uagauauccugggaggaag

SEQ ID NO: 347940 - RNA, 19 nt, Artificial Sequence
  Description of Artificial Sequence: Synthetic oligonucleotide
  Antisense Strand to SEQ ID NO: 347939
cuuccucccaggauaucua

SEQ ID NO: 347941 - RNA, 19 nt, Artificial Sequence
  Description of Artificial Sequence: Synthetic oligonucleotide
  Sense Strand Starting at position 370 of SEQ ID NO: 315877
cgggaucacggaugaguua

SEQ ID NO: 347942 - RNA, 19 nt, Artificial Sequence
  Description of Artificial Sequence: Synthetic oligonucleotide
  Antisense Strand to SEQ ID NO: 347941
uaacucauccgugaucccg

SEQ ID NO: 347943 - RNA, 19 nt, Artificial Sequence
  Description of Artificial Sequence: Synthetic oligonucleotide
  Sense Strand Starting at position 370 of SEQ ID NO: 315924
ugaguccagcacuggaaau

SEQ ID NO: 347944 - RNA, 19 nt, Artificial Sequence
  Description of Artificial Sequence: Synthetic oligonucleotide
  Antisense Strand to SEQ ID NO: 347943
auuuccagugcuggacuca

SEQ ID NO: 347945 - RNA, 19 nt, Artificial Sequence
  Description of Artificial Sequence: Synthetic oligonucleotide
  Sense Strand Starting at position 370 of SEQ ID NO: 316013
ugcuuccugagguauaaag

SEQ ID NO: 347946 - RNA, 19 nt, Artificial Sequence
  Description of Artificial Sequence: Synthetic oligonucleotide
  Antisense Strand to SEQ ID NO: 347945
cuuuauaccucaggaagca

SEQ ID NO: 347947 - RNA, 19 nt, Artificial Sequence
  Description of Artificial Sequence: Synthetic oligonucleotide
  Sense Strand Starting at position 370 of SEQ ID NO: 316020
ugagguauaaagugggauu

SEQ ID NO: 347948 - RNA, 19 nt, Artificial Sequence
  Description of Artificial Sequence: Synthetic oligonucleotide
  Antisense Strand to SEQ ID NO: 347947
aaucccacuuuauaccuca

SEQ ID NO: 347949 - RNA, 19 nt, Artificial Sequence
  Description of Artificial Sequence: Synthetic oligonucleotide
  Sense Strand Starting at position 370 of SEQ ID NO: 316021
gagguauaaagugggauua

SEQ ID NO: 347950 - RNA, 19 nt, Artificial Sequence
  Description of Artificial Sequence: Synthetic oligonucleotide
  Antisense Strand to SEQ ID NO: 347949
uaaucccacuuuauaccuc

SEQ ID NO: 347951 - RNA, 19 nt, Artificial Sequence
  Description of Artificial Sequence: Synthetic oligonucleotide
  Sense Strand Starting at position 370 of SEQ ID NO: 316044
uggcaacaacuucgugauu

SEQ ID NO: 347952 - RNA, 19 nt, Artificial Sequence
  Description of Artificial Sequence: Synthetic oligonucleotide
  Antisense Strand to SEQ ID NO: 347951
aaucacgaaguuguugcca

SEQ ID NO: 347953 - RNA, 19 nt, Artificial Sequence
  Description of Artificial Sequence: Synthetic oligonucleotide
  Sense Strand Starting at position 370 of SEQ ID NO: 316045
ggcaacaacuucgugauua

SEQ ID NO: 347954 - RNA, 19 nt, Artificial Sequence
  Description of Artificial Sequence: Synthetic oligonucleotide
  Antisense Strand to SEQ ID NO: 347953
uaaucacgaaguuguugcc

SEQ ID NO: 347955 - RNA, 19 nt, Artificial Sequence
  Description of Artificial Sequence: Synthetic oligonucleotide
  Sense Strand Starting at position 370 of SEQ ID NO: 316049
acaacuucgugauuacugu

SEQ ID NO: 347956 - RNA, 19 nt, Artificial Sequence
  Description of Artificial Sequence: Synthetic oligonucleotide
  Antisense Strand to SEQ ID NO: 347955
acaguaaucacgaaguugu

SEQ ID NO: 347957 - RNA, 19 nt, Artificial Sequence
  Description of Artificial Sequence: Synthetic oligonucleotide
  Sense Strand Starting at position 370 of SEQ ID NO: 316050
caacuucgugauuacuguu

SEQ ID NO: 347958 - RNA, 19 nt, Artificial Sequence
  Description of Artificial Sequence: Synthetic oligonucleotide
  Antisense Strand to SEQ ID NO: 347957
aacaguaaucacgaaguug

SEQ ID NO: 347959 - RNA, 19 nt, Artificial Sequence
  Description of Artificial Sequence: Synthetic oligonucleotide
  Sense Strand Starting at position 370 of SEQ ID NO: 316072
ggagauaaugcuugccaag

SEQ ID NO: 347960 - RNA, 19 nt, Artificial Sequence
  Description of Artificial Sequence: Synthetic oligonucleotide
  Antisense Strand to SEQ ID NO: 347959
cuuggcaagcauuaucucc

SEQ ID NO: 347961 - RNA, 19 nt, Artificial Sequence
  Description of Artificial Sequence: Synthetic oligonucleotide
  Sense Strand Starting at position 370 of SEQ ID NO: 316074
agauaaugcuugccaagcu

SEQ ID NO: 347962 - RNA, 19 nt, Artificial Sequence
  Description of Artificial Sequence: Synthetic oligonucleotide
  Antisense Strand to SEQ ID NO: 347961
agcuuggcaagcauuaucu

SEQ ID NO: 347963 - RNA, 19 nt, Artificial Sequence
  Description of Artificial Sequence: Synthetic oligonucleotide
  Sense Strand Starting at position 370 of SEQ ID NO: 316142
uuaggauuacgaugacuau

SEQ ID NO: 347964 - RNA, 19 nt, Artificial Sequence
  Description of Artificial Sequence: Synthetic oligonucleotide
  Antisense Strand to SEQ ID NO: 347963
auagucaucguaauccuaa

SEQ ID NO: 347965 - RNA, 19 nt, Artificial Sequence
  Description of Artificial Sequence: Synthetic oligonucleotide
  Sense Strand Starting at position 370 of SEQ ID NO: 316195
aggcucauuccagauauuc

SEQ ID NO: 347966 - RNA, 19 nt, Artificial Sequence
  Description of Artificial Sequence: Synthetic oligonucleotide
  Antisense Strand to SEQ ID NO: 347965
gaauaucuggaaugagccu

SEQ ID NO: 347967 - RNA, 19 nt, Artificial Sequence
  Description of Artificial Sequence: Synthetic oligonucleotide
  Sense Strand Starting at position 370 of SEQ ID NO: 318248
ucgacuuucuuccugacaa

SEQ ID NO: 347968 - RNA, 19 nt, Artificial Sequence
  Description of Artificial Sequence: Synthetic oligonucleotide
  Antisense Strand to SEQ ID NO: 347967
uugucaggaagaaagucga

SEQ ID NO: 347969 - RNA, 19 nt, Artificial Sequence
  Description of Artificial Sequence: Synthetic oligonucleotide
  Sense Strand Starting at position 370 of SEQ ID NO: 318363
augcaacguuuccuaaaga

SEQ ID NO: 347970 - RNA, 19 nt, Artificial Sequence
  Description of Artificial Sequence: Synthetic oligonucleotide
  Antisense Strand to SEQ ID NO: 347969
ucuuuaggaaacguugcau

SEQ ID NO: 347971 - RNA, 19 nt, Artificial Sequence
  Description of Artificial Sequence: Synthetic oligonucleotide
  Sense Strand Starting at position 370 of SEQ ID NO: 318479
uagauuucuugaggaucuu

SEQ ID NO: 347972 - RNA, 19 nt, Artificial Sequence
  Description of Artificial Sequence: Synthetic oligonucleotide
  Antisense Strand to SEQ ID NO: 347971
aagauccucaagaaaucua

SEQ ID NO: 347973 - RNA, 19 nt, Artificial Sequence
  Description of Artificial Sequence: Synthetic oligonucleotide
  Sense Strand Starting at position 370 of SEQ ID NO: 318488
ugaggaucuucuguuggaa

SEQ ID NO: 347974 - RNA, 19 nt, Artificial Sequence
  Description of Artificial Sequence: Synthetic oligonucleotide
  Antisense Strand to SEQ ID NO: 347973
uuccaacagaagauccuca

SEQ ID NO: 347975 - RNA, 19 nt, Artificial Sequence
  Description of Artificial Sequence: Synthetic oligonucleotide
  Sense Strand Starting at position 370 of SEQ ID NO: 318491
ggaucuucuguuggaagca

SEQ ID NO: 347976 - RNA, 19 nt, Artificial Sequence
  Description of Artificial Sequence: Synthetic oligonucleotide
  Antisense Strand to SEQ ID NO: 347975
ugcuuccaacagaagaucc

SEQ ID NO: 347977 - RNA, 19 nt, Artificial Sequence
  Description of Artificial Sequence: Synthetic oligonucleotide
  Sense Strand Starting at position 370 of SEQ ID NO: 318540
cgaaaugcccucugaauug

SEQ ID NO: 347978 - RNA, 19 nt, Artificial Sequence
  Description of Artificial Sequence: Synthetic oligonucleotide
  Antisense Strand to SEQ ID NO: 347977
caauucagagggcauuucg

SEQ ID NO: 347979 - RNA, 19 nt, Artificial Sequence
  Description of Artificial Sequence: Synthetic oligonucleotide
  Sense Strand Starting at position 370 of SEQ ID NO: 318592
uugaaagucucaguguuga

SEQ ID NO: 347980 - RNA, 19 nt, Artificial Sequence
  Description of Artificial Sequence: Synthetic oligonucleotide
  Antisense Strand to SEQ ID NO: 347979
ucaacacugagacuuucaa

SEQ ID NO: 347981 - RNA, 19 nt, Artificial Sequence
  Description of Artificial Sequence: Synthetic oligonucleotide
  Sense Strand Starting at position 370 of SEQ ID NO: 318751
agcaaucuugaauggaaac

SEQ ID NO: 347982 - RNA, 19 nt, Artificial Sequence
  Description of Artificial Sequence: Synthetic oligonucleotide
  Antisense Strand to SEQ ID NO: 347981
guuuccauucaagauugcu

SEQ ID NO: 347983 - RNA, 19 nt, Artificial Sequence
  Description of Artificial Sequence: Synthetic oligonucleotide
  Sense Strand Starting at position 370 of SEQ ID NO: 318763
uggaaacauuucugucaag

SEQ ID NO: 347984 - RNA, 19 nt, Artificial Sequence
  Description of Artificial Sequence: Synthetic oligonucleotide
  Antisense Strand to SEQ ID NO: 347983
cuugacagaaauguuucca

SEQ ID NO: 347985 - RNA, 19 nt, Artificial Sequence
  Description of Artificial Sequence: Synthetic oligonucleotide
  Sense Strand Starting at position 370 of SEQ ID NO: 318813
uuaguaaugauguggagaa

SEQ ID NO: 347986 - RNA, 19 nt, Artificial Sequence
  Description of Artificial Sequence: Synthetic oligonucleotide
  Antisense Strand to SEQ ID NO: 347985
uucuccacaucauuacuaa

SEQ ID NO: 347987 - RNA, 19 nt, Artificial Sequence
  Description of Artificial Sequence: Synthetic oligonucleotide
  Sense Strand Starting at position 370 of SEQ ID NO: 318848
guguucguguguauagauu

SEQ ID NO: 347988 - RNA, 19 nt, Artificial Sequence
  Description of Artificial Sequence: Synthetic oligonucleotide
  Antisense Strand to SEQ ID NO: 347987
aaucuauacacacgaacac

SEQ ID NO: 347989 - RNA, 19 nt, Artificial Sequence
  Description of Artificial Sequence: Synthetic oligonucleotide
  Sense Strand Starting at position 370 of SEQ ID NO: 318861
uagauugugguucgaggau

SEQ ID NO: 347990 - RNA, 19 nt, Artificial Sequence
  Description of Artificial Sequence: Synthetic oligonucleotide
  Antisense Strand to SEQ ID NO: 347989
auccucgaaccacaaucua

SEQ ID NO: 347991 - RNA, 19 nt, Artificial Sequence
  Description of Artificial Sequence: Synthetic oligonucleotide
  Sense Strand Starting at position 370 of SEQ ID NO: 318954
auggaaauggcuugugcuu

SEQ ID NO: 347992 - RNA, 19 nt, Artificial Sequence
  Description of Artificial Sequence: Synthetic oligonucleotide
  Antisense Strand to SEQ ID NO: 347991
aagcacaagccauuuccau

SEQ ID NO: 347993 - RNA, 19 nt, Artificial Sequence
  Description of Artificial Sequence: Synthetic oligonucleotide
  Sense Strand Starting at position 370 of SEQ ID NO: 318959
aauggcuugugcuuugaga

SEQ ID NO: 347994 - RNA, 19 nt, Artificial Sequence
  Description of Artificial Sequence: Synthetic oligonucleotide
  Antisense Strand to SEQ ID NO: 347993
ucucaaagcacaagccauu

SEQ ID NO: 347995 - RNA, 19 nt, Artificial Sequence
  Description of Artificial Sequence: Synthetic oligonucleotide
  Sense Strand Starting at position 370 of SEQ ID NO: 318961
uggcuugugcuuugagaag

SEQ ID NO: 347996 - RNA, 19 nt, Artificial Sequence
  Description of Artificial Sequence: Synthetic oligonucleotide
  Antisense Strand to SEQ ID NO: 347995
cuucucaaagcacaagcca

SEQ ID NO: 347997 - RNA, 19 nt, Artificial Sequence
  Description of Artificial Sequence: Synthetic oligonucleotide
  Sense Strand Starting at position 370 of SEQ ID NO: 319056
ggaauauaaugauauccuc

SEQ ID NO: 347998 - RNA, 19 nt, Artificial Sequence
  Description of Artificial Sequence: Synthetic oligonucleotide
  Antisense Strand to SEQ ID NO: 347997
gaggauaucauuauauucc

SEQ ID NO: 347999 - RNA, 19 nt, Artificial Sequence
  Description of Artificial Sequence: Synthetic oligonucleotide
  Sense Strand Starting at position 370 of SEQ ID NO: 319101
aaauguuugcuagguuaag

SEQ ID NO: 348000 - RNA, 19 nt, Artificial Sequence
  Description of Artificial Sequence: Synthetic oligonucleotide
  Antisense Strand to SEQ ID NO: 347999
cuuaaccuagcaaacauuu

SEQ ID NO: 348001 - RNA, 19 nt, Artificial Sequence
  Description of Artificial Sequence: Synthetic oligonucleotide
  Sense Strand Starting at position 370 of SEQ ID NO: 319123
ugcuguucuacugaugguu

SEQ ID NO: 348002 - RNA, 19 nt, Artificial Sequence
  Description of Artificial Sequence: Synthetic oligonucleotide
  Antisense Strand to SEQ ID NO: 348001
aaccaucaguagaacagca

SEQ ID NO: 348003 - RNA, 19 nt, Artificial Sequence
  Description of Artificial Sequence: Synthetic oligonucleotide
  Sense Strand Starting at position 370 of SEQ ID NO: 319213
agacuaaauucugcaagua

SEQ ID NO: 348004 - RNA, 19 nt, Artificial Sequence
  Description of Artificial Sequence: Synthetic oligonucleotide
  Antisense Strand to SEQ ID NO: 348003
uacuugcagaauuuagucu

SEQ ID NO: 348005 - RNA, 19 nt, Artificial Sequence
  Description of Artificial Sequence: Synthetic oligonucleotide
  Sense Strand Starting at position 371 of SEQ ID NO: 315395
gcaagcauauaucuagauu

SEQ ID NO: 348006 - RNA, 19 nt, Artificial Sequence
  Description of Artificial Sequence: Synthetic oligonucleotide
  Antisense Strand to SEQ ID NO: 348005
aaucuagauauaugcuugc

SEQ ID NO: 348007 - RNA, 19 nt, Artificial Sequence
  Description of Artificial Sequence: Synthetic oligonucleotide
  Sense Strand Starting at position 371 of SEQ ID NO: 315452
ggaagcauuuaauaccaau

SEQ ID NO: 348008 - RNA, 19 nt, Artificial Sequence
  Description of Artificial Sequence: Synthetic oligonucleotide
  Antisense Strand to SEQ ID NO: 348007
auugguauuaaaugcuucc

SEQ ID NO: 348009 - RNA, 19 nt, Artificial Sequence
  Description of Artificial Sequence: Synthetic oligonucleotide
  Sense Strand Starting at position 371 of SEQ ID NO: 315715
agaagaauuguuggcugca

SEQ ID NO: 348010 - RNA, 19 nt, Artificial Sequence
  Description of Artificial Sequence: Synthetic oligonucleotide
  Antisense Strand to SEQ ID NO: 348009
ugcagccaacaauucuucu

SEQ ID NO: 348011 - RNA, 19 nt, Artificial Sequence
  Description of Artificial Sequence: Synthetic oligonucleotide
  Sense Strand Starting at position 371 of SEQ ID NO: 315718
agaauuguuggcugcauuu

SEQ ID NO: 348012 - RNA, 19 nt, Artificial Sequence
  Description of Artificial Sequence: Synthetic oligonucleotide
  Antisense Strand to SEQ ID NO: 348011
aaaugcagccaacaauucu

SEQ ID NO: 348013 - RNA, 19 nt, Artificial Sequence
  Description of Artificial Sequence: Synthetic oligonucleotide
  Sense Strand Starting at position 371 of SEQ ID NO: 315766
uugcaaagugguuacauga

SEQ ID NO: 348014 - RNA, 19 nt, Artificial Sequence
  Description of Artificial Sequence: Synthetic oligonucleotide
  Antisense Strand to SEQ ID NO: 348013
ucauguaaccacuuugcaa

SEQ ID NO: 348015 - RNA, 19 nt, Artificial Sequence
  Description of Artificial Sequence: Synthetic oligonucleotide
  Sense Strand Starting at position 371 of SEQ ID NO: 315838
cgaagugacacauaucugu

SEQ ID NO: 348016 - RNA, 19 nt, Artificial Sequence
  Description of Artificial Sequence: Synthetic oligonucleotide
  Antisense Strand to SEQ ID NO: 348015
acagauaugugucacuucg

SEQ ID NO: 348017 - RNA, 19 nt, Artificial Sequence
  Description of Artificial Sequence: Synthetic oligonucleotide
  Sense Strand Starting at position 371 of SEQ ID NO: 315841
agugacacauaucuguaua

SEQ ID NO: 348018 - RNA, 19 nt, Artificial Sequence
  Description of Artificial Sequence: Synthetic oligonucleotide
  Antisense Strand to SEQ ID NO: 348017
uauacagauaugugucacu

SEQ ID NO: 348019 - RNA, 19 nt, Artificial Sequence
  Description of Artificial Sequence: Synthetic oligonucleotide
  Sense Strand Starting at position 371 of SEQ ID NO: 316277
guaggugguauauaugaau

SEQ ID NO: 348020 - RNA, 19 nt, Artificial Sequence
  Description of Artificial Sequence: Synthetic oligonucleotide
  Antisense Strand to SEQ ID NO: 348019
auucauauauaccaccuac

SEQ ID NO: 348021 - RNA, 19 nt, Artificial Sequence
  Description of Artificial Sequence: Synthetic oligonucleotide
  Sense Strand Starting at position 371 of SEQ ID NO: 316596
aggccacagcucuaggaaa

SEQ ID NO: 348022 - RNA, 19 nt, Artificial Sequence
  Description of Artificial Sequence: Synthetic oligonucleotide
  Antisense Strand to SEQ ID NO: 348021
uuuccuagagcuguggccu

SEQ ID NO: 348023 - RNA, 19 nt, Artificial Sequence
  Description of Artificial Sequence: Synthetic oligonucleotide
  Sense Strand Starting at position 371 of SEQ ID NO: 316598
gccacagcucuaggaaaug

SEQ ID NO: 348024 - RNA, 19 nt, Artificial Sequence
  Description of Artificial Sequence: Synthetic oligonucleotide
  Antisense Strand to SEQ ID NO: 348023
cauuuccuagagcuguggc

SEQ ID NO: 348025 - RNA, 19 nt, Artificial Sequence
  Description of Artificial Sequence: Synthetic oligonucleotide
  Sense Strand Starting at position 371 of SEQ ID NO: 316895
ugacaagcucccuaggcau

SEQ ID NO: 348026 - RNA, 19 nt, Artificial Sequence
  Description of Artificial Sequence: Synthetic oligonucleotide
  Antisense Strand to SEQ ID NO: 348025
augccuagggagcuuguca

SEQ ID NO: 348027 - RNA, 19 nt, Artificial Sequence
  Description of Artificial Sequence: Synthetic oligonucleotide
  Sense Strand Starting at position 371 of SEQ ID NO: 317118
gggaaaucgcucuacaguu

SEQ ID NO: 348028 - RNA, 19 nt, Artificial Sequence
  Description of Artificial Sequence: Synthetic oligonucleotide
  Antisense Strand to SEQ ID NO: 348027
aacuguagagcgauuuccc

SEQ ID NO: 348029 - RNA, 19 nt, Artificial Sequence
  Description of Artificial Sequence: Synthetic oligonucleotide
  Sense Strand Starting at position 371 of SEQ ID NO: 317126
gcucuacaguuccuagaag

SEQ ID NO: 348030 - RNA, 19 nt, Artificial Sequence
  Description of Artificial Sequence: Synthetic oligonucleotide
  Antisense Strand to SEQ ID NO: 348029
cuucuaggaacuguagagc

SEQ ID NO: 348031 - RNA, 19 nt, Artificial Sequence
  Description of Artificial Sequence: Synthetic oligonucleotide
  Sense Strand Starting at position 371 of SEQ ID NO: 317395
uccuuuacccaaugaggaa

SEQ ID NO: 348032 - RNA, 19 nt, Artificial Sequence
  Description of Artificial Sequence: Synthetic oligonucleotide
  Antisense Strand to SEQ ID NO: 348031
uuccucauuggguaaagga

SEQ ID NO: 348033 - RNA, 19 nt, Artificial Sequence
  Description of Artificial Sequence: Synthetic oligonucleotide
  Sense Strand Starting at position 371 of SEQ ID NO: 317571
gggaacacauggucucuaa

SEQ ID NO: 348034 - RNA, 19 nt, Artificial Sequence
  Description of Artificial Sequence: Synthetic oligonucleotide
  Antisense Strand to SEQ ID NO: 348033
uuagagaccauguguuccc

SEQ ID NO: 348035 - RNA, 19 nt, Artificial Sequence
  Description of Artificial Sequence: Synthetic oligonucleotide
  Sense Strand Starting at position 371 of SEQ ID NO: 317652
ugccucagucuccacauau

SEQ ID NO: 348036 - RNA, 19 nt, Artificial Sequence
  Description of Artificial Sequence: Synthetic oligonucleotide
  Antisense Strand to SEQ ID NO: 348035
auauguggagacugaggca

SEQ ID NO: 348037 - RNA, 19 nt, Artificial Sequence
  Description of Artificial Sequence: Synthetic oligonucleotide
  Sense Strand Starting at position 371 of SEQ ID NO: 317684
gcuaauggucucuaucucu

SEQ ID NO: 348038 - RNA, 19 nt, Artificial Sequence
  Description of Artificial Sequence: Synthetic oligonucleotide
  Antisense Strand to SEQ ID NO: 348037
agagauagagaccauuagc

SEQ ID NO: 348039 - RNA, 19 nt, Artificial Sequence
  Description of Artificial Sequence: Synthetic oligonucleotide
  Sense Strand Starting at position 371 of SEQ ID NO: 317692
ucucuaucucucgaguuau

SEQ ID NO: 348040 - RNA, 19 nt, Artificial Sequence
  Description of Artificial Sequence: Synthetic oligonucleotide
  Antisense Strand to SEQ ID NO: 348039
auaacucgagagauagaga

SEQ ID NO: 348041 - RNA, 19 nt, Artificial Sequence
  Description of Artificial Sequence: Synthetic oligonucleotide
  Sense Strand Starting at position 371 of SEQ ID NO: 317744
gucccugguauauaguaaa

SEQ ID NO: 348042 - RNA, 19 nt, Artificial Sequence
  Description of Artificial Sequence: Synthetic oligonucleotide
  Antisense Strand to SEQ ID NO: 348041
uuuacuauauaccagggac

SEQ ID NO: 348043 - RNA, 19 nt, Artificial Sequence
  Description of Artificial Sequence: Synthetic oligonucleotide
  Sense Strand Starting at position 371 of SEQ ID NO: 317952
uguguauuuaaguguuugu

SEQ ID NO: 348044 - RNA, 19 nt, Artificial Sequence
  Description of Artificial Sequence: Synthetic oligonucleotide
  Antisense Strand to SEQ ID NO: 348043
acaaacacuuaaauacaca

SEQ ID NO: 348045 - RNA, 19 nt, Artificial Sequence
  Description of Artificial Sequence: Synthetic oligonucleotide
  Sense Strand Starting at position 371 of SEQ ID NO: 317955
guauuuaaguguuuguuga

SEQ ID NO: 348046 - RNA, 19 nt, Artificial Sequence
  Description of Artificial Sequence: Synthetic oligonucleotide
  Antisense Strand to SEQ ID NO: 348045
ucaacaaacacuuaaauac

SEQ ID NO: 348047 - RNA, 19 nt, Artificial Sequence
  Description of Artificial Sequence: Synthetic oligonucleotide
  Sense Strand Starting at position 371 of SEQ ID NO: 317982
cggaacucauuggcaauau

SEQ ID NO: 348048 - RNA, 19 nt, Artificial Sequence
  Description of Artificial Sequence: Synthetic oligonucleotide
  Antisense Strand to SEQ ID NO: 348047
auauugccaaugaguuccg

SEQ ID NO: 348049 - RNA, 19 nt, Artificial Sequence
  Description of Artificial Sequence: Synthetic oligonucleotide
  Sense Strand Starting at position 371 of SEQ ID NO: 318016
gggcuccuucucuaacacu

SEQ ID NO: 348050 - RNA, 19 nt, Artificial Sequence
  Description of Artificial Sequence: Synthetic oligonucleotide
  Antisense Strand to SEQ ID NO: 348049
aguguuagagaaggagccc

SEQ ID NO: 348051 - RNA, 19 nt, Artificial Sequence
  Description of Artificial Sequence: Synthetic oligonucleotide
  Sense Strand Starting at position 371 of SEQ ID NO: 318022
cuucucuaacacugagaag

SEQ ID NO: 348052 - RNA, 19 nt, Artificial Sequence
  Description of Artificial Sequence: Synthetic oligonucleotide
  Antisense Strand to SEQ ID NO: 348051
cuucucaguguuagagaag

SEQ ID NO: 348053 - RNA, 19 nt, Artificial Sequence
  Description of Artificial Sequence: Synthetic oligonucleotide
  Sense Strand Starting at position 371 of SEQ ID NO: 318033
cugagaaguuuccuguuua

SEQ ID NO: 348054 - RNA, 19 nt, Artificial Sequence
  Description of Artificial Sequence: Synthetic oligonucleotide
  Antisense Strand to SEQ ID NO: 348053
uaaacaggaaacuucucag

SEQ ID NO: 348055 - RNA, 19 nt, Artificial Sequence
  Description of Artificial Sequence: Synthetic oligonucleotide
  Sense Strand Starting at position 371 of SEQ ID NO: 318037
gaaguuuccuguuuacagg

SEQ ID NO: 348056 - RNA, 19 nt, Artificial Sequence
  Description of Artificial Sequence: Synthetic oligonucleotide
  Antisense Strand to SEQ ID NO: 348055
ccuguaaacaggaaacuuc

SEQ ID NO: 348057 - RNA, 19 nt, Artificial Sequence
  Description of Artificial Sequence: Synthetic oligonucleotide
  Sense Strand Starting at position 371 of SEQ ID NO: 318214
ugaagcuuccagcaaaggu

SEQ ID NO: 348058 - RNA, 19 nt, Artificial Sequence
  Description of Artificial Sequence: Synthetic oligonucleotide
  Antisense Strand to SEQ ID NO: 348057
accuuugcuggaagcuuca

SEQ ID NO: 348059 - RNA, 19 nt, Artificial Sequence
  Description of Artificial Sequence: Synthetic oligonucleotide
  Sense Strand Starting at position 371 of SEQ ID NO: 318243
uggucaguccuagagcaau

SEQ ID NO: 348060 - RNA, 19 nt, Artificial Sequence
  Description of Artificial Sequence: Synthetic oligonucleotide
  Antisense Strand to SEQ ID NO: 348059
auugcucuaggacugacca

SEQ ID NO: 348061 - RNA, 19 nt, Artificial Sequence
  Description of Artificial Sequence: Synthetic oligonucleotide
  Sense Strand Starting at position 371 of SEQ ID NO: 318254
agagcaauggcuuggaaag

SEQ ID NO: 348062 - RNA, 19 nt, Artificial Sequence
  Description of Artificial Sequence: Synthetic oligonucleotide
  Antisense Strand to SEQ ID NO: 348061
cuuuccaagccauugcucu

SEQ ID NO: 348063 - RNA, 19 nt, Artificial Sequence
  Description of Artificial Sequence: Synthetic oligonucleotide
  Sense Strand Starting at position 371 of SEQ ID NO: 318286
gacacuauucugggauacu

SEQ ID NO: 348064 - RNA, 19 nt, Artificial Sequence
  Description of Artificial Sequence: Synthetic oligonucleotide
  Antisense Strand to SEQ ID NO: 348063
aguaucccagaauaguguc

SEQ ID NO: 348065 - RNA, 19 nt, Artificial Sequence
  Description of Artificial Sequence: Synthetic oligonucleotide
  Sense Strand Starting at position 371 of SEQ ID NO: 318355
gagacugaucccugcucua

SEQ ID NO: 348066 - RNA, 19 nt, Artificial Sequence
  Description of Artificial Sequence: Synthetic oligonucleotide
  Antisense Strand to SEQ ID NO: 348065
uagagcagggaucagucuc

SEQ ID NO: 348067 - RNA, 19 nt, Artificial Sequence
  Description of Artificial Sequence: Synthetic oligonucleotide
  Sense Strand Starting at position 371 of SEQ ID NO: 318377
aagauccugccauagguaa

SEQ ID NO: 348068 - RNA, 19 nt, Artificial Sequence
  Description of Artificial Sequence: Synthetic oligonucleotide
  Antisense Strand to SEQ ID NO: 348067
uuaccuauggcaggaucuu

SEQ ID NO: 348069 - RNA, 19 nt, Artificial Sequence
  Description of Artificial Sequence: Synthetic oligonucleotide
  Sense Strand Starting at position 371 of SEQ ID NO: 318388
auagguaaacccugugacu

SEQ ID NO: 348070 - RNA, 19 nt, Artificial Sequence
  Description of Artificial Sequence: Synthetic oligonucleotide
  Antisense Strand to SEQ ID NO: 348069
agucacaggguuuaccuau

SEQ ID NO: 348071 - RNA, 19 nt, Artificial Sequence
  Description of Artificial Sequence: Synthetic oligonucleotide
  Sense Strand Starting at position 371 of SEQ ID NO: 318390
agguaaacccugugacucu

SEQ ID NO: 348072 - RNA, 19 nt, Artificial Sequence
  Description of Artificial Sequence: Synthetic oligonucleotide
  Antisense Strand to SEQ ID NO: 348071
agagucacaggguuuaccu

SEQ ID NO: 348073 - RNA, 19 nt, Artificial Sequence
  Description of Artificial Sequence: Synthetic oligonucleotide
  Sense Strand Starting at position 371 of SEQ ID NO: 318524
uugcaaguugcacauagaa

SEQ ID NO: 348074 - RNA, 19 nt, Artificial Sequence
  Description of Artificial Sequence: Synthetic oligonucleotide
  Antisense Strand to SEQ ID NO: 348073
uucuaugugcaacuugcaa

SEQ ID NO: 348075 - RNA, 19 nt, Artificial Sequence
  Description of Artificial Sequence: Synthetic oligonucleotide
  Sense Strand Starting at position 371 of SEQ ID NO: 318652
aaggaaauggcauguguua

SEQ ID NO: 348076 - RNA, 19 nt, Artificial Sequence
  Description of Artificial Sequence: Synthetic oligonucleotide
  Antisense Strand to SEQ ID NO: 348075
uaacacaugccauuuccuu

SEQ ID NO: 348077 - RNA, 19 nt, Artificial Sequence
  Description of Artificial Sequence: Synthetic oligonucleotide
  Sense Strand Starting at position 371 of SEQ ID NO: 318654
ggaaauggcauguguuaag

SEQ ID NO: 348078 - RNA, 19 nt, Artificial Sequence
  Description of Artificial Sequence: Synthetic oligonucleotide
  Antisense Strand to SEQ ID NO: 348077
cuuaacacaugccauuucc

SEQ ID NO: 348079 - RNA, 19 nt, Artificial Sequence
  Description of Artificial Sequence: Synthetic oligonucleotide
  Sense Strand Starting at position 371 of SEQ ID NO: 318664
uguguuaagcaucugcagu

SEQ ID NO: 348080 - RNA, 19 nt, Artificial Sequence
  Description of Artificial Sequence: Synthetic oligonucleotide
  Antisense Strand to SEQ ID NO: 348079
acugcagaugcuuaacaca

SEQ ID NO: 348081 - RNA, 19 nt, Artificial Sequence
  Description of Artificial Sequence: Synthetic oligonucleotide
  Sense Strand Starting at position 371 of SEQ ID NO: 318719
aaauguggccuugagguuu

SEQ ID NO: 348082 - RNA, 19 nt, Artificial Sequence
  Description of Artificial Sequence: Synthetic oligonucleotide
  Antisense Strand to SEQ ID NO: 348081
aaaccucaaggccacauuu

SEQ ID NO: 348083 - RNA, 19 nt, Artificial Sequence
  Description of Artificial Sequence: Synthetic oligonucleotide
  Sense Strand Starting at position 371 of SEQ ID NO: 318785
cguccugaucugccugcaa

SEQ ID NO: 348084 - RNA, 19 nt, Artificial Sequence
  Description of Artificial Sequence: Synthetic oligonucleotide
  Antisense Strand to SEQ ID NO: 348083
uugcaggcagaucaggacg

SEQ ID NO: 348085 - RNA, 19 nt, Artificial Sequence
  Description of Artificial Sequence: Synthetic oligonucleotide
  Sense Strand Starting at position 372 of SEQ ID NO: 315396
aagauuguguuaucuguag

SEQ ID NO: 348086 - RNA, 19 nt, Artificial Sequence
  Description of Artificial Sequence: Synthetic oligonucleotide
  Antisense Strand to SEQ ID NO: 348085
cuacagauaacacaaucuu

SEQ ID NO: 348087 - RNA, 19 nt, Artificial Sequence
  Description of Artificial Sequence: Synthetic oligonucleotide
  Sense Strand Starting at position 372 of SEQ ID NO: 315400
uuguguuaucuguaguauu

SEQ ID NO: 348088 - RNA, 19 nt, Artificial Sequence
  Description of Artificial Sequence: Synthetic oligonucleotide
  Antisense Strand to SEQ ID NO: 348087
aauacuacagauaacacaa

SEQ ID NO: 348089 - RNA, 19 nt, Artificial Sequence
  Description of Artificial Sequence: Synthetic oligonucleotide
  Sense Strand Starting at position 372 of SEQ ID NO: 315535
accacagguccagguuuaa

SEQ ID NO: 348090 - RNA, 19 nt, Artificial Sequence
  Description of Artificial Sequence: Synthetic oligonucleotide
  Antisense Strand to SEQ ID NO: 348089
uuaaaccuggaccuguggu

SEQ ID NO: 348091 - RNA, 19 nt, Artificial Sequence
  Description of Artificial Sequence: Synthetic oligonucleotide
  Sense Strand Starting at position 372 of SEQ ID NO: 315625
ucugcuaaggucugccaaa

SEQ ID NO: 348092 - RNA, 19 nt, Artificial Sequence
  Description of Artificial Sequence: Synthetic oligonucleotide
  Antisense Strand to SEQ ID NO: 348091
uuuggcagaccuuagcaga

SEQ ID NO: 348093 - RNA, 19 nt, Artificial Sequence
  Description of Artificial Sequence: Synthetic oligonucleotide
  Sense Strand Starting at position 372 of SEQ ID NO: 315651
uuguuaugacaguauaaug

SEQ ID NO: 348094 - RNA, 19 nt, Artificial Sequence
  Description of Artificial Sequence: Synthetic oligonucleotide
  Antisense Strand to SEQ ID NO: 348093
cauuauacugucauaacaa

SEQ ID NO: 348095 - RNA, 19 nt, Artificial Sequence
  Description of Artificial Sequence: Synthetic oligonucleotide
  Sense Strand Starting at position 372 of SEQ ID NO: 315749
uugggucuccggcaaagaa

SEQ ID NO: 348096 - RNA, 19 nt, Artificial Sequence
  Description of Artificial Sequence: Synthetic oligonucleotide
  Antisense Strand to SEQ ID NO: 348095
uucuuugccggagacccaa

SEQ ID NO: 348097 - RNA, 19 nt, Artificial Sequence
  Description of Artificial Sequence: Synthetic oligonucleotide
  Sense Strand Starting at position 372 of SEQ ID NO: 315786
uucuuauagacgggugcua

SEQ ID NO: 348098 - RNA, 19 nt, Artificial Sequence
  Description of Artificial Sequence: Synthetic oligonucleotide
  Antisense Strand to SEQ ID NO: 348097
uagcacccgucuauaagaa

SEQ ID NO: 348099 - RNA, 19 nt, Artificial Sequence
  Description of Artificial Sequence: Synthetic oligonucleotide
  Sense Strand Starting at position 372 of SEQ ID NO: 315788
cuuauagacgggugcuaua

SEQ ID NO: 348100 - RNA, 19 nt, Artificial Sequence
  Description of Artificial Sequence: Synthetic oligonucleotide
  Antisense Strand to SEQ ID NO: 348099
uauagcacccgucuauaag

SEQ ID NO: 348101 - RNA, 19 nt, Artificial Sequence
  Description of Artificial Sequence: Synthetic oligonucleotide
  Sense Strand Starting at position 372 of SEQ ID NO: 315824
aagaaaugagcuugucuua

SEQ ID NO: 348102 - RNA, 19 nt, Artificial Sequence
  Description of Artificial Sequence: Synthetic oligonucleotide
  Antisense Strand to SEQ ID NO: 348101
uaagacaagcucauuucuu

SEQ ID NO: 348103 - RNA, 19 nt, Artificial Sequence
  Description of Artificial Sequence: Synthetic oligonucleotide
  Sense Strand Starting at position 372 of SEQ ID NO: 316007
ccaaaugcucuugggacaa

SEQ ID NO: 348104 - RNA, 19 nt, Artificial Sequence
  Description of Artificial Sequence: Synthetic oligonucleotide
  Antisense Strand to SEQ ID NO: 348103
uugucccaagagcauuugg

SEQ ID NO: 348105 - RNA, 19 nt, Artificial Sequence
  Description of Artificial Sequence: Synthetic oligonucleotide
  Sense Strand Starting at position 372 of SEQ ID NO: 316136
ggcacaguucuagguccaa

SEQ ID NO: 348106 - RNA, 19 nt, Artificial Sequence
  Description of Artificial Sequence: Synthetic oligonucleotide
  Antisense Strand to SEQ ID NO: 348105
uuggaccuagaacugugcc

SEQ ID NO: 348107 - RNA, 19 nt, Artificial Sequence
  Description of Artificial Sequence: Synthetic oligonucleotide
  Sense Strand Starting at position 372 of SEQ ID NO: 316378
uggguugucccuugagaaa

SEQ ID NO: 348108 - RNA, 19 nt, Artificial Sequence
  Description of Artificial Sequence: Synthetic oligonucleotide
  Antisense Strand to SEQ ID NO: 348107
uuucucaagggacaaccca

SEQ ID NO: 348109 - RNA, 19 nt, Artificial Sequence
  Description of Artificial Sequence: Synthetic oligonucleotide
  Sense Strand Starting at position 372 of SEQ ID NO: 316476
acuguagguguucaggaaa

SEQ ID NO: 348110 - RNA, 19 nt, Artificial Sequence
  Description of Artificial Sequence: Synthetic oligonucleotide
  Antisense Strand to SEQ ID NO: 348109
uuuccugaacaccuacagu

SEQ ID NO: 348111 - RNA, 19 nt, Artificial Sequence
  Description of Artificial Sequence: Synthetic oligonucleotide
  Sense Strand Starting at position 372 of SEQ ID NO: 316789
uagaaaguguugccgaaac

SEQ ID NO: 348112 - RNA, 19 nt, Artificial Sequence
  Description of Artificial Sequence: Synthetic oligonucleotide
  Antisense Strand to SEQ ID NO: 348111
guuucggcaacacuuucua

SEQ ID NO: 348113 - RNA, 19 nt, Artificial Sequence
  Description of Artificial Sequence: Synthetic oligonucleotide
  Sense Strand Starting at position 372 of SEQ ID NO: 316791
gaaaguguugccgaaacuu

SEQ ID NO: 348114 - RNA, 19 nt, Artificial Sequence
  Description of Artificial Sequence: Synthetic oligonucleotide
  Antisense Strand to SEQ ID NO: 348113
aaguuucggcaacacuuuc

SEQ ID NO: 348115 - RNA, 19 nt, Artificial Sequence
  Description of Artificial Sequence: Synthetic oligonucleotide
  Sense Strand Starting at position 372 of SEQ ID NO: 317790
cacaguugggugugacaga

SEQ ID NO: 348116 - RNA, 19 nt, Artificial Sequence
  Description of Artificial Sequence: Synthetic oligonucleotide
  Antisense Strand to SEQ ID NO: 348115
ucugucacacccaacugug

SEQ ID NO: 348117 - RNA, 19 nt, Artificial Sequence
  Description of Artificial Sequence: Synthetic oligonucleotide
  Sense Strand Starting at position 372 of SEQ ID NO: 317941
ugcauuccucuuggugaga

SEQ ID NO: 348118 - RNA, 19 nt, Artificial Sequence
  Description of Artificial Sequence: Synthetic oligonucleotide
  Antisense Strand to SEQ ID NO: 348117
ucucaccaagaggaaugca

SEQ ID NO: 348119 - RNA, 19 nt, Artificial Sequence
  Description of Artificial Sequence: Synthetic oligonucleotide
  Sense Strand Starting at position 372 of SEQ ID NO: 317954
gugagagcauacuuccuaa

SEQ ID NO: 348120 - RNA, 19 nt, Artificial Sequence
  Description of Artificial Sequence: Synthetic oligonucleotide
  Antisense Strand to SEQ ID NO: 348119
uuaggaaguaugcucucac

SEQ ID NO: 348121 - RNA, 19 nt, Artificial Sequence
  Description of Artificial Sequence: Synthetic oligonucleotide
  Sense Strand Starting at position 372 of SEQ ID NO: 318105
ccagaucugcccuaaagca

SEQ ID NO: 348122 - RNA, 19 nt, Artificial Sequence
  Description of Artificial Sequence: Synthetic oligonucleotide
  Antisense Strand to SEQ ID NO: 348121
ugcuuuagggcagaucugg

SEQ ID NO: 348123 - RNA, 19 nt, Artificial Sequence
  Description of Artificial Sequence: Synthetic oligonucleotide
  Sense Strand Starting at position 372 of SEQ ID NO: 318165
gagcgcucugcuuccugua

SEQ ID NO: 348124 - RNA, 19 nt, Artificial Sequence
  Description of Artificial Sequence: Synthetic oligonucleotide
  Antisense Strand to SEQ ID NO: 348123
uacaggaagcagagcgcuc

SEQ ID NO: 348125 - RNA, 19 nt, Artificial Sequence
  Description of Artificial Sequence: Synthetic oligonucleotide
  Sense Strand Starting at position 372 of SEQ ID NO: 318203
ucccuuaggcggugagauu

SEQ ID NO: 348126 - RNA, 19 nt, Artificial Sequence
  Description of Artificial Sequence: Synthetic oligonucleotide
  Antisense Strand to SEQ ID NO: 348125
aaucucaccgccuaaggga

SEQ ID NO: 348127 - RNA, 19 nt, Artificial Sequence
  Description of Artificial Sequence: Synthetic oligonucleotide
  Sense Strand Starting at position 372 of SEQ ID NO: 318215
ugagauuccugagcccaaa

SEQ ID NO: 348128 - RNA, 19 nt, Artificial Sequence
  Description of Artificial Sequence: Synthetic oligonucleotide
  Antisense Strand to SEQ ID NO: 348127
uuugggcucaggaaucuca

SEQ ID NO: 348129 - RNA, 19 nt, Artificial Sequence
  Description of Artificial Sequence: Synthetic oligonucleotide
  Sense Strand Starting at position 372 of SEQ ID NO: 318218
gauuccugagcccaaagua

SEQ ID NO: 348130 - RNA, 19 nt, Artificial Sequence
  Description of Artificial Sequence: Synthetic oligonucleotide
  Antisense Strand to SEQ ID NO: 348129
uacuuugggcucaggaauc

SEQ ID NO: 348131 - RNA, 19 nt, Artificial Sequence
  Description of Artificial Sequence: Synthetic oligonucleotide
  Sense Strand Starting at position 372 of SEQ ID NO: 318305
gcaugaggccugugaacac

SEQ ID NO: 348132 - RNA, 19 nt, Artificial Sequence
  Description of Artificial Sequence: Synthetic oligonucleotide
  Antisense Strand to SEQ ID NO: 348131
guguucacaggccucaugc

SEQ ID NO: 348133 - RNA, 19 nt, Artificial Sequence
  Description of Artificial Sequence: Synthetic oligonucleotide
  Sense Strand Starting at position 372 of SEQ ID NO: 318370
gauaguuccucucuggcuu

SEQ ID NO: 348134 - RNA, 19 nt, Artificial Sequence
  Description of Artificial Sequence: Synthetic oligonucleotide
  Antisense Strand to SEQ ID NO: 348133
aagccagagaggaacuauc

SEQ ID NO: 348135 - RNA, 19 nt, Artificial Sequence
  Description of Artificial Sequence: Synthetic oligonucleotide
  Sense Strand Starting at position 372 of SEQ ID NO: 318374
guuccucucuggcuuugaa

SEQ ID NO: 348136 - RNA, 19 nt, Artificial Sequence
  Description of Artificial Sequence: Synthetic oligonucleotide
  Antisense Strand to SEQ ID NO: 348135
uucaaagccagagaggaac

SEQ ID NO: 348137 - RNA, 19 nt, Artificial Sequence
  Description of Artificial Sequence: Synthetic oligonucleotide
  Sense Strand Starting at position 372 of SEQ ID NO: 318381
ucuggcuuugaacagugaa

SEQ ID NO: 348138 - RNA, 19 nt, Artificial Sequence
  Description of Artificial Sequence: Synthetic oligonucleotide
  Antisense Strand to SEQ ID NO: 348137
uucacuguucaaagccaga

SEQ ID NO: 348139 - RNA, 19 nt, Artificial Sequence
  Description of Artificial Sequence: Synthetic oligonucleotide
  Sense Strand Starting at position 372 of SEQ ID NO: 318465
gagcauucgcugggaugga

SEQ ID NO: 348140 - RNA, 19 nt, Artificial Sequence
  Description of Artificial Sequence: Synthetic oligonucleotide
  Antisense Strand to SEQ ID NO: 348139
uccaucccagcgaaugcuc

SEQ ID NO: 348141 - RNA, 19 nt, Artificial Sequence
  Description of Artificial Sequence: Synthetic oligonucleotide
  Sense Strand Starting at position 372 of SEQ ID NO: 318510
gggcaucaacagcaucaua

SEQ ID NO: 348142 - RNA, 19 nt, Artificial Sequence
  Description of Artificial Sequence: Synthetic oligonucleotide
  Antisense Strand to SEQ ID NO: 348141
uaugaugcuguugaugccc

SEQ ID NO: 348143 - RNA, 19 nt, Artificial Sequence
  Description of Artificial Sequence: Synthetic oligonucleotide
  Sense Strand Starting at position 372 of SEQ ID NO: 318567
aaagguaaucaaggucaca

SEQ ID NO: 348144 - RNA, 19 nt, Artificial Sequence
  Description of Artificial Sequence: Synthetic oligonucleotide
  Antisense Strand to SEQ ID NO: 348143
ugugaccuugauuaccuuu

SEQ ID NO: 348145 - RNA, 19 nt, Artificial Sequence
  Description of Artificial Sequence: Synthetic oligonucleotide
  Sense Strand Starting at position 372 of SEQ ID NO: 318718
gcauuuaucuuguugcuua

SEQ ID NO: 348146 - RNA, 19 nt, Artificial Sequence
  Description of Artificial Sequence: Synthetic oligonucleotide
  Antisense Strand to SEQ ID NO: 348145
uaagcaacaagauaaaugc

SEQ ID NO: 348147 - RNA, 19 nt, Artificial Sequence
  Description of Artificial Sequence: Synthetic oligonucleotide
  Sense Strand Starting at position 372 of SEQ ID NO: 318753
uuccaagaagcgugguaua

SEQ ID NO: 348148 - RNA, 19 nt, Artificial Sequence
  Description of Artificial Sequence: Synthetic oligonucleotide
  Antisense Strand to SEQ ID NO: 348147
uauaccacgcuucuuggaa

SEQ ID NO: 348149 - RNA, 19 nt, Artificial Sequence
  Description of Artificial Sequence: Synthetic oligonucleotide
  Sense Strand Starting at position 372 of SEQ ID NO: 318766
gguauauggcauuguuuaa

SEQ ID NO: 348150 - RNA, 19 nt, Artificial Sequence
  Description of Artificial Sequence: Synthetic oligonucleotide
  Antisense Strand to SEQ ID NO: 348149
uuaaacaaugccauauacc

SEQ ID NO: 348151 - RNA, 19 nt, Artificial Sequence
  Description of Artificial Sequence: Synthetic oligonucleotide
  Sense Strand Starting at position 372 of SEQ ID NO: 318792
ugagcacuuuacccguaau

SEQ ID NO: 348152 - RNA, 19 nt, Artificial Sequence
  Description of Artificial Sequence: Synthetic oligonucleotide
  Antisense Strand to SEQ ID NO: 348151
auuacggguaaagugcuca

SEQ ID NO: 348153 - RNA, 19 nt, Artificial Sequence
  Description of Artificial Sequence: Synthetic oligonucleotide
  Sense Strand Starting at position 372 of SEQ ID NO: 318795
gcacuuuacccguaauaac

SEQ ID NO: 348154 - RNA, 19 nt, Artificial Sequence
  Description of Artificial Sequence: Synthetic oligonucleotide
  Antisense Strand to SEQ ID NO: 348153
guuauuacggguaaagugc

SEQ ID NO: 348155 - RNA, 19 nt, Artificial Sequence
  Description of Artificial Sequence: Synthetic oligonucleotide
  Sense Strand Starting at position 372 of SEQ ID NO: 318839
ugaggaagauacuauuaac

SEQ ID NO: 348156 - RNA, 19 nt, Artificial Sequence
  Description of Artificial Sequence: Synthetic oligonucleotide
  Antisense Strand to SEQ ID NO: 348155
guuaauaguaucuuccuca

SEQ ID NO: 348157 - RNA, 19 nt, Artificial Sequence
  Description of Artificial Sequence: Synthetic oligonucleotide
  Sense Strand Starting at position 372 of SEQ ID NO: 318842
ggaagauacuauuaaccca

SEQ ID NO: 348158 - RNA, 19 nt, Artificial Sequence
  Description of Artificial Sequence: Synthetic oligonucleotide
  Antisense Strand to SEQ ID NO: 348157
uggguuaauaguaucuucc

SEQ ID NO: 348159 - RNA, 19 nt, Artificial Sequence
  Description of Artificial Sequence: Synthetic oligonucleotide
  Sense Strand Starting at position 372 of SEQ ID NO: 319100
gcaacaguuuccuuccaga

SEQ ID NO: 348160 - RNA, 19 nt, Artificial Sequence
  Description of Artificial Sequence: Synthetic oligonucleotide
  Antisense Strand to SEQ ID NO: 348159
ucuggaaggaaacuguugc

SEQ ID NO: 348161 - RNA, 19 nt, Artificial Sequence
  Description of Artificial Sequence: Synthetic oligonucleotide
  Sense Strand Starting at position 372 of SEQ ID NO: 319138
gcaagcauauaucuagauu

SEQ ID NO: 348162 - RNA, 19 nt, Artificial Sequence
  Description of Artificial Sequence: Synthetic oligonucleotide
  Antisense Strand to SEQ ID NO: 348161
aaucuagauauaugcuugc

SEQ ID NO: 348163 - RNA, 19 nt, Artificial Sequence
  Description of Artificial Sequence: Synthetic oligonucleotide
  Sense Strand Starting at position 372 of SEQ ID NO: 319195
ggaagcauuuaauaccaau

SEQ ID NO: 348164 - RNA, 19 nt, Artificial Sequence
  Description of Artificial Sequence: Synthetic oligonucleotide
  Antisense Strand to SEQ ID NO: 348163
auugguauuaaaugcuucc

SEQ ID NO: 348165 - RNA, 19 nt, Artificial Sequence
  Description of Artificial Sequence: Synthetic oligonucleotide
  Sense Strand Starting at position 373 of SEQ ID NO: 315269
cucaauugauagccaauga

SEQ ID NO: 348166 - RNA, 19 nt, Artificial Sequence
  Description of Artificial Sequence: Synthetic oligonucleotide
  Antisense Strand to SEQ ID NO: 348165
ucauuggcuaucaauugag

SEQ ID NO: 348167 - RNA, 19 nt, Artificial Sequence
  Description of Artificial Sequence: Synthetic oligonucleotide
  Sense Strand Starting at position 373 of SEQ ID NO: 315273
auugauagccaaugauaug

SEQ ID NO: 348168 - RNA, 19 nt, Artificial Sequence
  Description of Artificial Sequence: Synthetic oligonucleotide
  Antisense Strand to SEQ ID NO: 348167
cauaucauuggcuaucaau

SEQ ID NO: 348169 - RNA, 19 nt, Artificial Sequence
  Description of Artificial Sequence: Synthetic oligonucleotide
  Sense Strand Starting at position 373 of SEQ ID NO: 315279
agccaaugauauguuuaag

SEQ ID NO: 348170 - RNA, 19 nt, Artificial Sequence
  Description of Artificial Sequence: Synthetic oligonucleotide
  Antisense Strand to SEQ ID NO: 348169
cuuaaacauaucauuggcu

SEQ ID NO: 348171 - RNA, 19 nt, Artificial Sequence
  Description of Artificial Sequence: Synthetic oligonucleotide
  Sense Strand Starting at position 373 of SEQ ID NO: 315282
caaugauauguuuaagugu

SEQ ID NO: 348172 - RNA, 19 nt, Artificial Sequence
  Description of Artificial Sequence: Synthetic oligonucleotide
  Antisense Strand to SEQ ID NO: 348171
acacuuaaacauaucauug

SEQ ID NO: 348173 - RNA, 19 nt, Artificial Sequence
  Description of Artificial Sequence: Synthetic oligonucleotide
  Sense Strand Starting at position 373 of SEQ ID NO: 315327
agcucuuccuacuuagaug

SEQ ID NO: 348174 - RNA, 19 nt, Artificial Sequence
  Description of Artificial Sequence: Synthetic oligonucleotide
  Antisense Strand to SEQ ID NO: 348173
caucuaaguaggaagagcu

SEQ ID NO: 348175 - RNA, 19 nt, Artificial Sequence
  Description of Artificial Sequence: Synthetic oligonucleotide
  Sense Strand Starting at position 373 of SEQ ID NO: 315335
cuacuuagauggcuggaau

SEQ ID NO: 348176 - RNA, 19 nt, Artificial Sequence
  Description of Artificial Sequence: Synthetic oligonucleotide
  Antisense Strand to SEQ ID NO: 348175
auuccagccaucuaaguag

SEQ ID NO: 348177 - RNA, 19 nt, Artificial Sequence
  Description of Artificial Sequence: Synthetic oligonucleotide
  Sense Strand Starting at position 373 of SEQ ID NO: 315336
uacuuagauggcuggaaua

SEQ ID NO: 348178 - RNA, 19 nt, Artificial Sequence
  Description of Artificial Sequence: Synthetic oligonucleotide
  Antisense Strand to SEQ ID NO: 348177
uauuccagccaucuaagua

SEQ ID NO: 348179 - RNA, 19 nt, Artificial Sequence
  Description of Artificial Sequence: Synthetic oligonucleotide
  Sense Strand Starting at position 373 of SEQ ID NO: 315376
uucuuucugccuggaauga

SEQ ID NO: 348180 - RNA, 19 nt, Artificial Sequence
  Description of Artificial Sequence: Synthetic oligonucleotide
  Antisense Strand to SEQ ID NO: 348179
ucauuccaggcagaaagaa

SEQ ID NO: 348181 - RNA, 19 nt, Artificial Sequence
  Description of Artificial Sequence: Synthetic oligonucleotide
  Sense Strand Starting at position 373 of SEQ ID NO: 315416
ggcagccuacugugaucau

SEQ ID NO: 348182 - RNA, 19 nt, Artificial Sequence
  Description of Artificial Sequence: Synthetic oligonucleotide
  Antisense Strand to SEQ ID NO: 348181
augaucacaguaggcugcc

SEQ ID NO: 348183 - RNA, 19 nt, Artificial Sequence
  Description of Artificial Sequence: Synthetic oligonucleotide
  Sense Strand Starting at position 373 of SEQ ID NO: 315672
aagucaggugcucaauagu

SEQ ID NO: 348184 - RNA, 19 nt, Artificial Sequence
  Description of Artificial Sequence: Synthetic oligonucleotide
  Antisense Strand to SEQ ID NO: 348183
acuauugagcaccugacuu

SEQ ID NO: 348185 - RNA, 19 nt, Artificial Sequence
  Description of Artificial Sequence: Synthetic oligonucleotide
  Sense Strand Starting at position 373 of SEQ ID NO: 315675
ucaggugcucaauaguuga

SEQ ID NO: 348186 - RNA, 19 nt, Artificial Sequence
  Description of Artificial Sequence: Synthetic oligonucleotide
  Antisense Strand to SEQ ID NO: 348185
ucaacuauugagcaccuga

SEQ ID NO: 348187 - RNA, 19 nt, Artificial Sequence
  Description of Artificial Sequence: Synthetic oligonucleotide
  Sense Strand Starting at position 373 of SEQ ID NO: 315678
ggugcucaauaguugauuu

SEQ ID NO: 348188 - RNA, 19 nt, Artificial Sequence
  Description of Artificial Sequence: Synthetic oligonucleotide
  Antisense Strand to SEQ ID NO: 348187
aaaucaacuauugagcacc

SEQ ID NO: 348189 - RNA, 19 nt, Artificial Sequence
  Description of Artificial Sequence: Synthetic oligonucleotide
  Sense Strand Starting at position 373 of SEQ ID NO: 315959
ccagaauaauguuccugga

SEQ ID NO: 348190 - RNA, 19 nt, Artificial Sequence
  Description of Artificial Sequence: Synthetic oligonucleotide
  Antisense Strand to SEQ ID NO: 348189
uccaggaacauuauucugg

SEQ ID NO: 348191 - RNA, 19 nt, Artificial Sequence
  Description of Artificial Sequence: Synthetic oligonucleotide
  Sense Strand Starting at position 373 of SEQ ID NO: 316125
gcauguaaucaguaggcaa

SEQ ID NO: 348192 - RNA, 19 nt, Artificial Sequence
  Description of Artificial Sequence: Synthetic oligonucleotide
  Antisense Strand to SEQ ID NO: 348191
uugccuacugauuacaugc

SEQ ID NO: 348193 - RNA, 19 nt, Artificial Sequence
  Description of Artificial Sequence: Synthetic oligonucleotide
  Sense Strand Starting at position 373 of SEQ ID NO: 316127
auguaaucaguaggcaaca

SEQ ID NO: 348194 - RNA, 19 nt, Artificial Sequence
  Description of Artificial Sequence: Synthetic oligonucleotide
  Antisense Strand to SEQ ID NO: 348193
uguugccuacugauuacau

SEQ ID NO: 348195 - RNA, 19 nt, Artificial Sequence
  Description of Artificial Sequence: Synthetic oligonucleotide
  Sense Strand Starting at position 373 of SEQ ID NO: 316173
aaaugagugugggugagaa

SEQ ID NO: 348196 - RNA, 19 nt, Artificial Sequence
  Description of Artificial Sequence: Synthetic oligonucleotide
  Antisense Strand to SEQ ID NO: 348195
uucucacccacacucauuu

SEQ ID NO: 348197 - RNA, 19 nt, Artificial Sequence
  Description of Artificial Sequence: Synthetic oligonucleotide
  Sense Strand Starting at position 373 of SEQ ID NO: 316189
gaaacaaugcguugcuuaa

SEQ ID NO: 348198 - RNA, 19 nt, Artificial Sequence
  Description of Artificial Sequence: Synthetic oligonucleotide
  Antisense Strand to SEQ ID NO: 348197
uuaagcaacgcauuguuuc

SEQ ID NO: 348199 - RNA, 19 nt, Artificial Sequence
  Description of Artificial Sequence: Synthetic oligonucleotide
  Sense Strand Starting at position 373 of SEQ ID NO: 316283
cuuagagccuaguuagaag

SEQ ID NO: 348200 - RNA, 19 nt, Artificial Sequence
  Description of Artificial Sequence: Synthetic oligonucleotide
  Antisense Strand to SEQ ID NO: 348199
cuucuaacuaggcucuaag

SEQ ID NO: 348201 - RNA, 19 nt, Artificial Sequence
  Description of Artificial Sequence: Synthetic oligonucleotide
  Sense Strand Starting at position 373 of SEQ ID NO: 316469
aagguccugcgagacaaau

SEQ ID NO: 348202 - RNA, 19 nt, Artificial Sequence
  Description of Artificial Sequence: Synthetic oligonucleotide
  Antisense Strand to SEQ ID NO: 348201
auuugucucgcaggaccuu

SEQ ID NO: 348203 - RNA, 19 nt, Artificial Sequence
  Description of Artificial Sequence: Synthetic oligonucleotide
  Sense Strand Starting at position 373 of SEQ ID NO: 316495
gucugagaaucauaacagg

SEQ ID NO: 348204 - RNA, 19 nt, Artificial Sequence
  Description of Artificial Sequence: Synthetic oligonucleotide
  Antisense Strand to SEQ ID NO: 348203
ccuguuaugauucucagac

SEQ ID NO: 348205 - RNA, 19 nt, Artificial Sequence
  Description of Artificial Sequence: Synthetic oligonucleotide
  Sense Strand Starting at position 373 of SEQ ID NO: 316542
uagauauccugggaggaag

SEQ ID NO: 348206 - RNA, 19 nt, Artificial Sequence
  Description of Artificial Sequence: Synthetic oligonucleotide
  Antisense Strand to SEQ ID NO: 348205
cuuccucccaggauaucua

SEQ ID NO: 348207 - RNA, 19 nt, Artificial Sequence
  Description of Artificial Sequence: Synthetic oligonucleotide
  Sense Strand Starting at position 373 of SEQ ID NO: 316636
cgggaucacggaugaguua

SEQ ID NO: 348208 - RNA, 19 nt, Artificial Sequence
  Description of Artificial Sequence: Synthetic oligonucleotide
  Antisense Strand to SEQ ID NO: 348207
uaacucauccgugaucccg

SEQ ID NO: 348209 - RNA, 19 nt, Artificial Sequence
  Description of Artificial Sequence: Synthetic oligonucleotide
  Sense Strand Starting at position 373 of SEQ ID NO: 316683
ugaguccagcacuggaaau

SEQ ID NO: 348210 - RNA, 19 nt, Artificial Sequence
  Description of Artificial Sequence: Synthetic oligonucleotide
  Antisense Strand to SEQ ID NO: 348209
auuuccagugcuggacuca

SEQ ID NO: 348211 - RNA, 19 nt, Artificial Sequence
  Description of Artificial Sequence: Synthetic oligonucleotide
  Sense Strand Starting at position 373 of SEQ ID NO: 316772
ugcuuccugagguauaaag

SEQ ID NO: 348212 - RNA, 19 nt, Artificial Sequence
  Description of Artificial Sequence: Synthetic oligonucleotide
  Antisense Strand to SEQ ID NO: 348211
cuuuauaccucaggaagca

SEQ ID NO: 348213 - RNA, 19 nt, Artificial Sequence
  Description of Artificial Sequence: Synthetic oligonucleotide
  Sense Strand Starting at position 373 of SEQ ID NO: 316779
ugagguauaaagugggauu

SEQ ID NO: 348214 - RNA, 19 nt, Artificial Sequence
  Description of Artificial Sequence: Synthetic oligonucleotide
  Antisense Strand to SEQ ID NO: 348213
aaucccacuuuauaccuca

SEQ ID NO: 348215 - RNA, 19 nt, Artificial Sequence
  Description of Artificial Sequence: Synthetic oligonucleotide
  Sense Strand Starting at position 373 of SEQ ID NO: 316780
gagguauaaagugggauua

SEQ ID NO: 348216 - RNA, 19 nt, Artificial Sequence
  Description of Artificial Sequence: Synthetic oligonucleotide
  Antisense Strand to SEQ ID NO: 348215
uaaucccacuuuauaccuc

SEQ ID NO: 348217 - RNA, 19 nt, Artificial Sequence
  Description of Artificial Sequence: Synthetic oligonucleotide
  Sense Strand Starting at position 373 of SEQ ID NO: 316782
gguauaaagugggauuaag

SEQ ID NO: 348218 - RNA, 19 nt, Artificial Sequence
  Description of Artificial Sequence: Synthetic oligonucleotide
  Antisense Strand to SEQ ID NO: 348217
cuuaaucccacuuuauacc

SEQ ID NO: 348219 - RNA, 19 nt, Artificial Sequence
  Description of Artificial Sequence: Synthetic oligonucleotide
  Sense Strand Starting at position 373 of SEQ ID NO: 316803
uggcaacaacuucgugauu

SEQ ID NO: 348220 - RNA, 19 nt, Artificial Sequence
  Description of Artificial Sequence: Synthetic oligonucleotide
  Antisense Strand to SEQ ID NO: 348219
aaucacgaaguuguugcca

SEQ ID NO: 348221 - RNA, 19 nt, Artificial Sequence
  Description of Artificial Sequence: Synthetic oligonucleotide
  Sense Strand Starting at position 373 of SEQ ID NO: 316804
ggcaacaacuucgugauua

SEQ ID NO: 348222 - RNA, 19 nt, Artificial Sequence
  Description of Artificial Sequence: Synthetic oligonucleotide
  Antisense Strand to SEQ ID NO: 348221
uaaucacgaaguuguugcc

SEQ ID NO: 348223 - RNA, 19 nt, Artificial Sequence
  Description of Artificial Sequence: Synthetic oligonucleotide
  Sense Strand Starting at position 373 of SEQ ID NO: 316808
acaacuucgugauuacugu

SEQ ID NO: 348224 - RNA, 19 nt, Artificial Sequence
  Description of Artificial Sequence: Synthetic oligonucleotide
  Antisense Strand to SEQ ID NO: 348223
acaguaaucacgaaguugu

SEQ ID NO: 348225 - RNA, 19 nt, Artificial Sequence
  Description of Artificial Sequence: Synthetic oligonucleotide
  Sense Strand Starting at position 373 of SEQ ID NO: 316809
caacuucgugauuacuguu

SEQ ID NO: 348226 - RNA, 19 nt, Artificial Sequence
  Description of Artificial Sequence: Synthetic oligonucleotide
  Antisense Strand to SEQ ID NO: 348225
aacaguaaucacgaaguug

SEQ ID NO: 348227 - RNA, 19 nt, Artificial Sequence
  Description of Artificial Sequence: Synthetic oligonucleotide
  Sense Strand Starting at position 373 of SEQ ID NO: 316831
ggagauaaugcuugccaag

SEQ ID NO: 348228 - RNA, 19 nt, Artificial Sequence
  Description of Artificial Sequence: Synthetic oligonucleotide
  Antisense Strand to SEQ ID NO: 348227
cuuggcaagcauuaucucc

SEQ ID NO: 348229 - RNA, 19 nt, Artificial Sequence
  Description of Artificial Sequence: Synthetic oligonucleotide
  Sense Strand Starting at position 373 of SEQ ID NO: 316833
agauaaugcuugccaagcu

SEQ ID NO: 348230 - RNA, 19 nt, Artificial Sequence
  Description of Artificial Sequence: Synthetic oligonucleotide
  Antisense Strand to SEQ ID NO: 348229
agcuuggcaagcauuaucu

SEQ ID NO: 348231 - RNA, 19 nt, Artificial Sequence
  Description of Artificial Sequence: Synthetic oligonucleotide
  Sense Strand Starting at position 373 of SEQ ID NO: 316883
accugaguaucagcgguuu

SEQ ID NO: 348232 - RNA, 19 nt, Artificial Sequence
  Description of Artificial Sequence: Synthetic oligonucleotide
  Antisense Strand to SEQ ID NO: 348231
aaaccgcugauacucaggu

SEQ ID NO: 348233 - RNA, 19 nt, Artificial Sequence
  Description of Artificial Sequence: Synthetic oligonucleotide
  Sense Strand Starting at position 373 of SEQ ID NO: 316901
uuaggauuacgaugacuau

SEQ ID NO: 348234 - RNA, 19 nt, Artificial Sequence
  Description of Artificial Sequence: Synthetic oligonucleotide
  Antisense Strand to SEQ ID NO: 348233
auagucaucguaauccuaa

SEQ ID NO: 348235 - RNA, 19 nt, Artificial Sequence
  Description of Artificial Sequence: Synthetic oligonucleotide
  Sense Strand Starting at position 373 of SEQ ID NO: 316954
aggcucauuccagauauuc

SEQ ID NO: 348236 - RNA, 19 nt, Artificial Sequence
  Description of Artificial Sequence: Synthetic oligonucleotide
  Antisense Strand to SEQ ID NO: 348235
gaauaucuggaaugagccu

SEQ ID NO: 348237 - RNA, 19 nt, Artificial Sequence
  Description of Artificial Sequence: Synthetic oligonucleotide
  Sense Strand Starting at position 373 of SEQ ID NO: 318911
gacagacacuuggauugua

SEQ ID NO: 348238 - RNA, 19 nt, Artificial Sequence
  Description of Artificial Sequence: Synthetic oligonucleotide
  Antisense Strand to SEQ ID NO: 348237
uacaauccaagugucuguc

SEQ ID NO: 348239 - RNA, 19 nt, Artificial Sequence
  Description of Artificial Sequence: Synthetic oligonucleotide
  Sense Strand Starting at position 373 of SEQ ID NO: 318988
gcacauucguccuccuaac

SEQ ID NO: 348240 - RNA, 19 nt, Artificial Sequence
  Description of Artificial Sequence: Synthetic oligonucleotide
  Antisense Strand to SEQ ID NO: 348239
guuaggaggacgaaugugc

SEQ ID NO: 348241 - RNA, 19 nt, Artificial Sequence
  Description of Artificial Sequence: Synthetic oligonucleotide
  Sense Strand Starting at position 373 of SEQ ID NO: 319007
ucgacuuucuuccugacaa

SEQ ID NO: 348242 - RNA, 19 nt, Artificial Sequence
  Description of Artificial Sequence: Synthetic oligonucleotide
  Antisense Strand to SEQ ID NO: 348241
uugucaggaagaaagucga

SEQ ID NO: 348243 - RNA, 19 nt, Artificial Sequence
  Description of Artificial Sequence: Synthetic oligonucleotide
  Sense Strand Starting at position 373 of SEQ ID NO: 319122
augcaacguuuccuaaaga

SEQ ID NO: 348244 - RNA, 19 nt, Artificial Sequence
  Description of Artificial Sequence: Synthetic oligonucleotide
  Antisense Strand to SEQ ID NO: 348243
ucuuuaggaaacguugcau

SEQ ID NO: 348245 - RNA, 19 nt, Artificial Sequence
  Description of Artificial Sequence: Synthetic oligonucleotide
  Sense Strand Starting at position 374 of SEQ ID NO: 315320
aagguccugcgagacaaau

SEQ ID NO: 348246 - RNA, 19 nt, Artificial Sequence
  Description of Artificial Sequence: Synthetic oligonucleotide
  Antisense Strand to SEQ ID NO: 348245
auuugucucgcaggaccuu

SEQ ID NO: 348247 - RNA, 19 nt, Artificial Sequence
  Description of Artificial Sequence: Synthetic oligonucleotide
  Sense Strand Starting at position 374 of SEQ ID NO: 315393
uagauauccugggaggaag

SEQ ID NO: 348248 - RNA, 19 nt, Artificial Sequence
  Description of Artificial Sequence: Synthetic oligonucleotide
  Antisense Strand to SEQ ID NO: 348247
cuuccucccaggauaucua

SEQ ID NO: 348249 - RNA, 19 nt, Artificial Sequence
  Description of Artificial Sequence: Synthetic oligonucleotide
  Sense Strand Starting at position 374 of SEQ ID NO: 315487
cgggaucacggaugaguua

SEQ ID NO: 348250 - RNA, 19 nt, Artificial Sequence
  Description of Artificial Sequence: Synthetic oligonucleotide
  Antisense Strand to SEQ ID NO: 348249
uaacucauccgugaucccg

SEQ ID NO: 348251 - RNA, 19 nt, Artificial Sequence
  Description of Artificial Sequence: Synthetic oligonucleotide
  Sense Strand Starting at position 374 of SEQ ID NO: 315534
ugaguccagcacuggaaau

SEQ ID NO: 348252 - RNA, 19 nt, Artificial Sequence
  Description of Artificial Sequence: Synthetic oligonucleotide
  Antisense Strand to SEQ ID NO: 348251
auuuccagugcuggacuca

SEQ ID NO: 348253 - RNA, 19 nt, Artificial Sequence
  Description of Artificial Sequence: Synthetic oligonucleotide
  Sense Strand Starting at position 374 of SEQ ID NO: 315623
ugcuuccugagguauaaag

SEQ ID NO: 348254 - RNA, 19 nt, Artificial Sequence
  Description of Artificial Sequence: Synthetic oligonucleotide
  Antisense Strand to SEQ ID NO: 348253
cuuuauaccucaggaagca

SEQ ID NO: 348255 - RNA, 19 nt, Artificial Sequence
  Description of Artificial Sequence: Synthetic oligonucleotide
  Sense Strand Starting at position 374 of SEQ ID NO: 315630
ugagguauaaagugggauu

SEQ ID NO: 348256 - RNA, 19 nt, Artificial Sequence
  Description of Artificial Sequence: Synthetic oligonucleotide
  Antisense Strand to SEQ ID NO: 348255
aaucccacuuuauaccuca

SEQ ID NO: 348257 - RNA, 19 nt, Artificial Sequence
  Description of Artificial Sequence: Synthetic oligonucleotide
  Sense Strand Starting at position 374 of SEQ ID NO: 315631
gagguauaaagugggauua

SEQ ID NO: 348258 - RNA, 19 nt, Artificial Sequence
  Description of Artificial Sequence: Synthetic oligonucleotide
  Antisense Strand to SEQ ID NO: 348257
uaaucccacuuuauaccuc

SEQ ID NO: 348259 - RNA, 19 nt, Artificial Sequence
  Description of Artificial Sequence: Synthetic oligonucleotide
  Sense Strand Starting at position 374 of SEQ ID NO: 315654
uggcaacaacuucgugauu

SEQ ID NO: 348260 - RNA, 19 nt, Artificial Sequence
  Description of Artificial Sequence: Synthetic oligonucleotide
  Antisense Strand to SEQ ID NO: 348259
aaucacgaaguuguugcca

SEQ ID NO: 348261 - RNA, 19 nt, Artificial Sequence
  Description of Artificial Sequence: Synthetic oligonucleotide
  Sense Strand Starting at position 374 of SEQ ID NO: 315655
ggcaacaacuucgugauua

SEQ ID NO: 348262 - RNA, 19 nt, Artificial Sequence
  Description of Artificial Sequence: Synthetic oligonucleotide
  Antisense Strand to SEQ ID NO: 348261
uaaucacgaaguuguugcc

SEQ ID NO: 348263 - RNA, 19 nt, Artificial Sequence
  Description of Artificial Sequence: Synthetic oligonucleotide
  Sense Strand Starting at position 374 of SEQ ID NO: 315659
acaacuucgugauuacugu

SEQ ID NO: 348264 - RNA, 19 nt, Artificial Sequence
  Description of Artificial Sequence: Synthetic oligonucleotide
  Antisense Strand to SEQ ID NO: 348263
acaguaaucacgaaguugu

SEQ ID NO: 348265 - RNA, 19 nt, Artificial Sequence
  Description of Artificial Sequence: Synthetic oligonucleotide
  Sense Strand Starting at position 374 of SEQ ID NO: 315660
caacuucgugauuacuguu

SEQ ID NO: 348266 - RNA, 19 nt, Artificial Sequence
  Description of Artificial Sequence: Synthetic oligonucleotide
  Antisense Strand to SEQ ID NO: 348265
aacaguaaucacgaaguug

SEQ ID NO: 348267 - RNA, 19 nt, Artificial Sequence
  Description of Artificial Sequence: Synthetic oligonucleotide
  Sense Strand Starting at position 374 of SEQ ID NO: 315682
ggagauaaugcuugccaag

SEQ ID NO: 348268 - RNA, 19 nt, Artificial Sequence
  Description of Artificial Sequence: Synthetic oligonucleotide
  Antisense Strand to SEQ ID NO: 348267
cuuggcaagcauuaucucc

SEQ ID NO: 348269 - RNA, 19 nt, Artificial Sequence
  Description of Artificial Sequence: Synthetic oligonucleotide
  Sense Strand Starting at position 374 of SEQ ID NO: 315684
agauaaugcuugccaagcu

SEQ ID NO: 348270 - RNA, 19 nt, Artificial Sequence
  Description of Artificial Sequence: Synthetic oligonucleotide
  Antisense Strand to SEQ ID NO: 348269
agcuuggcaagcauuaucu

SEQ ID NO: 348271 - RNA, 19 nt, Artificial Sequence
  Description of Artificial Sequence: Synthetic oligonucleotide
  Sense Strand Starting at position 374 of SEQ ID NO: 315752
uuaggauuacgaugacuau

SEQ ID NO: 348272 - RNA, 19 nt, Artificial Sequence
  Description of Artificial Sequence: Synthetic oligonucleotide
  Antisense Strand to SEQ ID NO: 348271
auagucaucguaauccuaa

SEQ ID NO: 348273 - RNA, 19 nt, Artificial Sequence
  Description of Artificial Sequence: Synthetic oligonucleotide
  Sense Strand Starting at position 374 of SEQ ID NO: 315805
aggcucauuccagauauuc

SEQ ID NO: 348274 - RNA, 19 nt, Artificial Sequence
  Description of Artificial Sequence: Synthetic oligonucleotide
  Antisense Strand to SEQ ID NO: 348273
gaauaucuggaaugagccu

SEQ ID NO: 348275 - RNA, 19 nt, Artificial Sequence
  Description of Artificial Sequence: Synthetic oligonucleotide
  Sense Strand Starting at position 374 of SEQ ID NO: 317858
ucgacuuucuuccugacaa

SEQ ID NO: 348276 - RNA, 19 nt, Artificial Sequence
  Description of Artificial Sequence: Synthetic oligonucleotide
  Antisense Strand to SEQ ID NO: 348275
uugucaggaagaaagucga

SEQ ID NO: 348277 - RNA, 19 nt, Artificial Sequence
  Description of Artificial Sequence: Synthetic oligonucleotide
  Sense Strand Starting at position 374 of SEQ ID NO: 317973
augcaacguuuccuaaaga

SEQ ID NO: 348278 - RNA, 19 nt, Artificial Sequence
  Description of Artificial Sequence: Synthetic oligonucleotide
  Antisense Strand to SEQ ID NO: 348277
ucuuuaggaaacguugcau

SEQ ID NO: 348279 - RNA, 19 nt, Artificial Sequence
  Description of Artificial Sequence: Synthetic oligonucleotide
  Sense Strand Starting at position 374 of SEQ ID NO: 318089
uagauuucuugaggaucuu

SEQ ID NO: 348280 - RNA, 19 nt, Artificial Sequence
  Description of Artificial Sequence: Synthetic oligonucleotide
  Antisense Strand to SEQ ID NO: 348279
aagauccucaagaaaucua

SEQ ID NO: 348281 - RNA, 19 nt, Artificial Sequence
  Description of Artificial Sequence: Synthetic oligonucleotide
  Sense Strand Starting at position 374 of SEQ ID NO: 318098
ugaggaucuucuguuggaa

SEQ ID NO: 348282 - RNA, 19 nt, Artificial Sequence
  Description of Artificial Sequence: Synthetic oligonucleotide
  Antisense Strand to SEQ ID NO: 348281
uuccaacagaagauccuca

SEQ ID NO: 348283 - RNA, 19 nt, Artificial Sequence
  Description of Artificial Sequence: Synthetic oligonucleotide
  Sense Strand Starting at position 374 of SEQ ID NO: 318101
ggaucuucuguuggaagca

SEQ ID NO: 348284 - RNA, 19 nt, Artificial Sequence
  Description of Artificial Sequence: Synthetic oligonucleotide
  Antisense Strand to SEQ ID NO: 348283
ugcuuccaacagaagaucc

SEQ ID NO: 348285 - RNA, 19 nt, Artificial Sequence
  Description of Artificial Sequence: Synthetic oligonucleotide
  Sense Strand Starting at position 374 of SEQ ID NO: 318150
cgaaaugcccucugaauug

SEQ ID NO: 348286 - RNA, 19 nt, Artificial Sequence
  Description of Artificial Sequence: Synthetic oligonucleotide
  Antisense Strand to SEQ ID NO: 348285
caauucagagggcauuucg

SEQ ID NO: 348287 - RNA, 19 nt, Artificial Sequence
  Description of Artificial Sequence: Synthetic oligonucleotide
  Sense Strand Starting at position 374 of SEQ ID NO: 318202
uugaaagucucaguguuga

SEQ ID NO: 348288 - RNA, 19 nt, Artificial Sequence
  Description of Artificial Sequence: Synthetic oligonucleotide
  Antisense Strand to SEQ ID NO: 348287
ucaacacugagacuuucaa

SEQ ID NO: 348289 - RNA, 19 nt, Artificial Sequence
  Description of Artificial Sequence: Synthetic oligonucleotide
  Sense Strand Starting at position 374 of SEQ ID NO: 318361
agcaaucuugaauggaaac

SEQ ID NO: 348290 - RNA, 19 nt, Artificial Sequence
  Description of Artificial Sequence: Synthetic oligonucleotide
  Antisense Strand to SEQ ID NO: 348289
guuuccauucaagauugcu

SEQ ID NO: 348291 - RNA, 19 nt, Artificial Sequence
  Description of Artificial Sequence: Synthetic oligonucleotide
  Sense Strand Starting at position 374 of SEQ ID NO: 318373
uggaaacauuucugucaag

SEQ ID NO: 348292 - RNA, 19 nt, Artificial Sequence
  Description of Artificial Sequence: Synthetic oligonucleotide
  Antisense Strand to SEQ ID NO: 348291
cuugacagaaauguuucca

SEQ ID NO: 348293 - RNA, 19 nt, Artificial Sequence
  Description of Artificial Sequence: Synthetic oligonucleotide
  Sense Strand Starting at position 374 of SEQ ID NO: 318423
uuaguaaugauguggagaa

SEQ ID NO: 348294 - RNA, 19 nt, Artificial Sequence
  Description of Artificial Sequence: Synthetic oligonucleotide
  Antisense Strand to SEQ ID NO: 348293
uucuccacaucauuacuaa

SEQ ID NO: 348295 - RNA, 19 nt, Artificial Sequence
  Description of Artificial Sequence: Synthetic oligonucleotide
  Sense Strand Starting at position 374 of SEQ ID NO: 318458
guguucguguguauagauu

SEQ ID NO: 348296 - RNA, 19 nt, Artificial Sequence
  Description of Artificial Sequence: Synthetic oligonucleotide
  Antisense Strand to SEQ ID NO: 348295
aaucuauacacacgaacac

SEQ ID NO: 348297 - RNA, 19 nt, Artificial Sequence
  Description of Artificial Sequence: Synthetic oligonucleotide
  Sense Strand Starting at position 374 of SEQ ID NO: 318471
uagauugugguucgaggau

SEQ ID NO: 348298 - RNA, 19 nt, Artificial Sequence
  Description of Artificial Sequence: Synthetic oligonucleotide
  Antisense Strand to SEQ ID NO: 348297
auccucgaaccacaaucua

SEQ ID NO: 348299 - RNA, 19 nt, Artificial Sequence
  Description of Artificial Sequence: Synthetic oligonucleotide
  Sense Strand Starting at position 374 of SEQ ID NO: 318564
auggaaauggcuugugcuu

SEQ ID NO: 348300 - RNA, 19 nt, Artificial Sequence
  Description of Artificial Sequence: Synthetic oligonucleotide
  Antisense Strand to SEQ ID NO: 348299
aagcacaagccauuuccau

SEQ ID NO: 348301 - RNA, 19 nt, Artificial Sequence
  Description of Artificial Sequence: Synthetic oligonucleotide
  Sense Strand Starting at position 374 of SEQ ID NO: 318569
aauggcuugugcuuugaga

SEQ ID NO: 348302 - RNA, 19 nt, Artificial Sequence
  Description of Artificial Sequence: Synthetic oligonucleotide
  Antisense Strand to SEQ ID NO: 348301
ucucaaagcacaagccauu

SEQ ID NO: 348303 - RNA, 19 nt, Artificial Sequence
  Description of Artificial Sequence: Synthetic oligonucleotide
  Sense Strand Starting at position 374 of SEQ ID NO: 318666
ggaauauaaugauauccuc

SEQ ID NO: 348304 - RNA, 19 nt, Artificial Sequence
  Description of Artificial Sequence: Synthetic oligonucleotide
  Antisense Strand to SEQ ID NO: 348303
gaggauaucauuauauucc

SEQ ID NO: 348305 - RNA, 19 nt, Artificial Sequence
  Description of Artificial Sequence: Synthetic oligonucleotide
  Sense Strand Starting at position 374 of SEQ ID NO: 318711
aaauguuugcuagguuaag

SEQ ID NO: 348306 - RNA, 19 nt, Artificial Sequence
  Description of Artificial Sequence: Synthetic oligonucleotide
  Antisense Strand to SEQ ID NO: 348305
cuuaaccuagcaaacauuu

SEQ ID NO: 348307 - RNA, 19 nt, Artificial Sequence
  Description of Artificial Sequence: Synthetic oligonucleotide
  Sense Strand Starting at position 374 of SEQ ID NO: 318733
ugcuguucuacugaugguu

SEQ ID NO: 348308 - RNA, 19 nt, Artificial Sequence
  Description of Artificial Sequence: Synthetic oligonucleotide
  Antisense Strand to SEQ ID NO: 348307
aaccaucaguagaacagca

SEQ ID NO: 348309 - RNA, 19 nt, Artificial Sequence
  Description of Artificial Sequence: Synthetic oligonucleotide
  Sense Strand Starting at position 374 of SEQ ID NO: 318823
agacuaaauucugcaagua

SEQ ID NO: 348310 - RNA, 19 nt, Artificial Sequence
  Description of Artificial Sequence: Synthetic oligonucleotide
  Antisense Strand to SEQ ID NO: 348309
uacuugcagaauuuagucu

SEQ ID NO: 348311 - RNA, 19 nt, Artificial Sequence
  Description of Artificial Sequence: Synthetic oligonucleotide
  Sense Strand Starting at position 374 of SEQ ID NO: 318908
aucuguauuucucuuugca

SEQ ID NO: 348312 - RNA, 19 nt, Artificial Sequence
  Description of Artificial Sequence: Synthetic oligonucleotide
  Antisense Strand to SEQ ID NO: 348311
ugcaaagagaaauacagau

SEQ ID NO: 348313 - RNA, 19 nt, Artificial Sequence
  Description of Artificial Sequence: Synthetic oligonucleotide
  Sense Strand Starting at position 374 of SEQ ID NO: 318910
cuguauuucucuuugcauu

SEQ ID NO: 348314 - RNA, 19 nt, Artificial Sequence
  Description of Artificial Sequence: Synthetic oligonucleotide
  Antisense Strand to SEQ ID NO: 348313
aaugcaaagagaaauacag

SEQ ID NO: 348315 - RNA, 19 nt, Artificial Sequence
  Description of Artificial Sequence: Synthetic oligonucleotide
  Sense Strand Starting at position 374 of SEQ ID NO: 318911
uguauuucucuuugcauua

SEQ ID NO: 348316 - RNA, 19 nt, Artificial Sequence
  Description of Artificial Sequence: Synthetic oligonucleotide
  Antisense Strand to SEQ ID NO: 348315
uaaugcaaagagaaauaca

SEQ ID NO: 348317 - RNA, 19 nt, Artificial Sequence
  Description of Artificial Sequence: Synthetic oligonucleotide
  Sense Strand Starting at position 374 of SEQ ID NO: 319002
aauacaugcgucgaaguau

SEQ ID NO: 348318 - RNA, 19 nt, Artificial Sequence
  Description of Artificial Sequence: Synthetic oligonucleotide
  Antisense Strand to SEQ ID NO: 348317
auacuucgacgcauguauu

SEQ ID NO: 348319 - RNA, 19 nt, Artificial Sequence
  Description of Artificial Sequence: Synthetic oligonucleotide
  Sense Strand Starting at position 374 of SEQ ID NO: 319021
guuacaugccucuaaguau

SEQ ID NO: 348320 - RNA, 19 nt, Artificial Sequence
  Description of Artificial Sequence: Synthetic oligonucleotide
  Antisense Strand to SEQ ID NO: 348319
auacuuagaggcauguaac

SEQ ID NO: 348321 - RNA, 19 nt, Artificial Sequence
  Description of Artificial Sequence: Synthetic oligonucleotide
  Sense Strand Starting at position 374 of SEQ ID NO: 319033
uaaguauguuauguaagga

SEQ ID NO: 348322 - RNA, 19 nt, Artificial Sequence
  Description of Artificial Sequence: Synthetic oligonucleotide
  Antisense Strand to SEQ ID NO: 348321
uccuuacauaacauacuua

SEQ ID NO: 348323 - RNA, 19 nt, Artificial Sequence
  Description of Artificial Sequence: Synthetic oligonucleotide
  Sense Strand Starting at position 374 of SEQ ID NO: 319048
aggauaacaugcucuauga

SEQ ID NO: 348324 - RNA, 19 nt, Artificial Sequence
  Description of Artificial Sequence: Synthetic oligonucleotide
  Antisense Strand to SEQ ID NO: 348323
ucauagagcauguuauccu

SEQ ID NO: 348325 - RNA, 19 nt, Artificial Sequence
  Description of Artificial Sequence: Synthetic oligonucleotide
  Sense Strand Starting at position 375 of SEQ ID NO: 315295
gcacuaggaucccaguaau

SEQ ID NO: 348326 - RNA, 19 nt, Artificial Sequence
  Description of Artificial Sequence: Synthetic oligonucleotide
  Antisense Strand to SEQ ID NO: 348325
auuacugggauccuagugc

SEQ ID NO: 348327 - RNA, 19 nt, Artificial Sequence
  Description of Artificial Sequence: Synthetic oligonucleotide
  Sense Strand Starting at position 375 of SEQ ID NO: 315356
gugaguaaucaacagggca

SEQ ID NO: 348328 - RNA, 19 nt, Artificial Sequence
  Description of Artificial Sequence: Synthetic oligonucleotide
  Antisense Strand to SEQ ID NO: 348327
ugcccuguugauuacucac

SEQ ID NO: 348329 - RNA, 19 nt, Artificial Sequence
  Description of Artificial Sequence: Synthetic oligonucleotide
  Sense Strand Starting at position 375 of SEQ ID NO: 315686
cggcaagagccuuaacaau

SEQ ID NO: 348330 - RNA, 19 nt, Artificial Sequence
  Description of Artificial Sequence: Synthetic oligonucleotide
  Antisense Strand to SEQ ID NO: 348329
auuguuaaggcucuugccg

SEQ ID NO: 348331 - RNA, 19 nt, Artificial Sequence
  Description of Artificial Sequence: Synthetic oligonucleotide
  Sense Strand Starting at position 375 of SEQ ID NO: 315777
ugcacuuugcccugacaca

SEQ ID NO: 348332 - RNA, 19 nt, Artificial Sequence
  Description of Artificial Sequence: Synthetic oligonucleotide
  Antisense Strand to SEQ ID NO: 348331
ugugucagggcaaagugca

SEQ ID NO: 348333 - RNA, 19 nt, Artificial Sequence
  Description of Artificial Sequence: Synthetic oligonucleotide
  Sense Strand Starting at position 375 of SEQ ID NO: 315866
ccuaauuaccugugggagu

SEQ ID NO: 348334 - RNA, 19 nt, Artificial Sequence
  Description of Artificial Sequence: Synthetic oligonucleotide
  Antisense Strand to SEQ ID NO: 348333
acucccacagguaauuagg

SEQ ID NO: 348335 - RNA, 19 nt, Artificial Sequence
  Description of Artificial Sequence: Synthetic oligonucleotide
  Sense Strand Starting at position 375 of SEQ ID NO: 316028
cggugaaaggguugaugca

SEQ ID NO: 348336 - RNA, 19 nt, Artificial Sequence
  Description of Artificial Sequence: Synthetic oligonucleotide
  Antisense Strand to SEQ ID NO: 348335
ugcaucaacccuuucaccg

SEQ ID NO: 348337 - RNA, 19 nt, Artificial Sequence
  Description of Artificial Sequence: Synthetic oligonucleotide
  Sense Strand Starting at position 375 of SEQ ID NO: 316029
ggugaaaggguugaugcaa

SEQ ID NO: 348338 - RNA, 19 nt, Artificial Sequence
  Description of Artificial Sequence: Synthetic oligonucleotide
  Antisense Strand to SEQ ID NO: 348337
uugcaucaacccuuucacc

SEQ ID NO: 348339 - RNA, 19 nt, Artificial Sequence
  Description of Artificial Sequence: Synthetic oligonucleotide
  Sense Strand Starting at position 375 of SEQ ID NO: 316783
ggcauuucgcggcgacgaa

SEQ ID NO: 348340 - RNA, 19 nt, Artificial Sequence
  Description of Artificial Sequence: Synthetic oligonucleotide
  Antisense Strand to SEQ ID NO: 348339
uucgucgccgcgaaaugcc

SEQ ID NO: 348341 - RNA, 19 nt, Artificial Sequence
  Description of Artificial Sequence: Synthetic oligonucleotide
  Sense Strand Starting at position 375 of SEQ ID NO: 317342
ucuguuccgcgauucuuua

SEQ ID NO: 348342 - RNA, 19 nt, Artificial Sequence
  Description of Artificial Sequence: Synthetic oligonucleotide
  Antisense Strand to SEQ ID NO: 348341
uaaagaaucgcggaacaga

SEQ ID NO: 348343 - RNA, 19 nt, Artificial Sequence
  Description of Artificial Sequence: Synthetic oligonucleotide
  Sense Strand Starting at position 375 of SEQ ID NO: 317783
cuccguccugccuaaguaa

SEQ ID NO: 348344 - RNA, 19 nt, Artificial Sequence
  Description of Artificial Sequence: Synthetic oligonucleotide
  Antisense Strand to SEQ ID NO: 348343
uuacuuaggcaggacggag

SEQ ID NO: 348345 - RNA, 19 nt, Artificial Sequence
  Description of Artificial Sequence: Synthetic oligonucleotide
  Sense Strand Starting at position 375 of SEQ ID NO: 317792
gccuaaguaaaucgugaua

SEQ ID NO: 348346 - RNA, 19 nt, Artificial Sequence
  Description of Artificial Sequence: Synthetic oligonucleotide
  Antisense Strand to SEQ ID NO: 348345
uaucacgauuuacuuaggc

SEQ ID NO: 348347 - RNA, 19 nt, Artificial Sequence
  Description of Artificial Sequence: Synthetic oligonucleotide
  Sense Strand Starting at position 375 of SEQ ID NO: 317794
cuaaguaaaucgugauaca

SEQ ID NO: 348348 - RNA, 19 nt, Artificial Sequence
  Description of Artificial Sequence: Synthetic oligonucleotide
  Antisense Strand to SEQ ID NO: 348347
uguaucacgauuuacuuag

SEQ ID NO: 348349 - RNA, 19 nt, Artificial Sequence
  Description of Artificial Sequence: Synthetic oligonucleotide
  Sense Strand Starting at position 375 of SEQ ID NO: 317795
uaaguaaaucgugauacaa

SEQ ID NO: 348350 - RNA, 19 nt, Artificial Sequence
  Description of Artificial Sequence: Synthetic oligonucleotide
  Antisense Strand to SEQ ID NO: 348349
uuguaucacgauuuacuua

SEQ ID NO: 348351 - RNA, 19 nt, Artificial Sequence
  Description of Artificial Sequence: Synthetic oligonucleotide
  Sense Strand Starting at position 375 of SEQ ID NO: 317797
aguaaaucgugauacaaua

SEQ ID NO: 348352 - RNA, 19 nt, Artificial Sequence
  Description of Artificial Sequence: Synthetic oligonucleotide
  Antisense Strand to SEQ ID NO: 348351
uauuguaucacgauuuacu

SEQ ID NO: 348353 - RNA, 19 nt, Artificial Sequence
  Description of Artificial Sequence: Synthetic oligonucleotide
  Sense Strand Starting at position 375 of SEQ ID NO: 317804
cgugauacaauacgaauua

SEQ ID NO: 348354 - RNA, 19 nt, Artificial Sequence
  Description of Artificial Sequence: Synthetic oligonucleotide
  Antisense Strand to SEQ ID NO: 348353
uaauucguauuguaucacg

SEQ ID NO: 348355 - RNA, 19 nt, Artificial Sequence
  Description of Artificial Sequence: Synthetic oligonucleotide
  Sense Strand Starting at position 375 of SEQ ID NO: 317805
gugauacaauacgaauuau

SEQ ID NO: 348356 - RNA, 19 nt, Artificial Sequence
  Description of Artificial Sequence: Synthetic oligonucleotide
  Antisense Strand to SEQ ID NO: 348355
auaauucguauuguaucac

SEQ ID NO: 348357 - RNA, 19 nt, Artificial Sequence
  Description of Artificial Sequence: Synthetic oligonucleotide
  Sense Strand Starting at position 375 of SEQ ID NO: 317813
auacgaauuaugcaggcuu

SEQ ID NO: 348358 - RNA, 19 nt, Artificial Sequence
  Description of Artificial Sequence: Synthetic oligonucleotide
  Antisense Strand to SEQ ID NO: 348357
aagccugcauaauucguau

SEQ ID NO: 348359 - RNA, 19 nt, Artificial Sequence
  Description of Artificial Sequence: Synthetic oligonucleotide
  Sense Strand Starting at position 375 of SEQ ID NO: 317849
aggucauugaaaggccaau

SEQ ID NO: 348360 - RNA, 19 nt, Artificial Sequence
  Description of Artificial Sequence: Synthetic oligonucleotide
  Antisense Strand to SEQ ID NO: 348359
auuggccuuucaaugaccu

SEQ ID NO: 348361 - RNA, 19 nt, Artificial Sequence
  Description of Artificial Sequence: Synthetic oligonucleotide
  Sense Strand Starting at position 375 of SEQ ID NO: 317902
uuaggcaaguaguaugaga

SEQ ID NO: 348362 - RNA, 19 nt, Artificial Sequence
  Description of Artificial Sequence: Synthetic oligonucleotide
  Antisense Strand to SEQ ID NO: 348361
ucucauacuacuugccuaa

SEQ ID NO: 348363 - RNA, 19 nt, Artificial Sequence
  Description of Artificial Sequence: Synthetic oligonucleotide
  Sense Strand Starting at position 375 of SEQ ID NO: 317904
aggcaaguaguaugagauu

SEQ ID NO: 348364 - RNA, 19 nt, Artificial Sequence
  Description of Artificial Sequence: Synthetic oligonucleotide
  Antisense Strand to SEQ ID NO: 348363
aaucucauacuacuugccu

SEQ ID NO: 348365 - RNA, 19 nt, Artificial Sequence
  Description of Artificial Sequence: Synthetic oligonucleotide
  Sense Strand Starting at position 375 of SEQ ID NO: 317907
caaguaguaugagauuugu

SEQ ID NO: 348366 - RNA, 19 nt, Artificial Sequence
  Description of Artificial Sequence: Synthetic oligonucleotide
  Antisense Strand to SEQ ID NO: 348365
acaaaucucauacuacuug

SEQ ID NO: 348367 - RNA, 19 nt, Artificial Sequence
  Description of Artificial Sequence: Synthetic oligonucleotide
  Sense Strand Starting at position 375 of SEQ ID NO: 317913
guaugagauuuguaguuua

SEQ ID NO: 348368 - RNA, 19 nt, Artificial Sequence
  Description of Artificial Sequence: Synthetic oligonucleotide
  Antisense Strand to SEQ ID NO: 348367
uaaacuacaaaucucauac

SEQ ID NO: 348369 - RNA, 19 nt, Artificial Sequence
  Description of Artificial Sequence: Synthetic oligonucleotide
  Sense Strand Starting at position 375 of SEQ ID NO: 318259
cucaguccugccuaaguaa

SEQ ID NO: 348370 - RNA, 19 nt, Artificial Sequence
  Description of Artificial Sequence: Synthetic oligonucleotide
  Antisense Strand to SEQ ID NO: 348369
uuacuuaggcaggacugag

SEQ ID NO: 348371 - RNA, 19 nt, Artificial Sequence
  Description of Artificial Sequence: Synthetic oligonucleotide
  Sense Strand Starting at position 375 of SEQ ID NO: 318273
aguaaaucgugauacaaca

SEQ ID NO: 348372 - RNA, 19 nt, Artificial Sequence
  Description of Artificial Sequence: Synthetic oligonucleotide
  Antisense Strand to SEQ ID NO: 348371
uguuguaucacgauuuacu

SEQ ID NO: 348373 - RNA, 19 nt, Artificial Sequence
  Description of Artificial Sequence: Synthetic oligonucleotide
  Sense Strand Starting at position 375 of SEQ ID NO: 318280
cgugauacaacacgaauua

SEQ ID NO: 348374 - RNA, 19 nt, Artificial Sequence
  Description of Artificial Sequence: Synthetic oligonucleotide
  Antisense Strand to SEQ ID NO: 348373
uaauucguguuguaucacg

SEQ ID NO: 348375 - RNA, 19 nt, Artificial Sequence
  Description of Artificial Sequence: Synthetic oligonucleotide
  Sense Strand Starting at position 375 of SEQ ID NO: 318289
acacgaauuaugcaggcuu

SEQ ID NO: 348376 - RNA, 19 nt, Artificial Sequence
  Description of Artificial Sequence: Synthetic oligonucleotide
  Antisense Strand to SEQ ID NO: 348375
aagccugcauaauucgugu

SEQ ID NO: 348377 - RNA, 19 nt, Artificial Sequence
  Description of Artificial Sequence: Synthetic oligonucleotide
  Sense Strand Starting at position 375 of SEQ ID NO: 318319
uagauuagguccuugaaag

SEQ ID NO: 348378 - RNA, 19 nt, Artificial Sequence
  Description of Artificial Sequence: Synthetic oligonucleotide
  Antisense Strand to SEQ ID NO: 348377
cuuucaaggaccuaaucua

SEQ ID NO: 348379 - RNA, 19 nt, Artificial Sequence
  Description of Artificial Sequence: Synthetic oligonucleotide
  Sense Strand Starting at position 375 of SEQ ID NO: 318378
cuaggcaaguaguaugaga

SEQ ID NO: 348380 - RNA, 19 nt, Artificial Sequence
  Description of Artificial Sequence: Synthetic oligonucleotide
  Antisense Strand to SEQ ID NO: 348379
ucucauacuacuugccuag

SEQ ID NO: 348381 - RNA, 19 nt, Artificial Sequence
  Description of Artificial Sequence: Synthetic oligonucleotide
  Sense Strand Starting at position 375 of SEQ ID NO: 318387
uaguaugagauuugucguu

SEQ ID NO: 348382 - RNA, 19 nt, Artificial Sequence
  Description of Artificial Sequence: Synthetic oligonucleotide
  Antisense Strand to SEQ ID NO: 348381
aacgacaaaucucauacua

SEQ ID NO: 348383 - RNA, 19 nt, Artificial Sequence
  Description of Artificial Sequence: Synthetic oligonucleotide
  Sense Strand Starting at position 375 of SEQ ID NO: 318389
guaugagauuugucguuua

SEQ ID NO: 348384 - RNA, 19 nt, Artificial Sequence
  Description of Artificial Sequence: Synthetic oligonucleotide
  Antisense Strand to SEQ ID NO: 348383
uaaacgacaaaucucauac

SEQ ID NO: 348385 - RNA, 19 nt, Artificial Sequence
  Description of Artificial Sequence: Synthetic oligonucleotide
  Sense Strand Starting at position 376 of SEQ ID NO: 315302
gcacuaggaucccaguaau

SEQ ID NO: 348386 - RNA, 19 nt, Artificial Sequence
  Description of Artificial Sequence: Synthetic oligonucleotide
  Antisense Strand to SEQ ID NO: 348385
auuacugggauccuagugc

SEQ ID NO: 348387 - RNA, 19 nt, Artificial Sequence
  Description of Artificial Sequence: Synthetic oligonucleotide
  Sense Strand Starting at position 376 of SEQ ID NO: 315363
gugaguaaucaacagggca

SEQ ID NO: 348388 - RNA, 19 nt, Artificial Sequence
  Description of Artificial Sequence: Synthetic oligonucleotide
  Antisense Strand to SEQ ID NO: 348387
ugcccuguugauuacucac

SEQ ID NO: 348389 - RNA, 19 nt, Artificial Sequence
  Description of Artificial Sequence: Synthetic oligonucleotide
  Sense Strand Starting at position 376 of SEQ ID NO: 315693
cggcaagagccuuaacaau

SEQ ID NO: 348390 - RNA, 19 nt, Artificial Sequence
  Description of Artificial Sequence: Synthetic oligonucleotide
  Antisense Strand to SEQ ID NO: 348389
auuguuaaggcucuugccg

SEQ ID NO: 348391 - RNA, 19 nt, Artificial Sequence
  Description of Artificial Sequence: Synthetic oligonucleotide
  Sense Strand Starting at position 376 of SEQ ID NO: 315784
ugcacuuugcccugacaca

SEQ ID NO: 348392 - RNA, 19 nt, Artificial Sequence
  Description of Artificial Sequence: Synthetic oligonucleotide
  Antisense Strand to SEQ ID NO: 348391
ugugucagggcaaagugca

SEQ ID NO: 348393 - RNA, 19 nt, Artificial Sequence
  Description of Artificial Sequence: Synthetic oligonucleotide
  Sense Strand Starting at position 376 of SEQ ID NO: 315873
ccuaauuaccugugggagu

SEQ ID NO: 348394 - RNA, 19 nt, Artificial Sequence
  Description of Artificial Sequence: Synthetic oligonucleotide
  Antisense Strand to SEQ ID NO: 348393
acucccacagguaauuagg

SEQ ID NO: 348395 - RNA, 19 nt, Artificial Sequence
  Description of Artificial Sequence: Synthetic oligonucleotide
  Sense Strand Starting at position 376 of SEQ ID NO: 316035
cggugaaaggguugaugca

SEQ ID NO: 348396 - RNA, 19 nt, Artificial Sequence
  Description of Artificial Sequence: Synthetic oligonucleotide
  Antisense Strand to SEQ ID NO: 348395
ugcaucaacccuuucaccg

SEQ ID NO: 348397 - RNA, 19 nt, Artificial Sequence
  Description of Artificial Sequence: Synthetic oligonucleotide
  Sense Strand Starting at position 376 of SEQ ID NO: 316036
ggugaaaggguugaugcaa

SEQ ID NO: 348398 - RNA, 19 nt, Artificial Sequence
  Description of Artificial Sequence: Synthetic oligonucleotide
  Antisense Strand to SEQ ID NO: 348397
uugcaucaacccuuucacc

SEQ ID NO: 348399 - RNA, 19 nt, Artificial Sequence
  Description of Artificial Sequence: Synthetic oligonucleotide
  Sense Strand Starting at position 376 of SEQ ID NO: 316790
ggcauuucgcggcgacgaa

SEQ ID NO: 348400 - RNA, 19 nt, Artificial Sequence
  Description of Artificial Sequence: Synthetic oligonucleotide
  Antisense Strand to SEQ ID NO: 348399
uucgucgccgcgaaaugcc

SEQ ID NO: 348401 - RNA, 19 nt, Artificial Sequence
  Description of Artificial Sequence: Synthetic oligonucleotide
  Sense Strand Starting at position 376 of SEQ ID NO: 317349
ucuguuccgcgauucuuua

SEQ ID NO: 348402 - RNA, 19 nt, Artificial Sequence
  Description of Artificial Sequence: Synthetic oligonucleotide
  Antisense Strand to SEQ ID NO: 348401
uaaagaaucgcggaacaga

SEQ ID NO: 348403 - RNA, 19 nt, Artificial Sequence
  Description of Artificial Sequence: Synthetic oligonucleotide
  Sense Strand Starting at position 376 of SEQ ID NO: 317790
cuccguccugccuaaguaa

SEQ ID NO: 348404 - RNA, 19 nt, Artificial Sequence
  Description of Artificial Sequence: Synthetic oligonucleotide
  Antisense Strand to SEQ ID NO: 348403
uuacuuaggcaggacggag

SEQ ID NO: 348405 - RNA, 19 nt, Artificial Sequence
  Description of Artificial Sequence: Synthetic oligonucleotide
  Sense Strand Starting at position 376 of SEQ ID NO: 317799
gccuaaguaaaucgugaua

SEQ ID NO: 348406 - RNA, 19 nt, Artificial Sequence
  Description of Artificial Sequence: Synthetic oligonucleotide
  Antisense Strand to SEQ ID NO: 348405
uaucacgauuuacuuaggc

SEQ ID NO: 348407 - RNA, 19 nt, Artificial Sequence
  Description of Artificial Sequence: Synthetic oligonucleotide
  Sense Strand Starting at position 376 of SEQ ID NO: 317801
cuaaguaaaucgugauaca

SEQ ID NO: 348408 - RNA, 19 nt, Artificial Sequence
  Description of Artificial Sequence: Synthetic oligonucleotide
  Antisense Strand to SEQ ID NO: 348407
uguaucacgauuuacuuag

SEQ ID NO: 348409 - RNA, 19 nt, Artificial Sequence
  Description of Artificial Sequence: Synthetic oligonucleotide
  Sense Strand Starting at position 376 of SEQ ID NO: 317802
uaaguaaaucgugauacaa

SEQ ID NO: 348410 - RNA, 19 nt, Artificial Sequence
  Description of Artificial Sequence: Synthetic oligonucleotide
  Antisense Strand to SEQ ID NO: 348409
uuguaucacgauuuacuua

SEQ ID NO: 348411 - RNA, 19 nt, Artificial Sequence
  Description of Artificial Sequence: Synthetic oligonucleotide
  Sense Strand Starting at position 376 of SEQ ID NO: 317804
aguaaaucgugauacaaua

SEQ ID NO: 348412 - RNA, 19 nt, Artificial Sequence
  Description of Artificial Sequence: Synthetic oligonucleotide
  Antisense Strand to SEQ ID NO: 348411
uauuguaucacgauuuacu

SEQ ID NO: 348413 - RNA, 19 nt, Artificial Sequence
  Description of Artificial Sequence: Synthetic oligonucleotide
  Sense Strand Starting at position 376 of SEQ ID NO: 317811
cgugauacaauacgaauua

SEQ ID NO: 348414 - RNA, 19 nt, Artificial Sequence
  Description of Artificial Sequence: Synthetic oligonucleotide
  Antisense Strand to SEQ ID NO: 348413
uaauucguauuguaucacg

SEQ ID NO: 348415 - RNA, 19 nt, Artificial Sequence
  Description of Artificial Sequence: Synthetic oligonucleotide
  Sense Strand Starting at position 376 of SEQ ID NO: 317812
gugauacaauacgaauuau

SEQ ID NO: 348416 - RNA, 19 nt, Artificial Sequence
  Description of Artificial Sequence: Synthetic oligonucleotide
  Antisense Strand to SEQ ID NO: 348415
auaauucguauuguaucac

SEQ ID NO: 348417 - RNA, 19 nt, Artificial Sequence
  Description of Artificial Sequence: Synthetic oligonucleotide
  Sense Strand Starting at position 376 of SEQ ID NO: 317820
auacgaauuaugcaggcuu

SEQ ID NO: 348418 - RNA, 19 nt, Artificial Sequence
  Description of Artificial Sequence: Synthetic oligonucleotide
  Antisense Strand to SEQ ID NO: 348417
aagccugcauaauucguau

SEQ ID NO: 348419 - RNA, 19 nt, Artificial Sequence
  Description of Artificial Sequence: Synthetic oligonucleotide
  Sense Strand Starting at position 376 of SEQ ID NO: 317856
aggucauugaaaggccaau

SEQ ID NO: 348420 - RNA, 19 nt, Artificial Sequence
  Description of Artificial Sequence: Synthetic oligonucleotide
  Antisense Strand to SEQ ID NO: 348419
auuggccuuucaaugaccu

SEQ ID NO: 348421 - RNA, 19 nt, Artificial Sequence
  Description of Artificial Sequence: Synthetic oligonucleotide
  Sense Strand Starting at position 376 of SEQ ID NO: 317909
uuaggcaaguaguaugaga

SEQ ID NO: 348422 - RNA, 19 nt, Artificial Sequence
  Description of Artificial Sequence: Synthetic oligonucleotide
  Antisense Strand to SEQ ID NO: 348421
ucucauacuacuugccuaa

SEQ ID NO: 348423 - RNA, 19 nt, Artificial Sequence
  Description of Artificial Sequence: Synthetic oligonucleotide
  Sense Strand Starting at position 376 of SEQ ID NO: 317911
aggcaaguaguaugagauu

SEQ ID NO: 348424 - RNA, 19 nt, Artificial Sequence
  Description of Artificial Sequence: Synthetic oligonucleotide
  Antisense Strand to SEQ ID NO: 348423
aaucucauacuacuugccu

SEQ ID NO: 348425 - RNA, 19 nt, Artificial Sequence
  Description of Artificial Sequence: Synthetic oligonucleotide
  Sense Strand Starting at position 376 of SEQ ID NO: 317914
caaguaguaugagauuugu

SEQ ID NO: 348426 - RNA, 19 nt, Artificial Sequence
  Description of Artificial Sequence: Synthetic oligonucleotide
  Antisense Strand to SEQ ID NO: 348425
acaaaucucauacuacuug

SEQ ID NO: 348427 - RNA, 19 nt, Artificial Sequence
  Description of Artificial Sequence: Synthetic oligonucleotide
  Sense Strand Starting at position 376 of SEQ ID NO: 317920
guaugagauuuguaguuua

SEQ ID NO: 348428 - RNA, 19 nt, Artificial Sequence
  Description of Artificial Sequence: Synthetic oligonucleotide
  Antisense Strand to SEQ ID NO: 348427
uaaacuacaaaucucauac

SEQ ID NO: 348429 - RNA, 19 nt, Artificial Sequence
  Description of Artificial Sequence: Synthetic oligonucleotide
  Sense Strand Starting at position 376 of SEQ ID NO: 318266
cucaguccugccuaaguaa

SEQ ID NO: 348430 - RNA, 19 nt, Artificial Sequence
  Description of Artificial Sequence: Synthetic oligonucleotide
  Antisense Strand to SEQ ID NO: 348429
uuacuuaggcaggacugag

SEQ ID NO: 348431 - RNA, 19 nt, Artificial Sequence
  Description of Artificial Sequence: Synthetic oligonucleotide
  Sense Strand Starting at position 376 of SEQ ID NO: 318280
aguaaaucgugauacaaca

SEQ ID NO: 348432 - RNA, 19 nt, Artificial Sequence
  Description of Artificial Sequence: Synthetic oligonucleotide
  Antisense Strand to SEQ ID NO: 348431
uguuguaucacgauuuacu

SEQ ID NO: 348433 - RNA, 19 nt, Artificial Sequence
  Description of Artificial Sequence: Synthetic oligonucleotide
  Sense Strand Starting at position 376 of SEQ ID NO: 318287
cgugauacaacacgaauua

SEQ ID NO: 348434 - RNA, 19 nt, Artificial Sequence
  Description of Artificial Sequence: Synthetic oligonucleotide
  Antisense Strand to SEQ ID NO: 348433
uaauucguguuguaucacg

SEQ ID NO: 348435 - RNA, 19 nt, Artificial Sequence
  Description of Artificial Sequence: Synthetic oligonucleotide
  Sense Strand Starting at position 376 of SEQ ID NO: 318296
acacgaauuaugcaggcuu

SEQ ID NO: 348436 - RNA, 19 nt, Artificial Sequence
  Description of Artificial Sequence: Synthetic oligonucleotide
  Antisense Strand to SEQ ID NO: 348435
aagccugcauaauucgugu

SEQ ID NO: 348437 - RNA, 19 nt, Artificial Sequence
  Description of Artificial Sequence: Synthetic oligonucleotide
  Sense Strand Starting at position 376 of SEQ ID NO: 318326
uagauuagguccuugaaag

SEQ ID NO: 348438 - RNA, 19 nt, Artificial Sequence
  Description of Artificial Sequence: Synthetic oligonucleotide
  Antisense Strand to SEQ ID NO: 348437
cuuucaaggaccuaaucua

SEQ ID NO: 348439 - RNA, 19 nt, Artificial Sequence
  Description of Artificial Sequence: Synthetic oligonucleotide
  Sense Strand Starting at position 376 of SEQ ID NO: 318385
cuaggcaaguaguaugaga

SEQ ID NO: 348440 - RNA, 19 nt, Artificial Sequence
  Description of Artificial Sequence: Synthetic oligonucleotide
  Antisense Strand to SEQ ID NO: 348439
ucucauacuacuugccuag

SEQ ID NO: 348441 - RNA, 19 nt, Artificial Sequence
  Description of Artificial Sequence: Synthetic oligonucleotide
  Sense Strand Starting at position 376 of SEQ ID NO: 318394
uaguaugagauuugucguu

SEQ ID NO: 348442 - RNA, 19 nt, Artificial Sequence
  Description of Artificial Sequence: Synthetic oligonucleotide
  Antisense Strand to SEQ ID NO: 348441
aacgacaaaucucauacua

SEQ ID NO: 348443 - RNA, 19 nt, Artificial Sequence
  Description of Artificial Sequence: Synthetic oligonucleotide
  Sense Strand Starting at position 376 of SEQ ID NO: 318396
guaugagauuugucguuua

SEQ ID NO: 348444 - RNA, 19 nt, Artificial Sequence
  Description of Artificial Sequence: Synthetic oligonucleotide
  Antisense Strand to SEQ ID NO: 348443
uaaacgacaaaucucauac

SEQ ID NO: 348445 - RNA, 19 nt, Artificial Sequence
  Description of Artificial Sequence: Synthetic oligonucleotide
  Sense Strand Starting at position 377 of SEQ ID NO: 315242
acccuuaaucccugggaaa

SEQ ID NO: 348446 - RNA, 19 nt, Artificial Sequence
  Description of Artificial Sequence: Synthetic oligonucleotide
  Antisense Strand to SEQ ID NO: 348445
uuucccagggauuaagggu

SEQ ID NO: 348447 - RNA, 19 nt, Artificial Sequence
  Description of Artificial Sequence: Synthetic oligonucleotide
  Sense Strand Starting at position 377 of SEQ ID NO: 315243
cccuuaaucccugggaaau

SEQ ID NO: 348448 - RNA, 19 nt, Artificial Sequence
  Description of Artificial Sequence: Synthetic oligonucleotide
  Antisense Strand to SEQ ID NO: 348447
auuucccagggauuaaggg

SEQ ID NO: 348449 - RNA, 19 nt, Artificial Sequence
  Description of Artificial Sequence: Synthetic oligonucleotide
  Sense Strand Starting at position 377 of SEQ ID NO: 315244
ccuuaaucccugggaaaua

SEQ ID NO: 348450 - RNA, 19 nt, Artificial Sequence
  Description of Artificial Sequence: Synthetic oligonucleotide
  Antisense Strand to SEQ ID NO: 348449
uauuucccagggauuaagg

SEQ ID NO: 348451 - RNA, 19 nt, Artificial Sequence
  Description of Artificial Sequence: Synthetic oligonucleotide
  Sense Strand Starting at position 377 of SEQ ID NO: 315245
cuuaaucccugggaaauag

SEQ ID NO: 348452 - RNA, 19 nt, Artificial Sequence
  Description of Artificial Sequence: Synthetic oligonucleotide
  Antisense Strand to SEQ ID NO: 348451
cuauuucccagggauuaag

SEQ ID NO: 348453 - RNA, 19 nt, Artificial Sequence
  Description of Artificial Sequence: Synthetic oligonucleotide
  Sense Strand Starting at position 377 of SEQ ID NO: 315330
guucuuagauuccauugca

SEQ ID NO: 348454 - RNA, 19 nt, Artificial Sequence
  Description of Artificial Sequence: Synthetic oligonucleotide
  Antisense Strand to SEQ ID NO: 348453
ugcaauggaaucuaagaac

SEQ ID NO: 348455 - RNA, 19 nt, Artificial Sequence
  Description of Artificial Sequence: Synthetic oligonucleotide
  Sense Strand Starting at position 377 of SEQ ID NO: 316259
accggucaucugcaccaua

SEQ ID NO: 348456 - RNA, 19 nt, Artificial Sequence
  Description of Artificial Sequence: Synthetic oligonucleotide
  Antisense Strand to SEQ ID NO: 348455
uauggugcagaugaccggu

SEQ ID NO: 348457 - RNA, 19 nt, Artificial Sequence
  Description of Artificial Sequence: Synthetic oligonucleotide
  Sense Strand Starting at position 377 of SEQ ID NO: 316262
ggucaucugcaccauagga

SEQ ID NO: 348458 - RNA, 19 nt, Artificial Sequence
  Description of Artificial Sequence: Synthetic oligonucleotide
  Antisense Strand to SEQ ID NO: 348457
uccuauggugcagaugacc

SEQ ID NO: 348459 - RNA, 19 nt, Artificial Sequence
  Description of Artificial Sequence: Synthetic oligonucleotide
  Sense Strand Starting at position 377 of SEQ ID NO: 316643
ccaaguuugcacugaagag

SEQ ID NO: 348460 - RNA, 19 nt, Artificial Sequence
  Description of Artificial Sequence: Synthetic oligonucleotide
  Antisense Strand to SEQ ID NO: 348459
cucuucagugcaaacuugg

SEQ ID NO: 348461 - RNA, 19 nt, Artificial Sequence
  Description of Artificial Sequence: Synthetic oligonucleotide
  Sense Strand Starting at position 377 of SEQ ID NO: 316696
uuuagcucugccuagaaau

SEQ ID NO: 348462 - RNA, 19 nt, Artificial Sequence
  Description of Artificial Sequence: Synthetic oligonucleotide
  Antisense Strand to SEQ ID NO: 348461
auuucuaggcagagcuaaa

SEQ ID NO: 348463 - RNA, 19 nt, Artificial Sequence
  Description of Artificial Sequence: Synthetic oligonucleotide
  Sense Strand Starting at position 377 of SEQ ID NO: 316727
ggaaauaaaucccuuaguu

SEQ ID NO: 348464 - RNA, 19 nt, Artificial Sequence
  Description of Artificial Sequence: Synthetic oligonucleotide
  Antisense Strand to SEQ ID NO: 348463
aacuaagggauuuauuucc

SEQ ID NO: 348465 - RNA, 19 nt, Artificial Sequence
  Description of Artificial Sequence: Synthetic oligonucleotide
  Sense Strand Starting at position 377 of SEQ ID NO: 317257
gcuagugugccugaucucu

SEQ ID NO: 348466 - RNA, 19 nt, Artificial Sequence
  Description of Artificial Sequence: Synthetic oligonucleotide
  Antisense Strand to SEQ ID NO: 348465
agagaucaggcacacuagc

SEQ ID NO: 348467 - RNA, 19 nt, Artificial Sequence
  Description of Artificial Sequence: Synthetic oligonucleotide
  Sense Strand Starting at position 377 of SEQ ID NO: 317517
ccaggucucgcaggaacuu

SEQ ID NO: 348468 - RNA, 19 nt, Artificial Sequence
  Description of Artificial Sequence: Synthetic oligonucleotide
  Antisense Strand to SEQ ID NO: 348467
aaguuccugcgagaccugg

SEQ ID NO: 348469 - RNA, 19 nt, Artificial Sequence
  Description of Artificial Sequence: Synthetic oligonucleotide
  Sense Strand Starting at position 377 of SEQ ID NO: 317529
ggaacuuccucgcuaggca

SEQ ID NO: 348470 - RNA, 19 nt, Artificial Sequence
  Description of Artificial Sequence: Synthetic oligonucleotide
  Antisense Strand to SEQ ID NO: 348469
ugccuagcgaggaaguucc

SEQ ID NO: 348471 - RNA, 19 nt, Artificial Sequence
  Description of Artificial Sequence: Synthetic oligonucleotide
  Sense Strand Starting at position 377 of SEQ ID NO: 317564
accugcuucuaugcugaaa

SEQ ID NO: 348472 - RNA, 19 nt, Artificial Sequence
  Description of Artificial Sequence: Synthetic oligonucleotide
  Antisense Strand to SEQ ID NO: 348471
uuucagcauagaagcaggu

SEQ ID NO: 348473 - RNA, 19 nt, Artificial Sequence
  Description of Artificial Sequence: Synthetic oligonucleotide
  Sense Strand Starting at position 377 of SEQ ID NO: 317566
cugcuucuaugcugaaauc

SEQ ID NO: 348474 - RNA, 19 nt, Artificial Sequence
  Description of Artificial Sequence: Synthetic oligonucleotide
  Antisense Strand to SEQ ID NO: 348473
gauuucagcauagaagcag

SEQ ID NO: 348475 - RNA, 19 nt, Artificial Sequence
  Description of Artificial Sequence: Synthetic oligonucleotide
  Sense Strand Starting at position 377 of SEQ ID NO: 317567
ugcuucuaugcugaaaucu

SEQ ID NO: 348476 - RNA, 19 nt, Artificial Sequence
  Description of Artificial Sequence: Synthetic oligonucleotide
  Antisense Strand to SEQ ID NO: 348475
agauuucagcauagaagca

SEQ ID NO: 348477 - RNA, 19 nt, Artificial Sequence
  Description of Artificial Sequence: Synthetic oligonucleotide
  Sense Strand Starting at position 377 of SEQ ID NO: 317576
gcugaaaucuuagcaucuu

SEQ ID NO: 348478 - RNA, 19 nt, Artificial Sequence
  Description of Artificial Sequence: Synthetic oligonucleotide
  Antisense Strand to SEQ ID NO: 348477
aagaugcuaagauuucagc

SEQ ID NO: 348479 - RNA, 19 nt, Artificial Sequence
  Description of Artificial Sequence: Synthetic oligonucleotide
  Sense Strand Starting at position 377 of SEQ ID NO: 317661
acugcucuuuccggcacaa

SEQ ID NO: 348480 - RNA, 19 nt, Artificial Sequence
  Description of Artificial Sequence: Synthetic oligonucleotide
  Antisense Strand to SEQ ID NO: 348479
uugugccggaaagagcagu

SEQ ID NO: 348481 - RNA, 19 nt, Artificial Sequence
  Description of Artificial Sequence: Synthetic oligonucleotide
  Sense Strand Starting at position 377 of SEQ ID NO: 318002
cagggaauuaggugucugu

SEQ ID NO: 348482 - RNA, 19 nt, Artificial Sequence
  Description of Artificial Sequence: Synthetic oligonucleotide
  Antisense Strand to SEQ ID NO: 348481
acagacaccuaauucccug

SEQ ID NO: 348483 - RNA, 19 nt, Artificial Sequence
  Description of Artificial Sequence: Synthetic oligonucleotide
  Sense Strand Starting at position 377 of SEQ ID NO: 318005
ggaauuaggugucugucaa

SEQ ID NO: 348484 - RNA, 19 nt, Artificial Sequence
  Description of Artificial Sequence: Synthetic oligonucleotide
  Antisense Strand to SEQ ID NO: 348483
uugacagacaccuaauucc

SEQ ID NO: 348485 - RNA, 19 nt, Artificial Sequence
  Description of Artificial Sequence: Synthetic oligonucleotide
  Sense Strand Starting at position 377 of SEQ ID NO: 318006
gaauuaggugucugucaaa

SEQ ID NO: 348486 - RNA, 19 nt, Artificial Sequence
  Description of Artificial Sequence: Synthetic oligonucleotide
  Antisense Strand to SEQ ID NO: 348485
uuugacagacaccuaauuc

SEQ ID NO: 348487 - RNA, 19 nt, Artificial Sequence
  Description of Artificial Sequence: Synthetic oligonucleotide
  Sense Strand Starting at position 377 of SEQ ID NO: 318009
uuaggugucugucaaagcu

SEQ ID NO: 348488 - RNA, 19 nt, Artificial Sequence
  Description of Artificial Sequence: Synthetic oligonucleotide
  Antisense Strand to SEQ ID NO: 348487
agcuuugacagacaccuaa

SEQ ID NO: 348489 - RNA, 19 nt, Artificial Sequence
  Description of Artificial Sequence: Synthetic oligonucleotide
  Sense Strand Starting at position 377 of SEQ ID NO: 318039
cugaacugcguuuacaaga

SEQ ID NO: 348490 - RNA, 19 nt, Artificial Sequence
  Description of Artificial Sequence: Synthetic oligonucleotide
  Antisense Strand to SEQ ID NO: 348489
ucuuguaaacgcaguucag

SEQ ID NO: 348491 - RNA, 19 nt, Artificial Sequence
  Description of Artificial Sequence: Synthetic oligonucleotide
  Sense Strand Starting at position 377 of SEQ ID NO: 318168
aggacuuaugucuguccuu

SEQ ID NO: 348492 - RNA, 19 nt, Artificial Sequence
  Description of Artificial Sequence: Synthetic oligonucleotide
  Antisense Strand to SEQ ID NO: 348491
aaggacagacauaaguccu

SEQ ID NO: 348493 - RNA, 19 nt, Artificial Sequence
  Description of Artificial Sequence: Synthetic oligonucleotide
  Sense Strand Starting at position 377 of SEQ ID NO: 318194
acaaguuacucucgugugu

SEQ ID NO: 348494 - RNA, 19 nt, Artificial Sequence
  Description of Artificial Sequence: Synthetic oligonucleotide
  Antisense Strand to SEQ ID NO: 348493
acacacgagaguaacuugu

SEQ ID NO: 348495 - RNA, 19 nt, Artificial Sequence
  Description of Artificial Sequence: Synthetic oligonucleotide
  Sense Strand Starting at position 377 of SEQ ID NO: 318265
ccaggucuuuggcugguaa

SEQ ID NO: 348496 - RNA, 19 nt, Artificial Sequence
  Description of Artificial Sequence: Synthetic oligonucleotide
  Antisense Strand to SEQ ID NO: 348495
uuaccagccaaagaccugg

SEQ ID NO: 348497 - RNA, 19 nt, Artificial Sequence
  Description of Artificial Sequence: Synthetic oligonucleotide
  Sense Strand Starting at position 377 of SEQ ID NO: 318266
caggucuuuggcugguaau

SEQ ID NO: 348498 - RNA, 19 nt, Artificial Sequence
  Description of Artificial Sequence: Synthetic oligonucleotide
  Antisense Strand to SEQ ID NO: 348497
auuaccagccaaagaccug

SEQ ID NO: 348499 - RNA, 19 nt, Artificial Sequence
  Description of Artificial Sequence: Synthetic oligonucleotide
  Sense Strand Starting at position 377 of SEQ ID NO: 318267
aggucuuuggcugguaaug

SEQ ID NO: 348500 - RNA, 19 nt, Artificial Sequence
  Description of Artificial Sequence: Synthetic oligonucleotide
  Antisense Strand to SEQ ID NO: 348499
cauuaccagccaaagaccu

SEQ ID NO: 348501 - RNA, 19 nt, Artificial Sequence
  Description of Artificial Sequence: Synthetic oligonucleotide
  Sense Strand Starting at position 377 of SEQ ID NO: 318269
gucuuuggcugguaaugag

SEQ ID NO: 348502 - RNA, 19 nt, Artificial Sequence
  Description of Artificial Sequence: Synthetic oligonucleotide
  Antisense Strand to SEQ ID NO: 348501
cucauuaccagccaaagac

SEQ ID NO: 348503 - RNA, 19 nt, Artificial Sequence
  Description of Artificial Sequence: Synthetic oligonucleotide
  Sense Strand Starting at position 377 of SEQ ID NO: 318272
uuuggcugguaaugagaga

SEQ ID NO: 348504 - RNA, 19 nt, Artificial Sequence
  Description of Artificial Sequence: Synthetic oligonucleotide
  Antisense Strand to SEQ ID NO: 348503
ucucucauuaccagccaaa

SEQ ID NO: 348505 - RNA, 19 nt, Artificial Sequence
  Description of Artificial Sequence: Synthetic oligonucleotide
  Sense Strand Starting at position 377 of SEQ ID NO: 319194
ccgggcacauucuuuaauu

SEQ ID NO: 348506 - RNA, 19 nt, Artificial Sequence
  Description of Artificial Sequence: Synthetic oligonucleotide
  Antisense Strand to SEQ ID NO: 348505
aauuaaagaaugugcccgg

SEQ ID NO: 348507 - RNA, 19 nt, Artificial Sequence
  Description of Artificial Sequence: Synthetic oligonucleotide
  Sense Strand Starting at position 377 of SEQ ID NO: 319195
cgggcacauucuuuaauuu

SEQ ID NO: 348508 - RNA, 19 nt, Artificial Sequence
  Description of Artificial Sequence: Synthetic oligonucleotide
  Antisense Strand to SEQ ID NO: 348507
aaauuaaagaaugugcccg

SEQ ID NO: 348509 - RNA, 19 nt, Artificial Sequence
  Description of Artificial Sequence: Synthetic oligonucleotide
  Sense Strand Starting at position 378 of SEQ ID NO: 315285
cuuugcauccugcagagau

SEQ ID NO: 348510 - RNA, 19 nt, Artificial Sequence
  Description of Artificial Sequence: Synthetic oligonucleotide
  Antisense Strand to SEQ ID NO: 348509
aucucugcaggaugcaaag

SEQ ID NO: 348511 - RNA, 19 nt, Artificial Sequence
  Description of Artificial Sequence: Synthetic oligonucleotide
  Sense Strand Starting at position 378 of SEQ ID NO: 315378
gaugcaucaugccuaagua

SEQ ID NO: 348512 - RNA, 19 nt, Artificial Sequence
  Description of Artificial Sequence: Synthetic oligonucleotide
  Antisense Strand to SEQ ID NO: 348511
uacuuaggcaugaugcauc

SEQ ID NO: 348513 - RNA, 19 nt, Artificial Sequence
  Description of Artificial Sequence: Synthetic oligonucleotide
  Sense Strand Starting at position 378 of SEQ ID NO: 315379
augcaucaugccuaaguaa

SEQ ID NO: 348514 - RNA, 19 nt, Artificial Sequence
  Description of Artificial Sequence: Synthetic oligonucleotide
  Antisense Strand to SEQ ID NO: 348513
uuacuuaggcaugaugcau

SEQ ID NO: 348515 - RNA, 19 nt, Artificial Sequence
  Description of Artificial Sequence: Synthetic oligonucleotide
  Sense Strand Starting at position 378 of SEQ ID NO: 315398
ggcccuuucgggcaacaua

SEQ ID NO: 348516 - RNA, 19 nt, Artificial Sequence
  Description of Artificial Sequence: Synthetic oligonucleotide
  Antisense Strand to SEQ ID NO: 348515
uauguugcccgaaagggcc

SEQ ID NO: 348517 - RNA, 19 nt, Artificial Sequence
  Description of Artificial Sequence: Synthetic oligonucleotide
  Sense Strand Starting at position 378 of SEQ ID NO: 315441
gcauguaaugaggagcuaa

SEQ ID NO: 348518 - RNA, 19 nt, Artificial Sequence
  Description of Artificial Sequence: Synthetic oligonucleotide
  Antisense Strand to SEQ ID NO: 348517
uuagcuccucauuacaugc

SEQ ID NO: 348519 - RNA, 19 nt, Artificial Sequence
  Description of Artificial Sequence: Synthetic oligonucleotide
  Sense Strand Starting at position 378 of SEQ ID NO: 315486
cccagaugcgcguucuuca

SEQ ID NO: 348520 - RNA, 19 nt, Artificial Sequence
  Description of Artificial Sequence: Synthetic oligonucleotide
  Antisense Strand to SEQ ID NO: 348519
ugaagaacgcgcaucuggg

SEQ ID NO: 348521 - RNA, 19 nt, Artificial Sequence
  Description of Artificial Sequence: Synthetic oligonucleotide
  Sense Strand Starting at position 378 of SEQ ID NO: 315487
ccagaugcgcguucuucaa

SEQ ID NO: 348522 - RNA, 19 nt, Artificial Sequence
  Description of Artificial Sequence: Synthetic oligonucleotide
  Antisense Strand to SEQ ID NO: 348521
uugaagaacgcgcaucugg

SEQ ID NO: 348523 - RNA, 19 nt, Artificial Sequence
  Description of Artificial Sequence: Synthetic oligonucleotide
  Sense Strand Starting at position 378 of SEQ ID NO: 315489
agaugcgcguucuucaaga

SEQ ID NO: 348524 - RNA, 19 nt, Artificial Sequence
  Description of Artificial Sequence: Synthetic oligonucleotide
  Antisense Strand to SEQ ID NO: 348523
ucuugaagaacgcgcaucu

SEQ ID NO: 348525 - RNA, 19 nt, Artificial Sequence
  Description of Artificial Sequence: Synthetic oligonucleotide
  Sense Strand Starting at position 378 of SEQ ID NO: 315494
cgcguucuucaagauguag

SEQ ID NO: 348526 - RNA, 19 nt, Artificial Sequence
  Description of Artificial Sequence: Synthetic oligonucleotide
  Antisense Strand to SEQ ID NO: 348525
cuacaucuugaagaacgcg

SEQ ID NO: 348527 - RNA, 19 nt, Artificial Sequence
  Description of Artificial Sequence: Synthetic oligonucleotide
  Sense Strand Starting at position 378 of SEQ ID NO: 315655
aagggauauuaccugcaga

SEQ ID NO: 348528 - RNA, 19 nt, Artificial Sequence
  Description of Artificial Sequence: Synthetic oligonucleotide
  Antisense Strand to SEQ ID NO: 348527
ucugcagguaauaucccuu

SEQ ID NO: 348529 - RNA, 19 nt, Artificial Sequence
  Description of Artificial Sequence: Synthetic oligonucleotide
  Sense Strand Starting at position 378 of SEQ ID NO: 315656
agggauauuaccugcagag

SEQ ID NO: 348530 - RNA, 19 nt, Artificial Sequence
  Description of Artificial Sequence: Synthetic oligonucleotide
  Antisense Strand to SEQ ID NO: 348529
cucugcagguaauaucccu

SEQ ID NO: 348531 - RNA, 19 nt, Artificial Sequence
  Description of Artificial Sequence: Synthetic oligonucleotide
  Sense Strand Starting at position 378 of SEQ ID NO: 315676
ccugaauccucccugagag

SEQ ID NO: 348532 - RNA, 19 nt, Artificial Sequence
  Description of Artificial Sequence: Synthetic oligonucleotide
  Antisense Strand to SEQ ID NO: 348531
cucucagggaggauucagg

SEQ ID NO: 348533 - RNA, 19 nt, Artificial Sequence
  Description of Artificial Sequence: Synthetic oligonucleotide
  Sense Strand Starting at position 378 of SEQ ID NO: 315678
ugaauccucccugagagca

SEQ ID NO: 348534 - RNA, 19 nt, Artificial Sequence
  Description of Artificial Sequence: Synthetic oligonucleotide
  Antisense Strand to SEQ ID NO: 348533
ugcucucagggaggauuca

SEQ ID NO: 348535 - RNA, 19 nt, Artificial Sequence
  Description of Artificial Sequence: Synthetic oligonucleotide
  Sense Strand Starting at position 378 of SEQ ID NO: 315780
cccacuuaguaaggaagaa

SEQ ID NO: 348536 - RNA, 19 nt, Artificial Sequence
  Description of Artificial Sequence: Synthetic oligonucleotide
  Antisense Strand to SEQ ID NO: 348535
uucuuccuuacuaaguggg

SEQ ID NO: 348537 - RNA, 19 nt, Artificial Sequence
  Description of Artificial Sequence: Synthetic oligonucleotide
  Sense Strand Starting at position 378 of SEQ ID NO: 315829
uggaguguuuaccucacca

SEQ ID NO: 348538 - RNA, 19 nt, Artificial Sequence
  Description of Artificial Sequence: Synthetic oligonucleotide
  Antisense Strand to SEQ ID NO: 348537
uggugagguaaacacucca

SEQ ID NO: 348539 - RNA, 19 nt, Artificial Sequence
  Description of Artificial Sequence: Synthetic oligonucleotide
  Sense Strand Starting at position 378 of SEQ ID NO: 315833
guguuuaccucaccacagu

SEQ ID NO: 348540 - RNA, 19 nt, Artificial Sequence
  Description of Artificial Sequence: Synthetic oligonucleotide
  Antisense Strand to SEQ ID NO: 348539
acuguggugagguaaacac

SEQ ID NO: 348541 - RNA, 19 nt, Artificial Sequence
  Description of Artificial Sequence: Synthetic oligonucleotide
  Sense Strand Starting at position 378 of SEQ ID NO: 316025
gugaguaaucaacagggca

SEQ ID NO: 348542 - RNA, 19 nt, Artificial Sequence
  Description of Artificial Sequence: Synthetic oligonucleotide
  Antisense Strand to SEQ ID NO: 348541
ugcccuguugauuacucac

SEQ ID NO: 348543 - RNA, 19 nt, Artificial Sequence
  Description of Artificial Sequence: Synthetic oligonucleotide
  Sense Strand Starting at position 378 of SEQ ID NO: 316355
cggcaagagccuuaacaau

SEQ ID NO: 348544 - RNA, 19 nt, Artificial Sequence
  Description of Artificial Sequence: Synthetic oligonucleotide
  Antisense Strand to SEQ ID NO: 348543
auuguuaaggcucuugccg

SEQ ID NO: 348545 - RNA, 19 nt, Artificial Sequence
  Description of Artificial Sequence: Synthetic oligonucleotide
  Sense Strand Starting at position 378 of SEQ ID NO: 316446
ugcacuuugcccugacaca

SEQ ID NO: 348546 - RNA, 19 nt, Artificial Sequence
  Description of Artificial Sequence: Synthetic oligonucleotide
  Antisense Strand to SEQ ID NO: 348545
ugugucagggcaaagugca

SEQ ID NO: 348547 - RNA, 19 nt, Artificial Sequence
  Description of Artificial Sequence: Synthetic oligonucleotide
  Sense Strand Starting at position 378 of SEQ ID NO: 316535
ccuaauuaccugugggagu

SEQ ID NO: 348548 - RNA, 19 nt, Artificial Sequence
  Description of Artificial Sequence: Synthetic oligonucleotide
  Antisense Strand to SEQ ID NO: 348547
acucccacagguaauuagg

SEQ ID NO: 348549 - RNA, 19 nt, Artificial Sequence
  Description of Artificial Sequence: Synthetic oligonucleotide
  Sense Strand Starting at position 378 of SEQ ID NO: 316697
cggugaaaggguugaugca

SEQ ID NO: 348550 - RNA, 19 nt, Artificial Sequence
  Description of Artificial Sequence: Synthetic oligonucleotide
  Antisense Strand to SEQ ID NO: 348549
ugcaucaacccuuucaccg

SEQ ID NO: 348551 - RNA, 19 nt, Artificial Sequence
  Description of Artificial Sequence: Synthetic oligonucleotide
  Sense Strand Starting at position 378 of SEQ ID NO: 316698
ggugaaaggguugaugcaa

SEQ ID NO: 348552 - RNA, 19 nt, Artificial Sequence
  Description of Artificial Sequence: Synthetic oligonucleotide
  Antisense Strand to SEQ ID NO: 348551
uugcaucaacccuuucacc

SEQ ID NO: 348553 - RNA, 19 nt, Artificial Sequence
  Description of Artificial Sequence: Synthetic oligonucleotide
  Sense Strand Starting at position 378 of SEQ ID NO: 317452
ggcauuucgcggcgacgaa

SEQ ID NO: 348554 - RNA, 19 nt, Artificial Sequence
  Description of Artificial Sequence: Synthetic oligonucleotide
  Antisense Strand to SEQ ID NO: 348553
uucgucgccgcgaaaugcc

SEQ ID NO: 348555 - RNA, 19 nt, Artificial Sequence
  Description of Artificial Sequence: Synthetic oligonucleotide
  Sense Strand Starting at position 378 of SEQ ID NO: 318011
ucuguuccgcgauucuuua

SEQ ID NO: 348556 - RNA, 19 nt, Artificial Sequence
  Description of Artificial Sequence: Synthetic oligonucleotide
  Antisense Strand to SEQ ID NO: 348555
uaaagaaucgcggaacaga

SEQ ID NO: 348557 - RNA, 19 nt, Artificial Sequence
  Description of Artificial Sequence: Synthetic oligonucleotide
  Sense Strand Starting at position 378 of SEQ ID NO: 318452
cuccguccugccuaaguaa

SEQ ID NO: 348558 - RNA, 19 nt, Artificial Sequence
  Description of Artificial Sequence: Synthetic oligonucleotide
  Antisense Strand to SEQ ID NO: 348557
uuacuuaggcaggacggag

SEQ ID NO: 348559 - RNA, 19 nt, Artificial Sequence
  Description of Artificial Sequence: Synthetic oligonucleotide
  Sense Strand Starting at position 378 of SEQ ID NO: 318461
gccuaaguaaaucgugaua

SEQ ID NO: 348560 - RNA, 19 nt, Artificial Sequence
  Description of Artificial Sequence: Synthetic oligonucleotide
  Antisense Strand to SEQ ID NO: 348559
uaucacgauuuacuuaggc

SEQ ID NO: 348561 - RNA, 19 nt, Artificial Sequence
  Description of Artificial Sequence: Synthetic oligonucleotide
  Sense Strand Starting at position 378 of SEQ ID NO: 318464
uaaguaaaucgugauacaa

SEQ ID NO: 348562 - RNA, 19 nt, Artificial Sequence
  Description of Artificial Sequence: Synthetic oligonucleotide
  Antisense Strand to SEQ ID NO: 348561
uuguaucacgauuuacuua

SEQ ID NO: 348563 - RNA, 19 nt, Artificial Sequence
  Description of Artificial Sequence: Synthetic oligonucleotide
  Sense Strand Starting at position 378 of SEQ ID NO: 318473
cgugauacaauacgaauua

SEQ ID NO: 348564 - RNA, 19 nt, Artificial Sequence
  Description of Artificial Sequence: Synthetic oligonucleotide
  Antisense Strand to SEQ ID NO: 348563
uaauucguauuguaucacg

SEQ ID NO: 348565 - RNA, 19 nt, Artificial Sequence
  Description of Artificial Sequence: Synthetic oligonucleotide
  Sense Strand Starting at position 378 of SEQ ID NO: 318474
gugauacaauacgaauuau

SEQ ID NO: 348566 - RNA, 19 nt, Artificial Sequence
  Description of Artificial Sequence: Synthetic oligonucleotide
  Antisense Strand to SEQ ID NO: 348565
auaauucguauuguaucac

SEQ ID NO: 348567 - RNA, 19 nt, Artificial Sequence
  Description of Artificial Sequence: Synthetic oligonucleotide
  Sense Strand Starting at position 378 of SEQ ID NO: 318482
auacgaauuaugcaggcuu

SEQ ID NO: 348568 - RNA, 19 nt, Artificial Sequence
  Description of Artificial Sequence: Synthetic oligonucleotide
  Antisense Strand to SEQ ID NO: 348567
aagccugcauaauucguau

SEQ ID NO: 348569 - RNA, 19 nt, Artificial Sequence
  Description of Artificial Sequence: Synthetic oligonucleotide
  Sense Strand Starting at position 378 of SEQ ID NO: 318518
aggucauugaaaggccaau

SEQ ID NO: 348570 - RNA, 19 nt, Artificial Sequence
  Description of Artificial Sequence: Synthetic oligonucleotide
  Antisense Strand to SEQ ID NO: 348569
auuggccuuucaaugaccu

SEQ ID NO: 348571 - RNA, 19 nt, Artificial Sequence
  Description of Artificial Sequence: Synthetic oligonucleotide
  Sense Strand Starting at position 378 of SEQ ID NO: 318573
aggcaaguaguaugagauu

SEQ ID NO: 348572 - RNA, 19 nt, Artificial Sequence
  Description of Artificial Sequence: Synthetic oligonucleotide
  Antisense Strand to SEQ ID NO: 348571
aaucucauacuacuugccu

SEQ ID NO: 348573 - RNA, 19 nt, Artificial Sequence
  Description of Artificial Sequence: Synthetic oligonucleotide
  Sense Strand Starting at position 378 of SEQ ID NO: 318576
caaguaguaugagauuugu

SEQ ID NO: 348574 - RNA, 19 nt, Artificial Sequence
  Description of Artificial Sequence: Synthetic oligonucleotide
  Antisense Strand to SEQ ID NO: 348573
acaaaucucauacuacuug

SEQ ID NO: 348575 - RNA, 19 nt, Artificial Sequence
  Description of Artificial Sequence: Synthetic oligonucleotide
  Sense Strand Starting at position 378 of SEQ ID NO: 318582
guaugagauuuguaguuua

SEQ ID NO: 348576 - RNA, 19 nt, Artificial Sequence
  Description of Artificial Sequence: Synthetic oligonucleotide
  Antisense Strand to SEQ ID NO: 348575
uaaacuacaaaucucauac

SEQ ID NO: 348577 - RNA, 19 nt, Artificial Sequence
  Description of Artificial Sequence: Synthetic oligonucleotide
  Sense Strand Starting at position 378 of SEQ ID NO: 318928
cucaguccugccuaaguaa

SEQ ID NO: 348578 - RNA, 19 nt, Artificial Sequence
  Description of Artificial Sequence: Synthetic oligonucleotide
  Antisense Strand to SEQ ID NO: 348577
uuacuuaggcaggacugag

SEQ ID NO: 348579 - RNA, 19 nt, Artificial Sequence
  Description of Artificial Sequence: Synthetic oligonucleotide
  Sense Strand Starting at position 378 of SEQ ID NO: 318949
cgugauacaacacgaauua

SEQ ID NO: 348580 - RNA, 19 nt, Artificial Sequence
  Description of Artificial Sequence: Synthetic oligonucleotide
  Antisense Strand to SEQ ID NO: 348579
uaauucguguuguaucacg

SEQ ID NO: 348581 - RNA, 19 nt, Artificial Sequence
  Description of Artificial Sequence: Synthetic oligonucleotide
  Sense Strand Starting at position 378 of SEQ ID NO: 318958
acacgaauuaugcaggcuu

SEQ ID NO: 348582 - RNA, 19 nt, Artificial Sequence
  Description of Artificial Sequence: Synthetic oligonucleotide
  Antisense Strand to SEQ ID NO: 348581
aagccugcauaauucgugu

SEQ ID NO: 348583 - RNA, 19 nt, Artificial Sequence
  Description of Artificial Sequence: Synthetic oligonucleotide
  Sense Strand Starting at position 378 of SEQ ID NO: 318988
uagauuagguccuugaaag

SEQ ID NO: 348584 - RNA, 19 nt, Artificial Sequence
  Description of Artificial Sequence: Synthetic oligonucleotide
  Antisense Strand to SEQ ID NO: 348583
cuuucaaggaccuaaucua

SEQ ID NO: 348585 - RNA, 19 nt, Artificial Sequence
  Description of Artificial Sequence: Synthetic oligonucleotide
  Sense Strand Starting at position 378 of SEQ ID NO: 319056
uaguaugagauuugucguu

SEQ ID NO: 348586 - RNA, 19 nt, Artificial Sequence
  Description of Artificial Sequence: Synthetic oligonucleotide
  Antisense Strand to SEQ ID NO: 348585
aacgacaaaucucauacua

SEQ ID NO: 348587 - RNA, 19 nt, Artificial Sequence
  Description of Artificial Sequence: Synthetic oligonucleotide
  Sense Strand Starting at position 378 of SEQ ID NO: 319058
guaugagauuugucguuua

SEQ ID NO: 348588 - RNA, 19 nt, Artificial Sequence
  Description of Artificial Sequence: Synthetic oligonucleotide
  Antisense Strand to SEQ ID NO: 348587
uaaacgacaaaucucauac

SEQ ID NO: 348589 - RNA, 19 nt, Artificial Sequence
  Description of Artificial Sequence: Synthetic oligonucleotide
  Sense Strand Starting at position 379 of SEQ ID NO: 315323
agucacuuggccugagaac

SEQ ID NO: 348590 - RNA, 19 nt, Artificial Sequence
  Description of Artificial Sequence: Synthetic oligonucleotide
  Antisense Strand to SEQ ID NO: 348589
guucucaggccaagugacu

SEQ ID NO: 348591 - RNA, 19 nt, Artificial Sequence
  Description of Artificial Sequence: Synthetic oligonucleotide
  Sense Strand Starting at position 379 of SEQ ID NO: 315324
gucacuuggccugagaaca

SEQ ID NO: 348592 - RNA, 19 nt, Artificial Sequence
  Description of Artificial Sequence: Synthetic oligonucleotide
  Antisense Strand to SEQ ID NO: 348591
uguucucaggccaagugac

SEQ ID NO: 348593 - RNA, 19 nt, Artificial Sequence
  Description of Artificial Sequence: Synthetic oligonucleotide
  Sense Strand Starting at position 379 of SEQ ID NO: 315421
uguguuaaacaucacuauu

SEQ ID NO: 348594 - RNA, 19 nt, Artificial Sequence
  Description of Artificial Sequence: Synthetic oligonucleotide
  Antisense Strand to SEQ ID NO: 348593
aauagugauguuuaacaca

SEQ ID NO: 348595 - RNA, 19 nt, Artificial Sequence
  Description of Artificial Sequence: Synthetic oligonucleotide
  Sense Strand Starting at position 379 of SEQ ID NO: 315454
gauagcuggugccuaauaa

SEQ ID NO: 348596 - RNA, 19 nt, Artificial Sequence
  Description of Artificial Sequence: Synthetic oligonucleotide
  Antisense Strand to SEQ ID NO: 348595
uuauuaggcaccagcuauc

SEQ ID NO: 348597 - RNA, 19 nt, Artificial Sequence
  Description of Artificial Sequence: Synthetic oligonucleotide
  Sense Strand Starting at position 379 of SEQ ID NO: 315455
auagcuggugccuaauaau

SEQ ID NO: 348598 - RNA, 19 nt, Artificial Sequence
  Description of Artificial Sequence: Synthetic oligonucleotide
  Antisense Strand to SEQ ID NO: 348597
auuauuaggcaccagcuau

SEQ ID NO: 348599 - RNA, 19 nt, Artificial Sequence
  Description of Artificial Sequence: Synthetic oligonucleotide
  Sense Strand Starting at position 379 of SEQ ID NO: 315464
gccuaauaauugguuagaa

SEQ ID NO: 348600 - RNA, 19 nt, Artificial Sequence
  Description of Artificial Sequence: Synthetic oligonucleotide
  Antisense Strand to SEQ ID NO: 348599
uucuaaccaauuauuaggc

SEQ ID NO: 348601 - RNA, 19 nt, Artificial Sequence
  Description of Artificial Sequence: Synthetic oligonucleotide
  Sense Strand Starting at position 379 of SEQ ID NO: 315510
gucaaauuauuacugauag

SEQ ID NO: 348602 - RNA, 19 nt, Artificial Sequence
  Description of Artificial Sequence: Synthetic oligonucleotide
  Antisense Strand to SEQ ID NO: 348601
cuaucaguaauaauuugac

SEQ ID NO: 348603 - RNA, 19 nt, Artificial Sequence
  Description of Artificial Sequence: Synthetic oligonucleotide
  Sense Strand Starting at position 379 of SEQ ID NO: 315575
aucagugcuuacuugauaa

SEQ ID NO: 348604 - RNA, 19 nt, Artificial Sequence
  Description of Artificial Sequence: Synthetic oligonucleotide
  Antisense Strand to SEQ ID NO: 348603
uuaucaaguaagcacugau

SEQ ID NO: 348605 - RNA, 19 nt, Artificial Sequence
  Description of Artificial Sequence: Synthetic oligonucleotide
  Sense Strand Starting at position 379 of SEQ ID NO: 315758
gcacaauaccaaugcugau

SEQ ID NO: 348606 - RNA, 19 nt, Artificial Sequence
  Description of Artificial Sequence: Synthetic oligonucleotide
  Antisense Strand to SEQ ID NO: 348605
aucagcauugguauugugc

SEQ ID NO: 348607 - RNA, 19 nt, Artificial Sequence
  Description of Artificial Sequence: Synthetic oligonucleotide
  Sense Strand Starting at position 379 of SEQ ID NO: 315872
acaguaucacgacauguca

SEQ ID NO: 348608 - RNA, 19 nt, Artificial Sequence
  Description of Artificial Sequence: Synthetic oligonucleotide
  Antisense Strand to SEQ ID NO: 348607
ugacaugucgugauacugu

SEQ ID NO: 348609 - RNA, 19 nt, Artificial Sequence
  Description of Artificial Sequence: Synthetic oligonucleotide
  Sense Strand Starting at position 379 of SEQ ID NO: 315951
uucuuagaauugcuagaac

SEQ ID NO: 348610 - RNA, 19 nt, Artificial Sequence
  Description of Artificial Sequence: Synthetic oligonucleotide
  Antisense Strand to SEQ ID NO: 348609
guucuagcaauucuaagaa

SEQ ID NO: 348611 - RNA, 19 nt, Artificial Sequence
  Description of Artificial Sequence: Synthetic oligonucleotide
  Sense Strand Starting at position 379 of SEQ ID NO: 315998
ucuuauaggucacuaggau

SEQ ID NO: 348612 - RNA, 19 nt, Artificial Sequence
  Description of Artificial Sequence: Synthetic oligonucleotide
  Antisense Strand to SEQ ID NO: 348611
auccuagugaccuauaaga

SEQ ID NO: 348613 - RNA, 19 nt, Artificial Sequence
  Description of Artificial Sequence: Synthetic oligonucleotide
  Sense Strand Starting at position 379 of SEQ ID NO: 316035
ccaguuaaugaacauugua

SEQ ID NO: 348614 - RNA, 19 nt, Artificial Sequence
  Description of Artificial Sequence: Synthetic oligonucleotide
  Antisense Strand to SEQ ID NO: 348613
uacaauguucauuaacugg

SEQ ID NO: 348615 - RNA, 19 nt, Artificial Sequence
  Description of Artificial Sequence: Synthetic oligonucleotide
  Sense Strand Starting at position 379 of SEQ ID NO: 316065
agggaaugcuaccuuuaag

SEQ ID NO: 348616 - RNA, 19 nt, Artificial Sequence
  Description of Artificial Sequence: Synthetic oligonucleotide
  Antisense Strand to SEQ ID NO: 348615
cuuaaagguagcauucccu

SEQ ID NO: 348617 - RNA, 19 nt, Artificial Sequence
  Description of Artificial Sequence: Synthetic oligonucleotide
  Sense Strand Starting at position 379 of SEQ ID NO: 316091
cguaauaacugauuaccca

SEQ ID NO: 348618 - RNA, 19 nt, Artificial Sequence
  Description of Artificial Sequence: Synthetic oligonucleotide
  Antisense Strand to SEQ ID NO: 348617
uggguaaucaguuauuacg

SEQ ID NO: 348619 - RNA, 19 nt, Artificial Sequence
  Description of Artificial Sequence: Synthetic oligonucleotide
  Sense Strand Starting at position 379 of SEQ ID NO: 316099
cugauuacccaguaauugu

SEQ ID NO: 348620 - RNA, 19 nt, Artificial Sequence
  Description of Artificial Sequence: Synthetic oligonucleotide
  Antisense Strand to SEQ ID NO: 348619
acaauuacuggguaaucag

SEQ ID NO: 348621 - RNA, 19 nt, Artificial Sequence
  Description of Artificial Sequence: Synthetic oligonucleotide
  Sense Strand Starting at position 379 of SEQ ID NO: 316107
ccaguaauugugggaagga

SEQ ID NO: 348622 - RNA, 19 nt, Artificial Sequence
  Description of Artificial Sequence: Synthetic oligonucleotide
  Antisense Strand to SEQ ID NO: 348621
uccuucccacaauuacugg

SEQ ID NO: 348623 - RNA, 19 nt, Artificial Sequence
  Description of Artificial Sequence: Synthetic oligonucleotide
  Sense Strand Starting at position 379 of SEQ ID NO: 316163
ucucaugaucuguaacgga

SEQ ID NO: 348624 - RNA, 19 nt, Artificial Sequence
  Description of Artificial Sequence: Synthetic oligonucleotide
  Antisense Strand to SEQ ID NO: 348623
uccguuacagaucaugaga

SEQ ID NO: 348625 - RNA, 19 nt, Artificial Sequence
  Description of Artificial Sequence: Synthetic oligonucleotide
  Sense Strand Starting at position 379 of SEQ ID NO: 316231
gguacuuaccuuggcauga

SEQ ID NO: 348626 - RNA, 19 nt, Artificial Sequence
  Description of Artificial Sequence: Synthetic oligonucleotide
  Antisense Strand to SEQ ID NO: 348625
ucaugccaagguaaguacc

SEQ ID NO: 348627 - RNA, 19 nt, Artificial Sequence
  Description of Artificial Sequence: Synthetic oligonucleotide
  Sense Strand Starting at position 379 of SEQ ID NO: 316270
aguugacaucuccacuauu

SEQ ID NO: 348628 - RNA, 19 nt, Artificial Sequence
  Description of Artificial Sequence: Synthetic oligonucleotide
  Antisense Strand to SEQ ID NO: 348627
aauaguggagaugucaacu

SEQ ID NO: 348629 - RNA, 19 nt, Artificial Sequence
  Description of Artificial Sequence: Synthetic oligonucleotide
  Sense Strand Starting at position 379 of SEQ ID NO: 316368
cggcaucuccaguagugaa

SEQ ID NO: 348630 - RNA, 19 nt, Artificial Sequence
  Description of Artificial Sequence: Synthetic oligonucleotide
  Antisense Strand to SEQ ID NO: 348629
uucacuacuggagaugccg

SEQ ID NO: 348631 - RNA, 19 nt, Artificial Sequence
  Description of Artificial Sequence: Synthetic oligonucleotide
  Sense Strand Starting at position 379 of SEQ ID NO: 316504
ggacaaguuaugugccaag

SEQ ID NO: 348632 - RNA, 19 nt, Artificial Sequence
  Description of Artificial Sequence: Synthetic oligonucleotide
  Antisense Strand to SEQ ID NO: 348631
cuuggcacauaacuugucc

SEQ ID NO: 348633 - RNA, 19 nt, Artificial Sequence
  Description of Artificial Sequence: Synthetic oligonucleotide
  Sense Strand Starting at position 379 of SEQ ID NO: 316532
cccguuauuucugcaugua

SEQ ID NO: 348634 - RNA, 19 nt, Artificial Sequence
  Description of Artificial Sequence: Synthetic oligonucleotide
  Antisense Strand to SEQ ID NO: 348633
uacaugcagaaauaacggg

SEQ ID NO: 348635 - RNA, 19 nt, Artificial Sequence
  Description of Artificial Sequence: Synthetic oligonucleotide
  Sense Strand Starting at position 379 of SEQ ID NO: 316533
ccguuauuucugcauguaa

SEQ ID NO: 348636 - RNA, 19 nt, Artificial Sequence
  Description of Artificial Sequence: Synthetic oligonucleotide
  Antisense Strand to SEQ ID NO: 348635
uuacaugcagaaauaacgg

SEQ ID NO: 348637 - RNA, 19 nt, Artificial Sequence
  Description of Artificial Sequence: Synthetic oligonucleotide
  Sense Strand Starting at position 379 of SEQ ID NO: 316535
guuauuucugcauguaagg

SEQ ID NO: 348638 - RNA, 19 nt, Artificial Sequence
  Description of Artificial Sequence: Synthetic oligonucleotide
  Antisense Strand to SEQ ID NO: 348637
ccuuacaugcagaaauaac

SEQ ID NO: 348639 - RNA, 19 nt, Artificial Sequence
  Description of Artificial Sequence: Synthetic oligonucleotide
  Sense Strand Starting at position 379 of SEQ ID NO: 317600
gcaguuaucacaugacgau

SEQ ID NO: 348640 - RNA, 19 nt, Artificial Sequence
  Description of Artificial Sequence: Synthetic oligonucleotide
  Antisense Strand to SEQ ID NO: 348639
aucgucaugugauaacugc

SEQ ID NO: 348641 - RNA, 19 nt, Artificial Sequence
  Description of Artificial Sequence: Synthetic oligonucleotide
  Sense Strand Starting at position 379 of SEQ ID NO: 317601
caguuaucacaugacgauc

SEQ ID NO: 348642 - RNA, 19 nt, Artificial Sequence
  Description of Artificial Sequence: Synthetic oligonucleotide
  Antisense Strand to SEQ ID NO: 348641
gaucgucaugugauaacug

SEQ ID NO: 348643 - RNA, 19 nt, Artificial Sequence
  Description of Artificial Sequence: Synthetic oligonucleotide
  Sense Strand Starting at position 379 of SEQ ID NO: 317607
ucacaugacgaucgucaga

SEQ ID NO: 348644 - RNA, 19 nt, Artificial Sequence
  Description of Artificial Sequence: Synthetic oligonucleotide
  Antisense Strand to SEQ ID NO: 348643
ucugacgaucgucauguga

SEQ ID NO: 348645 - RNA, 19 nt, Artificial Sequence
  Description of Artificial Sequence: Synthetic oligonucleotide
  Sense Strand Starting at position 379 of SEQ ID NO: 317732
uccuccugguccuuaaaga

SEQ ID NO: 348646 - RNA, 19 nt, Artificial Sequence
  Description of Artificial Sequence: Synthetic oligonucleotide
  Antisense Strand to SEQ ID NO: 348645
ucuuuaaggaccaggagga

SEQ ID NO: 348647 - RNA, 19 nt, Artificial Sequence
  Description of Artificial Sequence: Synthetic oligonucleotide
  Sense Strand Starting at position 379 of SEQ ID NO: 317733
ccuccugguccuuaaagaa

SEQ ID NO: 348648 - RNA, 19 nt, Artificial Sequence
  Description of Artificial Sequence: Synthetic oligonucleotide
  Antisense Strand to SEQ ID NO: 348647
uucuuuaaggaccaggagg

SEQ ID NO: 348649 - RNA, 19 nt, Artificial Sequence
  Description of Artificial Sequence: Synthetic oligonucleotide
  Sense Strand Starting at position 379 of SEQ ID NO: 318053
auuggcauuccuuagaguu

SEQ ID NO: 348650 - RNA, 19 nt, Artificial Sequence
  Description of Artificial Sequence: Synthetic oligonucleotide
  Antisense Strand to SEQ ID NO: 348649
aacucuaaggaaugccaau

SEQ ID NO: 348651 - RNA, 19 nt, Artificial Sequence
  Description of Artificial Sequence: Synthetic oligonucleotide
  Sense Strand Starting at position 379 of SEQ ID NO: 318074
ggguuuaacccuggcacau

SEQ ID NO: 348652 - RNA, 19 nt, Artificial Sequence
  Description of Artificial Sequence: Synthetic oligonucleotide
  Antisense Strand to SEQ ID NO: 348651
augugccaggguuaaaccc

SEQ ID NO: 348653 - RNA, 19 nt, Artificial Sequence
  Description of Artificial Sequence: Synthetic oligonucleotide
  Sense Strand Starting at position 379 of SEQ ID NO: 318251
acccgcauuuaugugguaa

SEQ ID NO: 348654 - RNA, 19 nt, Artificial Sequence
  Description of Artificial Sequence: Synthetic oligonucleotide
  Antisense Strand to SEQ ID NO: 348653
uuaccacauaaaugcgggu

SEQ ID NO: 348655 - RNA, 19 nt, Artificial Sequence
  Description of Artificial Sequence: Synthetic oligonucleotide
  Sense Strand Starting at position 379 of SEQ ID NO: 318252
cccgcauuuaugugguaac

SEQ ID NO: 348656 - RNA, 19 nt, Artificial Sequence
  Description of Artificial Sequence: Synthetic oligonucleotide
  Antisense Strand to SEQ ID NO: 348655
guuaccacauaaaugcggg

SEQ ID NO: 348657 - RNA, 19 nt, Artificial Sequence
  Description of Artificial Sequence: Synthetic oligonucleotide
  Sense Strand Starting at position 379 of SEQ ID NO: 318309
cucacauuccuguaugacu

SEQ ID NO: 348658 - RNA, 19 nt, Artificial Sequence
  Description of Artificial Sequence: Synthetic oligonucleotide
  Antisense Strand to SEQ ID NO: 348657
agucauacaggaaugugag

SEQ ID NO: 348659 - RNA, 19 nt, Artificial Sequence
  Description of Artificial Sequence: Synthetic oligonucleotide
  Sense Strand Starting at position 379 of SEQ ID NO: 318317
ccuguaugacucuacaguu

SEQ ID NO: 348660 - RNA, 19 nt, Artificial Sequence
  Description of Artificial Sequence: Synthetic oligonucleotide
  Antisense Strand to SEQ ID NO: 348659
aacuguagagucauacagg

SEQ ID NO: 348661 - RNA, 19 nt, Artificial Sequence
  Description of Artificial Sequence: Synthetic oligonucleotide
  Sense Strand Starting at position 379 of SEQ ID NO: 318812
uuacaaugaucgcuaauag

SEQ ID NO: 348662 - RNA, 19 nt, Artificial Sequence
  Description of Artificial Sequence: Synthetic oligonucleotide
  Antisense Strand to SEQ ID NO: 348661
cuauuagcgaucauuguaa

SEQ ID NO: 348663 - RNA, 19 nt, Artificial Sequence
  Description of Artificial Sequence: Synthetic oligonucleotide
  Sense Strand Starting at position 379 of SEQ ID NO: 318813
uacaaugaucgcuaauagu

SEQ ID NO: 348664 - RNA, 19 nt, Artificial Sequence
  Description of Artificial Sequence: Synthetic oligonucleotide
  Antisense Strand to SEQ ID NO: 348663
acuauuagcgaucauugua

SEQ ID NO: 348665 - RNA, 19 nt, Artificial Sequence
  Description of Artificial Sequence: Synthetic oligonucleotide
  Sense Strand Starting at position 379 of SEQ ID NO: 318822
cgcuaauaguauuuaguau

SEQ ID NO: 348666 - RNA, 19 nt, Artificial Sequence
  Description of Artificial Sequence: Synthetic oligonucleotide
  Antisense Strand to SEQ ID NO: 348665
auacuaaauacuauuagcg

SEQ ID NO: 348667 - RNA, 19 nt, Artificial Sequence
  Description of Artificial Sequence: Synthetic oligonucleotide
  Sense Strand Starting at position 379 of SEQ ID NO: 318983
ucuugaucaucugcuauga

SEQ ID NO: 348668 - RNA, 19 nt, Artificial Sequence
  Description of Artificial Sequence: Synthetic oligonucleotide
  Antisense Strand to SEQ ID NO: 348667
ucauagcagaugaucaaga

SEQ ID NO: 348669 - RNA, 19 nt, Artificial Sequence
  Description of Artificial Sequence: Synthetic oligonucleotide
  Sense Strand Starting at position 380 of SEQ ID NO: 315482
gaaagaucacaucgucaga

SEQ ID NO: 348670 - RNA, 19 nt, Artificial Sequence
  Description of Artificial Sequence: Synthetic oligonucleotide
  Antisense Strand to SEQ ID NO: 348669
ucugacgaugugaucuuuc

SEQ ID NO: 348671 - RNA, 19 nt, Artificial Sequence
  Description of Artificial Sequence: Synthetic oligonucleotide
  Sense Strand Starting at position 380 of SEQ ID NO: 315493
ucgucagaccuucaguguu

SEQ ID NO: 348672 - RNA, 19 nt, Artificial Sequence
  Description of Artificial Sequence: Synthetic oligonucleotide
  Antisense Strand to SEQ ID NO: 348671
aacacugaaggucugacga

SEQ ID NO: 348673 - RNA, 19 nt, Artificial Sequence
  Description of Artificial Sequence: Synthetic oligonucleotide
  Sense Strand Starting at position 380 of SEQ ID NO: 315583
ggaagugccagugguaacu

SEQ ID NO: 348674 - RNA, 19 nt, Artificial Sequence
  Description of Artificial Sequence: Synthetic oligonucleotide
  Antisense Strand to SEQ ID NO: 348673
aguuaccacuggcacuucc

SEQ ID NO: 348675 - RNA, 19 nt, Artificial Sequence
  Description of Artificial Sequence: Synthetic oligonucleotide
  Sense Strand Starting at position 380 of SEQ ID NO: 315600
cuggcaagguaaucagagu

SEQ ID NO: 348676 - RNA, 19 nt, Artificial Sequence
  Description of Artificial Sequence: Synthetic oligonucleotide
  Antisense Strand to SEQ ID NO: 348675
acucugauuaccuugccag

SEQ ID NO: 348677 - RNA, 19 nt, Artificial Sequence
  Description of Artificial Sequence: Synthetic oligonucleotide
  Sense Strand Starting at position 380 of SEQ ID NO: 315609
uaaucagagucaucuggac

SEQ ID NO: 348678 - RNA, 19 nt, Artificial Sequence
  Description of Artificial Sequence: Synthetic oligonucleotide
  Antisense Strand to SEQ ID NO: 348677
guccagaugacucugauua

SEQ ID NO: 348679 - RNA, 19 nt, Artificial Sequence
  Description of Artificial Sequence: Synthetic oligonucleotide
  Sense Strand Starting at position 380 of SEQ ID NO: 315720
ccugguugccuggaggagu

SEQ ID NO: 348680 - RNA, 19 nt, Artificial Sequence
  Description of Artificial Sequence: Synthetic oligonucleotide
  Antisense Strand to SEQ ID NO: 348679
acuccuccaggcaaccagg

SEQ ID NO: 348681 - RNA, 19 nt, Artificial Sequence
  Description of Artificial Sequence: Synthetic oligonucleotide
  Sense Strand Starting at position 380 of SEQ ID NO: 316122
agguuacuccuacguuaaa

SEQ ID NO: 348682 - RNA, 19 nt, Artificial Sequence
  Description of Artificial Sequence: Synthetic oligonucleotide
  Antisense Strand to SEQ ID NO: 348681
uuuaacguaggaguaaccu

SEQ ID NO: 348683 - RNA, 19 nt, Artificial Sequence
  Description of Artificial Sequence: Synthetic oligonucleotide
  Sense Strand Starting at position 380 of SEQ ID NO: 316842
cgcacagccguugagaaua

SEQ ID NO: 348684 - RNA, 19 nt, Artificial Sequence
  Description of Artificial Sequence: Synthetic oligonucleotide
  Antisense Strand to SEQ ID NO: 348683
uauucucaacggcugugcg

SEQ ID NO: 348685 - RNA, 19 nt, Artificial Sequence
  Description of Artificial Sequence: Synthetic oligonucleotide
  Sense Strand Starting at position 380 of SEQ ID NO: 316850
cguugagaauaugcgagau

SEQ ID NO: 348686 - RNA, 19 nt, Artificial Sequence
  Description of Artificial Sequence: Synthetic oligonucleotide
  Antisense Strand to SEQ ID NO: 348685
aucucgcauauucucaacg

SEQ ID NO: 348687 - RNA, 19 nt, Artificial Sequence
  Description of Artificial Sequence: Synthetic oligonucleotide
  Sense Strand Starting at position 380 of SEQ ID NO: 317081
ggugguguuaagcagguua

SEQ ID NO: 348688 - RNA, 19 nt, Artificial Sequence
  Description of Artificial Sequence: Synthetic oligonucleotide
  Antisense Strand to SEQ ID NO: 348687
uaaccugcuuaacaccacc

SEQ ID NO: 348689 - RNA, 19 nt, Artificial Sequence
  Description of Artificial Sequence: Synthetic oligonucleotide
  Sense Strand Starting at position 380 of SEQ ID NO: 317372
ggcucauuccgcgcagauc

SEQ ID NO: 348690 - RNA, 19 nt, Artificial Sequence
  Description of Artificial Sequence: Synthetic oligonucleotide
  Antisense Strand to SEQ ID NO: 348689
gaucugcgcggaaugagcc

SEQ ID NO: 348691 - RNA, 19 nt, Artificial Sequence
  Description of Artificial Sequence: Synthetic oligonucleotide
  Sense Strand Starting at position 380 of SEQ ID NO: 317505
ugucaagcgccuucuguau

SEQ ID NO: 348692 - RNA, 19 nt, Artificial Sequence
  Description of Artificial Sequence: Synthetic oligonucleotide
  Antisense Strand to SEQ ID NO: 348691
auacagaaggcgcuugaca

SEQ ID NO: 348693 - RNA, 19 nt, Artificial Sequence
  Description of Artificial Sequence: Synthetic oligonucleotide
  Sense Strand Starting at position 380 of SEQ ID NO: 317545
gggcuacaucgaugaacaa

SEQ ID NO: 348694 - RNA, 19 nt, Artificial Sequence
  Description of Artificial Sequence: Synthetic oligonucleotide
  Antisense Strand to SEQ ID NO: 348693
uuguucaucgauguagccc

SEQ ID NO: 348695 - RNA, 19 nt, Artificial Sequence
  Description of Artificial Sequence: Synthetic oligonucleotide
  Sense Strand Starting at position 380 of SEQ ID NO: 318022
ucacuaagaaagugugguu

SEQ ID NO: 348696 - RNA, 19 nt, Artificial Sequence
  Description of Artificial Sequence: Synthetic oligonucleotide
  Antisense Strand to SEQ ID NO: 348695
aaccacacuuucuuaguga

SEQ ID NO: 348697 - RNA, 19 nt, Artificial Sequence
  Description of Artificial Sequence: Synthetic oligonucleotide
  Sense Strand Starting at position 380 of SEQ ID NO: 318410
cccagauauuaagcugauu

SEQ ID NO: 348698 - RNA, 19 nt, Artificial Sequence
  Description of Artificial Sequence: Synthetic oligonucleotide
  Antisense Strand to SEQ ID NO: 348697
aaucagcuuaauaucuggg

SEQ ID NO: 348699 - RNA, 19 nt, Artificial Sequence
  Description of Artificial Sequence: Synthetic oligonucleotide
  Sense Strand Starting at position 380 of SEQ ID NO: 318463
gaugucacuuuauucguga

SEQ ID NO: 348700 - RNA, 19 nt, Artificial Sequence
  Description of Artificial Sequence: Synthetic oligonucleotide
  Antisense Strand to SEQ ID NO: 348699
ucacgaauaaagugacauc

SEQ ID NO: 348701 - RNA, 19 nt, Artificial Sequence
  Description of Artificial Sequence: Synthetic oligonucleotide
  Sense Strand Starting at position 380 of SEQ ID NO: 318468
cacuuuauucgugaggccu

SEQ ID NO: 348702 - RNA, 19 nt, Artificial Sequence
  Description of Artificial Sequence: Synthetic oligonucleotide
  Antisense Strand to SEQ ID NO: 348701
aggccucacgaauaaagug

SEQ ID NO: 348703 - RNA, 19 nt, Artificial Sequence
  Description of Artificial Sequence: Synthetic oligonucleotide
  Sense Strand Starting at position 380 of SEQ ID NO: 318573
ucuauuauaccguauauag

SEQ ID NO: 348704 - RNA, 19 nt, Artificial Sequence
  Description of Artificial Sequence: Synthetic oligonucleotide
  Antisense Strand to SEQ ID NO: 348703
cuauauacgguauaauaga

SEQ ID NO: 348705 - RNA, 19 nt, Artificial Sequence
  Description of Artificial Sequence: Synthetic oligonucleotide
  Sense Strand Starting at position 380 of SEQ ID NO: 318611
gccucagaucaguggacaa

SEQ ID NO: 348706 - RNA, 19 nt, Artificial Sequence
  Description of Artificial Sequence: Synthetic oligonucleotide
  Antisense Strand to SEQ ID NO: 348705
uuguccacugaucugaggc

SEQ ID NO: 348707 - RNA, 19 nt, Artificial Sequence
  Description of Artificial Sequence: Synthetic oligonucleotide
  Sense Strand Starting at position 380 of SEQ ID NO: 318632
cuguaauuccaccaaaguc

SEQ ID NO: 348708 - RNA, 19 nt, Artificial Sequence
  Description of Artificial Sequence: Synthetic oligonucleotide
  Antisense Strand to SEQ ID NO: 348707
gacuuugguggaauuacag

SEQ ID NO: 348709 - RNA, 19 nt, Artificial Sequence
  Description of Artificial Sequence: Synthetic oligonucleotide
  Sense Strand Starting at position 380 of SEQ ID NO: 318679
guuauaugauuugggaaag

SEQ ID NO: 348710 - RNA, 19 nt, Artificial Sequence
  Description of Artificial Sequence: Synthetic oligonucleotide
  Antisense Strand to SEQ ID NO: 348709
cuuucccaaaucauauaac

SEQ ID NO: 348711 - RNA, 19 nt, Artificial Sequence
  Description of Artificial Sequence: Synthetic oligonucleotide
  Sense Strand Starting at position 380 of SEQ ID NO: 318680
uuauaugauuugggaaaga

SEQ ID NO: 348712 - RNA, 19 nt, Artificial Sequence
  Description of Artificial Sequence: Synthetic oligonucleotide
  Antisense Strand to SEQ ID NO: 348711
ucuuucccaaaucauauaa

SEQ ID NO: 348713 - RNA, 19 nt, Artificial Sequence
  Description of Artificial Sequence: Synthetic oligonucleotide
  Sense Strand Starting at position 380 of SEQ ID NO: 318721
gugaaccgguguuugauau

SEQ ID NO: 348714 - RNA, 19 nt, Artificial Sequence
  Description of Artificial Sequence: Synthetic oligonucleotide
  Antisense Strand to SEQ ID NO: 348713
auaucaaacaccgguucac

SEQ ID NO: 348715 - RNA, 19 nt, Artificial Sequence
  Description of Artificial Sequence: Synthetic oligonucleotide
  Sense Strand Starting at position 380 of SEQ ID NO: 318728
gguguuugauaugcucaaa

SEQ ID NO: 348716 - RNA, 19 nt, Artificial Sequence
  Description of Artificial Sequence: Synthetic oligonucleotide
  Antisense Strand to SEQ ID NO: 348715
uuugagcauaucaaacacc

SEQ ID NO: 348717 - RNA, 19 nt, Artificial Sequence
  Description of Artificial Sequence: Synthetic oligonucleotide
  Sense Strand Starting at position 380 of SEQ ID NO: 318731
guuugauaugcucaaagca

SEQ ID NO: 348718 - RNA, 19 nt, Artificial Sequence
  Description of Artificial Sequence: Synthetic oligonucleotide
  Antisense Strand to SEQ ID NO: 348717
ugcuuugagcauaucaaac

SEQ ID NO: 348719 - RNA, 19 nt, Artificial Sequence
  Description of Artificial Sequence: Synthetic oligonucleotide
  Sense Strand Starting at position 380 of SEQ ID NO: 318827
gguuaagaucgauguggaa

SEQ ID NO: 348720 - RNA, 19 nt, Artificial Sequence
  Description of Artificial Sequence: Synthetic oligonucleotide
  Antisense Strand to SEQ ID NO: 348719
uuccacaucgaucuuaacc

SEQ ID NO: 348721 - RNA, 19 nt, Artificial Sequence
  Description of Artificial Sequence: Synthetic oligonucleotide
  Sense Strand Starting at position 380 of SEQ ID NO: 318829
uuaagaucgauguggaaug

SEQ ID NO: 348722 - RNA, 19 nt, Artificial Sequence
  Description of Artificial Sequence: Synthetic oligonucleotide
  Antisense Strand to SEQ ID NO: 348721
cauuccacaucgaucuuaa

SEQ ID NO: 348723 - RNA, 19 nt, Artificial Sequence
  Description of Artificial Sequence: Synthetic oligonucleotide
  Sense Strand Starting at position 380 of SEQ ID NO: 318834
aucgauguggaauguaauc

SEQ ID NO: 348724 - RNA, 19 nt, Artificial Sequence
  Description of Artificial Sequence: Synthetic oligonucleotide
  Antisense Strand to SEQ ID NO: 348723
gauuacauuccacaucgau

SEQ ID NO: 348725 - RNA, 19 nt, Artificial Sequence
  Description of Artificial Sequence: Synthetic oligonucleotide
  Sense Strand Starting at position 380 of SEQ ID NO: 318839
uguggaauguaaucguuag

SEQ ID NO: 348726 - RNA, 19 nt, Artificial Sequence
  Description of Artificial Sequence: Synthetic oligonucleotide
  Antisense Strand to SEQ ID NO: 348725
cuaacgauuacauuccaca

SEQ ID NO: 348727 - RNA, 19 nt, Artificial Sequence
  Description of Artificial Sequence: Synthetic oligonucleotide
  Sense Strand Starting at position 380 of SEQ ID NO: 318843
gaauguaaucguuagcuga

SEQ ID NO: 348728 - RNA, 19 nt, Artificial Sequence
  Description of Artificial Sequence: Synthetic oligonucleotide
  Antisense Strand to SEQ ID NO: 348727
ucagcuaacgauuacauuc

SEQ ID NO: 348729 - RNA, 19 nt, Artificial Sequence
  Description of Artificial Sequence: Synthetic oligonucleotide
  Sense Strand Starting at position 380 of SEQ ID NO: 318845
auguaaucguuagcugaag

SEQ ID NO: 348730 - RNA, 19 nt, Artificial Sequence
  Description of Artificial Sequence: Synthetic oligonucleotide
  Antisense Strand to SEQ ID NO: 348729
cuucagcuaacgauuacau

SEQ ID NO: 348731 - RNA, 19 nt, Artificial Sequence
  Description of Artificial Sequence: Synthetic oligonucleotide
  Sense Strand Starting at position 380 of SEQ ID NO: 318900
gugucaaagggauguagau

SEQ ID NO: 348732 - RNA, 19 nt, Artificial Sequence
  Description of Artificial Sequence: Synthetic oligonucleotide
  Antisense Strand to SEQ ID NO: 348731
aucuacaucccuuugacac

SEQ ID NO: 348733 - RNA, 19 nt, Artificial Sequence
  Description of Artificial Sequence: Synthetic oligonucleotide
  Sense Strand Starting at position 380 of SEQ ID NO: 318945
ugcuuauugaaaugugaga

SEQ ID NO: 348734 - RNA, 19 nt, Artificial Sequence
  Description of Artificial Sequence: Synthetic oligonucleotide
  Antisense Strand to SEQ ID NO: 348733
ucucacauuucaauaagca

SEQ ID NO: 348735 - RNA, 19 nt, Artificial Sequence
  Description of Artificial Sequence: Synthetic oligonucleotide
  Sense Strand Starting at position 380 of SEQ ID NO: 318950
auugaaaugugagaaagag

SEQ ID NO: 348736 - RNA, 19 nt, Artificial Sequence
  Description of Artificial Sequence: Synthetic oligonucleotide
  Antisense Strand to SEQ ID NO: 348735
cucuuucucacauuucaau

SEQ ID NO: 348737 - RNA, 19 nt, Artificial Sequence
  Description of Artificial Sequence: Synthetic oligonucleotide
  Sense Strand Starting at position 380 of SEQ ID NO: 319005
gguguuccuguugagcaua

SEQ ID NO: 348738 - RNA, 19 nt, Artificial Sequence
  Description of Artificial Sequence: Synthetic oligonucleotide
  Antisense Strand to SEQ ID NO: 348737
uaugcucaacaggaacacc

SEQ ID NO: 348739 - RNA, 19 nt, Artificial Sequence
  Description of Artificial Sequence: Synthetic oligonucleotide
  Sense Strand Starting at position 380 of SEQ ID NO: 319007
uguuccuguugagcauaaa

SEQ ID NO: 348740 - RNA, 19 nt, Artificial Sequence
  Description of Artificial Sequence: Synthetic oligonucleotide
  Antisense Strand to SEQ ID NO: 348739
uuuaugcucaacaggaaca

SEQ ID NO: 348741 - RNA, 19 nt, Artificial Sequence
  Description of Artificial Sequence: Synthetic oligonucleotide
  Sense Strand Starting at position 380 of SEQ ID NO: 319010
uccuguugagcauaaacaa

SEQ ID NO: 348742 - RNA, 19 nt, Artificial Sequence
  Description of Artificial Sequence: Synthetic oligonucleotide
  Antisense Strand to SEQ ID NO: 348741
uuguuuaugcucaacagga

SEQ ID NO: 348743 - RNA, 19 nt, Artificial Sequence
  Description of Artificial Sequence: Synthetic oligonucleotide
  Sense Strand Starting at position 380 of SEQ ID NO: 319041
ccaacaucagacugauugu

SEQ ID NO: 348744 - RNA, 19 nt, Artificial Sequence
  Description of Artificial Sequence: Synthetic oligonucleotide
  Antisense Strand to SEQ ID NO: 348743
acaaucagucugauguugg

SEQ ID NO: 348745 - RNA, 19 nt, Artificial Sequence
  Description of Artificial Sequence: Synthetic oligonucleotide
  Sense Strand Starting at position 380 of SEQ ID NO: 319051
acugauugugacggaucaa

SEQ ID NO: 348746 - RNA, 19 nt, Artificial Sequence
  Description of Artificial Sequence: Synthetic oligonucleotide
  Antisense Strand to SEQ ID NO: 348745
uugauccgucacaaucagu

SEQ ID NO: 348747 - RNA, 19 nt, Artificial Sequence
  Description of Artificial Sequence: Synthetic oligonucleotide
  Sense Strand Starting at position 380 of SEQ ID NO: 319052
cugauugugacggaucaag

SEQ ID NO: 348748 - RNA, 19 nt, Artificial Sequence
  Description of Artificial Sequence: Synthetic oligonucleotide
  Antisense Strand to SEQ ID NO: 348747
cuugauccgucacaaucag

SEQ ID NO: 348749 - RNA, 19 nt, Artificial Sequence
  Description of Artificial Sequence: Synthetic oligonucleotide
  Sense Strand Starting at position 381 of SEQ ID NO: 315336
cucauagaguugcuuugaa

SEQ ID NO: 348750 - RNA, 19 nt, Artificial Sequence
  Description of Artificial Sequence: Synthetic oligonucleotide
  Antisense Strand to SEQ ID NO: 348749
uucaaagcaacucuaugag

SEQ ID NO: 348751 - RNA, 19 nt, Artificial Sequence
  Description of Artificial Sequence: Synthetic oligonucleotide
  Sense Strand Starting at position 381 of SEQ ID NO: 315486
acucucaugccauguuaga

SEQ ID NO: 348752 - RNA, 19 nt, Artificial Sequence
  Description of Artificial Sequence: Synthetic oligonucleotide
  Antisense Strand to SEQ ID NO: 348751
ucuaacauggcaugagagu

SEQ ID NO: 348753 - RNA, 19 nt, Artificial Sequence
  Description of Artificial Sequence: Synthetic oligonucleotide
  Sense Strand Starting at position 381 of SEQ ID NO: 315516
acgcuuguaucauuacaua

SEQ ID NO: 348754 - RNA, 19 nt, Artificial Sequence
  Description of Artificial Sequence: Synthetic oligonucleotide
  Antisense Strand to SEQ ID NO: 348753
uauguaaugauacaagcgu

SEQ ID NO: 348755 - RNA, 19 nt, Artificial Sequence
  Description of Artificial Sequence: Synthetic oligonucleotide
  Sense Strand Starting at position 381 of SEQ ID NO: 315606
auggaaauccaguauuguc

SEQ ID NO: 348756 - RNA, 19 nt, Artificial Sequence
  Description of Artificial Sequence: Synthetic oligonucleotide
  Antisense Strand to SEQ ID NO: 348755
gacaauacuggauuuccau

SEQ ID NO: 348757 - RNA, 19 nt, Artificial Sequence
  Description of Artificial Sequence: Synthetic oligonucleotide
  Sense Strand Starting at position 381 of SEQ ID NO: 315684
agacacuguuaccugugaa

SEQ ID NO: 348758 - RNA, 19 nt, Artificial Sequence
  Description of Artificial Sequence: Synthetic oligonucleotide
  Antisense Strand to SEQ ID NO: 348757
uucacagguaacagugucu

SEQ ID NO: 348759 - RNA, 19 nt, Artificial Sequence
  Description of Artificial Sequence: Synthetic oligonucleotide
  Sense Strand Starting at position 381 of SEQ ID NO: 315760
aggugcuaaagauauagua

SEQ ID NO: 348760 - RNA, 19 nt, Artificial Sequence
  Description of Artificial Sequence: Synthetic oligonucleotide
  Antisense Strand to SEQ ID NO: 348759
uacuauaucuuuagcaccu

SEQ ID NO: 348761 - RNA, 19 nt, Artificial Sequence
  Description of Artificial Sequence: Synthetic oligonucleotide
  Sense Strand Starting at position 381 of SEQ ID NO: 315775
aguagcacuuaccugagau

SEQ ID NO: 348762 - RNA, 19 nt, Artificial Sequence
  Description of Artificial Sequence: Synthetic oligonucleotide
  Antisense Strand to SEQ ID NO: 348761
aucucagguaagugcuacu

SEQ ID NO: 348763 - RNA, 19 nt, Artificial Sequence
  Description of Artificial Sequence: Synthetic oligonucleotide
  Sense Strand Starting at position 381 of SEQ ID NO: 315776
guagcacuuaccugagaug

SEQ ID NO: 348764 - RNA, 19 nt, Artificial Sequence
  Description of Artificial Sequence: Synthetic oligonucleotide
  Antisense Strand to SEQ ID NO: 348763
caucucagguaagugcuac

SEQ ID NO: 348765 - RNA, 19 nt, Artificial Sequence
  Description of Artificial Sequence: Synthetic oligonucleotide
  Sense Strand Starting at position 381 of SEQ ID NO: 315788
ugagaugauuucugaaagu

SEQ ID NO: 348766 - RNA, 19 nt, Artificial Sequence
  Description of Artificial Sequence: Synthetic oligonucleotide
  Antisense Strand to SEQ ID NO: 348765
acuuucagaaaucaucuca

SEQ ID NO: 348767 - RNA, 19 nt, Artificial Sequence
  Description of Artificial Sequence: Synthetic oligonucleotide
  Sense Strand Starting at position 381 of SEQ ID NO: 315939
gggcuacaugucuagauaa

SEQ ID NO: 348768 - RNA, 19 nt, Artificial Sequence
  Description of Artificial Sequence: Synthetic oligonucleotide
  Antisense Strand to SEQ ID NO: 348767
uuaucuagacauguagccc

SEQ ID NO: 348769 - RNA, 19 nt, Artificial Sequence
  Description of Artificial Sequence: Synthetic oligonucleotide
  Sense Strand Starting at position 381 of SEQ ID NO: 316331
aaugaaauaugugaggaag

SEQ ID NO: 348770 - RNA, 19 nt, Artificial Sequence
  Description of Artificial Sequence: Synthetic oligonucleotide
  Antisense Strand to SEQ ID NO: 348769
cuuccucacauauuucauu

SEQ ID NO: 348771 - RNA, 19 nt, Artificial Sequence
  Description of Artificial Sequence: Synthetic oligonucleotide
  Sense Strand Starting at position 381 of SEQ ID NO: 316345
ggaaguugccuccacucua

SEQ ID NO: 348772 - RNA, 19 nt, Artificial Sequence
  Description of Artificial Sequence: Synthetic oligonucleotide
  Antisense Strand to SEQ ID NO: 348771
uagaguggaggcaacuucc

SEQ ID NO: 348773 - RNA, 19 nt, Artificial Sequence
  Description of Artificial Sequence: Synthetic oligonucleotide
  Sense Strand Starting at position 381 of SEQ ID NO: 316414
acugcaaagcgcuuuggua

SEQ ID NO: 348774 - RNA, 19 nt, Artificial Sequence
  Description of Artificial Sequence: Synthetic oligonucleotide
  Antisense Strand to SEQ ID NO: 348773
uaccaaagcgcuuugcagu

SEQ ID NO: 348775 - RNA, 19 nt, Artificial Sequence
  Description of Artificial Sequence: Synthetic oligonucleotide
  Sense Strand Starting at position 381 of SEQ ID NO: 316703
uuugauuccuaccugucua

SEQ ID NO: 348776 - RNA, 19 nt, Artificial Sequence
  Description of Artificial Sequence: Synthetic oligonucleotide
  Antisense Strand to SEQ ID NO: 348775
uagacagguaggaaucaaa

SEQ ID NO: 348777 - RNA, 19 nt, Artificial Sequence
  Description of Artificial Sequence: Synthetic oligonucleotide
  Sense Strand Starting at position 381 of SEQ ID NO: 316813
acgugaaccuaggcaaauu

SEQ ID NO: 348778 - RNA, 19 nt, Artificial Sequence
  Description of Artificial Sequence: Synthetic oligonucleotide
  Antisense Strand to SEQ ID NO: 348777
aauuugccuagguucacgu

SEQ ID NO: 348779 - RNA, 19 nt, Artificial Sequence
  Description of Artificial Sequence: Synthetic oligonucleotide
  Sense Strand Starting at position 381 of SEQ ID NO: 316968
ggaucaugccuacgaagaa

SEQ ID NO: 348780 - RNA, 19 nt, Artificial Sequence
  Description of Artificial Sequence: Synthetic oligonucleotide
  Antisense Strand to SEQ ID NO: 348779
uucuucguaggcaugaucc

SEQ ID NO: 348781 - RNA, 19 nt, Artificial Sequence
  Description of Artificial Sequence: Synthetic oligonucleotide
  Sense Strand Starting at position 381 of SEQ ID NO: 316977
cuacgaagaaagugaugau

SEQ ID NO: 348782 - RNA, 19 nt, Artificial Sequence
  Description of Artificial Sequence: Synthetic oligonucleotide
  Antisense Strand to SEQ ID NO: 348781
aucaucacuuucuucguag

SEQ ID NO: 348783 - RNA, 19 nt, Artificial Sequence
  Description of Artificial Sequence: Synthetic oligonucleotide
  Sense Strand Starting at position 381 of SEQ ID NO: 317022
ggauguuggagucgagcaa

SEQ ID NO: 348784 - RNA, 19 nt, Artificial Sequence
  Description of Artificial Sequence: Synthetic oligonucleotide
  Antisense Strand to SEQ ID NO: 348783
uugcucgacuccaacaucc

SEQ ID NO: 348785 - RNA, 19 nt, Artificial Sequence
  Description of Artificial Sequence: Synthetic oligonucleotide
  Sense Strand Starting at position 381 of SEQ ID NO: 317026
guuggagucgagcaacagu

SEQ ID NO: 348786 - RNA, 19 nt, Artificial Sequence
  Description of Artificial Sequence: Synthetic oligonucleotide
  Antisense Strand to SEQ ID NO: 348785
acuguugcucgacuccaac

SEQ ID NO: 348787 - RNA, 19 nt, Artificial Sequence
  Description of Artificial Sequence: Synthetic oligonucleotide
  Sense Strand Starting at position 381 of SEQ ID NO: 317652
cggcuucucggugaguaaa

SEQ ID NO: 348788 - RNA, 19 nt, Artificial Sequence
  Description of Artificial Sequence: Synthetic oligonucleotide
  Antisense Strand to SEQ ID NO: 348787
uuuacucaccgagaagccg

SEQ ID NO: 348789 - RNA, 19 nt, Artificial Sequence
  Description of Artificial Sequence: Synthetic oligonucleotide
  Sense Strand Starting at position 381 of SEQ ID NO: 317710
gcgaccuaaucucuuaagu

SEQ ID NO: 348790 - RNA, 19 nt, Artificial Sequence
  Description of Artificial Sequence: Synthetic oligonucleotide
  Antisense Strand to SEQ ID NO: 348789
acuuaagagauuaggucgc

SEQ ID NO: 348791 - RNA, 19 nt, Artificial Sequence
  Description of Artificial Sequence: Synthetic oligonucleotide
  Sense Strand Starting at position 381 of SEQ ID NO: 317817
uaccuuucugcgucguuaa

SEQ ID NO: 348792 - RNA, 19 nt, Artificial Sequence
  Description of Artificial Sequence: Synthetic oligonucleotide
  Antisense Strand to SEQ ID NO: 348791
uuaacgacgcagaaaggua

SEQ ID NO: 348793 - RNA, 19 nt, Artificial Sequence
  Description of Artificial Sequence: Synthetic oligonucleotide
  Sense Strand Starting at position 381 of SEQ ID NO: 317972
gccgaaaguccugacuaac

SEQ ID NO: 348794 - RNA, 19 nt, Artificial Sequence
  Description of Artificial Sequence: Synthetic oligonucleotide
  Antisense Strand to SEQ ID NO: 348793
guuagucaggacuuucggc

SEQ ID NO: 348795 - RNA, 19 nt, Artificial Sequence
  Description of Artificial Sequence: Synthetic oligonucleotide
  Sense Strand Starting at position 381 of SEQ ID NO: 317978
aguccugacuaacugagaa

SEQ ID NO: 348796 - RNA, 19 nt, Artificial Sequence
  Description of Artificial Sequence: Synthetic oligonucleotide
  Antisense Strand to SEQ ID NO: 348795
uucucaguuagucaggacu

SEQ ID NO: 348797 - RNA, 19 nt, Artificial Sequence
  Description of Artificial Sequence: Synthetic oligonucleotide
  Sense Strand Starting at position 381 of SEQ ID NO: 317995
aauguugacuaauccggau

SEQ ID NO: 348798 - RNA, 19 nt, Artificial Sequence
  Description of Artificial Sequence: Synthetic oligonucleotide
  Antisense Strand to SEQ ID NO: 348797
auccggauuagucaacauu

SEQ ID NO: 348799 - RNA, 19 nt, Artificial Sequence
  Description of Artificial Sequence: Synthetic oligonucleotide
  Sense Strand Starting at position 381 of SEQ ID NO: 317999
uugacuaauccggauagca

SEQ ID NO: 348800 - RNA, 19 nt, Artificial Sequence
  Description of Artificial Sequence: Synthetic oligonucleotide
  Antisense Strand to SEQ ID NO: 348799
ugcuauccggauuagucaa

SEQ ID NO: 348801 - RNA, 19 nt, Artificial Sequence
  Description of Artificial Sequence: Synthetic oligonucleotide
  Sense Strand Starting at position 381 of SEQ ID NO: 318007
uccggauagcauugagaag

SEQ ID NO: 348802 - RNA, 19 nt, Artificial Sequence
  Description of Artificial Sequence: Synthetic oligonucleotide
  Antisense Strand to SEQ ID NO: 348801
cuucucaaugcuauccgga

SEQ ID NO: 348803 - RNA, 19 nt, Artificial Sequence
  Description of Artificial Sequence: Synthetic oligonucleotide
  Sense Strand Starting at position 381 of SEQ ID NO: 318219
ggagauugucaugguugag

SEQ ID NO: 348804 - RNA, 19 nt, Artificial Sequence
  Description of Artificial Sequence: Synthetic oligonucleotide
  Antisense Strand to SEQ ID NO: 348803
cucaaccaugacaaucucc

SEQ ID NO: 348805 - RNA, 19 nt, Artificial Sequence
  Description of Artificial Sequence: Synthetic oligonucleotide
  Sense Strand Starting at position 381 of SEQ ID NO: 318222
gauugucaugguugagaga

SEQ ID NO: 348806 - RNA, 19 nt, Artificial Sequence
  Description of Artificial Sequence: Synthetic oligonucleotide
  Antisense Strand to SEQ ID NO: 348805
ucucucaaccaugacaauc

SEQ ID NO: 348807 - RNA, 19 nt, Artificial Sequence
  Description of Artificial Sequence: Synthetic oligonucleotide
  Sense Strand Starting at position 381 of SEQ ID NO: 318288
auuaacuuucugcagguaa

SEQ ID NO: 348808 - RNA, 19 nt, Artificial Sequence
  Description of Artificial Sequence: Synthetic oligonucleotide
  Antisense Strand to SEQ ID NO: 348807
uuaccugcagaaaguuaau

SEQ ID NO: 348809 - RNA, 19 nt, Artificial Sequence
  Description of Artificial Sequence: Synthetic oligonucleotide
  Sense Strand Starting at position 381 of SEQ ID NO: 318448
augucacaguucucugaca

SEQ ID NO: 348810 - RNA, 19 nt, Artificial Sequence
  Description of Artificial Sequence: Synthetic oligonucleotide
  Antisense Strand to SEQ ID NO: 348809
ugucagagaacugugacau

SEQ ID NO: 348811 - RNA, 19 nt, Artificial Sequence
  Description of Artificial Sequence: Synthetic oligonucleotide
  Sense Strand Starting at position 381 of SEQ ID NO: 318449
ugucacaguucucugacau

SEQ ID NO: 348812 - RNA, 19 nt, Artificial Sequence
  Description of Artificial Sequence: Synthetic oligonucleotide
  Antisense Strand to SEQ ID NO: 348811
augucagagaacugugaca

SEQ ID NO: 348813 - RNA, 19 nt, Artificial Sequence
  Description of Artificial Sequence: Synthetic oligonucleotide
  Sense Strand Starting at position 381 of SEQ ID NO: 318450
gucacaguucucugacauc

SEQ ID NO: 348814 - RNA, 19 nt, Artificial Sequence
  Description of Artificial Sequence: Synthetic oligonucleotide
  Antisense Strand to SEQ ID NO: 348813
gaugucagagaacugugac

SEQ ID NO: 348815 - RNA, 19 nt, Artificial Sequence
  Description of Artificial Sequence: Synthetic oligonucleotide
  Sense Strand Starting at position 381 of SEQ ID NO: 318563
auauguauguggcuaugua

SEQ ID NO: 348816 - RNA, 19 nt, Artificial Sequence
  Description of Artificial Sequence: Synthetic oligonucleotide
  Antisense Strand to SEQ ID NO: 348815
uacauagccacauacauau

SEQ ID NO: 348817 - RNA, 19 nt, Artificial Sequence
  Description of Artificial Sequence: Synthetic oligonucleotide
  Sense Strand Starting at position 381 of SEQ ID NO: 318656
acaugagguugucauuuac

SEQ ID NO: 348818 - RNA, 19 nt, Artificial Sequence
  Description of Artificial Sequence: Synthetic oligonucleotide
  Antisense Strand to SEQ ID NO: 348817
guaaaugacaaccucaugu

SEQ ID NO: 348819 - RNA, 19 nt, Artificial Sequence
  Description of Artificial Sequence: Synthetic oligonucleotide
  Sense Strand Starting at position 381 of SEQ ID NO: 318761
acuuguaauuccucaggaa

SEQ ID NO: 348820 - RNA, 19 nt, Artificial Sequence
  Description of Artificial Sequence: Synthetic oligonucleotide
  Antisense Strand to SEQ ID NO: 348819
uuccugaggaauuacaagu

SEQ ID NO: 348821 - RNA, 19 nt, Artificial Sequence
  Description of Artificial Sequence: Synthetic oligonucleotide
  Sense Strand Starting at position 381 of SEQ ID NO: 318793
cggucagaaccguauuauu

SEQ ID NO: 348822 - RNA, 19 nt, Artificial Sequence
  Description of Artificial Sequence: Synthetic oligonucleotide
  Antisense Strand to SEQ ID NO: 348821
aauaauacgguucugaccg

SEQ ID NO: 348823 - RNA, 19 nt, Artificial Sequence
  Description of Artificial Sequence: Synthetic oligonucleotide
  Sense Strand Starting at position 381 of SEQ ID NO: 318801
accguauuauucucuuuga

SEQ ID NO: 348824 - RNA, 19 nt, Artificial Sequence
  Description of Artificial Sequence: Synthetic oligonucleotide
  Antisense Strand to SEQ ID NO: 348823
ucaaagagaauaauacggu

SEQ ID NO: 348825 - RNA, 19 nt, Artificial Sequence
  Description of Artificial Sequence: Synthetic oligonucleotide
  Sense Strand Starting at position 381 of SEQ ID NO: 318802
ccguauuauucucuuugau

SEQ ID NO: 348826 - RNA, 19 nt, Artificial Sequence
  Description of Artificial Sequence: Synthetic oligonucleotide
  Antisense Strand to SEQ ID NO: 348825
aucaaagagaauaauacgg

SEQ ID NO: 348827 - RNA, 19 nt, Artificial Sequence
  Description of Artificial Sequence: Synthetic oligonucleotide
  Sense Strand Starting at position 381 of SEQ ID NO: 318804
guauuauucucuuugaugu

SEQ ID NO: 348828 - RNA, 19 nt, Artificial Sequence
  Description of Artificial Sequence: Synthetic oligonucleotide
  Antisense Strand to SEQ ID NO: 348827
acaucaaagagaauaauac

SEQ ID NO: 348829 - RNA, 19 nt, Artificial Sequence
  Description of Artificial Sequence: Synthetic oligonucleotide
  Sense Strand Starting at position 382 of SEQ ID NO: 315240
acguuacaaucuguguuaa

SEQ ID NO: 348830 - RNA, 19 nt, Artificial Sequence
  Description of Artificial Sequence: Synthetic oligonucleotide
  Antisense Strand to SEQ ID NO: 348829
uuaacacagauuguaacgu

SEQ ID NO: 348831 - RNA, 19 nt, Artificial Sequence
  Description of Artificial Sequence: Synthetic oligonucleotide
  Sense Strand Starting at position 382 of SEQ ID NO: 315242
guuacaaucuguguuaaca

SEQ ID NO: 348832 - RNA, 19 nt, Artificial Sequence
  Description of Artificial Sequence: Synthetic oligonucleotide
  Antisense Strand to SEQ ID NO: 348831
uguuaacacagauuguaac

SEQ ID NO: 348833 - RNA, 19 nt, Artificial Sequence
  Description of Artificial Sequence: Synthetic oligonucleotide
  Sense Strand Starting at position 382 of SEQ ID NO: 315313
agugcaaugucccuuuaca

SEQ ID NO: 348834 - RNA, 19 nt, Artificial Sequence
  Description of Artificial Sequence: Synthetic oligonucleotide
  Antisense Strand to SEQ ID NO: 348833
uguaaagggacauugcacu

SEQ ID NO: 348835 - RNA, 19 nt, Artificial Sequence
  Description of Artificial Sequence: Synthetic oligonucleotide
  Sense Strand Starting at position 382 of SEQ ID NO: 315448
gugauauguaugcaguuuc

SEQ ID NO: 348836 - RNA, 19 nt, Artificial Sequence
  Description of Artificial Sequence: Synthetic oligonucleotide
  Antisense Strand to SEQ ID NO: 348835
gaaacugcauacauaucac

SEQ ID NO: 348837 - RNA, 19 nt, Artificial Sequence
  Description of Artificial Sequence: Synthetic oligonucleotide
  Sense Strand Starting at position 382 of SEQ ID NO: 315603
cuuacucauuuaggaaaug

SEQ ID NO: 348838 - RNA, 19 nt, Artificial Sequence
  Description of Artificial Sequence: Synthetic oligonucleotide
  Antisense Strand to SEQ ID NO: 348837
cauuuccuaaaugaguaag

SEQ ID NO: 348839 - RNA, 19 nt, Artificial Sequence
  Description of Artificial Sequence: Synthetic oligonucleotide
  Sense Strand Starting at position 382 of SEQ ID NO: 315638
ugucauuagggcuggacaa

SEQ ID NO: 348840 - RNA, 19 nt, Artificial Sequence
  Description of Artificial Sequence: Synthetic oligonucleotide
  Antisense Strand to SEQ ID NO: 348839
uuguccagcccuaaugaca

SEQ ID NO: 348841 - RNA, 19 nt, Artificial Sequence
  Description of Artificial Sequence: Synthetic oligonucleotide
  Sense Strand Starting at position 382 of SEQ ID NO: 315639
gucauuagggcuggacaaa

SEQ ID NO: 348842 - RNA, 19 nt, Artificial Sequence
  Description of Artificial Sequence: Synthetic oligonucleotide
  Antisense Strand to SEQ ID NO: 348841
uuuguccagcccuaaugac

SEQ ID NO: 348843 - RNA, 19 nt, Artificial Sequence
  Description of Artificial Sequence: Synthetic oligonucleotide
  Sense Strand Starting at position 382 of SEQ ID NO: 315648
gcuggacaaacaugguaau

SEQ ID NO: 348844 - RNA, 19 nt, Artificial Sequence
  Description of Artificial Sequence: Synthetic oligonucleotide
  Antisense Strand to SEQ ID NO: 348843
auuaccauguuuguccagc

SEQ ID NO: 348845 - RNA, 19 nt, Artificial Sequence
  Description of Artificial Sequence: Synthetic oligonucleotide
  Sense Strand Starting at position 382 of SEQ ID NO: 315649
cuggacaaacaugguaauu

SEQ ID NO: 348846 - RNA, 19 nt, Artificial Sequence
  Description of Artificial Sequence: Synthetic oligonucleotide
  Antisense Strand to SEQ ID NO: 348845
aauuaccauguuuguccag

SEQ ID NO: 348847 - RNA, 19 nt, Artificial Sequence
  Description of Artificial Sequence: Synthetic oligonucleotide
  Sense Strand Starting at position 382 of SEQ ID NO: 315707
ugggcuuccacaugagcaa

SEQ ID NO: 348848 - RNA, 19 nt, Artificial Sequence
  Description of Artificial Sequence: Synthetic oligonucleotide
  Antisense Strand to SEQ ID NO: 348847
uugcucauguggaagccca

SEQ ID NO: 348849 - RNA, 19 nt, Artificial Sequence
  Description of Artificial Sequence: Synthetic oligonucleotide
  Sense Strand Starting at position 382 of SEQ ID NO: 315818
ugccuuccagugugagaaa

SEQ ID NO: 348850 - RNA, 19 nt, Artificial Sequence
  Description of Artificial Sequence: Synthetic oligonucleotide
  Antisense Strand to SEQ ID NO: 348849
uuucucacacuggaaggca

SEQ ID NO: 348851 - RNA, 19 nt, Artificial Sequence
  Description of Artificial Sequence: Synthetic oligonucleotide
  Sense Strand Starting at position 382 of SEQ ID NO: 315946
auccaaguacuguacaauu

SEQ ID NO: 348852 - RNA, 19 nt, Artificial Sequence
  Description of Artificial Sequence: Synthetic oligonucleotide
  Antisense Strand to SEQ ID NO: 348851
aauuguacaguacuuggau

SEQ ID NO: 348853 - RNA, 19 nt, Artificial Sequence
  Description of Artificial Sequence: Synthetic oligonucleotide
  Sense Strand Starting at position 382 of SEQ ID NO: 315948
ccaaguacuguacaauuga

SEQ ID NO: 348854 - RNA, 19 nt, Artificial Sequence
  Description of Artificial Sequence: Synthetic oligonucleotide
  Antisense Strand to SEQ ID NO: 348853
ucaauuguacaguacuugg

SEQ ID NO: 348855 - RNA, 19 nt, Artificial Sequence
  Description of Artificial Sequence: Synthetic oligonucleotide
  Sense Strand Starting at position 382 of SEQ ID NO: 316075
gugaaacaugcauguuagu

SEQ ID NO: 348856 - RNA, 19 nt, Artificial Sequence
  Description of Artificial Sequence: Synthetic oligonucleotide
  Antisense Strand to SEQ ID NO: 348855
acuaacaugcauguuucac

SEQ ID NO: 348857 - RNA, 19 nt, Artificial Sequence
  Description of Artificial Sequence: Synthetic oligonucleotide
  Sense Strand Starting at position 382 of SEQ ID NO: 316136
gaggaaugccgguguugaa

SEQ ID NO: 348858 - RNA, 19 nt, Artificial Sequence
  Description of Artificial Sequence: Synthetic oligonucleotide
  Antisense Strand to SEQ ID NO: 348857
uucaacaccggcauuccuc

SEQ ID NO: 348859 - RNA, 19 nt, Artificial Sequence
  Description of Artificial Sequence: Synthetic oligonucleotide
  Sense Strand Starting at position 382 of SEQ ID NO: 316244
ucucuugcgauuuggcaaa

SEQ ID NO: 348860 - RNA, 19 nt, Artificial Sequence
  Description of Artificial Sequence: Synthetic oligonucleotide
  Antisense Strand to SEQ ID NO: 348859
uuugccaaaucgcaagaga

SEQ ID NO: 348861 - RNA, 19 nt, Artificial Sequence
  Description of Artificial Sequence: Synthetic oligonucleotide
  Sense Strand Starting at position 382 of SEQ ID NO: 316270
uugcuaccugcugagagau

SEQ ID NO: 348862 - RNA, 19 nt, Artificial Sequence
  Description of Artificial Sequence: Synthetic oligonucleotide
  Antisense Strand to SEQ ID NO: 348861
aucucucagcagguagcaa

SEQ ID NO: 348863 - RNA, 19 nt, Artificial Sequence
  Description of Artificial Sequence: Synthetic oligonucleotide
  Sense Strand Starting at position 382 of SEQ ID NO: 316357
gagaauacaggaugucagu

SEQ ID NO: 348864 - RNA, 19 nt, Artificial Sequence
  Description of Artificial Sequence: Synthetic oligonucleotide
  Antisense Strand to SEQ ID NO: 348863
acugacauccuguauucuc

SEQ ID NO: 348865 - RNA, 19 nt, Artificial Sequence
  Description of Artificial Sequence: Synthetic oligonucleotide
  Sense Strand Starting at position 382 of SEQ ID NO: 316391
gccucacaaguuuaaagaa

SEQ ID NO: 348866 - RNA, 19 nt, Artificial Sequence
  Description of Artificial Sequence: Synthetic oligonucleotide
  Antisense Strand to SEQ ID NO: 348865
uucuuuaaacuugugaggc

SEQ ID NO: 348867 - RNA, 19 nt, Artificial Sequence
  Description of Artificial Sequence: Synthetic oligonucleotide
  Sense Strand Starting at position 382 of SEQ ID NO: 316456
accucaucccgggaaaggu

SEQ ID NO: 348868 - RNA, 19 nt, Artificial Sequence
  Description of Artificial Sequence: Synthetic oligonucleotide
  Antisense Strand to SEQ ID NO: 348867
accuuucccgggaugaggu

SEQ ID NO: 348869 - RNA, 19 nt, Artificial Sequence
  Description of Artificial Sequence: Synthetic oligonucleotide
  Sense Strand Starting at position 382 of SEQ ID NO: 317560
aagggaggugucuauuauc

SEQ ID NO: 348870 - RNA, 19 nt, Artificial Sequence
  Description of Artificial Sequence: Synthetic oligonucleotide
  Antisense Strand to SEQ ID NO: 348869
gauaauagacaccucccuu

SEQ ID NO: 348871 - RNA, 19 nt, Artificial Sequence
  Description of Artificial Sequence: Synthetic oligonucleotide
  Sense Strand Starting at position 382 of SEQ ID NO: 317587
ucuugcaucugugucaaga

SEQ ID NO: 348872 - RNA, 19 nt, Artificial Sequence
  Description of Artificial Sequence: Synthetic oligonucleotide
  Antisense Strand to SEQ ID NO: 348871
ucuugacacagaugcaaga

SEQ ID NO: 348873 - RNA, 19 nt, Artificial Sequence
  Description of Artificial Sequence: Synthetic oligonucleotide
  Sense Strand Starting at position 382 of SEQ ID NO: 317616
uuugaucugucuucuaguu

SEQ ID NO: 348874 - RNA, 19 nt, Artificial Sequence
  Description of Artificial Sequence: Synthetic oligonucleotide
  Antisense Strand to SEQ ID NO: 348873
aacuagaagacagaucaaa

SEQ ID NO: 348875 - RNA, 19 nt, Artificial Sequence
  Description of Artificial Sequence: Synthetic oligonucleotide
  Sense Strand Starting at position 382 of SEQ ID NO: 317779
gucaaacaccuguaauguu

SEQ ID NO: 348876 - RNA, 19 nt, Artificial Sequence
  Description of Artificial Sequence: Synthetic oligonucleotide
  Antisense Strand to SEQ ID NO: 348875
aacauuacagguguuugac

SEQ ID NO: 348877 - RNA, 19 nt, Artificial Sequence
  Description of Artificial Sequence: Synthetic oligonucleotide
  Sense Strand Starting at position 382 of SEQ ID NO: 318066
gagucugucucaguguaca

SEQ ID NO: 348878 - RNA, 19 nt, Artificial Sequence
  Description of Artificial Sequence: Synthetic oligonucleotide
  Antisense Strand to SEQ ID NO: 348877
uguacacugagacagacuc

SEQ ID NO: 348879 - RNA, 19 nt, Artificial Sequence
  Description of Artificial Sequence: Synthetic oligonucleotide
  Sense Strand Starting at position 382 of SEQ ID NO: 318189
ccugcaugucuggaaggaa

SEQ ID NO: 348880 - RNA, 19 nt, Artificial Sequence
  Description of Artificial Sequence: Synthetic oligonucleotide
  Antisense Strand to SEQ ID NO: 348879
uuccuuccagacaugcagg

SEQ ID NO: 348881 - RNA, 19 nt, Artificial Sequence
  Description of Artificial Sequence: Synthetic oligonucleotide
  Sense Strand Starting at position 382 of SEQ ID NO: 318209
agcugagucccuggcuaua

SEQ ID NO: 348882 - RNA, 19 nt, Artificial Sequence
  Description of Artificial Sequence: Synthetic oligonucleotide
  Antisense Strand to SEQ ID NO: 348881
uauagccagggacucagcu

SEQ ID NO: 348883 - RNA, 19 nt, Artificial Sequence
  Description of Artificial Sequence: Synthetic oligonucleotide
  Sense Strand Starting at position 382 of SEQ ID NO: 318219
cuggcuauacccugccaua

SEQ ID NO: 348884 - RNA, 19 nt, Artificial Sequence
  Description of Artificial Sequence: Synthetic oligonucleotide
  Antisense Strand to SEQ ID NO: 348883
uauggcaggguauagccag

SEQ ID NO: 348885 - RNA, 19 nt, Artificial Sequence
  Description of Artificial Sequence: Synthetic oligonucleotide
  Sense Strand Starting at position 382 of SEQ ID NO: 318305
agaaguccuuaagauagga

SEQ ID NO: 348886 - RNA, 19 nt, Artificial Sequence
  Description of Artificial Sequence: Synthetic oligonucleotide
  Antisense Strand to SEQ ID NO: 348885
uccuaucuuaaggacuucu

SEQ ID NO: 348887 - RNA, 19 nt, Artificial Sequence
  Description of Artificial Sequence: Synthetic oligonucleotide
  Sense Strand Starting at position 382 of SEQ ID NO: 318440
gcaagagcaccauggucau

SEQ ID NO: 348888 - RNA, 19 nt, Artificial Sequence
  Description of Artificial Sequence: Synthetic oligonucleotide
  Antisense Strand to SEQ ID NO: 348887
augaccauggugcucuugc

SEQ ID NO: 348889 - RNA, 19 nt, Artificial Sequence
  Description of Artificial Sequence: Synthetic oligonucleotide
  Sense Strand Starting at position 382 of SEQ ID NO: 318566
cuuugaaagcugugggaca

SEQ ID NO: 348890 - RNA, 19 nt, Artificial Sequence
  Description of Artificial Sequence: Synthetic oligonucleotide
  Antisense Strand to SEQ ID NO: 348889
ugucccacagcuuucaaag

SEQ ID NO: 348891 - RNA, 19 nt, Artificial Sequence
  Description of Artificial Sequence: Synthetic oligonucleotide
  Sense Strand Starting at position 382 of SEQ ID NO: 318568
uugaaagcugugggacaau

SEQ ID NO: 348892 - RNA, 19 nt, Artificial Sequence
  Description of Artificial Sequence: Synthetic oligonucleotide
  Antisense Strand to SEQ ID NO: 348891
auugucccacagcuuucaa

SEQ ID NO: 348893 - RNA, 19 nt, Artificial Sequence
  Description of Artificial Sequence: Synthetic oligonucleotide
  Sense Strand Starting at position 382 of SEQ ID NO: 318809
cagagaucaguccaugcca

SEQ ID NO: 348894 - RNA, 19 nt, Artificial Sequence
  Description of Artificial Sequence: Synthetic oligonucleotide
  Antisense Strand to SEQ ID NO: 348893
uggcauggacugaucucug

SEQ ID NO: 348895 - RNA, 19 nt, Artificial Sequence
  Description of Artificial Sequence: Synthetic oligonucleotide
  Sense Strand Starting at position 382 of SEQ ID NO: 318850
accuacagaccuuguaagu

SEQ ID NO: 348896 - RNA, 19 nt, Artificial Sequence
  Description of Artificial Sequence: Synthetic oligonucleotide
  Antisense Strand to SEQ ID NO: 348895
acuuacaaggucuguaggu

SEQ ID NO: 348897 - RNA, 19 nt, Artificial Sequence
  Description of Artificial Sequence: Synthetic oligonucleotide
  Sense Strand Starting at position 382 of SEQ ID NO: 318884
cuuugagagcccuguaguc

SEQ ID NO: 348898 - RNA, 19 nt, Artificial Sequence
  Description of Artificial Sequence: Synthetic oligonucleotide
  Antisense Strand to SEQ ID NO: 348897
gacuacagggcucucaaag

SEQ ID NO: 348899 - RNA, 19 nt, Artificial Sequence
  Description of Artificial Sequence: Synthetic oligonucleotide
  Sense Strand Starting at position 382 of SEQ ID NO: 318893
cccuguagucuccaauucu

SEQ ID NO: 348900 - RNA, 19 nt, Artificial Sequence
  Description of Artificial Sequence: Synthetic oligonucleotide
  Antisense Strand to SEQ ID NO: 348899
agaauuggagacuacaggg

SEQ ID NO: 348901 - RNA, 19 nt, Artificial Sequence
  Description of Artificial Sequence: Synthetic oligonucleotide
  Sense Strand Starting at position 382 of SEQ ID NO: 318957
gugucaaacuccuuugcag

SEQ ID NO: 348902 - RNA, 19 nt, Artificial Sequence
  Description of Artificial Sequence: Synthetic oligonucleotide
  Antisense Strand to SEQ ID NO: 348901
cugcaaaggaguuugacac

SEQ ID NO: 348903 - RNA, 19 nt, Artificial Sequence
  Description of Artificial Sequence: Synthetic oligonucleotide
  Sense Strand Starting at position 382 of SEQ ID NO: 319126
auuguaaagccacaguaau

SEQ ID NO: 348904 - RNA, 19 nt, Artificial Sequence
  Description of Artificial Sequence: Synthetic oligonucleotide
  Antisense Strand to SEQ ID NO: 348903
auuacuguggcuuuacaau

SEQ ID NO: 348905 - RNA, 19 nt, Artificial Sequence
  Description of Artificial Sequence: Synthetic oligonucleotide
  Sense Strand Starting at position 382 of SEQ ID NO: 319165
acaggaauauacugagaga

SEQ ID NO: 348906 - RNA, 19 nt, Artificial Sequence
  Description of Artificial Sequence: Synthetic oligonucleotide
  Antisense Strand to SEQ ID NO: 348905
ucucucaguauauuccugu

SEQ ID NO: 348907 - RNA, 19 nt, Artificial Sequence
  Description of Artificial Sequence: Synthetic oligonucleotide
  Sense Strand Starting at position 382 of SEQ ID NO: 319168
ggaauauacugagagaucu

SEQ ID NO: 348908 - RNA, 19 nt, Artificial Sequence
  Description of Artificial Sequence: Synthetic oligonucleotide
  Antisense Strand to SEQ ID NO: 348907
agaucucucaguauauucc

SEQ ID NO: 348909 - RNA, 19 nt, Artificial Sequence
  Description of Artificial Sequence: Synthetic oligonucleotide
  Sense Strand Starting at position 383 of SEQ ID NO: 315289
guccuuuggaaggaaugua

SEQ ID NO: 348910 - RNA, 19 nt, Artificial Sequence
  Description of Artificial Sequence: Synthetic oligonucleotide
  Antisense Strand to SEQ ID NO: 348909
uacauuccuuccaaaggac

SEQ ID NO: 348911 - RNA, 19 nt, Artificial Sequence
  Description of Artificial Sequence: Synthetic oligonucleotide
  Sense Strand Starting at position 383 of SEQ ID NO: 315299
aggaauguaacagguuagu

SEQ ID NO: 348912 - RNA, 19 nt, Artificial Sequence
  Description of Artificial Sequence: Synthetic oligonucleotide
  Antisense Strand to SEQ ID NO: 348911
acuaaccuguuacauuccu

SEQ ID NO: 348913 - RNA, 19 nt, Artificial Sequence
  Description of Artificial Sequence: Synthetic oligonucleotide
  Sense Strand Starting at position 383 of SEQ ID NO: 315305
guaacagguuagucuguau

SEQ ID NO: 348914 - RNA, 19 nt, Artificial Sequence
  Description of Artificial Sequence: Synthetic oligonucleotide
  Antisense Strand to SEQ ID NO: 348913
auacagacuaaccuguuac

SEQ ID NO: 348915 - RNA, 19 nt, Artificial Sequence
  Description of Artificial Sequence: Synthetic oligonucleotide
  Sense Strand Starting at position 383 of SEQ ID NO: 315308
acagguuagucuguaugag

SEQ ID NO: 348916 - RNA, 19 nt, Artificial Sequence
  Description of Artificial Sequence: Synthetic oligonucleotide
  Antisense Strand to SEQ ID NO: 348915
cucauacagacuaaccugu

SEQ ID NO: 348917 - RNA, 19 nt, Artificial Sequence
  Description of Artificial Sequence: Synthetic oligonucleotide
  Sense Strand Starting at position 383 of SEQ ID NO: 315309
cagguuagucuguaugagu

SEQ ID NO: 348918 - RNA, 19 nt, Artificial Sequence
  Description of Artificial Sequence: Synthetic oligonucleotide
  Antisense Strand to SEQ ID NO: 348917
acucauacagacuaaccug

SEQ ID NO: 348919 - RNA, 19 nt, Artificial Sequence
  Description of Artificial Sequence: Synthetic oligonucleotide
  Sense Strand Starting at position 383 of SEQ ID NO: 315316
gucuguaugagugacguua

SEQ ID NO: 348920 - RNA, 19 nt, Artificial Sequence
  Description of Artificial Sequence: Synthetic oligonucleotide
  Antisense Strand to SEQ ID NO: 348919
uaacgucacucauacagac

SEQ ID NO: 348921 - RNA, 19 nt, Artificial Sequence
  Description of Artificial Sequence: Synthetic oligonucleotide
  Sense Strand Starting at position 383 of SEQ ID NO: 315329
acguuacaaucuguguuaa

SEQ ID NO: 348922 - RNA, 19 nt, Artificial Sequence
  Description of Artificial Sequence: Synthetic oligonucleotide
  Antisense Strand to SEQ ID NO: 348921
uuaacacagauuguaacgu

SEQ ID NO: 348923 - RNA, 19 nt, Artificial Sequence
  Description of Artificial Sequence: Synthetic oligonucleotide
  Sense Strand Starting at position 383 of SEQ ID NO: 315331
guuacaaucuguguuaaca

SEQ ID NO: 348924 - RNA, 19 nt, Artificial Sequence
  Description of Artificial Sequence: Synthetic oligonucleotide
  Antisense Strand to SEQ ID NO: 348923
uguuaacacagauuguaac

SEQ ID NO: 348925 - RNA, 19 nt, Artificial Sequence
  Description of Artificial Sequence: Synthetic oligonucleotide
  Sense Strand Starting at position 383 of SEQ ID NO: 315402
agugcaaugucccuuuaca

SEQ ID NO: 348926 - RNA, 19 nt, Artificial Sequence
  Description of Artificial Sequence: Synthetic oligonucleotide
  Antisense Strand to SEQ ID NO: 348925
uguaaagggacauugcacu

SEQ ID NO: 348927 - RNA, 19 nt, Artificial Sequence
  Description of Artificial Sequence: Synthetic oligonucleotide
  Sense Strand Starting at position 383 of SEQ ID NO: 315537
gugauauguaugcaguuuc

SEQ ID NO: 348928 - RNA, 19 nt, Artificial Sequence
  Description of Artificial Sequence: Synthetic oligonucleotide
  Antisense Strand to SEQ ID NO: 348927
gaaacugcauacauaucac

SEQ ID NO: 348929 - RNA, 19 nt, Artificial Sequence
  Description of Artificial Sequence: Synthetic oligonucleotide
  Sense Strand Starting at position 383 of SEQ ID NO: 315692
cuuacucauuuaggaaaug

SEQ ID NO: 348930 - RNA, 19 nt, Artificial Sequence
  Description of Artificial Sequence: Synthetic oligonucleotide
  Antisense Strand to SEQ ID NO: 348929
cauuuccuaaaugaguaag

SEQ ID NO: 348931 - RNA, 19 nt, Artificial Sequence
  Description of Artificial Sequence: Synthetic oligonucleotide
  Sense Strand Starting at position 383 of SEQ ID NO: 315727
ugucauuagggcuggacaa

SEQ ID NO: 348932 - RNA, 19 nt, Artificial Sequence
  Description of Artificial Sequence: Synthetic oligonucleotide
  Antisense Strand to SEQ ID NO: 348931
uuguccagcccuaaugaca

SEQ ID NO: 348933 - RNA, 19 nt, Artificial Sequence
  Description of Artificial Sequence: Synthetic oligonucleotide
  Sense Strand Starting at position 383 of SEQ ID NO: 315728
gucauuagggcuggacaaa

SEQ ID NO: 348934 - RNA, 19 nt, Artificial Sequence
  Description of Artificial Sequence: Synthetic oligonucleotide
  Antisense Strand to SEQ ID NO: 348933
uuuguccagcccuaaugac

SEQ ID NO: 348935 - RNA, 19 nt, Artificial Sequence
  Description of Artificial Sequence: Synthetic oligonucleotide
  Sense Strand Starting at position 383 of SEQ ID NO: 315737
gcuggacaaacaugguaau

SEQ ID NO: 348936 - RNA, 19 nt, Artificial Sequence
  Description of Artificial Sequence: Synthetic oligonucleotide
  Antisense Strand to SEQ ID NO: 348935
auuaccauguuuguccagc

SEQ ID NO: 348937 - RNA, 19 nt, Artificial Sequence
  Description of Artificial Sequence: Synthetic oligonucleotide
  Sense Strand Starting at position 383 of SEQ ID NO: 315738
cuggacaaacaugguaauu

SEQ ID NO: 348938 - RNA, 19 nt, Artificial Sequence
  Description of Artificial Sequence: Synthetic oligonucleotide
  Antisense Strand to SEQ ID NO: 348937
aauuaccauguuuguccag

SEQ ID NO: 348939 - RNA, 19 nt, Artificial Sequence
  Description of Artificial Sequence: Synthetic oligonucleotide
  Sense Strand Starting at position 383 of SEQ ID NO: 315796
ugggcuuccacaugagcaa

SEQ ID NO: 348940 - RNA, 19 nt, Artificial Sequence
  Description of Artificial Sequence: Synthetic oligonucleotide
  Antisense Strand to SEQ ID NO: 348939
uugcucauguggaagccca

SEQ ID NO: 348941 - RNA, 19 nt, Artificial Sequence
  Description of Artificial Sequence: Synthetic oligonucleotide
  Sense Strand Starting at position 383 of SEQ ID NO: 315907
ugccuuccagugugagaaa

SEQ ID NO: 348942 - RNA, 19 nt, Artificial Sequence
  Description of Artificial Sequence: Synthetic oligonucleotide
  Antisense Strand to SEQ ID NO: 348941
uuucucacacuggaaggca

SEQ ID NO: 348943 - RNA, 19 nt, Artificial Sequence
  Description of Artificial Sequence: Synthetic oligonucleotide
  Sense Strand Starting at position 383 of SEQ ID NO: 316035
auccaaguacuguacaauu

SEQ ID NO: 348944 - RNA, 19 nt, Artificial Sequence
  Description of Artificial Sequence: Synthetic oligonucleotide
  Antisense Strand to SEQ ID NO: 348943
aauuguacaguacuuggau

SEQ ID NO: 348945 - RNA, 19 nt, Artificial Sequence
  Description of Artificial Sequence: Synthetic oligonucleotide
  Sense Strand Starting at position 383 of SEQ ID NO: 316037
ccaaguacuguacaauuga

SEQ ID NO: 348946 - RNA, 19 nt, Artificial Sequence
  Description of Artificial Sequence: Synthetic oligonucleotide
  Antisense Strand to SEQ ID NO: 348945
ucaauuguacaguacuugg

SEQ ID NO: 348947 - RNA, 19 nt, Artificial Sequence
  Description of Artificial Sequence: Synthetic oligonucleotide
  Sense Strand Starting at position 383 of SEQ ID NO: 316164
gugaaacaugcauguuagu

SEQ ID NO: 348948 - RNA, 19 nt, Artificial Sequence
  Description of Artificial Sequence: Synthetic oligonucleotide
  Antisense Strand to SEQ ID NO: 348947
acuaacaugcauguuucac

SEQ ID NO: 348949 - RNA, 19 nt, Artificial Sequence
  Description of Artificial Sequence: Synthetic oligonucleotide
  Sense Strand Starting at position 383 of SEQ ID NO: 316225
gaggaaugccgguguugaa

SEQ ID NO: 348950 - RNA, 19 nt, Artificial Sequence
  Description of Artificial Sequence: Synthetic oligonucleotide
  Antisense Strand to SEQ ID NO: 348949
uucaacaccggcauuccuc

SEQ ID NO: 348951 - RNA, 19 nt, Artificial Sequence
  Description of Artificial Sequence: Synthetic oligonucleotide
  Sense Strand Starting at position 383 of SEQ ID NO: 316333
ucucuugcgauuuggcaaa

SEQ ID NO: 348952 - RNA, 19 nt, Artificial Sequence
  Description of Artificial Sequence: Synthetic oligonucleotide
  Antisense Strand to SEQ ID NO: 348951
uuugccaaaucgcaagaga

SEQ ID NO: 348953 - RNA, 19 nt, Artificial Sequence
  Description of Artificial Sequence: Synthetic oligonucleotide
  Sense Strand Starting at position 383 of SEQ ID NO: 316359
uugcuaccugcugagagau

SEQ ID NO: 348954 - RNA, 19 nt, Artificial Sequence
  Description of Artificial Sequence: Synthetic oligonucleotide
  Antisense Strand to SEQ ID NO: 348953
aucucucagcagguagcaa

SEQ ID NO: 348955 - RNA, 19 nt, Artificial Sequence
  Description of Artificial Sequence: Synthetic oligonucleotide
  Sense Strand Starting at position 383 of SEQ ID NO: 316446
gagaauacaggaugucagu

SEQ ID NO: 348956 - RNA, 19 nt, Artificial Sequence
  Description of Artificial Sequence: Synthetic oligonucleotide
  Antisense Strand to SEQ ID NO: 348955
acugacauccuguauucuc

SEQ ID NO: 348957 - RNA, 19 nt, Artificial Sequence
  Description of Artificial Sequence: Synthetic oligonucleotide
  Sense Strand Starting at position 383 of SEQ ID NO: 316480
gccucacaaguuuaaagaa

SEQ ID NO: 348958 - RNA, 19 nt, Artificial Sequence
  Description of Artificial Sequence: Synthetic oligonucleotide
  Antisense Strand to SEQ ID NO: 348957
uucuuuaaacuugugaggc

SEQ ID NO: 348959 - RNA, 19 nt, Artificial Sequence
  Description of Artificial Sequence: Synthetic oligonucleotide
  Sense Strand Starting at position 383 of SEQ ID NO: 316545
accucaucccgggaaaggu

SEQ ID NO: 348960 - RNA, 19 nt, Artificial Sequence
  Description of Artificial Sequence: Synthetic oligonucleotide
  Antisense Strand to SEQ ID NO: 348959
accuuucccgggaugaggu

SEQ ID NO: 348961 - RNA, 19 nt, Artificial Sequence
  Description of Artificial Sequence: Synthetic oligonucleotide
  Sense Strand Starting at position 383 of SEQ ID NO: 317649
aagggaggugucuauuauc

SEQ ID NO: 348962 - RNA, 19 nt, Artificial Sequence
  Description of Artificial Sequence: Synthetic oligonucleotide
  Antisense Strand to SEQ ID NO: 348961
gauaauagacaccucccuu

SEQ ID NO: 348963 - RNA, 19 nt, Artificial Sequence
  Description of Artificial Sequence: Synthetic oligonucleotide
  Sense Strand Starting at position 383 of SEQ ID NO: 317676
ucuugcaucugugucaaga

SEQ ID NO: 348964 - RNA, 19 nt, Artificial Sequence
  Description of Artificial Sequence: Synthetic oligonucleotide
  Antisense Strand to SEQ ID NO: 348963
ucuugacacagaugcaaga

SEQ ID NO: 348965 - RNA, 19 nt, Artificial Sequence
  Description of Artificial Sequence: Synthetic oligonucleotide
  Sense Strand Starting at position 383 of SEQ ID NO: 317705
uuugaucugucuucuaguu

SEQ ID NO: 348966 - RNA, 19 nt, Artificial Sequence
  Description of Artificial Sequence: Synthetic oligonucleotide
  Antisense Strand to SEQ ID NO: 348965
aacuagaagacagaucaaa

SEQ ID NO: 348967 - RNA, 19 nt, Artificial Sequence
  Description of Artificial Sequence: Synthetic oligonucleotide
  Sense Strand Starting at position 383 of SEQ ID NO: 317868
gucaaacaccuguaauguu

SEQ ID NO: 348968 - RNA, 19 nt, Artificial Sequence
  Description of Artificial Sequence: Synthetic oligonucleotide
  Antisense Strand to SEQ ID NO: 348967
aacauuacagguguuugac

SEQ ID NO: 348969 - RNA, 19 nt, Artificial Sequence
  Description of Artificial Sequence: Synthetic oligonucleotide
  Sense Strand Starting at position 383 of SEQ ID NO: 318278
ccugcaugucuggaaggaa

SEQ ID NO: 348970 - RNA, 19 nt, Artificial Sequence
  Description of Artificial Sequence: Synthetic oligonucleotide
  Antisense Strand to SEQ ID NO: 348969
uuccuuccagacaugcagg

SEQ ID NO: 348971 - RNA, 19 nt, Artificial Sequence
  Description of Artificial Sequence: Synthetic oligonucleotide
  Sense Strand Starting at position 383 of SEQ ID NO: 318308
cuggcuauacccugccaua

SEQ ID NO: 348972 - RNA, 19 nt, Artificial Sequence
  Description of Artificial Sequence: Synthetic oligonucleotide
  Antisense Strand to SEQ ID NO: 348971
uauggcaggguauagccag

SEQ ID NO: 348973 - RNA, 19 nt, Artificial Sequence
  Description of Artificial Sequence: Synthetic oligonucleotide
  Sense Strand Starting at position 383 of SEQ ID NO: 318394
agaaguccuuaagauagga

SEQ ID NO: 348974 - RNA, 19 nt, Artificial Sequence
  Description of Artificial Sequence: Synthetic oligonucleotide
  Antisense Strand to SEQ ID NO: 348973
uccuaucuuaaggacuucu

SEQ ID NO: 348975 - RNA, 19 nt, Artificial Sequence
  Description of Artificial Sequence: Synthetic oligonucleotide
  Sense Strand Starting at position 383 of SEQ ID NO: 318529
gcaagagcaccauggucau

SEQ ID NO: 348976 - RNA, 19 nt, Artificial Sequence
  Description of Artificial Sequence: Synthetic oligonucleotide
  Antisense Strand to SEQ ID NO: 348975
augaccauggugcucuugc

SEQ ID NO: 348977 - RNA, 19 nt, Artificial Sequence
  Description of Artificial Sequence: Synthetic oligonucleotide
  Sense Strand Starting at position 383 of SEQ ID NO: 318655
cuuugaaagcugugggaca

SEQ ID NO: 348978 - RNA, 19 nt, Artificial Sequence
  Description of Artificial Sequence: Synthetic oligonucleotide
  Antisense Strand to SEQ ID NO: 348977
ugucccacagcuuucaaag

SEQ ID NO: 348979 - RNA, 19 nt, Artificial Sequence
  Description of Artificial Sequence: Synthetic oligonucleotide
  Sense Strand Starting at position 383 of SEQ ID NO: 318657
uugaaagcugugggacaau

SEQ ID NO: 348980 - RNA, 19 nt, Artificial Sequence
  Description of Artificial Sequence: Synthetic oligonucleotide
  Antisense Strand to SEQ ID NO: 348979
auugucccacagcuuucaa

SEQ ID NO: 348981 - RNA, 19 nt, Artificial Sequence
  Description of Artificial Sequence: Synthetic oligonucleotide
  Sense Strand Starting at position 383 of SEQ ID NO: 318898
cagagaucaguccaugcca

SEQ ID NO: 348982 - RNA, 19 nt, Artificial Sequence
  Description of Artificial Sequence: Synthetic oligonucleotide
  Antisense Strand to SEQ ID NO: 348981
uggcauggacugaucucug

SEQ ID NO: 348983 - RNA, 19 nt, Artificial Sequence
  Description of Artificial Sequence: Synthetic oligonucleotide
  Sense Strand Starting at position 383 of SEQ ID NO: 318939
accuacagaccuuguaagu

SEQ ID NO: 348984 - RNA, 19 nt, Artificial Sequence
  Description of Artificial Sequence: Synthetic oligonucleotide
  Antisense Strand to SEQ ID NO: 348983
acuuacaaggucuguaggu

SEQ ID NO: 348985 - RNA, 19 nt, Artificial Sequence
  Description of Artificial Sequence: Synthetic oligonucleotide
  Sense Strand Starting at position 383 of SEQ ID NO: 318982
cccuguagucuccaauucu

SEQ ID NO: 348986 - RNA, 19 nt, Artificial Sequence
  Description of Artificial Sequence: Synthetic oligonucleotide
  Antisense Strand to SEQ ID NO: 348985
agaauuggagacuacaggg

SEQ ID NO: 348987 - RNA, 19 nt, Artificial Sequence
  Description of Artificial Sequence: Synthetic oligonucleotide
  Sense Strand Starting at position 383 of SEQ ID NO: 319215
auuguaaagccacaguaau

SEQ ID NO: 348988 - RNA, 19 nt, Artificial Sequence
  Description of Artificial Sequence: Synthetic oligonucleotide
  Antisense Strand to SEQ ID NO: 348987
auuacuguggcuuuacaau

SEQ ID NO: 348989 - RNA, 19 nt, Artificial Sequence
  Description of Artificial Sequence: Synthetic oligonucleotide
  Sense Strand Starting at position 384 of SEQ ID NO: 315298
ucagaagcuucugugaugu

SEQ ID NO: 348990 - RNA, 19 nt, Artificial Sequence
  Description of Artificial Sequence: Synthetic oligonucleotide
  Antisense Strand to SEQ ID NO: 348989
acaucacagaagcuucuga

SEQ ID NO: 348991 - RNA, 19 nt, Artificial Sequence
  Description of Artificial Sequence: Synthetic oligonucleotide
  Sense Strand Starting at position 384 of SEQ ID NO: 315439
ugauaacucucagccagaa

SEQ ID NO: 348992 - RNA, 19 nt, Artificial Sequence
  Description of Artificial Sequence: Synthetic oligonucleotide
  Antisense Strand to SEQ ID NO: 348991
uucuggcugagaguuauca

SEQ ID NO: 348993 - RNA, 19 nt, Artificial Sequence
  Description of Artificial Sequence: Synthetic oligonucleotide
  Sense Strand Starting at position 384 of SEQ ID NO: 315673
caguaaucccacuggcuga

SEQ ID NO: 348994 - RNA, 19 nt, Artificial Sequence
  Description of Artificial Sequence: Synthetic oligonucleotide
  Antisense Strand to SEQ ID NO: 348993
ucagccagugggauuacug

SEQ ID NO: 348995 - RNA, 19 nt, Artificial Sequence
  Description of Artificial Sequence: Synthetic oligonucleotide
  Sense Strand Starting at position 384 of SEQ ID NO: 315756
cguccuucccgguaauaaa

SEQ ID NO: 348996 - RNA, 19 nt, Artificial Sequence
  Description of Artificial Sequence: Synthetic oligonucleotide
  Antisense Strand to SEQ ID NO: 348995
uuuauuaccgggaaggacg

SEQ ID NO: 348997 - RNA, 19 nt, Artificial Sequence
  Description of Artificial Sequence: Synthetic oligonucleotide
  Sense Strand Starting at position 384 of SEQ ID NO: 315765
cgguaauaaagucauuguu

SEQ ID NO: 348998 - RNA, 19 nt, Artificial Sequence
  Description of Artificial Sequence: Synthetic oligonucleotide
  Antisense Strand to SEQ ID NO: 348997
aacaaugacuuuauuaccg

SEQ ID NO: 348999 - RNA, 19 nt, Artificial Sequence
  Description of Artificial Sequence: Synthetic oligonucleotide
  Sense Strand Starting at position 384 of SEQ ID NO: 315791
agcccugaccuuugguuau

SEQ ID NO: 349000 - RNA, 19 nt, Artificial Sequence
  Description of Artificial Sequence: Synthetic oligonucleotide
  Antisense Strand to SEQ ID NO: 348999
auaaccaaaggucagggcu

SEQ ID NO: 349001 - RNA, 19 nt, Artificial Sequence
  Description of Artificial Sequence: Synthetic oligonucleotide
  Sense Strand Starting at position 384 of SEQ ID NO: 315795
cugaccuuugguuauccaa

SEQ ID NO: 349002 - RNA, 19 nt, Artificial Sequence
  Description of Artificial Sequence: Synthetic oligonucleotide
  Antisense Strand to SEQ ID NO: 349001
uuggauaaccaaaggucag

SEQ ID NO: 349003 - RNA, 19 nt, Artificial Sequence
  Description of Artificial Sequence: Synthetic oligonucleotide
  Sense Strand Starting at position 384 of SEQ ID NO: 315797
gaccuuugguuauccaagu

SEQ ID NO: 349004 - RNA, 19 nt, Artificial Sequence
  Description of Artificial Sequence: Synthetic oligonucleotide
  Antisense Strand to SEQ ID NO: 349003
acuuggauaaccaaagguc

SEQ ID NO: 349005 - RNA, 19 nt, Artificial Sequence
  Description of Artificial Sequence: Synthetic oligonucleotide
  Sense Strand Starting at position 384 of SEQ ID NO: 315829
gugagcucuggccaucacu

SEQ ID NO: 349006 - RNA, 19 nt, Artificial Sequence
  Description of Artificial Sequence: Synthetic oligonucleotide
  Antisense Strand to SEQ ID NO: 349005
agugauggccagagcucac

SEQ ID NO: 349007 - RNA, 19 nt, Artificial Sequence
  Description of Artificial Sequence: Synthetic oligonucleotide
  Sense Strand Starting at position 384 of SEQ ID NO: 315832
agcucuggccaucacuaaa

SEQ ID NO: 349008 - RNA, 19 nt, Artificial Sequence
  Description of Artificial Sequence: Synthetic oligonucleotide
  Antisense Strand to SEQ ID NO: 349007
uuuagugauggccagagcu

SEQ ID NO: 349009 - RNA, 19 nt, Artificial Sequence
  Description of Artificial Sequence: Synthetic oligonucleotide
  Sense Strand Starting at position 384 of SEQ ID NO: 315853
caccgaucaguggagaagu

SEQ ID NO: 349010 - RNA, 19 nt, Artificial Sequence
  Description of Artificial Sequence: Synthetic oligonucleotide
  Antisense Strand to SEQ ID NO: 349009
acuucuccacugaucggug

SEQ ID NO: 349011 - RNA, 19 nt, Artificial Sequence
  Description of Artificial Sequence: Synthetic oligonucleotide
  Sense Strand Starting at position 384 of SEQ ID NO: 315855
ccgaucaguggagaaguaa

SEQ ID NO: 349012 - RNA, 19 nt, Artificial Sequence
  Description of Artificial Sequence: Synthetic oligonucleotide
  Antisense Strand to SEQ ID NO: 349011
uuacuucuccacugaucgg

SEQ ID NO: 349013 - RNA, 19 nt, Artificial Sequence
  Description of Artificial Sequence: Synthetic oligonucleotide
  Sense Strand Starting at position 384 of SEQ ID NO: 315866
agaaguaacgcuuaggcga

SEQ ID NO: 349014 - RNA, 19 nt, Artificial Sequence
  Description of Artificial Sequence: Synthetic oligonucleotide
  Antisense Strand to SEQ ID NO: 349013
ucgccuaagcguuacuucu

SEQ ID NO: 349015 - RNA, 19 nt, Artificial Sequence
  Description of Artificial Sequence: Synthetic oligonucleotide
  Sense Strand Starting at position 384 of SEQ ID NO: 316113
agaaacccuugauucgauu

SEQ ID NO: 349016 - RNA, 19 nt, Artificial Sequence
  Description of Artificial Sequence: Synthetic oligonucleotide
  Antisense Strand to SEQ ID NO: 349015
aaucgaaucaaggguuucu

SEQ ID NO: 349017 - RNA, 19 nt, Artificial Sequence
  Description of Artificial Sequence: Synthetic oligonucleotide
  Sense Strand Starting at position 384 of SEQ ID NO: 316159
agggaaacaucugaaagau

SEQ ID NO: 349018 - RNA, 19 nt, Artificial Sequence
  Description of Artificial Sequence: Synthetic oligonucleotide
  Antisense Strand to SEQ ID NO: 349017
aucuuucagauguuucccu

SEQ ID NO: 349019 - RNA, 19 nt, Artificial Sequence
  Description of Artificial Sequence: Synthetic oligonucleotide
  Sense Strand Starting at position 384 of SEQ ID NO: 316279
uggaaaguucaacacguga

SEQ ID NO: 349020 - RNA, 19 nt, Artificial Sequence
  Description of Artificial Sequence: Synthetic oligonucleotide
  Antisense Strand to SEQ ID NO: 349019
ucacguguugaacuuucca

SEQ ID NO: 349021 - RNA, 19 nt, Artificial Sequence
  Description of Artificial Sequence: Synthetic oligonucleotide
  Sense Strand Starting at position 384 of SEQ ID NO: 316974
agaggagggagucgucaua

SEQ ID NO: 349022 - RNA, 19 nt, Artificial Sequence
  Description of Artificial Sequence: Synthetic oligonucleotide
  Antisense Strand to SEQ ID NO: 349021
uaugacgacucccuccucu

SEQ ID NO: 349023 - RNA, 19 nt, Artificial Sequence
  Description of Artificial Sequence: Synthetic oligonucleotide
  Sense Strand Starting at position 384 of SEQ ID NO: 317368
gagcguuaaagcgcucaga

SEQ ID NO: 349024 - RNA, 19 nt, Artificial Sequence
  Description of Artificial Sequence: Synthetic oligonucleotide
  Antisense Strand to SEQ ID NO: 349023
ucugagcgcuuuaacgcuc

SEQ ID NO: 349025 - RNA, 19 nt, Artificial Sequence
  Description of Artificial Sequence: Synthetic oligonucleotide
  Sense Strand Starting at position 384 of SEQ ID NO: 317371
cguuaaagcgcucagagga

SEQ ID NO: 349026 - RNA, 19 nt, Artificial Sequence
  Description of Artificial Sequence: Synthetic oligonucleotide
  Antisense Strand to SEQ ID NO: 349025
uccucugagcgcuuuaacg

SEQ ID NO: 349027 - RNA, 19 nt, Artificial Sequence
  Description of Artificial Sequence: Synthetic oligonucleotide
  Sense Strand Starting at position 384 of SEQ ID NO: 317475
gcagaaguugccgcccuaa

SEQ ID NO: 349028 - RNA, 19 nt, Artificial Sequence
  Description of Artificial Sequence: Synthetic oligonucleotide
  Antisense Strand to SEQ ID NO: 349027
uuagggcggcaacuucugc

SEQ ID NO: 349029 - RNA, 19 nt, Artificial Sequence
  Description of Artificial Sequence: Synthetic oligonucleotide
  Sense Strand Starting at position 384 of SEQ ID NO: 317524
ccgaauacacuuugugaug

SEQ ID NO: 349030 - RNA, 19 nt, Artificial Sequence
  Description of Artificial Sequence: Synthetic oligonucleotide
  Antisense Strand to SEQ ID NO: 349029
caucacaaaguguauucgg

SEQ ID NO: 349031 - RNA, 19 nt, Artificial Sequence
  Description of Artificial Sequence: Synthetic oligonucleotide
  Sense Strand Starting at position 384 of SEQ ID NO: 317533
cuuugugauggugaggaua

SEQ ID NO: 349032 - RNA, 19 nt, Artificial Sequence
  Description of Artificial Sequence: Synthetic oligonucleotide
  Antisense Strand to SEQ ID NO: 349031
uauccucaccaucacaaag

SEQ ID NO: 349033 - RNA, 19 nt, Artificial Sequence
  Description of Artificial Sequence: Synthetic oligonucleotide
  Sense Strand Starting at position 384 of SEQ ID NO: 317596
uccguaaacucaucaaguu

SEQ ID NO: 349034 - RNA, 19 nt, Artificial Sequence
  Description of Artificial Sequence: Synthetic oligonucleotide
  Antisense Strand to SEQ ID NO: 349033
aacuugaugaguuuacgga

SEQ ID NO: 349035 - RNA, 19 nt, Artificial Sequence
  Description of Artificial Sequence: Synthetic oligonucleotide
  Sense Strand Starting at position 384 of SEQ ID NO: 317597
ccguaaacucaucaaguuc

SEQ ID NO: 349036 - RNA, 19 nt, Artificial Sequence
  Description of Artificial Sequence: Synthetic oligonucleotide
  Antisense Strand to SEQ ID NO: 349035
gaacuugaugaguuuacgg

SEQ ID NO: 349037 - RNA, 19 nt, Artificial Sequence
  Description of Artificial Sequence: Synthetic oligonucleotide
  Sense Strand Starting at position 384 of SEQ ID NO: 317619
ugcuacucuguggaguuua

SEQ ID NO: 349038 - RNA, 19 nt, Artificial Sequence
  Description of Artificial Sequence: Synthetic oligonucleotide
  Antisense Strand to SEQ ID NO: 349037
uaaacuccacagaguagca

SEQ ID NO: 349039 - RNA, 19 nt, Artificial Sequence
  Description of Artificial Sequence: Synthetic oligonucleotide
  Sense Strand Starting at position 384 of SEQ ID NO: 317747
cacaguagaguugaucauu

SEQ ID NO: 349040 - RNA, 19 nt, Artificial Sequence
  Description of Artificial Sequence: Synthetic oligonucleotide
  Antisense Strand to SEQ ID NO: 349039
aaugaucaacucuacugug

SEQ ID NO: 349041 - RNA, 19 nt, Artificial Sequence
  Description of Artificial Sequence: Synthetic oligonucleotide
  Sense Strand Starting at position 384 of SEQ ID NO: 317927
guuuaagaauuguuacaag

SEQ ID NO: 349042 - RNA, 19 nt, Artificial Sequence
  Description of Artificial Sequence: Synthetic oligonucleotide
  Antisense Strand to SEQ ID NO: 349041
cuuguaacaauucuuaaac

SEQ ID NO: 349043 - RNA, 19 nt, Artificial Sequence
  Description of Artificial Sequence: Synthetic oligonucleotide
  Sense Strand Starting at position 384 of SEQ ID NO: 317946
uuccauuagugaccugcua

SEQ ID NO: 349044 - RNA, 19 nt, Artificial Sequence
  Description of Artificial Sequence: Synthetic oligonucleotide
  Antisense Strand to SEQ ID NO: 349043
uagcaggucacuaauggaa

SEQ ID NO: 349045 - RNA, 19 nt, Artificial Sequence
  Description of Artificial Sequence: Synthetic oligonucleotide
  Sense Strand Starting at position 384 of SEQ ID NO: 318106
ugucaagaggcaugugaac

SEQ ID NO: 349046 - RNA, 19 nt, Artificial Sequence
  Description of Artificial Sequence: Synthetic oligonucleotide
  Antisense Strand to SEQ ID NO: 349045
guucacaugccucuugaca

SEQ ID NO: 349047 - RNA, 19 nt, Artificial Sequence
  Description of Artificial Sequence: Synthetic oligonucleotide
  Sense Strand Starting at position 384 of SEQ ID NO: 318208
uaagucgcagaaugagaua

SEQ ID NO: 349048 - RNA, 19 nt, Artificial Sequence
  Description of Artificial Sequence: Synthetic oligonucleotide
  Antisense Strand to SEQ ID NO: 349047
uaucucauucugcgacuua

SEQ ID NO: 349049 - RNA, 19 nt, Artificial Sequence
  Description of Artificial Sequence: Synthetic oligonucleotide
  Sense Strand Starting at position 384 of SEQ ID NO: 318280
aguaaauaagccggcuaaa

SEQ ID NO: 349050 - RNA, 19 nt, Artificial Sequence
  Description of Artificial Sequence: Synthetic oligonucleotide
  Antisense Strand to SEQ ID NO: 349049
uuuagccggcuuauuuacu

SEQ ID NO: 349051 - RNA, 19 nt, Artificial Sequence
  Description of Artificial Sequence: Synthetic oligonucleotide
  Sense Strand Starting at position 384 of SEQ ID NO: 318323
gaaagagaccucugguagu

SEQ ID NO: 349052 - RNA, 19 nt, Artificial Sequence
  Description of Artificial Sequence: Synthetic oligonucleotide
  Antisense Strand to SEQ ID NO: 349051
acuaccagaggucucuuuc

SEQ ID NO: 349053 - RNA, 19 nt, Artificial Sequence
  Description of Artificial Sequence: Synthetic oligonucleotide
  Sense Strand Starting at position 384 of SEQ ID NO: 318333
ucugguaguccuuacuacu

SEQ ID NO: 349054 - RNA, 19 nt, Artificial Sequence
  Description of Artificial Sequence: Synthetic oligonucleotide
  Antisense Strand to SEQ ID NO: 349053
aguaguaaggacuaccaga

SEQ ID NO: 349055 - RNA, 19 nt, Artificial Sequence
  Description of Artificial Sequence: Synthetic oligonucleotide
  Sense Strand Starting at position 384 of SEQ ID NO: 318959
guaugacaugugcauggua

SEQ ID NO: 349056 - RNA, 19 nt, Artificial Sequence
  Description of Artificial Sequence: Synthetic oligonucleotide
  Antisense Strand to SEQ ID NO: 349055
uaccaugcacaugucauac

SEQ ID NO: 349057 - RNA, 19 nt, Artificial Sequence
  Description of Artificial Sequence: Synthetic oligonucleotide
  Sense Strand Starting at position 384 of SEQ ID NO: 318961
augacaugugcaugguacu

SEQ ID NO: 349058 - RNA, 19 nt, Artificial Sequence
  Description of Artificial Sequence: Synthetic oligonucleotide
  Antisense Strand to SEQ ID NO: 349057
aguaccaugcacaugucau

SEQ ID NO: 349059 - RNA, 19 nt, Artificial Sequence
  Description of Artificial Sequence: Synthetic oligonucleotide
  Sense Strand Starting at position 384 of SEQ ID NO: 318962
ugacaugugcaugguacua

SEQ ID NO: 349060 - RNA, 19 nt, Artificial Sequence
  Description of Artificial Sequence: Synthetic oligonucleotide
  Antisense Strand to SEQ ID NO: 349059
uaguaccaugcacauguca

SEQ ID NO: 349061 - RNA, 19 nt, Artificial Sequence
  Description of Artificial Sequence: Synthetic oligonucleotide
  Sense Strand Starting at position 384 of SEQ ID NO: 319139
cuacauauugaauggucau

SEQ ID NO: 349062 - RNA, 19 nt, Artificial Sequence
  Description of Artificial Sequence: Synthetic oligonucleotide
  Antisense Strand to SEQ ID NO: 349061
augaccauucaauauguag

SEQ ID NO: 349063 - RNA, 19 nt, Artificial Sequence
  Description of Artificial Sequence: Synthetic oligonucleotide
  Sense Strand Starting at position 384 of SEQ ID NO: 319190
ugaacaugagauugagucu

SEQ ID NO: 349064 - RNA, 19 nt, Artificial Sequence
  Description of Artificial Sequence: Synthetic oligonucleotide
  Antisense Strand to SEQ ID NO: 349063
agacucaaucucauguuca

SEQ ID NO: 349065 - RNA, 19 nt, Artificial Sequence
  Description of Artificial Sequence: Synthetic oligonucleotide
  Sense Strand Starting at position 384 of SEQ ID NO: 319197
gagauugagucucucuuac

SEQ ID NO: 349066 - RNA, 19 nt, Artificial Sequence
  Description of Artificial Sequence: Synthetic oligonucleotide
  Antisense Strand to SEQ ID NO: 349065
guaagagagacucaaucuc

SEQ ID NO: 349067 - RNA, 19 nt, Artificial Sequence
  Description of Artificial Sequence: Synthetic oligonucleotide
  Sense Strand Starting at position 384 of SEQ ID NO: 319199
gauugagucucucuuacug

SEQ ID NO: 349068 - RNA, 19 nt, Artificial Sequence
  Description of Artificial Sequence: Synthetic oligonucleotide
  Antisense Strand to SEQ ID NO: 349067
caguaagagagacucaauc

SEQ ID NO: 349069 - RNA, 19 nt, Artificial Sequence
  Description of Artificial Sequence: Synthetic oligonucleotide
  Sense Strand Starting at position 385 of SEQ ID NO: 315372
gaacuuucucgcgcaccga

SEQ ID NO: 349070 - RNA, 19 nt, Artificial Sequence
  Description of Artificial Sequence: Synthetic oligonucleotide
  Antisense Strand to SEQ ID NO: 349069
ucggugcgcgagaaaguuc

SEQ ID NO: 349071 - RNA, 19 nt, Artificial Sequence
  Description of Artificial Sequence: Synthetic oligonucleotide
  Sense Strand Starting at position 385 of SEQ ID NO: 315710
cgguguacagccguaacau

SEQ ID NO: 349072 - RNA, 19 nt, Artificial Sequence
  Description of Artificial Sequence: Synthetic oligonucleotide
  Antisense Strand to SEQ ID NO: 349071
auguuacggcuguacaccg

SEQ ID NO: 349073 - RNA, 19 nt, Artificial Sequence
  Description of Artificial Sequence: Synthetic oligonucleotide
  Sense Strand Starting at position 385 of SEQ ID NO: 315711
gguguacagccguaacauu

SEQ ID NO: 349074 - RNA, 19 nt, Artificial Sequence
  Description of Artificial Sequence: Synthetic oligonucleotide
  Antisense Strand to SEQ ID NO: 349073
aauguuacggcuguacacc

SEQ ID NO: 349075 - RNA, 19 nt, Artificial Sequence
  Description of Artificial Sequence: Synthetic oligonucleotide
  Sense Strand Starting at position 385 of SEQ ID NO: 315942
uuucguaaugaucaucuca

SEQ ID NO: 349076 - RNA, 19 nt, Artificial Sequence
  Description of Artificial Sequence: Synthetic oligonucleotide
  Antisense Strand to SEQ ID NO: 349075
ugagaugaucauuacgaaa

SEQ ID NO: 349077 - RNA, 19 nt, Artificial Sequence
  Description of Artificial Sequence: Synthetic oligonucleotide
  Sense Strand Starting at position 385 of SEQ ID NO: 315944
ucguaaugaucaucucagu

SEQ ID NO: 349078 - RNA, 19 nt, Artificial Sequence
  Description of Artificial Sequence: Synthetic oligonucleotide
  Antisense Strand to SEQ ID NO: 349077
acugagaugaucauuacga

SEQ ID NO: 349079 - RNA, 19 nt, Artificial Sequence
  Description of Artificial Sequence: Synthetic oligonucleotide
  Sense Strand Starting at position 385 of SEQ ID NO: 316999
gcguccuuuccggaaggaa

SEQ ID NO: 349080 - RNA, 19 nt, Artificial Sequence
  Description of Artificial Sequence: Synthetic oligonucleotide
  Antisense Strand to SEQ ID NO: 349079
uuccuuccggaaaggacgc

SEQ ID NO: 349081 - RNA, 19 nt, Artificial Sequence
  Description of Artificial Sequence: Synthetic oligonucleotide
  Sense Strand Starting at position 385 of SEQ ID NO: 317128
gcuggaagaaggugacuua

SEQ ID NO: 349082 - RNA, 19 nt, Artificial Sequence
  Description of Artificial Sequence: Synthetic oligonucleotide
  Antisense Strand to SEQ ID NO: 349081
uaagucaccuucuuccagc

SEQ ID NO: 349083 - RNA, 19 nt, Artificial Sequence
  Description of Artificial Sequence: Synthetic oligonucleotide
  Sense Strand Starting at position 385 of SEQ ID NO: 317230
aaacuuaugggcugucacu

SEQ ID NO: 349084 - RNA, 19 nt, Artificial Sequence
  Description of Artificial Sequence: Synthetic oligonucleotide
  Antisense Strand to SEQ ID NO: 349083
agugacagcccauaaguuu

SEQ ID NO: 349085 - RNA, 19 nt, Artificial Sequence
  Description of Artificial Sequence: Synthetic oligonucleotide
  Sense Strand Starting at position 385 of SEQ ID NO: 317422
cugcgucccgcugugauaa

SEQ ID NO: 349086 - RNA, 19 nt, Artificial Sequence
  Description of Artificial Sequence: Synthetic oligonucleotide
  Antisense Strand to SEQ ID NO: 349085
uuaucacagcgggacgcag

SEQ ID NO: 349087 - RNA, 19 nt, Artificial Sequence
  Description of Artificial Sequence: Synthetic oligonucleotide
  Sense Strand Starting at position 385 of SEQ ID NO: 317442
caauccuggugucuguaau

SEQ ID NO: 349088 - RNA, 19 nt, Artificial Sequence
  Description of Artificial Sequence: Synthetic oligonucleotide
  Antisense Strand to SEQ ID NO: 349087
auuacagacaccaggauug

SEQ ID NO: 349089 - RNA, 19 nt, Artificial Sequence
  Description of Artificial Sequence: Synthetic oligonucleotide
  Sense Strand Starting at position 385 of SEQ ID NO: 317443
aauccuggugucuguaauu

SEQ ID NO: 349090 - RNA, 19 nt, Artificial Sequence
  Description of Artificial Sequence: Synthetic oligonucleotide
  Antisense Strand to SEQ ID NO: 349089
aauuacagacaccaggauu

SEQ ID NO: 349091 - RNA, 19 nt, Artificial Sequence
  Description of Artificial Sequence: Synthetic oligonucleotide
  Sense Strand Starting at position 385 of SEQ ID NO: 317452
gucuguaauuucgccggaa

SEQ ID NO: 349092 - RNA, 19 nt, Artificial Sequence
  Description of Artificial Sequence: Synthetic oligonucleotide
  Antisense Strand to SEQ ID NO: 349091
uuccggcgaaauuacagac

SEQ ID NO: 349093 - RNA, 19 nt, Artificial Sequence
  Description of Artificial Sequence: Synthetic oligonucleotide
  Sense Strand Starting at position 385 of SEQ ID NO: 317453
ucuguaauuucgccggaau

SEQ ID NO: 349094 - RNA, 19 nt, Artificial Sequence
  Description of Artificial Sequence: Synthetic oligonucleotide
  Antisense Strand to SEQ ID NO: 349093
auuccggcgaaauuacaga

SEQ ID NO: 349095 - RNA, 19 nt, Artificial Sequence
  Description of Artificial Sequence: Synthetic oligonucleotide
  Sense Strand Starting at position 385 of SEQ ID NO: 317454
cuguaauuucgccggaauu

SEQ ID NO: 349096 - RNA, 19 nt, Artificial Sequence
  Description of Artificial Sequence: Synthetic oligonucleotide
  Antisense Strand to SEQ ID NO: 349095
aauuccggcgaaauuacag

SEQ ID NO: 349097 - RNA, 19 nt, Artificial Sequence
  Description of Artificial Sequence: Synthetic oligonucleotide
  Sense Strand Starting at position 385 of SEQ ID NO: 317791
gugggaaagguuuguagag

SEQ ID NO: 349098 - RNA, 19 nt, Artificial Sequence
  Description of Artificial Sequence: Synthetic oligonucleotide
  Antisense Strand to SEQ ID NO: 349097
cucuacaaaccuuucccac

SEQ ID NO: 349099 - RNA, 19 nt, Artificial Sequence
  Description of Artificial Sequence: Synthetic oligonucleotide
  Sense Strand Starting at position 385 of SEQ ID NO: 318177
gugaaauaaucaguuugau

SEQ ID NO: 349100 - RNA, 19 nt, Artificial Sequence
  Description of Artificial Sequence: Synthetic oligonucleotide
  Antisense Strand to SEQ ID NO: 349099
aucaaacugauuauuucac

SEQ ID NO: 349101 - RNA, 19 nt, Artificial Sequence
  Description of Artificial Sequence: Synthetic oligonucleotide
  Sense Strand Starting at position 385 of SEQ ID NO: 318299
gcacguuucguugcggaua

SEQ ID NO: 349102 - RNA, 19 nt, Artificial Sequence
  Description of Artificial Sequence: Synthetic oligonucleotide
  Antisense Strand to SEQ ID NO: 349101
uauccgcaacgaaacgugc

SEQ ID NO: 349103 - RNA, 19 nt, Artificial Sequence
  Description of Artificial Sequence: Synthetic oligonucleotide
  Sense Strand Starting at position 385 of SEQ ID NO: 318326
ccugaauauucgcuguuaa

SEQ ID NO: 349104 - RNA, 19 nt, Artificial Sequence
  Description of Artificial Sequence: Synthetic oligonucleotide
  Antisense Strand to SEQ ID NO: 349103
uuaacagcgaauauucagg

SEQ ID NO: 349105 - RNA, 19 nt, Artificial Sequence
  Description of Artificial Sequence: Synthetic oligonucleotide
  Sense Strand Starting at position 385 of SEQ ID NO: 318327
cugaauauucgcuguuaau

SEQ ID NO: 349106 - RNA, 19 nt, Artificial Sequence
  Description of Artificial Sequence: Synthetic oligonucleotide
  Antisense Strand to SEQ ID NO: 349105
auuaacagcgaauauucag

SEQ ID NO: 349107 - RNA, 19 nt, Artificial Sequence
  Description of Artificial Sequence: Synthetic oligonucleotide
  Sense Strand Starting at position 385 of SEQ ID NO: 318336
cgcuguuaauaagcaauua

SEQ ID NO: 349108 - RNA, 19 nt, Artificial Sequence
  Description of Artificial Sequence: Synthetic oligonucleotide
  Antisense Strand to SEQ ID NO: 349107
uaauugcuuauuaacagcg

SEQ ID NO: 349109 - RNA, 19 nt, Artificial Sequence
  Description of Artificial Sequence: Synthetic oligonucleotide
  Sense Strand Starting at position 385 of SEQ ID NO: 318439
gggaaacucuucgcccaca

SEQ ID NO: 349110 - RNA, 19 nt, Artificial Sequence
  Description of Artificial Sequence: Synthetic oligonucleotide
  Antisense Strand to SEQ ID NO: 349109
ugugggcgaagaguuuccc

SEQ ID NO: 349111 - RNA, 19 nt, Artificial Sequence
  Description of Artificial Sequence: Synthetic oligonucleotide
  Sense Strand Starting at position 385 of SEQ ID NO: 318440
ggaaacucuucgcccacaa

SEQ ID NO: 349112 - RNA, 19 nt, Artificial Sequence
  Description of Artificial Sequence: Synthetic oligonucleotide
  Antisense Strand to SEQ ID NO: 349111
uugugggcgaagaguuucc

SEQ ID NO: 349113 - RNA, 19 nt, Artificial Sequence
  Description of Artificial Sequence: Synthetic oligonucleotide
  Sense Strand Starting at position 385 of SEQ ID NO: 318578
gaacgagguccuuaaugca

SEQ ID NO: 349114 - RNA, 19 nt, Artificial Sequence
  Description of Artificial Sequence: Synthetic oligonucleotide
  Antisense Strand to SEQ ID NO: 349113
ugcauuaaggaccucguuc

SEQ ID NO: 349115 - RNA, 19 nt, Artificial Sequence
  Description of Artificial Sequence: Synthetic oligonucleotide
  Sense Strand Starting at position 385 of SEQ ID NO: 318692
ccaggagugcgcgaagauu

SEQ ID NO: 349116 - RNA, 19 nt, Artificial Sequence
  Description of Artificial Sequence: Synthetic oligonucleotide
  Antisense Strand to SEQ ID NO: 349115
aaucuucgcgcacuccugg

SEQ ID NO: 349117 - RNA, 19 nt, Artificial Sequence
  Description of Artificial Sequence: Synthetic oligonucleotide
  Sense Strand Starting at position 385 of SEQ ID NO: 318804
agcagaucgccagaaagcu

SEQ ID NO: 349118 - RNA, 19 nt, Artificial Sequence
  Description of Artificial Sequence: Synthetic oligonucleotide
  Antisense Strand to SEQ ID NO: 349117
agcuuucuggcgaucugcu

SEQ ID NO: 349119 - RNA, 19 nt, Artificial Sequence
  Description of Artificial Sequence: Synthetic oligonucleotide
  Sense Strand Starting at position 385 of SEQ ID NO: 318859
uugugucaucaguauaguu

SEQ ID NO: 349120 - RNA, 19 nt, Artificial Sequence
  Description of Artificial Sequence: Synthetic oligonucleotide
  Antisense Strand to SEQ ID NO: 349119
aacuauacugaugacacaa

SEQ ID NO: 349121 - RNA, 19 nt, Artificial Sequence
  Description of Artificial Sequence: Synthetic oligonucleotide
  Sense Strand Starting at position 385 of SEQ ID NO: 318861
gugucaucaguauaguuag

SEQ ID NO: 349122 - RNA, 19 nt, Artificial Sequence
  Description of Artificial Sequence: Synthetic oligonucleotide
  Antisense Strand to SEQ ID NO: 349121
cuaacuauacugaugacac

SEQ ID NO: 349123 - RNA, 19 nt, Artificial Sequence
  Description of Artificial Sequence: Synthetic oligonucleotide
  Sense Strand Starting at position 385 of SEQ ID NO: 318956
agucuagaacauugauugu

SEQ ID NO: 349124 - RNA, 19 nt, Artificial Sequence
  Description of Artificial Sequence: Synthetic oligonucleotide
  Antisense Strand to SEQ ID NO: 349123
acaaucaauguucuagacu

SEQ ID NO: 349125 - RNA, 19 nt, Artificial Sequence
  Description of Artificial Sequence: Synthetic oligonucleotide
  Sense Strand Starting at position 385 of SEQ ID NO: 318979
guaguauagcucugugaau

SEQ ID NO: 349126 - RNA, 19 nt, Artificial Sequence
  Description of Artificial Sequence: Synthetic oligonucleotide
  Antisense Strand to SEQ ID NO: 349125
auucacagagcuauacuac

SEQ ID NO: 349127 - RNA, 19 nt, Artificial Sequence
  Description of Artificial Sequence: Synthetic oligonucleotide
  Sense Strand Starting at position 385 of SEQ ID NO: 318980
uaguauagcucugugaaua

SEQ ID NO: 349128 - RNA, 19 nt, Artificial Sequence
  Description of Artificial Sequence: Synthetic oligonucleotide
  Antisense Strand to SEQ ID NO: 349127
uauucacagagcuauacua

SEQ ID NO: 349129 - RNA, 19 nt, Artificial Sequence
  Description of Artificial Sequence: Synthetic oligonucleotide
  Sense Strand Starting at position 385 of SEQ ID NO: 318981
aguauagcucugugaauac

SEQ ID NO: 349130 - RNA, 19 nt, Artificial Sequence
  Description of Artificial Sequence: Synthetic oligonucleotide
  Antisense Strand to SEQ ID NO: 349129
guauucacagagcuauacu

SEQ ID NO: 349131 - RNA, 19 nt, Artificial Sequence
  Description of Artificial Sequence: Synthetic oligonucleotide
  Sense Strand Starting at position 385 of SEQ ID NO: 318990
cugugaauaccucaugacu

SEQ ID NO: 349132 - RNA, 19 nt, Artificial Sequence
  Description of Artificial Sequence: Synthetic oligonucleotide
  Antisense Strand to SEQ ID NO: 349131
agucaugagguauucacag

SEQ ID NO: 349133 - RNA, 19 nt, Artificial Sequence
  Description of Artificial Sequence: Synthetic oligonucleotide
  Sense Strand Starting at position 385 of SEQ ID NO: 319005
gacugucaacgugaagauc

SEQ ID NO: 349134 - RNA, 19 nt, Artificial Sequence
  Description of Artificial Sequence: Synthetic oligonucleotide
  Antisense Strand to SEQ ID NO: 349133
gaucuucacguugacaguc

SEQ ID NO: 349135 - RNA, 19 nt, Artificial Sequence
  Description of Artificial Sequence: Synthetic oligonucleotide
  Sense Strand Starting at position 385 of SEQ ID NO: 319105
gcggguccugauuacuauu

SEQ ID NO: 349136 - RNA, 19 nt, Artificial Sequence
  Description of Artificial Sequence: Synthetic oligonucleotide
  Antisense Strand to SEQ ID NO: 349135
aauaguaaucaggacccgc

SEQ ID NO: 349137 - RNA, 19 nt, Artificial Sequence
  Description of Artificial Sequence: Synthetic oligonucleotide
  Sense Strand Starting at position 385 of SEQ ID NO: 319112
cugauuacuauucguagga

SEQ ID NO: 349138 - RNA, 19 nt, Artificial Sequence
  Description of Artificial Sequence: Synthetic oligonucleotide
  Antisense Strand to SEQ ID NO: 349137
uccuacgaauaguaaucag

SEQ ID NO: 349139 - RNA, 19 nt, Artificial Sequence
  Description of Artificial Sequence: Synthetic oligonucleotide
  Sense Strand Starting at position 385 of SEQ ID NO: 319113
ugauuacuauucguaggau

SEQ ID NO: 349140 - RNA, 19 nt, Artificial Sequence
  Description of Artificial Sequence: Synthetic oligonucleotide
  Antisense Strand to SEQ ID NO: 349139
auccuacgaauaguaauca

SEQ ID NO: 349141 - RNA, 19 nt, Artificial Sequence
  Description of Artificial Sequence: Synthetic oligonucleotide
  Sense Strand Starting at position 385 of SEQ ID NO: 319116
uuacuauucguaggauccu

SEQ ID NO: 349142 - RNA, 19 nt, Artificial Sequence
  Description of Artificial Sequence: Synthetic oligonucleotide
  Antisense Strand to SEQ ID NO: 349141
aggauccuacgaauaguaa

SEQ ID NO: 349143 - RNA, 19 nt, Artificial Sequence
  Description of Artificial Sequence: Synthetic oligonucleotide
  Sense Strand Starting at position 385 of SEQ ID NO: 319122
uucguaggauccuccacau

SEQ ID NO: 349144 - RNA, 19 nt, Artificial Sequence
  Description of Artificial Sequence: Synthetic oligonucleotide
  Antisense Strand to SEQ ID NO: 349143
auguggaggauccuacgaa

SEQ ID NO: 349145 - RNA, 19 nt, Artificial Sequence
  Description of Artificial Sequence: Synthetic oligonucleotide
  Sense Strand Starting at position 385 of SEQ ID NO: 319143
uccuuuaccugaguugcaa

SEQ ID NO: 349146 - RNA, 19 nt, Artificial Sequence
  Description of Artificial Sequence: Synthetic oligonucleotide
  Antisense Strand to SEQ ID NO: 349145
uugcaacucagguaaagga

SEQ ID NO: 349147 - RNA, 19 nt, Artificial Sequence
  Description of Artificial Sequence: Synthetic oligonucleotide
  Sense Strand Starting at position 385 of SEQ ID NO: 319185
ugagaaaucucccuaaugu

SEQ ID NO: 349148 - RNA, 19 nt, Artificial Sequence
  Description of Artificial Sequence: Synthetic oligonucleotide
  Antisense Strand to SEQ ID NO: 349147
acauuagggagauuucuca

SEQ ID NO: 349149 - RNA, 19 nt, Artificial Sequence
  Description of Artificial Sequence: Synthetic oligonucleotide
  Sense Strand Starting at position 386 of SEQ ID NO: 315672
gaaaguaggucaccgagua

SEQ ID NO: 349150 - RNA, 19 nt, Artificial Sequence
  Description of Artificial Sequence: Synthetic oligonucleotide
  Antisense Strand to SEQ ID NO: 349149
uacucggugaccuacuuuc

SEQ ID NO: 349151 - RNA, 19 nt, Artificial Sequence
  Description of Artificial Sequence: Synthetic oligonucleotide
  Sense Strand Starting at position 386 of SEQ ID NO: 315772
acaguauuggcuugacaau

SEQ ID NO: 349152 - RNA, 19 nt, Artificial Sequence
  Description of Artificial Sequence: Synthetic oligonucleotide
  Antisense Strand to SEQ ID NO: 349151
auugucaagccaauacugu

SEQ ID NO: 349153 - RNA, 19 nt, Artificial Sequence
  Description of Artificial Sequence: Synthetic oligonucleotide
  Sense Strand Starting at position 386 of SEQ ID NO: 315773
caguauuggcuugacaaua

SEQ ID NO: 349154 - RNA, 19 nt, Artificial Sequence
  Description of Artificial Sequence: Synthetic oligonucleotide
  Antisense Strand to SEQ ID NO: 349153
uauugucaagccaauacug

SEQ ID NO: 349155 - RNA, 19 nt, Artificial Sequence
  Description of Artificial Sequence: Synthetic oligonucleotide
  Sense Strand Starting at position 386 of SEQ ID NO: 315814
auaacaugauguuugcaca

SEQ ID NO: 349156 - RNA, 19 nt, Artificial Sequence
  Description of Artificial Sequence: Synthetic oligonucleotide
  Antisense Strand to SEQ ID NO: 349155
ugugcaaacaucauguuau

SEQ ID NO: 349157 - RNA, 19 nt, Artificial Sequence
  Description of Artificial Sequence: Synthetic oligonucleotide
  Sense Strand Starting at position 386 of SEQ ID NO: 315925
guggcuuuacacuaaucaa

SEQ ID NO: 349158 - RNA, 19 nt, Artificial Sequence
  Description of Artificial Sequence: Synthetic oligonucleotide
  Antisense Strand to SEQ ID NO: 349157
uugauuaguguaaagccac

SEQ ID NO: 349159 - RNA, 19 nt, Artificial Sequence
  Description of Artificial Sequence: Synthetic oligonucleotide
  Sense Strand Starting at position 386 of SEQ ID NO: 316053
acacauugguguccuuaac

SEQ ID NO: 349160 - RNA, 19 nt, Artificial Sequence
  Description of Artificial Sequence: Synthetic oligonucleotide
  Antisense Strand to SEQ ID NO: 349159
guuaaggacaccaaugugu

SEQ ID NO: 349161 - RNA, 19 nt, Artificial Sequence
  Description of Artificial Sequence: Synthetic oligonucleotide
  Sense Strand Starting at position 386 of SEQ ID NO: 316100
aggaauuaaugcucauuac

SEQ ID NO: 349162 - RNA, 19 nt, Artificial Sequence
  Description of Artificial Sequence: Synthetic oligonucleotide
  Antisense Strand to SEQ ID NO: 349161
guaaugagcauuaauuccu

SEQ ID NO: 349163 - RNA, 19 nt, Artificial Sequence
  Description of Artificial Sequence: Synthetic oligonucleotide
  Sense Strand Starting at position 386 of SEQ ID NO: 316109
ugcucauuacaaggauaau

SEQ ID NO: 349164 - RNA, 19 nt, Artificial Sequence
  Description of Artificial Sequence: Synthetic oligonucleotide
  Antisense Strand to SEQ ID NO: 349163
auuauccuuguaaugagca

SEQ ID NO: 349165 - RNA, 19 nt, Artificial Sequence
  Description of Artificial Sequence: Synthetic oligonucleotide
  Sense Strand Starting at position 386 of SEQ ID NO: 316150
ugccauuugcugcauauga

SEQ ID NO: 349166 - RNA, 19 nt, Artificial Sequence
  Description of Artificial Sequence: Synthetic oligonucleotide
  Antisense Strand to SEQ ID NO: 349165
ucauaugcagcaaauggca

SEQ ID NO: 349167 - RNA, 19 nt, Artificial Sequence
  Description of Artificial Sequence: Synthetic oligonucleotide
  Sense Strand Starting at position 386 of SEQ ID NO: 316204
auaucuucccaggagcuau

SEQ ID NO: 349168 - RNA, 19 nt, Artificial Sequence
  Description of Artificial Sequence: Synthetic oligonucleotide
  Antisense Strand to SEQ ID NO: 349167
auagcuccugggaagauau

SEQ ID NO: 349169 - RNA, 19 nt, Artificial Sequence
  Description of Artificial Sequence: Synthetic oligonucleotide
  Sense Strand Starting at position 386 of SEQ ID NO: 316560
ggaguaccacauggucaua

SEQ ID NO: 349170 - RNA, 19 nt, Artificial Sequence
  Description of Artificial Sequence: Synthetic oligonucleotide
  Antisense Strand to SEQ ID NO: 349169
uaugaccaugugguacucc

SEQ ID NO: 349171 - RNA, 19 nt, Artificial Sequence
  Description of Artificial Sequence: Synthetic oligonucleotide
  Sense Strand Starting at position 386 of SEQ ID NO: 316562
aguaccacauggucauaau

SEQ ID NO: 349172 - RNA, 19 nt, Artificial Sequence
  Description of Artificial Sequence: Synthetic oligonucleotide
  Antisense Strand to SEQ ID NO: 349171
auuaugaccaugugguacu

SEQ ID NO: 349173 - RNA, 19 nt, Artificial Sequence
  Description of Artificial Sequence: Synthetic oligonucleotide
  Sense Strand Starting at position 386 of SEQ ID NO: 316563
guaccacauggucauaauu

SEQ ID NO: 349174 - RNA, 19 nt, Artificial Sequence
  Description of Artificial Sequence: Synthetic oligonucleotide
  Antisense Strand to SEQ ID NO: 349173
aauuaugaccaugugguac

SEQ ID NO: 349175 - RNA, 19 nt, Artificial Sequence
  Description of Artificial Sequence: Synthetic oligonucleotide
  Sense Strand Starting at position 386 of SEQ ID NO: 316599
cuuggcuauuuggcaauua

SEQ ID NO: 349176 - RNA, 19 nt, Artificial Sequence
  Description of Artificial Sequence: Synthetic oligonucleotide
  Antisense Strand to SEQ ID NO: 349175
uaauugccaaauagccaag

SEQ ID NO: 349177 - RNA, 19 nt, Artificial Sequence
  Description of Artificial Sequence: Synthetic oligonucleotide
  Sense Strand Starting at position 386 of SEQ ID NO: 316679
aagguaauugcucgaaaug

SEQ ID NO: 349178 - RNA, 19 nt, Artificial Sequence
  Description of Artificial Sequence: Synthetic oligonucleotide
  Antisense Strand to SEQ ID NO: 349177
cauuucgagcaauuaccuu

SEQ ID NO: 349179 - RNA, 19 nt, Artificial Sequence
  Description of Artificial Sequence: Synthetic oligonucleotide
  Sense Strand Starting at position 386 of SEQ ID NO: 316680
agguaauugcucgaaaugg

SEQ ID NO: 349180 - RNA, 19 nt, Artificial Sequence
  Description of Artificial Sequence: Synthetic oligonucleotide
  Antisense Strand to SEQ ID NO: 349179
ccauuucgagcaauuaccu

SEQ ID NO: 349181 - RNA, 19 nt, Artificial Sequence
  Description of Artificial Sequence: Synthetic oligonucleotide
  Sense Strand Starting at position 386 of SEQ ID NO: 317441
acagccuugauaggaguau

SEQ ID NO: 349182 - RNA, 19 nt, Artificial Sequence
  Description of Artificial Sequence: Synthetic oligonucleotide
  Antisense Strand to SEQ ID NO: 349181
auacuccuaucaaggcugu

SEQ ID NO: 349183 - RNA, 19 nt, Artificial Sequence
  Description of Artificial Sequence: Synthetic oligonucleotide
  Sense Strand Starting at position 386 of SEQ ID NO: 317452
aggaguaucauauggcaau

SEQ ID NO: 349184 - RNA, 19 nt, Artificial Sequence
  Description of Artificial Sequence: Synthetic oligonucleotide
  Antisense Strand to SEQ ID NO: 349183
auugccauaugauacuccu

SEQ ID NO: 349185 - RNA, 19 nt, Artificial Sequence
  Description of Artificial Sequence: Synthetic oligonucleotide
  Sense Strand Starting at position 386 of SEQ ID NO: 317708
cuagaucuggcacagugau

SEQ ID NO: 349186 - RNA, 19 nt, Artificial Sequence
  Description of Artificial Sequence: Synthetic oligonucleotide
  Antisense Strand to SEQ ID NO: 349185
aucacugugccagaucuag

SEQ ID NO: 349187 - RNA, 19 nt, Artificial Sequence
  Description of Artificial Sequence: Synthetic oligonucleotide
  Sense Strand Starting at position 386 of SEQ ID NO: 317835
ucucguucuguguuguaaa

SEQ ID NO: 349188 - RNA, 19 nt, Artificial Sequence
  Description of Artificial Sequence: Synthetic oligonucleotide
  Antisense Strand to SEQ ID NO: 349187
uuuacaacacagaacgaga

SEQ ID NO: 349189 - RNA, 19 nt, Artificial Sequence
  Description of Artificial Sequence: Synthetic oligonucleotide
  Sense Strand Starting at position 386 of SEQ ID NO: 318004
ggguauucuuauucuuuaa

SEQ ID NO: 349190 - RNA, 19 nt, Artificial Sequence
  Description of Artificial Sequence: Synthetic oligonucleotide
  Antisense Strand to SEQ ID NO: 349189
uuaaagaauaagaauaccc

SEQ ID NO: 349191 - RNA, 19 nt, Artificial Sequence
  Description of Artificial Sequence: Synthetic oligonucleotide
  Sense Strand Starting at position 386 of SEQ ID NO: 318057
cguacuuucucacuuauuu

SEQ ID NO: 349192 - RNA, 19 nt, Artificial Sequence
  Description of Artificial Sequence: Synthetic oligonucleotide
  Antisense Strand to SEQ ID NO: 349191
aaauaagugagaaaguacg

SEQ ID NO: 349193 - RNA, 19 nt, Artificial Sequence
  Description of Artificial Sequence: Synthetic oligonucleotide
  Sense Strand Starting at position 386 of SEQ ID NO: 318093
uggucucuguuauuuccaa

SEQ ID NO: 349194 - RNA, 19 nt, Artificial Sequence
  Description of Artificial Sequence: Synthetic oligonucleotide
  Antisense Strand to SEQ ID NO: 349193
uuggaaauaacagagacca

SEQ ID NO: 349195 - RNA, 19 nt, Artificial Sequence
  Description of Artificial Sequence: Synthetic oligonucleotide
  Sense Strand Starting at position 386 of SEQ ID NO: 318094
ggucucuguuauuuccaau

SEQ ID NO: 349196 - RNA, 19 nt, Artificial Sequence
  Description of Artificial Sequence: Synthetic oligonucleotide
  Antisense Strand to SEQ ID NO: 349195
auuggaaauaacagagacc

SEQ ID NO: 349197 - RNA, 19 nt, Artificial Sequence
  Description of Artificial Sequence: Synthetic oligonucleotide
  Sense Strand Starting at position 386 of SEQ ID NO: 318309
guauguugauaaucuuaag

SEQ ID NO: 349198 - RNA, 19 nt, Artificial Sequence
  Description of Artificial Sequence: Synthetic oligonucleotide
  Antisense Strand to SEQ ID NO: 349197
cuuaagauuaucaacauac

SEQ ID NO: 349199 - RNA, 19 nt, Artificial Sequence
  Description of Artificial Sequence: Synthetic oligonucleotide
  Sense Strand Starting at position 386 of SEQ ID NO: 318320
aucuuaagaucagugauca

SEQ ID NO: 349200 - RNA, 19 nt, Artificial Sequence
  Description of Artificial Sequence: Synthetic oligonucleotide
  Antisense Strand to SEQ ID NO: 349199
ugaucacugaucuuaagau

SEQ ID NO: 349201 - RNA, 19 nt, Artificial Sequence
  Description of Artificial Sequence: Synthetic oligonucleotide
  Sense Strand Starting at position 386 of SEQ ID NO: 318321
ucuuaagaucagugaucaa

SEQ ID NO: 349202 - RNA, 19 nt, Artificial Sequence
  Description of Artificial Sequence: Synthetic oligonucleotide
  Antisense Strand to SEQ ID NO: 349201
uugaucacugaucuuaaga

SEQ ID NO: 349203 - RNA, 19 nt, Artificial Sequence
  Description of Artificial Sequence: Synthetic oligonucleotide
  Sense Strand Starting at position 386 of SEQ ID NO: 318341
uuuagagcucuugauaaug

SEQ ID NO: 349204 - RNA, 19 nt, Artificial Sequence
  Description of Artificial Sequence: Synthetic oligonucleotide
  Antisense Strand to SEQ ID NO: 349203
cauuaucaagagcucuaaa

SEQ ID NO: 349205 - RNA, 19 nt, Artificial Sequence
  Description of Artificial Sequence: Synthetic oligonucleotide
  Sense Strand Starting at position 386 of SEQ ID NO: 318467
gccagauaauaguuugaug

SEQ ID NO: 349206 - RNA, 19 nt, Artificial Sequence
  Description of Artificial Sequence: Synthetic oligonucleotide
  Antisense Strand to SEQ ID NO: 349205
caucaaacuauuaucuggc

SEQ ID NO: 349207 - RNA, 19 nt, Artificial Sequence
  Description of Artificial Sequence: Synthetic oligonucleotide
  Sense Strand Starting at position 386 of SEQ ID NO: 318469
cagauaauaguuugaugac

SEQ ID NO: 349208 - RNA, 19 nt, Artificial Sequence
  Description of Artificial Sequence: Synthetic oligonucleotide
  Antisense Strand to SEQ ID NO: 349207
gucaucaaacuauuaucug

SEQ ID NO: 349209 - RNA, 19 nt, Artificial Sequence
  Description of Artificial Sequence: Synthetic oligonucleotide
  Sense Strand Starting at position 386 of SEQ ID NO: 318653
gcagauacugcccagagaa

SEQ ID NO: 349210 - RNA, 19 nt, Artificial Sequence
  Description of Artificial Sequence: Synthetic oligonucleotide
  Antisense Strand to SEQ ID NO: 349209
uucucugggcaguaucugc

SEQ ID NO: 349211 - RNA, 19 nt, Artificial Sequence
  Description of Artificial Sequence: Synthetic oligonucleotide
  Sense Strand Starting at position 386 of SEQ ID NO: 318887
aacugcuugucacugggaa

SEQ ID NO: 349212 - RNA, 19 nt, Artificial Sequence
  Description of Artificial Sequence: Synthetic oligonucleotide
  Antisense Strand to SEQ ID NO: 349211
uucccagugacaagcaguu

SEQ ID NO: 349213 - RNA, 19 nt, Artificial Sequence
  Description of Artificial Sequence: Synthetic oligonucleotide
  Sense Strand Starting at position 386 of SEQ ID NO: 318888
acugcuugucacugggaaa

SEQ ID NO: 349214 - RNA, 19 nt, Artificial Sequence
  Description of Artificial Sequence: Synthetic oligonucleotide
  Antisense Strand to SEQ ID NO: 349213
uuucccagugacaagcagu

SEQ ID NO: 349215 - RNA, 19 nt, Artificial Sequence
  Description of Artificial Sequence: Synthetic oligonucleotide
  Sense Strand Starting at position 386 of SEQ ID NO: 318957
agcaauaccuggccugaaa

SEQ ID NO: 349216 - RNA, 19 nt, Artificial Sequence
  Description of Artificial Sequence: Synthetic oligonucleotide
  Antisense Strand to SEQ ID NO: 349215
uuucaggccagguauugcu

SEQ ID NO: 349217 - RNA, 19 nt, Artificial Sequence
  Description of Artificial Sequence: Synthetic oligonucleotide
  Sense Strand Starting at position 386 of SEQ ID NO: 319005
auugucaacucucuaguga

SEQ ID NO: 349218 - RNA, 19 nt, Artificial Sequence
  Description of Artificial Sequence: Synthetic oligonucleotide
  Antisense Strand to SEQ ID NO: 349217
ucacuagagaguugacaau

SEQ ID NO: 349219 - RNA, 19 nt, Artificial Sequence
  Description of Artificial Sequence: Synthetic oligonucleotide
  Sense Strand Starting at position 386 of SEQ ID NO: 319006
uugucaacucucuagugaa

SEQ ID NO: 349220 - RNA, 19 nt, Artificial Sequence
  Description of Artificial Sequence: Synthetic oligonucleotide
  Antisense Strand to SEQ ID NO: 349219
uucacuagagaguugacaa

SEQ ID NO: 349221 - RNA, 19 nt, Artificial Sequence
  Description of Artificial Sequence: Synthetic oligonucleotide
  Sense Strand Starting at position 386 of SEQ ID NO: 319030
aaagguuuccauuauguag

SEQ ID NO: 349222 - RNA, 19 nt, Artificial Sequence
  Description of Artificial Sequence: Synthetic oligonucleotide
  Antisense Strand to SEQ ID NO: 349221
cuacauaauggaaaccuuu

SEQ ID NO: 349223 - RNA, 19 nt, Artificial Sequence
  Description of Artificial Sequence: Synthetic oligonucleotide
  Sense Strand Starting at position 386 of SEQ ID NO: 319077
gagugaugccaauaagcag

SEQ ID NO: 349224 - RNA, 19 nt, Artificial Sequence
  Description of Artificial Sequence: Synthetic oligonucleotide
  Antisense Strand to SEQ ID NO: 349223
cugcuuauuggcaucacuc

SEQ ID NO: 349225 - RNA, 19 nt, Artificial Sequence
  Description of Artificial Sequence: Synthetic oligonucleotide
  Sense Strand Starting at position 386 of SEQ ID NO: 319158
uuauuaagaaagugguagu

SEQ ID NO: 349226 - RNA, 19 nt, Artificial Sequence
  Description of Artificial Sequence: Synthetic oligonucleotide
  Antisense Strand to SEQ ID NO: 349225
acuaccacuuucuuaauaa

SEQ ID NO: 349227 - RNA, 19 nt, Artificial Sequence
  Description of Artificial Sequence: Synthetic oligonucleotide
  Sense Strand Starting at position 386 of SEQ ID NO: 319199
guaggaguucacuaguaag

SEQ ID NO: 349228 - RNA, 19 nt, Artificial Sequence
  Description of Artificial Sequence: Synthetic oligonucleotide
  Antisense Strand to SEQ ID NO: 349227
cuuacuagugaacuccuac

SEQ ID NO: 349229 - RNA, 19 nt, Artificial Sequence
  Description of Artificial Sequence: Synthetic oligonucleotide
  Sense Strand Starting at position 387 of SEQ ID NO: 315255
aguaucaaugucugacuuu

SEQ ID NO: 349230 - RNA, 19 nt, Artificial Sequence
  Description of Artificial Sequence: Synthetic oligonucleotide
  Antisense Strand to SEQ ID NO: 349229
aaagucagacauugauacu

SEQ ID NO: 349231 - RNA, 19 nt, Artificial Sequence
  Description of Artificial Sequence: Synthetic oligonucleotide
  Sense Strand Starting at position 387 of SEQ ID NO: 315307
aaggguaaucguuacacgu

SEQ ID NO: 349232 - RNA, 19 nt, Artificial Sequence
  Description of Artificial Sequence: Synthetic oligonucleotide
  Antisense Strand to SEQ ID NO: 349231
acguguaacgauuacccuu

SEQ ID NO: 349233 - RNA, 19 nt, Artificial Sequence
  Description of Artificial Sequence: Synthetic oligonucleotide
  Sense Strand Starting at position 387 of SEQ ID NO: 315447
aggacacuguaacugauau

SEQ ID NO: 349234 - RNA, 19 nt, Artificial Sequence
  Description of Artificial Sequence: Synthetic oligonucleotide
  Antisense Strand to SEQ ID NO: 349233
auaucaguuacaguguccu

SEQ ID NO: 349235 - RNA, 19 nt, Artificial Sequence
  Description of Artificial Sequence: Synthetic oligonucleotide
  Sense Strand Starting at position 387 of SEQ ID NO: 315465
ucuauuaugugaucuaucu

SEQ ID NO: 349236 - RNA, 19 nt, Artificial Sequence
  Description of Artificial Sequence: Synthetic oligonucleotide
  Antisense Strand to SEQ ID NO: 349235
agauagaucacauaauaga

SEQ ID NO: 349237 - RNA, 19 nt, Artificial Sequence
  Description of Artificial Sequence: Synthetic oligonucleotide
  Sense Strand Starting at position 387 of SEQ ID NO: 315488
agccaugaagguuauguau

SEQ ID NO: 349238 - RNA, 19 nt, Artificial Sequence
  Description of Artificial Sequence: Synthetic oligonucleotide
  Antisense Strand to SEQ ID NO: 349237
auacauaaccuucauggcu

SEQ ID NO: 349239 - RNA, 19 nt, Artificial Sequence
  Description of Artificial Sequence: Synthetic oligonucleotide
  Sense Strand Starting at position 387 of SEQ ID NO: 315497
gguuauguaugguuuccaa

SEQ ID NO: 349240 - RNA, 19 nt, Artificial Sequence
  Description of Artificial Sequence: Synthetic oligonucleotide
  Antisense Strand to SEQ ID NO: 349239
uuggaaaccauacauaacc

SEQ ID NO: 349241 - RNA, 19 nt, Artificial Sequence
  Description of Artificial Sequence: Synthetic oligonucleotide
  Sense Strand Starting at position 387 of SEQ ID NO: 315537
ugcauucugucaguuuaaa

SEQ ID NO: 349242 - RNA, 19 nt, Artificial Sequence
  Description of Artificial Sequence: Synthetic oligonucleotide
  Antisense Strand to SEQ ID NO: 349241
uuuaaacugacagaaugca

SEQ ID NO: 349243 - RNA, 19 nt, Artificial Sequence
  Description of Artificial Sequence: Synthetic oligonucleotide
  Sense Strand Starting at position 387 of SEQ ID NO: 315659
gccauauauguugaugaca

SEQ ID NO: 349244 - RNA, 19 nt, Artificial Sequence
  Description of Artificial Sequence: Synthetic oligonucleotide
  Antisense Strand to SEQ ID NO: 349243
ugucaucaacauauauggc

SEQ ID NO: 349245 - RNA, 19 nt, Artificial Sequence
  Description of Artificial Sequence: Synthetic oligonucleotide
  Sense Strand Starting at position 387 of SEQ ID NO: 315769
ccugcaaauuacuucgaga

SEQ ID NO: 349246 - RNA, 19 nt, Artificial Sequence
  Description of Artificial Sequence: Synthetic oligonucleotide
  Antisense Strand to SEQ ID NO: 349245
ucucgaaguaauuugcagg

SEQ ID NO: 349247 - RNA, 19 nt, Artificial Sequence
  Description of Artificial Sequence: Synthetic oligonucleotide
  Sense Strand Starting at position 387 of SEQ ID NO: 315771
ugcaaauuacuucgagacu

SEQ ID NO: 349248 - RNA, 19 nt, Artificial Sequence
  Description of Artificial Sequence: Synthetic oligonucleotide
  Antisense Strand to SEQ ID NO: 349247
agucucgaaguaauuugca

SEQ ID NO: 349249 - RNA, 19 nt, Artificial Sequence
  Description of Artificial Sequence: Synthetic oligonucleotide
  Sense Strand Starting at position 387 of SEQ ID NO: 315791
ugaaacauaugccuuaugu

SEQ ID NO: 349250 - RNA, 19 nt, Artificial Sequence
  Description of Artificial Sequence: Synthetic oligonucleotide
  Antisense Strand to SEQ ID NO: 349249
acauaaggcauauguuuca

SEQ ID NO: 349251 - RNA, 19 nt, Artificial Sequence
  Description of Artificial Sequence: Synthetic oligonucleotide
  Sense Strand Starting at position 387 of SEQ ID NO: 315854
ggacauaucgguuggucau

SEQ ID NO: 349252 - RNA, 19 nt, Artificial Sequence
  Description of Artificial Sequence: Synthetic oligonucleotide
  Antisense Strand to SEQ ID NO: 349251
augaccaaccgauaugucc

SEQ ID NO: 349253 - RNA, 19 nt, Artificial Sequence
  Description of Artificial Sequence: Synthetic oligonucleotide
  Sense Strand Starting at position 387 of SEQ ID NO: 315855
gacauaucgguuggucauu

SEQ ID NO: 349254 - RNA, 19 nt, Artificial Sequence
  Description of Artificial Sequence: Synthetic oligonucleotide
  Antisense Strand to SEQ ID NO: 349253
aaugaccaaccgauauguc

SEQ ID NO: 349255 - RNA, 19 nt, Artificial Sequence
  Description of Artificial Sequence: Synthetic oligonucleotide
  Sense Strand Starting at position 387 of SEQ ID NO: 315856
acauaucgguuggucauua

SEQ ID NO: 349256 - RNA, 19 nt, Artificial Sequence
  Description of Artificial Sequence: Synthetic oligonucleotide
  Antisense Strand to SEQ ID NO: 349255
uaaugaccaaccgauaugu

SEQ ID NO: 349257 - RNA, 19 nt, Artificial Sequence
  Description of Artificial Sequence: Synthetic oligonucleotide
  Sense Strand Starting at position 387 of SEQ ID NO: 315866
uggucauuacagcacgagu

SEQ ID NO: 349258 - RNA, 19 nt, Artificial Sequence
  Description of Artificial Sequence: Synthetic oligonucleotide
  Antisense Strand to SEQ ID NO: 349257
acucgugcuguaaugacca

SEQ ID NO: 349259 - RNA, 19 nt, Artificial Sequence
  Description of Artificial Sequence: Synthetic oligonucleotide
  Sense Strand Starting at position 387 of SEQ ID NO: 315868
gucauuacagcacgaguga

SEQ ID NO: 349260 - RNA, 19 nt, Artificial Sequence
  Description of Artificial Sequence: Synthetic oligonucleotide
  Antisense Strand to SEQ ID NO: 349259
ucacucgugcuguaaugac

SEQ ID NO: 349261 - RNA, 19 nt, Artificial Sequence
  Description of Artificial Sequence: Synthetic oligonucleotide
  Sense Strand Starting at position 387 of SEQ ID NO: 315877
gcacgagugagagaauauc

SEQ ID NO: 349262 - RNA, 19 nt, Artificial Sequence
  Description of Artificial Sequence: Synthetic oligonucleotide
  Antisense Strand to SEQ ID NO: 349261
gauauucucucacucgugc

SEQ ID NO: 349263 - RNA, 19 nt, Artificial Sequence
  Description of Artificial Sequence: Synthetic oligonucleotide
  Sense Strand Starting at position 387 of SEQ ID NO: 315901
agauacaugcugggaaacu

SEQ ID NO: 349264 - RNA, 19 nt, Artificial Sequence
  Description of Artificial Sequence: Synthetic oligonucleotide
  Antisense Strand to SEQ ID NO: 349263
aguuucccagcauguaucu

SEQ ID NO: 349265 - RNA, 19 nt, Artificial Sequence
  Description of Artificial Sequence: Synthetic oligonucleotide
  Sense Strand Starting at position 387 of SEQ ID NO: 315953
uuagaauaugcagguggua

SEQ ID NO: 349266 - RNA, 19 nt, Artificial Sequence
  Description of Artificial Sequence: Synthetic oligonucleotide
  Antisense Strand to SEQ ID NO: 349265
uaccaccugcauauucuaa

SEQ ID NO: 349267 - RNA, 19 nt, Artificial Sequence
  Description of Artificial Sequence: Synthetic oligonucleotide
  Sense Strand Starting at position 387 of SEQ ID NO: 315981
gaucuuuaugcacagcaga

SEQ ID NO: 349268 - RNA, 19 nt, Artificial Sequence
  Description of Artificial Sequence: Synthetic oligonucleotide
  Antisense Strand to SEQ ID NO: 349267
ucugcugugcauaaagauc

SEQ ID NO: 349269 - RNA, 19 nt, Artificial Sequence
  Description of Artificial Sequence: Synthetic oligonucleotide
  Sense Strand Starting at position 387 of SEQ ID NO: 315984
cuuuaugcacagcagaaau

SEQ ID NO: 349270 - RNA, 19 nt, Artificial Sequence
  Description of Artificial Sequence: Synthetic oligonucleotide
  Antisense Strand to SEQ ID NO: 349269
auuucugcugugcauaaag

SEQ ID NO: 349271 - RNA, 19 nt, Artificial Sequence
  Description of Artificial Sequence: Synthetic oligonucleotide
  Sense Strand Starting at position 387 of SEQ ID NO: 316021
ugaagauuguaugaauaga

SEQ ID NO: 349272 - RNA, 19 nt, Artificial Sequence
  Description of Artificial Sequence: Synthetic oligonucleotide
  Antisense Strand to SEQ ID NO: 349271
ucuauucauacaaucuuca

SEQ ID NO: 349273 - RNA, 19 nt, Artificial Sequence
  Description of Artificial Sequence: Synthetic oligonucleotide
  Sense Strand Starting at position 387 of SEQ ID NO: 316139
agcaaucugucagugacuu

SEQ ID NO: 349274 - RNA, 19 nt, Artificial Sequence
  Description of Artificial Sequence: Synthetic oligonucleotide
  Antisense Strand to SEQ ID NO: 349273
aagucacugacagauugcu

SEQ ID NO: 349275 - RNA, 19 nt, Artificial Sequence
  Description of Artificial Sequence: Synthetic oligonucleotide
  Sense Strand Starting at position 387 of SEQ ID NO: 316140
gcaaucugucagugacuug

SEQ ID NO: 349276 - RNA, 19 nt, Artificial Sequence
  Description of Artificial Sequence: Synthetic oligonucleotide
  Antisense Strand to SEQ ID NO: 349275
caagucacugacagauugc

SEQ ID NO: 349277 - RNA, 19 nt, Artificial Sequence
  Description of Artificial Sequence: Synthetic oligonucleotide
  Sense Strand Starting at position 387 of SEQ ID NO: 316211
acucccugcccgcaagaau

SEQ ID NO: 349278 - RNA, 19 nt, Artificial Sequence
  Description of Artificial Sequence: Synthetic oligonucleotide
  Antisense Strand to SEQ ID NO: 349277
auucuugcgggcagggagu

SEQ ID NO: 349279 - RNA, 19 nt, Artificial Sequence
  Description of Artificial Sequence: Synthetic oligonucleotide
  Sense Strand Starting at position 387 of SEQ ID NO: 316254
gcaucuggucuaggaagaa

SEQ ID NO: 349280 - RNA, 19 nt, Artificial Sequence
  Description of Artificial Sequence: Synthetic oligonucleotide
  Antisense Strand to SEQ ID NO: 349279
uucuuccuagaccagaugc

SEQ ID NO: 349281 - RNA, 19 nt, Artificial Sequence
  Description of Artificial Sequence: Synthetic oligonucleotide
  Sense Strand Starting at position 387 of SEQ ID NO: 316264
uaggaagaauuucgaguaa

SEQ ID NO: 349282 - RNA, 19 nt, Artificial Sequence
  Description of Artificial Sequence: Synthetic oligonucleotide
  Antisense Strand to SEQ ID NO: 349281
uuacucgaaauucuuccua

SEQ ID NO: 349283 - RNA, 19 nt, Artificial Sequence
  Description of Artificial Sequence: Synthetic oligonucleotide
  Sense Strand Starting at position 387 of SEQ ID NO: 316468
agaagucuccauuaagucu

SEQ ID NO: 349284 - RNA, 19 nt, Artificial Sequence
  Description of Artificial Sequence: Synthetic oligonucleotide
  Antisense Strand to SEQ ID NO: 349283
agacuuaauggagacuucu

SEQ ID NO: 349285 - RNA, 19 nt, Artificial Sequence
  Description of Artificial Sequence: Synthetic oligonucleotide
  Sense Strand Starting at position 387 of SEQ ID NO: 316499
cugacuuccaguggagaca

SEQ ID NO: 349286 - RNA, 19 nt, Artificial Sequence
  Description of Artificial Sequence: Synthetic oligonucleotide
  Antisense Strand to SEQ ID NO: 349285
ugucuccacuggaagucag

SEQ ID NO: 349287 - RNA, 19 nt, Artificial Sequence
  Description of Artificial Sequence: Synthetic oligonucleotide
  Sense Strand Starting at position 387 of SEQ ID NO: 316573
gcucacgcuaccguuuaaa

SEQ ID NO: 349288 - RNA, 19 nt, Artificial Sequence
  Description of Artificial Sequence: Synthetic oligonucleotide
  Antisense Strand to SEQ ID NO: 349287
uuuaaacgguagcgugagc

SEQ ID NO: 349289 - RNA, 19 nt, Artificial Sequence
  Description of Artificial Sequence: Synthetic oligonucleotide
  Sense Strand Starting at position 387 of SEQ ID NO: 317909
cgcggcuuccaguuguaga

SEQ ID NO: 349290 - RNA, 19 nt, Artificial Sequence
  Description of Artificial Sequence: Synthetic oligonucleotide
  Antisense Strand to SEQ ID NO: 349289
ucuacaacuggaagccgcg

SEQ ID NO: 349291 - RNA, 19 nt, Artificial Sequence
  Description of Artificial Sequence: Synthetic oligonucleotide
  Sense Strand Starting at position 387 of SEQ ID NO: 318647
ggauuuccgugauacuuua

SEQ ID NO: 349292 - RNA, 19 nt, Artificial Sequence
  Description of Artificial Sequence: Synthetic oligonucleotide
  Antisense Strand to SEQ ID NO: 349291
uaaaguaucacggaaaucc

SEQ ID NO: 349293 - RNA, 19 nt, Artificial Sequence
  Description of Artificial Sequence: Synthetic oligonucleotide
  Sense Strand Starting at position 387 of SEQ ID NO: 318654
cgugauacuuuauuuguua

SEQ ID NO: 349294 - RNA, 19 nt, Artificial Sequence
  Description of Artificial Sequence: Synthetic oligonucleotide
  Antisense Strand to SEQ ID NO: 349293
uaacaaauaaaguaucacg

SEQ ID NO: 349295 - RNA, 19 nt, Artificial Sequence
  Description of Artificial Sequence: Synthetic oligonucleotide
  Sense Strand Starting at position 387 of SEQ ID NO: 318705
agggacuucggcuaucaca

SEQ ID NO: 349296 - RNA, 19 nt, Artificial Sequence
  Description of Artificial Sequence: Synthetic oligonucleotide
  Antisense Strand to SEQ ID NO: 349295
ugugauagccgaagucccu

SEQ ID NO: 349297 - RNA, 19 nt, Artificial Sequence
  Description of Artificial Sequence: Synthetic oligonucleotide
  Sense Strand Starting at position 387 of SEQ ID NO: 318821
cggucuuguaaaggauaua

SEQ ID NO: 349298 - RNA, 19 nt, Artificial Sequence
  Description of Artificial Sequence: Synthetic oligonucleotide
  Antisense Strand to SEQ ID NO: 349297
uauauccuuuacaagaccg

SEQ ID NO: 349299 - RNA, 19 nt, Artificial Sequence
  Description of Artificial Sequence: Synthetic oligonucleotide
  Sense Strand Starting at position 387 of SEQ ID NO: 319010
accauagcugaagaaguuu

SEQ ID NO: 349300 - RNA, 19 nt, Artificial Sequence
  Description of Artificial Sequence: Synthetic oligonucleotide
  Antisense Strand to SEQ ID NO: 349299
aaacuucuucagcuauggu

SEQ ID NO: 349301 - RNA, 19 nt, Artificial Sequence
  Description of Artificial Sequence: Synthetic oligonucleotide
  Sense Strand Starting at position 387 of SEQ ID NO: 319076
agaaaugucccaugucaaa

SEQ ID NO: 349302 - RNA, 19 nt, Artificial Sequence
  Description of Artificial Sequence: Synthetic oligonucleotide
  Antisense Strand to SEQ ID NO: 349301
uuugacaugggacauuucu

SEQ ID NO: 349303 - RNA, 19 nt, Artificial Sequence
  Description of Artificial Sequence: Synthetic oligonucleotide
  Sense Strand Starting at position 387 of SEQ ID NO: 319152
ggguucugauuggugacua

SEQ ID NO: 349304 - RNA, 19 nt, Artificial Sequence
  Description of Artificial Sequence: Synthetic oligonucleotide
  Antisense Strand to SEQ ID NO: 349303
uagucaccaaucagaaccc

SEQ ID NO: 349305 - RNA, 19 nt, Artificial Sequence
  Description of Artificial Sequence: Synthetic oligonucleotide
  Sense Strand Starting at position 387 of SEQ ID NO: 319156
ucugauuggugacuauacu

SEQ ID NO: 349306 - RNA, 19 nt, Artificial Sequence
  Description of Artificial Sequence: Synthetic oligonucleotide
  Antisense Strand to SEQ ID NO: 349305
aguauagucaccaaucaga

SEQ ID NO: 349307 - RNA, 19 nt, Artificial Sequence
  Description of Artificial Sequence: Synthetic oligonucleotide
  Sense Strand Starting at position 387 of SEQ ID NO: 319162
uggugacuauacucucauu

SEQ ID NO: 349308 - RNA, 19 nt, Artificial Sequence
  Description of Artificial Sequence: Synthetic oligonucleotide
  Antisense Strand to SEQ ID NO: 349307
aaugagaguauagucacca

SEQ ID NO: 349309 - RNA, 19 nt, Artificial Sequence
  Description of Artificial Sequence: Synthetic oligonucleotide
  Sense Strand Starting at position 388 of SEQ ID NO: 315238
auugcaaugcuuuagcaua

SEQ ID NO: 349310 - RNA, 19 nt, Artificial Sequence
  Description of Artificial Sequence: Synthetic oligonucleotide
  Antisense Strand to SEQ ID NO: 349309
uaugcuaaagcauugcaau

SEQ ID NO: 349311 - RNA, 19 nt, Artificial Sequence
  Description of Artificial Sequence: Synthetic oligonucleotide
  Sense Strand Starting at position 388 of SEQ ID NO: 315517
gcagaacuaucuuugcauu

SEQ ID NO: 349312 - RNA, 19 nt, Artificial Sequence
  Description of Artificial Sequence: Synthetic oligonucleotide
  Antisense Strand to SEQ ID NO: 349311
aaugcaaagauaguucugc

SEQ ID NO: 349313 - RNA, 19 nt, Artificial Sequence
  Description of Artificial Sequence: Synthetic oligonucleotide
  Sense Strand Starting at position 388 of SEQ ID NO: 315651
guuaucucagcuuacaguu

SEQ ID NO: 349314 - RNA, 19 nt, Artificial Sequence
  Description of Artificial Sequence: Synthetic oligonucleotide
  Antisense Strand to SEQ ID NO: 349313
aacuguaagcugagauaac

SEQ ID NO: 349315 - RNA, 19 nt, Artificial Sequence
  Description of Artificial Sequence: Synthetic oligonucleotide
  Sense Strand Starting at position 388 of SEQ ID NO: 315996
uagguaagcuuguuuauuu

SEQ ID NO: 349316 - RNA, 19 nt, Artificial Sequence
  Description of Artificial Sequence: Synthetic oligonucleotide
  Antisense Strand to SEQ ID NO: 349315
aaauaaacaagcuuaccua

SEQ ID NO: 349317 - RNA, 19 nt, Artificial Sequence
  Description of Artificial Sequence: Synthetic oligonucleotide
  Sense Strand Starting at position 388 of SEQ ID NO: 316291
uuguuaaugguuugcaaau

SEQ ID NO: 349318 - RNA, 19 nt, Artificial Sequence
  Description of Artificial Sequence: Synthetic oligonucleotide
  Antisense Strand to SEQ ID NO: 349317
auuugcaaaccauuaacaa

SEQ ID NO: 349319 - RNA, 19 nt, Artificial Sequence
  Description of Artificial Sequence: Synthetic oligonucleotide
  Sense Strand Starting at position 388 of SEQ ID NO: 316292
uguuaaugguuugcaaaua

SEQ ID NO: 349320 - RNA, 19 nt, Artificial Sequence
  Description of Artificial Sequence: Synthetic oligonucleotide
  Antisense Strand to SEQ ID NO: 349319
uauuugcaaaccauuaaca

SEQ ID NO: 349321 - RNA, 19 nt, Artificial Sequence
  Description of Artificial Sequence: Synthetic oligonucleotide
  Sense Strand Starting at position 388 of SEQ ID NO: 316324
caggaaauuuguugaaauu

SEQ ID NO: 349322 - RNA, 19 nt, Artificial Sequence
  Description of Artificial Sequence: Synthetic oligonucleotide
  Antisense Strand to SEQ ID NO: 349321
aauuucaacaaauuuccug

SEQ ID NO: 349323 - RNA, 19 nt, Artificial Sequence
  Description of Artificial Sequence: Synthetic oligonucleotide
  Sense Strand Starting at position 388 of SEQ ID NO: 316707
cuacuuauugaaugugcau

SEQ ID NO: 349324 - RNA, 19 nt, Artificial Sequence
  Description of Artificial Sequence: Synthetic oligonucleotide
  Antisense Strand to SEQ ID NO: 349323
augcacauucaauaaguag

SEQ ID NO: 349325 - RNA, 19 nt, Artificial Sequence
  Description of Artificial Sequence: Synthetic oligonucleotide
  Sense Strand Starting at position 388 of SEQ ID NO: 316806
aaaggagugcuggaugcau

SEQ ID NO: 349326 - RNA, 19 nt, Artificial Sequence
  Description of Artificial Sequence: Synthetic oligonucleotide
  Antisense Strand to SEQ ID NO: 349325
augcauccagcacuccuuu

SEQ ID NO: 349327 - RNA, 19 nt, Artificial Sequence
  Description of Artificial Sequence: Synthetic oligonucleotide
  Sense Strand Starting at position 388 of SEQ ID NO: 316815
cuggaugcauagucaguau

SEQ ID NO: 349328 - RNA, 19 nt, Artificial Sequence
  Description of Artificial Sequence: Synthetic oligonucleotide
  Antisense Strand to SEQ ID NO: 349327
auacugacuaugcauccag

SEQ ID NO: 349329 - RNA, 19 nt, Artificial Sequence
  Description of Artificial Sequence: Synthetic oligonucleotide
  Sense Strand Starting at position 388 of SEQ ID NO: 316840
augucaauugauugauauc

SEQ ID NO: 349330 - RNA, 19 nt, Artificial Sequence
  Description of Artificial Sequence: Synthetic oligonucleotide
  Antisense Strand to SEQ ID NO: 349329
gauaucaaucaauugacau

SEQ ID NO: 349331 - RNA, 19 nt, Artificial Sequence
  Description of Artificial Sequence: Synthetic oligonucleotide
  Sense Strand Starting at position 388 of SEQ ID NO: 316901
ugcagcucuggucacauau

SEQ ID NO: 349332 - RNA, 19 nt, Artificial Sequence
  Description of Artificial Sequence: Synthetic oligonucleotide
  Antisense Strand to SEQ ID NO: 349331
auaugugaccagagcugca

SEQ ID NO: 349333 - RNA, 19 nt, Artificial Sequence
  Description of Artificial Sequence: Synthetic oligonucleotide
  Sense Strand Starting at position 388 of SEQ ID NO: 316910
ggucacauaucacugggaa

SEQ ID NO: 349334 - RNA, 19 nt, Artificial Sequence
  Description of Artificial Sequence: Synthetic oligonucleotide
  Antisense Strand to SEQ ID NO: 349333
uucccagugauaugugacc

SEQ ID NO: 349335 - RNA, 19 nt, Artificial Sequence
  Description of Artificial Sequence: Synthetic oligonucleotide
  Sense Strand Starting at position 388 of SEQ ID NO: 316911
gucacauaucacugggaau

SEQ ID NO: 349336 - RNA, 19 nt, Artificial Sequence
  Description of Artificial Sequence: Synthetic oligonucleotide
  Antisense Strand to SEQ ID NO: 349335
auucccagugauaugugac

SEQ ID NO: 349337 - RNA, 19 nt, Artificial Sequence
  Description of Artificial Sequence: Synthetic oligonucleotide
  Sense Strand Starting at position 388 of SEQ ID NO: 317224
uggauucuccauugugaca

SEQ ID NO: 349338 - RNA, 19 nt, Artificial Sequence
  Description of Artificial Sequence: Synthetic oligonucleotide
  Antisense Strand to SEQ ID NO: 349337
ugucacaauggagaaucca

SEQ ID NO: 349339 - RNA, 19 nt, Artificial Sequence
  Description of Artificial Sequence: Synthetic oligonucleotide
  Sense Strand Starting at position 388 of SEQ ID NO: 317283
ccaacagaguuguugucuu

SEQ ID NO: 349340 - RNA, 19 nt, Artificial Sequence
  Description of Artificial Sequence: Synthetic oligonucleotide
  Antisense Strand to SEQ ID NO: 349339
aagacaacaacucuguugg

SEQ ID NO: 349341 - RNA, 19 nt, Artificial Sequence
  Description of Artificial Sequence: Synthetic oligonucleotide
  Sense Strand Starting at position 388 of SEQ ID NO: 317326
agaagaaauuucuaauggu

SEQ ID NO: 349342 - RNA, 19 nt, Artificial Sequence
  Description of Artificial Sequence: Synthetic oligonucleotide
  Antisense Strand to SEQ ID NO: 349341
accauuagaaauuucuucu

SEQ ID NO: 349343 - RNA, 19 nt, Artificial Sequence
  Description of Artificial Sequence: Synthetic oligonucleotide
  Sense Strand Starting at position 388 of SEQ ID NO: 317329
agaaauuucuaauggugag

SEQ ID NO: 349344 - RNA, 19 nt, Artificial Sequence
  Description of Artificial Sequence: Synthetic oligonucleotide
  Antisense Strand to SEQ ID NO: 349343
cucaccauuagaaauuucu

SEQ ID NO: 349345 - RNA, 19 nt, Artificial Sequence
  Description of Artificial Sequence: Synthetic oligonucleotide
  Sense Strand Starting at position 388 of SEQ ID NO: 317365
uaagaaguuccuugguggu

SEQ ID NO: 349346 - RNA, 19 nt, Artificial Sequence
  Description of Artificial Sequence: Synthetic oligonucleotide
  Antisense Strand to SEQ ID NO: 349345
accaccaaggaacuucuua

SEQ ID NO: 349347 - RNA, 19 nt, Artificial Sequence
  Description of Artificial Sequence: Synthetic oligonucleotide
  Sense Strand Starting at position 388 of SEQ ID NO: 317479
uguagaaguaguuauucca

SEQ ID NO: 349348 - RNA, 19 nt, Artificial Sequence
  Description of Artificial Sequence: Synthetic oligonucleotide
  Antisense Strand to SEQ ID NO: 349347
uggaauaacuacuucuaca

SEQ ID NO: 349349 - RNA, 19 nt, Artificial Sequence
  Description of Artificial Sequence: Synthetic oligonucleotide
  Sense Strand Starting at position 388 of SEQ ID NO: 317482
agaaguaguuauuccaugu

SEQ ID NO: 349350 - RNA, 19 nt, Artificial Sequence
  Description of Artificial Sequence: Synthetic oligonucleotide
  Antisense Strand to SEQ ID NO: 349349
acauggaauaacuacuucu

SEQ ID NO: 349351 - RNA, 19 nt, Artificial Sequence
  Description of Artificial Sequence: Synthetic oligonucleotide
  Sense Strand Starting at position 388 of SEQ ID NO: 317486
guaguuauuccauguacac

SEQ ID NO: 349352 - RNA, 19 nt, Artificial Sequence
  Description of Artificial Sequence: Synthetic oligonucleotide
  Antisense Strand to SEQ ID NO: 349351
guguacauggaauaacuac

SEQ ID NO: 349353 - RNA, 19 nt, Artificial Sequence
  Description of Artificial Sequence: Synthetic oligonucleotide
  Sense Strand Starting at position 388 of SEQ ID NO: 317847
gauauuuacuguuagagaa

SEQ ID NO: 349354 - RNA, 19 nt, Artificial Sequence
  Description of Artificial Sequence: Synthetic oligonucleotide
  Antisense Strand to SEQ ID NO: 349353
uucucuaacaguaaauauc

SEQ ID NO: 349355 - RNA, 19 nt, Artificial Sequence
  Description of Artificial Sequence: Synthetic oligonucleotide
  Sense Strand Starting at position 388 of SEQ ID NO: 318036
ggauccagcagguguguaa

SEQ ID NO: 349356 - RNA, 19 nt, Artificial Sequence
  Description of Artificial Sequence: Synthetic oligonucleotide
  Antisense Strand to SEQ ID NO: 349355
uuacacaccugcuggaucc

SEQ ID NO: 349357 - RNA, 19 nt, Artificial Sequence
  Description of Artificial Sequence: Synthetic oligonucleotide
  Sense Strand Starting at position 388 of SEQ ID NO: 318047
guguguaacguagcauugu

SEQ ID NO: 349358 - RNA, 19 nt, Artificial Sequence
  Description of Artificial Sequence: Synthetic oligonucleotide
  Antisense Strand to SEQ ID NO: 349357
acaaugcuacguuacacac

SEQ ID NO: 349359 - RNA, 19 nt, Artificial Sequence
  Description of Artificial Sequence: Synthetic oligonucleotide
  Sense Strand Starting at position 388 of SEQ ID NO: 318103
uuuauuccagggcaaugau

SEQ ID NO: 349360 - RNA, 19 nt, Artificial Sequence
  Description of Artificial Sequence: Synthetic oligonucleotide
  Antisense Strand to SEQ ID NO: 349359
aucauugcccuggaauaaa

SEQ ID NO: 349361 - RNA, 19 nt, Artificial Sequence
  Description of Artificial Sequence: Synthetic oligonucleotide
  Sense Strand Starting at position 388 of SEQ ID NO: 318222
guaugccuagcauauugua

SEQ ID NO: 349362 - RNA, 19 nt, Artificial Sequence
  Description of Artificial Sequence: Synthetic oligonucleotide
  Antisense Strand to SEQ ID NO: 349361
uacaauaugcuaggcauac

SEQ ID NO: 349363 - RNA, 19 nt, Artificial Sequence
  Description of Artificial Sequence: Synthetic oligonucleotide
  Sense Strand Starting at position 388 of SEQ ID NO: 318238
guaggcucucaugauauau

SEQ ID NO: 349364 - RNA, 19 nt, Artificial Sequence
  Description of Artificial Sequence: Synthetic oligonucleotide
  Antisense Strand to SEQ ID NO: 349363
auauaucaugagagccuac

SEQ ID NO: 349365 - RNA, 19 nt, Artificial Sequence
  Description of Artificial Sequence: Synthetic oligonucleotide
  Sense Strand Starting at position 388 of SEQ ID NO: 318248
augauauauuguccaaaug

SEQ ID NO: 349366 - RNA, 19 nt, Artificial Sequence
  Description of Artificial Sequence: Synthetic oligonucleotide
  Antisense Strand to SEQ ID NO: 349365
cauuuggacaauauaucau

SEQ ID NO: 349367 - RNA, 19 nt, Artificial Sequence
  Description of Artificial Sequence: Synthetic oligonucleotide
  Sense Strand Starting at position 388 of SEQ ID NO: 318256
uuguccaaaugauugaauu

SEQ ID NO: 349368 - RNA, 19 nt, Artificial Sequence
  Description of Artificial Sequence: Synthetic oligonucleotide
  Antisense Strand to SEQ ID NO: 349367
aauucaaucauuuggacaa

SEQ ID NO: 349369 - RNA, 19 nt, Artificial Sequence
  Description of Artificial Sequence: Synthetic oligonucleotide
  Sense Strand Starting at position 388 of SEQ ID NO: 318257
uguccaaaugauugaauua

SEQ ID NO: 349370 - RNA, 19 nt, Artificial Sequence
  Description of Artificial Sequence: Synthetic oligonucleotide
  Antisense Strand to SEQ ID NO: 349369
uaauucaaucauuuggaca

SEQ ID NO: 349371 - RNA, 19 nt, Artificial Sequence
  Description of Artificial Sequence: Synthetic oligonucleotide
  Sense Strand Starting at position 388 of SEQ ID NO: 318433
auauuaugucaguauagca

SEQ ID NO: 349372 - RNA, 19 nt, Artificial Sequence
  Description of Artificial Sequence: Synthetic oligonucleotide
  Antisense Strand to SEQ ID NO: 349371
ugcuauacugacauaauau

SEQ ID NO: 349373 - RNA, 19 nt, Artificial Sequence
  Description of Artificial Sequence: Synthetic oligonucleotide
  Sense Strand Starting at position 388 of SEQ ID NO: 318473
uguggagaauguccaagau

SEQ ID NO: 349374 - RNA, 19 nt, Artificial Sequence
  Description of Artificial Sequence: Synthetic oligonucleotide
  Antisense Strand to SEQ ID NO: 349373
aucuuggacauucuccaca

SEQ ID NO: 349375 - RNA, 19 nt, Artificial Sequence
  Description of Artificial Sequence: Synthetic oligonucleotide
  Sense Strand Starting at position 388 of SEQ ID NO: 318616
agccuaccuguagauagau

SEQ ID NO: 349376 - RNA, 19 nt, Artificial Sequence
  Description of Artificial Sequence: Synthetic oligonucleotide
  Antisense Strand to SEQ ID NO: 349375
aucuaucuacagguaggcu

SEQ ID NO: 349377 - RNA, 19 nt, Artificial Sequence
  Description of Artificial Sequence: Synthetic oligonucleotide
  Sense Strand Starting at position 388 of SEQ ID NO: 318705
guguuuaaaguuugauacu

SEQ ID NO: 349378 - RNA, 19 nt, Artificial Sequence
  Description of Artificial Sequence: Synthetic oligonucleotide
  Antisense Strand to SEQ ID NO: 349377
aguaucaaacuuuaaacac

SEQ ID NO: 349379 - RNA, 19 nt, Artificial Sequence
  Description of Artificial Sequence: Synthetic oligonucleotide
  Sense Strand Starting at position 388 of SEQ ID NO: 318714
guuugauacuuggcccuga

SEQ ID NO: 349380 - RNA, 19 nt, Artificial Sequence
  Description of Artificial Sequence: Synthetic oligonucleotide
  Antisense Strand to SEQ ID NO: 349379
ucagggccaaguaucaaac

SEQ ID NO: 349381 - RNA, 19 nt, Artificial Sequence
  Description of Artificial Sequence: Synthetic oligonucleotide
  Sense Strand Starting at position 388 of SEQ ID NO: 318715
uuugauacuuggcccugaa

SEQ ID NO: 349382 - RNA, 19 nt, Artificial Sequence
  Description of Artificial Sequence: Synthetic oligonucleotide
  Antisense Strand to SEQ ID NO: 349381
uucagggccaaguaucaaa

SEQ ID NO: 349383 - RNA, 19 nt, Artificial Sequence
  Description of Artificial Sequence: Synthetic oligonucleotide
  Sense Strand Starting at position 388 of SEQ ID NO: 318718
gauacuuggcccugaagaa

SEQ ID NO: 349384 - RNA, 19 nt, Artificial Sequence
  Description of Artificial Sequence: Synthetic oligonucleotide
  Antisense Strand to SEQ ID NO: 349383
uucuucagggccaaguauc

SEQ ID NO: 349385 - RNA, 19 nt, Artificial Sequence
  Description of Artificial Sequence: Synthetic oligonucleotide
  Sense Strand Starting at position 388 of SEQ ID NO: 319187
guuuaugcauucuuagaag

SEQ ID NO: 349386 - RNA, 19 nt, Artificial Sequence
  Description of Artificial Sequence: Synthetic oligonucleotide
  Antisense Strand to SEQ ID NO: 349385
cuucuaagaaugcauaaac

SEQ ID NO: 349387 - RNA, 19 nt, Artificial Sequence
  Description of Artificial Sequence: Synthetic oligonucleotide
  Sense Strand Starting at position 388 of SEQ ID NO: 319193
gcauucuuagaagaguuua

SEQ ID NO: 349388 - RNA, 19 nt, Artificial Sequence
  Description of Artificial Sequence: Synthetic oligonucleotide
  Antisense Strand to SEQ ID NO: 349387
uaaacucuucuaagaaugc

SEQ ID NO: 349389 - RNA, 19 nt, Artificial Sequence
  Description of Artificial Sequence: Synthetic oligonucleotide
  Sense Strand Starting at position 389 of SEQ ID NO: 315303
ccagcagucccugagggaa

SEQ ID NO: 349390 - RNA, 19 nt, Artificial Sequence
  Description of Artificial Sequence: Synthetic oligonucleotide
  Antisense Strand to SEQ ID NO: 349389
uucccucagggacugcugg

SEQ ID NO: 349391 - RNA, 19 nt, Artificial Sequence
  Description of Artificial Sequence: Synthetic oligonucleotide
  Sense Strand Starting at position 389 of SEQ ID NO: 315368
gagagcuuucuaggcauua

SEQ ID NO: 349392 - RNA, 19 nt, Artificial Sequence
  Description of Artificial Sequence: Synthetic oligonucleotide
  Antisense Strand to SEQ ID NO: 349391
uaaugccuagaaagcucuc

SEQ ID NO: 349393 - RNA, 19 nt, Artificial Sequence
  Description of Artificial Sequence: Synthetic oligonucleotide
  Sense Strand Starting at position 389 of SEQ ID NO: 315369
agagcuuucuaggcauuaa

SEQ ID NO: 349394 - RNA, 19 nt, Artificial Sequence
  Description of Artificial Sequence: Synthetic oligonucleotide
  Antisense Strand to SEQ ID NO: 349393
uuaaugccuagaaagcucu

SEQ ID NO: 349395 - RNA, 19 nt, Artificial Sequence
  Description of Artificial Sequence: Synthetic oligonucleotide
  Sense Strand Starting at position 389 of SEQ ID NO: 315535
gcaccaaaccaucguguuu

SEQ ID NO: 349396 - RNA, 19 nt, Artificial Sequence
  Description of Artificial Sequence: Synthetic oligonucleotide
  Antisense Strand to SEQ ID NO: 349395
aaacacgaugguuuggugc

SEQ ID NO: 349397 - RNA, 19 nt, Artificial Sequence
  Description of Artificial Sequence: Synthetic oligonucleotide
  Sense Strand Starting at position 389 of SEQ ID NO: 315556
gggaguuuccacugggcaa

SEQ ID NO: 349398 - RNA, 19 nt, Artificial Sequence
  Description of Artificial Sequence: Synthetic oligonucleotide
  Antisense Strand to SEQ ID NO: 349397
uugcccaguggaaacuccc

SEQ ID NO: 349399 - RNA, 19 nt, Artificial Sequence
  Description of Artificial Sequence: Synthetic oligonucleotide
  Sense Strand Starting at position 389 of SEQ ID NO: 315581
acaguuucgcgaggaacga

SEQ ID NO: 349400 - RNA, 19 nt, Artificial Sequence
  Description of Artificial Sequence: Synthetic oligonucleotide
  Antisense Strand to SEQ ID NO: 349399
ucguuccucgcgaaacugu

SEQ ID NO: 349401 - RNA, 19 nt, Artificial Sequence
  Description of Artificial Sequence: Synthetic oligonucleotide
  Sense Strand Starting at position 389 of SEQ ID NO: 315680
aggaguuccauccggagca

SEQ ID NO: 349402 - RNA, 19 nt, Artificial Sequence
  Description of Artificial Sequence: Synthetic oligonucleotide
  Antisense Strand to SEQ ID NO: 349401
ugcuccggauggaacuccu

SEQ ID NO: 349403 - RNA, 19 nt, Artificial Sequence
  Description of Artificial Sequence: Synthetic oligonucleotide
  Sense Strand Starting at position 389 of SEQ ID NO: 315892
cagggauucgcgagcgcua

SEQ ID NO: 349404 - RNA, 19 nt, Artificial Sequence
  Description of Artificial Sequence: Synthetic oligonucleotide
  Antisense Strand to SEQ ID NO: 349403
uagcgcucgcgaaucccug

SEQ ID NO: 349405 - RNA, 19 nt, Artificial Sequence
  Description of Artificial Sequence: Synthetic oligonucleotide
  Sense Strand Starting at position 389 of SEQ ID NO: 317357
cuggcauuguuaguuuaag

SEQ ID NO: 349406 - RNA, 19 nt, Artificial Sequence
  Description of Artificial Sequence: Synthetic oligonucleotide
  Antisense Strand to SEQ ID NO: 349405
cuuaaacuaacaaugccag

SEQ ID NO: 349407 - RNA, 19 nt, Artificial Sequence
  Description of Artificial Sequence: Synthetic oligonucleotide
  Sense Strand Starting at position 389 of SEQ ID NO: 317358
uggcauuguuaguuuaaga

SEQ ID NO: 349408 - RNA, 19 nt, Artificial Sequence
  Description of Artificial Sequence: Synthetic oligonucleotide
  Antisense Strand to SEQ ID NO: 349407
ucuuaaacuaacaaugcca

SEQ ID NO: 349409 - RNA, 19 nt, Artificial Sequence
  Description of Artificial Sequence: Synthetic oligonucleotide
  Sense Strand Starting at position 389 of SEQ ID NO: 317549
aggacuggauccgcuuuaa

SEQ ID NO: 349410 - RNA, 19 nt, Artificial Sequence
  Description of Artificial Sequence: Synthetic oligonucleotide
  Antisense Strand to SEQ ID NO: 349409
uuaaagcggauccaguccu

SEQ ID NO: 349411 - RNA, 19 nt, Artificial Sequence
  Description of Artificial Sequence: Synthetic oligonucleotide
  Sense Strand Starting at position 389 of SEQ ID NO: 317553
cuggauccgcuuuaaauga

SEQ ID NO: 349412 - RNA, 19 nt, Artificial Sequence
  Description of Artificial Sequence: Synthetic oligonucleotide
  Antisense Strand to SEQ ID NO: 349411
ucauuuaaagcggauccag

SEQ ID NO: 349413 - RNA, 19 nt, Artificial Sequence
  Description of Artificial Sequence: Synthetic oligonucleotide
  Sense Strand Starting at position 389 of SEQ ID NO: 317561
gcuuuaaaugaucaaacga

SEQ ID NO: 349414 - RNA, 19 nt, Artificial Sequence
  Description of Artificial Sequence: Synthetic oligonucleotide
  Antisense Strand to SEQ ID NO: 349413
ucguuugaucauuuaaagc

SEQ ID NO: 349415 - RNA, 19 nt, Artificial Sequence
  Description of Artificial Sequence: Synthetic oligonucleotide
  Sense Strand Starting at position 389 of SEQ ID NO: 317588
ucaucuucucugugacaag

SEQ ID NO: 349416 - RNA, 19 nt, Artificial Sequence
  Description of Artificial Sequence: Synthetic oligonucleotide
  Antisense Strand to SEQ ID NO: 349415
cuugucacagagaagauga

SEQ ID NO: 349417 - RNA, 19 nt, Artificial Sequence
  Description of Artificial Sequence: Synthetic oligonucleotide
  Sense Strand Starting at position 389 of SEQ ID NO: 317688
guugguauuuacuaaucga

SEQ ID NO: 349418 - RNA, 19 nt, Artificial Sequence
  Description of Artificial Sequence: Synthetic oligonucleotide
  Antisense Strand to SEQ ID NO: 349417
ucgauuaguaaauaccaac

SEQ ID NO: 349419 - RNA, 19 nt, Artificial Sequence
  Description of Artificial Sequence: Synthetic oligonucleotide
  Sense Strand Starting at position 389 of SEQ ID NO: 317721
gggucucucccucauuaaa

SEQ ID NO: 349420 - RNA, 19 nt, Artificial Sequence
  Description of Artificial Sequence: Synthetic oligonucleotide
  Antisense Strand to SEQ ID NO: 349419
uuuaaugagggagagaccc

SEQ ID NO: 349421 - RNA, 19 nt, Artificial Sequence
  Description of Artificial Sequence: Synthetic oligonucleotide
  Sense Strand Starting at position 389 of SEQ ID NO: 317754
uucggauucuugucuauuu

SEQ ID NO: 349422 - RNA, 19 nt, Artificial Sequence
  Description of Artificial Sequence: Synthetic oligonucleotide
  Antisense Strand to SEQ ID NO: 349421
aaauagacaagaauccgaa

SEQ ID NO: 349423 - RNA, 19 nt, Artificial Sequence
  Description of Artificial Sequence: Synthetic oligonucleotide
  Sense Strand Starting at position 389 of SEQ ID NO: 317825
auaguacauguccgucgaa

SEQ ID NO: 349424 - RNA, 19 nt, Artificial Sequence
  Description of Artificial Sequence: Synthetic oligonucleotide
  Antisense Strand to SEQ ID NO: 349423
uucgacggacauguacuau

SEQ ID NO: 349425 - RNA, 19 nt, Artificial Sequence
  Description of Artificial Sequence: Synthetic oligonucleotide
  Sense Strand Starting at position 389 of SEQ ID NO: 317826
uaguacauguccgucgaaa

SEQ ID NO: 349426 - RNA, 19 nt, Artificial Sequence
  Description of Artificial Sequence: Synthetic oligonucleotide
  Antisense Strand to SEQ ID NO: 349425
uuucgacggacauguacua

SEQ ID NO: 349427 - RNA, 19 nt, Artificial Sequence
  Description of Artificial Sequence: Synthetic oligonucleotide
  Sense Strand Starting at position 389 of SEQ ID NO: 317828
guacauguccgucgaaaga

SEQ ID NO: 349428 - RNA, 19 nt, Artificial Sequence
  Description of Artificial Sequence: Synthetic oligonucleotide
  Antisense Strand to SEQ ID NO: 349427
ucuuucgacggacauguac

SEQ ID NO: 349429 - RNA, 19 nt, Artificial Sequence
  Description of Artificial Sequence: Synthetic oligonucleotide
  Sense Strand Starting at position 389 of SEQ ID NO: 317837
cgucgaaagaaugaauacu

SEQ ID NO: 349430 - RNA, 19 nt, Artificial Sequence
  Description of Artificial Sequence: Synthetic oligonucleotide
  Antisense Strand to SEQ ID NO: 349429
aguauucauucuuucgacg

SEQ ID NO: 349431 - RNA, 19 nt, Artificial Sequence
  Description of Artificial Sequence: Synthetic oligonucleotide
  Sense Strand Starting at position 389 of SEQ ID NO: 317901
ggauuugcuuccuguccaa

SEQ ID NO: 349432 - RNA, 19 nt, Artificial Sequence
  Description of Artificial Sequence: Synthetic oligonucleotide
  Antisense Strand to SEQ ID NO: 349431
uuggacaggaagcaaaucc

SEQ ID NO: 349433 - RNA, 19 nt, Artificial Sequence
  Description of Artificial Sequence: Synthetic oligonucleotide
  Sense Strand Starting at position 389 of SEQ ID NO: 317917
caacguuucgcaguucuuu

SEQ ID NO: 349434 - RNA, 19 nt, Artificial Sequence
  Description of Artificial Sequence: Synthetic oligonucleotide
  Antisense Strand to SEQ ID NO: 349433
aaagaacugcgaaacguug

SEQ ID NO: 349435 - RNA, 19 nt, Artificial Sequence
  Description of Artificial Sequence: Synthetic oligonucleotide
  Sense Strand Starting at position 389 of SEQ ID NO: 318042
gucacacagucagcuauaa

SEQ ID NO: 349436 - RNA, 19 nt, Artificial Sequence
  Description of Artificial Sequence: Synthetic oligonucleotide
  Antisense Strand to SEQ ID NO: 349435
uuauagcugacugugugac

SEQ ID NO: 349437 - RNA, 19 nt, Artificial Sequence
  Description of Artificial Sequence: Synthetic oligonucleotide
  Sense Strand Starting at position 389 of SEQ ID NO: 318169
ggaugcagccuuggagaua

SEQ ID NO: 349438 - RNA, 19 nt, Artificial Sequence
  Description of Artificial Sequence: Synthetic oligonucleotide
  Antisense Strand to SEQ ID NO: 349437
uaucuccaaggcugcaucc

SEQ ID NO: 349439 - RNA, 19 nt, Artificial Sequence
  Description of Artificial Sequence: Synthetic oligonucleotide
  Sense Strand Starting at position 389 of SEQ ID NO: 318248
ggucaaggguucuaaauca

SEQ ID NO: 349440 - RNA, 19 nt, Artificial Sequence
  Description of Artificial Sequence: Synthetic oligonucleotide
  Antisense Strand to SEQ ID NO: 349439
ugauuuagaacccuugacc

SEQ ID NO: 349441 - RNA, 19 nt, Artificial Sequence
  Description of Artificial Sequence: Synthetic oligonucleotide
  Sense Strand Starting at position 389 of SEQ ID NO: 318272
ucaccuugaggcuguuaua

SEQ ID NO: 349442 - RNA, 19 nt, Artificial Sequence
  Description of Artificial Sequence: Synthetic oligonucleotide
  Antisense Strand to SEQ ID NO: 349441
uauaacagccucaagguga

SEQ ID NO: 349443 - RNA, 19 nt, Artificial Sequence
  Description of Artificial Sequence: Synthetic oligonucleotide
  Sense Strand Starting at position 389 of SEQ ID NO: 318279
gaggcuguuauauguuaug

SEQ ID NO: 349444 - RNA, 19 nt, Artificial Sequence
  Description of Artificial Sequence: Synthetic oligonucleotide
  Antisense Strand to SEQ ID NO: 349443
cauaacauauaacagccuc

SEQ ID NO: 349445 - RNA, 19 nt, Artificial Sequence
  Description of Artificial Sequence: Synthetic oligonucleotide
  Sense Strand Starting at position 389 of SEQ ID NO: 318288
auauguuaugcuggagaug

SEQ ID NO: 349446 - RNA, 19 nt, Artificial Sequence
  Description of Artificial Sequence: Synthetic oligonucleotide
  Antisense Strand to SEQ ID NO: 349445
caucuccagcauaacauau

SEQ ID NO: 349447 - RNA, 19 nt, Artificial Sequence
  Description of Artificial Sequence: Synthetic oligonucleotide
  Sense Strand Starting at position 389 of SEQ ID NO: 318289
uauguuaugcuggagaugu

SEQ ID NO: 349448 - RNA, 19 nt, Artificial Sequence
  Description of Artificial Sequence: Synthetic oligonucleotide
  Antisense Strand to SEQ ID NO: 349447
acaucuccagcauaacaua

SEQ ID NO: 349449 - RNA, 19 nt, Artificial Sequence
  Description of Artificial Sequence: Synthetic oligonucleotide
  Sense Strand Starting at position 389 of SEQ ID NO: 318344
augauagucugguccuaca

SEQ ID NO: 349450 - RNA, 19 nt, Artificial Sequence
  Description of Artificial Sequence: Synthetic oligonucleotide
  Antisense Strand to SEQ ID NO: 349449
uguaggaccagacuaucau

SEQ ID NO: 349451 - RNA, 19 nt, Artificial Sequence
  Description of Artificial Sequence: Synthetic oligonucleotide
  Sense Strand Starting at position 389 of SEQ ID NO: 318438
uggucuguuaaugagcuaa

SEQ ID NO: 349452 - RNA, 19 nt, Artificial Sequence
  Description of Artificial Sequence: Synthetic oligonucleotide
  Antisense Strand to SEQ ID NO: 349451
uuagcucauuaacagacca

SEQ ID NO: 349453 - RNA, 19 nt, Artificial Sequence
  Description of Artificial Sequence: Synthetic oligonucleotide
  Sense Strand Starting at position 389 of SEQ ID NO: 318440
gucuguuaaugagcuaaca

SEQ ID NO: 349454 - RNA, 19 nt, Artificial Sequence
  Description of Artificial Sequence: Synthetic oligonucleotide
  Antisense Strand to SEQ ID NO: 349453
uguuagcucauuaacagac

SEQ ID NO: 349455 - RNA, 19 nt, Artificial Sequence
  Description of Artificial Sequence: Synthetic oligonucleotide
  Sense Strand Starting at position 389 of SEQ ID NO: 318459
gugggcagaugcgauauuu

SEQ ID NO: 349456 - RNA, 19 nt, Artificial Sequence
  Description of Artificial Sequence: Synthetic oligonucleotide
  Antisense Strand to SEQ ID NO: 349455
aaauaucgcaucugcccac

SEQ ID NO: 349457 - RNA, 19 nt, Artificial Sequence
  Description of Artificial Sequence: Synthetic oligonucleotide
  Sense Strand Starting at position 389 of SEQ ID NO: 318472
auauuucccuuugggauga

SEQ ID NO: 349458 - RNA, 19 nt, Artificial Sequence
  Description of Artificial Sequence: Synthetic oligonucleotide
  Antisense Strand to SEQ ID NO: 349457
ucaucccaaagggaaauau

SEQ ID NO: 349459 - RNA, 19 nt, Artificial Sequence
  Description of Artificial Sequence: Synthetic oligonucleotide
  Sense Strand Starting at position 389 of SEQ ID NO: 318691
aagggaagaugucaucaac

SEQ ID NO: 349460 - RNA, 19 nt, Artificial Sequence
  Description of Artificial Sequence: Synthetic oligonucleotide
  Antisense Strand to SEQ ID NO: 349459
guugaugacaucuucccuu

SEQ ID NO: 349461 - RNA, 19 nt, Artificial Sequence
  Description of Artificial Sequence: Synthetic oligonucleotide
  Sense Strand Starting at position 389 of SEQ ID NO: 318825
gcuccuaguuagcugucau

SEQ ID NO: 349462 - RNA, 19 nt, Artificial Sequence
  Description of Artificial Sequence: Synthetic oligonucleotide
  Antisense Strand to SEQ ID NO: 349461
augacagcuaacuaggagc

SEQ ID NO: 349463 - RNA, 19 nt, Artificial Sequence
  Description of Artificial Sequence: Synthetic oligonucleotide
  Sense Strand Starting at position 389 of SEQ ID NO: 318868
gacauugguguccaguaga

SEQ ID NO: 349464 - RNA, 19 nt, Artificial Sequence
  Description of Artificial Sequence: Synthetic oligonucleotide
  Antisense Strand to SEQ ID NO: 349463
ucuacuggacaccaauguc

SEQ ID NO: 349465 - RNA, 19 nt, Artificial Sequence
  Description of Artificial Sequence: Synthetic oligonucleotide
  Sense Strand Starting at position 389 of SEQ ID NO: 318871
auugguguccaguagaucu

SEQ ID NO: 349466 - RNA, 19 nt, Artificial Sequence
  Description of Artificial Sequence: Synthetic oligonucleotide
  Antisense Strand to SEQ ID NO: 349465
agaucuacuggacaccaau

SEQ ID NO: 349467 - RNA, 19 nt, Artificial Sequence
  Description of Artificial Sequence: Synthetic oligonucleotide
  Sense Strand Starting at position 389 of SEQ ID NO: 319205
uccuuaugcccuuguccua

SEQ ID NO: 349468 - RNA, 19 nt, Artificial Sequence
  Description of Artificial Sequence: Synthetic oligonucleotide
  Antisense Strand to SEQ ID NO: 349467
uaggacaagggcauaagga

SEQ ID NO: 349469 - RNA, 19 nt, Artificial Sequence
  Description of Artificial Sequence: Synthetic oligonucleotide
  Sense Strand Starting at position 390 of SEQ ID NO: 315456
gggaucauaggaggucuuu

SEQ ID NO: 349470 - RNA, 19 nt, Artificial Sequence
  Description of Artificial Sequence: Synthetic oligonucleotide
  Antisense Strand to SEQ ID NO: 349469
aaagaccuccuaugauccc

SEQ ID NO: 349471 - RNA, 19 nt, Artificial Sequence
  Description of Artificial Sequence: Synthetic oligonucleotide
  Sense Strand Starting at position 390 of SEQ ID NO: 315465
ggaggucuuuccucuggag

SEQ ID NO: 349472 - RNA, 19 nt, Artificial Sequence
  Description of Artificial Sequence: Synthetic oligonucleotide
  Antisense Strand to SEQ ID NO: 349471
cuccagaggaaagaccucc

SEQ ID NO: 349473 - RNA, 19 nt, Artificial Sequence
  Description of Artificial Sequence: Synthetic oligonucleotide
  Sense Strand Starting at position 390 of SEQ ID NO: 315467
aggucuuuccucuggagaa

SEQ ID NO: 349474 - RNA, 19 nt, Artificial Sequence
  Description of Artificial Sequence: Synthetic oligonucleotide
  Antisense Strand to SEQ ID NO: 349473
uucuccagaggaaagaccu

SEQ ID NO: 349475 - RNA, 19 nt, Artificial Sequence
  Description of Artificial Sequence: Synthetic oligonucleotide
  Sense Strand Starting at position 390 of SEQ ID NO: 315469
gucuuuccucuggagaaca

SEQ ID NO: 349476 - RNA, 19 nt, Artificial Sequence
  Description of Artificial Sequence: Synthetic oligonucleotide
  Antisense Strand to SEQ ID NO: 349475
uguucuccagaggaaagac

SEQ ID NO: 349477 - RNA, 19 nt, Artificial Sequence
  Description of Artificial Sequence: Synthetic oligonucleotide
  Sense Strand Starting at position 390 of SEQ ID NO: 315503
ggaugccuuucucucugaa

SEQ ID NO: 349478 - RNA, 19 nt, Artificial Sequence
  Description of Artificial Sequence: Synthetic oligonucleotide
  Antisense Strand to SEQ ID NO: 349477
uucagagagaaaggcaucc

SEQ ID NO: 349479 - RNA, 19 nt, Artificial Sequence
  Description of Artificial Sequence: Synthetic oligonucleotide
  Sense Strand Starting at position 390 of SEQ ID NO: 315549
aaguuuaccgacugugaac

SEQ ID NO: 349480 - RNA, 19 nt, Artificial Sequence
  Description of Artificial Sequence: Synthetic oligonucleotide
  Antisense Strand to SEQ ID NO: 349479
guucacagucgguaaacuu

SEQ ID NO: 349481 - RNA, 19 nt, Artificial Sequence
  Description of Artificial Sequence: Synthetic oligonucleotide
  Sense Strand Starting at position 390 of SEQ ID NO: 315622
guaacuagaucuguuaaag

SEQ ID NO: 349482 - RNA, 19 nt, Artificial Sequence
  Description of Artificial Sequence: Synthetic oligonucleotide
  Antisense Strand to SEQ ID NO: 349481
cuuuaacagaucuaguuac

SEQ ID NO: 349483 - RNA, 19 nt, Artificial Sequence
  Description of Artificial Sequence: Synthetic oligonucleotide
  Sense Strand Starting at position 390 of SEQ ID NO: 315667
uccaauugcccucgaauuu

SEQ ID NO: 349484 - RNA, 19 nt, Artificial Sequence
  Description of Artificial Sequence: Synthetic oligonucleotide
  Antisense Strand to SEQ ID NO: 349483
aaauucgagggcaauugga

SEQ ID NO: 349485 - RNA, 19 nt, Artificial Sequence
  Description of Artificial Sequence: Synthetic oligonucleotide
  Sense Strand Starting at position 390 of SEQ ID NO: 316129
guguaauuggcgcccggua

SEQ ID NO: 349486 - RNA, 19 nt, Artificial Sequence
  Description of Artificial Sequence: Synthetic oligonucleotide
  Antisense Strand to SEQ ID NO: 349485
uaccgggcgccaauuacac

SEQ ID NO: 349487 - RNA, 19 nt, Artificial Sequence
  Description of Artificial Sequence: Synthetic oligonucleotide
  Sense Strand Starting at position 390 of SEQ ID NO: 316130
uguaauuggcgcccgguaa

SEQ ID NO: 349488 - RNA, 19 nt, Artificial Sequence
  Description of Artificial Sequence: Synthetic oligonucleotide
  Antisense Strand to SEQ ID NO: 349487
uuaccgggcgccaauuaca

SEQ ID NO: 349489 - RNA, 19 nt, Artificial Sequence
  Description of Artificial Sequence: Synthetic oligonucleotide
  Sense Strand Starting at position 390 of SEQ ID NO: 317489
agcgaugcuguccaucaga

SEQ ID NO: 349490 - RNA, 19 nt, Artificial Sequence
  Description of Artificial Sequence: Synthetic oligonucleotide
  Antisense Strand to SEQ ID NO: 349489
ucugauggacagcaucgcu

SEQ ID NO: 349491 - RNA, 19 nt, Artificial Sequence
  Description of Artificial Sequence: Synthetic oligonucleotide
  Sense Strand Starting at position 390 of SEQ ID NO: 317530
cccauuggcgauuaguaac

SEQ ID NO: 349492 - RNA, 19 nt, Artificial Sequence
  Description of Artificial Sequence: Synthetic oligonucleotide
  Antisense Strand to SEQ ID NO: 349491
guuacuaaucgccaauggg

SEQ ID NO: 349493 - RNA, 19 nt, Artificial Sequence
  Description of Artificial Sequence: Synthetic oligonucleotide
  Sense Strand Starting at position 390 of SEQ ID NO: 317536
ggcgauuaguaaccuaaac

SEQ ID NO: 349494 - RNA, 19 nt, Artificial Sequence
  Description of Artificial Sequence: Synthetic oligonucleotide
  Antisense Strand to SEQ ID NO: 349493
guuuagguuacuaaucgcc

SEQ ID NO: 349495 - RNA, 19 nt, Artificial Sequence
  Description of Artificial Sequence: Synthetic oligonucleotide
  Sense Strand Starting at position 390 of SEQ ID NO: 317675
cgauguauccugugacaag

SEQ ID NO: 349496 - RNA, 19 nt, Artificial Sequence
  Description of Artificial Sequence: Synthetic oligonucleotide
  Antisense Strand to SEQ ID NO: 349495
cuugucacaggauacaucg

SEQ ID NO: 349497 - RNA, 19 nt, Artificial Sequence
  Description of Artificial Sequence: Synthetic oligonucleotide
  Sense Strand Starting at position 390 of SEQ ID NO: 317814
aagacagaggcuuguguua

SEQ ID NO: 349498 - RNA, 19 nt, Artificial Sequence
  Description of Artificial Sequence: Synthetic oligonucleotide
  Antisense Strand to SEQ ID NO: 349497
uaacacaagccucugucuu

SEQ ID NO: 349499 - RNA, 19 nt, Artificial Sequence
  Description of Artificial Sequence: Synthetic oligonucleotide
  Sense Strand Starting at position 390 of SEQ ID NO: 317853
gugggauuaagucaucgcu

SEQ ID NO: 349500 - RNA, 19 nt, Artificial Sequence
  Description of Artificial Sequence: Synthetic oligonucleotide
  Antisense Strand to SEQ ID NO: 349499
agcgaugacuuaaucccac

SEQ ID NO: 349501 - RNA, 19 nt, Artificial Sequence
  Description of Artificial Sequence: Synthetic oligonucleotide
  Sense Strand Starting at position 390 of SEQ ID NO: 317880
uaaggagcuuuauugcaga

SEQ ID NO: 349502 - RNA, 19 nt, Artificial Sequence
  Description of Artificial Sequence: Synthetic oligonucleotide
  Antisense Strand to SEQ ID NO: 349501
ucugcaauaaagcuccuua

SEQ ID NO: 349503 - RNA, 19 nt, Artificial Sequence
  Description of Artificial Sequence: Synthetic oligonucleotide
  Sense Strand Starting at position 390 of SEQ ID NO: 318034
aauacucuuugugugaaga

SEQ ID NO: 349504 - RNA, 19 nt, Artificial Sequence
  Description of Artificial Sequence: Synthetic oligonucleotide
  Antisense Strand to SEQ ID NO: 349503
ucuucacacaaagaguauu

SEQ ID NO: 349505 - RNA, 19 nt, Artificial Sequence
  Description of Artificial Sequence: Synthetic oligonucleotide
  Sense Strand Starting at position 390 of SEQ ID NO: 318035
auacucuuugugugaagac

SEQ ID NO: 349506 - RNA, 19 nt, Artificial Sequence
  Description of Artificial Sequence: Synthetic oligonucleotide
  Antisense Strand to SEQ ID NO: 349505
gucuucacacaaagaguau

SEQ ID NO: 349507 - RNA, 19 nt, Artificial Sequence
  Description of Artificial Sequence: Synthetic oligonucleotide
  Sense Strand Starting at position 390 of SEQ ID NO: 318099
ucagaauagcuugagugua

SEQ ID NO: 349508 - RNA, 19 nt, Artificial Sequence
  Description of Artificial Sequence: Synthetic oligonucleotide
  Antisense Strand to SEQ ID NO: 349507
uacacucaagcuauucuga

SEQ ID NO: 349509 - RNA, 19 nt, Artificial Sequence
  Description of Artificial Sequence: Synthetic oligonucleotide
  Sense Strand Starting at position 390 of SEQ ID NO: 318101
agaauagcuugaguguaag

SEQ ID NO: 349510 - RNA, 19 nt, Artificial Sequence
  Description of Artificial Sequence: Synthetic oligonucleotide
  Antisense Strand to SEQ ID NO: 349509
cuuacacucaagcuauucu

SEQ ID NO: 349511 - RNA, 19 nt, Artificial Sequence
  Description of Artificial Sequence: Synthetic oligonucleotide
  Sense Strand Starting at position 390 of SEQ ID NO: 318198
agagcuaggguuugaagua

SEQ ID NO: 349512 - RNA, 19 nt, Artificial Sequence
  Description of Artificial Sequence: Synthetic oligonucleotide
  Antisense Strand to SEQ ID NO: 349511
uacuucaaacccuagcucu

SEQ ID NO: 349513 - RNA, 19 nt, Artificial Sequence
  Description of Artificial Sequence: Synthetic oligonucleotide
  Sense Strand Starting at position 390 of SEQ ID NO: 318218
gggcaugaccuuggaugau

SEQ ID NO: 349514 - RNA, 19 nt, Artificial Sequence
  Description of Artificial Sequence: Synthetic oligonucleotide
  Antisense Strand to SEQ ID NO: 349513
aucauccaaggucaugccc

SEQ ID NO: 349515 - RNA, 19 nt, Artificial Sequence
  Description of Artificial Sequence: Synthetic oligonucleotide
  Sense Strand Starting at position 390 of SEQ ID NO: 318387
guauguaggagguagaguu

SEQ ID NO: 349516 - RNA, 19 nt, Artificial Sequence
  Description of Artificial Sequence: Synthetic oligonucleotide
  Antisense Strand to SEQ ID NO: 349515
aacucuaccuccuacauac

SEQ ID NO: 349517 - RNA, 19 nt, Artificial Sequence
  Description of Artificial Sequence: Synthetic oligonucleotide
  Sense Strand Starting at position 390 of SEQ ID NO: 318407
acaggaauuugugauuggu

SEQ ID NO: 349518 - RNA, 19 nt, Artificial Sequence
  Description of Artificial Sequence: Synthetic oligonucleotide
  Antisense Strand to SEQ ID NO: 349517
accaaucacaaauuccugu

SEQ ID NO: 349519 - RNA, 19 nt, Artificial Sequence
  Description of Artificial Sequence: Synthetic oligonucleotide
  Sense Strand Starting at position 390 of SEQ ID NO: 318416
ugugauugguugguggaga

SEQ ID NO: 349520 - RNA, 19 nt, Artificial Sequence
  Description of Artificial Sequence: Synthetic oligonucleotide
  Antisense Strand to SEQ ID NO: 349519
ucuccaccaaccaaucaca

SEQ ID NO: 349521 - RNA, 19 nt, Artificial Sequence
  Description of Artificial Sequence: Synthetic oligonucleotide
  Sense Strand Starting at position 390 of SEQ ID NO: 318418
ugauugguugguggagaga

SEQ ID NO: 349522 - RNA, 19 nt, Artificial Sequence
  Description of Artificial Sequence: Synthetic oligonucleotide
  Antisense Strand to SEQ ID NO: 349521
ucucuccaccaaccaauca

SEQ ID NO: 349523 - RNA, 19 nt, Artificial Sequence
  Description of Artificial Sequence: Synthetic oligonucleotide
  Sense Strand Starting at position 390 of SEQ ID NO: 318420
auugguugguggagagaug

SEQ ID NO: 349524 - RNA, 19 nt, Artificial Sequence
  Description of Artificial Sequence: Synthetic oligonucleotide
  Antisense Strand to SEQ ID NO: 349523
caucucuccaccaaccaau

SEQ ID NO: 349525 - RNA, 19 nt, Artificial Sequence
  Description of Artificial Sequence: Synthetic oligonucleotide
  Sense Strand Starting at position 390 of SEQ ID NO: 318609
cagaaaggcuuagugacuu

SEQ ID NO: 349526 - RNA, 19 nt, Artificial Sequence
  Description of Artificial Sequence: Synthetic oligonucleotide
  Antisense Strand to SEQ ID NO: 349525
aagucacuaagccuuucug

SEQ ID NO: 349527 - RNA, 19 nt, Artificial Sequence
  Description of Artificial Sequence: Synthetic oligonucleotide
  Sense Strand Starting at position 390 of SEQ ID NO: 318617
cuuagugacuuucucaagu

SEQ ID NO: 349528 - RNA, 19 nt, Artificial Sequence
  Description of Artificial Sequence: Synthetic oligonucleotide
  Antisense Strand to SEQ ID NO: 349527
acuugagaaagucacuaag

SEQ ID NO: 349529 - RNA, 19 nt, Artificial Sequence
  Description of Artificial Sequence: Synthetic oligonucleotide
  Sense Strand Starting at position 390 of SEQ ID NO: 318718
ggaccuagguacucguuua

SEQ ID NO: 349530 - RNA, 19 nt, Artificial Sequence
  Description of Artificial Sequence: Synthetic oligonucleotide
  Antisense Strand to SEQ ID NO: 349529
uaaacgaguaccuaggucc

SEQ ID NO: 349531 - RNA, 19 nt, Artificial Sequence
  Description of Artificial Sequence: Synthetic oligonucleotide
  Sense Strand Starting at position 390 of SEQ ID NO: 318895
ggagaaaccucucuccaug

SEQ ID NO: 349532 - RNA, 19 nt, Artificial Sequence
  Description of Artificial Sequence: Synthetic oligonucleotide
  Antisense Strand to SEQ ID NO: 349531
cauggagagagguuucucc

SEQ ID NO: 349533 - RNA, 19 nt, Artificial Sequence
  Description of Artificial Sequence: Synthetic oligonucleotide
  Sense Strand Starting at position 390 of SEQ ID NO: 319033
gcucuaguccuggaaguuc

SEQ ID NO: 349534 - RNA, 19 nt, Artificial Sequence
  Description of Artificial Sequence: Synthetic oligonucleotide
  Antisense Strand to SEQ ID NO: 349533
gaacuuccaggacuagagc

SEQ ID NO: 349535 - RNA, 19 nt, Artificial Sequence
  Description of Artificial Sequence: Synthetic oligonucleotide
  Sense Strand Starting at position 390 of SEQ ID NO: 319042
cuggaaguuccaugaaagu

SEQ ID NO: 349536 - RNA, 19 nt, Artificial Sequence
  Description of Artificial Sequence: Synthetic oligonucleotide
  Antisense Strand to SEQ ID NO: 349535
acuuucauggaacuuccag

SEQ ID NO: 349537 - RNA, 19 nt, Artificial Sequence
  Description of Artificial Sequence: Synthetic oligonucleotide
  Sense Strand Starting at position 390 of SEQ ID NO: 319048
guuccaugaaagugaauga

SEQ ID NO: 349538 - RNA, 19 nt, Artificial Sequence
  Description of Artificial Sequence: Synthetic oligonucleotide
  Antisense Strand to SEQ ID NO: 349537
ucauucacuuucauggaac

SEQ ID NO: 349539 - RNA, 19 nt, Artificial Sequence
  Description of Artificial Sequence: Synthetic oligonucleotide
  Sense Strand Starting at position 390 of SEQ ID NO: 319069
ucagaaauccaguggucaa

SEQ ID NO: 349540 - RNA, 19 nt, Artificial Sequence
  Description of Artificial Sequence: Synthetic oligonucleotide
  Antisense Strand to SEQ ID NO: 349539
uugaccacuggauuucuga

SEQ ID NO: 349541 - RNA, 19 nt, Artificial Sequence
  Description of Artificial Sequence: Synthetic oligonucleotide
  Sense Strand Starting at position 390 of SEQ ID NO: 319072
gaaauccaguggucaagga

SEQ ID NO: 349542 - RNA, 19 nt, Artificial Sequence
  Description of Artificial Sequence: Synthetic oligonucleotide
  Antisense Strand to SEQ ID NO: 349541
uccuugaccacuggauuuc

SEQ ID NO: 349543 - RNA, 19 nt, Artificial Sequence
  Description of Artificial Sequence: Synthetic oligonucleotide
  Sense Strand Starting at position 390 of SEQ ID NO: 319076
uccaguggucaaggacauu

SEQ ID NO: 349544 - RNA, 19 nt, Artificial Sequence
  Description of Artificial Sequence: Synthetic oligonucleotide
  Antisense Strand to SEQ ID NO: 349543
aauguccuugaccacugga

SEQ ID NO: 349545 - RNA, 19 nt, Artificial Sequence
  Description of Artificial Sequence: Synthetic oligonucleotide
  Sense Strand Starting at position 390 of SEQ ID NO: 319088
ggacauuucucugaaagag

SEQ ID NO: 349546 - RNA, 19 nt, Artificial Sequence
  Description of Artificial Sequence: Synthetic oligonucleotide
  Antisense Strand to SEQ ID NO: 349545
cucuuucagagaaaugucc

SEQ ID NO: 349547 - RNA, 19 nt, Artificial Sequence
  Description of Artificial Sequence: Synthetic oligonucleotide
  Sense Strand Starting at position 390 of SEQ ID NO: 319160
ccaggacuaccaugaguua

SEQ ID NO: 349548 - RNA, 19 nt, Artificial Sequence
  Description of Artificial Sequence: Synthetic oligonucleotide
  Antisense Strand to SEQ ID NO: 349547
uaacucaugguaguccugg

SEQ ID NO: 349549 - RNA, 19 nt, Artificial Sequence
  Description of Artificial Sequence: Synthetic oligonucleotide
  Sense Strand Starting at position 391 of SEQ ID NO: 315270
agaugcucaucuguuaaug

SEQ ID NO: 349550 - RNA, 19 nt, Artificial Sequence
  Description of Artificial Sequence: Synthetic oligonucleotide
  Antisense Strand to SEQ ID NO: 349549
cauuaacagaugagcaucu

SEQ ID NO: 349551 - RNA, 19 nt, Artificial Sequence
  Description of Artificial Sequence: Synthetic oligonucleotide
  Sense Strand Starting at position 391 of SEQ ID NO: 315280
cuguuaauggcugacucaa

SEQ ID NO: 349552 - RNA, 19 nt, Artificial Sequence
  Description of Artificial Sequence: Synthetic oligonucleotide
  Antisense Strand to SEQ ID NO: 349551
uugagucagccauuaacag

SEQ ID NO: 349553 - RNA, 19 nt, Artificial Sequence
  Description of Artificial Sequence: Synthetic oligonucleotide
  Sense Strand Starting at position 391 of SEQ ID NO: 315298
aaguguguugguuucgagu

SEQ ID NO: 349554 - RNA, 19 nt, Artificial Sequence
  Description of Artificial Sequence: Synthetic oligonucleotide
  Antisense Strand to SEQ ID NO: 349553
acucgaaaccaacacacuu

SEQ ID NO: 349555 - RNA, 19 nt, Artificial Sequence
  Description of Artificial Sequence: Synthetic oligonucleotide
  Sense Strand Starting at position 391 of SEQ ID NO: 315305
uugguuucgagucaaauau

SEQ ID NO: 349556 - RNA, 19 nt, Artificial Sequence
  Description of Artificial Sequence: Synthetic oligonucleotide
  Antisense Strand to SEQ ID NO: 349555
auauuugacucgaaaccaa

SEQ ID NO: 349557 - RNA, 19 nt, Artificial Sequence
  Description of Artificial Sequence: Synthetic oligonucleotide
  Sense Strand Starting at position 391 of SEQ ID NO: 315340
agauuugguuacuaucaaa

SEQ ID NO: 349558 - RNA, 19 nt, Artificial Sequence
  Description of Artificial Sequence: Synthetic oligonucleotide
  Antisense Strand to SEQ ID NO: 349557
uuugauaguaaccaaaucu

SEQ ID NO: 349559 - RNA, 19 nt, Artificial Sequence
  Description of Artificial Sequence: Synthetic oligonucleotide
  Sense Strand Starting at position 391 of SEQ ID NO: 315386
uuugauaauuggguaggau

SEQ ID NO: 349560 - RNA, 19 nt, Artificial Sequence
  Description of Artificial Sequence: Synthetic oligonucleotide
  Antisense Strand to SEQ ID NO: 349559
auccuacccaauuaucaaa

SEQ ID NO: 349561 - RNA, 19 nt, Artificial Sequence
  Description of Artificial Sequence: Synthetic oligonucleotide
  Sense Strand Starting at position 391 of SEQ ID NO: 315702
gcaggaaagucuguuagau

SEQ ID NO: 349562 - RNA, 19 nt, Artificial Sequence
  Description of Artificial Sequence: Synthetic oligonucleotide
  Antisense Strand to SEQ ID NO: 349561
aucuaacagacuuuccugc

SEQ ID NO: 349563 - RNA, 19 nt, Artificial Sequence
  Description of Artificial Sequence: Synthetic oligonucleotide
  Sense Strand Starting at position 391 of SEQ ID NO: 315704
aggaaagucuguuagauuu

SEQ ID NO: 349564 - RNA, 19 nt, Artificial Sequence
  Description of Artificial Sequence: Synthetic oligonucleotide
  Antisense Strand to SEQ ID NO: 349563
aaaucuaacagacuuuccu

SEQ ID NO: 349565 - RNA, 19 nt, Artificial Sequence
  Description of Artificial Sequence: Synthetic oligonucleotide
  Sense Strand Starting at position 391 of SEQ ID NO: 315799
agacuuuacuaacucguaa

SEQ ID NO: 349566 - RNA, 19 nt, Artificial Sequence
  Description of Artificial Sequence: Synthetic oligonucleotide
  Antisense Strand to SEQ ID NO: 349565
uuacgaguuaguaaagucu

SEQ ID NO: 349567 - RNA, 19 nt, Artificial Sequence
  Description of Artificial Sequence: Synthetic oligonucleotide
  Sense Strand Starting at position 391 of SEQ ID NO: 315823
cacugaguucucgaaggug

SEQ ID NO: 349568 - RNA, 19 nt, Artificial Sequence
  Description of Artificial Sequence: Synthetic oligonucleotide
  Antisense Strand to SEQ ID NO: 349567
caccuucgagaacucagug

SEQ ID NO: 349569 - RNA, 19 nt, Artificial Sequence
  Description of Artificial Sequence: Synthetic oligonucleotide
  Sense Strand Starting at position 391 of SEQ ID NO: 315841
guuccauaauguccaccaa

SEQ ID NO: 349570 - RNA, 19 nt, Artificial Sequence
  Description of Artificial Sequence: Synthetic oligonucleotide
  Antisense Strand to SEQ ID NO: 349569
uugguggacauuauggaac

SEQ ID NO: 349571 - RNA, 19 nt, Artificial Sequence
  Description of Artificial Sequence: Synthetic oligonucleotide
  Sense Strand Starting at position 391 of SEQ ID NO: 315887
gucugagaaguggacuguu

SEQ ID NO: 349572 - RNA, 19 nt, Artificial Sequence
  Description of Artificial Sequence: Synthetic oligonucleotide
  Antisense Strand to SEQ ID NO: 349571
aacaguccacuucucagac

SEQ ID NO: 349573 - RNA, 19 nt, Artificial Sequence
  Description of Artificial Sequence: Synthetic oligonucleotide
  Sense Strand Starting at position 391 of SEQ ID NO: 315994
ucagacaucguccauuaac

SEQ ID NO: 349574 - RNA, 19 nt, Artificial Sequence
  Description of Artificial Sequence: Synthetic oligonucleotide
  Antisense Strand to SEQ ID NO: 349573
guuaauggacgaugucuga

SEQ ID NO: 349575 - RNA, 19 nt, Artificial Sequence
  Description of Artificial Sequence: Synthetic oligonucleotide
  Sense Strand Starting at position 391 of SEQ ID NO: 316041
guuaguaaagucugaaauu

SEQ ID NO: 349576 - RNA, 19 nt, Artificial Sequence
  Description of Artificial Sequence: Synthetic oligonucleotide
  Antisense Strand to SEQ ID NO: 349575
aauuucagacuuuacuaac

SEQ ID NO: 349577 - RNA, 19 nt, Artificial Sequence
  Description of Artificial Sequence: Synthetic oligonucleotide
  Sense Strand Starting at position 391 of SEQ ID NO: 316094
uauccauucggauauggua

SEQ ID NO: 349578 - RNA, 19 nt, Artificial Sequence
  Description of Artificial Sequence: Synthetic oligonucleotide
  Antisense Strand to SEQ ID NO: 349577
uaccauauccgaauggaua

SEQ ID NO: 349579 - RNA, 19 nt, Artificial Sequence
  Description of Artificial Sequence: Synthetic oligonucleotide
  Sense Strand Starting at position 391 of SEQ ID NO: 316106
uaugguauuuaugaucuga

SEQ ID NO: 349580 - RNA, 19 nt, Artificial Sequence
  Description of Artificial Sequence: Synthetic oligonucleotide
  Antisense Strand to SEQ ID NO: 349579
ucagaucauaaauaccaua

SEQ ID NO: 349581 - RNA, 19 nt, Artificial Sequence
  Description of Artificial Sequence: Synthetic oligonucleotide
  Sense Strand Starting at position 391 of SEQ ID NO: 316233
aguccugaguucucaccaa

SEQ ID NO: 349582 - RNA, 19 nt, Artificial Sequence
  Description of Artificial Sequence: Synthetic oligonucleotide
  Antisense Strand to SEQ ID NO: 349581
uuggugagaacucaggacu

SEQ ID NO: 349583 - RNA, 19 nt, Artificial Sequence
  Description of Artificial Sequence: Synthetic oligonucleotide
  Sense Strand Starting at position 391 of SEQ ID NO: 316369
gguugauuauggucagaag

SEQ ID NO: 349584 - RNA, 19 nt, Artificial Sequence
  Description of Artificial Sequence: Synthetic oligonucleotide
  Antisense Strand to SEQ ID NO: 349583
cuucugaccauaaucaacc

SEQ ID NO: 349585 - RNA, 19 nt, Artificial Sequence
  Description of Artificial Sequence: Synthetic oligonucleotide
  Sense Strand Starting at position 391 of SEQ ID NO: 316380
gucagaagaucuucuugca

SEQ ID NO: 349586 - RNA, 19 nt, Artificial Sequence
  Description of Artificial Sequence: Synthetic oligonucleotide
  Antisense Strand to SEQ ID NO: 349585
ugcaagaagaucuucugac

SEQ ID NO: 349587 - RNA, 19 nt, Artificial Sequence
  Description of Artificial Sequence: Synthetic oligonucleotide
  Sense Strand Starting at position 391 of SEQ ID NO: 316476
gcaagagaauaggcuuuaa

SEQ ID NO: 349588 - RNA, 19 nt, Artificial Sequence
  Description of Artificial Sequence: Synthetic oligonucleotide
  Antisense Strand to SEQ ID NO: 349587
uuaaagccuauucucuugc

SEQ ID NO: 349589 - RNA, 19 nt, Artificial Sequence
  Description of Artificial Sequence: Synthetic oligonucleotide
  Sense Strand Starting at position 391 of SEQ ID NO: 316556
ccuugugauaucuggagau

SEQ ID NO: 349590 - RNA, 19 nt, Artificial Sequence
  Description of Artificial Sequence: Synthetic oligonucleotide
  Antisense Strand to SEQ ID NO: 349589
aucuccagauaucacaagg

SEQ ID NO: 349591 - RNA, 19 nt, Artificial Sequence
  Description of Artificial Sequence: Synthetic oligonucleotide
  Sense Strand Starting at position 391 of SEQ ID NO: 316723
ucucuucaggagugaagga

SEQ ID NO: 349592 - RNA, 19 nt, Artificial Sequence
  Description of Artificial Sequence: Synthetic oligonucleotide
  Antisense Strand to SEQ ID NO: 349591
uccuucacuccugaagaga

SEQ ID NO: 349593 - RNA, 19 nt, Artificial Sequence
  Description of Artificial Sequence: Synthetic oligonucleotide
  Sense Strand Starting at position 391 of SEQ ID NO: 317102
gccagaucaccucagcaga

SEQ ID NO: 349594 - RNA, 19 nt, Artificial Sequence
  Description of Artificial Sequence: Synthetic oligonucleotide
  Antisense Strand to SEQ ID NO: 349593
ucugcugaggugaucuggc

SEQ ID NO: 349595 - RNA, 19 nt, Artificial Sequence
  Description of Artificial Sequence: Synthetic oligonucleotide
  Sense Strand Starting at position 391 of SEQ ID NO: 317819
aguguaaguggaggaauau

SEQ ID NO: 349596 - RNA, 19 nt, Artificial Sequence
  Description of Artificial Sequence: Synthetic oligonucleotide
  Antisense Strand to SEQ ID NO: 349595
auauuccuccacuuacacu

SEQ ID NO: 349597 - RNA, 19 nt, Artificial Sequence
  Description of Artificial Sequence: Synthetic oligonucleotide
  Sense Strand Starting at position 391 of SEQ ID NO: 317828
ggaggaauauacguagugu

SEQ ID NO: 349598 - RNA, 19 nt, Artificial Sequence
  Description of Artificial Sequence: Synthetic oligonucleotide
  Antisense Strand to SEQ ID NO: 349597
acacuacguauauuccucc

SEQ ID NO: 349599 - RNA, 19 nt, Artificial Sequence
  Description of Artificial Sequence: Synthetic oligonucleotide
  Sense Strand Starting at position 391 of SEQ ID NO: 317829
gaggaauauacguaguguu

SEQ ID NO: 349600 - RNA, 19 nt, Artificial Sequence
  Description of Artificial Sequence: Synthetic oligonucleotide
  Antisense Strand to SEQ ID NO: 349599
aacacuacguauauuccuc

SEQ ID NO: 349601 - RNA, 19 nt, Artificial Sequence
  Description of Artificial Sequence: Synthetic oligonucleotide
  Sense Strand Starting at position 391 of SEQ ID NO: 317856
gguaccguuaacuaaguaa

SEQ ID NO: 349602 - RNA, 19 nt, Artificial Sequence
  Description of Artificial Sequence: Synthetic oligonucleotide
  Antisense Strand to SEQ ID NO: 349601
uuacuuaguuaacgguacc

SEQ ID NO: 349603 - RNA, 19 nt, Artificial Sequence
  Description of Artificial Sequence: Synthetic oligonucleotide
  Sense Strand Starting at position 391 of SEQ ID NO: 317860
ccguuaacuaaguaaggaa

SEQ ID NO: 349604 - RNA, 19 nt, Artificial Sequence
  Description of Artificial Sequence: Synthetic oligonucleotide
  Antisense Strand to SEQ ID NO: 349603
uuccuuacuuaguuaacgg

SEQ ID NO: 349605 - RNA, 19 nt, Artificial Sequence
  Description of Artificial Sequence: Synthetic oligonucleotide
  Sense Strand Starting at position 391 of SEQ ID NO: 318107
uucugauuacccuauuguu

SEQ ID NO: 349606 - RNA, 19 nt, Artificial Sequence
  Description of Artificial Sequence: Synthetic oligonucleotide
  Antisense Strand to SEQ ID NO: 349605
aacaauaggguaaucagaa

SEQ ID NO: 349607 - RNA, 19 nt, Artificial Sequence
  Description of Artificial Sequence: Synthetic oligonucleotide
  Sense Strand Starting at position 391 of SEQ ID NO: 318158
cuuuauuucggaggacgca

SEQ ID NO: 349608 - RNA, 19 nt, Artificial Sequence
  Description of Artificial Sequence: Synthetic oligonucleotide
  Antisense Strand to SEQ ID NO: 349607
ugcguccuccgaaauaaag

SEQ ID NO: 349609 - RNA, 19 nt, Artificial Sequence
  Description of Artificial Sequence: Synthetic oligonucleotide
  Sense Strand Starting at position 391 of SEQ ID NO: 318177
cuucgaagauaccagauuu

SEQ ID NO: 349610 - RNA, 19 nt, Artificial Sequence
  Description of Artificial Sequence: Synthetic oligonucleotide
  Antisense Strand to SEQ ID NO: 349609
aaaucugguaucuucgaag

SEQ ID NO: 349611 - RNA, 19 nt, Artificial Sequence
  Description of Artificial Sequence: Synthetic oligonucleotide
  Sense Strand Starting at position 391 of SEQ ID NO: 318219
agcuuauaacugugacaaa

SEQ ID NO: 349612 - RNA, 19 nt, Artificial Sequence
  Description of Artificial Sequence: Synthetic oligonucleotide
  Antisense Strand to SEQ ID NO: 349611
uuugucacaguuauaagcu

SEQ ID NO: 349613 - RNA, 19 nt, Artificial Sequence
  Description of Artificial Sequence: Synthetic oligonucleotide
  Sense Strand Starting at position 391 of SEQ ID NO: 318278
gugagugcagacuauaaac

SEQ ID NO: 349614 - RNA, 19 nt, Artificial Sequence
  Description of Artificial Sequence: Synthetic oligonucleotide
  Antisense Strand to SEQ ID NO: 349613
guuuauagucugcacucac

SEQ ID NO: 349615 - RNA, 19 nt, Artificial Sequence
  Description of Artificial Sequence: Synthetic oligonucleotide
  Sense Strand Starting at position 391 of SEQ ID NO: 318280
gagugcagacuauaaacuu

SEQ ID NO: 349616 - RNA, 19 nt, Artificial Sequence
  Description of Artificial Sequence: Synthetic oligonucleotide
  Antisense Strand to SEQ ID NO: 349615
aaguuuauagucugcacuc

SEQ ID NO: 349617 - RNA, 19 nt, Artificial Sequence
  Description of Artificial Sequence: Synthetic oligonucleotide
  Sense Strand Starting at position 391 of SEQ ID NO: 318320
acaccuaaacguuauguca

SEQ ID NO: 349618 - RNA, 19 nt, Artificial Sequence
  Description of Artificial Sequence: Synthetic oligonucleotide
  Antisense Strand to SEQ ID NO: 349617
ugacauaacguuuaggugu

SEQ ID NO: 349619 - RNA, 19 nt, Artificial Sequence
  Description of Artificial Sequence: Synthetic oligonucleotide
  Sense Strand Starting at position 391 of SEQ ID NO: 318358
guuguuagugacguccgua

SEQ ID NO: 349620 - RNA, 19 nt, Artificial Sequence
  Description of Artificial Sequence: Synthetic oligonucleotide
  Antisense Strand to SEQ ID NO: 349619
uacggacgucacuaacaac

SEQ ID NO: 349621 - RNA, 19 nt, Artificial Sequence
  Description of Artificial Sequence: Synthetic oligonucleotide
  Sense Strand Starting at position 391 of SEQ ID NO: 318425
gggauuuauugugaaagua

SEQ ID NO: 349622 - RNA, 19 nt, Artificial Sequence
  Description of Artificial Sequence: Synthetic oligonucleotide
  Antisense Strand to SEQ ID NO: 349621
uacuuucacaauaaauccc

SEQ ID NO: 349623 - RNA, 19 nt, Artificial Sequence
  Description of Artificial Sequence: Synthetic oligonucleotide
  Sense Strand Starting at position 391 of SEQ ID NO: 318655
uguacugugccagaauacu

SEQ ID NO: 349624 - RNA, 19 nt, Artificial Sequence
  Description of Artificial Sequence: Synthetic oligonucleotide
  Antisense Strand to SEQ ID NO: 349623
aguauucuggcacaguaca

SEQ ID NO: 349625 - RNA, 19 nt, Artificial Sequence
  Description of Artificial Sequence: Synthetic oligonucleotide
  Sense Strand Starting at position 391 of SEQ ID NO: 318713
uuaauuacuuaaguggaga

SEQ ID NO: 349626 - RNA, 19 nt, Artificial Sequence
  Description of Artificial Sequence: Synthetic oligonucleotide
  Antisense Strand to SEQ ID NO: 349625
ucuccacuuaaguaauuaa

SEQ ID NO: 349627 - RNA, 19 nt, Artificial Sequence
  Description of Artificial Sequence: Synthetic oligonucleotide
  Sense Strand Starting at position 391 of SEQ ID NO: 319190
uuauauggaguccaguuau

SEQ ID NO: 349628 - RNA, 19 nt, Artificial Sequence
  Description of Artificial Sequence: Synthetic oligonucleotide
  Antisense Strand to SEQ ID NO: 349627
auaacuggacuccauauaa

SEQ ID NO: 349629 - RNA, 19 nt, Artificial Sequence
  Description of Artificial Sequence: Synthetic oligonucleotide
  Sense Strand Starting at position 392 of SEQ ID NO: 315262
cuaguagugaguugagaug

SEQ ID NO: 349630 - RNA, 19 nt, Artificial Sequence
  Description of Artificial Sequence: Synthetic oligonucleotide
  Antisense Strand to SEQ ID NO: 349629
caucucaacucacuacuag

SEQ ID NO: 349631 - RNA, 19 nt, Artificial Sequence
  Description of Artificial Sequence: Synthetic oligonucleotide
  Sense Strand Starting at position 392 of SEQ ID NO: 315264
aguagugaguugagaugga

SEQ ID NO: 349632 - RNA, 19 nt, Artificial Sequence
  Description of Artificial Sequence: Synthetic oligonucleotide
  Antisense Strand to SEQ ID NO: 349631
uccaucucaacucacuacu

SEQ ID NO: 349633 - RNA, 19 nt, Artificial Sequence
  Description of Artificial Sequence: Synthetic oligonucleotide
  Sense Strand Starting at position 392 of SEQ ID NO: 315315
gaaagucuugcuggugaaa

SEQ ID NO: 349634 - RNA, 19 nt, Artificial Sequence
  Description of Artificial Sequence: Synthetic oligonucleotide
  Antisense Strand to SEQ ID NO: 349633
uuucaccagcaagacuuuc

SEQ ID NO: 349635 - RNA, 19 nt, Artificial Sequence
  Description of Artificial Sequence: Synthetic oligonucleotide
  Sense Strand Starting at position 392 of SEQ ID NO: 315526
uccagaaguugaguuaacu

SEQ ID NO: 349636 - RNA, 19 nt, Artificial Sequence
  Description of Artificial Sequence: Synthetic oligonucleotide
  Antisense Strand to SEQ ID NO: 349635
aguuaacucaacuucugga

SEQ ID NO: 349637 - RNA, 19 nt, Artificial Sequence
  Description of Artificial Sequence: Synthetic oligonucleotide
  Sense Strand Starting at position 392 of SEQ ID NO: 315532
aguugaguuaacugucaga

SEQ ID NO: 349638 - RNA, 19 nt, Artificial Sequence
  Description of Artificial Sequence: Synthetic oligonucleotide
  Antisense Strand to SEQ ID NO: 349637
ucugacaguuaacucaacu

SEQ ID NO: 349639 - RNA, 19 nt, Artificial Sequence
  Description of Artificial Sequence: Synthetic oligonucleotide
  Sense Strand Starting at position 392 of SEQ ID NO: 315590
gaacguuugccggcuccaa

SEQ ID NO: 349640 - RNA, 19 nt, Artificial Sequence
  Description of Artificial Sequence: Synthetic oligonucleotide
  Antisense Strand to SEQ ID NO: 349639
uuggagccggcaaacguuc

SEQ ID NO: 349641 - RNA, 19 nt, Artificial Sequence
  Description of Artificial Sequence: Synthetic oligonucleotide
  Sense Strand Starting at position 392 of SEQ ID NO: 315591
aacguuugccggcuccaaa

SEQ ID NO: 349642 - RNA, 19 nt, Artificial Sequence
  Description of Artificial Sequence: Synthetic oligonucleotide
  Antisense Strand to SEQ ID NO: 349641
uuuggagccggcaaacguu

SEQ ID NO: 349643 - RNA, 19 nt, Artificial Sequence
  Description of Artificial Sequence: Synthetic oligonucleotide
  Sense Strand Starting at position 392 of SEQ ID NO: 315771
uggagaaauaggugggcaa

SEQ ID NO: 349644 - RNA, 19 nt, Artificial Sequence
  Description of Artificial Sequence: Synthetic oligonucleotide
  Antisense Strand to SEQ ID NO: 349643
uugcccaccuauuucucca

SEQ ID NO: 349645 - RNA, 19 nt, Artificial Sequence
  Description of Artificial Sequence: Synthetic oligonucleotide
  Sense Strand Starting at position 392 of SEQ ID NO: 315772
ggagaaauaggugggcaau

SEQ ID NO: 349646 - RNA, 19 nt, Artificial Sequence
  Description of Artificial Sequence: Synthetic oligonucleotide
  Antisense Strand to SEQ ID NO: 349645
auugcccaccuauuucucc

SEQ ID NO: 349647 - RNA, 19 nt, Artificial Sequence
  Description of Artificial Sequence: Synthetic oligonucleotide
  Sense Strand Starting at position 392 of SEQ ID NO: 315773
gagaaauaggugggcaauu

SEQ ID NO: 349648 - RNA, 19 nt, Artificial Sequence
  Description of Artificial Sequence: Synthetic oligonucleotide
  Antisense Strand to SEQ ID NO: 349647
aauugcccaccuauuucuc

SEQ ID NO: 349649 - RNA, 19 nt, Artificial Sequence
  Description of Artificial Sequence: Synthetic oligonucleotide
  Sense Strand Starting at position 392 of SEQ ID NO: 316013
gguggaaaccaaugguuaa

SEQ ID NO: 349650 - RNA, 19 nt, Artificial Sequence
  Description of Artificial Sequence: Synthetic oligonucleotide
  Antisense Strand to SEQ ID NO: 349649
uuaaccauugguuuccacc

SEQ ID NO: 349651 - RNA, 19 nt, Artificial Sequence
  Description of Artificial Sequence: Synthetic oligonucleotide
  Sense Strand Starting at position 392 of SEQ ID NO: 316014
guggaaaccaaugguuaag

SEQ ID NO: 349652 - RNA, 19 nt, Artificial Sequence
  Description of Artificial Sequence: Synthetic oligonucleotide
  Antisense Strand to SEQ ID NO: 349651
cuuaaccauugguuuccac

SEQ ID NO: 349653 - RNA, 19 nt, Artificial Sequence
  Description of Artificial Sequence: Synthetic oligonucleotide
  Sense Strand Starting at position 392 of SEQ ID NO: 316016
ggaaaccaaugguuaagua

SEQ ID NO: 349654 - RNA, 19 nt, Artificial Sequence
  Description of Artificial Sequence: Synthetic oligonucleotide
  Antisense Strand to SEQ ID NO: 349653
uacuuaaccauugguuucc

SEQ ID NO: 349655 - RNA, 19 nt, Artificial Sequence
  Description of Artificial Sequence: Synthetic oligonucleotide
  Sense Strand Starting at position 392 of SEQ ID NO: 316101
gagcauugauugguucuuu

SEQ ID NO: 349656 - RNA, 19 nt, Artificial Sequence
  Description of Artificial Sequence: Synthetic oligonucleotide
  Antisense Strand to SEQ ID NO: 349655
aaagaaccaaucaaugcuc

SEQ ID NO: 349657 - RNA, 19 nt, Artificial Sequence
  Description of Artificial Sequence: Synthetic oligonucleotide
  Sense Strand Starting at position 392 of SEQ ID NO: 316106
uugauugguucuuuggguu

SEQ ID NO: 349658 - RNA, 19 nt, Artificial Sequence
  Description of Artificial Sequence: Synthetic oligonucleotide
  Antisense Strand to SEQ ID NO: 349657
aacccaaagaaccaaucaa

SEQ ID NO: 349659 - RNA, 19 nt, Artificial Sequence
  Description of Artificial Sequence: Synthetic oligonucleotide
  Sense Strand Starting at position 392 of SEQ ID NO: 316901
ggguuuauacaucagggca

SEQ ID NO: 349660 - RNA, 19 nt, Artificial Sequence
  Description of Artificial Sequence: Synthetic oligonucleotide
  Antisense Strand to SEQ ID NO: 349659
ugcccugauguauaaaccc

SEQ ID NO: 349661 - RNA, 19 nt, Artificial Sequence
  Description of Artificial Sequence: Synthetic oligonucleotide
  Sense Strand Starting at position 392 of SEQ ID NO: 317140
ggccgucccacauggauuu

SEQ ID NO: 349662 - RNA, 19 nt, Artificial Sequence
  Description of Artificial Sequence: Synthetic oligonucleotide
  Antisense Strand to SEQ ID NO: 349661
aaauccaugugggacggcc

SEQ ID NO: 349663 - RNA, 19 nt, Artificial Sequence
  Description of Artificial Sequence: Synthetic oligonucleotide
  Sense Strand Starting at position 392 of SEQ ID NO: 317725
agggauggcacuuaucuuu

SEQ ID NO: 349664 - RNA, 19 nt, Artificial Sequence
  Description of Artificial Sequence: Synthetic oligonucleotide
  Antisense Strand to SEQ ID NO: 349663
aaagauaagugccaucccu

SEQ ID NO: 349665 - RNA, 19 nt, Artificial Sequence
  Description of Artificial Sequence: Synthetic oligonucleotide
  Sense Strand Starting at position 392 of SEQ ID NO: 317744
uaaguuaagcauuggagua

SEQ ID NO: 349666 - RNA, 19 nt, Artificial Sequence
  Description of Artificial Sequence: Synthetic oligonucleotide
  Antisense Strand to SEQ ID NO: 349665
uacuccaaugcuuaacuua

SEQ ID NO: 349667 - RNA, 19 nt, Artificial Sequence
  Description of Artificial Sequence: Synthetic oligonucleotide
  Sense Strand Starting at position 392 of SEQ ID NO: 317792
guccaucagcuuuaauguu

SEQ ID NO: 349668 - RNA, 19 nt, Artificial Sequence
  Description of Artificial Sequence: Synthetic oligonucleotide
  Antisense Strand to SEQ ID NO: 349667
aacauuaaagcugauggac

SEQ ID NO: 349669 - RNA, 19 nt, Artificial Sequence
  Description of Artificial Sequence: Synthetic oligonucleotide
  Sense Strand Starting at position 392 of SEQ ID NO: 317800
gcuuuaauguuccuuagga

SEQ ID NO: 349670 - RNA, 19 nt, Artificial Sequence
  Description of Artificial Sequence: Synthetic oligonucleotide
  Antisense Strand to SEQ ID NO: 349669
uccuaaggaacauuaaagc

SEQ ID NO: 349671 - RNA, 19 nt, Artificial Sequence
  Description of Artificial Sequence: Synthetic oligonucleotide
  Sense Strand Starting at position 392 of SEQ ID NO: 317801
cuuuaauguuccuuaggag

SEQ ID NO: 349672 - RNA, 19 nt, Artificial Sequence
  Description of Artificial Sequence: Synthetic oligonucleotide
  Antisense Strand to SEQ ID NO: 349671
cuccuaaggaacauuaaag

SEQ ID NO: 349673 - RNA, 19 nt, Artificial Sequence
  Description of Artificial Sequence: Synthetic oligonucleotide
  Sense Strand Starting at position 392 of SEQ ID NO: 317980
aaagaugaugucugaguug

SEQ ID NO: 349674 - RNA, 19 nt, Artificial Sequence
  Description of Artificial Sequence: Synthetic oligonucleotide
  Antisense Strand to SEQ ID NO: 349673
caacucagacaucaucuuu

SEQ ID NO: 349675 - RNA, 19 nt, Artificial Sequence
  Description of Artificial Sequence: Synthetic oligonucleotide
  Sense Strand Starting at position 392 of SEQ ID NO: 317983
gaugaugucugaguugaua

SEQ ID NO: 349676 - RNA, 19 nt, Artificial Sequence
  Description of Artificial Sequence: Synthetic oligonucleotide
  Antisense Strand to SEQ ID NO: 349675
uaucaacucagacaucauc

SEQ ID NO: 349677 - RNA, 19 nt, Artificial Sequence
  Description of Artificial Sequence: Synthetic oligonucleotide
  Sense Strand Starting at position 392 of SEQ ID NO: 318138
cugggauagccaugggcau

SEQ ID NO: 349678 - RNA, 19 nt, Artificial Sequence
  Description of Artificial Sequence: Synthetic oligonucleotide
  Antisense Strand to SEQ ID NO: 349677
augcccauggcuaucccag

SEQ ID NO: 349679 - RNA, 19 nt, Artificial Sequence
  Description of Artificial Sequence: Synthetic oligonucleotide
  Sense Strand Starting at position 392 of SEQ ID NO: 318204
gcagucauuuccuuccugu

SEQ ID NO: 349680 - RNA, 19 nt, Artificial Sequence
  Description of Artificial Sequence: Synthetic oligonucleotide
  Antisense Strand to SEQ ID NO: 349679
acaggaaggaaaugacugc

SEQ ID NO: 349681 - RNA, 19 nt, Artificial Sequence
  Description of Artificial Sequence: Synthetic oligonucleotide
  Sense Strand Starting at position 392 of SEQ ID NO: 318323
ugcgcagaggcauagaauu

SEQ ID NO: 349682 - RNA, 19 nt, Artificial Sequence
  Description of Artificial Sequence: Synthetic oligonucleotide
  Antisense Strand to SEQ ID NO: 349681
aauucuaugccucugcgca

SEQ ID NO: 349683 - RNA, 19 nt, Artificial Sequence
  Description of Artificial Sequence: Synthetic oligonucleotide
  Sense Strand Starting at position 392 of SEQ ID NO: 318334
auagaauuaguacagcgau

SEQ ID NO: 349684 - RNA, 19 nt, Artificial Sequence
  Description of Artificial Sequence: Synthetic oligonucleotide
  Antisense Strand to SEQ ID NO: 349683
aucgcuguacuaauucuau

SEQ ID NO: 349685 - RNA, 19 nt, Artificial Sequence
  Description of Artificial Sequence: Synthetic oligonucleotide
  Sense Strand Starting at position 392 of SEQ ID NO: 318337
gaauuaguacagcgauuag

SEQ ID NO: 349686 - RNA, 19 nt, Artificial Sequence
  Description of Artificial Sequence: Synthetic oligonucleotide
  Antisense Strand to SEQ ID NO: 349685
cuaaucgcuguacuaauuc

SEQ ID NO: 349687 - RNA, 19 nt, Artificial Sequence
  Description of Artificial Sequence: Synthetic oligonucleotide
  Sense Strand Starting at position 392 of SEQ ID NO: 318710
aaugauuccugcucaggga

SEQ ID NO: 349688 - RNA, 19 nt, Artificial Sequence
  Description of Artificial Sequence: Synthetic oligonucleotide
  Antisense Strand to SEQ ID NO: 349687
ucccugagcaggaaucauu

SEQ ID NO: 349689 - RNA, 19 nt, Artificial Sequence
  Description of Artificial Sequence: Synthetic oligonucleotide
  Sense Strand Starting at position 392 of SEQ ID NO: 318729
aucagacucugagagacaa

SEQ ID NO: 349690 - RNA, 19 nt, Artificial Sequence
  Description of Artificial Sequence: Synthetic oligonucleotide
  Antisense Strand to SEQ ID NO: 349689
uugucucucagagucugau

SEQ ID NO: 349691 - RNA, 19 nt, Artificial Sequence
  Description of Artificial Sequence: Synthetic oligonucleotide
  Sense Strand Starting at position 392 of SEQ ID NO: 318944
uugacagccucugcucaaa

SEQ ID NO: 349692 - RNA, 19 nt, Artificial Sequence
  Description of Artificial Sequence: Synthetic oligonucleotide
  Antisense Strand to SEQ ID NO: 349691
uuugagcagaggcugucaa

SEQ ID NO: 349693 - RNA, 19 nt, Artificial Sequence
  Description of Artificial Sequence: Synthetic oligonucleotide
  Sense Strand Starting at position 392 of SEQ ID NO: 318963
aggcuuguuguauaugaga

SEQ ID NO: 349694 - RNA, 19 nt, Artificial Sequence
  Description of Artificial Sequence: Synthetic oligonucleotide
  Antisense Strand to SEQ ID NO: 349693
ucucauauacaacaagccu

SEQ ID NO: 349695 - RNA, 19 nt, Artificial Sequence
  Description of Artificial Sequence: Synthetic oligonucleotide
  Sense Strand Starting at position 392 of SEQ ID NO: 318974
auaugagagccuuguugag

SEQ ID NO: 349696 - RNA, 19 nt, Artificial Sequence
  Description of Artificial Sequence: Synthetic oligonucleotide
  Antisense Strand to SEQ ID NO: 349695
cucaacaaggcucucauau

SEQ ID NO: 349697 - RNA, 19 nt, Artificial Sequence
  Description of Artificial Sequence: Synthetic oligonucleotide
  Sense Strand Starting at position 392 of SEQ ID NO: 318986
uguugagaguccuuugaga

SEQ ID NO: 349698 - RNA, 19 nt, Artificial Sequence
  Description of Artificial Sequence: Synthetic oligonucleotide
  Antisense Strand to SEQ ID NO: 349697
ucucaaaggacucucaaca

SEQ ID NO: 349699 - RNA, 19 nt, Artificial Sequence
  Description of Artificial Sequence: Synthetic oligonucleotide
  Sense Strand Starting at position 392 of SEQ ID NO: 318988
uugagaguccuuugagaau

SEQ ID NO: 349700 - RNA, 19 nt, Artificial Sequence
  Description of Artificial Sequence: Synthetic oligonucleotide
  Antisense Strand to SEQ ID NO: 349699
auucucaaaggacucucaa

SEQ ID NO: 349701 - RNA, 19 nt, Artificial Sequence
  Description of Artificial Sequence: Synthetic oligonucleotide
  Sense Strand Starting at position 392 of SEQ ID NO: 319025
uuugaaacguggccaacau

SEQ ID NO: 349702 - RNA, 19 nt, Artificial Sequence
  Description of Artificial Sequence: Synthetic oligonucleotide
  Antisense Strand to SEQ ID NO: 349701
auguuggccacguuucaaa

SEQ ID NO: 349703 - RNA, 19 nt, Artificial Sequence
  Description of Artificial Sequence: Synthetic oligonucleotide
  Sense Strand Starting at position 392 of SEQ ID NO: 319026
uugaaacguggccaacauu

SEQ ID NO: 349704 - RNA, 19 nt, Artificial Sequence
  Description of Artificial Sequence: Synthetic oligonucleotide
  Antisense Strand to SEQ ID NO: 349703
aauguuggccacguuucaa

SEQ ID NO: 349705 - RNA, 19 nt, Artificial Sequence
  Description of Artificial Sequence: Synthetic oligonucleotide
  Sense Strand Starting at position 392 of SEQ ID NO: 319137
guaacauaccagggugauc

SEQ ID NO: 349706 - RNA, 19 nt, Artificial Sequence
  Description of Artificial Sequence: Synthetic oligonucleotide
  Antisense Strand to SEQ ID NO: 349705
gaucacccugguauguuac

SEQ ID NO: 349707 - RNA, 19 nt, Artificial Sequence
  Description of Artificial Sequence: Synthetic oligonucleotide
  Sense Strand Starting at position 392 of SEQ ID NO: 319172
uaaaucaaugccugagguu

SEQ ID NO: 349708 - RNA, 19 nt, Artificial Sequence
  Description of Artificial Sequence: Synthetic oligonucleotide
  Antisense Strand to SEQ ID NO: 349707
aaccucaggcauugauuua

SEQ ID NO: 349709 - RNA, 19 nt, Artificial Sequence
  Description of Artificial Sequence: Synthetic oligonucleotide
  Sense Strand Starting at position 393 of SEQ ID NO: 315251
agugucuaccaguguauau

SEQ ID NO: 349710 - RNA, 19 nt, Artificial Sequence
  Description of Artificial Sequence: Synthetic oligonucleotide
  Antisense Strand to SEQ ID NO: 349709
auauacacugguagacacu

SEQ ID NO: 349711 - RNA, 19 nt, Artificial Sequence
  Description of Artificial Sequence: Synthetic oligonucleotide
  Sense Strand Starting at position 393 of SEQ ID NO: 316005
gcuugagaagccuacucua

SEQ ID NO: 349712 - RNA, 19 nt, Artificial Sequence
  Description of Artificial Sequence: Synthetic oligonucleotide
  Antisense Strand to SEQ ID NO: 349711
uagaguaggcuucucaagc

SEQ ID NO: 349713 - RNA, 19 nt, Artificial Sequence
  Description of Artificial Sequence: Synthetic oligonucleotide
  Sense Strand Starting at position 393 of SEQ ID NO: 316008
ugagaagccuacucuagaa

SEQ ID NO: 349714 - RNA, 19 nt, Artificial Sequence
  Description of Artificial Sequence: Synthetic oligonucleotide
  Antisense Strand to SEQ ID NO: 349713
uucuagaguaggcuucuca

SEQ ID NO: 349715 - RNA, 19 nt, Artificial Sequence
  Description of Artificial Sequence: Synthetic oligonucleotide
  Sense Strand Starting at position 393 of SEQ ID NO: 316021
cuagaagacuucucugcuu

SEQ ID NO: 349716 - RNA, 19 nt, Artificial Sequence
  Description of Artificial Sequence: Synthetic oligonucleotide
  Antisense Strand to SEQ ID NO: 349715
aagcagagaagucuucuag

SEQ ID NO: 349717 - RNA, 19 nt, Artificial Sequence
  Description of Artificial Sequence: Synthetic oligonucleotide
  Sense Strand Starting at position 393 of SEQ ID NO: 316023
agaagacuucucugcuucu

SEQ ID NO: 349718 - RNA, 19 nt, Artificial Sequence
  Description of Artificial Sequence: Synthetic oligonucleotide
  Antisense Strand to SEQ ID NO: 349717
agaagcagagaagucuucu

SEQ ID NO: 349719 - RNA, 19 nt, Artificial Sequence
  Description of Artificial Sequence: Synthetic oligonucleotide
  Sense Strand Starting at position 393 of SEQ ID NO: 316155
cuggaaauaauaugagugu

SEQ ID NO: 349720 - RNA, 19 nt, Artificial Sequence
  Description of Artificial Sequence: Synthetic oligonucleotide
  Antisense Strand to SEQ ID NO: 349719
acacucauauuauuuccag

SEQ ID NO: 349721 - RNA, 19 nt, Artificial Sequence
  Description of Artificial Sequence: Synthetic oligonucleotide
  Sense Strand Starting at position 393 of SEQ ID NO: 316290
gagagaugucacgguguga

SEQ ID NO: 349722 - RNA, 19 nt, Artificial Sequence
  Description of Artificial Sequence: Synthetic oligonucleotide
  Antisense Strand to SEQ ID NO: 349721
ucacaccgugacaucucuc

SEQ ID NO: 349723 - RNA, 19 nt, Artificial Sequence
  Description of Artificial Sequence: Synthetic oligonucleotide
  Sense Strand Starting at position 393 of SEQ ID NO: 316301
cggugugaaugcacgcaaa

SEQ ID NO: 349724 - RNA, 19 nt, Artificial Sequence
  Description of Artificial Sequence: Synthetic oligonucleotide
  Antisense Strand to SEQ ID NO: 349723
uuugcgugcauucacaccg

SEQ ID NO: 349725 - RNA, 19 nt, Artificial Sequence
  Description of Artificial Sequence: Synthetic oligonucleotide
  Sense Strand Starting at position 393 of SEQ ID NO: 316554
guguuucgccuauauccua

SEQ ID NO: 349726 - RNA, 19 nt, Artificial Sequence
  Description of Artificial Sequence: Synthetic oligonucleotide
  Antisense Strand to SEQ ID NO: 349725
uaggauauaggcgaaacac

SEQ ID NO: 349727 - RNA, 19 nt, Artificial Sequence
  Description of Artificial Sequence: Synthetic oligonucleotide
  Sense Strand Starting at position 393 of SEQ ID NO: 316569
ccuaaaucgugccucauca

SEQ ID NO: 349728 - RNA, 19 nt, Artificial Sequence
  Description of Artificial Sequence: Synthetic oligonucleotide
  Antisense Strand to SEQ ID NO: 349727
ugaugaggcacgauuuagg

SEQ ID NO: 349729 - RNA, 19 nt, Artificial Sequence
  Description of Artificial Sequence: Synthetic oligonucleotide
  Sense Strand Starting at position 393 of SEQ ID NO: 316632
agagauuagguguguggaa

SEQ ID NO: 349730 - RNA, 19 nt, Artificial Sequence
  Description of Artificial Sequence: Synthetic oligonucleotide
  Antisense Strand to SEQ ID NO: 349729
uuccacacaccuaaucucu

SEQ ID NO: 349731 - RNA, 19 nt, Artificial Sequence
  Description of Artificial Sequence: Synthetic oligonucleotide
  Sense Strand Starting at position 393 of SEQ ID NO: 316633
gagauuagguguguggaau

SEQ ID NO: 349732 - RNA, 19 nt, Artificial Sequence
  Description of Artificial Sequence: Synthetic oligonucleotide
  Antisense Strand to SEQ ID NO: 349731
auuccacacaccuaaucuc

SEQ ID NO: 349733 - RNA, 19 nt, Artificial Sequence
  Description of Artificial Sequence: Synthetic oligonucleotide
  Sense Strand Starting at position 393 of SEQ ID NO: 316634
agauuagguguguggaaug

SEQ ID NO: 349734 - RNA, 19 nt, Artificial Sequence
  Description of Artificial Sequence: Synthetic oligonucleotide
  Antisense Strand to SEQ ID NO: 349733
cauuccacacaccuaaucu

SEQ ID NO: 349735 - RNA, 19 nt, Artificial Sequence
  Description of Artificial Sequence: Synthetic oligonucleotide
  Sense Strand Starting at position 393 of SEQ ID NO: 316644
uguggaauggugcaugcau

SEQ ID NO: 349736 - RNA, 19 nt, Artificial Sequence
  Description of Artificial Sequence: Synthetic oligonucleotide
  Antisense Strand to SEQ ID NO: 349735
augcaugcaccauuccaca

SEQ ID NO: 349737 - RNA, 19 nt, Artificial Sequence
  Description of Artificial Sequence: Synthetic oligonucleotide
  Sense Strand Starting at position 393 of SEQ ID NO: 316646
uggaauggugcaugcauuu

SEQ ID NO: 349738 - RNA, 19 nt, Artificial Sequence
  Description of Artificial Sequence: Synthetic oligonucleotide
  Antisense Strand to SEQ ID NO: 349737
aaaugcaugcaccauucca

SEQ ID NO: 349739 - RNA, 19 nt, Artificial Sequence
  Description of Artificial Sequence: Synthetic oligonucleotide
  Sense Strand Starting at position 393 of SEQ ID NO: 316736
acgagaaacccucgaggaa

SEQ ID NO: 349740 - RNA, 19 nt, Artificial Sequence
  Description of Artificial Sequence: Synthetic oligonucleotide
  Antisense Strand to SEQ ID NO: 349739
uuccucgaggguuucucgu

SEQ ID NO: 349741 - RNA, 19 nt, Artificial Sequence
  Description of Artificial Sequence: Synthetic oligonucleotide
  Sense Strand Starting at position 393 of SEQ ID NO: 316944
agagguacucuucgcugaa

SEQ ID NO: 349742 - RNA, 19 nt, Artificial Sequence
  Description of Artificial Sequence: Synthetic oligonucleotide
  Antisense Strand to SEQ ID NO: 349741
uucagcgaagaguaccucu

SEQ ID NO: 349743 - RNA, 19 nt, Artificial Sequence
  Description of Artificial Sequence: Synthetic oligonucleotide
  Sense Strand Starting at position 393 of SEQ ID NO: 316945
gagguacucuucgcugaac

SEQ ID NO: 349744 - RNA, 19 nt, Artificial Sequence
  Description of Artificial Sequence: Synthetic oligonucleotide
  Antisense Strand to SEQ ID NO: 349743
guucagcgaagaguaccuc

SEQ ID NO: 349745 - RNA, 19 nt, Artificial Sequence
  Description of Artificial Sequence: Synthetic oligonucleotide
  Sense Strand Starting at position 393 of SEQ ID NO: 317522
cacggugccauuugguauu

SEQ ID NO: 349746 - RNA, 19 nt, Artificial Sequence
  Description of Artificial Sequence: Synthetic oligonucleotide
  Antisense Strand to SEQ ID NO: 349745
aauaccaaauggcaccgug

SEQ ID NO: 349747 - RNA, 19 nt, Artificial Sequence
  Description of Artificial Sequence: Synthetic oligonucleotide
  Sense Strand Starting at position 393 of SEQ ID NO: 317544
gaugcuggagucugguuau

SEQ ID NO: 349748 - RNA, 19 nt, Artificial Sequence
  Description of Artificial Sequence: Synthetic oligonucleotide
  Antisense Strand to SEQ ID NO: 349747
auaaccagacuccagcauc

SEQ ID NO: 349749 - RNA, 19 nt, Artificial Sequence
  Description of Artificial Sequence: Synthetic oligonucleotide
  Sense Strand Starting at position 393 of SEQ ID NO: 317547
gcuggagucugguuauuga

SEQ ID NO: 349750 - RNA, 19 nt, Artificial Sequence
  Description of Artificial Sequence: Synthetic oligonucleotide
  Antisense Strand to SEQ ID NO: 349749
ucaauaaccagacuccagc

SEQ ID NO: 349751 - RNA, 19 nt, Artificial Sequence
  Description of Artificial Sequence: Synthetic oligonucleotide
  Sense Strand Starting at position 393 of SEQ ID NO: 317550
ggagucugguuauugagua

SEQ ID NO: 349752 - RNA, 19 nt, Artificial Sequence
  Description of Artificial Sequence: Synthetic oligonucleotide
  Antisense Strand to SEQ ID NO: 349751
uacucaauaaccagacucc

SEQ ID NO: 349753 - RNA, 19 nt, Artificial Sequence
  Description of Artificial Sequence: Synthetic oligonucleotide
  Sense Strand Starting at position 393 of SEQ ID NO: 317554
ucugguuauugaguagaca

SEQ ID NO: 349754 - RNA, 19 nt, Artificial Sequence
  Description of Artificial Sequence: Synthetic oligonucleotide
  Antisense Strand to SEQ ID NO: 349753
ugucuacucaauaaccaga

SEQ ID NO: 349755 - RNA, 19 nt, Artificial Sequence
  Description of Artificial Sequence: Synthetic oligonucleotide
  Sense Strand Starting at position 393 of SEQ ID NO: 317569
gacagaugcuugcuggaac

SEQ ID NO: 349756 - RNA, 19 nt, Artificial Sequence
  Description of Artificial Sequence: Synthetic oligonucleotide
  Antisense Strand to SEQ ID NO: 349755
guuccagcaagcaucuguc

SEQ ID NO: 349757 - RNA, 19 nt, Artificial Sequence
  Description of Artificial Sequence: Synthetic oligonucleotide
  Sense Strand Starting at position 393 of SEQ ID NO: 317582
uggaacguccagugaaacu

SEQ ID NO: 349758 - RNA, 19 nt, Artificial Sequence
  Description of Artificial Sequence: Synthetic oligonucleotide
  Antisense Strand to SEQ ID NO: 349757
aguuucacuggacguucca

SEQ ID NO: 349759 - RNA, 19 nt, Artificial Sequence
  Description of Artificial Sequence: Synthetic oligonucleotide
  Sense Strand Starting at position 393 of SEQ ID NO: 317690
ccuuaaauguuaguuaucu

SEQ ID NO: 349760 - RNA, 19 nt, Artificial Sequence
  Description of Artificial Sequence: Synthetic oligonucleotide
  Antisense Strand to SEQ ID NO: 349759
agauaacuaacauuuaagg

SEQ ID NO: 349761 - RNA, 19 nt, Artificial Sequence
  Description of Artificial Sequence: Synthetic oligonucleotide
  Sense Strand Starting at position 393 of SEQ ID NO: 317731
aauuaaucuugauuggcga

SEQ ID NO: 349762 - RNA, 19 nt, Artificial Sequence
  Description of Artificial Sequence: Synthetic oligonucleotide
  Antisense Strand to SEQ ID NO: 349761
ucgccaaucaagauuaauu

SEQ ID NO: 349763 - RNA, 19 nt, Artificial Sequence
  Description of Artificial Sequence: Synthetic oligonucleotide
  Sense Strand Starting at position 393 of SEQ ID NO: 317733
uuaaucuugauuggcgaca

SEQ ID NO: 349764 - RNA, 19 nt, Artificial Sequence
  Description of Artificial Sequence: Synthetic oligonucleotide
  Antisense Strand to SEQ ID NO: 349763
ugucgccaaucaagauuaa

SEQ ID NO: 349765 - RNA, 19 nt, Artificial Sequence
  Description of Artificial Sequence: Synthetic oligonucleotide
  Sense Strand Starting at position 393 of SEQ ID NO: 317734
uaaucuugauuggcgacau

SEQ ID NO: 349766 - RNA, 19 nt, Artificial Sequence
  Description of Artificial Sequence: Synthetic oligonucleotide
  Antisense Strand to SEQ ID NO: 349765
augucgccaaucaagauua

SEQ ID NO: 349767 - RNA, 19 nt, Artificial Sequence
  Description of Artificial Sequence: Synthetic oligonucleotide
  Sense Strand Starting at position 393 of SEQ ID NO: 318613
cucaaacucucggucucaa

SEQ ID NO: 349768 - RNA, 19 nt, Artificial Sequence
  Description of Artificial Sequence: Synthetic oligonucleotide
  Antisense Strand to SEQ ID NO: 349767
uugagaccgagaguuugag

SEQ ID NO: 349769 - RNA, 19 nt, Artificial Sequence
  Description of Artificial Sequence: Synthetic oligonucleotide
  Sense Strand Starting at position 393 of SEQ ID NO: 318665
cucccaaaguucuuaggau

SEQ ID NO: 349770 - RNA, 19 nt, Artificial Sequence
  Description of Artificial Sequence: Synthetic oligonucleotide
  Antisense Strand to SEQ ID NO: 349769
auccuaagaacuuugggag

SEQ ID NO: 349771 - RNA, 19 nt, Artificial Sequence
  Description of Artificial Sequence: Synthetic oligonucleotide
  Sense Strand Starting at position 393 of SEQ ID NO: 318730
agaguucuugcaggcuaaa

SEQ ID NO: 349772 - RNA, 19 nt, Artificial Sequence
  Description of Artificial Sequence: Synthetic oligonucleotide
  Antisense Strand to SEQ ID NO: 349771
uuuagccugcaagaacucu

SEQ ID NO: 349773 - RNA, 19 nt, Artificial Sequence
  Description of Artificial Sequence: Synthetic oligonucleotide
  Sense Strand Starting at position 393 of SEQ ID NO: 318771
ggagacaucugaguugcuu

SEQ ID NO: 349774 - RNA, 19 nt, Artificial Sequence
  Description of Artificial Sequence: Synthetic oligonucleotide
  Antisense Strand to SEQ ID NO: 349773
aagcaacucagaugucucc

SEQ ID NO: 349775 - RNA, 19 nt, Artificial Sequence
  Description of Artificial Sequence: Synthetic oligonucleotide
  Sense Strand Starting at position 393 of SEQ ID NO: 318775
acaucugaguugcuuuaaa

SEQ ID NO: 349776 - RNA, 19 nt, Artificial Sequence
  Description of Artificial Sequence: Synthetic oligonucleotide
  Antisense Strand to SEQ ID NO: 349775
uuuaaagcaacucagaugu

SEQ ID NO: 349777 - RNA, 19 nt, Artificial Sequence
  Description of Artificial Sequence: Synthetic oligonucleotide
  Sense Strand Starting at position 393 of SEQ ID NO: 318874
agggaacuauguguacaga

SEQ ID NO: 349778 - RNA, 19 nt, Artificial Sequence
  Description of Artificial Sequence: Synthetic oligonucleotide
  Antisense Strand to SEQ ID NO: 349777
ucuguacacauaguucccu

SEQ ID NO: 349779 - RNA, 19 nt, Artificial Sequence
  Description of Artificial Sequence: Synthetic oligonucleotide
  Sense Strand Starting at position 393 of SEQ ID NO: 318903
caaauaagguaaguguaau

SEQ ID NO: 349780 - RNA, 19 nt, Artificial Sequence
  Description of Artificial Sequence: Synthetic oligonucleotide
  Antisense Strand to SEQ ID NO: 349779
auuacacuuaccuuauuug

SEQ ID NO: 349781 - RNA, 19 nt, Artificial Sequence
  Description of Artificial Sequence: Synthetic oligonucleotide
  Sense Strand Starting at position 393 of SEQ ID NO: 318981
gcuggaagcuaucuuagaa

SEQ ID NO: 349782 - RNA, 19 nt, Artificial Sequence
  Description of Artificial Sequence: Synthetic oligonucleotide
  Antisense Strand to SEQ ID NO: 349781
uucuaagauagcuuccagc

SEQ ID NO: 349783 - RNA, 19 nt, Artificial Sequence
  Description of Artificial Sequence: Synthetic oligonucleotide
  Sense Strand Starting at position 393 of SEQ ID NO: 319084
gugacagugcuugugcuua

SEQ ID NO: 349784 - RNA, 19 nt, Artificial Sequence
  Description of Artificial Sequence: Synthetic oligonucleotide
  Antisense Strand to SEQ ID NO: 349783
uaagcacaagcacugucac

SEQ ID NO: 349785 - RNA, 19 nt, Artificial Sequence
  Description of Artificial Sequence: Synthetic oligonucleotide
  Sense Strand Starting at position 393 of SEQ ID NO: 319150
uucucaauuguguggugaa

SEQ ID NO: 349786 - RNA, 19 nt, Artificial Sequence
  Description of Artificial Sequence: Synthetic oligonucleotide
  Antisense Strand to SEQ ID NO: 349785
uucaccacacaauugagaa

SEQ ID NO: 349787 - RNA, 19 nt, Artificial Sequence
  Description of Artificial Sequence: Synthetic oligonucleotide
  Sense Strand Starting at position 393 of SEQ ID NO: 319178
uuaaguacuccuuguuuag

SEQ ID NO: 349788 - RNA, 19 nt, Artificial Sequence
  Description of Artificial Sequence: Synthetic oligonucleotide
  Antisense Strand to SEQ ID NO: 349787
cuaaacaaggaguacuuaa

SEQ ID NO: 349789 - RNA, 19 nt, Artificial Sequence
  Description of Artificial Sequence: Synthetic oligonucleotide
  Sense Strand Starting at position 394 of SEQ ID NO: 315357
gugauucuauuugcaggua

SEQ ID NO: 349790 - RNA, 19 nt, Artificial Sequence
  Description of Artificial Sequence: Synthetic oligonucleotide
  Antisense Strand to SEQ ID NO: 349789
uaccugcaaauagaaucac

SEQ ID NO: 349791 - RNA, 19 nt, Artificial Sequence
  Description of Artificial Sequence: Synthetic oligonucleotide
  Sense Strand Starting at position 394 of SEQ ID NO: 315623
guuguacucaguuauggcu

SEQ ID NO: 349792 - RNA, 19 nt, Artificial Sequence
  Description of Artificial Sequence: Synthetic oligonucleotide
  Antisense Strand to SEQ ID NO: 349791
agccauaacugaguacaac

SEQ ID NO: 349793 - RNA, 19 nt, Artificial Sequence
  Description of Artificial Sequence: Synthetic oligonucleotide
  Sense Strand Starting at position 394 of SEQ ID NO: 315629
cucaguuauggcugacuga

SEQ ID NO: 349794 - RNA, 19 nt, Artificial Sequence
  Description of Artificial Sequence: Synthetic oligonucleotide
  Antisense Strand to SEQ ID NO: 349793
ucagucagccauaacugag

SEQ ID NO: 349795 - RNA, 19 nt, Artificial Sequence
  Description of Artificial Sequence: Synthetic oligonucleotide
  Sense Strand Starting at position 394 of SEQ ID NO: 315630
ucaguuauggcugacugau

SEQ ID NO: 349796 - RNA, 19 nt, Artificial Sequence
  Description of Artificial Sequence: Synthetic oligonucleotide
  Antisense Strand to SEQ ID NO: 349795
aucagucagccauaacuga

SEQ ID NO: 349797 - RNA, 19 nt, Artificial Sequence
  Description of Artificial Sequence: Synthetic oligonucleotide
  Sense Strand Starting at position 394 of SEQ ID NO: 315949
ccaggauaccucugugcca

SEQ ID NO: 349798 - RNA, 19 nt, Artificial Sequence
  Description of Artificial Sequence: Synthetic oligonucleotide
  Antisense Strand to SEQ ID NO: 349797
uggcacagagguauccugg

SEQ ID NO: 349799 - RNA, 19 nt, Artificial Sequence
  Description of Artificial Sequence: Synthetic oligonucleotide
  Sense Strand Starting at position 394 of SEQ ID NO: 316022
accagaagcguuugaggaa

SEQ ID NO: 349800 - RNA, 19 nt, Artificial Sequence
  Description of Artificial Sequence: Synthetic oligonucleotide
  Antisense Strand to SEQ ID NO: 349799
uuccucaaacgcuucuggu

SEQ ID NO: 349801 - RNA, 19 nt, Artificial Sequence
  Description of Artificial Sequence: Synthetic oligonucleotide
  Sense Strand Starting at position 394 of SEQ ID NO: 316029
gcguuugaggaaucguagu

SEQ ID NO: 349802 - RNA, 19 nt, Artificial Sequence
  Description of Artificial Sequence: Synthetic oligonucleotide
  Antisense Strand to SEQ ID NO: 349801
acuacgauuccucaaacgc

SEQ ID NO: 349803 - RNA, 19 nt, Artificial Sequence
  Description of Artificial Sequence: Synthetic oligonucleotide
  Sense Strand Starting at position 394 of SEQ ID NO: 316250
guuucugucacugcgguau

SEQ ID NO: 349804 - RNA, 19 nt, Artificial Sequence
  Description of Artificial Sequence: Synthetic oligonucleotide
  Antisense Strand to SEQ ID NO: 349803
auaccgcagugacagaaac

SEQ ID NO: 349805 - RNA, 19 nt, Artificial Sequence
  Description of Artificial Sequence: Synthetic oligonucleotide
  Sense Strand Starting at position 394 of SEQ ID NO: 316261
ugcgguauuugcccaucua

SEQ ID NO: 349806 - RNA, 19 nt, Artificial Sequence
  Description of Artificial Sequence: Synthetic oligonucleotide
  Antisense Strand to SEQ ID NO: 349805
uagaugggcaaauaccgca

SEQ ID NO: 349807 - RNA, 19 nt, Artificial Sequence
  Description of Artificial Sequence: Synthetic oligonucleotide
  Sense Strand Starting at position 394 of SEQ ID NO: 316262
gcgguauuugcccaucuac

SEQ ID NO: 349808 - RNA, 19 nt, Artificial Sequence
  Description of Artificial Sequence: Synthetic oligonucleotide
  Antisense Strand to SEQ ID NO: 349807
guagaugggcaaauaccgc

SEQ ID NO: 349809 - RNA, 19 nt, Artificial Sequence
  Description of Artificial Sequence: Synthetic oligonucleotide
  Sense Strand Starting at position 394 of SEQ ID NO: 317396
ugcccuaggugguuaauga

SEQ ID NO: 349810 - RNA, 19 nt, Artificial Sequence
  Description of Artificial Sequence: Synthetic oligonucleotide
  Antisense Strand to SEQ ID NO: 349809
ucauuaaccaccuagggca

SEQ ID NO: 349811 - RNA, 19 nt, Artificial Sequence
  Description of Artificial Sequence: Synthetic oligonucleotide
  Sense Strand Starting at position 394 of SEQ ID NO: 317428
guguacaacuggcuuauca

SEQ ID NO: 349812 - RNA, 19 nt, Artificial Sequence
  Description of Artificial Sequence: Synthetic oligonucleotide
  Antisense Strand to SEQ ID NO: 349811
ugauaagccaguuguacac

SEQ ID NO: 349813 - RNA, 19 nt, Artificial Sequence
  Description of Artificial Sequence: Synthetic oligonucleotide
  Sense Strand Starting at position 394 of SEQ ID NO: 317430
guacaacuggcuuaucaug

SEQ ID NO: 349814 - RNA, 19 nt, Artificial Sequence
  Description of Artificial Sequence: Synthetic oligonucleotide
  Antisense Strand to SEQ ID NO: 349813
caugauaagccaguuguac

SEQ ID NO: 349815 - RNA, 19 nt, Artificial Sequence
  Description of Artificial Sequence: Synthetic oligonucleotide
  Sense Strand Starting at position 394 of SEQ ID NO: 317436
cuggcuuaucauggauaaa

SEQ ID NO: 349816 - RNA, 19 nt, Artificial Sequence
  Description of Artificial Sequence: Synthetic oligonucleotide
  Antisense Strand to SEQ ID NO: 349815
uuuauccaugauaagccag

SEQ ID NO: 349817 - RNA, 19 nt, Artificial Sequence
  Description of Artificial Sequence: Synthetic oligonucleotide
  Sense Strand Starting at position 394 of SEQ ID NO: 317475
cuacacgcggucuauaaua

SEQ ID NO: 349818 - RNA, 19 nt, Artificial Sequence
  Description of Artificial Sequence: Synthetic oligonucleotide
  Antisense Strand to SEQ ID NO: 349817
uauuauagaccgcguguag

SEQ ID NO: 349819 - RNA, 19 nt, Artificial Sequence
  Description of Artificial Sequence: Synthetic oligonucleotide
  Sense Strand Starting at position 394 of SEQ ID NO: 317477
acacgcggucuauaauaca

SEQ ID NO: 349820 - RNA, 19 nt, Artificial Sequence
  Description of Artificial Sequence: Synthetic oligonucleotide
  Antisense Strand to SEQ ID NO: 349819
uguauuauagaccgcgugu

SEQ ID NO: 349821 - RNA, 19 nt, Artificial Sequence
  Description of Artificial Sequence: Synthetic oligonucleotide
  Sense Strand Starting at position 394 of SEQ ID NO: 317630
ucuguaaagcuuggaccua

SEQ ID NO: 349822 - RNA, 19 nt, Artificial Sequence
  Description of Artificial Sequence: Synthetic oligonucleotide
  Antisense Strand to SEQ ID NO: 349821
uagguccaagcuuuacaga

SEQ ID NO: 349823 - RNA, 19 nt, Artificial Sequence
  Description of Artificial Sequence: Synthetic oligonucleotide
  Sense Strand Starting at position 394 of SEQ ID NO: 317730
cuaggugucuguuuggauc

SEQ ID NO: 349824 - RNA, 19 nt, Artificial Sequence
  Description of Artificial Sequence: Synthetic oligonucleotide
  Antisense Strand to SEQ ID NO: 349823
gauccaaacagacaccuag

SEQ ID NO: 349825 - RNA, 19 nt, Artificial Sequence
  Description of Artificial Sequence: Synthetic oligonucleotide
  Sense Strand Starting at position 394 of SEQ ID NO: 317734
gugucuguuuggaucguca

SEQ ID NO: 349826 - RNA, 19 nt, Artificial Sequence
  Description of Artificial Sequence: Synthetic oligonucleotide
  Antisense Strand to SEQ ID NO: 349825
ugacgauccaaacagacac

SEQ ID NO: 349827 - RNA, 19 nt, Artificial Sequence
  Description of Artificial Sequence: Synthetic oligonucleotide
  Sense Strand Starting at position 394 of SEQ ID NO: 317875
cugagagucaauggugaag

SEQ ID NO: 349828 - RNA, 19 nt, Artificial Sequence
  Description of Artificial Sequence: Synthetic oligonucleotide
  Antisense Strand to SEQ ID NO: 349827
cuucaccauugacucucag

SEQ ID NO: 349829 - RNA, 19 nt, Artificial Sequence
  Description of Artificial Sequence: Synthetic oligonucleotide
  Sense Strand Starting at position 394 of SEQ ID NO: 317908
cccuuuaaugaucagagca

SEQ ID NO: 349830 - RNA, 19 nt, Artificial Sequence
  Description of Artificial Sequence: Synthetic oligonucleotide
  Antisense Strand to SEQ ID NO: 349829
ugcucugaucauuaaaggg

SEQ ID NO: 349831 - RNA, 19 nt, Artificial Sequence
  Description of Artificial Sequence: Synthetic oligonucleotide
  Sense Strand Starting at position 394 of SEQ ID NO: 318014
caauuacuggaaugugauu

SEQ ID NO: 349832 - RNA, 19 nt, Artificial Sequence
  Description of Artificial Sequence: Synthetic oligonucleotide
  Antisense Strand to SEQ ID NO: 349831
aaucacauuccaguaauug

SEQ ID NO: 349833 - RNA, 19 nt, Artificial Sequence
  Description of Artificial Sequence: Synthetic oligonucleotide
  Sense Strand Starting at position 394 of SEQ ID NO: 318035
ggaguugacaaauguacca

SEQ ID NO: 349834 - RNA, 19 nt, Artificial Sequence
  Description of Artificial Sequence: Synthetic oligonucleotide
  Antisense Strand to SEQ ID NO: 349833
ugguacauuugucaacucc

SEQ ID NO: 349835 - RNA, 19 nt, Artificial Sequence
  Description of Artificial Sequence: Synthetic oligonucleotide
  Sense Strand Starting at position 394 of SEQ ID NO: 318061
uuggaaugacucuacuguu

SEQ ID NO: 349836 - RNA, 19 nt, Artificial Sequence
  Description of Artificial Sequence: Synthetic oligonucleotide
  Antisense Strand to SEQ ID NO: 349835
aacaguagagucauuccaa

SEQ ID NO: 349837 - RNA, 19 nt, Artificial Sequence
  Description of Artificial Sequence: Synthetic oligonucleotide
  Sense Strand Starting at position 394 of SEQ ID NO: 318080
ucaacagcuuuaucgaaag

SEQ ID NO: 349838 - RNA, 19 nt, Artificial Sequence
  Description of Artificial Sequence: Synthetic oligonucleotide
  Antisense Strand to SEQ ID NO: 349837
cuuucgauaaagcuguuga

SEQ ID NO: 349839 - RNA, 19 nt, Artificial Sequence
  Description of Artificial Sequence: Synthetic oligonucleotide
  Sense Strand Starting at position 394 of SEQ ID NO: 318086
gcuuuaucgaaaggcugga

SEQ ID NO: 349840 - RNA, 19 nt, Artificial Sequence
  Description of Artificial Sequence: Synthetic oligonucleotide
  Antisense Strand to SEQ ID NO: 349839
uccagccuuucgauaaagc

SEQ ID NO: 349841 - RNA, 19 nt, Artificial Sequence
  Description of Artificial Sequence: Synthetic oligonucleotide
  Sense Strand Starting at position 394 of SEQ ID NO: 318291
ugaguuccugguggucaga

SEQ ID NO: 349842 - RNA, 19 nt, Artificial Sequence
  Description of Artificial Sequence: Synthetic oligonucleotide
  Antisense Strand to SEQ ID NO: 349841
ucugaccaccaggaacuca

SEQ ID NO: 349843 - RNA, 19 nt, Artificial Sequence
  Description of Artificial Sequence: Synthetic oligonucleotide
  Sense Strand Starting at position 394 of SEQ ID NO: 318293
aguuccugguggucagaau

SEQ ID NO: 349844 - RNA, 19 nt, Artificial Sequence
  Description of Artificial Sequence: Synthetic oligonucleotide
  Antisense Strand to SEQ ID NO: 349843
auucugaccaccaggaacu

SEQ ID NO: 349845 - RNA, 19 nt, Artificial Sequence
  Description of Artificial Sequence: Synthetic oligonucleotide
  Sense Strand Starting at position 394 of SEQ ID NO: 318294
guuccugguggucagaaua

SEQ ID NO: 349846 - RNA, 19 nt, Artificial Sequence
  Description of Artificial Sequence: Synthetic oligonucleotide
  Antisense Strand to SEQ ID NO: 349845
uauucugaccaccaggaac

SEQ ID NO: 349847 - RNA, 19 nt, Artificial Sequence
  Description of Artificial Sequence: Synthetic oligonucleotide
  Sense Strand Starting at position 394 of SEQ ID NO: 318392
cccaguguagccugggaaa

SEQ ID NO: 349848 - RNA, 19 nt, Artificial Sequence
  Description of Artificial Sequence: Synthetic oligonucleotide
  Antisense Strand to SEQ ID NO: 349847
uuucccaggcuacacuggg

SEQ ID NO: 349849 - RNA, 19 nt, Artificial Sequence
  Description of Artificial Sequence: Synthetic oligonucleotide
  Sense Strand Starting at position 394 of SEQ ID NO: 318394
caguguagccugggaaauc

SEQ ID NO: 349850 - RNA, 19 nt, Artificial Sequence
  Description of Artificial Sequence: Synthetic oligonucleotide
  Antisense Strand to SEQ ID NO: 349849
gauuucccaggcuacacug

SEQ ID NO: 349851 - RNA, 19 nt, Artificial Sequence
  Description of Artificial Sequence: Synthetic oligonucleotide
  Sense Strand Starting at position 394 of SEQ ID NO: 318434
uggaguuccuucuugagag

SEQ ID NO: 349852 - RNA, 19 nt, Artificial Sequence
  Description of Artificial Sequence: Synthetic oligonucleotide
  Antisense Strand to SEQ ID NO: 349851
cucucaagaaggaacucca

SEQ ID NO: 349853 - RNA, 19 nt, Artificial Sequence
  Description of Artificial Sequence: Synthetic oligonucleotide
  Sense Strand Starting at position 394 of SEQ ID NO: 318436
gaguuccuucuugagaguu

SEQ ID NO: 349854 - RNA, 19 nt, Artificial Sequence
  Description of Artificial Sequence: Synthetic oligonucleotide
  Antisense Strand to SEQ ID NO: 349853
aacucucaagaaggaacuc

SEQ ID NO: 349855 - RNA, 19 nt, Artificial Sequence
  Description of Artificial Sequence: Synthetic oligonucleotide
  Sense Strand Starting at position 394 of SEQ ID NO: 318446
uugagaguugcauguacac

SEQ ID NO: 349856 - RNA, 19 nt, Artificial Sequence
  Description of Artificial Sequence: Synthetic oligonucleotide
  Antisense Strand to SEQ ID NO: 349855
guguacaugcaacucucaa

SEQ ID NO: 349857 - RNA, 19 nt, Artificial Sequence
  Description of Artificial Sequence: Synthetic oligonucleotide
  Sense Strand Starting at position 394 of SEQ ID NO: 318448
gagaguugcauguacacag

SEQ ID NO: 349858 - RNA, 19 nt, Artificial Sequence
  Description of Artificial Sequence: Synthetic oligonucleotide
  Antisense Strand to SEQ ID NO: 349857
cuguguacaugcaacucuc

SEQ ID NO: 349859 - RNA, 19 nt, Artificial Sequence
  Description of Artificial Sequence: Synthetic oligonucleotide
  Sense Strand Starting at position 394 of SEQ ID NO: 318630
gggaauucuccuggaagcu

SEQ ID NO: 349860 - RNA, 19 nt, Artificial Sequence
  Description of Artificial Sequence: Synthetic oligonucleotide
  Antisense Strand to SEQ ID NO: 349859
agcuuccaggagaauuccc

SEQ ID NO: 349861 - RNA, 19 nt, Artificial Sequence
  Description of Artificial Sequence: Synthetic oligonucleotide
  Sense Strand Starting at position 394 of SEQ ID NO: 318631
ggaauucuccuggaagcug

SEQ ID NO: 349862 - RNA, 19 nt, Artificial Sequence
  Description of Artificial Sequence: Synthetic oligonucleotide
  Antisense Strand to SEQ ID NO: 349861
cagcuuccaggagaauucc

SEQ ID NO: 349863 - RNA, 19 nt, Artificial Sequence
  Description of Artificial Sequence: Synthetic oligonucleotide
  Sense Strand Starting at position 394 of SEQ ID NO: 318994
gaagguuguugguuuguga

SEQ ID NO: 349864 - RNA, 19 nt, Artificial Sequence
  Description of Artificial Sequence: Synthetic oligonucleotide
  Antisense Strand to SEQ ID NO: 349863
ucacaaaccaacaaccuuc

SEQ ID NO: 349865 - RNA, 19 nt, Artificial Sequence
  Description of Artificial Sequence: Synthetic oligonucleotide
  Sense Strand Starting at position 394 of SEQ ID NO: 319050
agacgaccugugggacauu

SEQ ID NO: 349866 - RNA, 19 nt, Artificial Sequence
  Description of Artificial Sequence: Synthetic oligonucleotide
  Antisense Strand to SEQ ID NO: 349865
aaugucccacaggucgucu

SEQ ID NO: 349867 - RNA, 19 nt, Artificial Sequence
  Description of Artificial Sequence: Synthetic oligonucleotide
  Sense Strand Starting at position 394 of SEQ ID NO: 319156
cuggaauguuccucuucua

SEQ ID NO: 349868 - RNA, 19 nt, Artificial Sequence
  Description of Artificial Sequence: Synthetic oligonucleotide
  Antisense Strand to SEQ ID NO: 349867
uagaagaggaacauuccag

SEQ ID NO: 349869 - RNA, 19 nt, Artificial Sequence
  Description of Artificial Sequence: Synthetic oligonucleotide
  Sense Strand Starting at position 395 of SEQ ID NO: 315443
ugagaaaccucagcaguga

SEQ ID NO: 349870 - RNA, 19 nt, Artificial Sequence
  Description of Artificial Sequence: Synthetic oligonucleotide
  Antisense Strand to SEQ ID NO: 349869
ucacugcugagguuucuca

SEQ ID NO: 349871 - RNA, 19 nt, Artificial Sequence
  Description of Artificial Sequence: Synthetic oligonucleotide
  Sense Strand Starting at position 395 of SEQ ID NO: 315480
gagagugcucugucgcuua

SEQ ID NO: 349872 - RNA, 19 nt, Artificial Sequence
  Description of Artificial Sequence: Synthetic oligonucleotide
  Antisense Strand to SEQ ID NO: 349871
uaagcgacagagcacucuc

SEQ ID NO: 349873 - RNA, 19 nt, Artificial Sequence
  Description of Artificial Sequence: Synthetic oligonucleotide
  Sense Strand Starting at position 395 of SEQ ID NO: 315484
gugcucugucgcuuaggaa

SEQ ID NO: 349874 - RNA, 19 nt, Artificial Sequence
  Description of Artificial Sequence: Synthetic oligonucleotide
  Antisense Strand to SEQ ID NO: 349873
uuccuaagcgacagagcac

SEQ ID NO: 349875 - RNA, 19 nt, Artificial Sequence
  Description of Artificial Sequence: Synthetic oligonucleotide
  Sense Strand Starting at position 395 of SEQ ID NO: 315511
agauuaaaucauggccuaa

SEQ ID NO: 349876 - RNA, 19 nt, Artificial Sequence
  Description of Artificial Sequence: Synthetic oligonucleotide
  Antisense Strand to SEQ ID NO: 349875
uuaggccaugauuuaaucu

SEQ ID NO: 349877 - RNA, 19 nt, Artificial Sequence
  Description of Artificial Sequence: Synthetic oligonucleotide
  Sense Strand Starting at position 395 of SEQ ID NO: 315513
auuaaaucauggccuaaga

SEQ ID NO: 349878 - RNA, 19 nt, Artificial Sequence
  Description of Artificial Sequence: Synthetic oligonucleotide
  Antisense Strand to SEQ ID NO: 349877
ucuuaggccaugauuuaau

SEQ ID NO: 349879 - RNA, 19 nt, Artificial Sequence
  Description of Artificial Sequence: Synthetic oligonucleotide
  Sense Strand Starting at position 395 of SEQ ID NO: 315683
gaggcauuccaggguuaga

SEQ ID NO: 349880 - RNA, 19 nt, Artificial Sequence
  Description of Artificial Sequence: Synthetic oligonucleotide
  Antisense Strand to SEQ ID NO: 349879
ucuaacccuggaaugccuc

SEQ ID NO: 349881 - RNA, 19 nt, Artificial Sequence
  Description of Artificial Sequence: Synthetic oligonucleotide
  Sense Strand Starting at position 395 of SEQ ID NO: 315750
cgaguucauccaggaguuu

SEQ ID NO: 349882 - RNA, 19 nt, Artificial Sequence
  Description of Artificial Sequence: Synthetic oligonucleotide
  Antisense Strand to SEQ ID NO: 349881
aaacuccuggaugaacucg

SEQ ID NO: 349883 - RNA, 19 nt, Artificial Sequence
  Description of Artificial Sequence: Synthetic oligonucleotide
  Sense Strand Starting at position 395 of SEQ ID NO: 316572
gcacuugccugugucauuu

SEQ ID NO: 349884 - RNA, 19 nt, Artificial Sequence
  Description of Artificial Sequence: Synthetic oligonucleotide
  Antisense Strand to SEQ ID NO: 349883
aaaugacacaggcaagugc

SEQ ID NO: 349885 - RNA, 19 nt, Artificial Sequence
  Description of Artificial Sequence: Synthetic oligonucleotide
  Sense Strand Starting at position 395 of SEQ ID NO: 316969
gaaucagcccgugaacucu

SEQ ID NO: 349886 - RNA, 19 nt, Artificial Sequence
  Description of Artificial Sequence: Synthetic oligonucleotide
  Antisense Strand to SEQ ID NO: 349885
agaguucacgggcugauuc

SEQ ID NO: 349887 - RNA, 19 nt, Artificial Sequence
  Description of Artificial Sequence: Synthetic oligonucleotide
  Sense Strand Starting at position 395 of SEQ ID NO: 317782
gggagaggaauucgucauu

SEQ ID NO: 349888 - RNA, 19 nt, Artificial Sequence
  Description of Artificial Sequence: Synthetic oligonucleotide
  Antisense Strand to SEQ ID NO: 349887
aaugacgaauuccucuccc

SEQ ID NO: 349889 - RNA, 19 nt, Artificial Sequence
  Description of Artificial Sequence: Synthetic oligonucleotide
  Sense Strand Starting at position 395 of SEQ ID NO: 317785
agaggaauucgucauucca

SEQ ID NO: 349890 - RNA, 19 nt, Artificial Sequence
  Description of Artificial Sequence: Synthetic oligonucleotide
  Antisense Strand to SEQ ID NO: 349889
uggaaugacgaauuccucu

SEQ ID NO: 349891 - RNA, 19 nt, Artificial Sequence
  Description of Artificial Sequence: Synthetic oligonucleotide
  Sense Strand Starting at position 395 of SEQ ID NO: 317787
aggaauucgucauuccaca

SEQ ID NO: 349892 - RNA, 19 nt, Artificial Sequence
  Description of Artificial Sequence: Synthetic oligonucleotide
  Antisense Strand to SEQ ID NO: 349891
uguggaaugacgaauuccu

SEQ ID NO: 349893 - RNA, 19 nt, Artificial Sequence
  Description of Artificial Sequence: Synthetic oligonucleotide
  Sense Strand Starting at position 395 of SEQ ID NO: 317825
gggcguuuagcccacagaa

SEQ ID NO: 349894 - RNA, 19 nt, Artificial Sequence
  Description of Artificial Sequence: Synthetic oligonucleotide
  Antisense Strand to SEQ ID NO: 349893
uucugugggcuaaacgccc

SEQ ID NO: 349895 - RNA, 19 nt, Artificial Sequence
  Description of Artificial Sequence: Synthetic oligonucleotide
  Sense Strand Starting at position 395 of SEQ ID NO: 317827
gcguuuagcccacagaaac

SEQ ID NO: 349896 - RNA, 19 nt, Artificial Sequence
  Description of Artificial Sequence: Synthetic oligonucleotide
  Antisense Strand to SEQ ID NO: 349895
guuucugugggcuaaacgc

SEQ ID NO: 349897 - RNA, 19 nt, Artificial Sequence
  Description of Artificial Sequence: Synthetic oligonucleotide
  Sense Strand Starting at position 395 of SEQ ID NO: 317911
ccagguuuccagugggaag

SEQ ID NO: 349898 - RNA, 19 nt, Artificial Sequence
  Description of Artificial Sequence: Synthetic oligonucleotide
  Antisense Strand to SEQ ID NO: 349897
cuucccacuggaaaccugg

SEQ ID NO: 349899 - RNA, 19 nt, Artificial Sequence
  Description of Artificial Sequence: Synthetic oligonucleotide
  Sense Strand Starting at position 395 of SEQ ID NO: 317912
cagguuuccagugggaaga

SEQ ID NO: 349900 - RNA, 19 nt, Artificial Sequence
  Description of Artificial Sequence: Synthetic oligonucleotide
  Antisense Strand to SEQ ID NO: 349899
ucuucccacuggaaaccug

SEQ ID NO: 349901 - RNA, 19 nt, Artificial Sequence
  Description of Artificial Sequence: Synthetic oligonucleotide
  Sense Strand Starting at position 395 of SEQ ID NO: 317913
agguuuccagugggaagaa

SEQ ID NO: 349902 - RNA, 19 nt, Artificial Sequence
  Description of Artificial Sequence: Synthetic oligonucleotide
  Antisense Strand to SEQ ID NO: 349901
uucuucccacuggaaaccu

SEQ ID NO: 349903 - RNA, 19 nt, Artificial Sequence
  Description of Artificial Sequence: Synthetic oligonucleotide
  Sense Strand Starting at position 395 of SEQ ID NO: 318061
gguucuguagucgagguga

SEQ ID NO: 349904 - RNA, 19 nt, Artificial Sequence
  Description of Artificial Sequence: Synthetic oligonucleotide
  Antisense Strand to SEQ ID NO: 349903
ucaccucgacuacagaacc

SEQ ID NO: 349905 - RNA, 19 nt, Artificial Sequence
  Description of Artificial Sequence: Synthetic oligonucleotide
  Sense Strand Starting at position 395 of SEQ ID NO: 318083
aggguucgggcucaaagaa

SEQ ID NO: 349906 - RNA, 19 nt, Artificial Sequence
  Description of Artificial Sequence: Synthetic oligonucleotide
  Antisense Strand to SEQ ID NO: 349905
uucuuugagcccgaacccu

SEQ ID NO: 349907 - RNA, 19 nt, Artificial Sequence
  Description of Artificial Sequence: Synthetic oligonucleotide
  Sense Strand Starting at position 395 of SEQ ID NO: 318216
uuaaguauugaaugcaaga

SEQ ID NO: 349908 - RNA, 19 nt, Artificial Sequence
  Description of Artificial Sequence: Synthetic oligonucleotide
  Antisense Strand to SEQ ID NO: 349907
ucuugcauucaauacuuaa

SEQ ID NO: 349909 - RNA, 19 nt, Artificial Sequence
  Description of Artificial Sequence: Synthetic oligonucleotide
  Sense Strand Starting at position 395 of SEQ ID NO: 318233
gaugguguauuugcgaauu

SEQ ID NO: 349910 - RNA, 19 nt, Artificial Sequence
  Description of Artificial Sequence: Synthetic oligonucleotide
  Antisense Strand to SEQ ID NO: 349909
aauucgcaaauacaccauc

SEQ ID NO: 349911 - RNA, 19 nt, Artificial Sequence
  Description of Artificial Sequence: Synthetic oligonucleotide
  Sense Strand Starting at position 395 of SEQ ID NO: 318312
acugcaauugcugagauuc

SEQ ID NO: 349912 - RNA, 19 nt, Artificial Sequence
  Description of Artificial Sequence: Synthetic oligonucleotide
  Antisense Strand to SEQ ID NO: 349911
gaaucucagcaauugcagu

SEQ ID NO: 349913 - RNA, 19 nt, Artificial Sequence
  Description of Artificial Sequence: Synthetic oligonucleotide
  Sense Strand Starting at position 395 of SEQ ID NO: 318335
caggguguuccaggaaaca

SEQ ID NO: 349914 - RNA, 19 nt, Artificial Sequence
  Description of Artificial Sequence: Synthetic oligonucleotide
  Antisense Strand to SEQ ID NO: 349913
uguuuccuggaacacccug

SEQ ID NO: 349915 - RNA, 19 nt, Artificial Sequence
  Description of Artificial Sequence: Synthetic oligonucleotide
  Sense Strand Starting at position 395 of SEQ ID NO: 318613
agucaaagguucuuuccua

SEQ ID NO: 349916 - RNA, 19 nt, Artificial Sequence
  Description of Artificial Sequence: Synthetic oligonucleotide
  Antisense Strand to SEQ ID NO: 349915
uaggaaagaaccuuugacu

SEQ ID NO: 349917 - RNA, 19 nt, Artificial Sequence
  Description of Artificial Sequence: Synthetic oligonucleotide
  Sense Strand Starting at position 395 of SEQ ID NO: 318614
gucaaagguucuuuccuau

SEQ ID NO: 349918 - RNA, 19 nt, Artificial Sequence
  Description of Artificial Sequence: Synthetic oligonucleotide
  Antisense Strand to SEQ ID NO: 349917
auaggaaagaaccuuugac

SEQ ID NO: 349919 - RNA, 19 nt, Artificial Sequence
  Description of Artificial Sequence: Synthetic oligonucleotide
  Sense Strand Starting at position 395 of SEQ ID NO: 318635
ccacuugugucucuuaaac

SEQ ID NO: 349920 - RNA, 19 nt, Artificial Sequence
  Description of Artificial Sequence: Synthetic oligonucleotide
  Antisense Strand to SEQ ID NO: 349919
guuuaagagacacaagugg

SEQ ID NO: 349921 - RNA, 19 nt, Artificial Sequence
  Description of Artificial Sequence: Synthetic oligonucleotide
  Sense Strand Starting at position 395 of SEQ ID NO: 318675
guuuauagcccuugaaaug

SEQ ID NO: 349922 - RNA, 19 nt, Artificial Sequence
  Description of Artificial Sequence: Synthetic oligonucleotide
  Antisense Strand to SEQ ID NO: 349921
cauuucaagggcuauaaac

SEQ ID NO: 349923 - RNA, 19 nt, Artificial Sequence
  Description of Artificial Sequence: Synthetic oligonucleotide
  Sense Strand Starting at position 395 of SEQ ID NO: 318676
uuuauagcccuugaaaugu

SEQ ID NO: 349924 - RNA, 19 nt, Artificial Sequence
  Description of Artificial Sequence: Synthetic oligonucleotide
  Antisense Strand to SEQ ID NO: 349923
acauuucaagggcuauaaa

SEQ ID NO: 349925 - RNA, 19 nt, Artificial Sequence
  Description of Artificial Sequence: Synthetic oligonucleotide
  Sense Strand Starting at position 395 of SEQ ID NO: 318764
agcuguugacuuuggaaga

SEQ ID NO: 349926 - RNA, 19 nt, Artificial Sequence
  Description of Artificial Sequence: Synthetic oligonucleotide
  Antisense Strand to SEQ ID NO: 349925
ucuuccaaagucaacagcu

SEQ ID NO: 349927 - RNA, 19 nt, Artificial Sequence
  Description of Artificial Sequence: Synthetic oligonucleotide
  Sense Strand Starting at position 395 of SEQ ID NO: 318783
cugaaaugggcaugaguug

SEQ ID NO: 349928 - RNA, 19 nt, Artificial Sequence
  Description of Artificial Sequence: Synthetic oligonucleotide
  Antisense Strand to SEQ ID NO: 349927
caacucaugcccauuucag

SEQ ID NO: 349929 - RNA, 19 nt, Artificial Sequence
  Description of Artificial Sequence: Synthetic oligonucleotide
  Sense Strand Starting at position 395 of SEQ ID NO: 318789
ugggcaugaguugauggau

SEQ ID NO: 349930 - RNA, 19 nt, Artificial Sequence
  Description of Artificial Sequence: Synthetic oligonucleotide
  Antisense Strand to SEQ ID NO: 349929
auccaucaacucaugccca

SEQ ID NO: 349931 - RNA, 19 nt, Artificial Sequence
  Description of Artificial Sequence: Synthetic oligonucleotide
  Sense Strand Starting at position 395 of SEQ ID NO: 318792
gcaugaguugauggaugga

SEQ ID NO: 349932 - RNA, 19 nt, Artificial Sequence
  Description of Artificial Sequence: Synthetic oligonucleotide
  Antisense Strand to SEQ ID NO: 349931
uccauccaucaacucaugc

SEQ ID NO: 349933 - RNA, 19 nt, Artificial Sequence
  Description of Artificial Sequence: Synthetic oligonucleotide
  Sense Strand Starting at position 395 of SEQ ID NO: 318807
uggaaaguacucugaacau

SEQ ID NO: 349934 - RNA, 19 nt, Artificial Sequence
  Description of Artificial Sequence: Synthetic oligonucleotide
  Antisense Strand to SEQ ID NO: 349933
auguucagaguacuuucca

SEQ ID NO: 349935 - RNA, 19 nt, Artificial Sequence
  Description of Artificial Sequence: Synthetic oligonucleotide
  Sense Strand Starting at position 395 of SEQ ID NO: 318829
acaagcaguuccuugagau

SEQ ID NO: 349936 - RNA, 19 nt, Artificial Sequence
  Description of Artificial Sequence: Synthetic oligonucleotide
  Antisense Strand to SEQ ID NO: 349935
aucucaaggaacugcuugu

SEQ ID NO: 349937 - RNA, 19 nt, Artificial Sequence
  Description of Artificial Sequence: Synthetic oligonucleotide
  Sense Strand Starting at position 395 of SEQ ID NO: 318830
caagcaguuccuugagauc

SEQ ID NO: 349938 - RNA, 19 nt, Artificial Sequence
  Description of Artificial Sequence: Synthetic oligonucleotide
  Antisense Strand to SEQ ID NO: 349937
gaucucaaggaacugcuug

SEQ ID NO: 349939 - RNA, 19 nt, Artificial Sequence
  Description of Artificial Sequence: Synthetic oligonucleotide
  Sense Strand Starting at position 395 of SEQ ID NO: 318843
gagaucuaguuuccuggua

SEQ ID NO: 349940 - RNA, 19 nt, Artificial Sequence
  Description of Artificial Sequence: Synthetic oligonucleotide
  Antisense Strand to SEQ ID NO: 349939
uaccaggaaacuagaucuc

SEQ ID NO: 349941 - RNA, 19 nt, Artificial Sequence
  Description of Artificial Sequence: Synthetic oligonucleotide
  Sense Strand Starting at position 395 of SEQ ID NO: 318850
aguuuccugguagaacauu

SEQ ID NO: 349942 - RNA, 19 nt, Artificial Sequence
  Description of Artificial Sequence: Synthetic oligonucleotide
  Antisense Strand to SEQ ID NO: 349941
aauguucuaccaggaaacu

SEQ ID NO: 349943 - RNA, 19 nt, Artificial Sequence
  Description of Artificial Sequence: Synthetic oligonucleotide
  Sense Strand Starting at position 395 of SEQ ID NO: 318969
cugagcuuauugcugacau

SEQ ID NO: 349944 - RNA, 19 nt, Artificial Sequence
  Description of Artificial Sequence: Synthetic oligonucleotide
  Antisense Strand to SEQ ID NO: 349943
augucagcaauaagcucag

SEQ ID NO: 349945 - RNA, 19 nt, Artificial Sequence
  Description of Artificial Sequence: Synthetic oligonucleotide
  Sense Strand Starting at position 395 of SEQ ID NO: 318971
gagcuuauugcugacauuc

SEQ ID NO: 349946 - RNA, 19 nt, Artificial Sequence
  Description of Artificial Sequence: Synthetic oligonucleotide
  Antisense Strand to SEQ ID NO: 349945
gaaugucagcaauaagcuc

SEQ ID NO: 349947 - RNA, 19 nt, Artificial Sequence
  Description of Artificial Sequence: Synthetic oligonucleotide
  Sense Strand Starting at position 395 of SEQ ID NO: 318980
gcugacauuccugagagcu

SEQ ID NO: 349948 - RNA, 19 nt, Artificial Sequence
  Description of Artificial Sequence: Synthetic oligonucleotide
  Antisense Strand to SEQ ID NO: 349947
agcucucaggaaugucagc

SEQ ID NO: 349949 - RNA, 19 nt, Artificial Sequence
  Description of Artificial Sequence: Synthetic oligonucleotide
  Sense Strand Starting at position 396 of SEQ ID NO: 315272
gcaaucaccuccuuuggaa

SEQ ID NO: 349950 - RNA, 19 nt, Artificial Sequence
  Description of Artificial Sequence: Synthetic oligonucleotide
  Antisense Strand to SEQ ID NO: 349949
uuccaaaggaggugauugc

SEQ ID NO: 349951 - RNA, 19 nt, Artificial Sequence
  Description of Artificial Sequence: Synthetic oligonucleotide
  Sense Strand Starting at position 396 of SEQ ID NO: 315375
ccucuacucuggucacaca

SEQ ID NO: 349952 - RNA, 19 nt, Artificial Sequence
  Description of Artificial Sequence: Synthetic oligonucleotide
  Antisense Strand to SEQ ID NO: 349951
ugugugaccagaguagagg

SEQ ID NO: 349953 - RNA, 19 nt, Artificial Sequence
  Description of Artificial Sequence: Synthetic oligonucleotide
  Sense Strand Starting at position 396 of SEQ ID NO: 315477
cuguaauauuuaugacaga

SEQ ID NO: 349954 - RNA, 19 nt, Artificial Sequence
  Description of Artificial Sequence: Synthetic oligonucleotide
  Antisense Strand to SEQ ID NO: 349953
ucugucauaaauauuacag

SEQ ID NO: 349955 - RNA, 19 nt, Artificial Sequence
  Description of Artificial Sequence: Synthetic oligonucleotide
  Sense Strand Starting at position 396 of SEQ ID NO: 315478
uguaauauuuaugacagag

SEQ ID NO: 349956 - RNA, 19 nt, Artificial Sequence
  Description of Artificial Sequence: Synthetic oligonucleotide
  Antisense Strand to SEQ ID NO: 349955
cucugucauaaauauuaca

SEQ ID NO: 349957 - RNA, 19 nt, Artificial Sequence
  Description of Artificial Sequence: Synthetic oligonucleotide
  Sense Strand Starting at position 396 of SEQ ID NO: 315500
cccaacuagugugucaaga

SEQ ID NO: 349958 - RNA, 19 nt, Artificial Sequence
  Description of Artificial Sequence: Synthetic oligonucleotide
  Antisense Strand to SEQ ID NO: 349957
ucuugacacacuaguuggg

SEQ ID NO: 349959 - RNA, 19 nt, Artificial Sequence
  Description of Artificial Sequence: Synthetic oligonucleotide
  Sense Strand Starting at position 396 of SEQ ID NO: 315509
ugugucaagauauggguau

SEQ ID NO: 349960 - RNA, 19 nt, Artificial Sequence
  Description of Artificial Sequence: Synthetic oligonucleotide
  Antisense Strand to SEQ ID NO: 349959
auacccauaucuugacaca

SEQ ID NO: 349961 - RNA, 19 nt, Artificial Sequence
  Description of Artificial Sequence: Synthetic oligonucleotide
  Sense Strand Starting at position 396 of SEQ ID NO: 315616
cuacaugugcuaugauaug

SEQ ID NO: 349962 - RNA, 19 nt, Artificial Sequence
  Description of Artificial Sequence: Synthetic oligonucleotide
  Antisense Strand to SEQ ID NO: 349961
cauaucauagcacauguag

SEQ ID NO: 349963 - RNA, 19 nt, Artificial Sequence
  Description of Artificial Sequence: Synthetic oligonucleotide
  Sense Strand Starting at position 396 of SEQ ID NO: 315972
aaaggagagcggugugauu

SEQ ID NO: 349964 - RNA, 19 nt, Artificial Sequence
  Description of Artificial Sequence: Synthetic oligonucleotide
  Antisense Strand to SEQ ID NO: 349963
aaucacaccgcucuccuuu

SEQ ID NO: 349965 - RNA, 19 nt, Artificial Sequence
  Description of Artificial Sequence: Synthetic oligonucleotide
  Sense Strand Starting at position 396 of SEQ ID NO: 315981
cggugugauuuacaaagga

SEQ ID NO: 349966 - RNA, 19 nt, Artificial Sequence
  Description of Artificial Sequence: Synthetic oligonucleotide
  Antisense Strand to SEQ ID NO: 349965
uccuuuguaaaucacaccg

SEQ ID NO: 349967 - RNA, 19 nt, Artificial Sequence
  Description of Artificial Sequence: Synthetic oligonucleotide
  Sense Strand Starting at position 396 of SEQ ID NO: 316002
ggcucagaagucuaaucaa

SEQ ID NO: 349968 - RNA, 19 nt, Artificial Sequence
  Description of Artificial Sequence: Synthetic oligonucleotide
  Antisense Strand to SEQ ID NO: 349967
uugauuagacuucugagcc

SEQ ID NO: 349969 - RNA, 19 nt, Artificial Sequence
  Description of Artificial Sequence: Synthetic oligonucleotide
  Sense Strand Starting at position 396 of SEQ ID NO: 316088
ugccuauaaucagugaaua

SEQ ID NO: 349970 - RNA, 19 nt, Artificial Sequence
  Description of Artificial Sequence: Synthetic oligonucleotide
  Antisense Strand to SEQ ID NO: 349969
uauucacugauuauaggca

SEQ ID NO: 349971 - RNA, 19 nt, Artificial Sequence
  Description of Artificial Sequence: Synthetic oligonucleotide
  Sense Strand Starting at position 396 of SEQ ID NO: 316089
gccuauaaucagugaauaa

SEQ ID NO: 349972 - RNA, 19 nt, Artificial Sequence
  Description of Artificial Sequence: Synthetic oligonucleotide
  Antisense Strand to SEQ ID NO: 349971
uuauucacugauuauaggc

SEQ ID NO: 349973 - RNA, 19 nt, Artificial Sequence
  Description of Artificial Sequence: Synthetic oligonucleotide
  Sense Strand Starting at position 396 of SEQ ID NO: 316397
aagaaaugagcucguguua

SEQ ID NO: 349974 - RNA, 19 nt, Artificial Sequence
  Description of Artificial Sequence: Synthetic oligonucleotide
  Antisense Strand to SEQ ID NO: 349973
uaacacgagcucauuucuu

SEQ ID NO: 349975 - RNA, 19 nt, Artificial Sequence
  Description of Artificial Sequence: Synthetic oligonucleotide
  Sense Strand Starting at position 396 of SEQ ID NO: 316480
agggauagcagguauucuu

SEQ ID NO: 349976 - RNA, 19 nt, Artificial Sequence
  Description of Artificial Sequence: Synthetic oligonucleotide
  Antisense Strand to SEQ ID NO: 349975
aagaauaccugcuaucccu

SEQ ID NO: 349977 - RNA, 19 nt, Artificial Sequence
  Description of Artificial Sequence: Synthetic oligonucleotide
  Sense Strand Starting at position 396 of SEQ ID NO: 316601
uacugugcugguuagauga

SEQ ID NO: 349978 - RNA, 19 nt, Artificial Sequence
  Description of Artificial Sequence: Synthetic oligonucleotide
  Antisense Strand to SEQ ID NO: 349977
ucaucuaaccagcacagua

SEQ ID NO: 349979 - RNA, 19 nt, Artificial Sequence
  Description of Artificial Sequence: Synthetic oligonucleotide
  Sense Strand Starting at position 396 of SEQ ID NO: 316692
cauagauaucgcgaugagu

SEQ ID NO: 349980 - RNA, 19 nt, Artificial Sequence
  Description of Artificial Sequence: Synthetic oligonucleotide
  Antisense Strand to SEQ ID NO: 349979
acucaucgcgauaucuaug

SEQ ID NO: 349981 - RNA, 19 nt, Artificial Sequence
  Description of Artificial Sequence: Synthetic oligonucleotide
  Sense Strand Starting at position 396 of SEQ ID NO: 316694
uagauaucgcgaugaguaa

SEQ ID NO: 349982 - RNA, 19 nt, Artificial Sequence
  Description of Artificial Sequence: Synthetic oligonucleotide
  Antisense Strand to SEQ ID NO: 349981
uuacucaucgcgauaucua

SEQ ID NO: 349983 - RNA, 19 nt, Artificial Sequence
  Description of Artificial Sequence: Synthetic oligonucleotide
  Sense Strand Starting at position 396 of SEQ ID NO: 316695
agauaucgcgaugaguaac

SEQ ID NO: 349984 - RNA, 19 nt, Artificial Sequence
  Description of Artificial Sequence: Synthetic oligonucleotide
  Antisense Strand to SEQ ID NO: 349983
guuacucaucgcgauaucu

SEQ ID NO: 349985 - RNA, 19 nt, Artificial Sequence
  Description of Artificial Sequence: Synthetic oligonucleotide
  Sense Strand Starting at position 396 of SEQ ID NO: 316935
cgaaaucugggccagcgaa

SEQ ID NO: 349986 - RNA, 19 nt, Artificial Sequence
  Description of Artificial Sequence: Synthetic oligonucleotide
  Antisense Strand to SEQ ID NO: 349985
uucgcuggcccagauuucg

SEQ ID NO: 349987 - RNA, 19 nt, Artificial Sequence
  Description of Artificial Sequence: Synthetic oligonucleotide
  Sense Strand Starting at position 396 of SEQ ID NO: 317328
auaugaugucuagagggcu

SEQ ID NO: 349988 - RNA, 19 nt, Artificial Sequence
  Description of Artificial Sequence: Synthetic oligonucleotide
  Antisense Strand to SEQ ID NO: 349987
agcccucuagacaucauau

SEQ ID NO: 349989 - RNA, 19 nt, Artificial Sequence
  Description of Artificial Sequence: Synthetic oligonucleotide
  Sense Strand Starting at position 396 of SEQ ID NO: 317388
agucucauuuaauagguga

SEQ ID NO: 349990 - RNA, 19 nt, Artificial Sequence
  Description of Artificial Sequence: Synthetic oligonucleotide
  Antisense Strand to SEQ ID NO: 349989
ucaccuauuaaaugagacu

SEQ ID NO: 349991 - RNA, 19 nt, Artificial Sequence
  Description of Artificial Sequence: Synthetic oligonucleotide
  Sense Strand Starting at position 396 of SEQ ID NO: 317395
uuuaauaggugaguaaaca

SEQ ID NO: 349992 - RNA, 19 nt, Artificial Sequence
  Description of Artificial Sequence: Synthetic oligonucleotide
  Antisense Strand to SEQ ID NO: 349991
uguuuacucaccuauuaaa

SEQ ID NO: 349993 - RNA, 19 nt, Artificial Sequence
  Description of Artificial Sequence: Synthetic oligonucleotide
  Sense Strand Starting at position 396 of SEQ ID NO: 317791
auacuuagaccauagcguu

SEQ ID NO: 349994 - RNA, 19 nt, Artificial Sequence
  Description of Artificial Sequence: Synthetic oligonucleotide
  Antisense Strand to SEQ ID NO: 349993
aacgcuauggucuaaguau

SEQ ID NO: 349995 - RNA, 19 nt, Artificial Sequence
  Description of Artificial Sequence: Synthetic oligonucleotide
  Sense Strand Starting at position 396 of SEQ ID NO: 317889
guuagaaauguuugaguca

SEQ ID NO: 349996 - RNA, 19 nt, Artificial Sequence
  Description of Artificial Sequence: Synthetic oligonucleotide
  Antisense Strand to SEQ ID NO: 349995
ugacucaaacauuucuaac

SEQ ID NO: 349997 - RNA, 19 nt, Artificial Sequence
  Description of Artificial Sequence: Synthetic oligonucleotide
  Sense Strand Starting at position 396 of SEQ ID NO: 317892
agaaauguuugagucaucu

SEQ ID NO: 349998 - RNA, 19 nt, Artificial Sequence
  Description of Artificial Sequence: Synthetic oligonucleotide
  Antisense Strand to SEQ ID NO: 349997
agaugacucaaacauuucu

SEQ ID NO: 349999 - RNA, 19 nt, Artificial Sequence
  Description of Artificial Sequence: Synthetic oligonucleotide
  Sense Strand Starting at position 396 of SEQ ID NO: 317900
uugagucaucucuacucuu

SEQ ID NO: 350000 - RNA, 19 nt, Artificial Sequence
  Description of Artificial Sequence: Synthetic oligonucleotide
  Antisense Strand to SEQ ID NO: 349999
aagaguagagaugacucaa

SEQ ID NO: 350001 - RNA, 19 nt, Artificial Sequence
  Description of Artificial Sequence: Synthetic oligonucleotide
  Sense Strand Starting at position 396 of SEQ ID NO: 317910
ucuacucuuugucuugaua

SEQ ID NO: 350002 - RNA, 19 nt, Artificial Sequence
  Description of Artificial Sequence: Synthetic oligonucleotide
  Antisense Strand to SEQ ID NO: 350001
uaucaagacaaagaguaga

SEQ ID NO: 350003 - RNA, 19 nt, Artificial Sequence
  Description of Artificial Sequence: Synthetic oligonucleotide
  Sense Strand Starting at position 396 of SEQ ID NO: 317913
acucuuugucuugauagaa

SEQ ID NO: 350004 - RNA, 19 nt, Artificial Sequence
  Description of Artificial Sequence: Synthetic oligonucleotide
  Antisense Strand to SEQ ID NO: 350003
uucuaucaagacaaagagu

SEQ ID NO: 350005 - RNA, 19 nt, Artificial Sequence
  Description of Artificial Sequence: Synthetic oligonucleotide
  Sense Strand Starting at position 396 of SEQ ID NO: 318110
aucugaucccacugaugau

SEQ ID NO: 350006 - RNA, 19 nt, Artificial Sequence
  Description of Artificial Sequence: Synthetic oligonucleotide
  Antisense Strand to SEQ ID NO: 350005
aucaucagugggaucagau

SEQ ID NO: 350007 - RNA, 19 nt, Artificial Sequence
  Description of Artificial Sequence: Synthetic oligonucleotide
  Sense Strand Starting at position 396 of SEQ ID NO: 318159
uacugaagugugcacauua

SEQ ID NO: 350008 - RNA, 19 nt, Artificial Sequence
  Description of Artificial Sequence: Synthetic oligonucleotide
  Antisense Strand to SEQ ID NO: 350007
uaaugugcacacuucagua

SEQ ID NO: 350009 - RNA, 19 nt, Artificial Sequence
  Description of Artificial Sequence: Synthetic oligonucleotide
  Sense Strand Starting at position 396 of SEQ ID NO: 318229
gaaggacccugacugguua

SEQ ID NO: 350010 - RNA, 19 nt, Artificial Sequence
  Description of Artificial Sequence: Synthetic oligonucleotide
  Antisense Strand to SEQ ID NO: 350009
uaaccagucaggguccuuc

SEQ ID NO: 350011 - RNA, 19 nt, Artificial Sequence
  Description of Artificial Sequence: Synthetic oligonucleotide
  Sense Strand Starting at position 396 of SEQ ID NO: 318291
agucucucuggguagcaaa

SEQ ID NO: 350012 - RNA, 19 nt, Artificial Sequence
  Description of Artificial Sequence: Synthetic oligonucleotide
  Antisense Strand to SEQ ID NO: 350011
uuugcuacccagagagacu

SEQ ID NO: 350013 - RNA, 19 nt, Artificial Sequence
  Description of Artificial Sequence: Synthetic oligonucleotide
  Sense Strand Starting at position 396 of SEQ ID NO: 318680
ucuugcucugagcaauaau

SEQ ID NO: 350014 - RNA, 19 nt, Artificial Sequence
  Description of Artificial Sequence: Synthetic oligonucleotide
  Antisense Strand to SEQ ID NO: 350013
auuauugcucagagcaaga

SEQ ID NO: 350015 - RNA, 19 nt, Artificial Sequence
  Description of Artificial Sequence: Synthetic oligonucleotide
  Sense Strand Starting at position 396 of SEQ ID NO: 318683
ugcucugagcaauaaugga

SEQ ID NO: 350016 - RNA, 19 nt, Artificial Sequence
  Description of Artificial Sequence: Synthetic oligonucleotide
  Antisense Strand to SEQ ID NO: 350015
uccauuauugcucagagca

SEQ ID NO: 350017 - RNA, 19 nt, Artificial Sequence
  Description of Artificial Sequence: Synthetic oligonucleotide
  Sense Strand Starting at position 396 of SEQ ID NO: 318719
gguggaggccugcaauguu

SEQ ID NO: 350018 - RNA, 19 nt, Artificial Sequence
  Description of Artificial Sequence: Synthetic oligonucleotide
  Antisense Strand to SEQ ID NO: 350017
aacauugcaggccuccacc

SEQ ID NO: 350019 - RNA, 19 nt, Artificial Sequence
  Description of Artificial Sequence: Synthetic oligonucleotide
  Sense Strand Starting at position 396 of SEQ ID NO: 318788
ugaagucuuggcuagucau

SEQ ID NO: 350020 - RNA, 19 nt, Artificial Sequence
  Description of Artificial Sequence: Synthetic oligonucleotide
  Antisense Strand to SEQ ID NO: 350019
augacuagccaagacuuca

SEQ ID NO: 350021 - RNA, 19 nt, Artificial Sequence
  Description of Artificial Sequence: Synthetic oligonucleotide
  Sense Strand Starting at position 396 of SEQ ID NO: 319175
uuggaauugggccagugau

SEQ ID NO: 350022 - RNA, 19 nt, Artificial Sequence
  Description of Artificial Sequence: Synthetic oligonucleotide
  Antisense Strand to SEQ ID NO: 350021
aucacuggcccaauuccaa

SEQ ID NO: 350023 - RNA, 19 nt, Artificial Sequence
  Description of Artificial Sequence: Synthetic oligonucleotide
  Sense Strand Starting at position 396 of SEQ ID NO: 319195
uguaaacuuuaaucaaggu

SEQ ID NO: 350024 - RNA, 19 nt, Artificial Sequence
  Description of Artificial Sequence: Synthetic oligonucleotide
  Antisense Strand to SEQ ID NO: 350023
accuugauuaaaguuuaca

SEQ ID NO: 350025 - RNA, 19 nt, Artificial Sequence
  Description of Artificial Sequence: Synthetic oligonucleotide
  Sense Strand Starting at position 396 of SEQ ID NO: 319216
cuagguguuccauagggau

SEQ ID NO: 350026 - RNA, 19 nt, Artificial Sequence
  Description of Artificial Sequence: Synthetic oligonucleotide
  Antisense Strand to SEQ ID NO: 350025
aucccuauggaacaccuag

SEQ ID NO: 350027 - RNA, 19 nt, Artificial Sequence
  Description of Artificial Sequence: Synthetic oligonucleotide
  Sense Strand Starting at position 396 of SEQ ID NO: 319218
agguguuccauagggauac

SEQ ID NO: 350028 - RNA, 19 nt, Artificial Sequence
  Description of Artificial Sequence: Synthetic oligonucleotide
  Antisense Strand to SEQ ID NO: 350027
guaucccuauggaacaccu

SEQ ID NO: 350029 - RNA, 19 nt, Artificial Sequence
  Description of Artificial Sequence: Synthetic oligonucleotide
  Sense Strand Starting at position 397 of SEQ ID NO: 315344
accacuuccuuggcauaga

SEQ ID NO: 350030 - RNA, 19 nt, Artificial Sequence
  Description of Artificial Sequence: Synthetic oligonucleotide
  Antisense Strand to SEQ ID NO: 350029
ucuaugccaaggaaguggu

SEQ ID NO: 350031 - RNA, 19 nt, Artificial Sequence
  Description of Artificial Sequence: Synthetic oligonucleotide
  Sense Strand Starting at position 397 of SEQ ID NO: 315479
ccaggagcuagauauaugu

SEQ ID NO: 350032 - RNA, 19 nt, Artificial Sequence
  Description of Artificial Sequence: Synthetic oligonucleotide
  Antisense Strand to SEQ ID NO: 350031
acauauaucuagcuccugg

SEQ ID NO: 350033 - RNA, 19 nt, Artificial Sequence
  Description of Artificial Sequence: Synthetic oligonucleotide
  Sense Strand Starting at position 397 of SEQ ID NO: 315550
aaugaacugccgugggaau

SEQ ID NO: 350034 - RNA, 19 nt, Artificial Sequence
  Description of Artificial Sequence: Synthetic oligonucleotide
  Antisense Strand to SEQ ID NO: 350033
auucccacggcaguucauu

SEQ ID NO: 350035 - RNA, 19 nt, Artificial Sequence
  Description of Artificial Sequence: Synthetic oligonucleotide
  Sense Strand Starting at position 397 of SEQ ID NO: 315586
aagcucuaaccuugagguu

SEQ ID NO: 350036 - RNA, 19 nt, Artificial Sequence
  Description of Artificial Sequence: Synthetic oligonucleotide
  Antisense Strand to SEQ ID NO: 350035
aaccucaagguuagagcuu

SEQ ID NO: 350037 - RNA, 19 nt, Artificial Sequence
  Description of Artificial Sequence: Synthetic oligonucleotide
  Sense Strand Starting at position 397 of SEQ ID NO: 315587
agcucuaaccuugagguua

SEQ ID NO: 350038 - RNA, 19 nt, Artificial Sequence
  Description of Artificial Sequence: Synthetic oligonucleotide
  Antisense Strand to SEQ ID NO: 350037
uaaccucaagguuagagcu

SEQ ID NO: 350039 - RNA, 19 nt, Artificial Sequence
  Description of Artificial Sequence: Synthetic oligonucleotide
  Sense Strand Starting at position 397 of SEQ ID NO: 315673
gagucacuacaucauggua

SEQ ID NO: 350040 - RNA, 19 nt, Artificial Sequence
  Description of Artificial Sequence: Synthetic oligonucleotide
  Antisense Strand to SEQ ID NO: 350039
uaccaugauguagugacuc

SEQ ID NO: 350041 - RNA, 19 nt, Artificial Sequence
  Description of Artificial Sequence: Synthetic oligonucleotide
  Sense Strand Starting at position 397 of SEQ ID NO: 315738
acgguuauccguaaugugu

SEQ ID NO: 350042 - RNA, 19 nt, Artificial Sequence
  Description of Artificial Sequence: Synthetic oligonucleotide
  Antisense Strand to SEQ ID NO: 350041
acacauuacggauaaccgu

SEQ ID NO: 350043 - RNA, 19 nt, Artificial Sequence
  Description of Artificial Sequence: Synthetic oligonucleotide
  Sense Strand Starting at position 397 of SEQ ID NO: 315913
guuguuaauccugaauuau

SEQ ID NO: 350044 - RNA, 19 nt, Artificial Sequence
  Description of Artificial Sequence: Synthetic oligonucleotide
  Antisense Strand to SEQ ID NO: 350043
auaauucaggauuaacaac

SEQ ID NO: 350045 - RNA, 19 nt, Artificial Sequence
  Description of Artificial Sequence: Synthetic oligonucleotide
  Sense Strand Starting at position 397 of SEQ ID NO: 315957
ugacuuuauuauccaggca

SEQ ID NO: 350046 - RNA, 19 nt, Artificial Sequence
  Description of Artificial Sequence: Synthetic oligonucleotide
  Antisense Strand to SEQ ID NO: 350045
ugccuggauaauaaaguca

SEQ ID NO: 350047 - RNA, 19 nt, Artificial Sequence
  Description of Artificial Sequence: Synthetic oligonucleotide
  Sense Strand Starting at position 397 of SEQ ID NO: 316048
uggacauguccuuaacuca

SEQ ID NO: 350048 - RNA, 19 nt, Artificial Sequence
  Description of Artificial Sequence: Synthetic oligonucleotide
  Antisense Strand to SEQ ID NO: 350047
ugaguuaaggacaugucca

SEQ ID NO: 350049 - RNA, 19 nt, Artificial Sequence
  Description of Artificial Sequence: Synthetic oligonucleotide
  Sense Strand Starting at position 397 of SEQ ID NO: 316071
gugggacuucaaugauagc

SEQ ID NO: 350050 - RNA, 19 nt, Artificial Sequence
  Description of Artificial Sequence: Synthetic oligonucleotide
  Antisense Strand to SEQ ID NO: 350049
gcuaucauugaagucccac

SEQ ID NO: 350051 - RNA, 19 nt, Artificial Sequence
  Description of Artificial Sequence: Synthetic oligonucleotide
  Sense Strand Starting at position 397 of SEQ ID NO: 316366
guuauagcugccuagggau

SEQ ID NO: 350052 - RNA, 19 nt, Artificial Sequence
  Description of Artificial Sequence: Synthetic oligonucleotide
  Antisense Strand to SEQ ID NO: 350051
aucccuaggcagcuauaac

SEQ ID NO: 350053 - RNA, 19 nt, Artificial Sequence
  Description of Artificial Sequence: Synthetic oligonucleotide
  Sense Strand Starting at position 397 of SEQ ID NO: 316693
ccuuuauuuguacggcaau

SEQ ID NO: 350054 - RNA, 19 nt, Artificial Sequence
  Description of Artificial Sequence: Synthetic oligonucleotide
  Antisense Strand to SEQ ID NO: 350053
auugccguacaaauaaagg

SEQ ID NO: 350055 - RNA, 19 nt, Artificial Sequence
  Description of Artificial Sequence: Synthetic oligonucleotide
  Sense Strand Starting at position 397 of SEQ ID NO: 316840
gcgcgaacgccgaauggau

SEQ ID NO: 350056 - RNA, 19 nt, Artificial Sequence
  Description of Artificial Sequence: Synthetic oligonucleotide
  Antisense Strand to SEQ ID NO: 350055
auccauucggcguucgcgc

SEQ ID NO: 350057 - RNA, 19 nt, Artificial Sequence
  Description of Artificial Sequence: Synthetic oligonucleotide
  Sense Strand Starting at position 397 of SEQ ID NO: 317013
agcagaaccguuuaaucac

SEQ ID NO: 350058 - RNA, 19 nt, Artificial Sequence
  Description of Artificial Sequence: Synthetic oligonucleotide
  Antisense Strand to SEQ ID NO: 350057
gugauuaaacgguucugcu

SEQ ID NO: 350059 - RNA, 19 nt, Artificial Sequence
  Description of Artificial Sequence: Synthetic oligonucleotide
  Sense Strand Starting at position 397 of SEQ ID NO: 317022
guuuaaucacaagguaaac

SEQ ID NO: 350060 - RNA, 19 nt, Artificial Sequence
  Description of Artificial Sequence: Synthetic oligonucleotide
  Antisense Strand to SEQ ID NO: 350059
guuuaccuugugauuaaac

SEQ ID NO: 350061 - RNA, 19 nt, Artificial Sequence
  Description of Artificial Sequence: Synthetic oligonucleotide
  Sense Strand Starting at position 397 of SEQ ID NO: 317852
uagguaguucuugguggga

SEQ ID NO: 350062 - RNA, 19 nt, Artificial Sequence
  Description of Artificial Sequence: Synthetic oligonucleotide
  Antisense Strand to SEQ ID NO: 350061
ucccaccaagaacuaccua

SEQ ID NO: 350063 - RNA, 19 nt, Artificial Sequence
  Description of Artificial Sequence: Synthetic oligonucleotide
  Sense Strand Starting at position 397 of SEQ ID NO: 317865
gugggaaggguccgggaau

SEQ ID NO: 350064 - RNA, 19 nt, Artificial Sequence
  Description of Artificial Sequence: Synthetic oligonucleotide
  Antisense Strand to SEQ ID NO: 350063
auucccggacccuucccac

SEQ ID NO: 350065 - RNA, 19 nt, Artificial Sequence
  Description of Artificial Sequence: Synthetic oligonucleotide
  Sense Strand Starting at position 397 of SEQ ID NO: 318224
ggauaucugcaaggugaag

SEQ ID NO: 350066 - RNA, 19 nt, Artificial Sequence
  Description of Artificial Sequence: Synthetic oligonucleotide
  Antisense Strand to SEQ ID NO: 350065
cuucaccuugcagauaucc

SEQ ID NO: 350067 - RNA, 19 nt, Artificial Sequence
  Description of Artificial Sequence: Synthetic oligonucleotide
  Sense Strand Starting at position 397 of SEQ ID NO: 318280
caaaguauggugcaaguuu

SEQ ID NO: 350068 - RNA, 19 nt, Artificial Sequence
  Description of Artificial Sequence: Synthetic oligonucleotide
  Antisense Strand to SEQ ID NO: 350067
aaacuugcaccauacuuug

SEQ ID NO: 350069 - RNA, 19 nt, Artificial Sequence
  Description of Artificial Sequence: Synthetic oligonucleotide
  Sense Strand Starting at position 397 of SEQ ID NO: 318300
aaaggagccguguggauaa

SEQ ID NO: 350070 - RNA, 19 nt, Artificial Sequence
  Description of Artificial Sequence: Synthetic oligonucleotide
  Antisense Strand to SEQ ID NO: 350069
uuauccacacggcuccuuu

SEQ ID NO: 350071 - RNA, 19 nt, Artificial Sequence
  Description of Artificial Sequence: Synthetic oligonucleotide
  Sense Strand Starting at position 397 of SEQ ID NO: 318302
aggagccguguggauaaau

SEQ ID NO: 350072 - RNA, 19 nt, Artificial Sequence
  Description of Artificial Sequence: Synthetic oligonucleotide
  Antisense Strand to SEQ ID NO: 350071
auuuauccacacggcuccu

SEQ ID NO: 350073 - RNA, 19 nt, Artificial Sequence
  Description of Artificial Sequence: Synthetic oligonucleotide
  Sense Strand Starting at position 397 of SEQ ID NO: 318334
cccaaauuaguugaagcaa

SEQ ID NO: 350074 - RNA, 19 nt, Artificial Sequence
  Description of Artificial Sequence: Synthetic oligonucleotide
  Antisense Strand to SEQ ID NO: 350073
uugcuucaacuaauuuggg

SEQ ID NO: 350075 - RNA, 19 nt, Artificial Sequence
  Description of Artificial Sequence: Synthetic oligonucleotide
  Sense Strand Starting at position 397 of SEQ ID NO: 318373
ucugaugacuuuccugaug

SEQ ID NO: 350076 - RNA, 19 nt, Artificial Sequence
  Description of Artificial Sequence: Synthetic oligonucleotide
  Antisense Strand to SEQ ID NO: 350075
caucaggaaagucaucaga

SEQ ID NO: 350077 - RNA, 19 nt, Artificial Sequence
  Description of Artificial Sequence: Synthetic oligonucleotide
  Sense Strand Starting at position 397 of SEQ ID NO: 318376
gaugacuuuccugauguuc

SEQ ID NO: 350078 - RNA, 19 nt, Artificial Sequence
  Description of Artificial Sequence: Synthetic oligonucleotide
  Antisense Strand to SEQ ID NO: 350077
gaacaucaggaaagucauc

SEQ ID NO: 350079 - RNA, 19 nt, Artificial Sequence
  Description of Artificial Sequence: Synthetic oligonucleotide
  Sense Strand Starting at position 397 of SEQ ID NO: 318429
aaugguauuuaucagauag

SEQ ID NO: 350080 - RNA, 19 nt, Artificial Sequence
  Description of Artificial Sequence: Synthetic oligonucleotide
  Antisense Strand to SEQ ID NO: 350079
cuaucugauaaauaccauu

SEQ ID NO: 350081 - RNA, 19 nt, Artificial Sequence
  Description of Artificial Sequence: Synthetic oligonucleotide
  Sense Strand Starting at position 397 of SEQ ID NO: 318500
uugugcuaccuuuagaaca

SEQ ID NO: 350082 - RNA, 19 nt, Artificial Sequence
  Description of Artificial Sequence: Synthetic oligonucleotide
  Antisense Strand to SEQ ID NO: 350081
uguucuaaagguagcacaa

SEQ ID NO: 350083 - RNA, 19 nt, Artificial Sequence
  Description of Artificial Sequence: Synthetic oligonucleotide
  Sense Strand Starting at position 397 of SEQ ID NO: 318534
auacuaugcccagagaagu

SEQ ID NO: 350084 - RNA, 19 nt, Artificial Sequence
  Description of Artificial Sequence: Synthetic oligonucleotide
  Antisense Strand to SEQ ID NO: 350083
acuucucugggcauaguau

SEQ ID NO: 350085 - RNA, 19 nt, Artificial Sequence
  Description of Artificial Sequence: Synthetic oligonucleotide
  Sense Strand Starting at position 397 of SEQ ID NO: 318544
cagagaaguucccugggca

SEQ ID NO: 350086 - RNA, 19 nt, Artificial Sequence
  Description of Artificial Sequence: Synthetic oligonucleotide
  Antisense Strand to SEQ ID NO: 350085
ugcccagggaacuucucug

SEQ ID NO: 350087 - RNA, 19 nt, Artificial Sequence
  Description of Artificial Sequence: Synthetic oligonucleotide
  Sense Strand Starting at position 397 of SEQ ID NO: 318545
agagaaguucccugggcag

SEQ ID NO: 350088 - RNA, 19 nt, Artificial Sequence
  Description of Artificial Sequence: Synthetic oligonucleotide
  Antisense Strand to SEQ ID NO: 350087
cugcccagggaacuucucu

SEQ ID NO: 350089 - RNA, 19 nt, Artificial Sequence
  Description of Artificial Sequence: Synthetic oligonucleotide
  Sense Strand Starting at position 397 of SEQ ID NO: 318547
agaaguucccugggcagau

SEQ ID NO: 350090 - RNA, 19 nt, Artificial Sequence
  Description of Artificial Sequence: Synthetic oligonucleotide
  Antisense Strand to SEQ ID NO: 350089
aucugcccagggaacuucu

SEQ ID NO: 350091 - RNA, 19 nt, Artificial Sequence
  Description of Artificial Sequence: Synthetic oligonucleotide
  Sense Strand Starting at position 397 of SEQ ID NO: 318590
acagaucauggugguuaga

SEQ ID NO: 350092 - RNA, 19 nt, Artificial Sequence
  Description of Artificial Sequence: Synthetic oligonucleotide
  Antisense Strand to SEQ ID NO: 350091
ucuaaccaccaugaucugu

SEQ ID NO: 350093 - RNA, 19 nt, Artificial Sequence
  Description of Artificial Sequence: Synthetic oligonucleotide
  Sense Strand Starting at position 397 of SEQ ID NO: 318599
ggugguuagagcuaugaug

SEQ ID NO: 350094 - RNA, 19 nt, Artificial Sequence
  Description of Artificial Sequence: Synthetic oligonucleotide
  Antisense Strand to SEQ ID NO: 350093
caucauagcucuaaccacc

SEQ ID NO: 350095 - RNA, 19 nt, Artificial Sequence
  Description of Artificial Sequence: Synthetic oligonucleotide
  Sense Strand Starting at position 397 of SEQ ID NO: 318643
ugggaggucgucugauaag

SEQ ID NO: 350096 - RNA, 19 nt, Artificial Sequence
  Description of Artificial Sequence: Synthetic oligonucleotide
  Antisense Strand to SEQ ID NO: 350095
cuuaucagacgaccuccca

SEQ ID NO: 350097 - RNA, 19 nt, Artificial Sequence
  Description of Artificial Sequence: Synthetic oligonucleotide
  Sense Strand Starting at position 397 of SEQ ID NO: 318733
cuucguagacuggacauua

SEQ ID NO: 350098 - RNA, 19 nt, Artificial Sequence
  Description of Artificial Sequence: Synthetic oligonucleotide
  Antisense Strand to SEQ ID NO: 350097
uaauguccagucuacgaag

SEQ ID NO: 350099 - RNA, 19 nt, Artificial Sequence
  Description of Artificial Sequence: Synthetic oligonucleotide
  Sense Strand Starting at position 397 of SEQ ID NO: 318822
uuugccuuccagggaaacu

SEQ ID NO: 350100 - RNA, 19 nt, Artificial Sequence
  Description of Artificial Sequence: Synthetic oligonucleotide
  Antisense Strand to SEQ ID NO: 350099
aguuucccuggaaggcaaa

SEQ ID NO: 350101 - RNA, 19 nt, Artificial Sequence
  Description of Artificial Sequence: Synthetic oligonucleotide
  Sense Strand Starting at position 397 of SEQ ID NO: 318969
auaacaugagauugcugau

SEQ ID NO: 350102 - RNA, 19 nt, Artificial Sequence
  Description of Artificial Sequence: Synthetic oligonucleotide
  Antisense Strand to SEQ ID NO: 350101
aucagcaaucucauguuau

SEQ ID NO: 350103 - RNA, 19 nt, Artificial Sequence
  Description of Artificial Sequence: Synthetic oligonucleotide
  Sense Strand Starting at position 397 of SEQ ID NO: 319005
cuagaugugcuagagauug

SEQ ID NO: 350104 - RNA, 19 nt, Artificial Sequence
  Description of Artificial Sequence: Synthetic oligonucleotide
  Antisense Strand to SEQ ID NO: 350103
caaucucuagcacaucuag

SEQ ID NO: 350105 - RNA, 19 nt, Artificial Sequence
  Description of Artificial Sequence: Synthetic oligonucleotide
  Sense Strand Starting at position 397 of SEQ ID NO: 319013
gcuagagauugcucagaaa

SEQ ID NO: 350106 - RNA, 19 nt, Artificial Sequence
  Description of Artificial Sequence: Synthetic oligonucleotide
  Antisense Strand to SEQ ID NO: 350105
uuucugagcaaucucuagc

SEQ ID NO: 350107 - RNA, 19 nt, Artificial Sequence
  Description of Artificial Sequence: Synthetic oligonucleotide
  Sense Strand Starting at position 397 of SEQ ID NO: 319072
ugaggagacugaggauuua

SEQ ID NO: 350108 - RNA, 19 nt, Artificial Sequence
  Description of Artificial Sequence: Synthetic oligonucleotide
  Antisense Strand to SEQ ID NO: 350107
uaaauccucagucuccuca

SEQ ID NO: 350109 - RNA, 19 nt, Artificial Sequence
  Description of Artificial Sequence: Synthetic oligonucleotide
  Sense Strand Starting at position 398 of SEQ ID NO: 315346
aaaugaaacuugggagcaa

SEQ ID NO: 350110 - RNA, 19 nt, Artificial Sequence
  Description of Artificial Sequence: Synthetic oligonucleotide
  Antisense Strand to SEQ ID NO: 350109
uugcucccaaguuucauuu

SEQ ID NO: 350111 - RNA, 19 nt, Artificial Sequence
  Description of Artificial Sequence: Synthetic oligonucleotide
  Sense Strand Starting at position 398 of SEQ ID NO: 315361
gcaagaaauuaauccacug

SEQ ID NO: 350112 - RNA, 19 nt, Artificial Sequence
  Description of Artificial Sequence: Synthetic oligonucleotide
  Antisense Strand to SEQ ID NO: 350111
caguggauuaauuucuugc

SEQ ID NO: 350113 - RNA, 19 nt, Artificial Sequence
  Description of Artificial Sequence: Synthetic oligonucleotide
  Sense Strand Starting at position 398 of SEQ ID NO: 315711
gccuuaacuuagguuuauu

SEQ ID NO: 350114 - RNA, 19 nt, Artificial Sequence
  Description of Artificial Sequence: Synthetic oligonucleotide
  Antisense Strand to SEQ ID NO: 350113
aauaaaccuaaguuaaggc

SEQ ID NO: 350115 - RNA, 19 nt, Artificial Sequence
  Description of Artificial Sequence: Synthetic oligonucleotide
  Sense Strand Starting at position 398 of SEQ ID NO: 315741
cugaaaugguucguucaag

SEQ ID NO: 350116 - RNA, 19 nt, Artificial Sequence
  Description of Artificial Sequence: Synthetic oligonucleotide
  Antisense Strand to SEQ ID NO: 350115
cuugaacgaaccauuucag

SEQ ID NO: 350117 - RNA, 19 nt, Artificial Sequence
  Description of Artificial Sequence: Synthetic oligonucleotide
  Sense Strand Starting at position 398 of SEQ ID NO: 315742
ugaaaugguucguucaaga

SEQ ID NO: 350118 - RNA, 19 nt, Artificial Sequence
  Description of Artificial Sequence: Synthetic oligonucleotide
  Antisense Strand to SEQ ID NO: 350117
ucuugaacgaaccauuuca

SEQ ID NO: 350119 - RNA, 19 nt, Artificial Sequence
  Description of Artificial Sequence: Synthetic oligonucleotide
  Sense Strand Starting at position 398 of SEQ ID NO: 315788
agaugauaguaguuacuaa

SEQ ID NO: 350120 - RNA, 19 nt, Artificial Sequence
  Description of Artificial Sequence: Synthetic oligonucleotide
  Antisense Strand to SEQ ID NO: 350119
uuaguaacuacuaucaucu

SEQ ID NO: 350121 - RNA, 19 nt, Artificial Sequence
  Description of Artificial Sequence: Synthetic oligonucleotide
  Sense Strand Starting at position 398 of SEQ ID NO: 315792
gauaguaguuacuaagaug

SEQ ID NO: 350122 - RNA, 19 nt, Artificial Sequence
  Description of Artificial Sequence: Synthetic oligonucleotide
  Antisense Strand to SEQ ID NO: 350121
caucuuaguaacuacuauc

SEQ ID NO: 350123 - RNA, 19 nt, Artificial Sequence
  Description of Artificial Sequence: Synthetic oligonucleotide
  Sense Strand Starting at position 398 of SEQ ID NO: 315801
uacuaagaugcucaugguu

SEQ ID NO: 350124 - RNA, 19 nt, Artificial Sequence
  Description of Artificial Sequence: Synthetic oligonucleotide
  Antisense Strand to SEQ ID NO: 350123
aaccaugagcaucuuagua

SEQ ID NO: 350125 - RNA, 19 nt, Artificial Sequence
  Description of Artificial Sequence: Synthetic oligonucleotide
  Sense Strand Starting at position 398 of SEQ ID NO: 315953
cgagccaaguauucccaaa

SEQ ID NO: 350126 - RNA, 19 nt, Artificial Sequence
  Description of Artificial Sequence: Synthetic oligonucleotide
  Antisense Strand to SEQ ID NO: 350125
uuugggaauacuuggcucg

SEQ ID NO: 350127 - RNA, 19 nt, Artificial Sequence
  Description of Artificial Sequence: Synthetic oligonucleotide
  Sense Strand Starting at position 398 of SEQ ID NO: 315955
agccaaguauucccaaaug

SEQ ID NO: 350128 - RNA, 19 nt, Artificial Sequence
  Description of Artificial Sequence: Synthetic oligonucleotide
  Antisense Strand to SEQ ID NO: 350127
cauuugggaauacuuggcu

SEQ ID NO: 350129 - RNA, 19 nt, Artificial Sequence
  Description of Artificial Sequence: Synthetic oligonucleotide
  Sense Strand Starting at position 398 of SEQ ID NO: 315974
cuacuuacuggagguacaa

SEQ ID NO: 350130 - RNA, 19 nt, Artificial Sequence
  Description of Artificial Sequence: Synthetic oligonucleotide
  Antisense Strand to SEQ ID NO: 350129
uuguaccuccaguaaguag

SEQ ID NO: 350131 - RNA, 19 nt, Artificial Sequence
  Description of Artificial Sequence: Synthetic oligonucleotide
  Sense Strand Starting at position 398 of SEQ ID NO: 316044
ugugguauagaccguggau

SEQ ID NO: 350132 - RNA, 19 nt, Artificial Sequence
  Description of Artificial Sequence: Synthetic oligonucleotide
  Antisense Strand to SEQ ID NO: 350131
auccacggucuauaccaca

SEQ ID NO: 350133 - RNA, 19 nt, Artificial Sequence
  Description of Artificial Sequence: Synthetic oligonucleotide
  Sense Strand Starting at position 398 of SEQ ID NO: 316047
gguauagaccguggauucu

SEQ ID NO: 350134 - RNA, 19 nt, Artificial Sequence
  Description of Artificial Sequence: Synthetic oligonucleotide
  Antisense Strand to SEQ ID NO: 350133
agaauccacggucuauacc

SEQ ID NO: 350135 - RNA, 19 nt, Artificial Sequence
  Description of Artificial Sequence: Synthetic oligonucleotide
  Sense Strand Starting at position 398 of SEQ ID NO: 316056
cguggauucuaucuuguuu

SEQ ID NO: 350136 - RNA, 19 nt, Artificial Sequence
  Description of Artificial Sequence: Synthetic oligonucleotide
  Antisense Strand to SEQ ID NO: 350135
aaacaagauagaauccacg

SEQ ID NO: 350137 - RNA, 19 nt, Artificial Sequence
  Description of Artificial Sequence: Synthetic oligonucleotide
  Sense Strand Starting at position 398 of SEQ ID NO: 316079
acgaaucuugugcgauucu

SEQ ID NO: 350138 - RNA, 19 nt, Artificial Sequence
  Description of Artificial Sequence: Synthetic oligonucleotide
  Antisense Strand to SEQ ID NO: 350137
agaaucgcacaagauucgu

SEQ ID NO: 350139 - RNA, 19 nt, Artificial Sequence
  Description of Artificial Sequence: Synthetic oligonucleotide
  Sense Strand Starting at position 398 of SEQ ID NO: 316086
uugugcgauucuuucuaca

SEQ ID NO: 350140 - RNA, 19 nt, Artificial Sequence
  Description of Artificial Sequence: Synthetic oligonucleotide
  Antisense Strand to SEQ ID NO: 350139
uguagaaagaaucgcacaa

SEQ ID NO: 350141 - RNA, 19 nt, Artificial Sequence
  Description of Artificial Sequence: Synthetic oligonucleotide
  Sense Strand Starting at position 398 of SEQ ID NO: 316088
gugcgauucuuucuacaga

SEQ ID NO: 350142 - RNA, 19 nt, Artificial Sequence
  Description of Artificial Sequence: Synthetic oligonucleotide
  Antisense Strand to SEQ ID NO: 350141
ucuguagaaagaaucgcac

SEQ ID NO: 350143 - RNA, 19 nt, Artificial Sequence
  Description of Artificial Sequence: Synthetic oligonucleotide
  Sense Strand Starting at position 398 of SEQ ID NO: 316561
uuucgacagugagaaguau

SEQ ID NO: 350144 - RNA, 19 nt, Artificial Sequence
  Description of Artificial Sequence: Synthetic oligonucleotide
  Antisense Strand to SEQ ID NO: 350143
auacuucucacugucgaaa

SEQ ID NO: 350145 - RNA, 19 nt, Artificial Sequence
  Description of Artificial Sequence: Synthetic oligonucleotide
  Sense Strand Starting at position 398 of SEQ ID NO: 316570
ugagaaguauuaucuuuag

SEQ ID NO: 350146 - RNA, 19 nt, Artificial Sequence
  Description of Artificial Sequence: Synthetic oligonucleotide
  Antisense Strand to SEQ ID NO: 350145
cuaaagauaauacuucuca

SEQ ID NO: 350147 - RNA, 19 nt, Artificial Sequence
  Description of Artificial Sequence: Synthetic oligonucleotide
  Sense Strand Starting at position 398 of SEQ ID NO: 316573
gaaguauuaucuuuagagg

SEQ ID NO: 350148 - RNA, 19 nt, Artificial Sequence
  Description of Artificial Sequence: Synthetic oligonucleotide
  Antisense Strand to SEQ ID NO: 350147
ccucuaaagauaauacuuc

SEQ ID NO: 350149 - RNA, 19 nt, Artificial Sequence
  Description of Artificial Sequence: Synthetic oligonucleotide
  Sense Strand Starting at position 398 of SEQ ID NO: 316574
aaguauuaucuuuagaggu

SEQ ID NO: 350150 - RNA, 19 nt, Artificial Sequence
  Description of Artificial Sequence: Synthetic oligonucleotide
  Antisense Strand to SEQ ID NO: 350149
accucuaaagauaauacuu

SEQ ID NO: 350151 - RNA, 19 nt, Artificial Sequence
  Description of Artificial Sequence: Synthetic oligonucleotide
  Sense Strand Starting at position 398 of SEQ ID NO: 317490
accucuuuaugagucucau

SEQ ID NO: 350152 - RNA, 19 nt, Artificial Sequence
  Description of Artificial Sequence: Synthetic oligonucleotide
  Antisense Strand to SEQ ID NO: 350151
augagacucauaaagaggu

SEQ ID NO: 350153 - RNA, 19 nt, Artificial Sequence
  Description of Artificial Sequence: Synthetic oligonucleotide
  Sense Strand Starting at position 398 of SEQ ID NO: 317496
uuaugagucucauuccuuu

SEQ ID NO: 350154 - RNA, 19 nt, Artificial Sequence
  Description of Artificial Sequence: Synthetic oligonucleotide
  Antisense Strand to SEQ ID NO: 350153
aaaggaaugagacucauaa

SEQ ID NO: 350155 - RNA, 19 nt, Artificial Sequence
  Description of Artificial Sequence: Synthetic oligonucleotide
  Sense Strand Starting at position 398 of SEQ ID NO: 317606
gcagguuucuucucgccca

SEQ ID NO: 350156 - RNA, 19 nt, Artificial Sequence
  Description of Artificial Sequence: Synthetic oligonucleotide
  Antisense Strand to SEQ ID NO: 350155
ugggcgagaagaaaccugc

SEQ ID NO: 350157 - RNA, 19 nt, Artificial Sequence
  Description of Artificial Sequence: Synthetic oligonucleotide
  Sense Strand Starting at position 398 of SEQ ID NO: 318554
cugagaucgccucacugua

SEQ ID NO: 350158 - RNA, 19 nt, Artificial Sequence
  Description of Artificial Sequence: Synthetic oligonucleotide
  Antisense Strand to SEQ ID NO: 350157
uacagugaggcgaucucag

SEQ ID NO: 350159 - RNA, 19 nt, Artificial Sequence
  Description of Artificial Sequence: Synthetic oligonucleotide
  Sense Strand Starting at position 398 of SEQ ID NO: 318644
cagggauucuucuuccuag

SEQ ID NO: 350160 - RNA, 19 nt, Artificial Sequence
  Description of Artificial Sequence: Synthetic oligonucleotide
  Antisense Strand to SEQ ID NO: 350159
cuaggaagaagaaucccug

SEQ ID NO: 350161 - RNA, 19 nt, Artificial Sequence
  Description of Artificial Sequence: Synthetic oligonucleotide
  Sense Strand Starting at position 398 of SEQ ID NO: 318676
gugcaauaauuuguguaau

SEQ ID NO: 350162 - RNA, 19 nt, Artificial Sequence
  Description of Artificial Sequence: Synthetic oligonucleotide
  Antisense Strand to SEQ ID NO: 350161
auuacacaaauuauugcac

SEQ ID NO: 350163 - RNA, 19 nt, Artificial Sequence
  Description of Artificial Sequence: Synthetic oligonucleotide
  Sense Strand Starting at position 398 of SEQ ID NO: 318696
uuugcuuaauguguaacuu

SEQ ID NO: 350164 - RNA, 19 nt, Artificial Sequence
  Description of Artificial Sequence: Synthetic oligonucleotide
  Antisense Strand to SEQ ID NO: 350163
aaguuacacauuaagcaaa

SEQ ID NO: 350165 - RNA, 19 nt, Artificial Sequence
  Description of Artificial Sequence: Synthetic oligonucleotide
  Sense Strand Starting at position 398 of SEQ ID NO: 318697
uugcuuaauguguaacuua

SEQ ID NO: 350166 - RNA, 19 nt, Artificial Sequence
  Description of Artificial Sequence: Synthetic oligonucleotide
  Antisense Strand to SEQ ID NO: 350165
uaaguuacacauuaagcaa

SEQ ID NO: 350167 - RNA, 19 nt, Artificial Sequence
  Description of Artificial Sequence: Synthetic oligonucleotide
  Sense Strand Starting at position 398 of SEQ ID NO: 318705
uguguaacuuaacaguaga

SEQ ID NO: 350168 - RNA, 19 nt, Artificial Sequence
  Description of Artificial Sequence: Synthetic oligonucleotide
  Antisense Strand to SEQ ID NO: 350167
ucuacuguuaaguuacaca

SEQ ID NO: 350169 - RNA, 19 nt, Artificial Sequence
  Description of Artificial Sequence: Synthetic oligonucleotide
  Sense Strand Starting at position 398 of SEQ ID NO: 318716
acaguagacugagauccau

SEQ ID NO: 350170 - RNA, 19 nt, Artificial Sequence
  Description of Artificial Sequence: Synthetic oligonucleotide
  Antisense Strand to SEQ ID NO: 350169
auggaucucagucuacugu

SEQ ID NO: 350171 - RNA, 19 nt, Artificial Sequence
  Description of Artificial Sequence: Synthetic oligonucleotide
  Sense Strand Starting at position 398 of SEQ ID NO: 318765
auucuuguaugucucacau

SEQ ID NO: 350172 - RNA, 19 nt, Artificial Sequence
  Description of Artificial Sequence: Synthetic oligonucleotide
  Antisense Strand to SEQ ID NO: 350171
augugagacauacaagaau

SEQ ID NO: 350173 - RNA, 19 nt, Artificial Sequence
  Description of Artificial Sequence: Synthetic oligonucleotide
  Sense Strand Starting at position 398 of SEQ ID NO: 318799
ccauguuagcucugguaaa

SEQ ID NO: 350174 - RNA, 19 nt, Artificial Sequence
  Description of Artificial Sequence: Synthetic oligonucleotide
  Antisense Strand to SEQ ID NO: 350173
uuuaccagagcuaacaugg

SEQ ID NO: 350175 - RNA, 19 nt, Artificial Sequence
  Description of Artificial Sequence: Synthetic oligonucleotide
  Sense Strand Starting at position 398 of SEQ ID NO: 318897
gacaguguugccuacagag

SEQ ID NO: 350176 - RNA, 19 nt, Artificial Sequence
  Description of Artificial Sequence: Synthetic oligonucleotide
  Antisense Strand to SEQ ID NO: 350175
cucuguaggcaacacuguc

SEQ ID NO: 350177 - RNA, 19 nt, Artificial Sequence
  Description of Artificial Sequence: Synthetic oligonucleotide
  Sense Strand Starting at position 398 of SEQ ID NO: 318899
caguguugccuacagagag

SEQ ID NO: 350178 - RNA, 19 nt, Artificial Sequence
  Description of Artificial Sequence: Synthetic oligonucleotide
  Antisense Strand to SEQ ID NO: 350177
cucucuguaggcaacacug

SEQ ID NO: 350179 - RNA, 19 nt, Artificial Sequence
  Description of Artificial Sequence: Synthetic oligonucleotide
  Sense Strand Starting at position 398 of SEQ ID NO: 318952
agugaauggucccugugga

SEQ ID NO: 350180 - RNA, 19 nt, Artificial Sequence
  Description of Artificial Sequence: Synthetic oligonucleotide
  Antisense Strand to SEQ ID NO: 350179
uccacagggaccauucacu

SEQ ID NO: 350181 - RNA, 19 nt, Artificial Sequence
  Description of Artificial Sequence: Synthetic oligonucleotide
  Sense Strand Starting at position 398 of SEQ ID NO: 318953
gugaauggucccuguggag

SEQ ID NO: 350182 - RNA, 19 nt, Artificial Sequence
  Description of Artificial Sequence: Synthetic oligonucleotide
  Antisense Strand to SEQ ID NO: 350181
cuccacagggaccauucac

SEQ ID NO: 350183 - RNA, 19 nt, Artificial Sequence
  Description of Artificial Sequence: Synthetic oligonucleotide
  Sense Strand Starting at position 398 of SEQ ID NO: 318974
uaggcccagucauagaaua

SEQ ID NO: 350184 - RNA, 19 nt, Artificial Sequence
  Description of Artificial Sequence: Synthetic oligonucleotide
  Antisense Strand to SEQ ID NO: 350183
uauucuaugacugggccua

SEQ ID NO: 350185 - RNA, 19 nt, Artificial Sequence
  Description of Artificial Sequence: Synthetic oligonucleotide
  Sense Strand Starting at position 398 of SEQ ID NO: 319194
auguguggaugcucugaga

SEQ ID NO: 350186 - RNA, 19 nt, Artificial Sequence
  Description of Artificial Sequence: Synthetic oligonucleotide
  Antisense Strand to SEQ ID NO: 350185
ucucagagcauccacacau

SEQ ID NO: 350187 - RNA, 19 nt, Artificial Sequence
  Description of Artificial Sequence: Synthetic oligonucleotide
  Sense Strand Starting at position 398 of SEQ ID NO: 319207
cugagaaggcaccauguuu

SEQ ID NO: 350188 - RNA, 19 nt, Artificial Sequence
  Description of Artificial Sequence: Synthetic oligonucleotide
  Antisense Strand to SEQ ID NO: 350187
aaacauggugccuucucag

SEQ ID NO: 350189 - RNA, 19 nt, Artificial Sequence
  Description of Artificial Sequence: Synthetic oligonucleotide
  Sense Strand Starting at position 399 of SEQ ID NO: 315723
aaaugaaacuugggagcaa

SEQ ID NO: 350190 - RNA, 19 nt, Artificial Sequence
  Description of Artificial Sequence: Synthetic oligonucleotide
  Antisense Strand to SEQ ID NO: 350189
uugcucccaaguuucauuu

SEQ ID NO: 350191 - RNA, 19 nt, Artificial Sequence
  Description of Artificial Sequence: Synthetic oligonucleotide
  Sense Strand Starting at position 399 of SEQ ID NO: 315738
gcaagaaauuaauccacug

SEQ ID NO: 350192 - RNA, 19 nt, Artificial Sequence
  Description of Artificial Sequence: Synthetic oligonucleotide
  Antisense Strand to SEQ ID NO: 350191
caguggauuaauuucuugc

SEQ ID NO: 350193 - RNA, 19 nt, Artificial Sequence
  Description of Artificial Sequence: Synthetic oligonucleotide
  Sense Strand Starting at position 399 of SEQ ID NO: 316088
gccuuaacuuagguuuauu

SEQ ID NO: 350194 - RNA, 19 nt, Artificial Sequence
  Description of Artificial Sequence: Synthetic oligonucleotide
  Antisense Strand to SEQ ID NO: 350193
aauaaaccuaaguuaaggc

SEQ ID NO: 350195 - RNA, 19 nt, Artificial Sequence
  Description of Artificial Sequence: Synthetic oligonucleotide
  Sense Strand Starting at position 399 of SEQ ID NO: 316118
cugaaaugguucguucaag

SEQ ID NO: 350196 - RNA, 19 nt, Artificial Sequence
  Description of Artificial Sequence: Synthetic oligonucleotide
  Antisense Strand to SEQ ID NO: 350195
cuugaacgaaccauuucag

SEQ ID NO: 350197 - RNA, 19 nt, Artificial Sequence
  Description of Artificial Sequence: Synthetic oligonucleotide
  Sense Strand Starting at position 399 of SEQ ID NO: 316119
ugaaaugguucguucaaga

SEQ ID NO: 350198 - RNA, 19 nt, Artificial Sequence
  Description of Artificial Sequence: Synthetic oligonucleotide
  Antisense Strand to SEQ ID NO: 350197
ucuugaacgaaccauuuca

SEQ ID NO: 350199 - RNA, 19 nt, Artificial Sequence
  Description of Artificial Sequence: Synthetic oligonucleotide
  Sense Strand Starting at position 399 of SEQ ID NO: 316165
agaugauaguaguuacuaa

SEQ ID NO: 350200 - RNA, 19 nt, Artificial Sequence
  Description of Artificial Sequence: Synthetic oligonucleotide
  Antisense Strand to SEQ ID NO: 350199
uuaguaacuacuaucaucu

SEQ ID NO: 350201 - RNA, 19 nt, Artificial Sequence
  Description of Artificial Sequence: Synthetic oligonucleotide
  Sense Strand Starting at position 399 of SEQ ID NO: 316169
gauaguaguuacuaagaug

SEQ ID NO: 350202 - RNA, 19 nt, Artificial Sequence
  Description of Artificial Sequence: Synthetic oligonucleotide
  Antisense Strand to SEQ ID NO: 350201
caucuuaguaacuacuauc

SEQ ID NO: 350203 - RNA, 19 nt, Artificial Sequence
  Description of Artificial Sequence: Synthetic oligonucleotide
  Sense Strand Starting at position 399 of SEQ ID NO: 316178
uacuaagaugcucaugguu

SEQ ID NO: 350204 - RNA, 19 nt, Artificial Sequence
  Description of Artificial Sequence: Synthetic oligonucleotide
  Antisense Strand to SEQ ID NO: 350203
aaccaugagcaucuuagua

SEQ ID NO: 350205 - RNA, 19 nt, Artificial Sequence
  Description of Artificial Sequence: Synthetic oligonucleotide
  Sense Strand Starting at position 399 of SEQ ID NO: 316330
cgagccaaguauucccaaa

SEQ ID NO: 350206 - RNA, 19 nt, Artificial Sequence
  Description of Artificial Sequence: Synthetic oligonucleotide
  Antisense Strand to SEQ ID NO: 350205
uuugggaauacuuggcucg

SEQ ID NO: 350207 - RNA, 19 nt, Artificial Sequence
  Description of Artificial Sequence: Synthetic oligonucleotide
  Sense Strand Starting at position 399 of SEQ ID NO: 316332
agccaaguauucccaaaug

SEQ ID NO: 350208 - RNA, 19 nt, Artificial Sequence
  Description of Artificial Sequence: Synthetic oligonucleotide
  Antisense Strand to SEQ ID NO: 350207
cauuugggaauacuuggcu

SEQ ID NO: 350209 - RNA, 19 nt, Artificial Sequence
  Description of Artificial Sequence: Synthetic oligonucleotide
  Sense Strand Starting at position 399 of SEQ ID NO: 316351
cuacuuacuggagguacaa

SEQ ID NO: 350210 - RNA, 19 nt, Artificial Sequence
  Description of Artificial Sequence: Synthetic oligonucleotide
  Antisense Strand to SEQ ID NO: 350209
uuguaccuccaguaaguag

SEQ ID NO: 350211 - RNA, 19 nt, Artificial Sequence
  Description of Artificial Sequence: Synthetic oligonucleotide
  Sense Strand Starting at position 399 of SEQ ID NO: 316414
gaagccuugugguauagac

SEQ ID NO: 350212 - RNA, 19 nt, Artificial Sequence
  Description of Artificial Sequence: Synthetic oligonucleotide
  Antisense Strand to SEQ ID NO: 350211
gucuauaccacaaggcuuc

SEQ ID NO: 350213 - RNA, 19 nt, Artificial Sequence
  Description of Artificial Sequence: Synthetic oligonucleotide
  Sense Strand Starting at position 399 of SEQ ID NO: 316421
ugugguauagaccguggau

SEQ ID NO: 350214 - RNA, 19 nt, Artificial Sequence
  Description of Artificial Sequence: Synthetic oligonucleotide
  Antisense Strand to SEQ ID NO: 350213
auccacggucuauaccaca

SEQ ID NO: 350215 - RNA, 19 nt, Artificial Sequence
  Description of Artificial Sequence: Synthetic oligonucleotide
  Sense Strand Starting at position 399 of SEQ ID NO: 316424
gguauagaccguggauucu

SEQ ID NO: 350216 - RNA, 19 nt, Artificial Sequence
  Description of Artificial Sequence: Synthetic oligonucleotide
  Antisense Strand to SEQ ID NO: 350215
agaauccacggucuauacc

SEQ ID NO: 350217 - RNA, 19 nt, Artificial Sequence
  Description of Artificial Sequence: Synthetic oligonucleotide
  Sense Strand Starting at position 399 of SEQ ID NO: 316433
cguggauucuaucuuguuu

SEQ ID NO: 350218 - RNA, 19 nt, Artificial Sequence
  Description of Artificial Sequence: Synthetic oligonucleotide
  Antisense Strand to SEQ ID NO: 350217
aaacaagauagaauccacg

SEQ ID NO: 350219 - RNA, 19 nt, Artificial Sequence
  Description of Artificial Sequence: Synthetic oligonucleotide
  Sense Strand Starting at position 399 of SEQ ID NO: 316456
acgaaucuugugcgauucu

SEQ ID NO: 350220 - RNA, 19 nt, Artificial Sequence
  Description of Artificial Sequence: Synthetic oligonucleotide
  Antisense Strand to SEQ ID NO: 350219
agaaucgcacaagauucgu

SEQ ID NO: 350221 - RNA, 19 nt, Artificial Sequence
  Description of Artificial Sequence: Synthetic oligonucleotide
  Sense Strand Starting at position 399 of SEQ ID NO: 316463
uugugcgauucuuucuaca

SEQ ID NO: 350222 - RNA, 19 nt, Artificial Sequence
  Description of Artificial Sequence: Synthetic oligonucleotide
  Antisense Strand to SEQ ID NO: 350221
uguagaaagaaucgcacaa

SEQ ID NO: 350223 - RNA, 19 nt, Artificial Sequence
  Description of Artificial Sequence: Synthetic oligonucleotide
  Sense Strand Starting at position 399 of SEQ ID NO: 316465
gugcgauucuuucuacaga

SEQ ID NO: 350224 - RNA, 19 nt, Artificial Sequence
  Description of Artificial Sequence: Synthetic oligonucleotide
  Antisense Strand to SEQ ID NO: 350223
ucuguagaaagaaucgcac

SEQ ID NO: 350225 - RNA, 19 nt, Artificial Sequence
  Description of Artificial Sequence: Synthetic oligonucleotide
  Sense Strand Starting at position 399 of SEQ ID NO: 316466
ugcgauucuuucuacagaa

SEQ ID NO: 350226 - RNA, 19 nt, Artificial Sequence
  Description of Artificial Sequence: Synthetic oligonucleotide
  Antisense Strand to SEQ ID NO: 350225
uucuguagaaagaaucgca

SEQ ID NO: 350227 - RNA, 19 nt, Artificial Sequence
  Description of Artificial Sequence: Synthetic oligonucleotide
  Sense Strand Starting at position 399 of SEQ ID NO: 316819
ccgcucauguuacaaggaa

SEQ ID NO: 350228 - RNA, 19 nt, Artificial Sequence
  Description of Artificial Sequence: Synthetic oligonucleotide
  Antisense Strand to SEQ ID NO: 350227
uuccuuguaacaugagcgg

SEQ ID NO: 350229 - RNA, 19 nt, Artificial Sequence
  Description of Artificial Sequence: Synthetic oligonucleotide
  Sense Strand Starting at position 399 of SEQ ID NO: 316938
uuucgacagugagaaguau

SEQ ID NO: 350230 - RNA, 19 nt, Artificial Sequence
  Description of Artificial Sequence: Synthetic oligonucleotide
  Antisense Strand to SEQ ID NO: 350229
auacuucucacugucgaaa

SEQ ID NO: 350231 - RNA, 19 nt, Artificial Sequence
  Description of Artificial Sequence: Synthetic oligonucleotide
  Sense Strand Starting at position 399 of SEQ ID NO: 316947
ugagaaguauuaucuuuag

SEQ ID NO: 350232 - RNA, 19 nt, Artificial Sequence
  Description of Artificial Sequence: Synthetic oligonucleotide
  Antisense Strand to SEQ ID NO: 350231
cuaaagauaauacuucuca

SEQ ID NO: 350233 - RNA, 19 nt, Artificial Sequence
  Description of Artificial Sequence: Synthetic oligonucleotide
  Sense Strand Starting at position 399 of SEQ ID NO: 316950
gaaguauuaucuuuagagg

SEQ ID NO: 350234 - RNA, 19 nt, Artificial Sequence
  Description of Artificial Sequence: Synthetic oligonucleotide
  Antisense Strand to SEQ ID NO: 350233
ccucuaaagauaauacuuc

SEQ ID NO: 350235 - RNA, 19 nt, Artificial Sequence
  Description of Artificial Sequence: Synthetic oligonucleotide
  Sense Strand Starting at position 399 of SEQ ID NO: 316951
aaguauuaucuuuagaggu

SEQ ID NO: 350236 - RNA, 19 nt, Artificial Sequence
  Description of Artificial Sequence: Synthetic oligonucleotide
  Antisense Strand to SEQ ID NO: 350235
accucuaaagauaauacuu

SEQ ID NO: 350237 - RNA, 19 nt, Artificial Sequence
  Description of Artificial Sequence: Synthetic oligonucleotide
  Sense Strand Starting at position 399 of SEQ ID NO: 317867
accucuuuaugagucucau

SEQ ID NO: 350238 - RNA, 19 nt, Artificial Sequence
  Description of Artificial Sequence: Synthetic oligonucleotide
  Antisense Strand to SEQ ID NO: 350237
augagacucauaaagaggu

SEQ ID NO: 350239 - RNA, 19 nt, Artificial Sequence
  Description of Artificial Sequence: Synthetic oligonucleotide
  Sense Strand Starting at position 399 of SEQ ID NO: 317873
uuaugagucucauuccuuu

SEQ ID NO: 350240 - RNA, 19 nt, Artificial Sequence
  Description of Artificial Sequence: Synthetic oligonucleotide
  Antisense Strand to SEQ ID NO: 350239
aaaggaaugagacucauaa

SEQ ID NO: 350241 - RNA, 19 nt, Artificial Sequence
  Description of Artificial Sequence: Synthetic oligonucleotide
  Sense Strand Starting at position 399 of SEQ ID NO: 317983
gcagguuucuucucgccca

SEQ ID NO: 350242 - RNA, 19 nt, Artificial Sequence
  Description of Artificial Sequence: Synthetic oligonucleotide
  Antisense Strand to SEQ ID NO: 350241
ugggcgagaagaaaccugc

SEQ ID NO: 350243 - RNA, 19 nt, Artificial Sequence
  Description of Artificial Sequence: Synthetic oligonucleotide
  Sense Strand Starting at position 399 of SEQ ID NO: 318044
ccucuucccuauugugaga

SEQ ID NO: 350244 - RNA, 19 nt, Artificial Sequence
  Description of Artificial Sequence: Synthetic oligonucleotide
  Antisense Strand to SEQ ID NO: 350243
ucucacaauagggaagagg

SEQ ID NO: 350245 - RNA, 19 nt, Artificial Sequence
  Description of Artificial Sequence: Synthetic oligonucleotide
  Sense Strand Starting at position 399 of SEQ ID NO: 318047
cuucccuauugugagaguu

SEQ ID NO: 350246 - RNA, 19 nt, Artificial Sequence
  Description of Artificial Sequence: Synthetic oligonucleotide
  Antisense Strand to SEQ ID NO: 350245
aacucucacaauagggaag

SEQ ID NO: 350247 - RNA, 19 nt, Artificial Sequence
  Description of Artificial Sequence: Synthetic oligonucleotide
  Sense Strand Starting at position 399 of SEQ ID NO: 318049
ucccuauugugagaguucu

SEQ ID NO: 350248 - RNA, 19 nt, Artificial Sequence
  Description of Artificial Sequence: Synthetic oligonucleotide
  Antisense Strand to SEQ ID NO: 350247
agaacucucacaauaggga

SEQ ID NO: 350249 - RNA, 19 nt, Artificial Sequence
  Description of Artificial Sequence: Synthetic oligonucleotide
  Sense Strand Starting at position 399 of SEQ ID NO: 318102
ccauaagacuugcagcauu

SEQ ID NO: 350250 - RNA, 19 nt, Artificial Sequence
  Description of Artificial Sequence: Synthetic oligonucleotide
  Antisense Strand to SEQ ID NO: 350249
aaugcugcaagucuuaugg

SEQ ID NO: 350251 - RNA, 19 nt, Artificial Sequence
  Description of Artificial Sequence: Synthetic oligonucleotide
  Sense Strand Starting at position 399 of SEQ ID NO: 318931
cugagaucgccucacugua

SEQ ID NO: 350252 - RNA, 19 nt, Artificial Sequence
  Description of Artificial Sequence: Synthetic oligonucleotide
  Antisense Strand to SEQ ID NO: 350251
uacagugaggcgaucucag

SEQ ID NO: 350253 - RNA, 19 nt, Artificial Sequence
  Description of Artificial Sequence: Synthetic oligonucleotide
  Sense Strand Starting at position 399 of SEQ ID NO: 319021
cagggauucuucuuccuag

SEQ ID NO: 350254 - RNA, 19 nt, Artificial Sequence
  Description of Artificial Sequence: Synthetic oligonucleotide
  Antisense Strand to SEQ ID NO: 350253
cuaggaagaagaaucccug

SEQ ID NO: 350255 - RNA, 19 nt, Artificial Sequence
  Description of Artificial Sequence: Synthetic oligonucleotide
  Sense Strand Starting at position 399 of SEQ ID NO: 319053
gugcaauaauuuguguaau

SEQ ID NO: 350256 - RNA, 19 nt, Artificial Sequence
  Description of Artificial Sequence: Synthetic oligonucleotide
  Antisense Strand to SEQ ID NO: 350255
auuacacaaauuauugcac

SEQ ID NO: 350257 - RNA, 19 nt, Artificial Sequence
  Description of Artificial Sequence: Synthetic oligonucleotide
  Sense Strand Starting at position 399 of SEQ ID NO: 319073
uuugcuuaauguguaacuu

SEQ ID NO: 350258 - RNA, 19 nt, Artificial Sequence
  Description of Artificial Sequence: Synthetic oligonucleotide
  Antisense Strand to SEQ ID NO: 350257
aaguuacacauuaagcaaa

SEQ ID NO: 350259 - RNA, 19 nt, Artificial Sequence
  Description of Artificial Sequence: Synthetic oligonucleotide
  Sense Strand Starting at position 399 of SEQ ID NO: 319074
uugcuuaauguguaacuua

SEQ ID NO: 350260 - RNA, 19 nt, Artificial Sequence
  Description of Artificial Sequence: Synthetic oligonucleotide
  Antisense Strand to SEQ ID NO: 350259
uaaguuacacauuaagcaa

SEQ ID NO: 350261 - RNA, 19 nt, Artificial Sequence
  Description of Artificial Sequence: Synthetic oligonucleotide
  Sense Strand Starting at position 399 of SEQ ID NO: 319082
uguguaacuuaacaguaga

SEQ ID NO: 350262 - RNA, 19 nt, Artificial Sequence
  Description of Artificial Sequence: Synthetic oligonucleotide
  Antisense Strand to SEQ ID NO: 350261
ucuacuguuaaguuacaca

SEQ ID NO: 350263 - RNA, 19 nt, Artificial Sequence
  Description of Artificial Sequence: Synthetic oligonucleotide
  Sense Strand Starting at position 399 of SEQ ID NO: 319093
acaguagacugagauccau

SEQ ID NO: 350264 - RNA, 19 nt, Artificial Sequence
  Description of Artificial Sequence: Synthetic oligonucleotide
  Antisense Strand to SEQ ID NO: 350263
auggaucucagucuacugu

SEQ ID NO: 350265 - RNA, 19 nt, Artificial Sequence
  Description of Artificial Sequence: Synthetic oligonucleotide
  Sense Strand Starting at position 399 of SEQ ID NO: 319142
auucuuguaugucucacau

SEQ ID NO: 350266 - RNA, 19 nt, Artificial Sequence
  Description of Artificial Sequence: Synthetic oligonucleotide
  Antisense Strand to SEQ ID NO: 350265
augugagacauacaagaau

SEQ ID NO: 350267 - RNA, 19 nt, Artificial Sequence
  Description of Artificial Sequence: Synthetic oligonucleotide
  Sense Strand Starting at position 399 of SEQ ID NO: 319176
ccauguuagcucugguaaa

SEQ ID NO: 350268 - RNA, 19 nt, Artificial Sequence
  Description of Artificial Sequence: Synthetic oligonucleotide
  Antisense Strand to SEQ ID NO: 350267
uuuaccagagcuaacaugg

SEQ ID NO: 350269 - RNA, 19 nt, Artificial Sequence
  Description of Artificial Sequence: Synthetic oligonucleotide
  Sense Strand Starting at position 400 of SEQ ID NO: 315312
cuggucucuguuuaggaga

SEQ ID NO: 350270 - RNA, 19 nt, Artificial Sequence
  Description of Artificial Sequence: Synthetic oligonucleotide
  Antisense Strand to SEQ ID NO: 350269
ucuccuaaacagagaccag

SEQ ID NO: 350271 - RNA, 19 nt, Artificial Sequence
  Description of Artificial Sequence: Synthetic oligonucleotide
  Sense Strand Starting at position 400 of SEQ ID NO: 315564
gaaagugccuauuuguauu

SEQ ID NO: 350272 - RNA, 19 nt, Artificial Sequence
  Description of Artificial Sequence: Synthetic oligonucleotide
  Antisense Strand to SEQ ID NO: 350271
aauacaaauaggcacuuuc

SEQ ID NO: 350273 - RNA, 19 nt, Artificial Sequence
  Description of Artificial Sequence: Synthetic oligonucleotide
  Sense Strand Starting at position 400 of SEQ ID NO: 315705
ggcugacuuccugaacauu

SEQ ID NO: 350274 - RNA, 19 nt, Artificial Sequence
  Description of Artificial Sequence: Synthetic oligonucleotide
  Antisense Strand to SEQ ID NO: 350273
aauguucaggaagucagcc

SEQ ID NO: 350275 - RNA, 19 nt, Artificial Sequence
  Description of Artificial Sequence: Synthetic oligonucleotide
  Sense Strand Starting at position 400 of SEQ ID NO: 315759
ggagaauguuggguggaca

SEQ ID NO: 350276 - RNA, 19 nt, Artificial Sequence
  Description of Artificial Sequence: Synthetic oligonucleotide
  Antisense Strand to SEQ ID NO: 350275
uguccacccaacauucucc

SEQ ID NO: 350277 - RNA, 19 nt, Artificial Sequence
  Description of Artificial Sequence: Synthetic oligonucleotide
  Sense Strand Starting at position 400 of SEQ ID NO: 315760
gagaauguuggguggacau

SEQ ID NO: 350278 - RNA, 19 nt, Artificial Sequence
  Description of Artificial Sequence: Synthetic oligonucleotide
  Antisense Strand to SEQ ID NO: 350277
auguccacccaacauucuc

SEQ ID NO: 350279 - RNA, 19 nt, Artificial Sequence
  Description of Artificial Sequence: Synthetic oligonucleotide
  Sense Strand Starting at position 400 of SEQ ID NO: 315824
ggaggauacuuagcaaggu

SEQ ID NO: 350280 - RNA, 19 nt, Artificial Sequence
  Description of Artificial Sequence: Synthetic oligonucleotide
  Antisense Strand to SEQ ID NO: 350279
accuugcuaaguauccucc

SEQ ID NO: 350281 - RNA, 19 nt, Artificial Sequence
  Description of Artificial Sequence: Synthetic oligonucleotide
  Sense Strand Starting at position 400 of SEQ ID NO: 316380
gcuugaaucugagccaaac

SEQ ID NO: 350282 - RNA, 19 nt, Artificial Sequence
  Description of Artificial Sequence: Synthetic oligonucleotide
  Antisense Strand to SEQ ID NO: 350281
guuuggcucagauucaagc

SEQ ID NO: 350283 - RNA, 19 nt, Artificial Sequence
  Description of Artificial Sequence: Synthetic oligonucleotide
  Sense Strand Starting at position 400 of SEQ ID NO: 316455
ugugauaauugacuuaggu

SEQ ID NO: 350284 - RNA, 19 nt, Artificial Sequence
  Description of Artificial Sequence: Synthetic oligonucleotide
  Antisense Strand to SEQ ID NO: 350283
accuaagucaauuaucaca

SEQ ID NO: 350285 - RNA, 19 nt, Artificial Sequence
  Description of Artificial Sequence: Synthetic oligonucleotide
  Sense Strand Starting at position 400 of SEQ ID NO: 316784
caggucgaguccuugggaa

SEQ ID NO: 350286 - RNA, 19 nt, Artificial Sequence
  Description of Artificial Sequence: Synthetic oligonucleotide
  Antisense Strand to SEQ ID NO: 350285
uucccaaggacucgaccug

SEQ ID NO: 350287 - RNA, 19 nt, Artificial Sequence
  Description of Artificial Sequence: Synthetic oligonucleotide
  Sense Strand Starting at position 400 of SEQ ID NO: 316972
aaggaacuguuacuauagu

SEQ ID NO: 350288 - RNA, 19 nt, Artificial Sequence
  Description of Artificial Sequence: Synthetic oligonucleotide
  Antisense Strand to SEQ ID NO: 350287
acuauaguaacaguuccuu

SEQ ID NO: 350289 - RNA, 19 nt, Artificial Sequence
  Description of Artificial Sequence: Synthetic oligonucleotide
  Sense Strand Starting at position 400 of SEQ ID NO: 317052
acgcuugagaggcacaaau

SEQ ID NO: 350290 - RNA, 19 nt, Artificial Sequence
  Description of Artificial Sequence: Synthetic oligonucleotide
  Antisense Strand to SEQ ID NO: 350289
auuugugccucucaagcgu

SEQ ID NO: 350291 - RNA, 19 nt, Artificial Sequence
  Description of Artificial Sequence: Synthetic oligonucleotide
  Sense Strand Starting at position 400 of SEQ ID NO: 317236
ugguguggauucuucagga

SEQ ID NO: 350292 - RNA, 19 nt, Artificial Sequence
  Description of Artificial Sequence: Synthetic oligonucleotide
  Antisense Strand to SEQ ID NO: 350291
uccugaagaauccacacca

SEQ ID NO: 350293 - RNA, 19 nt, Artificial Sequence
  Description of Artificial Sequence: Synthetic oligonucleotide
  Sense Strand Starting at position 400 of SEQ ID NO: 317319
aguucuuaauuauccacga

SEQ ID NO: 350294 - RNA, 19 nt, Artificial Sequence
  Description of Artificial Sequence: Synthetic oligonucleotide
  Antisense Strand to SEQ ID NO: 350293
ucguggauaauuaagaacu

SEQ ID NO: 350295 - RNA, 19 nt, Artificial Sequence
  Description of Artificial Sequence: Synthetic oligonucleotide
  Sense Strand Starting at position 400 of SEQ ID NO: 317320
guucuuaauuauccacgaa

SEQ ID NO: 350296 - RNA, 19 nt, Artificial Sequence
  Description of Artificial Sequence: Synthetic oligonucleotide
  Antisense Strand to SEQ ID NO: 350295
uucguggauaauuaagaac

SEQ ID NO: 350297 - RNA, 19 nt, Artificial Sequence
  Description of Artificial Sequence: Synthetic oligonucleotide
  Sense Strand Starting at position 400 of SEQ ID NO: 317342
gucagaaacuccguacaca

SEQ ID NO: 350298 - RNA, 19 nt, Artificial Sequence
  Description of Artificial Sequence: Synthetic oligonucleotide
  Antisense Strand to SEQ ID NO: 350297
uguguacggaguuucugac

SEQ ID NO: 350299 - RNA, 19 nt, Artificial Sequence
  Description of Artificial Sequence: Synthetic oligonucleotide
  Sense Strand Starting at position 400 of SEQ ID NO: 317367
uccugauaccuugaauguc

SEQ ID NO: 350300 - RNA, 19 nt, Artificial Sequence
  Description of Artificial Sequence: Synthetic oligonucleotide
  Antisense Strand to SEQ ID NO: 350299
gacauucaagguaucagga

SEQ ID NO: 350301 - RNA, 19 nt, Artificial Sequence
  Description of Artificial Sequence: Synthetic oligonucleotide
  Sense Strand Starting at position 400 of SEQ ID NO: 317370
ugauaccuugaaugucauu

SEQ ID NO: 350302 - RNA, 19 nt, Artificial Sequence
  Description of Artificial Sequence: Synthetic oligonucleotide
  Antisense Strand to SEQ ID NO: 350301
aaugacauucaagguauca

SEQ ID NO: 350303 - RNA, 19 nt, Artificial Sequence
  Description of Artificial Sequence: Synthetic oligonucleotide
  Sense Strand Starting at position 400 of SEQ ID NO: 317375
ccuugaaugucauuggaac

SEQ ID NO: 350304 - RNA, 19 nt, Artificial Sequence
  Description of Artificial Sequence: Synthetic oligonucleotide
  Antisense Strand to SEQ ID NO: 350303
guuccaaugacauucaagg

SEQ ID NO: 350305 - RNA, 19 nt, Artificial Sequence
  Description of Artificial Sequence: Synthetic oligonucleotide
  Sense Strand Starting at position 400 of SEQ ID NO: 317376
cuugaaugucauuggaacu

SEQ ID NO: 350306 - RNA, 19 nt, Artificial Sequence
  Description of Artificial Sequence: Synthetic oligonucleotide
  Antisense Strand to SEQ ID NO: 350305
aguuccaaugacauucaag

SEQ ID NO: 350307 - RNA, 19 nt, Artificial Sequence
  Description of Artificial Sequence: Synthetic oligonucleotide
  Sense Strand Starting at position 400 of SEQ ID NO: 317532
uugucaaauguggagcaua

SEQ ID NO: 350308 - RNA, 19 nt, Artificial Sequence
  Description of Artificial Sequence: Synthetic oligonucleotide
  Antisense Strand to SEQ ID NO: 350307
uaugcuccacauuugacaa

SEQ ID NO: 350309 - RNA, 19 nt, Artificial Sequence
  Description of Artificial Sequence: Synthetic oligonucleotide
  Sense Strand Starting at position 400 of SEQ ID NO: 317599
auagucaaagcucagcaua

SEQ ID NO: 350310 - RNA, 19 nt, Artificial Sequence
  Description of Artificial Sequence: Synthetic oligonucleotide
  Antisense Strand to SEQ ID NO: 350309
uaugcugagcuuugacuau

SEQ ID NO: 350311 - RNA, 19 nt, Artificial Sequence
  Description of Artificial Sequence: Synthetic oligonucleotide
  Sense Strand Starting at position 400 of SEQ ID NO: 317642
uggacucuacgugaucuga

SEQ ID NO: 350312 - RNA, 19 nt, Artificial Sequence
  Description of Artificial Sequence: Synthetic oligonucleotide
  Antisense Strand to SEQ ID NO: 350311
ucagaucacguagagucca

SEQ ID NO: 350313 - RNA, 19 nt, Artificial Sequence
  Description of Artificial Sequence: Synthetic oligonucleotide
  Sense Strand Starting at position 400 of SEQ ID NO: 317697
auauguguuccauaaguag

SEQ ID NO: 350314 - RNA, 19 nt, Artificial Sequence
  Description of Artificial Sequence: Synthetic oligonucleotide
  Antisense Strand to SEQ ID NO: 350313
cuacuuauggaacacauau

SEQ ID NO: 350315 - RNA, 19 nt, Artificial Sequence
  Description of Artificial Sequence: Synthetic oligonucleotide
  Sense Strand Starting at position 400 of SEQ ID NO: 317709
uaaguaguggcucaaugaa

SEQ ID NO: 350316 - RNA, 19 nt, Artificial Sequence
  Description of Artificial Sequence: Synthetic oligonucleotide
  Antisense Strand to SEQ ID NO: 350315
uucauugagccacuacuua

SEQ ID NO: 350317 - RNA, 19 nt, Artificial Sequence
  Description of Artificial Sequence: Synthetic oligonucleotide
  Sense Strand Starting at position 400 of SEQ ID NO: 317716
uggcucaaugaaugaacau

SEQ ID NO: 350318 - RNA, 19 nt, Artificial Sequence
  Description of Artificial Sequence: Synthetic oligonucleotide
  Antisense Strand to SEQ ID NO: 350317
auguucauucauugagcca

SEQ ID NO: 350319 - RNA, 19 nt, Artificial Sequence
  Description of Artificial Sequence: Synthetic oligonucleotide
  Sense Strand Starting at position 400 of SEQ ID NO: 318107
cagccuggaugcuuauaga

SEQ ID NO: 350320 - RNA, 19 nt, Artificial Sequence
  Description of Artificial Sequence: Synthetic oligonucleotide
  Antisense Strand to SEQ ID NO: 350319
ucuauaagcauccaggcug

SEQ ID NO: 350321 - RNA, 19 nt, Artificial Sequence
  Description of Artificial Sequence: Synthetic oligonucleotide
  Sense Strand Starting at position 400 of SEQ ID NO: 318227
gggucuaccaguuagacca

SEQ ID NO: 350322 - RNA, 19 nt, Artificial Sequence
  Description of Artificial Sequence: Synthetic oligonucleotide
  Antisense Strand to SEQ ID NO: 350321
uggucuaacugguagaccc

SEQ ID NO: 350323 - RNA, 19 nt, Artificial Sequence
  Description of Artificial Sequence: Synthetic oligonucleotide
  Sense Strand Starting at position 400 of SEQ ID NO: 318440
guaccaugugaaugacaca

SEQ ID NO: 350324 - RNA, 19 nt, Artificial Sequence
  Description of Artificial Sequence: Synthetic oligonucleotide
  Antisense Strand to SEQ ID NO: 350323
ugugucauucacaugguac

SEQ ID NO: 350325 - RNA, 19 nt, Artificial Sequence
  Description of Artificial Sequence: Synthetic oligonucleotide
  Sense Strand Starting at position 400 of SEQ ID NO: 318447
gugaaugacacagguaaua

SEQ ID NO: 350326 - RNA, 19 nt, Artificial Sequence
  Description of Artificial Sequence: Synthetic oligonucleotide
  Antisense Strand to SEQ ID NO: 350325
uauuaccugugucauucac

SEQ ID NO: 350327 - RNA, 19 nt, Artificial Sequence
  Description of Artificial Sequence: Synthetic oligonucleotide
  Sense Strand Starting at position 400 of SEQ ID NO: 318541
ugaggaaugccgugaugaa

SEQ ID NO: 350328 - RNA, 19 nt, Artificial Sequence
  Description of Artificial Sequence: Synthetic oligonucleotide
  Antisense Strand to SEQ ID NO: 350327
uucaucacggcauuccuca

SEQ ID NO: 350329 - RNA, 19 nt, Artificial Sequence
  Description of Artificial Sequence: Synthetic oligonucleotide
  Sense Strand Starting at position 400 of SEQ ID NO: 318542
gaggaaugccgugaugaac

SEQ ID NO: 350330 - RNA, 19 nt, Artificial Sequence
  Description of Artificial Sequence: Synthetic oligonucleotide
  Antisense Strand to SEQ ID NO: 350329
guucaucacggcauuccuc

SEQ ID NO: 350331 - RNA, 19 nt, Artificial Sequence
  Description of Artificial Sequence: Synthetic oligonucleotide
  Sense Strand Starting at position 400 of SEQ ID NO: 318602
gcagaaucacaaggaguca

SEQ ID NO: 350332 - RNA, 19 nt, Artificial Sequence
  Description of Artificial Sequence: Synthetic oligonucleotide
  Antisense Strand to SEQ ID NO: 350331
ugacuccuugugauucugc

SEQ ID NO: 350333 - RNA, 19 nt, Artificial Sequence
  Description of Artificial Sequence: Synthetic oligonucleotide
  Sense Strand Starting at position 400 of SEQ ID NO: 318624
gugugaagucuguacacau

SEQ ID NO: 350334 - RNA, 19 nt, Artificial Sequence
  Description of Artificial Sequence: Synthetic oligonucleotide
  Antisense Strand to SEQ ID NO: 350333
auguguacagacuucacac

SEQ ID NO: 350335 - RNA, 19 nt, Artificial Sequence
  Description of Artificial Sequence: Synthetic oligonucleotide
  Sense Strand Starting at position 400 of SEQ ID NO: 318839
gguccuaaauucuugggua

SEQ ID NO: 350336 - RNA, 19 nt, Artificial Sequence
  Description of Artificial Sequence: Synthetic oligonucleotide
  Antisense Strand to SEQ ID NO: 350335
uacccaagaauuuaggacc

SEQ ID NO: 350337 - RNA, 19 nt, Artificial Sequence
  Description of Artificial Sequence: Synthetic oligonucleotide
  Sense Strand Starting at position 400 of SEQ ID NO: 318841
uccuaaauucuuggguaua

SEQ ID NO: 350338 - RNA, 19 nt, Artificial Sequence
  Description of Artificial Sequence: Synthetic oligonucleotide
  Antisense Strand to SEQ ID NO: 350337
uauacccaagaauuuagga

SEQ ID NO: 350339 - RNA, 19 nt, Artificial Sequence
  Description of Artificial Sequence: Synthetic oligonucleotide
  Sense Strand Starting at position 400 of SEQ ID NO: 318843
cuaaauucuuggguauaaa

SEQ ID NO: 350340 - RNA, 19 nt, Artificial Sequence
  Description of Artificial Sequence: Synthetic oligonucleotide
  Antisense Strand to SEQ ID NO: 350339
uuuauacccaagaauuuag

SEQ ID NO: 350341 - RNA, 19 nt, Artificial Sequence
  Description of Artificial Sequence: Synthetic oligonucleotide
  Sense Strand Starting at position 400 of SEQ ID NO: 318979
ccaaacucuccugguagaa

SEQ ID NO: 350342 - RNA, 19 nt, Artificial Sequence
  Description of Artificial Sequence: Synthetic oligonucleotide
  Antisense Strand to SEQ ID NO: 350341
uucuaccaggagaguuugg

SEQ ID NO: 350343 - RNA, 19 nt, Artificial Sequence
  Description of Artificial Sequence: Synthetic oligonucleotide
  Sense Strand Starting at position 400 of SEQ ID NO: 319002
acagcuagauucuugucaa

SEQ ID NO: 350344 - RNA, 19 nt, Artificial Sequence
  Description of Artificial Sequence: Synthetic oligonucleotide
  Antisense Strand to SEQ ID NO: 350343
uugacaagaaucuagcugu

SEQ ID NO: 350345 - RNA, 19 nt, Artificial Sequence
  Description of Artificial Sequence: Synthetic oligonucleotide
  Sense Strand Starting at position 400 of SEQ ID NO: 319056
ccuccugcucugcaaagaa

SEQ ID NO: 350346 - RNA, 19 nt, Artificial Sequence
  Description of Artificial Sequence: Synthetic oligonucleotide
  Antisense Strand to SEQ ID NO: 350345
uucuuugcagagcaggagg

SEQ ID NO: 350347 - RNA, 19 nt, Artificial Sequence
  Description of Artificial Sequence: Synthetic oligonucleotide
  Sense Strand Starting at position 400 of SEQ ID NO: 319130
cuucuaacaguuggagagu

SEQ ID NO: 350348 - RNA, 19 nt, Artificial Sequence
  Description of Artificial Sequence: Synthetic oligonucleotide
  Antisense Strand to SEQ ID NO: 350347
acucuccaacuguuagaag

SEQ ID NO: 350349 - RNA, 19 nt, Artificial Sequence
  Description of Artificial Sequence: Synthetic oligonucleotide
  Sense Strand Starting at position 401 of SEQ ID NO: 315424
cggagcugggauuggaaau

SEQ ID NO: 350350 - RNA, 19 nt, Artificial Sequence
  Description of Artificial Sequence: Synthetic oligonucleotide
  Antisense Strand to SEQ ID NO: 350349
auuuccaaucccagcuccg

SEQ ID NO: 350351 - RNA, 19 nt, Artificial Sequence
  Description of Artificial Sequence: Synthetic oligonucleotide
  Sense Strand Starting at position 401 of SEQ ID NO: 315437
ggaaaucagauucgucuga

SEQ ID NO: 350352 - RNA, 19 nt, Artificial Sequence
  Description of Artificial Sequence: Synthetic oligonucleotide
  Antisense Strand to SEQ ID NO: 350351
ucagacgaaucugauuucc

SEQ ID NO: 350353 - RNA, 19 nt, Artificial Sequence
  Description of Artificial Sequence: Synthetic oligonucleotide
  Sense Strand Starting at position 401 of SEQ ID NO: 315439
aaaucagauucgucugaug

SEQ ID NO: 350354 - RNA, 19 nt, Artificial Sequence
  Description of Artificial Sequence: Synthetic oligonucleotide
  Antisense Strand to SEQ ID NO: 350353
caucagacgaaucugauuu

SEQ ID NO: 350355 - RNA, 19 nt, Artificial Sequence
  Description of Artificial Sequence: Synthetic oligonucleotide
  Sense Strand Starting at position 401 of SEQ ID NO: 315441
aucagauucgucugaugau

SEQ ID NO: 350356 - RNA, 19 nt, Artificial Sequence
  Description of Artificial Sequence: Synthetic oligonucleotide
  Antisense Strand to SEQ ID NO: 350355
aucaucagacgaaucugau

SEQ ID NO: 350357 - RNA, 19 nt, Artificial Sequence
  Description of Artificial Sequence: Synthetic oligonucleotide
  Sense Strand Starting at position 401 of SEQ ID NO: 315552
cgcuuugggacuuggagaa

SEQ ID NO: 350358 - RNA, 19 nt, Artificial Sequence
  Description of Artificial Sequence: Synthetic oligonucleotide
  Antisense Strand to SEQ ID NO: 350357
uucuccaagucccaaagcg

SEQ ID NO: 350359 - RNA, 19 nt, Artificial Sequence
  Description of Artificial Sequence: Synthetic oligonucleotide
  Sense Strand Starting at position 401 of SEQ ID NO: 315565
ggagaacugugguuccagu

SEQ ID NO: 350360 - RNA, 19 nt, Artificial Sequence
  Description of Artificial Sequence: Synthetic oligonucleotide
  Antisense Strand to SEQ ID NO: 350359
acuggaaccacaguucucc

SEQ ID NO: 350361 - RNA, 19 nt, Artificial Sequence
  Description of Artificial Sequence: Synthetic oligonucleotide
  Sense Strand Starting at position 401 of SEQ ID NO: 315972
uuuggacacuggucauaua

SEQ ID NO: 350362 - RNA, 19 nt, Artificial Sequence
  Description of Artificial Sequence: Synthetic oligonucleotide
  Antisense Strand to SEQ ID NO: 350361
uauaugaccaguguccaaa

SEQ ID NO: 350363 - RNA, 19 nt, Artificial Sequence
  Description of Artificial Sequence: Synthetic oligonucleotide
  Sense Strand Starting at position 401 of SEQ ID NO: 315983
gucauauauuagguuaacu

SEQ ID NO: 350364 - RNA, 19 nt, Artificial Sequence
  Description of Artificial Sequence: Synthetic oligonucleotide
  Antisense Strand to SEQ ID NO: 350363
aguuaaccuaauauaugac

SEQ ID NO: 350365 - RNA, 19 nt, Artificial Sequence
  Description of Artificial Sequence: Synthetic oligonucleotide
  Sense Strand Starting at position 401 of SEQ ID NO: 316372
ugagucucuguuuaagaga

SEQ ID NO: 350366 - RNA, 19 nt, Artificial Sequence
  Description of Artificial Sequence: Synthetic oligonucleotide
  Antisense Strand to SEQ ID NO: 350365
ucucuuaaacagagacuca

SEQ ID NO: 350367 - RNA, 19 nt, Artificial Sequence
  Description of Artificial Sequence: Synthetic oligonucleotide
  Sense Strand Starting at position 401 of SEQ ID NO: 316412
acaggacuucuguggucaa

SEQ ID NO: 350368 - RNA, 19 nt, Artificial Sequence
  Description of Artificial Sequence: Synthetic oligonucleotide
  Antisense Strand to SEQ ID NO: 350367
uugaccacagaaguccugu

SEQ ID NO: 350369 - RNA, 19 nt, Artificial Sequence
  Description of Artificial Sequence: Synthetic oligonucleotide
  Sense Strand Starting at position 401 of SEQ ID NO: 316415
ggacuucuguggucaagaa

SEQ ID NO: 350370 - RNA, 19 nt, Artificial Sequence
  Description of Artificial Sequence: Synthetic oligonucleotide
  Antisense Strand to SEQ ID NO: 350369
uucuugaccacagaagucc

SEQ ID NO: 350371 - RNA, 19 nt, Artificial Sequence
  Description of Artificial Sequence: Synthetic oligonucleotide
  Sense Strand Starting at position 401 of SEQ ID NO: 316435
cugugugagcguguucuca

SEQ ID NO: 350372 - RNA, 19 nt, Artificial Sequence
  Description of Artificial Sequence: Synthetic oligonucleotide
  Antisense Strand to SEQ ID NO: 350371
ugagaacacgcucacacag

SEQ ID NO: 350373 - RNA, 19 nt, Artificial Sequence
  Description of Artificial Sequence: Synthetic oligonucleotide
  Sense Strand Starting at position 401 of SEQ ID NO: 316444
cguguucucacacauagga

SEQ ID NO: 350374 - RNA, 19 nt, Artificial Sequence
  Description of Artificial Sequence: Synthetic oligonucleotide
  Antisense Strand to SEQ ID NO: 350373
uccuaugugugagaacacg

SEQ ID NO: 350375 - RNA, 19 nt, Artificial Sequence
  Description of Artificial Sequence: Synthetic oligonucleotide
  Sense Strand Starting at position 401 of SEQ ID NO: 316460
ggaagaaagcaauguaugu

SEQ ID NO: 350376 - RNA, 19 nt, Artificial Sequence
  Description of Artificial Sequence: Synthetic oligonucleotide
  Antisense Strand to SEQ ID NO: 350375
acauacauugcuuucuucc

SEQ ID NO: 350377 - RNA, 19 nt, Artificial Sequence
  Description of Artificial Sequence: Synthetic oligonucleotide
  Sense Strand Starting at position 401 of SEQ ID NO: 316464
gaaagcaauguaugucaua

SEQ ID NO: 350378 - RNA, 19 nt, Artificial Sequence
  Description of Artificial Sequence: Synthetic oligonucleotide
  Antisense Strand to SEQ ID NO: 350377
uaugacauacauugcuuuc

SEQ ID NO: 350379 - RNA, 19 nt, Artificial Sequence
  Description of Artificial Sequence: Synthetic oligonucleotide
  Sense Strand Starting at position 401 of SEQ ID NO: 316573
gaaugacgugaggauuguu

SEQ ID NO: 350380 - RNA, 19 nt, Artificial Sequence
  Description of Artificial Sequence: Synthetic oligonucleotide
  Antisense Strand to SEQ ID NO: 350379
aacaauccucacgucauuc

SEQ ID NO: 350381 - RNA, 19 nt, Artificial Sequence
  Description of Artificial Sequence: Synthetic oligonucleotide
  Sense Strand Starting at position 401 of SEQ ID NO: 316631
gagaacucgucccuacaaa

SEQ ID NO: 350382 - RNA, 19 nt, Artificial Sequence
  Description of Artificial Sequence: Synthetic oligonucleotide
  Antisense Strand to SEQ ID NO: 350381
uuuguagggacgaguucuc

SEQ ID NO: 350383 - RNA, 19 nt, Artificial Sequence
  Description of Artificial Sequence: Synthetic oligonucleotide
  Sense Strand Starting at position 401 of SEQ ID NO: 317555
agaguacuuuccucacaug

SEQ ID NO: 350384 - RNA, 19 nt, Artificial Sequence
  Description of Artificial Sequence: Synthetic oligonucleotide
  Antisense Strand to SEQ ID NO: 350383
caugugaggaaaguacucu

SEQ ID NO: 350385 - RNA, 19 nt, Artificial Sequence
  Description of Artificial Sequence: Synthetic oligonucleotide
  Sense Strand Starting at position 401 of SEQ ID NO: 317578
ugagguuaaucagcuuaga

SEQ ID NO: 350386 - RNA, 19 nt, Artificial Sequence
  Description of Artificial Sequence: Synthetic oligonucleotide
  Antisense Strand to SEQ ID NO: 350385
ucuaagcugauuaaccuca

SEQ ID NO: 350387 - RNA, 19 nt, Artificial Sequence
  Description of Artificial Sequence: Synthetic oligonucleotide
  Sense Strand Starting at position 401 of SEQ ID NO: 317581
gguuaaucagcuuagagug

SEQ ID NO: 350388 - RNA, 19 nt, Artificial Sequence
  Description of Artificial Sequence: Synthetic oligonucleotide
  Antisense Strand to SEQ ID NO: 350387
cacucuaagcugauuaacc

SEQ ID NO: 350389 - RNA, 19 nt, Artificial Sequence
  Description of Artificial Sequence: Synthetic oligonucleotide
  Sense Strand Starting at position 401 of SEQ ID NO: 317635
guguguggcccagaacaga

SEQ ID NO: 350390 - RNA, 19 nt, Artificial Sequence
  Description of Artificial Sequence: Synthetic oligonucleotide
  Antisense Strand to SEQ ID NO: 350389
ucuguucugggccacacac

SEQ ID NO: 350391 - RNA, 19 nt, Artificial Sequence
  Description of Artificial Sequence: Synthetic oligonucleotide
  Sense Strand Starting at position 401 of SEQ ID NO: 317831
cagagaugagugggccaau

SEQ ID NO: 350392 - RNA, 19 nt, Artificial Sequence
  Description of Artificial Sequence: Synthetic oligonucleotide
  Antisense Strand to SEQ ID NO: 350391
auuggcccacucaucucug

SEQ ID NO: 350393 - RNA, 19 nt, Artificial Sequence
  Description of Artificial Sequence: Synthetic oligonucleotide
  Sense Strand Starting at position 401 of SEQ ID NO: 317844
gccaaucaggucuaaaggu

SEQ ID NO: 350394 - RNA, 19 nt, Artificial Sequence
  Description of Artificial Sequence: Synthetic oligonucleotide
  Antisense Strand to SEQ ID NO: 350393
accuuuagaccugauuggc

SEQ ID NO: 350395 - RNA, 19 nt, Artificial Sequence
  Description of Artificial Sequence: Synthetic oligonucleotide
  Sense Strand Starting at position 401 of SEQ ID NO: 317929
cugugucuggugcuaaguu

SEQ ID NO: 350396 - RNA, 19 nt, Artificial Sequence
  Description of Artificial Sequence: Synthetic oligonucleotide
  Antisense Strand to SEQ ID NO: 350395
aacuuagcaccagacacag

SEQ ID NO: 350397 - RNA, 19 nt, Artificial Sequence
  Description of Artificial Sequence: Synthetic oligonucleotide
  Sense Strand Starting at position 401 of SEQ ID NO: 318071
gaugcaacuucucugaagu

SEQ ID NO: 350398 - RNA, 19 nt, Artificial Sequence
  Description of Artificial Sequence: Synthetic oligonucleotide
  Antisense Strand to SEQ ID NO: 350397
acuucagagaaguugcauc

SEQ ID NO: 350399 - RNA, 19 nt, Artificial Sequence
  Description of Artificial Sequence: Synthetic oligonucleotide
  Sense Strand Starting at position 401 of SEQ ID NO: 318082
ucugaagucacacagugua

SEQ ID NO: 350400 - RNA, 19 nt, Artificial Sequence
  Description of Artificial Sequence: Synthetic oligonucleotide
  Antisense Strand to SEQ ID NO: 350399
uacacugugugacuucaga

SEQ ID NO: 350401 - RNA, 19 nt, Artificial Sequence
  Description of Artificial Sequence: Synthetic oligonucleotide
  Sense Strand Starting at position 401 of SEQ ID NO: 318204
ggguauucccuccaguuua

SEQ ID NO: 350402 - RNA, 19 nt, Artificial Sequence
  Description of Artificial Sequence: Synthetic oligonucleotide
  Antisense Strand to SEQ ID NO: 350401
uaaacuggagggaauaccc

SEQ ID NO: 350403 - RNA, 19 nt, Artificial Sequence
  Description of Artificial Sequence: Synthetic oligonucleotide
  Sense Strand Starting at position 401 of SEQ ID NO: 318225
ggugaggucguugagacuu

SEQ ID NO: 350404 - RNA, 19 nt, Artificial Sequence
  Description of Artificial Sequence: Synthetic oligonucleotide
  Antisense Strand to SEQ ID NO: 350403
aagucucaacgaccucacc

SEQ ID NO: 350405 - RNA, 19 nt, Artificial Sequence
  Description of Artificial Sequence: Synthetic oligonucleotide
  Sense Strand Starting at position 401 of SEQ ID NO: 318317
uagagauuccuggagcugu

SEQ ID NO: 350406 - RNA, 19 nt, Artificial Sequence
  Description of Artificial Sequence: Synthetic oligonucleotide
  Antisense Strand to SEQ ID NO: 350405
acagcuccaggaaucucua

SEQ ID NO: 350407 - RNA, 19 nt, Artificial Sequence
  Description of Artificial Sequence: Synthetic oligonucleotide
  Sense Strand Starting at position 401 of SEQ ID NO: 318360
caaggcugugucugaaaga

SEQ ID NO: 350408 - RNA, 19 nt, Artificial Sequence
  Description of Artificial Sequence: Synthetic oligonucleotide
  Antisense Strand to SEQ ID NO: 350407
ucuuucagacacagccuug

SEQ ID NO: 350409 - RNA, 19 nt, Artificial Sequence
  Description of Artificial Sequence: Synthetic oligonucleotide
  Sense Strand Starting at position 401 of SEQ ID NO: 318382
agggaaucuugagcugacu

SEQ ID NO: 350410 - RNA, 19 nt, Artificial Sequence
  Description of Artificial Sequence: Synthetic oligonucleotide
  Antisense Strand to SEQ ID NO: 350409
agucagcucaagauucccu

SEQ ID NO: 350411 - RNA, 19 nt, Artificial Sequence
  Description of Artificial Sequence: Synthetic oligonucleotide
  Sense Strand Starting at position 401 of SEQ ID NO: 318384
ggaaucuugagcugacugu

SEQ ID NO: 350412 - RNA, 19 nt, Artificial Sequence
  Description of Artificial Sequence: Synthetic oligonucleotide
  Antisense Strand to SEQ ID NO: 350411
acagucagcucaagauucc

SEQ ID NO: 350413 - RNA, 19 nt, Artificial Sequence
  Description of Artificial Sequence: Synthetic oligonucleotide
  Sense Strand Starting at position 401 of SEQ ID NO: 318648
cucauugauuggccagacu

SEQ ID NO: 350414 - RNA, 19 nt, Artificial Sequence
  Description of Artificial Sequence: Synthetic oligonucleotide
  Antisense Strand to SEQ ID NO: 350413
agucuggccaaucaaugag

SEQ ID NO: 350415 - RNA, 19 nt, Artificial Sequence
  Description of Artificial Sequence: Synthetic oligonucleotide
  Sense Strand Starting at position 401 of SEQ ID NO: 318663
gacugaucaugucugucau

SEQ ID NO: 350416 - RNA, 19 nt, Artificial Sequence
  Description of Artificial Sequence: Synthetic oligonucleotide
  Antisense Strand to SEQ ID NO: 350415
augacagacaugaucaguc

SEQ ID NO: 350417 - RNA, 19 nt, Artificial Sequence
  Description of Artificial Sequence: Synthetic oligonucleotide
  Sense Strand Starting at position 401 of SEQ ID NO: 318669
ucaugucugucaucaacaa

SEQ ID NO: 350418 - RNA, 19 nt, Artificial Sequence
  Description of Artificial Sequence: Synthetic oligonucleotide
  Antisense Strand to SEQ ID NO: 350417
uuguugaugacagacauga

SEQ ID NO: 350419 - RNA, 19 nt, Artificial Sequence
  Description of Artificial Sequence: Synthetic oligonucleotide
  Sense Strand Starting at position 401 of SEQ ID NO: 319115
acaagugacuugcucgaga

SEQ ID NO: 350420 - RNA, 19 nt, Artificial Sequence
  Description of Artificial Sequence: Synthetic oligonucleotide
  Antisense Strand to SEQ ID NO: 350419
ucucgagcaagucacuugu

SEQ ID NO: 350421 - RNA, 19 nt, Artificial Sequence
  Description of Artificial Sequence: Synthetic oligonucleotide
  Sense Strand Starting at position 401 of SEQ ID NO: 319118
agugacuugcucgagauca

SEQ ID NO: 350422 - RNA, 19 nt, Artificial Sequence
  Description of Artificial Sequence: Synthetic oligonucleotide
  Antisense Strand to SEQ ID NO: 350421
ugaucucgagcaagucacu

SEQ ID NO: 350423 - RNA, 19 nt, Artificial Sequence
  Description of Artificial Sequence: Synthetic oligonucleotide
  Sense Strand Starting at position 401 of SEQ ID NO: 319123
cuugcucgagaucacauaa

SEQ ID NO: 350424 - RNA, 19 nt, Artificial Sequence
  Description of Artificial Sequence: Synthetic oligonucleotide
  Antisense Strand to SEQ ID NO: 350423
uuaugugaucucgagcaag

SEQ ID NO: 350425 - RNA, 19 nt, Artificial Sequence
  Description of Artificial Sequence: Synthetic oligonucleotide
  Sense Strand Starting at position 401 of SEQ ID NO: 319133
aucacauaaugaguuggua

SEQ ID NO: 350426 - RNA, 19 nt, Artificial Sequence
  Description of Artificial Sequence: Synthetic oligonucleotide
  Antisense Strand to SEQ ID NO: 350425
uaccaacucauuaugugau

SEQ ID NO: 350427 - RNA, 19 nt, Artificial Sequence
  Description of Artificial Sequence: Synthetic oligonucleotide
  Sense Strand Starting at position 401 of SEQ ID NO: 319184
gaacuuaugcugcaaggga

SEQ ID NO: 350428 - RNA, 19 nt, Artificial Sequence
  Description of Artificial Sequence: Synthetic oligonucleotide
  Antisense Strand to SEQ ID NO: 350427
ucccuugcagcauaaguuc

SEQ ID NO: 350429 - RNA, 19 nt, Artificial Sequence
  Description of Artificial Sequence: Synthetic oligonucleotide
  Sense Strand Starting at position 402 of SEQ ID NO: 315275
ugcugcucagcauaaauuu

SEQ ID NO: 350430 - RNA, 19 nt, Artificial Sequence
  Description of Artificial Sequence: Synthetic oligonucleotide
  Antisense Strand to SEQ ID NO: 350429
aaauuuaugcugagcagca

SEQ ID NO: 350431 - RNA, 19 nt, Artificial Sequence
  Description of Artificial Sequence: Synthetic oligonucleotide
  Sense Strand Starting at position 402 of SEQ ID NO: 315465
gcaugacccuggcuaagaa

SEQ ID NO: 350432 - RNA, 19 nt, Artificial Sequence
  Description of Artificial Sequence: Synthetic oligonucleotide
  Antisense Strand to SEQ ID NO: 350431
uucuuagccagggucaugc

SEQ ID NO: 350433 - RNA, 19 nt, Artificial Sequence
  Description of Artificial Sequence: Synthetic oligonucleotide
  Sense Strand Starting at position 402 of SEQ ID NO: 315484
auuacuucuuccuugaguu

SEQ ID NO: 350434 - RNA, 19 nt, Artificial Sequence
  Description of Artificial Sequence: Synthetic oligonucleotide
  Antisense Strand to SEQ ID NO: 350433
aacucaaggaagaaguaau

SEQ ID NO: 350435 - RNA, 19 nt, Artificial Sequence
  Description of Artificial Sequence: Synthetic oligonucleotide
  Sense Strand Starting at position 402 of SEQ ID NO: 315500
guuucucaaccuugaugga

SEQ ID NO: 350436 - RNA, 19 nt, Artificial Sequence
  Description of Artificial Sequence: Synthetic oligonucleotide
  Antisense Strand to SEQ ID NO: 350435
uccaucaagguugagaaac

SEQ ID NO: 350437 - RNA, 19 nt, Artificial Sequence
  Description of Artificial Sequence: Synthetic oligonucleotide
  Sense Strand Starting at position 402 of SEQ ID NO: 315800
ccgagagcuggugaguaaa

SEQ ID NO: 350438 - RNA, 19 nt, Artificial Sequence
  Description of Artificial Sequence: Synthetic oligonucleotide
  Antisense Strand to SEQ ID NO: 350437
uuuacucaccagcucucgg

SEQ ID NO: 350439 - RNA, 19 nt, Artificial Sequence
  Description of Artificial Sequence: Synthetic oligonucleotide
  Sense Strand Starting at position 402 of SEQ ID NO: 315859
ucugaugggccaugagaaa

SEQ ID NO: 350440 - RNA, 19 nt, Artificial Sequence
  Description of Artificial Sequence: Synthetic oligonucleotide
  Antisense Strand to SEQ ID NO: 350439
uuucucauggcccaucaga

SEQ ID NO: 350441 - RNA, 19 nt, Artificial Sequence
  Description of Artificial Sequence: Synthetic oligonucleotide
  Sense Strand Starting at position 402 of SEQ ID NO: 315964
aggcaaugcugucuacaaa

SEQ ID NO: 350442 - RNA, 19 nt, Artificial Sequence
  Description of Artificial Sequence: Synthetic oligonucleotide
  Antisense Strand to SEQ ID NO: 350441
uuuguagacagcauugccu

SEQ ID NO: 350443 - RNA, 19 nt, Artificial Sequence
  Description of Artificial Sequence: Synthetic oligonucleotide
  Sense Strand Starting at position 402 of SEQ ID NO: 315965
ggcaaugcugucuacaaac

SEQ ID NO: 350444 - RNA, 19 nt, Artificial Sequence
  Description of Artificial Sequence: Synthetic oligonucleotide
  Antisense Strand to SEQ ID NO: 350443
guuuguagacagcauugcc

SEQ ID NO: 350445 - RNA, 19 nt, Artificial Sequence
  Description of Artificial Sequence: Synthetic oligonucleotide
  Sense Strand Starting at position 402 of SEQ ID NO: 316013
gagggauaauaacaugaau

SEQ ID NO: 350446 - RNA, 19 nt, Artificial Sequence
  Description of Artificial Sequence: Synthetic oligonucleotide
  Antisense Strand to SEQ ID NO: 350445
auucauguuauuaucccuc

SEQ ID NO: 350447 - RNA, 19 nt, Artificial Sequence
  Description of Artificial Sequence: Synthetic oligonucleotide
  Sense Strand Starting at position 402 of SEQ ID NO: 316122
caagguagugauuauuauu

SEQ ID NO: 350448 - RNA, 19 nt, Artificial Sequence
  Description of Artificial Sequence: Synthetic oligonucleotide
  Antisense Strand to SEQ ID NO: 350447
aauaauaaucacuaccuug

SEQ ID NO: 350449 - RNA, 19 nt, Artificial Sequence
  Description of Artificial Sequence: Synthetic oligonucleotide
  Sense Strand Starting at position 402 of SEQ ID NO: 316130
ugauuauuauuggcccuau

SEQ ID NO: 350450 - RNA, 19 nt, Artificial Sequence
  Description of Artificial Sequence: Synthetic oligonucleotide
  Antisense Strand to SEQ ID NO: 350449
auagggccaauaauaauca

SEQ ID NO: 350451 - RNA, 19 nt, Artificial Sequence
  Description of Artificial Sequence: Synthetic oligonucleotide
  Sense Strand Starting at position 402 of SEQ ID NO: 316217
cugguuagcuaacuuuaua

SEQ ID NO: 350452 - RNA, 19 nt, Artificial Sequence
  Description of Artificial Sequence: Synthetic oligonucleotide
  Antisense Strand to SEQ ID NO: 350451
uauaaaguuagcuaaccag

SEQ ID NO: 350453 - RNA, 19 nt, Artificial Sequence
  Description of Artificial Sequence: Synthetic oligonucleotide
  Sense Strand Starting at position 402 of SEQ ID NO: 316807
caggcuuagggcgauugau

SEQ ID NO: 350454 - RNA, 19 nt, Artificial Sequence
  Description of Artificial Sequence: Synthetic oligonucleotide
  Antisense Strand to SEQ ID NO: 350453
aucaaucgcccuaagccug

SEQ ID NO: 350455 - RNA, 19 nt, Artificial Sequence
  Description of Artificial Sequence: Synthetic oligonucleotide
  Sense Strand Starting at position 402 of SEQ ID NO: 316817
gcgauugauccugacagag

SEQ ID NO: 350456 - RNA, 19 nt, Artificial Sequence
  Description of Artificial Sequence: Synthetic oligonucleotide
  Antisense Strand to SEQ ID NO: 350455
cucugucaggaucaaucgc

SEQ ID NO: 350457 - RNA, 19 nt, Artificial Sequence
  Description of Artificial Sequence: Synthetic oligonucleotide
  Sense Strand Starting at position 402 of SEQ ID NO: 317419
aagagaccuugggcuugaa

SEQ ID NO: 350458 - RNA, 19 nt, Artificial Sequence
  Description of Artificial Sequence: Synthetic oligonucleotide
  Antisense Strand to SEQ ID NO: 350457
uucaagcccaaggucucuu

SEQ ID NO: 350459 - RNA, 19 nt, Artificial Sequence
  Description of Artificial Sequence: Synthetic oligonucleotide
  Sense Strand Starting at position 402 of SEQ ID NO: 317526
acucauacugcagagcuaa

SEQ ID NO: 350460 - RNA, 19 nt, Artificial Sequence
  Description of Artificial Sequence: Synthetic oligonucleotide
  Antisense Strand to SEQ ID NO: 350459
uuagcucugcaguaugagu

SEQ ID NO: 350461 - RNA, 19 nt, Artificial Sequence
  Description of Artificial Sequence: Synthetic oligonucleotide
  Sense Strand Starting at position 402 of SEQ ID NO: 317687
gcaucuggugaacaacaau

SEQ ID NO: 350462 - RNA, 19 nt, Artificial Sequence
  Description of Artificial Sequence: Synthetic oligonucleotide
  Antisense Strand to SEQ ID NO: 350461
auuguuguucaccagaugc

SEQ ID NO: 350463 - RNA, 19 nt, Artificial Sequence
  Description of Artificial Sequence: Synthetic oligonucleotide
  Sense Strand Starting at position 402 of SEQ ID NO: 317711
agagaaguuaggugccacu

SEQ ID NO: 350464 - RNA, 19 nt, Artificial Sequence
  Description of Artificial Sequence: Synthetic oligonucleotide
  Antisense Strand to SEQ ID NO: 350463
aguggcaccuaacuucucu

SEQ ID NO: 350465 - RNA, 19 nt, Artificial Sequence
  Description of Artificial Sequence: Synthetic oligonucleotide
  Sense Strand Starting at position 402 of SEQ ID NO: 317771
guggaaagucccgaauaac

SEQ ID NO: 350466 - RNA, 19 nt, Artificial Sequence
  Description of Artificial Sequence: Synthetic oligonucleotide
  Antisense Strand to SEQ ID NO: 350465
guuauucgggacuuuccac

SEQ ID NO: 350467 - RNA, 19 nt, Artificial Sequence
  Description of Artificial Sequence: Synthetic oligonucleotide
  Sense Strand Starting at position 402 of SEQ ID NO: 317931
gguggagggucaagaauua

SEQ ID NO: 350468 - RNA, 19 nt, Artificial Sequence
  Description of Artificial Sequence: Synthetic oligonucleotide
  Antisense Strand to SEQ ID NO: 350467
uaauucuugacccuccacc

SEQ ID NO: 350469 - RNA, 19 nt, Artificial Sequence
  Description of Artificial Sequence: Synthetic oligonucleotide
  Sense Strand Starting at position 402 of SEQ ID NO: 318163
ugaucuuugccugauucua

SEQ ID NO: 350470 - RNA, 19 nt, Artificial Sequence
  Description of Artificial Sequence: Synthetic oligonucleotide
  Antisense Strand to SEQ ID NO: 350469
uagaaucaggcaaagauca

SEQ ID NO: 350471 - RNA, 19 nt, Artificial Sequence
  Description of Artificial Sequence: Synthetic oligonucleotide
  Sense Strand Starting at position 402 of SEQ ID NO: 318205
cagagaagcuuucucuguu

SEQ ID NO: 350472 - RNA, 19 nt, Artificial Sequence
  Description of Artificial Sequence: Synthetic oligonucleotide
  Antisense Strand to SEQ ID NO: 350471
aacagagaaagcuucucug

SEQ ID NO: 350473 - RNA, 19 nt, Artificial Sequence
  Description of Artificial Sequence: Synthetic oligonucleotide
  Sense Strand Starting at position 402 of SEQ ID NO: 318206
agagaagcuuucucuguug

SEQ ID NO: 350474 - RNA, 19 nt, Artificial Sequence
  Description of Artificial Sequence: Synthetic oligonucleotide
  Antisense Strand to SEQ ID NO: 350473
caacagagaaagcuucucu

SEQ ID NO: 350475 - RNA, 19 nt, Artificial Sequence
  Description of Artificial Sequence: Synthetic oligonucleotide
  Sense Strand Starting at position 402 of SEQ ID NO: 318217
cucuguugccuugugcaaa

SEQ ID NO: 350476 - RNA, 19 nt, Artificial Sequence
  Description of Artificial Sequence: Synthetic oligonucleotide
  Antisense Strand to SEQ ID NO: 350475
uuugcacaaggcaacagag

SEQ ID NO: 350477 - RNA, 19 nt, Artificial Sequence
  Description of Artificial Sequence: Synthetic oligonucleotide
  Sense Strand Starting at position 402 of SEQ ID NO: 318325
cugccauuccucuggaaug

SEQ ID NO: 350478 - RNA, 19 nt, Artificial Sequence
  Description of Artificial Sequence: Synthetic oligonucleotide
  Antisense Strand to SEQ ID NO: 350477
cauuccagaggaauggcag

SEQ ID NO: 350479 - RNA, 19 nt, Artificial Sequence
  Description of Artificial Sequence: Synthetic oligonucleotide
  Sense Strand Starting at position 402 of SEQ ID NO: 318393
ccgagucuagagcaauauu

SEQ ID NO: 350480 - RNA, 19 nt, Artificial Sequence
  Description of Artificial Sequence: Synthetic oligonucleotide
  Antisense Strand to SEQ ID NO: 350479
aauauugcucuagacucgg

SEQ ID NO: 350481 - RNA, 19 nt, Artificial Sequence
  Description of Artificial Sequence: Synthetic oligonucleotide
  Sense Strand Starting at position 402 of SEQ ID NO: 318396
agucuagagcaauauuagu

SEQ ID NO: 350482 - RNA, 19 nt, Artificial Sequence
  Description of Artificial Sequence: Synthetic oligonucleotide
  Antisense Strand to SEQ ID NO: 350481
acuaauauugcucuagacu

SEQ ID NO: 350483 - RNA, 19 nt, Artificial Sequence
  Description of Artificial Sequence: Synthetic oligonucleotide
  Sense Strand Starting at position 402 of SEQ ID NO: 318403
agcaauauuaguggaagaa

SEQ ID NO: 350484 - RNA, 19 nt, Artificial Sequence
  Description of Artificial Sequence: Synthetic oligonucleotide
  Antisense Strand to SEQ ID NO: 350483
uucuuccacuaauauugcu

SEQ ID NO: 350485 - RNA, 19 nt, Artificial Sequence
  Description of Artificial Sequence: Synthetic oligonucleotide
  Sense Strand Starting at position 402 of SEQ ID NO: 318442
gaaauagucuaaguagguc

SEQ ID NO: 350486 - RNA, 19 nt, Artificial Sequence
  Description of Artificial Sequence: Synthetic oligonucleotide
  Antisense Strand to SEQ ID NO: 350485
gaccuacuuagacuauuuc

SEQ ID NO: 350487 - RNA, 19 nt, Artificial Sequence
  Description of Artificial Sequence: Synthetic oligonucleotide
  Sense Strand Starting at position 402 of SEQ ID NO: 318474
aguccugacucaucgaaag

SEQ ID NO: 350488 - RNA, 19 nt, Artificial Sequence
  Description of Artificial Sequence: Synthetic oligonucleotide
  Antisense Strand to SEQ ID NO: 350487
cuuucgaugagucaggacu

SEQ ID NO: 350489 - RNA, 19 nt, Artificial Sequence
  Description of Artificial Sequence: Synthetic oligonucleotide
  Sense Strand Starting at position 402 of SEQ ID NO: 318476
uccugacucaucgaaagug

SEQ ID NO: 350490 - RNA, 19 nt, Artificial Sequence
  Description of Artificial Sequence: Synthetic oligonucleotide
  Antisense Strand to SEQ ID NO: 350489
cacuuucgaugagucagga

SEQ ID NO: 350491 - RNA, 19 nt, Artificial Sequence
  Description of Artificial Sequence: Synthetic oligonucleotide
  Sense Strand Starting at position 402 of SEQ ID NO: 318486
ucgaaagugcucgcuucau

SEQ ID NO: 350492 - RNA, 19 nt, Artificial Sequence
  Description of Artificial Sequence: Synthetic oligonucleotide
  Antisense Strand to SEQ ID NO: 350491
augaagcgagcacuuucga

SEQ ID NO: 350493 - RNA, 19 nt, Artificial Sequence
  Description of Artificial Sequence: Synthetic oligonucleotide
  Sense Strand Starting at position 402 of SEQ ID NO: 318764
gcuguaagucaacacggaa

SEQ ID NO: 350494 - RNA, 19 nt, Artificial Sequence
  Description of Artificial Sequence: Synthetic oligonucleotide
  Antisense Strand to SEQ ID NO: 350493
uuccguguugacuuacagc

SEQ ID NO: 350495 - RNA, 19 nt, Artificial Sequence
  Description of Artificial Sequence: Synthetic oligonucleotide
  Sense Strand Starting at position 402 of SEQ ID NO: 318767
guaagucaacacggaagau

SEQ ID NO: 350496 - RNA, 19 nt, Artificial Sequence
  Description of Artificial Sequence: Synthetic oligonucleotide
  Antisense Strand to SEQ ID NO: 350495
aucuuccguguugacuuac

SEQ ID NO: 350497 - RNA, 19 nt, Artificial Sequence
  Description of Artificial Sequence: Synthetic oligonucleotide
  Sense Strand Starting at position 402 of SEQ ID NO: 318782
agaucaaacuccuuuggca

SEQ ID NO: 350498 - RNA, 19 nt, Artificial Sequence
  Description of Artificial Sequence: Synthetic oligonucleotide
  Antisense Strand to SEQ ID NO: 350497
ugccaaaggaguuugaucu

SEQ ID NO: 350499 - RNA, 19 nt, Artificial Sequence
  Description of Artificial Sequence: Synthetic oligonucleotide
  Sense Strand Starting at position 402 of SEQ ID NO: 318910
uggcuuagugcugcaguga

SEQ ID NO: 350500 - RNA, 19 nt, Artificial Sequence
  Description of Artificial Sequence: Synthetic oligonucleotide
  Antisense Strand to SEQ ID NO: 350499
ucacugcagcacuaagcca

SEQ ID NO: 350501 - RNA, 19 nt, Artificial Sequence
  Description of Artificial Sequence: Synthetic oligonucleotide
  Sense Strand Starting at position 402 of SEQ ID NO: 318923
cagugaaagccugguugac

SEQ ID NO: 350502 - RNA, 19 nt, Artificial Sequence
  Description of Artificial Sequence: Synthetic oligonucleotide
  Antisense Strand to SEQ ID NO: 350501
gucaaccaggcuuucacug

SEQ ID NO: 350503 - RNA, 19 nt, Artificial Sequence
  Description of Artificial Sequence: Synthetic oligonucleotide
  Sense Strand Starting at position 402 of SEQ ID NO: 319099
gaugauuuaugaggugaca

SEQ ID NO: 350504 - RNA, 19 nt, Artificial Sequence
  Description of Artificial Sequence: Synthetic oligonucleotide
  Antisense Strand to SEQ ID NO: 350503
ugucaccucauaaaucauc

SEQ ID NO: 350505 - RNA, 19 nt, Artificial Sequence
  Description of Artificial Sequence: Synthetic oligonucleotide
  Sense Strand Starting at position 402 of SEQ ID NO: 319136
aggagcagguguucuagau

SEQ ID NO: 350506 - RNA, 19 nt, Artificial Sequence
  Description of Artificial Sequence: Synthetic oligonucleotide
  Antisense Strand to SEQ ID NO: 350505
aucuagaacaccugcuccu

SEQ ID NO: 350507 - RNA, 19 nt, Artificial Sequence
  Description of Artificial Sequence: Synthetic oligonucleotide
  Sense Strand Starting at position 402 of SEQ ID NO: 319140
gcagguguucuagauccau

SEQ ID NO: 350508 - RNA, 19 nt, Artificial Sequence
  Description of Artificial Sequence: Synthetic oligonucleotide
  Antisense Strand to SEQ ID NO: 350507
auggaucuagaacaccugc

SEQ ID NO: 350509 - RNA, 19 nt, Artificial Sequence
  Description of Artificial Sequence: Synthetic oligonucleotide
  Sense Strand Starting at position 403 of SEQ ID NO: 315351
auaucuaagccagaguaau

SEQ ID NO: 350510 - RNA, 19 nt, Artificial Sequence
  Description of Artificial Sequence: Synthetic oligonucleotide
  Antisense Strand to SEQ ID NO: 350509
auuacucuggcuuagauau

SEQ ID NO: 350511 - RNA, 19 nt, Artificial Sequence
  Description of Artificial Sequence: Synthetic oligonucleotide
  Sense Strand Starting at position 403 of SEQ ID NO: 315666
ggagaacauuccugccuca

SEQ ID NO: 350512 - RNA, 19 nt, Artificial Sequence
  Description of Artificial Sequence: Synthetic oligonucleotide
  Antisense Strand to SEQ ID NO: 350511
ugaggcaggaauguucucc

SEQ ID NO: 350513 - RNA, 19 nt, Artificial Sequence
  Description of Artificial Sequence: Synthetic oligonucleotide
  Sense Strand Starting at position 403 of SEQ ID NO: 315772
ggcaauguacaucacaacu

SEQ ID NO: 350514 - RNA, 19 nt, Artificial Sequence
  Description of Artificial Sequence: Synthetic oligonucleotide
  Antisense Strand to SEQ ID NO: 350513
aguugugauguacauugcc

SEQ ID NO: 350515 - RNA, 19 nt, Artificial Sequence
  Description of Artificial Sequence: Synthetic oligonucleotide
  Sense Strand Starting at position 403 of SEQ ID NO: 315971
ggugaugacuuccugaacu

SEQ ID NO: 350516 - RNA, 19 nt, Artificial Sequence
  Description of Artificial Sequence: Synthetic oligonucleotide
  Antisense Strand to SEQ ID NO: 350515
aguucaggaagucaucacc

SEQ ID NO: 350517 - RNA, 19 nt, Artificial Sequence
  Description of Artificial Sequence: Synthetic oligonucleotide
  Sense Strand Starting at position 403 of SEQ ID NO: 316053
agguuaacuuaggacuaca

SEQ ID NO: 350518 - RNA, 19 nt, Artificial Sequence
  Description of Artificial Sequence: Synthetic oligonucleotide
  Antisense Strand to SEQ ID NO: 350517
uguaguccuaaguuaaccu

SEQ ID NO: 350519 - RNA, 19 nt, Artificial Sequence
  Description of Artificial Sequence: Synthetic oligonucleotide
  Sense Strand Starting at position 403 of SEQ ID NO: 316211
uugccuuaugcguggagaa

SEQ ID NO: 350520 - RNA, 19 nt, Artificial Sequence
  Description of Artificial Sequence: Synthetic oligonucleotide
  Antisense Strand to SEQ ID NO: 350519
uucuccacgcauaaggcaa

SEQ ID NO: 350521 - RNA, 19 nt, Artificial Sequence
  Description of Artificial Sequence: Synthetic oligonucleotide
  Sense Strand Starting at position 403 of SEQ ID NO: 316212
ugccuuaugcguggagaaa

SEQ ID NO: 350522 - RNA, 19 nt, Artificial Sequence
  Description of Artificial Sequence: Synthetic oligonucleotide
  Antisense Strand to SEQ ID NO: 350521
uuucuccacgcauaaggca

SEQ ID NO: 350523 - RNA, 19 nt, Artificial Sequence
  Description of Artificial Sequence: Synthetic oligonucleotide
  Sense Strand Starting at position 403 of SEQ ID NO: 316213
gccuuaugcguggagaaau

SEQ ID NO: 350524 - RNA, 19 nt, Artificial Sequence
  Description of Artificial Sequence: Synthetic oligonucleotide
  Antisense Strand to SEQ ID NO: 350523
auuucuccacgcauaaggc

SEQ ID NO: 350525 - RNA, 19 nt, Artificial Sequence
  Description of Artificial Sequence: Synthetic oligonucleotide
  Sense Strand Starting at position 403 of SEQ ID NO: 316438
acaacuguaauaggugaga

SEQ ID NO: 350526 - RNA, 19 nt, Artificial Sequence
  Description of Artificial Sequence: Synthetic oligonucleotide
  Antisense Strand to SEQ ID NO: 350525
ucucaccuauuacaguugu

SEQ ID NO: 350527 - RNA, 19 nt, Artificial Sequence
  Description of Artificial Sequence: Synthetic oligonucleotide
  Sense Strand Starting at position 403 of SEQ ID NO: 316523
gggagucaauguccgacaa

SEQ ID NO: 350528 - RNA, 19 nt, Artificial Sequence
  Description of Artificial Sequence: Synthetic oligonucleotide
  Antisense Strand to SEQ ID NO: 350527
uugucggacauugacuccc

SEQ ID NO: 350529 - RNA, 19 nt, Artificial Sequence
  Description of Artificial Sequence: Synthetic oligonucleotide
  Sense Strand Starting at position 403 of SEQ ID NO: 316524
ggagucaauguccgacaaa

SEQ ID NO: 350530 - RNA, 19 nt, Artificial Sequence
  Description of Artificial Sequence: Synthetic oligonucleotide
  Antisense Strand to SEQ ID NO: 350529
uuugucggacauugacucc

SEQ ID NO: 350531 - RNA, 19 nt, Artificial Sequence
  Description of Artificial Sequence: Synthetic oligonucleotide
  Sense Strand Starting at position 403 of SEQ ID NO: 316571
ccgaaaggcuaccucuuua

SEQ ID NO: 350532 - RNA, 19 nt, Artificial Sequence
  Description of Artificial Sequence: Synthetic oligonucleotide
  Antisense Strand to SEQ ID NO: 350531
uaaagagguagccuuucgg

SEQ ID NO: 350533 - RNA, 19 nt, Artificial Sequence
  Description of Artificial Sequence: Synthetic oligonucleotide
  Sense Strand Starting at position 403 of SEQ ID NO: 317540
gggcuugaaucauucuggu

SEQ ID NO: 350534 - RNA, 19 nt, Artificial Sequence
  Description of Artificial Sequence: Synthetic oligonucleotide
  Antisense Strand to SEQ ID NO: 350533
accagaaugauucaagccc

SEQ ID NO: 350535 - RNA, 19 nt, Artificial Sequence
  Description of Artificial Sequence: Synthetic oligonucleotide
  Sense Strand Starting at position 403 of SEQ ID NO: 317544
uugaaucauucugguagga

SEQ ID NO: 350536 - RNA, 19 nt, Artificial Sequence
  Description of Artificial Sequence: Synthetic oligonucleotide
  Antisense Strand to SEQ ID NO: 350535
uccuaccagaaugauucaa

SEQ ID NO: 350537 - RNA, 19 nt, Artificial Sequence
  Description of Artificial Sequence: Synthetic oligonucleotide
  Sense Strand Starting at position 403 of SEQ ID NO: 317546
gaaucauucugguaggaga

SEQ ID NO: 350538 - RNA, 19 nt, Artificial Sequence
  Description of Artificial Sequence: Synthetic oligonucleotide
  Antisense Strand to SEQ ID NO: 350537
ucuccuaccagaaugauuc

SEQ ID NO: 350539 - RNA, 19 nt, Artificial Sequence
  Description of Artificial Sequence: Synthetic oligonucleotide
  Sense Strand Starting at position 403 of SEQ ID NO: 317643
ggcccaaccuuccaggaaa

SEQ ID NO: 350540 - RNA, 19 nt, Artificial Sequence
  Description of Artificial Sequence: Synthetic oligonucleotide
  Antisense Strand to SEQ ID NO: 350539
uuuccuggaagguugggcc

SEQ ID NO: 350541 - RNA, 19 nt, Artificial Sequence
  Description of Artificial Sequence: Synthetic oligonucleotide
  Sense Strand Starting at position 403 of SEQ ID NO: 317804
cagugagcuuaauugaauu

SEQ ID NO: 350542 - RNA, 19 nt, Artificial Sequence
  Description of Artificial Sequence: Synthetic oligonucleotide
  Antisense Strand to SEQ ID NO: 350541
aauucaauuaagcucacug

SEQ ID NO: 350543 - RNA, 19 nt, Artificial Sequence
  Description of Artificial Sequence: Synthetic oligonucleotide
  Sense Strand Starting at position 403 of SEQ ID NO: 318546
gccugacauuuguggccau

SEQ ID NO: 350544 - RNA, 19 nt, Artificial Sequence
  Description of Artificial Sequence: Synthetic oligonucleotide
  Antisense Strand to SEQ ID NO: 350543
auggccacaaaugucaggc

SEQ ID NO: 350545 - RNA, 19 nt, Artificial Sequence
  Description of Artificial Sequence: Synthetic oligonucleotide
  Sense Strand Starting at position 403 of SEQ ID NO: 318547
ccugacauuuguggccauu

SEQ ID NO: 350546 - RNA, 19 nt, Artificial Sequence
  Description of Artificial Sequence: Synthetic oligonucleotide
  Antisense Strand to SEQ ID NO: 350545
aauggccacaaaugucagg

SEQ ID NO: 350547 - RNA, 19 nt, Artificial Sequence
  Description of Artificial Sequence: Synthetic oligonucleotide
  Sense Strand Starting at position 403 of SEQ ID NO: 318589
ggaugcuaaucucaugauc

SEQ ID NO: 350548 - RNA, 19 nt, Artificial Sequence
  Description of Artificial Sequence: Synthetic oligonucleotide
  Antisense Strand to SEQ ID NO: 350547
gaucaugagauuagcaucc

SEQ ID NO: 350549 - RNA, 19 nt, Artificial Sequence
  Description of Artificial Sequence: Synthetic oligonucleotide
  Sense Strand Starting at position 403 of SEQ ID NO: 318591
augcuaaucucaugaucug

SEQ ID NO: 350550 - RNA, 19 nt, Artificial Sequence
  Description of Artificial Sequence: Synthetic oligonucleotide
  Antisense Strand to SEQ ID NO: 350549
cagaucaugagauuagcau

SEQ ID NO: 350551 - RNA, 19 nt, Artificial Sequence
  Description of Artificial Sequence: Synthetic oligonucleotide
  Sense Strand Starting at position 403 of SEQ ID NO: 318592
ugcuaaucucaugaucuga

SEQ ID NO: 350552 - RNA, 19 nt, Artificial Sequence
  Description of Artificial Sequence: Synthetic oligonucleotide
  Antisense Strand to SEQ ID NO: 350551
ucagaucaugagauuagca

SEQ ID NO: 350553 - RNA, 19 nt, Artificial Sequence
  Description of Artificial Sequence: Synthetic oligonucleotide
  Sense Strand Starting at position 403 of SEQ ID NO: 318628
gagucacuuggccaucaga

SEQ ID NO: 350554 - RNA, 19 nt, Artificial Sequence
  Description of Artificial Sequence: Synthetic oligonucleotide
  Antisense Strand to SEQ ID NO: 350553
ucugauggccaagugacuc

SEQ ID NO: 350555 - RNA, 19 nt, Artificial Sequence
  Description of Artificial Sequence: Synthetic oligonucleotide
  Sense Strand Starting at position 403 of SEQ ID NO: 318690
ccucucugcccaugaugua

SEQ ID NO: 350556 - RNA, 19 nt, Artificial Sequence
  Description of Artificial Sequence: Synthetic oligonucleotide
  Antisense Strand to SEQ ID NO: 350555
uacaucaugggcagagagg

SEQ ID NO: 350557 - RNA, 19 nt, Artificial Sequence
  Description of Artificial Sequence: Synthetic oligonucleotide
  Sense Strand Starting at position 403 of SEQ ID NO: 318691
cucucugcccaugauguau

SEQ ID NO: 350558 - RNA, 19 nt, Artificial Sequence
  Description of Artificial Sequence: Synthetic oligonucleotide
  Antisense Strand to SEQ ID NO: 350557
auacaucaugggcagagag

SEQ ID NO: 350559 - RNA, 19 nt, Artificial Sequence
  Description of Artificial Sequence: Synthetic oligonucleotide
  Sense Strand Starting at position 403 of SEQ ID NO: 318730
cagaauugguacuccugaa

SEQ ID NO: 350560 - RNA, 19 nt, Artificial Sequence
  Description of Artificial Sequence: Synthetic oligonucleotide
  Antisense Strand to SEQ ID NO: 350559
uucaggaguaccaauucug

SEQ ID NO: 350561 - RNA, 19 nt, Artificial Sequence
  Description of Artificial Sequence: Synthetic oligonucleotide
  Sense Strand Starting at position 403 of SEQ ID NO: 318930
ugcuauauccuuugccgga

SEQ ID NO: 350562 - RNA, 19 nt, Artificial Sequence
  Description of Artificial Sequence: Synthetic oligonucleotide
  Antisense Strand to SEQ ID NO: 350561
uccggcaaaggauauagca

SEQ ID NO: 350563 - RNA, 19 nt, Artificial Sequence
  Description of Artificial Sequence: Synthetic oligonucleotide
  Sense Strand Starting at position 403 of SEQ ID NO: 318931
gcuauauccuuugccggaa

SEQ ID NO: 350564 - RNA, 19 nt, Artificial Sequence
  Description of Artificial Sequence: Synthetic oligonucleotide
  Antisense Strand to SEQ ID NO: 350563
uuccggcaaaggauauagc

SEQ ID NO: 350565 - RNA, 19 nt, Artificial Sequence
  Description of Artificial Sequence: Synthetic oligonucleotide
  Sense Strand Starting at position 403 of SEQ ID NO: 318932
cuauauccuuugccggaaa

SEQ ID NO: 350566 - RNA, 19 nt, Artificial Sequence
  Description of Artificial Sequence: Synthetic oligonucleotide
  Antisense Strand to SEQ ID NO: 350565
uuuccggcaaaggauauag

SEQ ID NO: 350567 - RNA, 19 nt, Artificial Sequence
  Description of Artificial Sequence: Synthetic oligonucleotide
  Sense Strand Starting at position 403 of SEQ ID NO: 318934
auauccuuugccggaaacu

SEQ ID NO: 350568 - RNA, 19 nt, Artificial Sequence
  Description of Artificial Sequence: Synthetic oligonucleotide
  Antisense Strand to SEQ ID NO: 350567
aguuuccggcaaaggauau

SEQ ID NO: 350569 - RNA, 19 nt, Artificial Sequence
  Description of Artificial Sequence: Synthetic oligonucleotide
  Sense Strand Starting at position 403 of SEQ ID NO: 318943
gccggaaacuuccucgugu

SEQ ID NO: 350570 - RNA, 19 nt, Artificial Sequence
  Description of Artificial Sequence: Synthetic oligonucleotide
  Antisense Strand to SEQ ID NO: 350569
acacgaggaaguuuccggc

SEQ ID NO: 350571 - RNA, 19 nt, Artificial Sequence
  Description of Artificial Sequence: Synthetic oligonucleotide
  Sense Strand Starting at position 403 of SEQ ID NO: 318945
cggaaacuuccucgugucu

SEQ ID NO: 350572 - RNA, 19 nt, Artificial Sequence
  Description of Artificial Sequence: Synthetic oligonucleotide
  Antisense Strand to SEQ ID NO: 350571
agacacgaggaaguuuccg

SEQ ID NO: 350573 - RNA, 19 nt, Artificial Sequence
  Description of Artificial Sequence: Synthetic oligonucleotide
  Sense Strand Starting at position 403 of SEQ ID NO: 318947
gaaacuuccucgugucuug

SEQ ID NO: 350574 - RNA, 19 nt, Artificial Sequence
  Description of Artificial Sequence: Synthetic oligonucleotide
  Antisense Strand to SEQ ID NO: 350573
caagacacgaggaaguuuc

SEQ ID NO: 350575 - RNA, 19 nt, Artificial Sequence
  Description of Artificial Sequence: Synthetic oligonucleotide
  Sense Strand Starting at position 403 of SEQ ID NO: 319043
caagcaacguguccuauaa

SEQ ID NO: 350576 - RNA, 19 nt, Artificial Sequence
  Description of Artificial Sequence: Synthetic oligonucleotide
  Antisense Strand to SEQ ID NO: 350575
uuauaggacacguugcuug

SEQ ID NO: 350577 - RNA, 19 nt, Artificial Sequence
  Description of Artificial Sequence: Synthetic oligonucleotide
  Sense Strand Starting at position 403 of SEQ ID NO: 319131
cuaagccaucuaugagaug

SEQ ID NO: 350578 - RNA, 19 nt, Artificial Sequence
  Description of Artificial Sequence: Synthetic oligonucleotide
  Antisense Strand to SEQ ID NO: 350577
caucucauagauggcuuag

SEQ ID NO: 350579 - RNA, 19 nt, Artificial Sequence
  Description of Artificial Sequence: Synthetic oligonucleotide
  Sense Strand Starting at position 404 of SEQ ID NO: 315349
uuuccucugggccaagaau

SEQ ID NO: 350580 - RNA, 19 nt, Artificial Sequence
  Description of Artificial Sequence: Synthetic oligonucleotide
  Antisense Strand to SEQ ID NO: 350579
auucuuggcccagaggaaa

SEQ ID NO: 350581 - RNA, 19 nt, Artificial Sequence
  Description of Artificial Sequence: Synthetic oligonucleotide
  Sense Strand Starting at position 404 of SEQ ID NO: 315364
gaaugccauccuuacguga

SEQ ID NO: 350582 - RNA, 19 nt, Artificial Sequence
  Description of Artificial Sequence: Synthetic oligonucleotide
  Antisense Strand to SEQ ID NO: 350581
ucacguaaggauggcauuc

SEQ ID NO: 350583 - RNA, 19 nt, Artificial Sequence
  Description of Artificial Sequence: Synthetic oligonucleotide
  Sense Strand Starting at position 404 of SEQ ID NO: 315366
augccauccuuacgugaaa

SEQ ID NO: 350584 - RNA, 19 nt, Artificial Sequence
  Description of Artificial Sequence: Synthetic oligonucleotide
  Antisense Strand to SEQ ID NO: 350583
uuucacguaaggauggcau

SEQ ID NO: 350585 - RNA, 19 nt, Artificial Sequence
  Description of Artificial Sequence: Synthetic oligonucleotide
  Sense Strand Starting at position 404 of SEQ ID NO: 315411
ucucaagugucaccugcaa

SEQ ID NO: 350586 - RNA, 19 nt, Artificial Sequence
  Description of Artificial Sequence: Synthetic oligonucleotide
  Antisense Strand to SEQ ID NO: 350585
uugcaggugacacuugaga

SEQ ID NO: 350587 - RNA, 19 nt, Artificial Sequence
  Description of Artificial Sequence: Synthetic oligonucleotide
  Sense Strand Starting at position 404 of SEQ ID NO: 315527
cuaagucugaugcacguaa

SEQ ID NO: 350588 - RNA, 19 nt, Artificial Sequence
  Description of Artificial Sequence: Synthetic oligonucleotide
  Antisense Strand to SEQ ID NO: 350587
uuacgugcaucagacuuag

SEQ ID NO: 350589 - RNA, 19 nt, Artificial Sequence
  Description of Artificial Sequence: Synthetic oligonucleotide
  Sense Strand Starting at position 404 of SEQ ID NO: 315529
aagucugaugcacguaagu

SEQ ID NO: 350590 - RNA, 19 nt, Artificial Sequence
  Description of Artificial Sequence: Synthetic oligonucleotide
  Antisense Strand to SEQ ID NO: 350589
acuuacgugcaucagacuu

SEQ ID NO: 350591 - RNA, 19 nt, Artificial Sequence
  Description of Artificial Sequence: Synthetic oligonucleotide
  Sense Strand Starting at position 404 of SEQ ID NO: 315531
gucugaugcacguaaguuc

SEQ ID NO: 350592 - RNA, 19 nt, Artificial Sequence
  Description of Artificial Sequence: Synthetic oligonucleotide
  Antisense Strand to SEQ ID NO: 350591
gaacuuacgugcaucagac

SEQ ID NO: 350593 - RNA, 19 nt, Artificial Sequence
  Description of Artificial Sequence: Synthetic oligonucleotide
  Sense Strand Starting at position 404 of SEQ ID NO: 315812
ggguguuucuuagcuugcu

SEQ ID NO: 350594 - RNA, 19 nt, Artificial Sequence
  Description of Artificial Sequence: Synthetic oligonucleotide
  Antisense Strand to SEQ ID NO: 350593
agcaagcuaagaaacaccc

SEQ ID NO: 350595 - RNA, 19 nt, Artificial Sequence
  Description of Artificial Sequence: Synthetic oligonucleotide
  Sense Strand Starting at position 404 of SEQ ID NO: 315914
guguaugucucccuggcaa

SEQ ID NO: 350596 - RNA, 19 nt, Artificial Sequence
  Description of Artificial Sequence: Synthetic oligonucleotide
  Antisense Strand to SEQ ID NO: 350595
uugccagggagacauacac

SEQ ID NO: 350597 - RNA, 19 nt, Artificial Sequence
  Description of Artificial Sequence: Synthetic oligonucleotide
  Sense Strand Starting at position 404 of SEQ ID NO: 316401
ccaguauugccguaucauu

SEQ ID NO: 350598 - RNA, 19 nt, Artificial Sequence
  Description of Artificial Sequence: Synthetic oligonucleotide
  Antisense Strand to SEQ ID NO: 350597
aaugauacggcaauacugg

SEQ ID NO: 350599 - RNA, 19 nt, Artificial Sequence
  Description of Artificial Sequence: Synthetic oligonucleotide
  Sense Strand Starting at position 404 of SEQ ID NO: 316548
accuuccugcucuggauaa

SEQ ID NO: 350600 - RNA, 19 nt, Artificial Sequence
  Description of Artificial Sequence: Synthetic oligonucleotide
  Antisense Strand to SEQ ID NO: 350599
uuauccagagcaggaaggu

SEQ ID NO: 350601 - RNA, 19 nt, Artificial Sequence
  Description of Artificial Sequence: Synthetic oligonucleotide
  Sense Strand Starting at position 404 of SEQ ID NO: 316550
cuuccugcucuggauaaau

SEQ ID NO: 350602 - RNA, 19 nt, Artificial Sequence
  Description of Artificial Sequence: Synthetic oligonucleotide
  Antisense Strand to SEQ ID NO: 350601
auuuauccagagcaggaag

SEQ ID NO: 350603 - RNA, 19 nt, Artificial Sequence
  Description of Artificial Sequence: Synthetic oligonucleotide
  Sense Strand Starting at position 404 of SEQ ID NO: 316638
acccauuccucuuggaaag

SEQ ID NO: 350604 - RNA, 19 nt, Artificial Sequence
  Description of Artificial Sequence: Synthetic oligonucleotide
  Antisense Strand to SEQ ID NO: 350603
cuuuccaagaggaaugggu

SEQ ID NO: 350605 - RNA, 19 nt, Artificial Sequence
  Description of Artificial Sequence: Synthetic oligonucleotide
  Sense Strand Starting at position 404 of SEQ ID NO: 316640
ccauuccucuuggaaagca

SEQ ID NO: 350606 - RNA, 19 nt, Artificial Sequence
  Description of Artificial Sequence: Synthetic oligonucleotide
  Antisense Strand to SEQ ID NO: 350605
ugcuuuccaagaggaaugg

SEQ ID NO: 350607 - RNA, 19 nt, Artificial Sequence
  Description of Artificial Sequence: Synthetic oligonucleotide
  Sense Strand Starting at position 404 of SEQ ID NO: 316663
gaguucuuccgccaucacu

SEQ ID NO: 350608 - RNA, 19 nt, Artificial Sequence
  Description of Artificial Sequence: Synthetic oligonucleotide
  Antisense Strand to SEQ ID NO: 350607
agugauggcggaagaacuc

SEQ ID NO: 350609 - RNA, 19 nt, Artificial Sequence
  Description of Artificial Sequence: Synthetic oligonucleotide
  Sense Strand Starting at position 404 of SEQ ID NO: 316910
auaucuaagccagaguaau

SEQ ID NO: 350610 - RNA, 19 nt, Artificial Sequence
  Description of Artificial Sequence: Synthetic oligonucleotide
  Antisense Strand to SEQ ID NO: 350609
auuacucuggcuuagauau

SEQ ID NO: 350611 - RNA, 19 nt, Artificial Sequence
  Description of Artificial Sequence: Synthetic oligonucleotide
  Sense Strand Starting at position 404 of SEQ ID NO: 317225
ggagaacauuccugccuca

SEQ ID NO: 350612 - RNA, 19 nt, Artificial Sequence
  Description of Artificial Sequence: Synthetic oligonucleotide
  Antisense Strand to SEQ ID NO: 350611
ugaggcaggaauguucucc

SEQ ID NO: 350613 - RNA, 19 nt, Artificial Sequence
  Description of Artificial Sequence: Synthetic oligonucleotide
  Sense Strand Starting at position 404 of SEQ ID NO: 317331
ggcaauguacaucacaacu

SEQ ID NO: 350614 - RNA, 19 nt, Artificial Sequence
  Description of Artificial Sequence: Synthetic oligonucleotide
  Antisense Strand to SEQ ID NO: 350613
aguugugauguacauugcc

SEQ ID NO: 350615 - RNA, 19 nt, Artificial Sequence
  Description of Artificial Sequence: Synthetic oligonucleotide
  Sense Strand Starting at position 404 of SEQ ID NO: 317530
ggugaugacuuccugaacu

SEQ ID NO: 350616 - RNA, 19 nt, Artificial Sequence
  Description of Artificial Sequence: Synthetic oligonucleotide
  Antisense Strand to SEQ ID NO: 350615
aguucaggaagucaucacc

SEQ ID NO: 350617 - RNA, 19 nt, Artificial Sequence
  Description of Artificial Sequence: Synthetic oligonucleotide
  Sense Strand Starting at position 404 of SEQ ID NO: 317612
agguuaacuuaggacuaca

SEQ ID NO: 350618 - RNA, 19 nt, Artificial Sequence
  Description of Artificial Sequence: Synthetic oligonucleotide
  Antisense Strand to SEQ ID NO: 350617
uguaguccuaaguuaaccu

SEQ ID NO: 350619 - RNA, 19 nt, Artificial Sequence
  Description of Artificial Sequence: Synthetic oligonucleotide
  Sense Strand Starting at position 404 of SEQ ID NO: 317770
uugccuuaugcguggagaa

SEQ ID NO: 350620 - RNA, 19 nt, Artificial Sequence
  Description of Artificial Sequence: Synthetic oligonucleotide
  Antisense Strand to SEQ ID NO: 350619
uucuccacgcauaaggcaa

SEQ ID NO: 350621 - RNA, 19 nt, Artificial Sequence
  Description of Artificial Sequence: Synthetic oligonucleotide
  Sense Strand Starting at position 404 of SEQ ID NO: 317771
ugccuuaugcguggagaaa

SEQ ID NO: 350622 - RNA, 19 nt, Artificial Sequence
  Description of Artificial Sequence: Synthetic oligonucleotide
  Antisense Strand to SEQ ID NO: 350621
uuucuccacgcauaaggca

SEQ ID NO: 350623 - RNA, 19 nt, Artificial Sequence
  Description of Artificial Sequence: Synthetic oligonucleotide
  Sense Strand Starting at position 404 of SEQ ID NO: 317772
gccuuaugcguggagaaau

SEQ ID NO: 350624 - RNA, 19 nt, Artificial Sequence
  Description of Artificial Sequence: Synthetic oligonucleotide
  Antisense Strand to SEQ ID NO: 350623
auuucuccacgcauaaggc

SEQ ID NO: 350625 - RNA, 19 nt, Artificial Sequence
  Description of Artificial Sequence: Synthetic oligonucleotide
  Sense Strand Starting at position 404 of SEQ ID NO: 317997
acaacuguaauaggugaga

SEQ ID NO: 350626 - RNA, 19 nt, Artificial Sequence
  Description of Artificial Sequence: Synthetic oligonucleotide
  Antisense Strand to SEQ ID NO: 350625
ucucaccuauuacaguugu

SEQ ID NO: 350627 - RNA, 19 nt, Artificial Sequence
  Description of Artificial Sequence: Synthetic oligonucleotide
  Sense Strand Starting at position 404 of SEQ ID NO: 318082
gggagucaauguccgacaa

SEQ ID NO: 350628 - RNA, 19 nt, Artificial Sequence
  Description of Artificial Sequence: Synthetic oligonucleotide
  Antisense Strand to SEQ ID NO: 350627
uugucggacauugacuccc

SEQ ID NO: 350629 - RNA, 19 nt, Artificial Sequence
  Description of Artificial Sequence: Synthetic oligonucleotide
  Sense Strand Starting at position 404 of SEQ ID NO: 318083
ggagucaauguccgacaaa

SEQ ID NO: 350630 - RNA, 19 nt, Artificial Sequence
  Description of Artificial Sequence: Synthetic oligonucleotide
  Antisense Strand to SEQ ID NO: 350629
uuugucggacauugacucc

SEQ ID NO: 350631 - RNA, 19 nt, Artificial Sequence
  Description of Artificial Sequence: Synthetic oligonucleotide
  Sense Strand Starting at position 404 of SEQ ID NO: 318130
ccgaaaggcuaccucuuua

SEQ ID NO: 350632 - RNA, 19 nt, Artificial Sequence
  Description of Artificial Sequence: Synthetic oligonucleotide
  Antisense Strand to SEQ ID NO: 350631
uaaagagguagccuuucgg

SEQ ID NO: 350633 - RNA, 19 nt, Artificial Sequence
  Description of Artificial Sequence: Synthetic oligonucleotide
  Sense Strand Starting at position 404 of SEQ ID NO: 319099
gggcuugaaucauucuggu

SEQ ID NO: 350634 - RNA, 19 nt, Artificial Sequence
  Description of Artificial Sequence: Synthetic oligonucleotide
  Antisense Strand to SEQ ID NO: 350633
accagaaugauucaagccc

SEQ ID NO: 350635 - RNA, 19 nt, Artificial Sequence
  Description of Artificial Sequence: Synthetic oligonucleotide
  Sense Strand Starting at position 404 of SEQ ID NO: 319103
uugaaucauucugguagga

SEQ ID NO: 350636 - RNA, 19 nt, Artificial Sequence
  Description of Artificial Sequence: Synthetic oligonucleotide
  Antisense Strand to SEQ ID NO: 350635
uccuaccagaaugauucaa

SEQ ID NO: 350637 - RNA, 19 nt, Artificial Sequence
  Description of Artificial Sequence: Synthetic oligonucleotide
  Sense Strand Starting at position 404 of SEQ ID NO: 319105
gaaucauucugguaggaga

SEQ ID NO: 350638 - RNA, 19 nt, Artificial Sequence
  Description of Artificial Sequence: Synthetic oligonucleotide
  Antisense Strand to SEQ ID NO: 350637
ucuccuaccagaaugauuc

SEQ ID NO: 350639 - RNA, 19 nt, Artificial Sequence
  Description of Artificial Sequence: Synthetic oligonucleotide
  Sense Strand Starting at position 404 of SEQ ID NO: 319202
ggcccaaccuuccaggaaa

SEQ ID NO: 350640 - RNA, 19 nt, Artificial Sequence
  Description of Artificial Sequence: Synthetic oligonucleotide
  Antisense Strand to SEQ ID NO: 350639
uuuccuggaagguugggcc

SEQ ID NO: 350641 - RNA, 19 nt, Artificial Sequence
  Description of Artificial Sequence: Synthetic oligonucleotide
  Sense Strand Starting at position 405 of SEQ ID NO: 315873
gaguaagggucuuaccugu

SEQ ID NO: 350642 - RNA, 19 nt, Artificial Sequence
  Description of Artificial Sequence: Synthetic oligonucleotide
  Antisense Strand to SEQ ID NO: 350641
acagguaagacccuuacuc

SEQ ID NO: 350643 - RNA, 19 nt, Artificial Sequence
  Description of Artificial Sequence: Synthetic oligonucleotide
  Sense Strand Starting at position 405 of SEQ ID NO: 316531
gaucucgaaccauggacaa

SEQ ID NO: 350644 - RNA, 19 nt, Artificial Sequence
  Description of Artificial Sequence: Synthetic oligonucleotide
  Antisense Strand to SEQ ID NO: 350643
uuguccaugguucgagauc

SEQ ID NO: 350645 - RNA, 19 nt, Artificial Sequence
  Description of Artificial Sequence: Synthetic oligonucleotide
  Sense Strand Starting at position 405 of SEQ ID NO: 317711
ggcugagagcacuguguga

SEQ ID NO: 350646 - RNA, 19 nt, Artificial Sequence
  Description of Artificial Sequence: Synthetic oligonucleotide
  Antisense Strand to SEQ ID NO: 350645
ucacacagugcucucagcc

SEQ ID NO: 350647 - RNA, 19 nt, Artificial Sequence
  Description of Artificial Sequence: Synthetic oligonucleotide
  Sense Strand Starting at position 406 of SEQ ID NO: 315425
cuggacaagucaucucuga

SEQ ID NO: 350648 - RNA, 19 nt, Artificial Sequence
  Description of Artificial Sequence: Synthetic oligonucleotide
  Antisense Strand to SEQ ID NO: 350647
ucagagaugacuuguccag

SEQ ID NO: 350649 - RNA, 19 nt, Artificial Sequence
  Description of Artificial Sequence: Synthetic oligonucleotide
  Sense Strand Starting at position 406 of SEQ ID NO: 315459
uuauaaagugugggaggaa

SEQ ID NO: 350650 - RNA, 19 nt, Artificial Sequence
  Description of Artificial Sequence: Synthetic oligonucleotide
  Antisense Strand to SEQ ID NO: 350649
uuccucccacacuuuauaa

SEQ ID NO: 350651 - RNA, 19 nt, Artificial Sequence
  Description of Artificial Sequence: Synthetic oligonucleotide
  Sense Strand Starting at position 406 of SEQ ID NO: 315544
agcuaugaagugggugaaa

SEQ ID NO: 350652 - RNA, 19 nt, Artificial Sequence
  Description of Artificial Sequence: Synthetic oligonucleotide
  Antisense Strand to SEQ ID NO: 350651
uuucacccacuucauagcu

SEQ ID NO: 350653 - RNA, 19 nt, Artificial Sequence
  Description of Artificial Sequence: Synthetic oligonucleotide
  Sense Strand Starting at position 406 of SEQ ID NO: 315594
gcaucagacauucguggaa

SEQ ID NO: 350654 - RNA, 19 nt, Artificial Sequence
  Description of Artificial Sequence: Synthetic oligonucleotide
  Antisense Strand to SEQ ID NO: 350653
uuccacgaaugucugaugc

SEQ ID NO: 350655 - RNA, 19 nt, Artificial Sequence
  Description of Artificial Sequence: Synthetic oligonucleotide
  Sense Strand Starting at position 406 of SEQ ID NO: 315597
ucagacauucguggaagau

SEQ ID NO: 350656 - RNA, 19 nt, Artificial Sequence
  Description of Artificial Sequence: Synthetic oligonucleotide
  Antisense Strand to SEQ ID NO: 350655
aucuuccacgaaugucuga

SEQ ID NO: 350657 - RNA, 19 nt, Artificial Sequence
  Description of Artificial Sequence: Synthetic oligonucleotide
  Sense Strand Starting at position 406 of SEQ ID NO: 315622
gagagagcugcucauauaa

SEQ ID NO: 350658 - RNA, 19 nt, Artificial Sequence
  Description of Artificial Sequence: Synthetic oligonucleotide
  Antisense Strand to SEQ ID NO: 350657
uuauaugagcagcucucuc

SEQ ID NO: 350659 - RNA, 19 nt, Artificial Sequence
  Description of Artificial Sequence: Synthetic oligonucleotide
  Sense Strand Starting at position 406 of SEQ ID NO: 315704
aaggaauucugcuuugguu

SEQ ID NO: 350660 - RNA, 19 nt, Artificial Sequence
  Description of Artificial Sequence: Synthetic oligonucleotide
  Antisense Strand to SEQ ID NO: 350659
aaccaaagcagaauuccuu

SEQ ID NO: 350661 - RNA, 19 nt, Artificial Sequence
  Description of Artificial Sequence: Synthetic oligonucleotide
  Sense Strand Starting at position 406 of SEQ ID NO: 315717
uugguuaaguggucaauag

SEQ ID NO: 350662 - RNA, 19 nt, Artificial Sequence
  Description of Artificial Sequence: Synthetic oligonucleotide
  Antisense Strand to SEQ ID NO: 350661
cuauugaccacuuaaccaa

SEQ ID NO: 350663 - RNA, 19 nt, Artificial Sequence
  Description of Artificial Sequence: Synthetic oligonucleotide
  Sense Strand Starting at position 406 of SEQ ID NO: 315718
ugguuaaguggucaauagu

SEQ ID NO: 350664 - RNA, 19 nt, Artificial Sequence
  Description of Artificial Sequence: Synthetic oligonucleotide
  Antisense Strand to SEQ ID NO: 350663
acuauugaccacuuaacca

SEQ ID NO: 350665 - RNA, 19 nt, Artificial Sequence
  Description of Artificial Sequence: Synthetic oligonucleotide
  Sense Strand Starting at position 406 of SEQ ID NO: 315721
uuaaguggucaauagugaa

SEQ ID NO: 350666 - RNA, 19 nt, Artificial Sequence
  Description of Artificial Sequence: Synthetic oligonucleotide
  Antisense Strand to SEQ ID NO: 350665
uucacuauugaccacuuaa

SEQ ID NO: 350667 - RNA, 19 nt, Artificial Sequence
  Description of Artificial Sequence: Synthetic oligonucleotide
  Sense Strand Starting at position 406 of SEQ ID NO: 315725
guggucaauagugaaguuu

SEQ ID NO: 350668 - RNA, 19 nt, Artificial Sequence
  Description of Artificial Sequence: Synthetic oligonucleotide
  Antisense Strand to SEQ ID NO: 350667
aaacuucacuauugaccac

SEQ ID NO: 350669 - RNA, 19 nt, Artificial Sequence
  Description of Artificial Sequence: Synthetic oligonucleotide
  Sense Strand Starting at position 406 of SEQ ID NO: 316136
cuagauaagcuguguaaag

SEQ ID NO: 350670 - RNA, 19 nt, Artificial Sequence
  Description of Artificial Sequence: Synthetic oligonucleotide
  Antisense Strand to SEQ ID NO: 350669
cuuuacacagcuuaucuag

SEQ ID NO: 350671 - RNA, 19 nt, Artificial Sequence
  Description of Artificial Sequence: Synthetic oligonucleotide
  Sense Strand Starting at position 406 of SEQ ID NO: 316143
agcuguguaaaggauaauc

SEQ ID NO: 350672 - RNA, 19 nt, Artificial Sequence
  Description of Artificial Sequence: Synthetic oligonucleotide
  Antisense Strand to SEQ ID NO: 350671
gauuauccuuuacacagcu

SEQ ID NO: 350673 - RNA, 19 nt, Artificial Sequence
  Description of Artificial Sequence: Synthetic oligonucleotide
  Sense Strand Starting at position 406 of SEQ ID NO: 316145
cuguguaaaggauaaucuu

SEQ ID NO: 350674 - RNA, 19 nt, Artificial Sequence
  Description of Artificial Sequence: Synthetic oligonucleotide
  Antisense Strand to SEQ ID NO: 350673
aagauuauccuuuacacag

SEQ ID NO: 350675 - RNA, 19 nt, Artificial Sequence
  Description of Artificial Sequence: Synthetic oligonucleotide
  Sense Strand Starting at position 406 of SEQ ID NO: 316328
gugugugccauugaacaaa

SEQ ID NO: 350676 - RNA, 19 nt, Artificial Sequence
  Description of Artificial Sequence: Synthetic oligonucleotide
  Antisense Strand to SEQ ID NO: 350675
uuuguucaauggcacacac

SEQ ID NO: 350677 - RNA, 19 nt, Artificial Sequence
  Description of Artificial Sequence: Synthetic oligonucleotide
  Sense Strand Starting at position 406 of SEQ ID NO: 316348
gaucucugguacccagaaa

SEQ ID NO: 350678 - RNA, 19 nt, Artificial Sequence
  Description of Artificial Sequence: Synthetic oligonucleotide
  Antisense Strand to SEQ ID NO: 350677
uuucuggguaccagagauc

SEQ ID NO: 350679 - RNA, 19 nt, Artificial Sequence
  Description of Artificial Sequence: Synthetic oligonucleotide
  Sense Strand Starting at position 406 of SEQ ID NO: 316376
augcaagcccucugauuuc

SEQ ID NO: 350680 - RNA, 19 nt, Artificial Sequence
  Description of Artificial Sequence: Synthetic oligonucleotide
  Antisense Strand to SEQ ID NO: 350679
gaaaucagagggcuugcau

SEQ ID NO: 350681 - RNA, 19 nt, Artificial Sequence
  Description of Artificial Sequence: Synthetic oligonucleotide
  Sense Strand Starting at position 406 of SEQ ID NO: 316764
agcugaaugcauggguaaa

SEQ ID NO: 350682 - RNA, 19 nt, Artificial Sequence
  Description of Artificial Sequence: Synthetic oligonucleotide
  Antisense Strand to SEQ ID NO: 350681
uuuacccaugcauucagcu

SEQ ID NO: 350683 - RNA, 19 nt, Artificial Sequence
  Description of Artificial Sequence: Synthetic oligonucleotide
  Sense Strand Starting at position 406 of SEQ ID NO: 316765
gcugaaugcauggguaaag

SEQ ID NO: 350684 - RNA, 19 nt, Artificial Sequence
  Description of Artificial Sequence: Synthetic oligonucleotide
  Antisense Strand to SEQ ID NO: 350683
cuuuacccaugcauucagc

SEQ ID NO: 350685 - RNA, 19 nt, Artificial Sequence
  Description of Artificial Sequence: Synthetic oligonucleotide
  Sense Strand Starting at position 406 of SEQ ID NO: 316793
agggauaguaggugcuuua

SEQ ID NO: 350686 - RNA, 19 nt, Artificial Sequence
  Description of Artificial Sequence: Synthetic oligonucleotide
  Antisense Strand to SEQ ID NO: 350685
uaaagcaccuacuaucccu

SEQ ID NO: 350687 - RNA, 19 nt, Artificial Sequence
  Description of Artificial Sequence: Synthetic oligonucleotide
  Sense Strand Starting at position 406 of SEQ ID NO: 316998
gagaaagugcgucauggaa

SEQ ID NO: 350688 - RNA, 19 nt, Artificial Sequence
  Description of Artificial Sequence: Synthetic oligonucleotide
  Antisense Strand to SEQ ID NO: 350687
uuccaugacgcacuuucuc

SEQ ID NO: 350689 - RNA, 19 nt, Artificial Sequence
  Description of Artificial Sequence: Synthetic oligonucleotide
  Sense Strand Starting at position 406 of SEQ ID NO: 317424
cggauauguacccauggga

SEQ ID NO: 350690 - RNA, 19 nt, Artificial Sequence
  Description of Artificial Sequence: Synthetic oligonucleotide
  Antisense Strand to SEQ ID NO: 350689
ucccauggguacauauccg

SEQ ID NO: 350691 - RNA, 19 nt, Artificial Sequence
  Description of Artificial Sequence: Synthetic oligonucleotide
  Sense Strand Starting at position 406 of SEQ ID NO: 317427
auauguacccaugggagua

SEQ ID NO: 350692 - RNA, 19 nt, Artificial Sequence
  Description of Artificial Sequence: Synthetic oligonucleotide
  Antisense Strand to SEQ ID NO: 350691
uacucccauggguacauau

SEQ ID NO: 350693 - RNA, 19 nt, Artificial Sequence
  Description of Artificial Sequence: Synthetic oligonucleotide
  Sense Strand Starting at position 406 of SEQ ID NO: 317439
gggaguaccugugugaaau

SEQ ID NO: 350694 - RNA, 19 nt, Artificial Sequence
  Description of Artificial Sequence: Synthetic oligonucleotide
  Antisense Strand to SEQ ID NO: 350693
auuucacacagguacuccc

SEQ ID NO: 350695 - RNA, 19 nt, Artificial Sequence
  Description of Artificial Sequence: Synthetic oligonucleotide
  Sense Strand Starting at position 406 of SEQ ID NO: 317440
ggaguaccugugugaaaua

SEQ ID NO: 350696 - RNA, 19 nt, Artificial Sequence
  Description of Artificial Sequence: Synthetic oligonucleotide
  Antisense Strand to SEQ ID NO: 350695
uauuucacacagguacucc

SEQ ID NO: 350697 - RNA, 19 nt, Artificial Sequence
  Description of Artificial Sequence: Synthetic oligonucleotide
  Sense Strand Starting at position 406 of SEQ ID NO: 317476
uuucgugaucuguaaacuc

SEQ ID NO: 350698 - RNA, 19 nt, Artificial Sequence
  Description of Artificial Sequence: Synthetic oligonucleotide
  Antisense Strand to SEQ ID NO: 350697
gaguuuacagaucacgaaa

SEQ ID NO: 350699 - RNA, 19 nt, Artificial Sequence
  Description of Artificial Sequence: Synthetic oligonucleotide
  Sense Strand Starting at position 406 of SEQ ID NO: 317485
cuguaaacucccgaaauac

SEQ ID NO: 350700 - RNA, 19 nt, Artificial Sequence
  Description of Artificial Sequence: Synthetic oligonucleotide
  Antisense Strand to SEQ ID NO: 350699
guauuucgggaguuuacag

SEQ ID NO: 350701 - RNA, 19 nt, Artificial Sequence
  Description of Artificial Sequence: Synthetic oligonucleotide
  Sense Strand Starting at position 406 of SEQ ID NO: 317621
cccucaggcuaaucugaga

SEQ ID NO: 350702 - RNA, 19 nt, Artificial Sequence
  Description of Artificial Sequence: Synthetic oligonucleotide
  Antisense Strand to SEQ ID NO: 350701
ucucagauuagccugaggg

SEQ ID NO: 350703 - RNA, 19 nt, Artificial Sequence
  Description of Artificial Sequence: Synthetic oligonucleotide
  Sense Strand Starting at position 406 of SEQ ID NO: 317831
acuggagugagagguauua

SEQ ID NO: 350704 - RNA, 19 nt, Artificial Sequence
  Description of Artificial Sequence: Synthetic oligonucleotide
  Antisense Strand to SEQ ID NO: 350703
uaauaccucucacuccagu

SEQ ID NO: 350705 - RNA, 19 nt, Artificial Sequence
  Description of Artificial Sequence: Synthetic oligonucleotide
  Sense Strand Starting at position 406 of SEQ ID NO: 317966
aucuuugauccauguaucu

SEQ ID NO: 350706 - RNA, 19 nt, Artificial Sequence
  Description of Artificial Sequence: Synthetic oligonucleotide
  Antisense Strand to SEQ ID NO: 350705
agauacauggaucaaagau

SEQ ID NO: 350707 - RNA, 19 nt, Artificial Sequence
  Description of Artificial Sequence: Synthetic oligonucleotide
  Sense Strand Starting at position 406 of SEQ ID NO: 318310
gggaguaugaaccagcuuu

SEQ ID NO: 350708 - RNA, 19 nt, Artificial Sequence
  Description of Artificial Sequence: Synthetic oligonucleotide
  Antisense Strand to SEQ ID NO: 350707
aaagcugguucauacuccc

SEQ ID NO: 350709 - RNA, 19 nt, Artificial Sequence
  Description of Artificial Sequence: Synthetic oligonucleotide
  Sense Strand Starting at position 406 of SEQ ID NO: 318472
ugggaagcucuggguaauc

SEQ ID NO: 350710 - RNA, 19 nt, Artificial Sequence
  Description of Artificial Sequence: Synthetic oligonucleotide
  Antisense Strand to SEQ ID NO: 350709
gauuacccagagcuuccca

SEQ ID NO: 350711 - RNA, 19 nt, Artificial Sequence
  Description of Artificial Sequence: Synthetic oligonucleotide
  Sense Strand Starting at position 406 of SEQ ID NO: 318514
guggauaaggauuguaaca

SEQ ID NO: 350712 - RNA, 19 nt, Artificial Sequence
  Description of Artificial Sequence: Synthetic oligonucleotide
  Antisense Strand to SEQ ID NO: 350711
uguuacaauccuuauccac

SEQ ID NO: 350713 - RNA, 19 nt, Artificial Sequence
  Description of Artificial Sequence: Synthetic oligonucleotide
  Sense Strand Starting at position 406 of SEQ ID NO: 318729
agugucauugcccauuaga

SEQ ID NO: 350714 - RNA, 19 nt, Artificial Sequence
  Description of Artificial Sequence: Synthetic oligonucleotide
  Antisense Strand to SEQ ID NO: 350713
ucuaaugggcaaugacacu

SEQ ID NO: 350715 - RNA, 19 nt, Artificial Sequence
  Description of Artificial Sequence: Synthetic oligonucleotide
  Sense Strand Starting at position 406 of SEQ ID NO: 318732
gucauugcccauuagagaa

SEQ ID NO: 350716 - RNA, 19 nt, Artificial Sequence
  Description of Artificial Sequence: Synthetic oligonucleotide
  Antisense Strand to SEQ ID NO: 350715
uucucuaaugggcaaugac

SEQ ID NO: 350717 - RNA, 19 nt, Artificial Sequence
  Description of Artificial Sequence: Synthetic oligonucleotide
  Sense Strand Starting at position 406 of SEQ ID NO: 318849
ccaaguugccauuaaaguu

SEQ ID NO: 350718 - RNA, 19 nt, Artificial Sequence
  Description of Artificial Sequence: Synthetic oligonucleotide
  Antisense Strand to SEQ ID NO: 350717
aacuuuaauggcaacuugg

SEQ ID NO: 350719 - RNA, 19 nt, Artificial Sequence
  Description of Artificial Sequence: Synthetic oligonucleotide
  Sense Strand Starting at position 406 of SEQ ID NO: 318978
auugaccuaucuguaguaa

SEQ ID NO: 350720 - RNA, 19 nt, Artificial Sequence
  Description of Artificial Sequence: Synthetic oligonucleotide
  Antisense Strand to SEQ ID NO: 350719
uuacuacagauaggucaau

SEQ ID NO: 350721 - RNA, 19 nt, Artificial Sequence
  Description of Artificial Sequence: Synthetic oligonucleotide
  Sense Strand Starting at position 406 of SEQ ID NO: 319012
cgguuugaagguaguggua

SEQ ID NO: 350722 - RNA, 19 nt, Artificial Sequence
  Description of Artificial Sequence: Synthetic oligonucleotide
  Antisense Strand to SEQ ID NO: 350721
uaccacuaccuucaaaccg

SEQ ID NO: 350723 - RNA, 19 nt, Artificial Sequence
  Description of Artificial Sequence: Synthetic oligonucleotide
  Sense Strand Starting at position 406 of SEQ ID NO: 319024
agugguauucuugaauacu

SEQ ID NO: 350724 - RNA, 19 nt, Artificial Sequence
  Description of Artificial Sequence: Synthetic oligonucleotide
  Antisense Strand to SEQ ID NO: 350723
aguauucaagaauaccacu

SEQ ID NO: 350725 - RNA, 19 nt, Artificial Sequence
  Description of Artificial Sequence: Synthetic oligonucleotide
  Sense Strand Starting at position 406 of SEQ ID NO: 319120
gagagugucucaccaaaua

SEQ ID NO: 350726 - RNA, 19 nt, Artificial Sequence
  Description of Artificial Sequence: Synthetic oligonucleotide
  Antisense Strand to SEQ ID NO: 350725
uauuuggugagacacucuc

SEQ ID NO: 350727 - RNA, 19 nt, Artificial Sequence
  Description of Artificial Sequence: Synthetic oligonucleotide
  Sense Strand Starting at position 407 of SEQ ID NO: 315283
gcaagugaacccugagaca

SEQ ID NO: 350728 - RNA, 19 nt, Artificial Sequence
  Description of Artificial Sequence: Synthetic oligonucleotide
  Antisense Strand to SEQ ID NO: 350727
ugucucaggguucacuugc

SEQ ID NO: 350729 - RNA, 19 nt, Artificial Sequence
  Description of Artificial Sequence: Synthetic oligonucleotide
  Sense Strand Starting at position 407 of SEQ ID NO: 315522
ccuuuaaagccaggagacu

SEQ ID NO: 350730 - RNA, 19 nt, Artificial Sequence
  Description of Artificial Sequence: Synthetic oligonucleotide
  Antisense Strand to SEQ ID NO: 350729
agucuccuggcuuuaaagg

SEQ ID NO: 350731 - RNA, 19 nt, Artificial Sequence
  Description of Artificial Sequence: Synthetic oligonucleotide
  Sense Strand Starting at position 407 of SEQ ID NO: 315533
aggagacuccagcaugcua

SEQ ID NO: 350732 - RNA, 19 nt, Artificial Sequence
  Description of Artificial Sequence: Synthetic oligonucleotide
  Antisense Strand to SEQ ID NO: 350731
uagcaugcuggagucuccu

SEQ ID NO: 350733 - RNA, 19 nt, Artificial Sequence
  Description of Artificial Sequence: Synthetic oligonucleotide
  Sense Strand Starting at position 407 of SEQ ID NO: 315611
gggaauuuguaauaggaua

SEQ ID NO: 350734 - RNA, 19 nt, Artificial Sequence
  Description of Artificial Sequence: Synthetic oligonucleotide
  Antisense Strand to SEQ ID NO: 350733
uauccuauuacaaauuccc

SEQ ID NO: 350735 - RNA, 19 nt, Artificial Sequence
  Description of Artificial Sequence: Synthetic oligonucleotide
  Sense Strand Starting at position 407 of SEQ ID NO: 315619
guaauaggauaucuccaca

SEQ ID NO: 350736 - RNA, 19 nt, Artificial Sequence
  Description of Artificial Sequence: Synthetic oligonucleotide
  Antisense Strand to SEQ ID NO: 350735
uguggagauauccuauuac

SEQ ID NO: 350737 - RNA, 19 nt, Artificial Sequence
  Description of Artificial Sequence: Synthetic oligonucleotide
  Sense Strand Starting at position 407 of SEQ ID NO: 315983
uucugugagcuuggaagga

SEQ ID NO: 350738 - RNA, 19 nt, Artificial Sequence
  Description of Artificial Sequence: Synthetic oligonucleotide
  Antisense Strand to SEQ ID NO: 350737
uccuuccaagcucacagaa

SEQ ID NO: 350739 - RNA, 19 nt, Artificial Sequence
  Description of Artificial Sequence: Synthetic oligonucleotide
  Sense Strand Starting at position 407 of SEQ ID NO: 316149
gcauguguccuuuagcuaa

SEQ ID NO: 350740 - RNA, 19 nt, Artificial Sequence
  Description of Artificial Sequence: Synthetic oligonucleotide
  Antisense Strand to SEQ ID NO: 350739
uuagcuaaaggacacaugc

SEQ ID NO: 350741 - RNA, 19 nt, Artificial Sequence
  Description of Artificial Sequence: Synthetic oligonucleotide
  Sense Strand Starting at position 407 of SEQ ID NO: 316178
ccacauucucgauggguuu

SEQ ID NO: 350742 - RNA, 19 nt, Artificial Sequence
  Description of Artificial Sequence: Synthetic oligonucleotide
  Antisense Strand to SEQ ID NO: 350741
aaacccaucgagaaugugg

SEQ ID NO: 350743 - RNA, 19 nt, Artificial Sequence
  Description of Artificial Sequence: Synthetic oligonucleotide
  Sense Strand Starting at position 407 of SEQ ID NO: 316216
gucugugaaguugaucaau

SEQ ID NO: 350744 - RNA, 19 nt, Artificial Sequence
  Description of Artificial Sequence: Synthetic oligonucleotide
  Antisense Strand to SEQ ID NO: 350743
auugaucaacuucacagac

SEQ ID NO: 350745 - RNA, 19 nt, Artificial Sequence
  Description of Artificial Sequence: Synthetic oligonucleotide
  Sense Strand Starting at position 407 of SEQ ID NO: 316394
guuaauaaacguuaggaca

SEQ ID NO: 350746 - RNA, 19 nt, Artificial Sequence
  Description of Artificial Sequence: Synthetic oligonucleotide
  Antisense Strand to SEQ ID NO: 350745
uguccuaacguuuauuaac

SEQ ID NO: 350747 - RNA, 19 nt, Artificial Sequence
  Description of Artificial Sequence: Synthetic oligonucleotide
  Sense Strand Starting at position 407 of SEQ ID NO: 316432
auagcuaaauuagagaaga

SEQ ID NO: 350748 - RNA, 19 nt, Artificial Sequence
  Description of Artificial Sequence: Synthetic oligonucleotide
  Antisense Strand to SEQ ID NO: 350747
ucuucucuaauuuagcuau

SEQ ID NO: 350749 - RNA, 19 nt, Artificial Sequence
  Description of Artificial Sequence: Synthetic oligonucleotide
  Sense Strand Starting at position 407 of SEQ ID NO: 316556
uguggauugcaugaagauu

SEQ ID NO: 350750 - RNA, 19 nt, Artificial Sequence
  Description of Artificial Sequence: Synthetic oligonucleotide
  Antisense Strand to SEQ ID NO: 350749
aaucuucaugcaauccaca

SEQ ID NO: 350751 - RNA, 19 nt, Artificial Sequence
  Description of Artificial Sequence: Synthetic oligonucleotide
  Sense Strand Starting at position 407 of SEQ ID NO: 316601
ggucaaggagugcagauua

SEQ ID NO: 350752 - RNA, 19 nt, Artificial Sequence
  Description of Artificial Sequence: Synthetic oligonucleotide
  Antisense Strand to SEQ ID NO: 350751
uaaucugcacuccuugacc

SEQ ID NO: 350753 - RNA, 19 nt, Artificial Sequence
  Description of Artificial Sequence: Synthetic oligonucleotide
  Sense Strand Starting at position 407 of SEQ ID NO: 316606
aggagugcagauuaguaau

SEQ ID NO: 350754 - RNA, 19 nt, Artificial Sequence
  Description of Artificial Sequence: Synthetic oligonucleotide
  Antisense Strand to SEQ ID NO: 350753
auuacuaaucugcacuccu

SEQ ID NO: 350755 - RNA, 19 nt, Artificial Sequence
  Description of Artificial Sequence: Synthetic oligonucleotide
  Sense Strand Starting at position 407 of SEQ ID NO: 316608
gagugcagauuaguaauaa

SEQ ID NO: 350756 - RNA, 19 nt, Artificial Sequence
  Description of Artificial Sequence: Synthetic oligonucleotide
  Antisense Strand to SEQ ID NO: 350755
uuauuacuaaucugcacuc

SEQ ID NO: 350757 - RNA, 19 nt, Artificial Sequence
  Description of Artificial Sequence: Synthetic oligonucleotide
  Sense Strand Starting at position 407 of SEQ ID NO: 316681
ccagcucuggugcagaaau

SEQ ID NO: 350758 - RNA, 19 nt, Artificial Sequence
  Description of Artificial Sequence: Synthetic oligonucleotide
  Antisense Strand to SEQ ID NO: 350757
auuucugcaccagagcugg

SEQ ID NO: 350759 - RNA, 19 nt, Artificial Sequence
  Description of Artificial Sequence: Synthetic oligonucleotide
  Sense Strand Starting at position 407 of SEQ ID NO: 316683
agcucuggugcagaaauga

SEQ ID NO: 350760 - RNA, 19 nt, Artificial Sequence
  Description of Artificial Sequence: Synthetic oligonucleotide
  Antisense Strand to SEQ ID NO: 350759
ucauuucugcaccagagcu

SEQ ID NO: 350761 - RNA, 19 nt, Artificial Sequence
  Description of Artificial Sequence: Synthetic oligonucleotide
  Sense Strand Starting at position 407 of SEQ ID NO: 317441
agcaauauggcugaguguu

SEQ ID NO: 350762 - RNA, 19 nt, Artificial Sequence
  Description of Artificial Sequence: Synthetic oligonucleotide
  Antisense Strand to SEQ ID NO: 350761
aacacucagccauauugcu

SEQ ID NO: 350763 - RNA, 19 nt, Artificial Sequence
  Description of Artificial Sequence: Synthetic oligonucleotide
  Sense Strand Starting at position 407 of SEQ ID NO: 317451
cugaguguugcccaaacug

SEQ ID NO: 350764 - RNA, 19 nt, Artificial Sequence
  Description of Artificial Sequence: Synthetic oligonucleotide
  Antisense Strand to SEQ ID NO: 350763
caguuugggcaacacucag

SEQ ID NO: 350765 - RNA, 19 nt, Artificial Sequence
  Description of Artificial Sequence: Synthetic oligonucleotide
  Sense Strand Starting at position 407 of SEQ ID NO: 317514
gcuugucagaaggacaagu

SEQ ID NO: 350766 - RNA, 19 nt, Artificial Sequence
  Description of Artificial Sequence: Synthetic oligonucleotide
  Antisense Strand to SEQ ID NO: 350765
acuuguccuucugacaagc

SEQ ID NO: 350767 - RNA, 19 nt, Artificial Sequence
  Description of Artificial Sequence: Synthetic oligonucleotide
  Sense Strand Starting at position 407 of SEQ ID NO: 317654
cuguuaaagucacugaagu

SEQ ID NO: 350768 - RNA, 19 nt, Artificial Sequence
  Description of Artificial Sequence: Synthetic oligonucleotide
  Antisense Strand to SEQ ID NO: 350767
acuucagugacuuuaacag

SEQ ID NO: 350769 - RNA, 19 nt, Artificial Sequence
  Description of Artificial Sequence: Synthetic oligonucleotide
  Sense Strand Starting at position 407 of SEQ ID NO: 317876
cccagacgucuuuaugacu

SEQ ID NO: 350770 - RNA, 19 nt, Artificial Sequence
  Description of Artificial Sequence: Synthetic oligonucleotide
  Antisense Strand to SEQ ID NO: 350769
agucauaaagacgucuggg

SEQ ID NO: 350771 - RNA, 19 nt, Artificial Sequence
  Description of Artificial Sequence: Synthetic oligonucleotide
  Sense Strand Starting at position 407 of SEQ ID NO: 317931
uuauuaagagccuguagac

SEQ ID NO: 350772 - RNA, 19 nt, Artificial Sequence
  Description of Artificial Sequence: Synthetic oligonucleotide
  Antisense Strand to SEQ ID NO: 350771
gucuacaggcucuuaauaa

SEQ ID NO: 350773 - RNA, 19 nt, Artificial Sequence
  Description of Artificial Sequence: Synthetic oligonucleotide
  Sense Strand Starting at position 407 of SEQ ID NO: 317975
gcaguagggugcucugaga

SEQ ID NO: 350774 - RNA, 19 nt, Artificial Sequence
  Description of Artificial Sequence: Synthetic oligonucleotide
  Antisense Strand to SEQ ID NO: 350773
ucucagagcacccuacugc

SEQ ID NO: 350775 - RNA, 19 nt, Artificial Sequence
  Description of Artificial Sequence: Synthetic oligonucleotide
  Sense Strand Starting at position 407 of SEQ ID NO: 318094
cccagaaugaucugagguu

SEQ ID NO: 350776 - RNA, 19 nt, Artificial Sequence
  Description of Artificial Sequence: Synthetic oligonucleotide
  Antisense Strand to SEQ ID NO: 350775
aaccucagaucauucuggg

SEQ ID NO: 350777 - RNA, 19 nt, Artificial Sequence
  Description of Artificial Sequence: Synthetic oligonucleotide
  Sense Strand Starting at position 407 of SEQ ID NO: 318161
ccuuaaauuguguaugugu

SEQ ID NO: 350778 - RNA, 19 nt, Artificial Sequence
  Description of Artificial Sequence: Synthetic oligonucleotide
  Antisense Strand to SEQ ID NO: 350777
acacauacacaauuuaagg

SEQ ID NO: 350779 - RNA, 19 nt, Artificial Sequence
  Description of Artificial Sequence: Synthetic oligonucleotide
  Sense Strand Starting at position 407 of SEQ ID NO: 318209
aguauucgguccuuaacau

SEQ ID NO: 350780 - RNA, 19 nt, Artificial Sequence
  Description of Artificial Sequence: Synthetic oligonucleotide
  Antisense Strand to SEQ ID NO: 350779
auguuaaggaccgaauacu

SEQ ID NO: 350781 - RNA, 19 nt, Artificial Sequence
  Description of Artificial Sequence: Synthetic oligonucleotide
  Sense Strand Starting at position 407 of SEQ ID NO: 318210
guauucgguccuuaacauu

SEQ ID NO: 350782 - RNA, 19 nt, Artificial Sequence
  Description of Artificial Sequence: Synthetic oligonucleotide
  Antisense Strand to SEQ ID NO: 350781
aauguuaaggaccgaauac

SEQ ID NO: 350783 - RNA, 19 nt, Artificial Sequence
  Description of Artificial Sequence: Synthetic oligonucleotide
  Sense Strand Starting at position 407 of SEQ ID NO: 318228
uccagaugcuuucuguaca

SEQ ID NO: 350784 - RNA, 19 nt, Artificial Sequence
  Description of Artificial Sequence: Synthetic oligonucleotide
  Antisense Strand to SEQ ID NO: 350783
uguacagaaagcaucugga

SEQ ID NO: 350785 - RNA, 19 nt, Artificial Sequence
  Description of Artificial Sequence: Synthetic oligonucleotide
  Sense Strand Starting at position 407 of SEQ ID NO: 318321
ugaaguaacuuuccugaga

SEQ ID NO: 350786 - RNA, 19 nt, Artificial Sequence
  Description of Artificial Sequence: Synthetic oligonucleotide
  Antisense Strand to SEQ ID NO: 350785
ucucaggaaaguuacuuca

SEQ ID NO: 350787 - RNA, 19 nt, Artificial Sequence
  Description of Artificial Sequence: Synthetic oligonucleotide
  Sense Strand Starting at position 407 of SEQ ID NO: 318322
gaaguaacuuuccugagac

SEQ ID NO: 350788 - RNA, 19 nt, Artificial Sequence
  Description of Artificial Sequence: Synthetic oligonucleotide
  Antisense Strand to SEQ ID NO: 350787
gucucaggaaaguuacuuc

SEQ ID NO: 350789 - RNA, 19 nt, Artificial Sequence
  Description of Artificial Sequence: Synthetic oligonucleotide
  Sense Strand Starting at position 407 of SEQ ID NO: 318337
agaccagaucgccaguaaa

SEQ ID NO: 350790 - RNA, 19 nt, Artificial Sequence
  Description of Artificial Sequence: Synthetic oligonucleotide
  Antisense Strand to SEQ ID NO: 350789
uuuacuggcgaucuggucu

SEQ ID NO: 350791 - RNA, 19 nt, Artificial Sequence
  Description of Artificial Sequence: Synthetic oligonucleotide
  Sense Strand Starting at position 407 of SEQ ID NO: 318462
gugcauauggacuacugaa

SEQ ID NO: 350792 - RNA, 19 nt, Artificial Sequence
  Description of Artificial Sequence: Synthetic oligonucleotide
  Antisense Strand to SEQ ID NO: 350791
uucaguaguccauaugcac

SEQ ID NO: 350793 - RNA, 19 nt, Artificial Sequence
  Description of Artificial Sequence: Synthetic oligonucleotide
  Sense Strand Starting at position 407 of SEQ ID NO: 318683
ugugaugcacucugacauu

SEQ ID NO: 350794 - RNA, 19 nt, Artificial Sequence
  Description of Artificial Sequence: Synthetic oligonucleotide
  Antisense Strand to SEQ ID NO: 350793
aaugucagagugcaucaca

SEQ ID NO: 350795 - RNA, 19 nt, Artificial Sequence
  Description of Artificial Sequence: Synthetic oligonucleotide
  Sense Strand Starting at position 407 of SEQ ID NO: 318762
ggaagagagugcccaguau

SEQ ID NO: 350796 - RNA, 19 nt, Artificial Sequence
  Description of Artificial Sequence: Synthetic oligonucleotide
  Antisense Strand to SEQ ID NO: 350795
auacugggcacucucuucc

SEQ ID NO: 350797 - RNA, 19 nt, Artificial Sequence
  Description of Artificial Sequence: Synthetic oligonucleotide
  Sense Strand Starting at position 407 of SEQ ID NO: 318902
auggcuaagcuguaaagaa

SEQ ID NO: 350798 - RNA, 19 nt, Artificial Sequence
  Description of Artificial Sequence: Synthetic oligonucleotide
  Antisense Strand to SEQ ID NO: 350797
uucuuuacagcuuagccau

SEQ ID NO: 350799 - RNA, 19 nt, Artificial Sequence
  Description of Artificial Sequence: Synthetic oligonucleotide
  Sense Strand Starting at position 407 of SEQ ID NO: 318910
gcuguaaagaauuguuugu

SEQ ID NO: 350800 - RNA, 19 nt, Artificial Sequence
  Description of Artificial Sequence: Synthetic oligonucleotide
  Antisense Strand to SEQ ID NO: 350799
acaaacaauucuuuacagc

SEQ ID NO: 350801 - RNA, 19 nt, Artificial Sequence
  Description of Artificial Sequence: Synthetic oligonucleotide
  Sense Strand Starting at position 407 of SEQ ID NO: 318933
auagcauauccugguccau

SEQ ID NO: 350802 - RNA, 19 nt, Artificial Sequence
  Description of Artificial Sequence: Synthetic oligonucleotide
  Antisense Strand to SEQ ID NO: 350801
auggaccaggauaugcuau

SEQ ID NO: 350803 - RNA, 19 nt, Artificial Sequence
  Description of Artificial Sequence: Synthetic oligonucleotide
  Sense Strand Starting at position 407 of SEQ ID NO: 319015
uuugucauuucucugcuca

SEQ ID NO: 350804 - RNA, 19 nt, Artificial Sequence
  Description of Artificial Sequence: Synthetic oligonucleotide
  Antisense Strand to SEQ ID NO: 350803
ugagcagagaaaugacaaa

SEQ ID NO: 350805 - RNA, 19 nt, Artificial Sequence
  Description of Artificial Sequence: Synthetic oligonucleotide
  Sense Strand Starting at position 407 of SEQ ID NO: 319050
ucaaaucuccugcagugua

SEQ ID NO: 350806 - RNA, 19 nt, Artificial Sequence
  Description of Artificial Sequence: Synthetic oligonucleotide
  Antisense Strand to SEQ ID NO: 350805
uacacugcaggagauuuga

SEQ ID NO: 350807 - RNA, 19 nt, Artificial Sequence
  Description of Artificial Sequence: Synthetic oligonucleotide
  Sense Strand Starting at position 408 of SEQ ID NO: 315248
gguauugcacauuaggaau

SEQ ID NO: 350808 - RNA, 19 nt, Artificial Sequence
  Description of Artificial Sequence: Synthetic oligonucleotide
  Antisense Strand to SEQ ID NO: 350807
auuccuaaugugcaauacc

SEQ ID NO: 350809 - RNA, 19 nt, Artificial Sequence
  Description of Artificial Sequence: Synthetic oligonucleotide
  Sense Strand Starting at position 408 of SEQ ID NO: 315298
uuuggauaguuuccaggga

SEQ ID NO: 350810 - RNA, 19 nt, Artificial Sequence
  Description of Artificial Sequence: Synthetic oligonucleotide
  Antisense Strand to SEQ ID NO: 350809
ucccuggaaacuauccaaa

SEQ ID NO: 350811 - RNA, 19 nt, Artificial Sequence
  Description of Artificial Sequence: Synthetic oligonucleotide
  Sense Strand Starting at position 408 of SEQ ID NO: 315505
cggccagaaacuuaagagu

SEQ ID NO: 350812 - RNA, 19 nt, Artificial Sequence
  Description of Artificial Sequence: Synthetic oligonucleotide
  Antisense Strand to SEQ ID NO: 350811
acucuuaaguuucuggccg

SEQ ID NO: 350813 - RNA, 19 nt, Artificial Sequence
  Description of Artificial Sequence: Synthetic oligonucleotide
  Sense Strand Starting at position 408 of SEQ ID NO: 315629
ggaaauuggcuaugaagua

SEQ ID NO: 350814 - RNA, 19 nt, Artificial Sequence
  Description of Artificial Sequence: Synthetic oligonucleotide
  Antisense Strand to SEQ ID NO: 350813
uacuucauagccaauuucc

SEQ ID NO: 350815 - RNA, 19 nt, Artificial Sequence
  Description of Artificial Sequence: Synthetic oligonucleotide
  Sense Strand Starting at position 408 of SEQ ID NO: 315703
uuccuauuucucugcaugu

SEQ ID NO: 350816 - RNA, 19 nt, Artificial Sequence
  Description of Artificial Sequence: Synthetic oligonucleotide
  Antisense Strand to SEQ ID NO: 350815
acaugcagagaaauaggaa

SEQ ID NO: 350817 - RNA, 19 nt, Artificial Sequence
  Description of Artificial Sequence: Synthetic oligonucleotide
  Sense Strand Starting at position 408 of SEQ ID NO: 315705
ccuauuucucugcaugugu

SEQ ID NO: 350818 - RNA, 19 nt, Artificial Sequence
  Description of Artificial Sequence: Synthetic oligonucleotide
  Antisense Strand to SEQ ID NO: 350817
acacaugcagagaaauagg

SEQ ID NO: 350819 - RNA, 19 nt, Artificial Sequence
  Description of Artificial Sequence: Synthetic oligonucleotide
  Sense Strand Starting at position 408 of SEQ ID NO: 315792
cccugauggcuuugaaaga

SEQ ID NO: 350820 - RNA, 19 nt, Artificial Sequence
  Description of Artificial Sequence: Synthetic oligonucleotide
  Antisense Strand to SEQ ID NO: 350819
ucuuucaaagccaucaggg

SEQ ID NO: 350821 - RNA, 19 nt, Artificial Sequence
  Description of Artificial Sequence: Synthetic oligonucleotide
  Sense Strand Starting at position 408 of SEQ ID NO: 315896
cagagauuggcucaagugu

SEQ ID NO: 350822 - RNA, 19 nt, Artificial Sequence
  Description of Artificial Sequence: Synthetic oligonucleotide
  Antisense Strand to SEQ ID NO: 350821
acacuugagccaaucucug

SEQ ID NO: 350823 - RNA, 19 nt, Artificial Sequence
  Description of Artificial Sequence: Synthetic oligonucleotide
  Sense Strand Starting at position 408 of SEQ ID NO: 316100
agucuaaaugaagguuaca

SEQ ID NO: 350824 - RNA, 19 nt, Artificial Sequence
  Description of Artificial Sequence: Synthetic oligonucleotide
  Antisense Strand to SEQ ID NO: 350823
uguaaccuucauuuagacu

SEQ ID NO: 350825 - RNA, 19 nt, Artificial Sequence
  Description of Artificial Sequence: Synthetic oligonucleotide
  Sense Strand Starting at position 408 of SEQ ID NO: 316250
uggguuauuccugacugag

SEQ ID NO: 350826 - RNA, 19 nt, Artificial Sequence
  Description of Artificial Sequence: Synthetic oligonucleotide
  Antisense Strand to SEQ ID NO: 350825
cucagucaggaauaaccca

SEQ ID NO: 350827 - RNA, 19 nt, Artificial Sequence
  Description of Artificial Sequence: Synthetic oligonucleotide
  Sense Strand Starting at position 408 of SEQ ID NO: 316412
augauaauguuccugauga

SEQ ID NO: 350828 - RNA, 19 nt, Artificial Sequence
  Description of Artificial Sequence: Synthetic oligonucleotide
  Antisense Strand to SEQ ID NO: 350827
ucaucaggaacauuaucau

SEQ ID NO: 350829 - RNA, 19 nt, Artificial Sequence
  Description of Artificial Sequence: Synthetic oligonucleotide
  Sense Strand Starting at position 408 of SEQ ID NO: 316439
accauugauugacugcaua

SEQ ID NO: 350830 - RNA, 19 nt, Artificial Sequence
  Description of Artificial Sequence: Synthetic oligonucleotide
  Antisense Strand to SEQ ID NO: 350829
uaugcagucaaucaauggu

SEQ ID NO: 350831 - RNA, 19 nt, Artificial Sequence
  Description of Artificial Sequence: Synthetic oligonucleotide
  Sense Strand Starting at position 408 of SEQ ID NO: 316464
cuguguugccucucuaagu

SEQ ID NO: 350832 - RNA, 19 nt, Artificial Sequence
  Description of Artificial Sequence: Synthetic oligonucleotide
  Antisense Strand to SEQ ID NO: 350831
acuuagagaggcaacacag

SEQ ID NO: 350833 - RNA, 19 nt, Artificial Sequence
  Description of Artificial Sequence: Synthetic oligonucleotide
  Sense Strand Starting at position 408 of SEQ ID NO: 316724
augucuguccacuagugaa

SEQ ID NO: 350834 - RNA, 19 nt, Artificial Sequence
  Description of Artificial Sequence: Synthetic oligonucleotide
  Antisense Strand to SEQ ID NO: 350833
uucacuaguggacagacau

SEQ ID NO: 350835 - RNA, 19 nt, Artificial Sequence
  Description of Artificial Sequence: Synthetic oligonucleotide
  Sense Strand Starting at position 408 of SEQ ID NO: 316827
cuaccaugugcuuagaaag

SEQ ID NO: 350836 - RNA, 19 nt, Artificial Sequence
  Description of Artificial Sequence: Synthetic oligonucleotide
  Antisense Strand to SEQ ID NO: 350835
cuuucuaagcacaugguag

SEQ ID NO: 350837 - RNA, 19 nt, Artificial Sequence
  Description of Artificial Sequence: Synthetic oligonucleotide
  Sense Strand Starting at position 408 of SEQ ID NO: 316864
uagagaaugccagggcauu

SEQ ID NO: 350838 - RNA, 19 nt, Artificial Sequence
  Description of Artificial Sequence: Synthetic oligonucleotide
  Antisense Strand to SEQ ID NO: 350837
aaugcccuggcauucucua

SEQ ID NO: 350839 - RNA, 19 nt, Artificial Sequence
  Description of Artificial Sequence: Synthetic oligonucleotide
  Sense Strand Starting at position 408 of SEQ ID NO: 316865
agagaaugccagggcauua

SEQ ID NO: 350840 - RNA, 19 nt, Artificial Sequence
  Description of Artificial Sequence: Synthetic oligonucleotide
  Antisense Strand to SEQ ID NO: 350839
uaaugcccuggcauucucu

SEQ ID NO: 350841 - RNA, 19 nt, Artificial Sequence
  Description of Artificial Sequence: Synthetic oligonucleotide
  Sense Strand Starting at position 408 of SEQ ID NO: 317248
ggagaagaauguccuagcu

SEQ ID NO: 350842 - RNA, 19 nt, Artificial Sequence
  Description of Artificial Sequence: Synthetic oligonucleotide
  Antisense Strand to SEQ ID NO: 350841
agcuaggacauucuucucc

SEQ ID NO: 350843 - RNA, 19 nt, Artificial Sequence
  Description of Artificial Sequence: Synthetic oligonucleotide
  Sense Strand Starting at position 408 of SEQ ID NO: 317256
auguccuagcucuaggaga

SEQ ID NO: 350844 - RNA, 19 nt, Artificial Sequence
  Description of Artificial Sequence: Synthetic oligonucleotide
  Antisense Strand to SEQ ID NO: 350843
ucuccuagagcuaggacau

SEQ ID NO: 350845 - RNA, 19 nt, Artificial Sequence
  Description of Artificial Sequence: Synthetic oligonucleotide
  Sense Strand Starting at position 408 of SEQ ID NO: 317499
augaaucuguacucaaaug

SEQ ID NO: 350846 - RNA, 19 nt, Artificial Sequence
  Description of Artificial Sequence: Synthetic oligonucleotide
  Antisense Strand to SEQ ID NO: 350845
cauuugaguacagauucau

SEQ ID NO: 350847 - RNA, 19 nt, Artificial Sequence
  Description of Artificial Sequence: Synthetic oligonucleotide
  Sense Strand Starting at position 408 of SEQ ID NO: 317507
guacucaaauggguauuau

SEQ ID NO: 350848 - RNA, 19 nt, Artificial Sequence
  Description of Artificial Sequence: Synthetic oligonucleotide
  Antisense Strand to SEQ ID NO: 350847
auaauacccauuugaguac

SEQ ID NO: 350849 - RNA, 19 nt, Artificial Sequence
  Description of Artificial Sequence: Synthetic oligonucleotide
  Sense Strand Starting at position 408 of SEQ ID NO: 317588
ucaguuaauaaguaguagu

SEQ ID NO: 350850 - RNA, 19 nt, Artificial Sequence
  Description of Artificial Sequence: Synthetic oligonucleotide
  Antisense Strand to SEQ ID NO: 350849
acuacuacuuauuaacuga

SEQ ID NO: 350851 - RNA, 19 nt, Artificial Sequence
  Description of Artificial Sequence: Synthetic oligonucleotide
  Sense Strand Starting at position 408 of SEQ ID NO: 317616
gaacccaagucaguaugaa

SEQ ID NO: 350852 - RNA, 19 nt, Artificial Sequence
  Description of Artificial Sequence: Synthetic oligonucleotide
  Antisense Strand to SEQ ID NO: 350851
uucauacugacuuggguuc

SEQ ID NO: 350853 - RNA, 19 nt, Artificial Sequence
  Description of Artificial Sequence: Synthetic oligonucleotide
  Sense Strand Starting at position 408 of SEQ ID NO: 317695
uguguuagaugauugaaua

SEQ ID NO: 350854 - RNA, 19 nt, Artificial Sequence
  Description of Artificial Sequence: Synthetic oligonucleotide
  Antisense Strand to SEQ ID NO: 350853
uauucaaucaucuaacaca

SEQ ID NO: 350855 - RNA, 19 nt, Artificial Sequence
  Description of Artificial Sequence: Synthetic oligonucleotide
  Sense Strand Starting at position 408 of SEQ ID NO: 317696
guguuagaugauugaauaa

SEQ ID NO: 350856 - RNA, 19 nt, Artificial Sequence
  Description of Artificial Sequence: Synthetic oligonucleotide
  Antisense Strand to SEQ ID NO: 350855
uuauucaaucaucuaacac

SEQ ID NO: 350857 - RNA, 19 nt, Artificial Sequence
  Description of Artificial Sequence: Synthetic oligonucleotide
  Sense Strand Starting at position 408 of SEQ ID NO: 317962
agaagugaguaguuagaag

SEQ ID NO: 350858 - RNA, 19 nt, Artificial Sequence
  Description of Artificial Sequence: Synthetic oligonucleotide
  Antisense Strand to SEQ ID NO: 350857
cuucuaacuacucacuucu

SEQ ID NO: 350859 - RNA, 19 nt, Artificial Sequence
  Description of Artificial Sequence: Synthetic oligonucleotide
  Sense Strand Starting at position 408 of SEQ ID NO: 318132
gggaguuuacaguauacuu

SEQ ID NO: 350860 - RNA, 19 nt, Artificial Sequence
  Description of Artificial Sequence: Synthetic oligonucleotide
  Antisense Strand to SEQ ID NO: 350859
aaguauacuguaaacuccc

SEQ ID NO: 350861 - RNA, 19 nt, Artificial Sequence
  Description of Artificial Sequence: Synthetic oligonucleotide
  Sense Strand Starting at position 408 of SEQ ID NO: 318285
gucagagucacaggacaaa

SEQ ID NO: 350862 - RNA, 19 nt, Artificial Sequence
  Description of Artificial Sequence: Synthetic oligonucleotide
  Antisense Strand to SEQ ID NO: 350861
uuuguccugugacucugac

SEQ ID NO: 350863 - RNA, 19 nt, Artificial Sequence
  Description of Artificial Sequence: Synthetic oligonucleotide
  Sense Strand Starting at position 408 of SEQ ID NO: 318408
acucacaguuauguggaau

SEQ ID NO: 350864 - RNA, 19 nt, Artificial Sequence
  Description of Artificial Sequence: Synthetic oligonucleotide
  Antisense Strand to SEQ ID NO: 350863
auuccacauaacugugagu

SEQ ID NO: 350865 - RNA, 19 nt, Artificial Sequence
  Description of Artificial Sequence: Synthetic oligonucleotide
  Sense Strand Starting at position 408 of SEQ ID NO: 318479
cuacgaauuccagauguug

SEQ ID NO: 350866 - RNA, 19 nt, Artificial Sequence
  Description of Artificial Sequence: Synthetic oligonucleotide
  Antisense Strand to SEQ ID NO: 350865
caacaucuggaauucguag

SEQ ID NO: 350867 - RNA, 19 nt, Artificial Sequence
  Description of Artificial Sequence: Synthetic oligonucleotide
  Sense Strand Starting at position 408 of SEQ ID NO: 318592
guaauuaggaaguauaugu

SEQ ID NO: 350868 - RNA, 19 nt, Artificial Sequence
  Description of Artificial Sequence: Synthetic oligonucleotide
  Antisense Strand to SEQ ID NO: 350867
acauauacuuccuaauuac

SEQ ID NO: 350869 - RNA, 19 nt, Artificial Sequence
  Description of Artificial Sequence: Synthetic oligonucleotide
  Sense Strand Starting at position 408 of SEQ ID NO: 318601
aaguauauguggccaagaa

SEQ ID NO: 350870 - RNA, 19 nt, Artificial Sequence
  Description of Artificial Sequence: Synthetic oligonucleotide
  Antisense Strand to SEQ ID NO: 350869
uucuuggccacauauacuu

SEQ ID NO: 350871 - RNA, 19 nt, Artificial Sequence
  Description of Artificial Sequence: Synthetic oligonucleotide
  Sense Strand Starting at position 408 of SEQ ID NO: 318602
aguauauguggccaagaag

SEQ ID NO: 350872 - RNA, 19 nt, Artificial Sequence
  Description of Artificial Sequence: Synthetic oligonucleotide
  Antisense Strand to SEQ ID NO: 350871
cuucuuggccacauauacu

SEQ ID NO: 350873 - RNA, 19 nt, Artificial Sequence
  Description of Artificial Sequence: Synthetic oligonucleotide
  Sense Strand Starting at position 408 of SEQ ID NO: 318689
cuauuuaggugcuccuaca

SEQ ID NO: 350874 - RNA, 19 nt, Artificial Sequence
  Description of Artificial Sequence: Synthetic oligonucleotide
  Antisense Strand to SEQ ID NO: 350873
uguaggagcaccuaaauag

SEQ ID NO: 350875 - RNA, 19 nt, Artificial Sequence
  Description of Artificial Sequence: Synthetic oligonucleotide
  Sense Strand Starting at position 408 of SEQ ID NO: 318706
caauaugcugggcaugauu

SEQ ID NO: 350876 - RNA, 19 nt, Artificial Sequence
  Description of Artificial Sequence: Synthetic oligonucleotide
  Antisense Strand to SEQ ID NO: 350875
aaucaugcccagcauauug

SEQ ID NO: 350877 - RNA, 19 nt, Artificial Sequence
  Description of Artificial Sequence: Synthetic oligonucleotide
  Sense Strand Starting at position 408 of SEQ ID NO: 318986
guugacaaagcaugauaua

SEQ ID NO: 350878 - RNA, 19 nt, Artificial Sequence
  Description of Artificial Sequence: Synthetic oligonucleotide
  Antisense Strand to SEQ ID NO: 350877
uauaucaugcuuugucaac

SEQ ID NO: 350879 - RNA, 19 nt, Artificial Sequence
  Description of Artificial Sequence: Synthetic oligonucleotide
  Sense Strand Starting at position 408 of SEQ ID NO: 319019
ucaauuauaggucagugca

SEQ ID NO: 350880 - RNA, 19 nt, Artificial Sequence
  Description of Artificial Sequence: Synthetic oligonucleotide
  Antisense Strand to SEQ ID NO: 350879
ugcacugaccuauaauuga

SEQ ID NO: 350881 - RNA, 19 nt, Artificial Sequence
  Description of Artificial Sequence: Synthetic oligonucleotide
  Sense Strand Starting at position 408 of SEQ ID NO: 319153
gguugugaagcucaaugga

SEQ ID NO: 350882 - RNA, 19 nt, Artificial Sequence
  Description of Artificial Sequence: Synthetic oligonucleotide
  Antisense Strand to SEQ ID NO: 350881
uccauugagcuucacaacc

SEQ ID NO: 350883 - RNA, 19 nt, Artificial Sequence
  Description of Artificial Sequence: Synthetic oligonucleotide
  Sense Strand Starting at position 408 of SEQ ID NO: 319185
auuuguucugccugagauc

SEQ ID NO: 350884 - RNA, 19 nt, Artificial Sequence
  Description of Artificial Sequence: Synthetic oligonucleotide
  Antisense Strand to SEQ ID NO: 350883
gaucucaggcagaacaaau

SEQ ID NO: 350885 - RNA, 19 nt, Artificial Sequence
  Description of Artificial Sequence: Synthetic oligonucleotide
  Sense Strand Starting at position 408 of SEQ ID NO: 319192
cugccugagaucugagauc

SEQ ID NO: 350886 - RNA, 19 nt, Artificial Sequence
  Description of Artificial Sequence: Synthetic oligonucleotide
  Antisense Strand to SEQ ID NO: 350885
gaucucagaucucaggcag

SEQ ID NO: 350887 - RNA, 19 nt, Artificial Sequence
  Description of Artificial Sequence: Synthetic oligonucleotide
  Sense Strand Starting at position 409 of SEQ ID NO: 315380
aucagaagggauuguguuu

SEQ ID NO: 350888 - RNA, 19 nt, Artificial Sequence
  Description of Artificial Sequence: Synthetic oligonucleotide
  Antisense Strand to SEQ ID NO: 350887
aaacacaaucccuucugau

SEQ ID NO: 350889 - RNA, 19 nt, Artificial Sequence
  Description of Artificial Sequence: Synthetic oligonucleotide
  Sense Strand Starting at position 409 of SEQ ID NO: 315392
uguguuuagccagaaugag

SEQ ID NO: 350890 - RNA, 19 nt, Artificial Sequence
  Description of Artificial Sequence: Synthetic oligonucleotide
  Antisense Strand to SEQ ID NO: 350889
cucauucuggcuaaacaca

SEQ ID NO: 350891 - RNA, 19 nt, Artificial Sequence
  Description of Artificial Sequence: Synthetic oligonucleotide
  Sense Strand Starting at position 409 of SEQ ID NO: 315430
gcuucuauccuagagcaag

SEQ ID NO: 350892 - RNA, 19 nt, Artificial Sequence
  Description of Artificial Sequence: Synthetic oligonucleotide
  Antisense Strand to SEQ ID NO: 350891
cuugcucuaggauagaagc

SEQ ID NO: 350893 - RNA, 19 nt, Artificial Sequence
  Description of Artificial Sequence: Synthetic oligonucleotide
  Sense Strand Starting at position 409 of SEQ ID NO: 315498
guuguauagcauugaugaa

SEQ ID NO: 350894 - RNA, 19 nt, Artificial Sequence
  Description of Artificial Sequence: Synthetic oligonucleotide
  Antisense Strand to SEQ ID NO: 350893
uucaucaaugcuauacaac

SEQ ID NO: 350895 - RNA, 19 nt, Artificial Sequence
  Description of Artificial Sequence: Synthetic oligonucleotide
  Sense Strand Starting at position 409 of SEQ ID NO: 315505
agcauugaugaauaugcau

SEQ ID NO: 350896 - RNA, 19 nt, Artificial Sequence
  Description of Artificial Sequence: Synthetic oligonucleotide
  Antisense Strand to SEQ ID NO: 350895
augcauauucaucaaugcu

SEQ ID NO: 350897 - RNA, 19 nt, Artificial Sequence
  Description of Artificial Sequence: Synthetic oligonucleotide
  Sense Strand Starting at position 409 of SEQ ID NO: 315725
gccagugauagggaagcau

SEQ ID NO: 350898 - RNA, 19 nt, Artificial Sequence
  Description of Artificial Sequence: Synthetic oligonucleotide
  Antisense Strand to SEQ ID NO: 350897
augcuucccuaucacuggc

SEQ ID NO: 350899 - RNA, 19 nt, Artificial Sequence
  Description of Artificial Sequence: Synthetic oligonucleotide
  Sense Strand Starting at position 409 of SEQ ID NO: 315854
ucucaacuauacguugaaa

SEQ ID NO: 350900 - RNA, 19 nt, Artificial Sequence
  Description of Artificial Sequence: Synthetic oligonucleotide
  Antisense Strand to SEQ ID NO: 350899
uuucaacguauaguugaga

SEQ ID NO: 350901 - RNA, 19 nt, Artificial Sequence
  Description of Artificial Sequence: Synthetic oligonucleotide
  Sense Strand Starting at position 409 of SEQ ID NO: 315958
acaucauauguaugcacau

SEQ ID NO: 350902 - RNA, 19 nt, Artificial Sequence
  Description of Artificial Sequence: Synthetic oligonucleotide
  Antisense Strand to SEQ ID NO: 350901
augugcauacauaugaugu

SEQ ID NO: 350903 - RNA, 19 nt, Artificial Sequence
  Description of Artificial Sequence: Synthetic oligonucleotide
  Sense Strand Starting at position 409 of SEQ ID NO: 315980
gcacgcuaauuuguggauu

SEQ ID NO: 350904 - RNA, 19 nt, Artificial Sequence
  Description of Artificial Sequence: Synthetic oligonucleotide
  Antisense Strand to SEQ ID NO: 350903
aauccacaaauuagcgugc

SEQ ID NO: 350905 - RNA, 19 nt, Artificial Sequence
  Description of Artificial Sequence: Synthetic oligonucleotide
  Sense Strand Starting at position 409 of SEQ ID NO: 316008
agaugcagucuuggaagga

SEQ ID NO: 350906 - RNA, 19 nt, Artificial Sequence
  Description of Artificial Sequence: Synthetic oligonucleotide
  Antisense Strand to SEQ ID NO: 350905
uccuuccaagacugcaucu

SEQ ID NO: 350907 - RNA, 19 nt, Artificial Sequence
  Description of Artificial Sequence: Synthetic oligonucleotide
  Sense Strand Starting at position 409 of SEQ ID NO: 316123
ugugauucagauggagcau

SEQ ID NO: 350908 - RNA, 19 nt, Artificial Sequence
  Description of Artificial Sequence: Synthetic oligonucleotide
  Antisense Strand to SEQ ID NO: 350907
augcuccaucugaaucaca

SEQ ID NO: 350909 - RNA, 19 nt, Artificial Sequence
  Description of Artificial Sequence: Synthetic oligonucleotide
  Sense Strand Starting at position 409 of SEQ ID NO: 316356
uguauuuacugcuugugaa

SEQ ID NO: 350910 - RNA, 19 nt, Artificial Sequence
  Description of Artificial Sequence: Synthetic oligonucleotide
  Antisense Strand to SEQ ID NO: 350909
uucacaagcaguaaauaca

SEQ ID NO: 350911 - RNA, 19 nt, Artificial Sequence
  Description of Artificial Sequence: Synthetic oligonucleotide
  Sense Strand Starting at position 409 of SEQ ID NO: 316357
guauuuacugcuugugaau

SEQ ID NO: 350912 - RNA, 19 nt, Artificial Sequence
  Description of Artificial Sequence: Synthetic oligonucleotide
  Antisense Strand to SEQ ID NO: 350911
auucacaagcaguaaauac

SEQ ID NO: 350913 - RNA, 19 nt, Artificial Sequence
  Description of Artificial Sequence: Synthetic oligonucleotide
  Sense Strand Starting at position 409 of SEQ ID NO: 316673
ugcacaguucucuagauau

SEQ ID NO: 350914 - RNA, 19 nt, Artificial Sequence
  Description of Artificial Sequence: Synthetic oligonucleotide
  Antisense Strand to SEQ ID NO: 350913
auaucuagagaacugugca

SEQ ID NO: 350915 - RNA, 19 nt, Artificial Sequence
  Description of Artificial Sequence: Synthetic oligonucleotide
  Sense Strand Starting at position 409 of SEQ ID NO: 316683
ucuagauaugccuggauau

SEQ ID NO: 350916 - RNA, 19 nt, Artificial Sequence
  Description of Artificial Sequence: Synthetic oligonucleotide
  Antisense Strand to SEQ ID NO: 350915
auauccaggcauaucuaga

SEQ ID NO: 350917 - RNA, 19 nt, Artificial Sequence
  Description of Artificial Sequence: Synthetic oligonucleotide
  Sense Strand Starting at position 409 of SEQ ID NO: 316684
cuagauaugccuggauaug

SEQ ID NO: 350918 - RNA, 19 nt, Artificial Sequence
  Description of Artificial Sequence: Synthetic oligonucleotide
  Antisense Strand to SEQ ID NO: 350917
cauauccaggcauaucuag

SEQ ID NO: 350919 - RNA, 19 nt, Artificial Sequence
  Description of Artificial Sequence: Synthetic oligonucleotide
  Sense Strand Starting at position 409 of SEQ ID NO: 316685
uagauaugccuggauaugu

SEQ ID NO: 350920 - RNA, 19 nt, Artificial Sequence
  Description of Artificial Sequence: Synthetic oligonucleotide
  Antisense Strand to SEQ ID NO: 350919
acauauccaggcauaucua

SEQ ID NO: 350921 - RNA, 19 nt, Artificial Sequence
  Description of Artificial Sequence: Synthetic oligonucleotide
  Sense Strand Starting at position 409 of SEQ ID NO: 316737
agaugcuucuuaccugaaa

SEQ ID NO: 350922 - RNA, 19 nt, Artificial Sequence
  Description of Artificial Sequence: Synthetic oligonucleotide
  Antisense Strand to SEQ ID NO: 350921
uuucagguaagaagcaucu

SEQ ID NO: 350923 - RNA, 19 nt, Artificial Sequence
  Description of Artificial Sequence: Synthetic oligonucleotide
  Sense Strand Starting at position 409 of SEQ ID NO: 317231
aguaucacaugucuuaaag

SEQ ID NO: 350924 - RNA, 19 nt, Artificial Sequence
  Description of Artificial Sequence: Synthetic oligonucleotide
  Antisense Strand to SEQ ID NO: 350923
cuuuaagacaugugauacu

SEQ ID NO: 350925 - RNA, 19 nt, Artificial Sequence
  Description of Artificial Sequence: Synthetic oligonucleotide
  Sense Strand Starting at position 409 of SEQ ID NO: 317262
cuauuacagcuacagugaa

SEQ ID NO: 350926 - RNA, 19 nt, Artificial Sequence
  Description of Artificial Sequence: Synthetic oligonucleotide
  Antisense Strand to SEQ ID NO: 350925
uucacuguagcuguaauag

SEQ ID NO: 350927 - RNA, 19 nt, Artificial Sequence
  Description of Artificial Sequence: Synthetic oligonucleotide
  Sense Strand Starting at position 409 of SEQ ID NO: 317436
gauaguauuagugggaguu

SEQ ID NO: 350928 - RNA, 19 nt, Artificial Sequence
  Description of Artificial Sequence: Synthetic oligonucleotide
  Antisense Strand to SEQ ID NO: 350927
aacucccacuaauacuauc

SEQ ID NO: 350929 - RNA, 19 nt, Artificial Sequence
  Description of Artificial Sequence: Synthetic oligonucleotide
  Sense Strand Starting at position 409 of SEQ ID NO: 317437
auaguauuagugggaguua

SEQ ID NO: 350930 - RNA, 19 nt, Artificial Sequence
  Description of Artificial Sequence: Synthetic oligonucleotide
  Antisense Strand to SEQ ID NO: 350929
uaacucccacuaauacuau

SEQ ID NO: 350931 - RNA, 19 nt, Artificial Sequence
  Description of Artificial Sequence: Synthetic oligonucleotide
  Sense Strand Starting at position 409 of SEQ ID NO: 317442
auuagugggaguuagacuu

SEQ ID NO: 350932 - RNA, 19 nt, Artificial Sequence
  Description of Artificial Sequence: Synthetic oligonucleotide
  Antisense Strand to SEQ ID NO: 350931
aagucuaacucccacuaau

SEQ ID NO: 350933 - RNA, 19 nt, Artificial Sequence
  Description of Artificial Sequence: Synthetic oligonucleotide
  Sense Strand Starting at position 409 of SEQ ID NO: 317532
ccacaaauauugucagguu

SEQ ID NO: 350934 - RNA, 19 nt, Artificial Sequence
  Description of Artificial Sequence: Synthetic oligonucleotide
  Antisense Strand to SEQ ID NO: 350933
aaccugacaauauuugugg

SEQ ID NO: 350935 - RNA, 19 nt, Artificial Sequence
  Description of Artificial Sequence: Synthetic oligonucleotide
  Sense Strand Starting at position 409 of SEQ ID NO: 317556
uaauuuaagucugcugguu

SEQ ID NO: 350936 - RNA, 19 nt, Artificial Sequence
  Description of Artificial Sequence: Synthetic oligonucleotide
  Antisense Strand to SEQ ID NO: 350935
aaccagcagacuuaaauua

SEQ ID NO: 350937 - RNA, 19 nt, Artificial Sequence
  Description of Artificial Sequence: Synthetic oligonucleotide
  Sense Strand Starting at position 409 of SEQ ID NO: 317612
aggacauagaugcguauau

SEQ ID NO: 350938 - RNA, 19 nt, Artificial Sequence
  Description of Artificial Sequence: Synthetic oligonucleotide
  Antisense Strand to SEQ ID NO: 350937
auauacgcaucuauguccu

SEQ ID NO: 350939 - RNA, 19 nt, Artificial Sequence
  Description of Artificial Sequence: Synthetic oligonucleotide
  Sense Strand Starting at position 409 of SEQ ID NO: 317613
ggacauagaugcguauaug

SEQ ID NO: 350940 - RNA, 19 nt, Artificial Sequence
  Description of Artificial Sequence: Synthetic oligonucleotide
  Antisense Strand to SEQ ID NO: 350939
cauauacgcaucuaugucc

SEQ ID NO: 350941 - RNA, 19 nt, Artificial Sequence
  Description of Artificial Sequence: Synthetic oligonucleotide
  Sense Strand Starting at position 409 of SEQ ID NO: 317915
ugguaauaauucucugaaa

SEQ ID NO: 350942 - RNA, 19 nt, Artificial Sequence
  Description of Artificial Sequence: Synthetic oligonucleotide
  Antisense Strand to SEQ ID NO: 350941
uuucagagaauuauuacca

SEQ ID NO: 350943 - RNA, 19 nt, Artificial Sequence
  Description of Artificial Sequence: Synthetic oligonucleotide
  Sense Strand Starting at position 409 of SEQ ID NO: 317916
gguaauaauucucugaaau

SEQ ID NO: 350944 - RNA, 19 nt, Artificial Sequence
  Description of Artificial Sequence: Synthetic oligonucleotide
  Antisense Strand to SEQ ID NO: 350943
auuucagagaauuauuacc

SEQ ID NO: 350945 - RNA, 19 nt, Artificial Sequence
  Description of Artificial Sequence: Synthetic oligonucleotide
  Sense Strand Starting at position 409 of SEQ ID NO: 318385
guucuaguugguguugcau

SEQ ID NO: 350946 - RNA, 19 nt, Artificial Sequence
  Description of Artificial Sequence: Synthetic oligonucleotide
  Antisense Strand to SEQ ID NO: 350945
augcaacaccaacuagaac

SEQ ID NO: 350947 - RNA, 19 nt, Artificial Sequence
  Description of Artificial Sequence: Synthetic oligonucleotide
  Sense Strand Starting at position 409 of SEQ ID NO: 318448
gaaaguuuacacugacugu

SEQ ID NO: 350948 - RNA, 19 nt, Artificial Sequence
  Description of Artificial Sequence: Synthetic oligonucleotide
  Antisense Strand to SEQ ID NO: 350947
acagucaguguaaacuuuc

SEQ ID NO: 350949 - RNA, 19 nt, Artificial Sequence
  Description of Artificial Sequence: Synthetic oligonucleotide
  Sense Strand Starting at position 409 of SEQ ID NO: 318462
acuguacagcaucaagaua

SEQ ID NO: 350950 - RNA, 19 nt, Artificial Sequence
  Description of Artificial Sequence: Synthetic oligonucleotide
  Antisense Strand to SEQ ID NO: 350949
uaucuugaugcuguacagu

SEQ ID NO: 350951 - RNA, 19 nt, Artificial Sequence
  Description of Artificial Sequence: Synthetic oligonucleotide
  Sense Strand Starting at position 409 of SEQ ID NO: 318504
gcagguaauguuuaucaaa

SEQ ID NO: 350952 - RNA, 19 nt, Artificial Sequence
  Description of Artificial Sequence: Synthetic oligonucleotide
  Antisense Strand to SEQ ID NO: 350951
uuugauaaacauuaccugc

SEQ ID NO: 350953 - RNA, 19 nt, Artificial Sequence
  Description of Artificial Sequence: Synthetic oligonucleotide
  Sense Strand Starting at position 409 of SEQ ID NO: 318840
ucauucuuucuagagguac

SEQ ID NO: 350954 - RNA, 19 nt, Artificial Sequence
  Description of Artificial Sequence: Synthetic oligonucleotide
  Antisense Strand to SEQ ID NO: 350953
guaccucuagaaagaauga

SEQ ID NO: 350955 - RNA, 19 nt, Artificial Sequence
  Description of Artificial Sequence: Synthetic oligonucleotide
  Sense Strand Starting at position 409 of SEQ ID NO: 318975
gcuaauaaaggcuacuauu

SEQ ID NO: 350956 - RNA, 19 nt, Artificial Sequence
  Description of Artificial Sequence: Synthetic oligonucleotide
  Antisense Strand to SEQ ID NO: 350955
aauaguagccuuuauuagc

SEQ ID NO: 350957 - RNA, 19 nt, Artificial Sequence
  Description of Artificial Sequence: Synthetic oligonucleotide
  Sense Strand Starting at position 409 of SEQ ID NO: 319000
accuguaaccauuauguuu

SEQ ID NO: 350958 - RNA, 19 nt, Artificial Sequence
  Description of Artificial Sequence: Synthetic oligonucleotide
  Antisense Strand to SEQ ID NO: 350957
aaacauaaugguuacaggu

SEQ ID NO: 350959 - RNA, 19 nt, Artificial Sequence
  Description of Artificial Sequence: Synthetic oligonucleotide
  Sense Strand Starting at position 409 of SEQ ID NO: 319111
auaggcauugcugacaauu

SEQ ID NO: 350960 - RNA, 19 nt, Artificial Sequence
  Description of Artificial Sequence: Synthetic oligonucleotide
  Antisense Strand to SEQ ID NO: 350959
aauugucagcaaugccuau

SEQ ID NO: 350961 - RNA, 19 nt, Artificial Sequence
  Description of Artificial Sequence: Synthetic oligonucleotide
  Sense Strand Starting at position 409 of SEQ ID NO: 319169
auucuaaaugcauguaaug

SEQ ID NO: 350962 - RNA, 19 nt, Artificial Sequence
  Description of Artificial Sequence: Synthetic oligonucleotide
  Antisense Strand to SEQ ID NO: 350961
cauuacaugcauuuagaau

SEQ ID NO: 350963 - RNA, 19 nt, Artificial Sequence
  Description of Artificial Sequence: Synthetic oligonucleotide
  Sense Strand Starting at position 409 of SEQ ID NO: 319190
gcaagaauauuagcauagu

SEQ ID NO: 350964 - RNA, 19 nt, Artificial Sequence
  Description of Artificial Sequence: Synthetic oligonucleotide
  Antisense Strand to SEQ ID NO: 350963
acuaugcuaauauucuugc

SEQ ID NO: 350965 - RNA, 19 nt, Artificial Sequence
  Description of Artificial Sequence: Synthetic oligonucleotide
  Sense Strand Starting at position 409 of SEQ ID NO: 319193
agaauauuagcauaguucu

SEQ ID NO: 350966 - RNA, 19 nt, Artificial Sequence
  Description of Artificial Sequence: Synthetic oligonucleotide
  Antisense Strand to SEQ ID NO: 350965
agaacuaugcuaauauucu

SEQ ID NO: 350967 - RNA, 19 nt, Artificial Sequence
  Description of Artificial Sequence: Synthetic oligonucleotide
  Sense Strand Starting at position 410 of SEQ ID NO: 315294
gacacaagucaucauucgu

SEQ ID NO: 350968 - RNA, 19 nt, Artificial Sequence
  Description of Artificial Sequence: Synthetic oligonucleotide
  Antisense Strand to SEQ ID NO: 350967
acgaaugaugacuuguguc

SEQ ID NO: 350969 - RNA, 19 nt, Artificial Sequence
  Description of Artificial Sequence: Synthetic oligonucleotide
  Sense Strand Starting at position 410 of SEQ ID NO: 315301
gucaucauucgucauaaug

SEQ ID NO: 350970 - RNA, 19 nt, Artificial Sequence
  Description of Artificial Sequence: Synthetic oligonucleotide
  Antisense Strand to SEQ ID NO: 350969
cauuaugacgaaugaugac

SEQ ID NO: 350971 - RNA, 19 nt, Artificial Sequence
  Description of Artificial Sequence: Synthetic oligonucleotide
  Sense Strand Starting at position 410 of SEQ ID NO: 315309
ucgucauaaugauucugaa

SEQ ID NO: 350972 - RNA, 19 nt, Artificial Sequence
  Description of Artificial Sequence: Synthetic oligonucleotide
  Antisense Strand to SEQ ID NO: 350971
uucagaaucauuaugacga

SEQ ID NO: 350973 - RNA, 19 nt, Artificial Sequence
  Description of Artificial Sequence: Synthetic oligonucleotide
  Sense Strand Starting at position 410 of SEQ ID NO: 315345
cuuauuaaggccuguauuu

SEQ ID NO: 350974 - RNA, 19 nt, Artificial Sequence
  Description of Artificial Sequence: Synthetic oligonucleotide
  Antisense Strand to SEQ ID NO: 350973
aaauacaggccuuaauaag

SEQ ID NO: 350975 - RNA, 19 nt, Artificial Sequence
  Description of Artificial Sequence: Synthetic oligonucleotide
  Sense Strand Starting at position 410 of SEQ ID NO: 315441
acgcgagcuauugaagaau

SEQ ID NO: 350976 - RNA, 19 nt, Artificial Sequence
  Description of Artificial Sequence: Synthetic oligonucleotide
  Antisense Strand to SEQ ID NO: 350975
auucuucaauagcucgcgu

SEQ ID NO: 350977 - RNA, 19 nt, Artificial Sequence
  Description of Artificial Sequence: Synthetic oligonucleotide
  Sense Strand Starting at position 410 of SEQ ID NO: 315481
cucagugacugagugguaa

SEQ ID NO: 350978 - RNA, 19 nt, Artificial Sequence
  Description of Artificial Sequence: Synthetic oligonucleotide
  Antisense Strand to SEQ ID NO: 350977
uuaccacucagucacugag

SEQ ID NO: 350979 - RNA, 19 nt, Artificial Sequence
  Description of Artificial Sequence: Synthetic oligonucleotide
  Sense Strand Starting at position 410 of SEQ ID NO: 315483
cagugacugagugguaaca

SEQ ID NO: 350980 - RNA, 19 nt, Artificial Sequence
  Description of Artificial Sequence: Synthetic oligonucleotide
  Antisense Strand to SEQ ID NO: 350979
uguuaccacucagucacug

SEQ ID NO: 350981 - RNA, 19 nt, Artificial Sequence
  Description of Artificial Sequence: Synthetic oligonucleotide
  Sense Strand Starting at position 410 of SEQ ID NO: 315711
acgaguuaugguggacaag

SEQ ID NO: 350982 - RNA, 19 nt, Artificial Sequence
  Description of Artificial Sequence: Synthetic oligonucleotide
  Antisense Strand to SEQ ID NO: 350981
cuuguccaccauaacucgu

SEQ ID NO: 350983 - RNA, 19 nt, Artificial Sequence
  Description of Artificial Sequence: Synthetic oligonucleotide
  Sense Strand Starting at position 410 of SEQ ID NO: 315825
gcuugucucagagggaaga

SEQ ID NO: 350984 - RNA, 19 nt, Artificial Sequence
  Description of Artificial Sequence: Synthetic oligonucleotide
  Antisense Strand to SEQ ID NO: 350983
ucuucccucugagacaagc

SEQ ID NO: 350985 - RNA, 19 nt, Artificial Sequence
  Description of Artificial Sequence: Synthetic oligonucleotide
  Sense Strand Starting at position 410 of SEQ ID NO: 315954
ccgugaacccgugcaugua

SEQ ID NO: 350986 - RNA, 19 nt, Artificial Sequence
  Description of Artificial Sequence: Synthetic oligonucleotide
  Antisense Strand to SEQ ID NO: 350985
uacaugcacggguucacgg

SEQ ID NO: 350987 - RNA, 19 nt, Artificial Sequence
  Description of Artificial Sequence: Synthetic oligonucleotide
  Sense Strand Starting at position 410 of SEQ ID NO: 316030
uuaaaugaugcugauucga

SEQ ID NO: 350988 - RNA, 19 nt, Artificial Sequence
  Description of Artificial Sequence: Synthetic oligonucleotide
  Antisense Strand to SEQ ID NO: 350987
ucgaaucagcaucauuuaa

SEQ ID NO: 350989 - RNA, 19 nt, Artificial Sequence
  Description of Artificial Sequence: Synthetic oligonucleotide
  Sense Strand Starting at position 410 of SEQ ID NO: 316032
aaaugaugcugauucgaga

SEQ ID NO: 350990 - RNA, 19 nt, Artificial Sequence
  Description of Artificial Sequence: Synthetic oligonucleotide
  Antisense Strand to SEQ ID NO: 350989
ucucgaaucagcaucauuu

SEQ ID NO: 350991 - RNA, 19 nt, Artificial Sequence
  Description of Artificial Sequence: Synthetic oligonucleotide
  Sense Strand Starting at position 410 of SEQ ID NO: 316167
ucuucuaggagcggauuaa

SEQ ID NO: 350992 - RNA, 19 nt, Artificial Sequence
  Description of Artificial Sequence: Synthetic oligonucleotide
  Antisense Strand to SEQ ID NO: 350991
uuaauccgcuccuagaaga

SEQ ID NO: 350993 - RNA, 19 nt, Artificial Sequence
  Description of Artificial Sequence: Synthetic oligonucleotide
  Sense Strand Starting at position 410 of SEQ ID NO: 316176
agcggauuaacagggcaaa

SEQ ID NO: 350994 - RNA, 19 nt, Artificial Sequence
  Description of Artificial Sequence: Synthetic oligonucleotide
  Antisense Strand to SEQ ID NO: 350993
uuugcccuguuaauccgcu

SEQ ID NO: 350995 - RNA, 19 nt, Artificial Sequence
  Description of Artificial Sequence: Synthetic oligonucleotide
  Sense Strand Starting at position 410 of SEQ ID NO: 316480
aaggucgacuuguccagaa

SEQ ID NO: 350996 - RNA, 19 nt, Artificial Sequence
  Description of Artificial Sequence: Synthetic oligonucleotide
  Antisense Strand to SEQ ID NO: 350995
uucuggacaagucgaccuu

SEQ ID NO: 350997 - RNA, 19 nt, Artificial Sequence
  Description of Artificial Sequence: Synthetic oligonucleotide
  Sense Strand Starting at position 410 of SEQ ID NO: 316855
cccuucuuacucgacuaga

SEQ ID NO: 350998 - RNA, 19 nt, Artificial Sequence
  Description of Artificial Sequence: Synthetic oligonucleotide
  Antisense Strand to SEQ ID NO: 350997
ucuagucgaguaagaaggg

SEQ ID NO: 350999 - RNA, 19 nt, Artificial Sequence
  Description of Artificial Sequence: Synthetic oligonucleotide
  Sense Strand Starting at position 410 of SEQ ID NO: 317404
gguauucuuccugaauacc

SEQ ID NO: 351000 - RNA, 19 nt, Artificial Sequence
  Description of Artificial Sequence: Synthetic oligonucleotide
  Antisense Strand to SEQ ID NO: 350999
gguauucaggaagaauacc

SEQ ID NO: 351001 - RNA, 19 nt, Artificial Sequence
  Description of Artificial Sequence: Synthetic oligonucleotide
  Sense Strand Starting at position 410 of SEQ ID NO: 317429
ucgcguugagcuccacaua

SEQ ID NO: 351002 - RNA, 19 nt, Artificial Sequence
  Description of Artificial Sequence: Synthetic oligonucleotide
  Antisense Strand to SEQ ID NO: 351001
uauguggagcucaacgcga

SEQ ID NO: 351003 - RNA, 19 nt, Artificial Sequence
  Description of Artificial Sequence: Synthetic oligonucleotide
  Sense Strand Starting at position 410 of SEQ ID NO: 317573
gcguguaaugugcuuguau

SEQ ID NO: 351004 - RNA, 19 nt, Artificial Sequence
  Description of Artificial Sequence: Synthetic oligonucleotide
  Antisense Strand to SEQ ID NO: 351003
auacaagcacauuacacgc

SEQ ID NO: 351005 - RNA, 19 nt, Artificial Sequence
  Description of Artificial Sequence: Synthetic oligonucleotide
  Sense Strand Starting at position 410 of SEQ ID NO: 317614
acguaugaauaccuaaaua

SEQ ID NO: 351006 - RNA, 19 nt, Artificial Sequence
  Description of Artificial Sequence: Synthetic oligonucleotide
  Antisense Strand to SEQ ID NO: 351005
uauuuagguauucauacgu

SEQ ID NO: 351007 - RNA, 19 nt, Artificial Sequence
  Description of Artificial Sequence: Synthetic oligonucleotide
  Sense Strand Starting at position 410 of SEQ ID NO: 317974
agcuaagacuucuuugacu

SEQ ID NO: 351008 - RNA, 19 nt, Artificial Sequence
  Description of Artificial Sequence: Synthetic oligonucleotide
  Antisense Strand to SEQ ID NO: 351007
agucaaagaagucuuagcu

SEQ ID NO: 351009 - RNA, 19 nt, Artificial Sequence
  Description of Artificial Sequence: Synthetic oligonucleotide
  Sense Strand Starting at position 410 of SEQ ID NO: 318047
acugauaaucagugucacu

SEQ ID NO: 351010 - RNA, 19 nt, Artificial Sequence
  Description of Artificial Sequence: Synthetic oligonucleotide
  Antisense Strand to SEQ ID NO: 351009
agugacacugauuaucagu

SEQ ID NO: 351011 - RNA, 19 nt, Artificial Sequence
  Description of Artificial Sequence: Synthetic oligonucleotide
  Sense Strand Starting at position 410 of SEQ ID NO: 318054
aucagugucacuuaauggu

SEQ ID NO: 351012 - RNA, 19 nt, Artificial Sequence
  Description of Artificial Sequence: Synthetic oligonucleotide
  Antisense Strand to SEQ ID NO: 351011
accauuaagugacacugau

SEQ ID NO: 351013 - RNA, 19 nt, Artificial Sequence
  Description of Artificial Sequence: Synthetic oligonucleotide
  Sense Strand Starting at position 410 of SEQ ID NO: 318137
gaaguuaaaucguuuacug

SEQ ID NO: 351014 - RNA, 19 nt, Artificial Sequence
  Description of Artificial Sequence: Synthetic oligonucleotide
  Antisense Strand to SEQ ID NO: 351013
caguaaacgauuuaacuuc

SEQ ID NO: 351015 - RNA, 19 nt, Artificial Sequence
  Description of Artificial Sequence: Synthetic oligonucleotide
  Sense Strand Starting at position 410 of SEQ ID NO: 318139
aguuaaaucguuuacugaa

SEQ ID NO: 351016 - RNA, 19 nt, Artificial Sequence
  Description of Artificial Sequence: Synthetic oligonucleotide
  Antisense Strand to SEQ ID NO: 351015
uucaguaaacgauuuaacu

SEQ ID NO: 351017 - RNA, 19 nt, Artificial Sequence
  Description of Artificial Sequence: Synthetic oligonucleotide
  Sense Strand Starting at position 410 of SEQ ID NO: 318141
uuaaaucguuuacugaaga

SEQ ID NO: 351018 - RNA, 19 nt, Artificial Sequence
  Description of Artificial Sequence: Synthetic oligonucleotide
  Antisense Strand to SEQ ID NO: 351017
ucuucaguaaacgauuuaa

SEQ ID NO: 351019 - RNA, 19 nt, Artificial Sequence
  Description of Artificial Sequence: Synthetic oligonucleotide
  Sense Strand Starting at position 410 of SEQ ID NO: 318146
ucguuuacugaagauuaca

SEQ ID NO: 351020 - RNA, 19 nt, Artificial Sequence
  Description of Artificial Sequence: Synthetic oligonucleotide
  Antisense Strand to SEQ ID NO: 351019
uguaaucuucaguaaacga

SEQ ID NO: 351021 - RNA, 19 nt, Artificial Sequence
  Description of Artificial Sequence: Synthetic oligonucleotide
  Sense Strand Starting at position 410 of SEQ ID NO: 318220
gucccuugagaacacuuua

SEQ ID NO: 351022 - RNA, 19 nt, Artificial Sequence
  Description of Artificial Sequence: Synthetic oligonucleotide
  Antisense Strand to SEQ ID NO: 351021
uaaaguguucucaagggac

SEQ ID NO: 351023 - RNA, 19 nt, Artificial Sequence
  Description of Artificial Sequence: Synthetic oligonucleotide
  Sense Strand Starting at position 410 of SEQ ID NO: 318683
aaagacuagcauugaaguu

SEQ ID NO: 351024 - RNA, 19 nt, Artificial Sequence
  Description of Artificial Sequence: Synthetic oligonucleotide
  Antisense Strand to SEQ ID NO: 351023
aacuucaaugcuagucuuu

SEQ ID NO: 351025 - RNA, 19 nt, Artificial Sequence
  Description of Artificial Sequence: Synthetic oligonucleotide
  Sense Strand Starting at position 410 of SEQ ID NO: 318739
aauagcaugccaggagauu

SEQ ID NO: 351026 - RNA, 19 nt, Artificial Sequence
  Description of Artificial Sequence: Synthetic oligonucleotide
  Antisense Strand to SEQ ID NO: 351025
aaucuccuggcaugcuauu

SEQ ID NO: 351027 - RNA, 19 nt, Artificial Sequence
  Description of Artificial Sequence: Synthetic oligonucleotide
  Sense Strand Starting at position 410 of SEQ ID NO: 318843
agugcugguacauagagaa

SEQ ID NO: 351028 - RNA, 19 nt, Artificial Sequence
  Description of Artificial Sequence: Synthetic oligonucleotide
  Antisense Strand to SEQ ID NO: 351027
uucucuauguaccagcacu

SEQ ID NO: 351029 - RNA, 19 nt, Artificial Sequence
  Description of Artificial Sequence: Synthetic oligonucleotide
  Sense Strand Starting at position 410 of SEQ ID NO: 318894
uggaacuuaucuucuagua

SEQ ID NO: 351030 - RNA, 19 nt, Artificial Sequence
  Description of Artificial Sequence: Synthetic oligonucleotide
  Antisense Strand to SEQ ID NO: 351029
uacuagaagauaaguucca

SEQ ID NO: 351031 - RNA, 19 nt, Artificial Sequence
  Description of Artificial Sequence: Synthetic oligonucleotide
  Sense Strand Starting at position 410 of SEQ ID NO: 318958
uugauagaaaguggucagu

SEQ ID NO: 351032 - RNA, 19 nt, Artificial Sequence
  Description of Artificial Sequence: Synthetic oligonucleotide
  Antisense Strand to SEQ ID NO: 351031
acugaccacuuucuaucaa

SEQ ID NO: 351033 - RNA, 19 nt, Artificial Sequence
  Description of Artificial Sequence: Synthetic oligonucleotide
  Sense Strand Starting at position 410 of SEQ ID NO: 318960
gauagaaaguggucagugu

SEQ ID NO: 351034 - RNA, 19 nt, Artificial Sequence
  Description of Artificial Sequence: Synthetic oligonucleotide
  Antisense Strand to SEQ ID NO: 351033
acacugaccacuuucuauc

SEQ ID NO: 351035 - RNA, 19 nt, Artificial Sequence
  Description of Artificial Sequence: Synthetic oligonucleotide
  Sense Strand Starting at position 410 of SEQ ID NO: 318961
auagaaaguggucaguguu

SEQ ID NO: 351036 - RNA, 19 nt, Artificial Sequence
  Description of Artificial Sequence: Synthetic oligonucleotide
  Antisense Strand to SEQ ID NO: 351035
aacacugaccacuuucuau

SEQ ID NO: 351037 - RNA, 19 nt, Artificial Sequence
  Description of Artificial Sequence: Synthetic oligonucleotide
  Sense Strand Starting at position 410 of SEQ ID NO: 318971
gucaguguuauagagagaa

SEQ ID NO: 351038 - RNA, 19 nt, Artificial Sequence
  Description of Artificial Sequence: Synthetic oligonucleotide
  Antisense Strand to SEQ ID NO: 351037
uucucucuauaacacugac

SEQ ID NO: 351039 - RNA, 19 nt, Artificial Sequence
  Description of Artificial Sequence: Synthetic oligonucleotide
  Sense Strand Starting at position 410 of SEQ ID NO: 319051
gcuaguucccacugagaag

SEQ ID NO: 351040 - RNA, 19 nt, Artificial Sequence
  Description of Artificial Sequence: Synthetic oligonucleotide
  Antisense Strand to SEQ ID NO: 351039
cuucucagugggaacuagc

SEQ ID NO: 351041 - RNA, 19 nt, Artificial Sequence
  Description of Artificial Sequence: Synthetic oligonucleotide
  Sense Strand Starting at position 410 of SEQ ID NO: 319057
ucccacugagaagguaaua

SEQ ID NO: 351042 - RNA, 19 nt, Artificial Sequence
  Description of Artificial Sequence: Synthetic oligonucleotide
  Antisense Strand to SEQ ID NO: 351041
uauuaccuucucaguggga

SEQ ID NO: 351043 - RNA, 19 nt, Artificial Sequence
  Description of Artificial Sequence: Synthetic oligonucleotide
  Sense Strand Starting at position 410 of SEQ ID NO: 319106
gcaagucauuuagaagaac

SEQ ID NO: 351044 - RNA, 19 nt, Artificial Sequence
  Description of Artificial Sequence: Synthetic oligonucleotide
  Antisense Strand to SEQ ID NO: 351043
guucuucuaaaugacuugc

SEQ ID NO: 351045 - RNA, 19 nt, Artificial Sequence
  Description of Artificial Sequence: Synthetic oligonucleotide
  Sense Strand Starting at position 410 of SEQ ID NO: 319161
uuccacacugugugacaaa

SEQ ID NO: 351046 - RNA, 19 nt, Artificial Sequence
  Description of Artificial Sequence: Synthetic oligonucleotide
  Antisense Strand to SEQ ID NO: 351045
uuugucacacaguguggaa

SEQ ID NO: 351047 - RNA, 19 nt, Artificial Sequence
  Description of Artificial Sequence: Synthetic oligonucleotide
  Sense Strand Starting at position 411 of SEQ ID NO: 315292
uuuaucaagcugugaagaa

SEQ ID NO: 351048 - RNA, 19 nt, Artificial Sequence
  Description of Artificial Sequence: Synthetic oligonucleotide
  Antisense Strand to SEQ ID NO: 351047
uucuucacagcuugauaaa

SEQ ID NO: 351049 - RNA, 19 nt, Artificial Sequence
  Description of Artificial Sequence: Synthetic oligonucleotide
  Sense Strand Starting at position 411 of SEQ ID NO: 315382
uugauuacacugggaacuu

SEQ ID NO: 351050 - RNA, 19 nt, Artificial Sequence
  Description of Artificial Sequence: Synthetic oligonucleotide
  Antisense Strand to SEQ ID NO: 351049
aaguucccaguguaaucaa

SEQ ID NO: 351051 - RNA, 19 nt, Artificial Sequence
  Description of Artificial Sequence: Synthetic oligonucleotide
  Sense Strand Starting at position 411 of SEQ ID NO: 315565
uugucaacaugguuucuca

SEQ ID NO: 351052 - RNA, 19 nt, Artificial Sequence
  Description of Artificial Sequence: Synthetic oligonucleotide
  Antisense Strand to SEQ ID NO: 351051
ugagaaaccauguugacaa

SEQ ID NO: 351053 - RNA, 19 nt, Artificial Sequence
  Description of Artificial Sequence: Synthetic oligonucleotide
  Sense Strand Starting at position 411 of SEQ ID NO: 315575
gguuucucacaccaaguau

SEQ ID NO: 351054 - RNA, 19 nt, Artificial Sequence
  Description of Artificial Sequence: Synthetic oligonucleotide
  Antisense Strand to SEQ ID NO: 351053
auacuuggugugagaaacc

SEQ ID NO: 351055 - RNA, 19 nt, Artificial Sequence
  Description of Artificial Sequence: Synthetic oligonucleotide
  Sense Strand Starting at position 411 of SEQ ID NO: 315679
acuggugaugcuuauggaa

SEQ ID NO: 351056 - RNA, 19 nt, Artificial Sequence
  Description of Artificial Sequence: Synthetic oligonucleotide
  Antisense Strand to SEQ ID NO: 351055
uuccauaagcaucaccagu

SEQ ID NO: 351057 - RNA, 19 nt, Artificial Sequence
  Description of Artificial Sequence: Synthetic oligonucleotide
  Sense Strand Starting at position 411 of SEQ ID NO: 315691
uauggaaagucaguauaau

SEQ ID NO: 351058 - RNA, 19 nt, Artificial Sequence
  Description of Artificial Sequence: Synthetic oligonucleotide
  Antisense Strand to SEQ ID NO: 351057
auuauacugacuuuccaua

SEQ ID NO: 351059 - RNA, 19 nt, Artificial Sequence
  Description of Artificial Sequence: Synthetic oligonucleotide
  Sense Strand Starting at position 411 of SEQ ID NO: 315702
aguauaaugcuacagccaa

SEQ ID NO: 351060 - RNA, 19 nt, Artificial Sequence
  Description of Artificial Sequence: Synthetic oligonucleotide
  Antisense Strand to SEQ ID NO: 351059
uuggcuguagcauuauacu

SEQ ID NO: 351061 - RNA, 19 nt, Artificial Sequence
  Description of Artificial Sequence: Synthetic oligonucleotide
  Sense Strand Starting at position 411 of SEQ ID NO: 315817
aaaggaaguugucuaaauu

SEQ ID NO: 351062 - RNA, 19 nt, Artificial Sequence
  Description of Artificial Sequence: Synthetic oligonucleotide
  Antisense Strand to SEQ ID NO: 351061
aauuuagacaacuuccuuu

SEQ ID NO: 351063 - RNA, 19 nt, Artificial Sequence
  Description of Artificial Sequence: Synthetic oligonucleotide
  Sense Strand Starting at position 411 of SEQ ID NO: 315975
auguaacuguuuccauaug

SEQ ID NO: 351064 - RNA, 19 nt, Artificial Sequence
  Description of Artificial Sequence: Synthetic oligonucleotide
  Antisense Strand to SEQ ID NO: 351063
cauauggaaacaguuacau

SEQ ID NO: 351065 - RNA, 19 nt, Artificial Sequence
  Description of Artificial Sequence: Synthetic oligonucleotide
  Sense Strand Starting at position 411 of SEQ ID NO: 315983
guuuccauauggguuccaa

SEQ ID NO: 351066 - RNA, 19 nt, Artificial Sequence
  Description of Artificial Sequence: Synthetic oligonucleotide
  Antisense Strand to SEQ ID NO: 351065
uuggaacccauauggaaac

SEQ ID NO: 351067 - RNA, 19 nt, Artificial Sequence
  Description of Artificial Sequence: Synthetic oligonucleotide
  Sense Strand Starting at position 411 of SEQ ID NO: 316051
ccaaguuggugacucuuga

SEQ ID NO: 351068 - RNA, 19 nt, Artificial Sequence
  Description of Artificial Sequence: Synthetic oligonucleotide
  Antisense Strand to SEQ ID NO: 351067
ucaagagucaccaacuugg

SEQ ID NO: 351069 - RNA, 19 nt, Artificial Sequence
  Description of Artificial Sequence: Synthetic oligonucleotide
  Sense Strand Starting at position 411 of SEQ ID NO: 316076
gguaacuucucauuaguuu

SEQ ID NO: 351070 - RNA, 19 nt, Artificial Sequence
  Description of Artificial Sequence: Synthetic oligonucleotide
  Antisense Strand to SEQ ID NO: 351069
aaacuaaugagaaguuacc

SEQ ID NO: 351071 - RNA, 19 nt, Artificial Sequence
  Description of Artificial Sequence: Synthetic oligonucleotide
  Sense Strand Starting at position 411 of SEQ ID NO: 316105
ggaaauuacugcuccaaga

SEQ ID NO: 351072 - RNA, 19 nt, Artificial Sequence
  Description of Artificial Sequence: Synthetic oligonucleotide
  Antisense Strand to SEQ ID NO: 351071
ucuuggagcaguaauuucc

SEQ ID NO: 351073 - RNA, 19 nt, Artificial Sequence
  Description of Artificial Sequence: Synthetic oligonucleotide
  Sense Strand Starting at position 411 of SEQ ID NO: 316381
uccucagaacauuggcaau

SEQ ID NO: 351074 - RNA, 19 nt, Artificial Sequence
  Description of Artificial Sequence: Synthetic oligonucleotide
  Antisense Strand to SEQ ID NO: 351073
auugccaauguucugagga

SEQ ID NO: 351075 - RNA, 19 nt, Artificial Sequence
  Description of Artificial Sequence: Synthetic oligonucleotide
  Sense Strand Starting at position 411 of SEQ ID NO: 316393
uggcaauggccuuggagaa

SEQ ID NO: 351076 - RNA, 19 nt, Artificial Sequence
  Description of Artificial Sequence: Synthetic oligonucleotide
  Antisense Strand to SEQ ID NO: 351075
uucuccaaggccauugcca

SEQ ID NO: 351077 - RNA, 19 nt, Artificial Sequence
  Description of Artificial Sequence: Synthetic oligonucleotide
  Sense Strand Starting at position 411 of SEQ ID NO: 316394
ggcaauggccuuggagaaa

SEQ ID NO: 351078 - RNA, 19 nt, Artificial Sequence
  Description of Artificial Sequence: Synthetic oligonucleotide
  Antisense Strand to SEQ ID NO: 351077
uuucuccaaggccauugcc

SEQ ID NO: 351079 - RNA, 19 nt, Artificial Sequence
  Description of Artificial Sequence: Synthetic oligonucleotide
  Sense Strand Starting at position 411 of SEQ ID NO: 316699
cguguuuacguaucucgga

SEQ ID NO: 351080 - RNA, 19 nt, Artificial Sequence
  Description of Artificial Sequence: Synthetic oligonucleotide
  Antisense Strand to SEQ ID NO: 351079
uccgagauacguaaacacg

SEQ ID NO: 351081 - RNA, 19 nt, Artificial Sequence
  Description of Artificial Sequence: Synthetic oligonucleotide
  Sense Strand Starting at position 411 of SEQ ID NO: 317766
gaacuauuugcauguguac

SEQ ID NO: 351082 - RNA, 19 nt, Artificial Sequence
  Description of Artificial Sequence: Synthetic oligonucleotide
  Antisense Strand to SEQ ID NO: 351081
guacacaugcaaauaguuc

SEQ ID NO: 351083 - RNA, 19 nt, Artificial Sequence
  Description of Artificial Sequence: Synthetic oligonucleotide
  Sense Strand Starting at position 411 of SEQ ID NO: 318241
uaaacuugcggucacauua

SEQ ID NO: 351084 - RNA, 19 nt, Artificial Sequence
  Description of Artificial Sequence: Synthetic oligonucleotide
  Antisense Strand to SEQ ID NO: 351083
uaaugugaccgcaaguuua

SEQ ID NO: 351085 - RNA, 19 nt, Artificial Sequence
  Description of Artificial Sequence: Synthetic oligonucleotide
  Sense Strand Starting at position 411 of SEQ ID NO: 318275
gucgucgcucucccauaaa

SEQ ID NO: 351086 - RNA, 19 nt, Artificial Sequence
  Description of Artificial Sequence: Synthetic oligonucleotide
  Antisense Strand to SEQ ID NO: 351085
uuuaugggagagcgacgac

SEQ ID NO: 351087 - RNA, 19 nt, Artificial Sequence
  Description of Artificial Sequence: Synthetic oligonucleotide
  Sense Strand Starting at position 411 of SEQ ID NO: 318310
uuaagagcccuuuacauag

SEQ ID NO: 351088 - RNA, 19 nt, Artificial Sequence
  Description of Artificial Sequence: Synthetic oligonucleotide
  Antisense Strand to SEQ ID NO: 351087
cuauguaaagggcucuuaa

SEQ ID NO: 351089 - RNA, 19 nt, Artificial Sequence
  Description of Artificial Sequence: Synthetic oligonucleotide
  Sense Strand Starting at position 411 of SEQ ID NO: 318327
agugguuucuaccuuauca

SEQ ID NO: 351090 - RNA, 19 nt, Artificial Sequence
  Description of Artificial Sequence: Synthetic oligonucleotide
  Antisense Strand to SEQ ID NO: 351089
ugauaagguagaaaccacu

SEQ ID NO: 351091 - RNA, 19 nt, Artificial Sequence
  Description of Artificial Sequence: Synthetic oligonucleotide
  Sense Strand Starting at position 411 of SEQ ID NO: 318329
ugguuucuaccuuaucagu

SEQ ID NO: 351092 - RNA, 19 nt, Artificial Sequence
  Description of Artificial Sequence: Synthetic oligonucleotide
  Antisense Strand to SEQ ID NO: 351091
acugauaagguagaaacca

SEQ ID NO: 351093 - RNA, 19 nt, Artificial Sequence
  Description of Artificial Sequence: Synthetic oligonucleotide
  Sense Strand Starting at position 411 of SEQ ID NO: 318348
auaaacuaucacggguuau

SEQ ID NO: 351094 - RNA, 19 nt, Artificial Sequence
  Description of Artificial Sequence: Synthetic oligonucleotide
  Antisense Strand to SEQ ID NO: 351093
auaacccgugauaguuuau

SEQ ID NO: 351095 - RNA, 19 nt, Artificial Sequence
  Description of Artificial Sequence: Synthetic oligonucleotide
  Sense Strand Starting at position 411 of SEQ ID NO: 318358
acggguuaucgugaguaca

SEQ ID NO: 351096 - RNA, 19 nt, Artificial Sequence
  Description of Artificial Sequence: Synthetic oligonucleotide
  Antisense Strand to SEQ ID NO: 351095
uguacucacgauaacccgu

SEQ ID NO: 351097 - RNA, 19 nt, Artificial Sequence
  Description of Artificial Sequence: Synthetic oligonucleotide
  Sense Strand Starting at position 411 of SEQ ID NO: 318359
cggguuaucgugaguacag

SEQ ID NO: 351098 - RNA, 19 nt, Artificial Sequence
  Description of Artificial Sequence: Synthetic oligonucleotide
  Antisense Strand to SEQ ID NO: 351097
cuguacucacgauaacccg

SEQ ID NO: 351099 - RNA, 19 nt, Artificial Sequence
  Description of Artificial Sequence: Synthetic oligonucleotide
  Sense Strand Starting at position 411 of SEQ ID NO: 318423
aagugauuuacgugcauug

SEQ ID NO: 351100 - RNA, 19 nt, Artificial Sequence
  Description of Artificial Sequence: Synthetic oligonucleotide
  Antisense Strand to SEQ ID NO: 351099
caaugcacguaaaucacuu

SEQ ID NO: 351101 - RNA, 19 nt, Artificial Sequence
  Description of Artificial Sequence: Synthetic oligonucleotide
  Sense Strand Starting at position 411 of SEQ ID NO: 318433
cgugcauugucuccauuua

SEQ ID NO: 351102 - RNA, 19 nt, Artificial Sequence
  Description of Artificial Sequence: Synthetic oligonucleotide
  Antisense Strand to SEQ ID NO: 351101
uaaauggagacaaugcacg

SEQ ID NO: 351103 - RNA, 19 nt, Artificial Sequence
  Description of Artificial Sequence: Synthetic oligonucleotide
  Sense Strand Starting at position 411 of SEQ ID NO: 318474
gguagauacuaguuugcag

SEQ ID NO: 351104 - RNA, 19 nt, Artificial Sequence
  Description of Artificial Sequence: Synthetic oligonucleotide
  Antisense Strand to SEQ ID NO: 351103
cugcaaacuaguaucuacc

SEQ ID NO: 351105 - RNA, 19 nt, Artificial Sequence
  Description of Artificial Sequence: Synthetic oligonucleotide
  Sense Strand Starting at position 411 of SEQ ID NO: 318476
uagauacuaguuugcagaa

SEQ ID NO: 351106 - RNA, 19 nt, Artificial Sequence
  Description of Artificial Sequence: Synthetic oligonucleotide
  Antisense Strand to SEQ ID NO: 351105
uucugcaaacuaguaucua

SEQ ID NO: 351107 - RNA, 19 nt, Artificial Sequence
  Description of Artificial Sequence: Synthetic oligonucleotide
  Sense Strand Starting at position 411 of SEQ ID NO: 318477
agauacuaguuugcagaau

SEQ ID NO: 351108 - RNA, 19 nt, Artificial Sequence
  Description of Artificial Sequence: Synthetic oligonucleotide
  Antisense Strand to SEQ ID NO: 351107
auucugcaaacuaguaucu

SEQ ID NO: 351109 - RNA, 19 nt, Artificial Sequence
  Description of Artificial Sequence: Synthetic oligonucleotide
  Sense Strand Starting at position 411 of SEQ ID NO: 318569
cgaguaaguacuuaagcac

SEQ ID NO: 351110 - RNA, 19 nt, Artificial Sequence
  Description of Artificial Sequence: Synthetic oligonucleotide
  Antisense Strand to SEQ ID NO: 351109
gugcuuaaguacuuacucg

SEQ ID NO: 351111 - RNA, 19 nt, Artificial Sequence
  Description of Artificial Sequence: Synthetic oligonucleotide
  Sense Strand Starting at position 411 of SEQ ID NO: 318591
acugacugcuucucuaaga

SEQ ID NO: 351112 - RNA, 19 nt, Artificial Sequence
  Description of Artificial Sequence: Synthetic oligonucleotide
  Antisense Strand to SEQ ID NO: 351111
ucuuagagaagcagucagu

SEQ ID NO: 351113 - RNA, 19 nt, Artificial Sequence
  Description of Artificial Sequence: Synthetic oligonucleotide
  Sense Strand Starting at position 411 of SEQ ID NO: 318657
gcaacagagggcugacauu

SEQ ID NO: 351114 - RNA, 19 nt, Artificial Sequence
  Description of Artificial Sequence: Synthetic oligonucleotide
  Antisense Strand to SEQ ID NO: 351113
aaugucagcccucuguugc

SEQ ID NO: 351115 - RNA, 19 nt, Artificial Sequence
  Description of Artificial Sequence: Synthetic oligonucleotide
  Sense Strand Starting at position 411 of SEQ ID NO: 318706
guuugagacccagaucucu

SEQ ID NO: 351116 - RNA, 19 nt, Artificial Sequence
  Description of Artificial Sequence: Synthetic oligonucleotide
  Antisense Strand to SEQ ID NO: 351115
agagaucugggucucaaac

SEQ ID NO: 351117 - RNA, 19 nt, Artificial Sequence
  Description of Artificial Sequence: Synthetic oligonucleotide
  Sense Strand Starting at position 411 of SEQ ID NO: 318733
acugucucccaaggaguuu

SEQ ID NO: 351118 - RNA, 19 nt, Artificial Sequence
  Description of Artificial Sequence: Synthetic oligonucleotide
  Antisense Strand to SEQ ID NO: 351117
aaacuccuugggagacagu

SEQ ID NO: 351119 - RNA, 19 nt, Artificial Sequence
  Description of Artificial Sequence: Synthetic oligonucleotide
  Sense Strand Starting at position 411 of SEQ ID NO: 318852
uguuuaacagcugauauua

SEQ ID NO: 351120 - RNA, 19 nt, Artificial Sequence
  Description of Artificial Sequence: Synthetic oligonucleotide
  Antisense Strand to SEQ ID NO: 351119
uaauaucagcuguuaaaca

SEQ ID NO: 351121 - RNA, 19 nt, Artificial Sequence
  Description of Artificial Sequence: Synthetic oligonucleotide
  Sense Strand Starting at position 411 of SEQ ID NO: 318920
uacgaaagagaguguaaau

SEQ ID NO: 351122 - RNA, 19 nt, Artificial Sequence
  Description of Artificial Sequence: Synthetic oligonucleotide
  Antisense Strand to SEQ ID NO: 351121
auuuacacucucuuucgua

SEQ ID NO: 351123 - RNA, 19 nt, Artificial Sequence
  Description of Artificial Sequence: Synthetic oligonucleotide
  Sense Strand Starting at position 411 of SEQ ID NO: 318931
guguaaauccauuauuagu

SEQ ID NO: 351124 - RNA, 19 nt, Artificial Sequence
  Description of Artificial Sequence: Synthetic oligonucleotide
  Antisense Strand to SEQ ID NO: 351123
acuaauaauggauuuacac

SEQ ID NO: 351125 - RNA, 19 nt, Artificial Sequence
  Description of Artificial Sequence: Synthetic oligonucleotide
  Sense Strand Starting at position 411 of SEQ ID NO: 319191
guugcacugaccugagaug

SEQ ID NO: 351126 - RNA, 19 nt, Artificial Sequence
  Description of Artificial Sequence: Synthetic oligonucleotide
  Antisense Strand to SEQ ID NO: 351125
caucucaggucagugcaac

SEQ ID NO: 351127 - RNA, 19 nt, Artificial Sequence
  Description of Artificial Sequence: Synthetic oligonucleotide
  Sense Strand Starting at position 412 of SEQ ID NO: 315284
acucuagacugagugacaa

SEQ ID NO: 351128 - RNA, 19 nt, Artificial Sequence
  Description of Artificial Sequence: Synthetic oligonucleotide
  Antisense Strand to SEQ ID NO: 351127
uugucacucagucuagagu

SEQ ID NO: 351129 - RNA, 19 nt, Artificial Sequence
  Description of Artificial Sequence: Synthetic oligonucleotide
  Sense Strand Starting at position 412 of SEQ ID NO: 315399
ggacucauauugccaaauc

SEQ ID NO: 351130 - RNA, 19 nt, Artificial Sequence
  Description of Artificial Sequence: Synthetic oligonucleotide
  Antisense Strand to SEQ ID NO: 351129
gauuuggcaauaugagucc

SEQ ID NO: 351131 - RNA, 19 nt, Artificial Sequence
  Description of Artificial Sequence: Synthetic oligonucleotide
  Sense Strand Starting at position 412 of SEQ ID NO: 315519
ggcucaagaaagugauaaa

SEQ ID NO: 351132 - RNA, 19 nt, Artificial Sequence
  Description of Artificial Sequence: Synthetic oligonucleotide
  Antisense Strand to SEQ ID NO: 351131
uuuaucacuuucuugagcc

SEQ ID NO: 351133 - RNA, 19 nt, Artificial Sequence
  Description of Artificial Sequence: Synthetic oligonucleotide
  Sense Strand Starting at position 412 of SEQ ID NO: 315548
acgaacugcucuuuacuua

SEQ ID NO: 351134 - RNA, 19 nt, Artificial Sequence
  Description of Artificial Sequence: Synthetic oligonucleotide
  Antisense Strand to SEQ ID NO: 351133
uaaguaaagagcaguucgu

SEQ ID NO: 351135 - RNA, 19 nt, Artificial Sequence
  Description of Artificial Sequence: Synthetic oligonucleotide
  Sense Strand Starting at position 412 of SEQ ID NO: 315549
cgaacugcucuuuacuuau

SEQ ID NO: 351136 - RNA, 19 nt, Artificial Sequence
  Description of Artificial Sequence: Synthetic oligonucleotide
  Antisense Strand to SEQ ID NO: 351135
auaaguaaagagcaguucg

SEQ ID NO: 351137 - RNA, 19 nt, Artificial Sequence
  Description of Artificial Sequence: Synthetic oligonucleotide
  Sense Strand Starting at position 412 of SEQ ID NO: 315648
cuguccuuuccacaaggua

SEQ ID NO: 351138 - RNA, 19 nt, Artificial Sequence
  Description of Artificial Sequence: Synthetic oligonucleotide
  Antisense Strand to SEQ ID NO: 351137
uaccuuguggaaaggacag

SEQ ID NO: 351139 - RNA, 19 nt, Artificial Sequence
  Description of Artificial Sequence: Synthetic oligonucleotide
  Sense Strand Starting at position 412 of SEQ ID NO: 315725
cagagaagugagugcacau

SEQ ID NO: 351140 - RNA, 19 nt, Artificial Sequence
  Description of Artificial Sequence: Synthetic oligonucleotide
  Antisense Strand to SEQ ID NO: 351139
augugcacucacuucucug

SEQ ID NO: 351141 - RNA, 19 nt, Artificial Sequence
  Description of Artificial Sequence: Synthetic oligonucleotide
  Sense Strand Starting at position 412 of SEQ ID NO: 315736
gugcacauuuauuagaaau

SEQ ID NO: 351142 - RNA, 19 nt, Artificial Sequence
  Description of Artificial Sequence: Synthetic oligonucleotide
  Antisense Strand to SEQ ID NO: 351141
auuucuaauaaaugugcac

SEQ ID NO: 351143 - RNA, 19 nt, Artificial Sequence
  Description of Artificial Sequence: Synthetic oligonucleotide
  Sense Strand Starting at position 412 of SEQ ID NO: 315738
gcacauuuauuagaaauga

SEQ ID NO: 351144 - RNA, 19 nt, Artificial Sequence
  Description of Artificial Sequence: Synthetic oligonucleotide
  Antisense Strand to SEQ ID NO: 351143
ucauuucuaauaaaugugc

SEQ ID NO: 351145 - RNA, 19 nt, Artificial Sequence
  Description of Artificial Sequence: Synthetic oligonucleotide
  Sense Strand Starting at position 412 of SEQ ID NO: 315908
acaaauguaucugucuaaa

SEQ ID NO: 351146 - RNA, 19 nt, Artificial Sequence
  Description of Artificial Sequence: Synthetic oligonucleotide
  Antisense Strand to SEQ ID NO: 351145
uuuagacagauacauuugu

SEQ ID NO: 351147 - RNA, 19 nt, Artificial Sequence
  Description of Artificial Sequence: Synthetic oligonucleotide
  Sense Strand Starting at position 412 of SEQ ID NO: 315920
gucuaaaugucauuaucag

SEQ ID NO: 351148 - RNA, 19 nt, Artificial Sequence
  Description of Artificial Sequence: Synthetic oligonucleotide
  Antisense Strand to SEQ ID NO: 351147
cugauaaugacauuuagac

SEQ ID NO: 351149 - RNA, 19 nt, Artificial Sequence
  Description of Artificial Sequence: Synthetic oligonucleotide
  Sense Strand Starting at position 412 of SEQ ID NO: 315997
cuguaugaaaucugguuga

SEQ ID NO: 351150 - RNA, 19 nt, Artificial Sequence
  Description of Artificial Sequence: Synthetic oligonucleotide
  Antisense Strand to SEQ ID NO: 351149
ucaaccagauuucauacag

SEQ ID NO: 351151 - RNA, 19 nt, Artificial Sequence
  Description of Artificial Sequence: Synthetic oligonucleotide
  Sense Strand Starting at position 412 of SEQ ID NO: 316000
uaugaaaucugguugauua

SEQ ID NO: 351152 - RNA, 19 nt, Artificial Sequence
  Description of Artificial Sequence: Synthetic oligonucleotide
  Antisense Strand to SEQ ID NO: 351151
uaaucaaccagauuucaua

SEQ ID NO: 351153 - RNA, 19 nt, Artificial Sequence
  Description of Artificial Sequence: Synthetic oligonucleotide
  Sense Strand Starting at position 412 of SEQ ID NO: 316001
augaaaucugguugauuau

SEQ ID NO: 351154 - RNA, 19 nt, Artificial Sequence
  Description of Artificial Sequence: Synthetic oligonucleotide
  Antisense Strand to SEQ ID NO: 351153
auaaucaaccagauuucau

SEQ ID NO: 351155 - RNA, 19 nt, Artificial Sequence
  Description of Artificial Sequence: Synthetic oligonucleotide
  Sense Strand Starting at position 412 of SEQ ID NO: 316039
uguaucuucuacucauugu

SEQ ID NO: 351156 - RNA, 19 nt, Artificial Sequence
  Description of Artificial Sequence: Synthetic oligonucleotide
  Antisense Strand to SEQ ID NO: 351155
acaaugaguagaagauaca

SEQ ID NO: 351157 - RNA, 19 nt, Artificial Sequence
  Description of Artificial Sequence: Synthetic oligonucleotide
  Sense Strand Starting at position 412 of SEQ ID NO: 316444
guccuacaccucuggugaa

SEQ ID NO: 351158 - RNA, 19 nt, Artificial Sequence
  Description of Artificial Sequence: Synthetic oligonucleotide
  Antisense Strand to SEQ ID NO: 351157
uucaccagagguguaggac

SEQ ID NO: 351159 - RNA, 19 nt, Artificial Sequence
  Description of Artificial Sequence: Synthetic oligonucleotide
  Sense Strand Starting at position 412 of SEQ ID NO: 316567
aggagaucuuaugcuugga

SEQ ID NO: 351160 - RNA, 19 nt, Artificial Sequence
  Description of Artificial Sequence: Synthetic oligonucleotide
  Antisense Strand to SEQ ID NO: 351159
uccaagcauaagaucuccu

SEQ ID NO: 351161 - RNA, 19 nt, Artificial Sequence
  Description of Artificial Sequence: Synthetic oligonucleotide
  Sense Strand Starting at position 412 of SEQ ID NO: 316569
gagaucuuaugcuuggaca

SEQ ID NO: 351162 - RNA, 19 nt, Artificial Sequence
  Description of Artificial Sequence: Synthetic oligonucleotide
  Antisense Strand to SEQ ID NO: 351161
uguccaagcauaagaucuc

SEQ ID NO: 351163 - RNA, 19 nt, Artificial Sequence
  Description of Artificial Sequence: Synthetic oligonucleotide
  Sense Strand Starting at position 412 of SEQ ID NO: 316570
agaucuuaugcuuggacaa

SEQ ID NO: 351164 - RNA, 19 nt, Artificial Sequence
  Description of Artificial Sequence: Synthetic oligonucleotide
  Antisense Strand to SEQ ID NO: 351163
uuguccaagcauaagaucu

SEQ ID NO: 351165 - RNA, 19 nt, Artificial Sequence
  Description of Artificial Sequence: Synthetic oligonucleotide
  Sense Strand Starting at position 412 of SEQ ID NO: 316730
cuauguuucuaucuguauu

SEQ ID NO: 351166 - RNA, 19 nt, Artificial Sequence
  Description of Artificial Sequence: Synthetic oligonucleotide
  Antisense Strand to SEQ ID NO: 351165
aauacagauagaaacauag

SEQ ID NO: 351167 - RNA, 19 nt, Artificial Sequence
  Description of Artificial Sequence: Synthetic oligonucleotide
  Sense Strand Starting at position 412 of SEQ ID NO: 316922
auccaagucuacuuagaga

SEQ ID NO: 351168 - RNA, 19 nt, Artificial Sequence
  Description of Artificial Sequence: Synthetic oligonucleotide
  Antisense Strand to SEQ ID NO: 351167
ucucuaaguagacuuggau

SEQ ID NO: 351169 - RNA, 19 nt, Artificial Sequence
  Description of Artificial Sequence: Synthetic oligonucleotide
  Sense Strand Starting at position 412 of SEQ ID NO: 316948
aguacuuacuucgcucaaa

SEQ ID NO: 351170 - RNA, 19 nt, Artificial Sequence
  Description of Artificial Sequence: Synthetic oligonucleotide
  Antisense Strand to SEQ ID NO: 351169
uuugagcgaaguaaguacu

SEQ ID NO: 351171 - RNA, 19 nt, Artificial Sequence
  Description of Artificial Sequence: Synthetic oligonucleotide
  Sense Strand Starting at position 412 of SEQ ID NO: 316978
acccaaauuuaagggaguu

SEQ ID NO: 351172 - RNA, 19 nt, Artificial Sequence
  Description of Artificial Sequence: Synthetic oligonucleotide
  Antisense Strand to SEQ ID NO: 351171
aacucccuuaaauuugggu

SEQ ID NO: 351173 - RNA, 19 nt, Artificial Sequence
  Description of Artificial Sequence: Synthetic oligonucleotide
  Sense Strand Starting at position 412 of SEQ ID NO: 317034
ccaccaaagucucuuguca

SEQ ID NO: 351174 - RNA, 19 nt, Artificial Sequence
  Description of Artificial Sequence: Synthetic oligonucleotide
  Antisense Strand to SEQ ID NO: 351173
ugacaagagacuuuggugg

SEQ ID NO: 351175 - RNA, 19 nt, Artificial Sequence
  Description of Artificial Sequence: Synthetic oligonucleotide
  Sense Strand Starting at position 412 of SEQ ID NO: 317143
ggcacaguucuagguaaua

SEQ ID NO: 351176 - RNA, 19 nt, Artificial Sequence
  Description of Artificial Sequence: Synthetic oligonucleotide
  Antisense Strand to SEQ ID NO: 351175
uauuaccuagaacugugcc

SEQ ID NO: 351177 - RNA, 19 nt, Artificial Sequence
  Description of Artificial Sequence: Synthetic oligonucleotide
  Sense Strand Starting at position 412 of SEQ ID NO: 317156
guaauaggauuauagagau

SEQ ID NO: 351178 - RNA, 19 nt, Artificial Sequence
  Description of Artificial Sequence: Synthetic oligonucleotide
  Antisense Strand to SEQ ID NO: 351177
aucucuauaauccuauuac

SEQ ID NO: 351179 - RNA, 19 nt, Artificial Sequence
  Description of Artificial Sequence: Synthetic oligonucleotide
  Sense Strand Starting at position 412 of SEQ ID NO: 317591
agugaaaguauguaucaca

SEQ ID NO: 351180 - RNA, 19 nt, Artificial Sequence
  Description of Artificial Sequence: Synthetic oligonucleotide
  Antisense Strand to SEQ ID NO: 351179
ugugauacauacuuucacu

SEQ ID NO: 351181 - RNA, 19 nt, Artificial Sequence
  Description of Artificial Sequence: Synthetic oligonucleotide
  Sense Strand Starting at position 412 of SEQ ID NO: 317602
guaucacagugaucauaaa

SEQ ID NO: 351182 - RNA, 19 nt, Artificial Sequence
  Description of Artificial Sequence: Synthetic oligonucleotide
  Antisense Strand to SEQ ID NO: 351181
uuuaugaucacugugauac

SEQ ID NO: 351183 - RNA, 19 nt, Artificial Sequence
  Description of Artificial Sequence: Synthetic oligonucleotide
  Sense Strand Starting at position 412 of SEQ ID NO: 317642
agccacaacugucuggaua

SEQ ID NO: 351184 - RNA, 19 nt, Artificial Sequence
  Description of Artificial Sequence: Synthetic oligonucleotide
  Antisense Strand to SEQ ID NO: 351183
uauccagacaguuguggcu

SEQ ID NO: 351185 - RNA, 19 nt, Artificial Sequence
  Description of Artificial Sequence: Synthetic oligonucleotide
  Sense Strand Starting at position 412 of SEQ ID NO: 317653
ucuggauacuaugucaauu

SEQ ID NO: 351186 - RNA, 19 nt, Artificial Sequence
  Description of Artificial Sequence: Synthetic oligonucleotide
  Antisense Strand to SEQ ID NO: 351185
aauugacauaguauccaga

SEQ ID NO: 351187 - RNA, 19 nt, Artificial Sequence
  Description of Artificial Sequence: Synthetic oligonucleotide
  Sense Strand Starting at position 412 of SEQ ID NO: 317672
gguaccuguggcuauagau

SEQ ID NO: 351188 - RNA, 19 nt, Artificial Sequence
  Description of Artificial Sequence: Synthetic oligonucleotide
  Antisense Strand to SEQ ID NO: 351187
aucuauagccacagguacc

SEQ ID NO: 351189 - RNA, 19 nt, Artificial Sequence
  Description of Artificial Sequence: Synthetic oligonucleotide
  Sense Strand Starting at position 412 of SEQ ID NO: 317681
ggcuauagaugguuuccaa

SEQ ID NO: 351190 - RNA, 19 nt, Artificial Sequence
  Description of Artificial Sequence: Synthetic oligonucleotide
  Antisense Strand to SEQ ID NO: 351189
uuggaaaccaucuauagcc

SEQ ID NO: 351191 - RNA, 19 nt, Artificial Sequence
  Description of Artificial Sequence: Synthetic oligonucleotide
  Sense Strand Starting at position 412 of SEQ ID NO: 317684
uauagaugguuuccaagga

SEQ ID NO: 351192 - RNA, 19 nt, Artificial Sequence
  Description of Artificial Sequence: Synthetic oligonucleotide
  Antisense Strand to SEQ ID NO: 351191
uccuuggaaaccaucuaua

SEQ ID NO: 351193 - RNA, 19 nt, Artificial Sequence
  Description of Artificial Sequence: Synthetic oligonucleotide
  Sense Strand Starting at position 412 of SEQ ID NO: 317688
gaugguuuccaaggauuau

SEQ ID NO: 351194 - RNA, 19 nt, Artificial Sequence
  Description of Artificial Sequence: Synthetic oligonucleotide
  Antisense Strand to SEQ ID NO: 351193
auaauccuuggaaaccauc

SEQ ID NO: 351195 - RNA, 19 nt, Artificial Sequence
  Description of Artificial Sequence: Synthetic oligonucleotide
  Sense Strand Starting at position 412 of SEQ ID NO: 318107
uaauccuagugcucuggaa

SEQ ID NO: 351196 - RNA, 19 nt, Artificial Sequence
  Description of Artificial Sequence: Synthetic oligonucleotide
  Antisense Strand to SEQ ID NO: 351195
uuccagagcacuaggauua

SEQ ID NO: 351197 - RNA, 19 nt, Artificial Sequence
  Description of Artificial Sequence: Synthetic oligonucleotide
  Sense Strand Starting at position 412 of SEQ ID NO: 318109
auccuagugcucuggaaua

SEQ ID NO: 351198 - RNA, 19 nt, Artificial Sequence
  Description of Artificial Sequence: Synthetic oligonucleotide
  Antisense Strand to SEQ ID NO: 351197
uauuccagagcacuaggau

SEQ ID NO: 351199 - RNA, 19 nt, Artificial Sequence
  Description of Artificial Sequence: Synthetic oligonucleotide
  Sense Strand Starting at position 412 of SEQ ID NO: 318478
augagcauccuuuguagaa

SEQ ID NO: 351200 - RNA, 19 nt, Artificial Sequence
  Description of Artificial Sequence: Synthetic oligonucleotide
  Antisense Strand to SEQ ID NO: 351199
uucuacaaaggaugcucau

SEQ ID NO: 351201 - RNA, 19 nt, Artificial Sequence
  Description of Artificial Sequence: Synthetic oligonucleotide
  Sense Strand Starting at position 412 of SEQ ID NO: 318479
ugagcauccuuuguagaag

SEQ ID NO: 351202 - RNA, 19 nt, Artificial Sequence
  Description of Artificial Sequence: Synthetic oligonucleotide
  Antisense Strand to SEQ ID NO: 351201
cuucuacaaaggaugcuca

SEQ ID NO: 351203 - RNA, 19 nt, Artificial Sequence
  Description of Artificial Sequence: Synthetic oligonucleotide
  Sense Strand Starting at position 412 of SEQ ID NO: 318931
caguaagaucccgagguca

SEQ ID NO: 351204 - RNA, 19 nt, Artificial Sequence
  Description of Artificial Sequence: Synthetic oligonucleotide
  Antisense Strand to SEQ ID NO: 351203
ugaccucgggaucuuacug

SEQ ID NO: 351205 - RNA, 19 nt, Artificial Sequence
  Description of Artificial Sequence: Synthetic oligonucleotide
  Sense Strand Starting at position 412 of SEQ ID NO: 319214
agauuagcgagaugagguu

SEQ ID NO: 351206 - RNA, 19 nt, Artificial Sequence
  Description of Artificial Sequence: Synthetic oligonucleotide
  Antisense Strand to SEQ ID NO: 351205
aaccucaucucgcuaaucu

SEQ ID NO: 351207 - RNA, 19 nt, Artificial Sequence
  Description of Artificial Sequence: Synthetic oligonucleotide
  Sense Strand Starting at position 413 of SEQ ID NO: 316326
gcagaagucggagagguau

SEQ ID NO: 351208 - RNA, 19 nt, Artificial Sequence
  Description of Artificial Sequence: Synthetic oligonucleotide
  Antisense Strand to SEQ ID NO: 351207
auaccucuccgacuucugc

SEQ ID NO: 351209 - RNA, 19 nt, Artificial Sequence
  Description of Artificial Sequence: Synthetic oligonucleotide
  Sense Strand Starting at position 413 of SEQ ID NO: 316841
gcuggaugcuguuaucuga

SEQ ID NO: 351210 - RNA, 19 nt, Artificial Sequence
  Description of Artificial Sequence: Synthetic oligonucleotide
  Antisense Strand to SEQ ID NO: 351209
ucagauaacagcauccagc

SEQ ID NO: 351211 - RNA, 19 nt, Artificial Sequence
  Description of Artificial Sequence: Synthetic oligonucleotide
  Sense Strand Starting at position 413 of SEQ ID NO: 316848
gcuguuaucugaugcucag

SEQ ID NO: 351212 - RNA, 19 nt, Artificial Sequence
  Description of Artificial Sequence: Synthetic oligonucleotide
  Antisense Strand to SEQ ID NO: 351211
cugagcaucagauaacagc

SEQ ID NO: 351213 - RNA, 19 nt, Artificial Sequence
  Description of Artificial Sequence: Synthetic oligonucleotide
  Sense Strand Starting at position 413 of SEQ ID NO: 316896
cgggccaucugagccauau

SEQ ID NO: 351214 - RNA, 19 nt, Artificial Sequence
  Description of Artificial Sequence: Synthetic oligonucleotide
  Antisense Strand to SEQ ID NO: 351213
auauggcucagauggcccg

SEQ ID NO: 351215 - RNA, 19 nt, Artificial Sequence
  Description of Artificial Sequence: Synthetic oligonucleotide
  Sense Strand Starting at position 413 of SEQ ID NO: 317425
gcguuugcugcgugacgca

SEQ ID NO: 351216 - RNA, 19 nt, Artificial Sequence
  Description of Artificial Sequence: Synthetic oligonucleotide
  Antisense Strand to SEQ ID NO: 351215
ugcgucacgcagcaaacgc

SEQ ID NO: 351217 - RNA, 19 nt, Artificial Sequence
  Description of Artificial Sequence: Synthetic oligonucleotide
  Sense Strand Starting at position 413 of SEQ ID NO: 317479
ccguuuguucaauggugaa

SEQ ID NO: 351218 - RNA, 19 nt, Artificial Sequence
  Description of Artificial Sequence: Synthetic oligonucleotide
  Antisense Strand to SEQ ID NO: 351217
uucaccauugaacaaacgg

SEQ ID NO: 351219 - RNA, 19 nt, Artificial Sequence
  Description of Artificial Sequence: Synthetic oligonucleotide
  Sense Strand Starting at position 413 of SEQ ID NO: 317960
gaaagucagucucacagga

SEQ ID NO: 351220 - RNA, 19 nt, Artificial Sequence
  Description of Artificial Sequence: Synthetic oligonucleotide
  Antisense Strand to SEQ ID NO: 351219
uccugugagacugacuuuc

SEQ ID NO: 351221 - RNA, 19 nt, Artificial Sequence
  Description of Artificial Sequence: Synthetic oligonucleotide
  Sense Strand Starting at position 413 of SEQ ID NO: 318450
ccaggugucugugauuggu

SEQ ID NO: 351222 - RNA, 19 nt, Artificial Sequence
  Description of Artificial Sequence: Synthetic oligonucleotide
  Antisense Strand to SEQ ID NO: 351221
accaaucacagacaccugg

SEQ ID NO: 351223 - RNA, 19 nt, Artificial Sequence
  Description of Artificial Sequence: Synthetic oligonucleotide
  Sense Strand Starting at position 413 of SEQ ID NO: 318542
uggugugaugaggagcaau

SEQ ID NO: 351224 - RNA, 19 nt, Artificial Sequence
  Description of Artificial Sequence: Synthetic oligonucleotide
  Antisense Strand to SEQ ID NO: 351223
auugcuccucaucacacca

SEQ ID NO: 351225 - RNA, 19 nt, Artificial Sequence
  Description of Artificial Sequence: Synthetic oligonucleotide
  Sense Strand Starting at position 413 of SEQ ID NO: 318564
ggccuuugagcaggaauga

SEQ ID NO: 351226 - RNA, 19 nt, Artificial Sequence
  Description of Artificial Sequence: Synthetic oligonucleotide
  Antisense Strand to SEQ ID NO: 351225
ucauuccugcucaaaggcc

SEQ ID NO: 351227 - RNA, 19 nt, Artificial Sequence
  Description of Artificial Sequence: Synthetic oligonucleotide
  Sense Strand Starting at position 413 of SEQ ID NO: 318573
gcaggaaugaccugggcua

SEQ ID NO: 351228 - RNA, 19 nt, Artificial Sequence
  Description of Artificial Sequence: Synthetic oligonucleotide
  Antisense Strand to SEQ ID NO: 351227
uagcccaggucauuccugc

SEQ ID NO: 351229 - RNA, 19 nt, Artificial Sequence
  Description of Artificial Sequence: Synthetic oligonucleotide
  Sense Strand Starting at position 413 of SEQ ID NO: 318588
gcuagcccuuguuuagaua

SEQ ID NO: 351230 - RNA, 19 nt, Artificial Sequence
  Description of Artificial Sequence: Synthetic oligonucleotide
  Antisense Strand to SEQ ID NO: 351229
uaucuaaacaagggcuagc

SEQ ID NO: 351231 - RNA, 19 nt, Artificial Sequence
  Description of Artificial Sequence: Synthetic oligonucleotide
  Sense Strand Starting at position 413 of SEQ ID NO: 318589
cuagcccuuguuuagauaa

SEQ ID NO: 351232 - RNA, 19 nt, Artificial Sequence
  Description of Artificial Sequence: Synthetic oligonucleotide
  Antisense Strand to SEQ ID NO: 351231
uuaucuaaacaagggcuag

SEQ ID NO: 351233 - RNA, 19 nt, Artificial Sequence
  Description of Artificial Sequence: Synthetic oligonucleotide
  Sense Strand Starting at position 413 of SEQ ID NO: 318633
cugcaauaagaguggaagu

SEQ ID NO: 351234 - RNA, 19 nt, Artificial Sequence
  Description of Artificial Sequence: Synthetic oligonucleotide
  Antisense Strand to SEQ ID NO: 351233
acuuccacucuuauugcag

SEQ ID NO: 351235 - RNA, 19 nt, Artificial Sequence
  Description of Artificial Sequence: Synthetic oligonucleotide
  Sense Strand Starting at position 413 of SEQ ID NO: 318748
ucaagucuugcugaugcau

SEQ ID NO: 351236 - RNA, 19 nt, Artificial Sequence
  Description of Artificial Sequence: Synthetic oligonucleotide
  Antisense Strand to SEQ ID NO: 351235
augcaucagcaagacuuga

SEQ ID NO: 351237 - RNA, 19 nt, Artificial Sequence
  Description of Artificial Sequence: Synthetic oligonucleotide
  Sense Strand Starting at position 413 of SEQ ID NO: 318827
guuggaugaaauugccaua

SEQ ID NO: 351238 - RNA, 19 nt, Artificial Sequence
  Description of Artificial Sequence: Synthetic oligonucleotide
  Antisense Strand to SEQ ID NO: 351237
uauggcaauuucauccaac

SEQ ID NO: 351239 - RNA, 19 nt, Artificial Sequence
  Description of Artificial Sequence: Synthetic oligonucleotide
  Sense Strand Starting at position 413 of SEQ ID NO: 318830
ggaugaaauugccauaaac

SEQ ID NO: 351240 - RNA, 19 nt, Artificial Sequence
  Description of Artificial Sequence: Synthetic oligonucleotide
  Antisense Strand to SEQ ID NO: 351239
guuuauggcaauuucaucc

SEQ ID NO: 351241 - RNA, 19 nt, Artificial Sequence
  Description of Artificial Sequence: Synthetic oligonucleotide
  Sense Strand Starting at position 413 of SEQ ID NO: 318840
gccauaaacugaucuggga

SEQ ID NO: 351242 - RNA, 19 nt, Artificial Sequence
  Description of Artificial Sequence: Synthetic oligonucleotide
  Antisense Strand to SEQ ID NO: 351241
ucccagaucaguuuauggc

SEQ ID NO: 351243 - RNA, 19 nt, Artificial Sequence
  Description of Artificial Sequence: Synthetic oligonucleotide
  Sense Strand Starting at position 413 of SEQ ID NO: 318910
acacguaacccuugagaug

SEQ ID NO: 351244 - RNA, 19 nt, Artificial Sequence
  Description of Artificial Sequence: Synthetic oligonucleotide
  Antisense Strand to SEQ ID NO: 351243
caucucaaggguuacgugu

SEQ ID NO: 351245 - RNA, 19 nt, Artificial Sequence
  Description of Artificial Sequence: Synthetic oligonucleotide
  Sense Strand Starting at position 413 of SEQ ID NO: 318919
ccuugagaugccuguuaga

SEQ ID NO: 351246 - RNA, 19 nt, Artificial Sequence
  Description of Artificial Sequence: Synthetic oligonucleotide
  Antisense Strand to SEQ ID NO: 351245
ucuaacaggcaucucaagg

SEQ ID NO: 351247 - RNA, 19 nt, Artificial Sequence
  Description of Artificial Sequence: Synthetic oligonucleotide
  Sense Strand Starting at position 413 of SEQ ID NO: 318969
gguguaugacucuggacuu

SEQ ID NO: 351248 - RNA, 19 nt, Artificial Sequence
  Description of Artificial Sequence: Synthetic oligonucleotide
  Antisense Strand to SEQ ID NO: 351247
aaguccagagucauacacc

SEQ ID NO: 351249 - RNA, 19 nt, Artificial Sequence
  Description of Artificial Sequence: Synthetic oligonucleotide
  Sense Strand Starting at position 413 of SEQ ID NO: 319023
gaggcauagugagugaaug

SEQ ID NO: 351250 - RNA, 19 nt, Artificial Sequence
  Description of Artificial Sequence: Synthetic oligonucleotide
  Antisense Strand to SEQ ID NO: 351249
cauucacucacuaugccuc

SEQ ID NO: 351251 - RNA, 19 nt, Artificial Sequence
  Description of Artificial Sequence: Synthetic oligonucleotide
  Sense Strand Starting at position 413 of SEQ ID NO: 319033
gagugaauggaugguaugu

SEQ ID NO: 351252 - RNA, 19 nt, Artificial Sequence
  Description of Artificial Sequence: Synthetic oligonucleotide
  Antisense Strand to SEQ ID NO: 351251
acauaccauccauucacuc

SEQ ID NO: 351253 - RNA, 19 nt, Artificial Sequence
  Description of Artificial Sequence: Synthetic oligonucleotide
  Sense Strand Starting at position 413 of SEQ ID NO: 319035
gugaauggaugguauguaa

SEQ ID NO: 351254 - RNA, 19 nt, Artificial Sequence
  Description of Artificial Sequence: Synthetic oligonucleotide
  Antisense Strand to SEQ ID NO: 351253
uuacauaccauccauucac

SEQ ID NO: 351255 - RNA, 19 nt, Artificial Sequence
  Description of Artificial Sequence: Synthetic oligonucleotide
  Sense Strand Starting at position 413 of SEQ ID NO: 319042
gaugguauguaaggccaua

SEQ ID NO: 351256 - RNA, 19 nt, Artificial Sequence
  Description of Artificial Sequence: Synthetic oligonucleotide
  Antisense Strand to SEQ ID NO: 351255
uauggccuuacauaccauc

SEQ ID NO: 351257 - RNA, 19 nt, Artificial Sequence
  Description of Artificial Sequence: Synthetic oligonucleotide
  Sense Strand Starting at position 413 of SEQ ID NO: 319053
aggccauaggccuggauaa

SEQ ID NO: 351258 - RNA, 19 nt, Artificial Sequence
  Description of Artificial Sequence: Synthetic oligonucleotide
  Antisense Strand to SEQ ID NO: 351257
uuauccaggccuauggccu

SEQ ID NO: 351259 - RNA, 19 nt, Artificial Sequence
  Description of Artificial Sequence: Synthetic oligonucleotide
  Sense Strand Starting at position 413 of SEQ ID NO: 319081
ggaggaaaucaguguaguc

SEQ ID NO: 351260 - RNA, 19 nt, Artificial Sequence
  Description of Artificial Sequence: Synthetic oligonucleotide
  Antisense Strand to SEQ ID NO: 351259
gacuacacugauuuccucc

SEQ ID NO: 351261 - RNA, 19 nt, Artificial Sequence
  Description of Artificial Sequence: Synthetic oligonucleotide
  Sense Strand Starting at position 413 of SEQ ID NO: 319119
gacugugcccugggacauu

SEQ ID NO: 351262 - RNA, 19 nt, Artificial Sequence
  Description of Artificial Sequence: Synthetic oligonucleotide
  Antisense Strand to SEQ ID NO: 351261
aaugucccagggcacaguc

SEQ ID NO: 351263 - RNA, 19 nt, Artificial Sequence
  Description of Artificial Sequence: Synthetic oligonucleotide
  Sense Strand Starting at position 413 of SEQ ID NO: 319202
ggagaaaucugagaaugug

SEQ ID NO: 351264 - RNA, 19 nt, Artificial Sequence
  Description of Artificial Sequence: Synthetic oligonucleotide
  Antisense Strand to SEQ ID NO: 351263
cacauucucagauuucucc

SEQ ID NO: 351265 - RNA, 19 nt, Artificial Sequence
  Description of Artificial Sequence: Synthetic oligonucleotide
  Sense Strand Starting at position 414 of SEQ ID NO: 315313
caggacugccaguaguaga

SEQ ID NO: 351266 - RNA, 19 nt, Artificial Sequence
  Description of Artificial Sequence: Synthetic oligonucleotide
  Antisense Strand to SEQ ID NO: 351265
ucuacuacuggcaguccug

SEQ ID NO: 351267 - RNA, 19 nt, Artificial Sequence
  Description of Artificial Sequence: Synthetic oligonucleotide
  Sense Strand Starting at position 414 of SEQ ID NO: 315371
ccaggaaauguuggcaaau

SEQ ID NO: 351268 - RNA, 19 nt, Artificial Sequence
  Description of Artificial Sequence: Synthetic oligonucleotide
  Antisense Strand to SEQ ID NO: 351267
auuugccaacauuuccugg

SEQ ID NO: 351269 - RNA, 19 nt, Artificial Sequence
  Description of Artificial Sequence: Synthetic oligonucleotide
  Sense Strand Starting at position 414 of SEQ ID NO: 315372
caggaaauguuggcaaaug

SEQ ID NO: 351270 - RNA, 19 nt, Artificial Sequence
  Description of Artificial Sequence: Synthetic oligonucleotide
  Antisense Strand to SEQ ID NO: 351269
cauuugccaacauuuccug

SEQ ID NO: 351271 - RNA, 19 nt, Artificial Sequence
  Description of Artificial Sequence: Synthetic oligonucleotide
  Sense Strand Starting at position 414 of SEQ ID NO: 315386
aaaugaugacuucgagcau

SEQ ID NO: 351272 - RNA, 19 nt, Artificial Sequence
  Description of Artificial Sequence: Synthetic oligonucleotide
  Antisense Strand to SEQ ID NO: 351271
augcucgaagucaucauuu

SEQ ID NO: 351273 - RNA, 19 nt, Artificial Sequence
  Description of Artificial Sequence: Synthetic oligonucleotide
  Sense Strand Starting at position 414 of SEQ ID NO: 315483
agggucuguguguaaagau

SEQ ID NO: 351274 - RNA, 19 nt, Artificial Sequence
  Description of Artificial Sequence: Synthetic oligonucleotide
  Antisense Strand to SEQ ID NO: 351273
aucuuuacacacagacccu

SEQ ID NO: 351275 - RNA, 19 nt, Artificial Sequence
  Description of Artificial Sequence: Synthetic oligonucleotide
  Sense Strand Starting at position 414 of SEQ ID NO: 315491
uguguaaagauggaguuga

SEQ ID NO: 351276 - RNA, 19 nt, Artificial Sequence
  Description of Artificial Sequence: Synthetic oligonucleotide
  Antisense Strand to SEQ ID NO: 351275
ucaacuccaucuuuacaca

SEQ ID NO: 351277 - RNA, 19 nt, Artificial Sequence
  Description of Artificial Sequence: Synthetic oligonucleotide
  Sense Strand Starting at position 414 of SEQ ID NO: 315749
cucagagauucuccacuga

SEQ ID NO: 351278 - RNA, 19 nt, Artificial Sequence
  Description of Artificial Sequence: Synthetic oligonucleotide
  Antisense Strand to SEQ ID NO: 351277
ucaguggagaaucucugag

SEQ ID NO: 351279 - RNA, 19 nt, Artificial Sequence
  Description of Artificial Sequence: Synthetic oligonucleotide
  Sense Strand Starting at position 414 of SEQ ID NO: 315908
ugguuagaaccauguauga

SEQ ID NO: 351280 - RNA, 19 nt, Artificial Sequence
  Description of Artificial Sequence: Synthetic oligonucleotide
  Antisense Strand to SEQ ID NO: 351279
ucauacaugguucuaacca

SEQ ID NO: 351281 - RNA, 19 nt, Artificial Sequence
  Description of Artificial Sequence: Synthetic oligonucleotide
  Sense Strand Starting at position 414 of SEQ ID NO: 315966
ccaauuaaugcucacugga

SEQ ID NO: 351282 - RNA, 19 nt, Artificial Sequence
  Description of Artificial Sequence: Synthetic oligonucleotide
  Antisense Strand to SEQ ID NO: 351281
uccagugagcauuaauugg

SEQ ID NO: 351283 - RNA, 19 nt, Artificial Sequence
  Description of Artificial Sequence: Synthetic oligonucleotide
  Sense Strand Starting at position 414 of SEQ ID NO: 315969
auuaaugcucacuggauga

SEQ ID NO: 351284 - RNA, 19 nt, Artificial Sequence
  Description of Artificial Sequence: Synthetic oligonucleotide
  Antisense Strand to SEQ ID NO: 351283
ucauccagugagcauuaau

SEQ ID NO: 351285 - RNA, 19 nt, Artificial Sequence
  Description of Artificial Sequence: Synthetic oligonucleotide
  Sense Strand Starting at position 414 of SEQ ID NO: 315973
augcucacuggaugaauca

SEQ ID NO: 351286 - RNA, 19 nt, Artificial Sequence
  Description of Artificial Sequence: Synthetic oligonucleotide
  Antisense Strand to SEQ ID NO: 351285
ugauucauccagugagcau

SEQ ID NO: 351287 - RNA, 19 nt, Artificial Sequence
  Description of Artificial Sequence: Synthetic oligonucleotide
  Sense Strand Starting at position 414 of SEQ ID NO: 315974
ugcucacuggaugaaucau

SEQ ID NO: 351288 - RNA, 19 nt, Artificial Sequence
  Description of Artificial Sequence: Synthetic oligonucleotide
  Antisense Strand to SEQ ID NO: 351287
augauucauccagugagca

SEQ ID NO: 351289 - RNA, 19 nt, Artificial Sequence
  Description of Artificial Sequence: Synthetic oligonucleotide
  Sense Strand Starting at position 414 of SEQ ID NO: 316207
uguguuauuauauggagag

SEQ ID NO: 351290 - RNA, 19 nt, Artificial Sequence
  Description of Artificial Sequence: Synthetic oligonucleotide
  Antisense Strand to SEQ ID NO: 351289
cucuccauauaauaacaca

SEQ ID NO: 351291 - RNA, 19 nt, Artificial Sequence
  Description of Artificial Sequence: Synthetic oligonucleotide
  Sense Strand Starting at position 414 of SEQ ID NO: 316209
uguuauuauauggagagca

SEQ ID NO: 351292 - RNA, 19 nt, Artificial Sequence
  Description of Artificial Sequence: Synthetic oligonucleotide
  Antisense Strand to SEQ ID NO: 351291
ugcucuccauauaauaaca

SEQ ID NO: 351293 - RNA, 19 nt, Artificial Sequence
  Description of Artificial Sequence: Synthetic oligonucleotide
  Sense Strand Starting at position 414 of SEQ ID NO: 316261
cagugaugauuaucauagu

SEQ ID NO: 351294 - RNA, 19 nt, Artificial Sequence
  Description of Artificial Sequence: Synthetic oligonucleotide
  Antisense Strand to SEQ ID NO: 351293
acuaugauaaucaucacug

SEQ ID NO: 351295 - RNA, 19 nt, Artificial Sequence
  Description of Artificial Sequence: Synthetic oligonucleotide
  Sense Strand Starting at position 414 of SEQ ID NO: 316352
aacugagucuuagugaaag

SEQ ID NO: 351296 - RNA, 19 nt, Artificial Sequence
  Description of Artificial Sequence: Synthetic oligonucleotide
  Antisense Strand to SEQ ID NO: 351295
cuuucacuaagacucaguu

SEQ ID NO: 351297 - RNA, 19 nt, Artificial Sequence
  Description of Artificial Sequence: Synthetic oligonucleotide
  Sense Strand Starting at position 414 of SEQ ID NO: 316358
gucuuagugaaagggacua

SEQ ID NO: 351298 - RNA, 19 nt, Artificial Sequence
  Description of Artificial Sequence: Synthetic oligonucleotide
  Antisense Strand to SEQ ID NO: 351297
uagucccuuucacuaagac

SEQ ID NO: 351299 - RNA, 19 nt, Artificial Sequence
  Description of Artificial Sequence: Synthetic oligonucleotide
  Sense Strand Starting at position 414 of SEQ ID NO: 316525
cacuguugaucauuggaau

SEQ ID NO: 351300 - RNA, 19 nt, Artificial Sequence
  Description of Artificial Sequence: Synthetic oligonucleotide
  Antisense Strand to SEQ ID NO: 351299
auuccaaugaucaacagug

SEQ ID NO: 351301 - RNA, 19 nt, Artificial Sequence
  Description of Artificial Sequence: Synthetic oligonucleotide
  Sense Strand Starting at position 414 of SEQ ID NO: 316526
acuguugaucauuggaaug

SEQ ID NO: 351302 - RNA, 19 nt, Artificial Sequence
  Description of Artificial Sequence: Synthetic oligonucleotide
  Antisense Strand to SEQ ID NO: 351301
cauuccaaugaucaacagu

SEQ ID NO: 351303 - RNA, 19 nt, Artificial Sequence
  Description of Artificial Sequence: Synthetic oligonucleotide
  Sense Strand Starting at position 414 of SEQ ID NO: 316808
gucugaucucaggaaucuc

SEQ ID NO: 351304 - RNA, 19 nt, Artificial Sequence
  Description of Artificial Sequence: Synthetic oligonucleotide
  Antisense Strand to SEQ ID NO: 351303
gagauuccugagaucagac

SEQ ID NO: 351305 - RNA, 19 nt, Artificial Sequence
  Description of Artificial Sequence: Synthetic oligonucleotide
  Sense Strand Starting at position 414 of SEQ ID NO: 316816
ucaggaaucucuucgauua

SEQ ID NO: 351306 - RNA, 19 nt, Artificial Sequence
  Description of Artificial Sequence: Synthetic oligonucleotide
  Antisense Strand to SEQ ID NO: 351305
uaaucgaagagauuccuga

SEQ ID NO: 351307 - RNA, 19 nt, Artificial Sequence
  Description of Artificial Sequence: Synthetic oligonucleotide
  Sense Strand Starting at position 414 of SEQ ID NO: 317222
cccuccuuugaggaaguuu

SEQ ID NO: 351308 - RNA, 19 nt, Artificial Sequence
  Description of Artificial Sequence: Synthetic oligonucleotide
  Antisense Strand to SEQ ID NO: 351307
aaacuuccucaaaggaggg

SEQ ID NO: 351309 - RNA, 19 nt, Artificial Sequence
  Description of Artificial Sequence: Synthetic oligonucleotide
  Sense Strand Starting at position 414 of SEQ ID NO: 317230
ugaggaaguuugccaucaa

SEQ ID NO: 351310 - RNA, 19 nt, Artificial Sequence
  Description of Artificial Sequence: Synthetic oligonucleotide
  Antisense Strand to SEQ ID NO: 351309
uugauggcaaacuuccuca

SEQ ID NO: 351311 - RNA, 19 nt, Artificial Sequence
  Description of Artificial Sequence: Synthetic oligonucleotide
  Sense Strand Starting at position 414 of SEQ ID NO: 317284
gaggaaguuuauucuaagu

SEQ ID NO: 351312 - RNA, 19 nt, Artificial Sequence
  Description of Artificial Sequence: Synthetic oligonucleotide
  Antisense Strand to SEQ ID NO: 351311
acuuagaauaaacuuccuc

SEQ ID NO: 351313 - RNA, 19 nt, Artificial Sequence
  Description of Artificial Sequence: Synthetic oligonucleotide
  Sense Strand Starting at position 414 of SEQ ID NO: 317428
ggagguuugggugggaauu

SEQ ID NO: 351314 - RNA, 19 nt, Artificial Sequence
  Description of Artificial Sequence: Synthetic oligonucleotide
  Antisense Strand to SEQ ID NO: 351313
aauucccacccaaaccucc

SEQ ID NO: 351315 - RNA, 19 nt, Artificial Sequence
  Description of Artificial Sequence: Synthetic oligonucleotide
  Sense Strand Starting at position 414 of SEQ ID NO: 317561
gcugguagagcgaguaacu

SEQ ID NO: 351316 - RNA, 19 nt, Artificial Sequence
  Description of Artificial Sequence: Synthetic oligonucleotide
  Antisense Strand to SEQ ID NO: 351315
aguuacucgcucuaccagc

SEQ ID NO: 351317 - RNA, 19 nt, Artificial Sequence
  Description of Artificial Sequence: Synthetic oligonucleotide
  Sense Strand Starting at position 414 of SEQ ID NO: 317709
gcaagauauugagcuugga

SEQ ID NO: 351318 - RNA, 19 nt, Artificial Sequence
  Description of Artificial Sequence: Synthetic oligonucleotide
  Antisense Strand to SEQ ID NO: 351317
uccaagcucaauaucuugc

SEQ ID NO: 351319 - RNA, 19 nt, Artificial Sequence
  Description of Artificial Sequence: Synthetic oligonucleotide
  Sense Strand Starting at position 414 of SEQ ID NO: 317712
agauauugagcuuggauga

SEQ ID NO: 351320 - RNA, 19 nt, Artificial Sequence
  Description of Artificial Sequence: Synthetic oligonucleotide
  Antisense Strand to SEQ ID NO: 351319
ucauccaagcucaauaucu

SEQ ID NO: 351321 - RNA, 19 nt, Artificial Sequence
  Description of Artificial Sequence: Synthetic oligonucleotide
  Sense Strand Starting at position 414 of SEQ ID NO: 317713
gauauugagcuuggaugau

SEQ ID NO: 351322 - RNA, 19 nt, Artificial Sequence
  Description of Artificial Sequence: Synthetic oligonucleotide
  Antisense Strand to SEQ ID NO: 351321
aucauccaagcucaauauc

SEQ ID NO: 351323 - RNA, 19 nt, Artificial Sequence
  Description of Artificial Sequence: Synthetic oligonucleotide
  Sense Strand Starting at position 414 of SEQ ID NO: 317747
cuuggucaagagugaggaa

SEQ ID NO: 351324 - RNA, 19 nt, Artificial Sequence
  Description of Artificial Sequence: Synthetic oligonucleotide
  Antisense Strand to SEQ ID NO: 351323
uuccucacucuugaccaag

SEQ ID NO: 351325 - RNA, 19 nt, Artificial Sequence
  Description of Artificial Sequence: Synthetic oligonucleotide
  Sense Strand Starting at position 414 of SEQ ID NO: 317908
uagugaaauggugaaugca

SEQ ID NO: 351326 - RNA, 19 nt, Artificial Sequence
  Description of Artificial Sequence: Synthetic oligonucleotide
  Antisense Strand to SEQ ID NO: 351325
ugcauucaccauuucacua

SEQ ID NO: 351327 - RNA, 19 nt, Artificial Sequence
  Description of Artificial Sequence: Synthetic oligonucleotide
  Sense Strand Starting at position 414 of SEQ ID NO: 318147
gcccacuuggaaggaauau

SEQ ID NO: 351328 - RNA, 19 nt, Artificial Sequence
  Description of Artificial Sequence: Synthetic oligonucleotide
  Antisense Strand to SEQ ID NO: 351327
auauuccuuccaagugggc

SEQ ID NO: 351329 - RNA, 19 nt, Artificial Sequence
  Description of Artificial Sequence: Synthetic oligonucleotide
  Sense Strand Starting at position 414 of SEQ ID NO: 318184
gcagcuggucaggaaauga

SEQ ID NO: 351330 - RNA, 19 nt, Artificial Sequence
  Description of Artificial Sequence: Synthetic oligonucleotide
  Antisense Strand to SEQ ID NO: 351329
ucauuuccugaccagcugc

SEQ ID NO: 351331 - RNA, 19 nt, Artificial Sequence
  Description of Artificial Sequence: Synthetic oligonucleotide
  Sense Strand Starting at position 414 of SEQ ID NO: 318592
uuggcuggucaggaauuaa

SEQ ID NO: 351332 - RNA, 19 nt, Artificial Sequence
  Description of Artificial Sequence: Synthetic oligonucleotide
  Antisense Strand to SEQ ID NO: 351331
uuaauuccugaccagccaa

SEQ ID NO: 351333 - RNA, 19 nt, Artificial Sequence
  Description of Artificial Sequence: Synthetic oligonucleotide
  Sense Strand Starting at position 414 of SEQ ID NO: 318761
caccguaguggagaguaaa

SEQ ID NO: 351334 - RNA, 19 nt, Artificial Sequence
  Description of Artificial Sequence: Synthetic oligonucleotide
  Antisense Strand to SEQ ID NO: 351333
uuuacucuccacuacggug

SEQ ID NO: 351335 - RNA, 19 nt, Artificial Sequence
  Description of Artificial Sequence: Synthetic oligonucleotide
  Sense Strand Starting at position 414 of SEQ ID NO: 318764
cguaguggagaguaaauga

SEQ ID NO: 351336 - RNA, 19 nt, Artificial Sequence
  Description of Artificial Sequence: Synthetic oligonucleotide
  Antisense Strand to SEQ ID NO: 351335
ucauuuacucuccacuacg

SEQ ID NO: 351337 - RNA, 19 nt, Artificial Sequence
  Description of Artificial Sequence: Synthetic oligonucleotide
  Sense Strand Starting at position 414 of SEQ ID NO: 318944
uggacaaucugucuuuaga

SEQ ID NO: 351338 - RNA, 19 nt, Artificial Sequence
  Description of Artificial Sequence: Synthetic oligonucleotide
  Antisense Strand to SEQ ID NO: 351337
ucuaaagacagauugucca

SEQ ID NO: 351339 - RNA, 19 nt, Artificial Sequence
  Description of Artificial Sequence: Synthetic oligonucleotide
  Sense Strand Starting at position 414 of SEQ ID NO: 319091
uugagacauucugugaaag

SEQ ID NO: 351340 - RNA, 19 nt, Artificial Sequence
  Description of Artificial Sequence: Synthetic oligonucleotide
  Antisense Strand to SEQ ID NO: 351339
cuuucacagaaugucucaa

SEQ ID NO: 351341 - RNA, 19 nt, Artificial Sequence
  Description of Artificial Sequence: Synthetic oligonucleotide
  Sense Strand Starting at position 414 of SEQ ID NO: 319129
aggagaacuuuccucagca

SEQ ID NO: 351342 - RNA, 19 nt, Artificial Sequence
  Description of Artificial Sequence: Synthetic oligonucleotide
  Antisense Strand to SEQ ID NO: 351341
ugcugaggaaaguucuccu

SEQ ID NO: 351343 - RNA, 19 nt, Artificial Sequence
  Description of Artificial Sequence: Synthetic oligonucleotide
  Sense Strand Starting at position 414 of SEQ ID NO: 319130
ggagaacuuuccucagcag

SEQ ID NO: 351344 - RNA, 19 nt, Artificial Sequence
  Description of Artificial Sequence: Synthetic oligonucleotide
  Antisense Strand to SEQ ID NO: 351343
cugcugaggaaaguucucc

SEQ ID NO: 351345 - RNA, 19 nt, Artificial Sequence
  Description of Artificial Sequence: Synthetic oligonucleotide
  Sense Strand Starting at position 415 of SEQ ID NO: 317256
gaggaagaucucggguaaa

SEQ ID NO: 351346 - RNA, 19 nt, Artificial Sequence
  Description of Artificial Sequence: Synthetic oligonucleotide
  Antisense Strand to SEQ ID NO: 351345
uuuacccgagaucuuccuc

SEQ ID NO: 351347 - RNA, 19 nt, Artificial Sequence
  Description of Artificial Sequence: Synthetic oligonucleotide
  Sense Strand Starting at position 415 of SEQ ID NO: 317355
gcggauuccugguuucuua

SEQ ID NO: 351348 - RNA, 19 nt, Artificial Sequence
  Description of Artificial Sequence: Synthetic oligonucleotide
  Antisense Strand to SEQ ID NO: 351347
uaagaaaccaggaauccgc

SEQ ID NO: 351349 - RNA, 19 nt, Artificial Sequence
  Description of Artificial Sequence: Synthetic oligonucleotide
  Sense Strand Starting at position 415 of SEQ ID NO: 317358
gauuccugguuucuuaaag

SEQ ID NO: 351350 - RNA, 19 nt, Artificial Sequence
  Description of Artificial Sequence: Synthetic oligonucleotide
  Antisense Strand to SEQ ID NO: 351349
cuuuaagaaaccaggaauc

SEQ ID NO: 351351 - RNA, 19 nt, Artificial Sequence
  Description of Artificial Sequence: Synthetic oligonucleotide
  Sense Strand Starting at position 415 of SEQ ID NO: 317505
agauuugaauccugacacu

SEQ ID NO: 351352 - RNA, 19 nt, Artificial Sequence
  Description of Artificial Sequence: Synthetic oligonucleotide
  Antisense Strand to SEQ ID NO: 351351
agugucaggauucaaaucu

SEQ ID NO: 351353 - RNA, 19 nt, Artificial Sequence
  Description of Artificial Sequence: Synthetic oligonucleotide
  Sense Strand Starting at position 415 of SEQ ID NO: 317553
gaauacauguaugucuaga

SEQ ID NO: 351354 - RNA, 19 nt, Artificial Sequence
  Description of Artificial Sequence: Synthetic oligonucleotide
  Antisense Strand to SEQ ID NO: 351353
ucuagacauacauguauuc

SEQ ID NO: 351355 - RNA, 19 nt, Artificial Sequence
  Description of Artificial Sequence: Synthetic oligonucleotide
  Sense Strand Starting at position 415 of SEQ ID NO: 317555
auacauguaugucuagauc

SEQ ID NO: 351356 - RNA, 19 nt, Artificial Sequence
  Description of Artificial Sequence: Synthetic oligonucleotide
  Antisense Strand to SEQ ID NO: 351355
gaucuagacauacauguau

SEQ ID NO: 351357 - RNA, 19 nt, Artificial Sequence
  Description of Artificial Sequence: Synthetic oligonucleotide
  Sense Strand Starting at position 415 of SEQ ID NO: 317558
cauguaugucuagaucgaa

SEQ ID NO: 351358 - RNA, 19 nt, Artificial Sequence
  Description of Artificial Sequence: Synthetic oligonucleotide
  Antisense Strand to SEQ ID NO: 351357
uucgaucuagacauacaug

SEQ ID NO: 351359 - RNA, 19 nt, Artificial Sequence
  Description of Artificial Sequence: Synthetic oligonucleotide
  Sense Strand Starting at position 415 of SEQ ID NO: 317561
guaugucuagaucgaaacu

SEQ ID NO: 351360 - RNA, 19 nt, Artificial Sequence
  Description of Artificial Sequence: Synthetic oligonucleotide
  Antisense Strand to SEQ ID NO: 351359
aguuucgaucuagacauac

SEQ ID NO: 351361 - RNA, 19 nt, Artificial Sequence
  Description of Artificial Sequence: Synthetic oligonucleotide
  Sense Strand Starting at position 415 of SEQ ID NO: 317592
ggcagaagaugagauuaca

SEQ ID NO: 351362 - RNA, 19 nt, Artificial Sequence
  Description of Artificial Sequence: Synthetic oligonucleotide
  Antisense Strand to SEQ ID NO: 351361
uguaaucucaucuucugcc

SEQ ID NO: 351363 - RNA, 19 nt, Artificial Sequence
  Description of Artificial Sequence: Synthetic oligonucleotide
  Sense Strand Starting at position 415 of SEQ ID NO: 317662
ugugacggcuuucugagaa

SEQ ID NO: 351364 - RNA, 19 nt, Artificial Sequence
  Description of Artificial Sequence: Synthetic oligonucleotide
  Antisense Strand to SEQ ID NO: 351363
uucucagaaagccgucaca

SEQ ID NO: 351365 - RNA, 19 nt, Artificial Sequence
  Description of Artificial Sequence: Synthetic oligonucleotide
  Sense Strand Starting at position 415 of SEQ ID NO: 317684
cugggugcuguuuaauauu

SEQ ID NO: 351366 - RNA, 19 nt, Artificial Sequence
  Description of Artificial Sequence: Synthetic oligonucleotide
  Antisense Strand to SEQ ID NO: 351365
aauauuaaacagcacccag

SEQ ID NO: 351367 - RNA, 19 nt, Artificial Sequence
  Description of Artificial Sequence: Synthetic oligonucleotide
  Sense Strand Starting at position 415 of SEQ ID NO: 317766
ucacuaucuugagcucgua

SEQ ID NO: 351368 - RNA, 19 nt, Artificial Sequence
  Description of Artificial Sequence: Synthetic oligonucleotide
  Antisense Strand to SEQ ID NO: 351367
uacgagcucaagauaguga

SEQ ID NO: 351369 - RNA, 19 nt, Artificial Sequence
  Description of Artificial Sequence: Synthetic oligonucleotide
  Sense Strand Starting at position 415 of SEQ ID NO: 317848
guagaauaccgucaaugaa

SEQ ID NO: 351370 - RNA, 19 nt, Artificial Sequence
  Description of Artificial Sequence: Synthetic oligonucleotide
  Antisense Strand to SEQ ID NO: 351369
uucauugacgguauucuac

SEQ ID NO: 351371 - RNA, 19 nt, Artificial Sequence
  Description of Artificial Sequence: Synthetic oligonucleotide
  Sense Strand Starting at position 415 of SEQ ID NO: 317962
ucgugugucguuaggacuu

SEQ ID NO: 351372 - RNA, 19 nt, Artificial Sequence
  Description of Artificial Sequence: Synthetic oligonucleotide
  Antisense Strand to SEQ ID NO: 351371
aaguccuaacgacacacga

SEQ ID NO: 351373 - RNA, 19 nt, Artificial Sequence
  Description of Artificial Sequence: Synthetic oligonucleotide
  Sense Strand Starting at position 415 of SEQ ID NO: 317968
gucguuaggacuuaguuua

SEQ ID NO: 351374 - RNA, 19 nt, Artificial Sequence
  Description of Artificial Sequence: Synthetic oligonucleotide
  Antisense Strand to SEQ ID NO: 351373
uaaacuaaguccuaacgac

SEQ ID NO: 351375 - RNA, 19 nt, Artificial Sequence
  Description of Artificial Sequence: Synthetic oligonucleotide
  Sense Strand Starting at position 415 of SEQ ID NO: 317976
gacuuaguuuacuuuggca

SEQ ID NO: 351376 - RNA, 19 nt, Artificial Sequence
  Description of Artificial Sequence: Synthetic oligonucleotide
  Antisense Strand to SEQ ID NO: 351375
ugccaaaguaaacuaaguc

SEQ ID NO: 351377 - RNA, 19 nt, Artificial Sequence
  Description of Artificial Sequence: Synthetic oligonucleotide
  Sense Strand Starting at position 415 of SEQ ID NO: 317996
gccggucaugcgguuucau

SEQ ID NO: 351378 - RNA, 19 nt, Artificial Sequence
  Description of Artificial Sequence: Synthetic oligonucleotide
  Antisense Strand to SEQ ID NO: 351377
augaaaccgcaugaccggc

SEQ ID NO: 351379 - RNA, 19 nt, Artificial Sequence
  Description of Artificial Sequence: Synthetic oligonucleotide
  Sense Strand Starting at position 415 of SEQ ID NO: 317997
ccggucaugcgguuucauu

SEQ ID NO: 351380 - RNA, 19 nt, Artificial Sequence
  Description of Artificial Sequence: Synthetic oligonucleotide
  Antisense Strand to SEQ ID NO: 351379
aaugaaaccgcaugaccgg

SEQ ID NO: 351381 - RNA, 19 nt, Artificial Sequence
  Description of Artificial Sequence: Synthetic oligonucleotide
  Sense Strand Starting at position 415 of SEQ ID NO: 318102
cuccaaugggagugauaau

SEQ ID NO: 351382 - RNA, 19 nt, Artificial Sequence
  Description of Artificial Sequence: Synthetic oligonucleotide
  Antisense Strand to SEQ ID NO: 351381
auuaucacucccauuggag

SEQ ID NO: 351383 - RNA, 19 nt, Artificial Sequence
  Description of Artificial Sequence: Synthetic oligonucleotide
  Sense Strand Starting at position 415 of SEQ ID NO: 318114
ugauaauugcaucaguauu

SEQ ID NO: 351384 - RNA, 19 nt, Artificial Sequence
  Description of Artificial Sequence: Synthetic oligonucleotide
  Antisense Strand to SEQ ID NO: 351383
aauacugaugcaauuauca

SEQ ID NO: 351385 - RNA, 19 nt, Artificial Sequence
  Description of Artificial Sequence: Synthetic oligonucleotide
  Sense Strand Starting at position 415 of SEQ ID NO: 318156
caguguaguugucuucuga

SEQ ID NO: 351386 - RNA, 19 nt, Artificial Sequence
  Description of Artificial Sequence: Synthetic oligonucleotide
  Antisense Strand to SEQ ID NO: 351385
ucagaagacaacuacacug

SEQ ID NO: 351387 - RNA, 19 nt, Artificial Sequence
  Description of Artificial Sequence: Synthetic oligonucleotide
  Sense Strand Starting at position 415 of SEQ ID NO: 318235
augguauggucagucaaag

SEQ ID NO: 351388 - RNA, 19 nt, Artificial Sequence
  Description of Artificial Sequence: Synthetic oligonucleotide
  Antisense Strand to SEQ ID NO: 351387
cuuugacugaccauaccau

SEQ ID NO: 351389 - RNA, 19 nt, Artificial Sequence
  Description of Artificial Sequence: Synthetic oligonucleotide
  Sense Strand Starting at position 415 of SEQ ID NO: 318276
gggaucaauguccgaauga

SEQ ID NO: 351390 - RNA, 19 nt, Artificial Sequence
  Description of Artificial Sequence: Synthetic oligonucleotide
  Antisense Strand to SEQ ID NO: 351389
ucauucggacauugauccc

SEQ ID NO: 351391 - RNA, 19 nt, Artificial Sequence
  Description of Artificial Sequence: Synthetic oligonucleotide
  Sense Strand Starting at position 415 of SEQ ID NO: 318416
gcaaccauaccuggaaauu

SEQ ID NO: 351392 - RNA, 19 nt, Artificial Sequence
  Description of Artificial Sequence: Synthetic oligonucleotide
  Antisense Strand to SEQ ID NO: 351391
aauuuccagguaugguugc

SEQ ID NO: 351393 - RNA, 19 nt, Artificial Sequence
  Description of Artificial Sequence: Synthetic oligonucleotide
  Sense Strand Starting at position 415 of SEQ ID NO: 318425
ccuggaaauucccuuggga

SEQ ID NO: 351394 - RNA, 19 nt, Artificial Sequence
  Description of Artificial Sequence: Synthetic oligonucleotide
  Antisense Strand to SEQ ID NO: 351393
ucccaagggaauuuccagg

SEQ ID NO: 351395 - RNA, 19 nt, Artificial Sequence
  Description of Artificial Sequence: Synthetic oligonucleotide
  Sense Strand Starting at position 415 of SEQ ID NO: 318535
cguugaugcugaguuucca

SEQ ID NO: 351396 - RNA, 19 nt, Artificial Sequence
  Description of Artificial Sequence: Synthetic oligonucleotide
  Antisense Strand to SEQ ID NO: 351395
uggaaacucagcaucaacg

SEQ ID NO: 351397 - RNA, 19 nt, Artificial Sequence
  Description of Artificial Sequence: Synthetic oligonucleotide
  Sense Strand Starting at position 415 of SEQ ID NO: 318555
uuaaguuacuuugcugagu

SEQ ID NO: 351398 - RNA, 19 nt, Artificial Sequence
  Description of Artificial Sequence: Synthetic oligonucleotide
  Antisense Strand to SEQ ID NO: 351397
acucagcaaaguaacuuaa

SEQ ID NO: 351399 - RNA, 19 nt, Artificial Sequence
  Description of Artificial Sequence: Synthetic oligonucleotide
  Sense Strand Starting at position 415 of SEQ ID NO: 318556
uaaguuacuuugcugaguu

SEQ ID NO: 351400 - RNA, 19 nt, Artificial Sequence
  Description of Artificial Sequence: Synthetic oligonucleotide
  Antisense Strand to SEQ ID NO: 351399
aacucagcaaaguaacuua

SEQ ID NO: 351401 - RNA, 19 nt, Artificial Sequence
  Description of Artificial Sequence: Synthetic oligonucleotide
  Sense Strand Starting at position 415 of SEQ ID NO: 318564
uuugcugaguuuccauuua

SEQ ID NO: 351402 - RNA, 19 nt, Artificial Sequence
  Description of Artificial Sequence: Synthetic oligonucleotide
  Antisense Strand to SEQ ID NO: 351401
uaaauggaaacucagcaaa

SEQ ID NO: 351403 - RNA, 19 nt, Artificial Sequence
  Description of Artificial Sequence: Synthetic oligonucleotide
  Sense Strand Starting at position 415 of SEQ ID NO: 318645
cuccuaguccaaugaaggu

SEQ ID NO: 351404 - RNA, 19 nt, Artificial Sequence
  Description of Artificial Sequence: Synthetic oligonucleotide
  Antisense Strand to SEQ ID NO: 351403
accuucauuggacuaggag

SEQ ID NO: 351405 - RNA, 19 nt, Artificial Sequence
  Description of Artificial Sequence: Synthetic oligonucleotide
  Sense Strand Starting at position 415 of SEQ ID NO: 318652
uccaaugaagguuguaaac

SEQ ID NO: 351406 - RNA, 19 nt, Artificial Sequence
  Description of Artificial Sequence: Synthetic oligonucleotide
  Antisense Strand to SEQ ID NO: 351405
guuuacaaccuucauugga

SEQ ID NO: 351407 - RNA, 19 nt, Artificial Sequence
  Description of Artificial Sequence: Synthetic oligonucleotide
  Sense Strand Starting at position 415 of SEQ ID NO: 318661
gguuguaaacucuacccaa

SEQ ID NO: 351408 - RNA, 19 nt, Artificial Sequence
  Description of Artificial Sequence: Synthetic oligonucleotide
  Antisense Strand to SEQ ID NO: 351407
uuggguagaguuuacaacc

SEQ ID NO: 351409 - RNA, 19 nt, Artificial Sequence
  Description of Artificial Sequence: Synthetic oligonucleotide
  Sense Strand Starting at position 415 of SEQ ID NO: 318696
gacuguggguucucugcaa

SEQ ID NO: 351410 - RNA, 19 nt, Artificial Sequence
  Description of Artificial Sequence: Synthetic oligonucleotide
  Antisense Strand to SEQ ID NO: 351409
uugcagagaacccacaguc

SEQ ID NO: 351411 - RNA, 19 nt, Artificial Sequence
  Description of Artificial Sequence: Synthetic oligonucleotide
  Sense Strand Starting at position 415 of SEQ ID NO: 318700
guggguucucugcaaguac

SEQ ID NO: 351412 - RNA, 19 nt, Artificial Sequence
  Description of Artificial Sequence: Synthetic oligonucleotide
  Antisense Strand to SEQ ID NO: 351411
guacuugcagagaacccac

SEQ ID NO: 351413 - RNA, 19 nt, Artificial Sequence
  Description of Artificial Sequence: Synthetic oligonucleotide
  Sense Strand Starting at position 415 of SEQ ID NO: 318745
ggcacucaguaacuagaau

SEQ ID NO: 351414 - RNA, 19 nt, Artificial Sequence
  Description of Artificial Sequence: Synthetic oligonucleotide
  Antisense Strand to SEQ ID NO: 351413
auucuaguuacugagugcc

SEQ ID NO: 351415 - RNA, 19 nt, Artificial Sequence
  Description of Artificial Sequence: Synthetic oligonucleotide
  Sense Strand Starting at position 415 of SEQ ID NO: 318770
gcaagauaugcauguggac

SEQ ID NO: 351416 - RNA, 19 nt, Artificial Sequence
  Description of Artificial Sequence: Synthetic oligonucleotide
  Antisense Strand to SEQ ID NO: 351415
guccacaugcauaucuugc

SEQ ID NO: 351417 - RNA, 19 nt, Artificial Sequence
  Description of Artificial Sequence: Synthetic oligonucleotide
  Sense Strand Starting at position 415 of SEQ ID NO: 318803
ggcuaaaugcuaugagaaa

SEQ ID NO: 351418 - RNA, 19 nt, Artificial Sequence
  Description of Artificial Sequence: Synthetic oligonucleotide
  Antisense Strand to SEQ ID NO: 351417
uuucucauagcauuuagcc

SEQ ID NO: 351419 - RNA, 19 nt, Artificial Sequence
  Description of Artificial Sequence: Synthetic oligonucleotide
  Sense Strand Starting at position 415 of SEQ ID NO: 318897
gguggugaccuuugaaaga

SEQ ID NO: 351420 - RNA, 19 nt, Artificial Sequence
  Description of Artificial Sequence: Synthetic oligonucleotide
  Antisense Strand to SEQ ID NO: 351419
ucuuucaaaggucaccacc

SEQ ID NO: 351421 - RNA, 19 nt, Artificial Sequence
  Description of Artificial Sequence: Synthetic oligonucleotide
  Sense Strand Starting at position 415 of SEQ ID NO: 318949
agggcuuuauggguauaga

SEQ ID NO: 351422 - RNA, 19 nt, Artificial Sequence
  Description of Artificial Sequence: Synthetic oligonucleotide
  Antisense Strand to SEQ ID NO: 351421
ucuauacccauaaagcccu

SEQ ID NO: 351423 - RNA, 19 nt, Artificial Sequence
  Description of Artificial Sequence: Synthetic oligonucleotide
  Sense Strand Starting at position 415 of SEQ ID NO: 318950
gggcuuuauggguauagag

SEQ ID NO: 351424 - RNA, 19 nt, Artificial Sequence
  Description of Artificial Sequence: Synthetic oligonucleotide
  Antisense Strand to SEQ ID NO: 351423
cucuauacccauaaagccc

SEQ ID NO: 351425 - RNA, 19 nt, Artificial Sequence
  Description of Artificial Sequence: Synthetic oligonucleotide
  Sense Strand Starting at position 416 of SEQ ID NO: 315259
gcuguugcugaaggauaaa

SEQ ID NO: 351426 - RNA, 19 nt, Artificial Sequence
  Description of Artificial Sequence: Synthetic oligonucleotide
  Antisense Strand to SEQ ID NO: 351425
uuuauccuucagcaacagc

SEQ ID NO: 351427 - RNA, 19 nt, Artificial Sequence
  Description of Artificial Sequence: Synthetic oligonucleotide
  Sense Strand Starting at position 416 of SEQ ID NO: 315388
ggguuacaacugugaacua

SEQ ID NO: 351428 - RNA, 19 nt, Artificial Sequence
  Description of Artificial Sequence: Synthetic oligonucleotide
  Antisense Strand to SEQ ID NO: 351427
uaguucacaguuguaaccc

SEQ ID NO: 351429 - RNA, 19 nt, Artificial Sequence
  Description of Artificial Sequence: Synthetic oligonucleotide
  Sense Strand Starting at position 416 of SEQ ID NO: 315445
gguaacaaauagccuuaau

SEQ ID NO: 351430 - RNA, 19 nt, Artificial Sequence
  Description of Artificial Sequence: Synthetic oligonucleotide
  Antisense Strand to SEQ ID NO: 351429
auuaaggcuauuuguuacc

SEQ ID NO: 351431 - RNA, 19 nt, Artificial Sequence
  Description of Artificial Sequence: Synthetic oligonucleotide
  Sense Strand Starting at position 416 of SEQ ID NO: 315510
gagggcuuacuaggaaauu

SEQ ID NO: 351432 - RNA, 19 nt, Artificial Sequence
  Description of Artificial Sequence: Synthetic oligonucleotide
  Antisense Strand to SEQ ID NO: 351431
aauuuccuaguaagcccuc

SEQ ID NO: 351433 - RNA, 19 nt, Artificial Sequence
  Description of Artificial Sequence: Synthetic oligonucleotide
  Sense Strand Starting at position 416 of SEQ ID NO: 315511
agggcuuacuaggaaauuu

SEQ ID NO: 351434 - RNA, 19 nt, Artificial Sequence
  Description of Artificial Sequence: Synthetic oligonucleotide
  Antisense Strand to SEQ ID NO: 351433
aaauuuccuaguaagcccu

SEQ ID NO: 351435 - RNA, 19 nt, Artificial Sequence
  Description of Artificial Sequence: Synthetic oligonucleotide
  Sense Strand Starting at position 416 of SEQ ID NO: 315568
accauuucuuagggacaau

SEQ ID NO: 351436 - RNA, 19 nt, Artificial Sequence
  Description of Artificial Sequence: Synthetic oligonucleotide
  Antisense Strand to SEQ ID NO: 351435
auugucccuaagaaauggu

SEQ ID NO: 351437 - RNA, 19 nt, Artificial Sequence
  Description of Artificial Sequence: Synthetic oligonucleotide
  Sense Strand Starting at position 416 of SEQ ID NO: 315579
gggacaaucuccuugaauu

SEQ ID NO: 351438 - RNA, 19 nt, Artificial Sequence
  Description of Artificial Sequence: Synthetic oligonucleotide
  Antisense Strand to SEQ ID NO: 351437
aauucaaggagauuguccc

SEQ ID NO: 351439 - RNA, 19 nt, Artificial Sequence
  Description of Artificial Sequence: Synthetic oligonucleotide
  Sense Strand Starting at position 416 of SEQ ID NO: 316065
ggacuugagggcugaaaca

SEQ ID NO: 351440 - RNA, 19 nt, Artificial Sequence
  Description of Artificial Sequence: Synthetic oligonucleotide
  Antisense Strand to SEQ ID NO: 351439
uguuucagcccucaagucc

SEQ ID NO: 351441 - RNA, 19 nt, Artificial Sequence
  Description of Artificial Sequence: Synthetic oligonucleotide
  Sense Strand Starting at position 416 of SEQ ID NO: 316280
ugcucuuauuugccuggaa

SEQ ID NO: 351442 - RNA, 19 nt, Artificial Sequence
  Description of Artificial Sequence: Synthetic oligonucleotide
  Antisense Strand to SEQ ID NO: 351441
uuccaggcaaauaagagca

SEQ ID NO: 351443 - RNA, 19 nt, Artificial Sequence
  Description of Artificial Sequence: Synthetic oligonucleotide
  Sense Strand Starting at position 416 of SEQ ID NO: 316281
gcucuuauuugccuggaaa

SEQ ID NO: 351444 - RNA, 19 nt, Artificial Sequence
  Description of Artificial Sequence: Synthetic oligonucleotide
  Antisense Strand to SEQ ID NO: 351443
uuuccaggcaaauaagagc

SEQ ID NO: 351445 - RNA, 19 nt, Artificial Sequence
  Description of Artificial Sequence: Synthetic oligonucleotide
  Sense Strand Starting at position 416 of SEQ ID NO: 316493
uaguuaccggcauaaggaa

SEQ ID NO: 351446 - RNA, 19 nt, Artificial Sequence
  Description of Artificial Sequence: Synthetic oligonucleotide
  Antisense Strand to SEQ ID NO: 351445
uuccuuaugccgguaacua

SEQ ID NO: 351447 - RNA, 19 nt, Artificial Sequence
  Description of Artificial Sequence: Synthetic oligonucleotide
  Sense Strand Starting at position 416 of SEQ ID NO: 316837
agccaucuugcagauggaa

SEQ ID NO: 351448 - RNA, 19 nt, Artificial Sequence
  Description of Artificial Sequence: Synthetic oligonucleotide
  Antisense Strand to SEQ ID NO: 351447
uuccaucugcaagauggcu

SEQ ID NO: 351449 - RNA, 19 nt, Artificial Sequence
  Description of Artificial Sequence: Synthetic oligonucleotide
  Sense Strand Starting at position 416 of SEQ ID NO: 316964
uggauuaguucaucgggaa

SEQ ID NO: 351450 - RNA, 19 nt, Artificial Sequence
  Description of Artificial Sequence: Synthetic oligonucleotide
  Antisense Strand to SEQ ID NO: 351449
uucccgaugaacuaaucca

SEQ ID NO: 351451 - RNA, 19 nt, Artificial Sequence
  Description of Artificial Sequence: Synthetic oligonucleotide
  Sense Strand Starting at position 416 of SEQ ID NO: 316965
ggauuaguucaucgggaag

SEQ ID NO: 351452 - RNA, 19 nt, Artificial Sequence
  Description of Artificial Sequence: Synthetic oligonucleotide
  Antisense Strand to SEQ ID NO: 351451
cuucccgaugaacuaaucc

SEQ ID NO: 351453 - RNA, 19 nt, Artificial Sequence
  Description of Artificial Sequence: Synthetic oligonucleotide
  Sense Strand Starting at position 416 of SEQ ID NO: 317018
uuuaaugacgcagaaaggu

SEQ ID NO: 351454 - RNA, 19 nt, Artificial Sequence
  Description of Artificial Sequence: Synthetic oligonucleotide
  Antisense Strand to SEQ ID NO: 351453
accuuucugcgucauuaaa

SEQ ID NO: 351455 - RNA, 19 nt, Artificial Sequence
  Description of Artificial Sequence: Synthetic oligonucleotide
  Sense Strand Starting at position 416 of SEQ ID NO: 317179
uccacuuacucaccgagaa

SEQ ID NO: 351456 - RNA, 19 nt, Artificial Sequence
  Description of Artificial Sequence: Synthetic oligonucleotide
  Antisense Strand to SEQ ID NO: 351455
uucucggugaguaagugga

SEQ ID NO: 351457 - RNA, 19 nt, Artificial Sequence
  Description of Artificial Sequence: Synthetic oligonucleotide
  Sense Strand Starting at position 416 of SEQ ID NO: 317180
ccacuuacucaccgagaag

SEQ ID NO: 351458 - RNA, 19 nt, Artificial Sequence
  Description of Artificial Sequence: Synthetic oligonucleotide
  Antisense Strand to SEQ ID NO: 351457
cuucucggugaguaagugg

SEQ ID NO: 351459 - RNA, 19 nt, Artificial Sequence
  Description of Artificial Sequence: Synthetic oligonucleotide
  Sense Strand Starting at position 416 of SEQ ID NO: 317536
uuaucacucuucguagaca

SEQ ID NO: 351460 - RNA, 19 nt, Artificial Sequence
  Description of Artificial Sequence: Synthetic oligonucleotide
  Antisense Strand to SEQ ID NO: 351459
ugucuacgaagagugauaa

SEQ ID NO: 351461 - RNA, 19 nt, Artificial Sequence
  Description of Artificial Sequence: Synthetic oligonucleotide
  Sense Strand Starting at position 416 of SEQ ID NO: 317539
ucacucuucguagacauga

SEQ ID NO: 351462 - RNA, 19 nt, Artificial Sequence
  Description of Artificial Sequence: Synthetic oligonucleotide
  Antisense Strand to SEQ ID NO: 351461
ucaugucuacgaagaguga

SEQ ID NO: 351463 - RNA, 19 nt, Artificial Sequence
  Description of Artificial Sequence: Synthetic oligonucleotide
  Sense Strand Starting at position 416 of SEQ ID NO: 317549
uagacaugauccgccacua

SEQ ID NO: 351464 - RNA, 19 nt, Artificial Sequence
  Description of Artificial Sequence: Synthetic oligonucleotide
  Antisense Strand to SEQ ID NO: 351463
uaguggcggaucaugucua

SEQ ID NO: 351465 - RNA, 19 nt, Artificial Sequence
  Description of Artificial Sequence: Synthetic oligonucleotide
  Sense Strand Starting at position 416 of SEQ ID NO: 317683
gcaggcguugugucaguuu

SEQ ID NO: 351466 - RNA, 19 nt, Artificial Sequence
  Description of Artificial Sequence: Synthetic oligonucleotide
  Antisense Strand to SEQ ID NO: 351465
aaacugacacaacgccugc

SEQ ID NO: 351467 - RNA, 19 nt, Artificial Sequence
  Description of Artificial Sequence: Synthetic oligonucleotide
  Sense Strand Starting at position 416 of SEQ ID NO: 317688
cguugugucaguuugccua

SEQ ID NO: 351468 - RNA, 19 nt, Artificial Sequence
  Description of Artificial Sequence: Synthetic oligonucleotide
  Antisense Strand to SEQ ID NO: 351467
uaggcaaacugacacaacg

SEQ ID NO: 351469 - RNA, 19 nt, Artificial Sequence
  Description of Artificial Sequence: Synthetic oligonucleotide
  Sense Strand Starting at position 416 of SEQ ID NO: 317825
auuagaugaugucuguaaa

SEQ ID NO: 351470 - RNA, 19 nt, Artificial Sequence
  Description of Artificial Sequence: Synthetic oligonucleotide
  Antisense Strand to SEQ ID NO: 351469
uuuacagacaucaucuaau

SEQ ID NO: 351471 - RNA, 19 nt, Artificial Sequence
  Description of Artificial Sequence: Synthetic oligonucleotide
  Sense Strand Starting at position 416 of SEQ ID NO: 317826
uuagaugaugucuguaaau

SEQ ID NO: 351472 - RNA, 19 nt, Artificial Sequence
  Description of Artificial Sequence: Synthetic oligonucleotide
  Antisense Strand to SEQ ID NO: 351471
auuuacagacaucaucuaa

SEQ ID NO: 351473 - RNA, 19 nt, Artificial Sequence
  Description of Artificial Sequence: Synthetic oligonucleotide
  Sense Strand Starting at position 416 of SEQ ID NO: 317828
agaugaugucuguaaaucc

SEQ ID NO: 351474 - RNA, 19 nt, Artificial Sequence
  Description of Artificial Sequence: Synthetic oligonucleotide
  Antisense Strand to SEQ ID NO: 351473
ggauuuacagacaucaucu

SEQ ID NO: 351475 - RNA, 19 nt, Artificial Sequence
  Description of Artificial Sequence: Synthetic oligonucleotide
  Sense Strand Starting at position 416 of SEQ ID NO: 317863
ggacguauugaguguuaaa

SEQ ID NO: 351476 - RNA, 19 nt, Artificial Sequence
  Description of Artificial Sequence: Synthetic oligonucleotide
  Antisense Strand to SEQ ID NO: 351475
uuuaacacucaauacgucc

SEQ ID NO: 351477 - RNA, 19 nt, Artificial Sequence
  Description of Artificial Sequence: Synthetic oligonucleotide
  Sense Strand Starting at position 416 of SEQ ID NO: 317963
cacccuuucguugggaaga

SEQ ID NO: 351478 - RNA, 19 nt, Artificial Sequence
  Description of Artificial Sequence: Synthetic oligonucleotide
  Antisense Strand to SEQ ID NO: 351477
ucuucccaacgaaagggug

SEQ ID NO: 351479 - RNA, 19 nt, Artificial Sequence
  Description of Artificial Sequence: Synthetic oligonucleotide
  Sense Strand Starting at position 416 of SEQ ID NO: 318062
uuccaaugguuagcugaga

SEQ ID NO: 351480 - RNA, 19 nt, Artificial Sequence
  Description of Artificial Sequence: Synthetic oligonucleotide
  Antisense Strand to SEQ ID NO: 351479
ucucagcuaaccauuggaa

SEQ ID NO: 351481 - RNA, 19 nt, Artificial Sequence
  Description of Artificial Sequence: Synthetic oligonucleotide
  Sense Strand Starting at position 416 of SEQ ID NO: 318063
uccaaugguuagcugagau

SEQ ID NO: 351482 - RNA, 19 nt, Artificial Sequence
  Description of Artificial Sequence: Synthetic oligonucleotide
  Antisense Strand to SEQ ID NO: 351481
aucucagcuaaccauugga

SEQ ID NO: 351483 - RNA, 19 nt, Artificial Sequence
  Description of Artificial Sequence: Synthetic oligonucleotide
  Sense Strand Starting at position 416 of SEQ ID NO: 318087
gcaccaaagcgcuuugcaa

SEQ ID NO: 351484 - RNA, 19 nt, Artificial Sequence
  Description of Artificial Sequence: Synthetic oligonucleotide
  Antisense Strand to SEQ ID NO: 351483
uugcaaagcgcuuuggugc

SEQ ID NO: 351485 - RNA, 19 nt, Artificial Sequence
  Description of Artificial Sequence: Synthetic oligonucleotide
  Sense Strand Starting at position 416 of SEQ ID NO: 318094
agcgcuuugcaaucuguaa

SEQ ID NO: 351486 - RNA, 19 nt, Artificial Sequence
  Description of Artificial Sequence: Synthetic oligonucleotide
  Antisense Strand to SEQ ID NO: 351485
uuacagauugcaaagcgcu

SEQ ID NO: 351487 - RNA, 19 nt, Artificial Sequence
  Description of Artificial Sequence: Synthetic oligonucleotide
  Sense Strand Starting at position 416 of SEQ ID NO: 318095
gcgcuuugcaaucuguaac

SEQ ID NO: 351488 - RNA, 19 nt, Artificial Sequence
  Description of Artificial Sequence: Synthetic oligonucleotide
  Antisense Strand to SEQ ID NO: 351487
guuacagauugcaaagcgc

SEQ ID NO: 351489 - RNA, 19 nt, Artificial Sequence
  Description of Artificial Sequence: Synthetic oligonucleotide
  Sense Strand Starting at position 416 of SEQ ID NO: 318254
guugcacuagauuaaguau

SEQ ID NO: 351490 - RNA, 19 nt, Artificial Sequence
  Description of Artificial Sequence: Synthetic oligonucleotide
  Antisense Strand to SEQ ID NO: 351489
auacuuaaucuagugcaac

SEQ ID NO: 351491 - RNA, 19 nt, Artificial Sequence
  Description of Artificial Sequence: Synthetic oligonucleotide
  Sense Strand Starting at position 416 of SEQ ID NO: 318257
gcacuagauuaaguaucua

SEQ ID NO: 351492 - RNA, 19 nt, Artificial Sequence
  Description of Artificial Sequence: Synthetic oligonucleotide
  Antisense Strand to SEQ ID NO: 351491
uagauacuuaaucuagugc

SEQ ID NO: 351493 - RNA, 19 nt, Artificial Sequence
  Description of Artificial Sequence: Synthetic oligonucleotide
  Sense Strand Starting at position 416 of SEQ ID NO: 318820
cuauauuuacgcugcugaa

SEQ ID NO: 351494 - RNA, 19 nt, Artificial Sequence
  Description of Artificial Sequence: Synthetic oligonucleotide
  Antisense Strand to SEQ ID NO: 351493
uucagcagcguaaauauag

SEQ ID NO: 351495 - RNA, 19 nt, Artificial Sequence
  Description of Artificial Sequence: Synthetic oligonucleotide
  Sense Strand Starting at position 416 of SEQ ID NO: 318862
auaucaugacccugaggua

SEQ ID NO: 351496 - RNA, 19 nt, Artificial Sequence
  Description of Artificial Sequence: Synthetic oligonucleotide
  Antisense Strand to SEQ ID NO: 351495
uaccucagggucaugauau

SEQ ID NO: 351497 - RNA, 19 nt, Artificial Sequence
  Description of Artificial Sequence: Synthetic oligonucleotide
  Sense Strand Starting at position 416 of SEQ ID NO: 318930
acucaauaucuguguuauc

SEQ ID NO: 351498 - RNA, 19 nt, Artificial Sequence
  Description of Artificial Sequence: Synthetic oligonucleotide
  Antisense Strand to SEQ ID NO: 351497
gauaacacagauauugagu

SEQ ID NO: 351499 - RNA, 19 nt, Artificial Sequence
  Description of Artificial Sequence: Synthetic oligonucleotide
  Sense Strand Starting at position 416 of SEQ ID NO: 318935
auaucuguguuaucugaag

SEQ ID NO: 351500 - RNA, 19 nt, Artificial Sequence
  Description of Artificial Sequence: Synthetic oligonucleotide
  Antisense Strand to SEQ ID NO: 351499
cuucagauaacacagauau

SEQ ID NO: 351501 - RNA, 19 nt, Artificial Sequence
  Description of Artificial Sequence: Synthetic oligonucleotide
  Sense Strand Starting at position 416 of SEQ ID NO: 318944
uuaucugaaguuugcaaau

SEQ ID NO: 351502 - RNA, 19 nt, Artificial Sequence
  Description of Artificial Sequence: Synthetic oligonucleotide
  Antisense Strand to SEQ ID NO: 351501
auuugcaaacuucagauaa

SEQ ID NO: 351503 - RNA, 19 nt, Artificial Sequence
  Description of Artificial Sequence: Synthetic oligonucleotide
  Sense Strand Starting at position 416 of SEQ ID NO: 318955
uugcaaauuccgcaagaaa

SEQ ID NO: 351504 - RNA, 19 nt, Artificial Sequence
  Description of Artificial Sequence: Synthetic oligonucleotide
  Antisense Strand to SEQ ID NO: 351503
uuucuugcggaauuugcaa

SEQ ID NO: 351505 - RNA, 19 nt, Artificial Sequence
  Description of Artificial Sequence: Synthetic oligonucleotide
  Sense Strand Starting at position 417 of SEQ ID NO: 315264
accuacugguuccauaaga

SEQ ID NO: 351506 - RNA, 19 nt, Artificial Sequence
  Description of Artificial Sequence: Synthetic oligonucleotide
  Antisense Strand to SEQ ID NO: 351505
ucuuauggaaccaguaggu

SEQ ID NO: 351507 - RNA, 19 nt, Artificial Sequence
  Description of Artificial Sequence: Synthetic oligonucleotide
  Sense Strand Starting at position 417 of SEQ ID NO: 315322
ugaggauauugcuaacuga

SEQ ID NO: 351508 - RNA, 19 nt, Artificial Sequence
  Description of Artificial Sequence: Synthetic oligonucleotide
  Antisense Strand to SEQ ID NO: 351507
ucaguuagcaauauccuca

SEQ ID NO: 351509 - RNA, 19 nt, Artificial Sequence
  Description of Artificial Sequence: Synthetic oligonucleotide
  Sense Strand Starting at position 417 of SEQ ID NO: 315856
ccgggaucaagccauugaa

SEQ ID NO: 351510 - RNA, 19 nt, Artificial Sequence
  Description of Artificial Sequence: Synthetic oligonucleotide
  Antisense Strand to SEQ ID NO: 351509
uucaauggcuugaucccgg

SEQ ID NO: 351511 - RNA, 19 nt, Artificial Sequence
  Description of Artificial Sequence: Synthetic oligonucleotide
  Sense Strand Starting at position 417 of SEQ ID NO: 315952
gcuccugacaaugguuagu

SEQ ID NO: 351512 - RNA, 19 nt, Artificial Sequence
  Description of Artificial Sequence: Synthetic oligonucleotide
  Antisense Strand to SEQ ID NO: 351511
acuaaccauugucaggagc

SEQ ID NO: 351513 - RNA, 19 nt, Artificial Sequence
  Description of Artificial Sequence: Synthetic oligonucleotide
  Sense Strand Starting at position 417 of SEQ ID NO: 315954
uccugacaaugguuaguau

SEQ ID NO: 351514 - RNA, 19 nt, Artificial Sequence
  Description of Artificial Sequence: Synthetic oligonucleotide
  Antisense Strand to SEQ ID NO: 351513
auacuaaccauugucagga

SEQ ID NO: 351515 - RNA, 19 nt, Artificial Sequence
  Description of Artificial Sequence: Synthetic oligonucleotide
  Sense Strand Starting at position 417 of SEQ ID NO: 315955
ccugacaaugguuaguaua

SEQ ID NO: 351516 - RNA, 19 nt, Artificial Sequence
  Description of Artificial Sequence: Synthetic oligonucleotide
  Antisense Strand to SEQ ID NO: 351515
uauacuaaccauugucagg

SEQ ID NO: 351517 - RNA, 19 nt, Artificial Sequence
  Description of Artificial Sequence: Synthetic oligonucleotide
  Sense Strand Starting at position 417 of SEQ ID NO: 315997
acuaguauguuucucauga

SEQ ID NO: 351518 - RNA, 19 nt, Artificial Sequence
  Description of Artificial Sequence: Synthetic oligonucleotide
  Antisense Strand to SEQ ID NO: 351517
ucaugagaaacauacuagu

SEQ ID NO: 351519 - RNA, 19 nt, Artificial Sequence
  Description of Artificial Sequence: Synthetic oligonucleotide
  Sense Strand Starting at position 417 of SEQ ID NO: 315998
cuaguauguuucucaugau

SEQ ID NO: 351520 - RNA, 19 nt, Artificial Sequence
  Description of Artificial Sequence: Synthetic oligonucleotide
  Antisense Strand to SEQ ID NO: 351519
aucaugagaaacauacuag

SEQ ID NO: 351521 - RNA, 19 nt, Artificial Sequence
  Description of Artificial Sequence: Synthetic oligonucleotide
  Sense Strand Starting at position 417 of SEQ ID NO: 316018
uauguaggcucuuugcaaa

SEQ ID NO: 351522 - RNA, 19 nt, Artificial Sequence
  Description of Artificial Sequence: Synthetic oligonucleotide
  Antisense Strand to SEQ ID NO: 351521
uuugcaaagagccuacaua

SEQ ID NO: 351523 - RNA, 19 nt, Artificial Sequence
  Description of Artificial Sequence: Synthetic oligonucleotide
  Sense Strand Starting at position 417 of SEQ ID NO: 316060
gcugccuuagaaugagaaa

SEQ ID NO: 351524 - RNA, 19 nt, Artificial Sequence
  Description of Artificial Sequence: Synthetic oligonucleotide
  Antisense Strand to SEQ ID NO: 351523
uuucucauucuaaggcagc

SEQ ID NO: 351525 - RNA, 19 nt, Artificial Sequence
  Description of Artificial Sequence: Synthetic oligonucleotide
  Sense Strand Starting at position 417 of SEQ ID NO: 316088
aagggacaguuaucuauuc

SEQ ID NO: 351526 - RNA, 19 nt, Artificial Sequence
  Description of Artificial Sequence: Synthetic oligonucleotide
  Antisense Strand to SEQ ID NO: 351525
gaauagauaacugucccuu

SEQ ID NO: 351527 - RNA, 19 nt, Artificial Sequence
  Description of Artificial Sequence: Synthetic oligonucleotide
  Sense Strand Starting at position 417 of SEQ ID NO: 316123
ggcuucuggugcuugauau

SEQ ID NO: 351528 - RNA, 19 nt, Artificial Sequence
  Description of Artificial Sequence: Synthetic oligonucleotide
  Antisense Strand to SEQ ID NO: 351527
auaucaagcaccagaagcc

SEQ ID NO: 351529 - RNA, 19 nt, Artificial Sequence
  Description of Artificial Sequence: Synthetic oligonucleotide
  Sense Strand Starting at position 417 of SEQ ID NO: 316124
gcuucuggugcuugauauc

SEQ ID NO: 351530 - RNA, 19 nt, Artificial Sequence
  Description of Artificial Sequence: Synthetic oligonucleotide
  Antisense Strand to SEQ ID NO: 351529
gauaucaagcaccagaagc

SEQ ID NO: 351531 - RNA, 19 nt, Artificial Sequence
  Description of Artificial Sequence: Synthetic oligonucleotide
  Sense Strand Starting at position 417 of SEQ ID NO: 316133
gcuugauaucuugaccuuc

SEQ ID NO: 351532 - RNA, 19 nt, Artificial Sequence
  Description of Artificial Sequence: Synthetic oligonucleotide
  Antisense Strand to SEQ ID NO: 351531
gaaggucaagauaucaagc

SEQ ID NO: 351533 - RNA, 19 nt, Artificial Sequence
  Description of Artificial Sequence: Synthetic oligonucleotide
  Sense Strand Starting at position 417 of SEQ ID NO: 316169
gagggacuacugugguaca

SEQ ID NO: 351534 - RNA, 19 nt, Artificial Sequence
  Description of Artificial Sequence: Synthetic oligonucleotide
  Antisense Strand to SEQ ID NO: 351533
uguaccacaguagucccuc

SEQ ID NO: 351535 - RNA, 19 nt, Artificial Sequence
  Description of Artificial Sequence: Synthetic oligonucleotide
  Sense Strand Starting at position 417 of SEQ ID NO: 316241
cccagaauaugggauuuaa

SEQ ID NO: 351536 - RNA, 19 nt, Artificial Sequence
  Description of Artificial Sequence: Synthetic oligonucleotide
  Antisense Strand to SEQ ID NO: 351535
uuaaaucccauauucuggg

SEQ ID NO: 351537 - RNA, 19 nt, Artificial Sequence
  Description of Artificial Sequence: Synthetic oligonucleotide
  Sense Strand Starting at position 417 of SEQ ID NO: 316263
aguauuuaaucccaggauc

SEQ ID NO: 351538 - RNA, 19 nt, Artificial Sequence
  Description of Artificial Sequence: Synthetic oligonucleotide
  Antisense Strand to SEQ ID NO: 351537
gauccugggauuaaauacu

SEQ ID NO: 351539 - RNA, 19 nt, Artificial Sequence
  Description of Artificial Sequence: Synthetic oligonucleotide
  Sense Strand Starting at position 417 of SEQ ID NO: 316646
gucuuugucaaauguccag

SEQ ID NO: 351540 - RNA, 19 nt, Artificial Sequence
  Description of Artificial Sequence: Synthetic oligonucleotide
  Antisense Strand to SEQ ID NO: 351539
cuggacauuugacaaagac

SEQ ID NO: 351541 - RNA, 19 nt, Artificial Sequence
  Description of Artificial Sequence: Synthetic oligonucleotide
  Sense Strand Starting at position 417 of SEQ ID NO: 316650
uugucaaauguccagccua

SEQ ID NO: 351542 - RNA, 19 nt, Artificial Sequence
  Description of Artificial Sequence: Synthetic oligonucleotide
  Antisense Strand to SEQ ID NO: 351541
uaggcuggacauuugacaa

SEQ ID NO: 351543 - RNA, 19 nt, Artificial Sequence
  Description of Artificial Sequence: Synthetic oligonucleotide
  Sense Strand Starting at position 417 of SEQ ID NO: 316749
agccuaaauauucggcaga

SEQ ID NO: 351544 - RNA, 19 nt, Artificial Sequence
  Description of Artificial Sequence: Synthetic oligonucleotide
  Antisense Strand to SEQ ID NO: 351543
ucugccgaauauuuaggcu

SEQ ID NO: 351545 - RNA, 19 nt, Artificial Sequence
  Description of Artificial Sequence: Synthetic oligonucleotide
  Sense Strand Starting at position 417 of SEQ ID NO: 316751
ccuaaauauucggcagaac

SEQ ID NO: 351546 - RNA, 19 nt, Artificial Sequence
  Description of Artificial Sequence: Synthetic oligonucleotide
  Antisense Strand to SEQ ID NO: 351545
guucugccgaauauuuagg

SEQ ID NO: 351547 - RNA, 19 nt, Artificial Sequence
  Description of Artificial Sequence: Synthetic oligonucleotide
  Sense Strand Starting at position 417 of SEQ ID NO: 316815
ucgcacaaaguuuaaagau

SEQ ID NO: 351548 - RNA, 19 nt, Artificial Sequence
  Description of Artificial Sequence: Synthetic oligonucleotide
  Antisense Strand to SEQ ID NO: 351547
aucuuuaaacuuugugcga

SEQ ID NO: 351549 - RNA, 19 nt, Artificial Sequence
  Description of Artificial Sequence: Synthetic oligonucleotide
  Sense Strand Starting at position 417 of SEQ ID NO: 316854
cccagaagucacugucaac

SEQ ID NO: 351550 - RNA, 19 nt, Artificial Sequence
  Description of Artificial Sequence: Synthetic oligonucleotide
  Antisense Strand to SEQ ID NO: 351549
guugacagugacuucuggg

SEQ ID NO: 351551 - RNA, 19 nt, Artificial Sequence
  Description of Artificial Sequence: Synthetic oligonucleotide
  Sense Strand Starting at position 417 of SEQ ID NO: 317049
agcugagguccugaacugu

SEQ ID NO: 351552 - RNA, 19 nt, Artificial Sequence
  Description of Artificial Sequence: Synthetic oligonucleotide
  Antisense Strand to SEQ ID NO: 351551
acaguucaggaccucagcu

SEQ ID NO: 351553 - RNA, 19 nt, Artificial Sequence
  Description of Artificial Sequence: Synthetic oligonucleotide
  Sense Strand Starting at position 417 of SEQ ID NO: 317565
uggucagaggccugcauaa

SEQ ID NO: 351554 - RNA, 19 nt, Artificial Sequence
  Description of Artificial Sequence: Synthetic oligonucleotide
  Antisense Strand to SEQ ID NO: 351553
uuaugcaggccucugacca

SEQ ID NO: 351555 - RNA, 19 nt, Artificial Sequence
  Description of Artificial Sequence: Synthetic oligonucleotide
  Sense Strand Starting at position 417 of SEQ ID NO: 317685
guugcucuauuugaaugau

SEQ ID NO: 351556 - RNA, 19 nt, Artificial Sequence
  Description of Artificial Sequence: Synthetic oligonucleotide
  Antisense Strand to SEQ ID NO: 351555
aucauucaaauagagcaac

SEQ ID NO: 351557 - RNA, 19 nt, Artificial Sequence
  Description of Artificial Sequence: Synthetic oligonucleotide
  Sense Strand Starting at position 417 of SEQ ID NO: 317697
gaaugaucccaguggcaaa

SEQ ID NO: 351558 - RNA, 19 nt, Artificial Sequence
  Description of Artificial Sequence: Synthetic oligonucleotide
  Antisense Strand to SEQ ID NO: 351557
uuugccacugggaucauuc

SEQ ID NO: 351559 - RNA, 19 nt, Artificial Sequence
  Description of Artificial Sequence: Synthetic oligonucleotide
  Sense Strand Starting at position 417 of SEQ ID NO: 317752
ggaggaaacgcacgucuuu

SEQ ID NO: 351560 - RNA, 19 nt, Artificial Sequence
  Description of Artificial Sequence: Synthetic oligonucleotide
  Antisense Strand to SEQ ID NO: 351559
aaagacgugcguuuccucc

SEQ ID NO: 351561 - RNA, 19 nt, Artificial Sequence
  Description of Artificial Sequence: Synthetic oligonucleotide
  Sense Strand Starting at position 417 of SEQ ID NO: 317761
gcacgucuuuccuugauuu

SEQ ID NO: 351562 - RNA, 19 nt, Artificial Sequence
  Description of Artificial Sequence: Synthetic oligonucleotide
  Antisense Strand to SEQ ID NO: 351561
aaaucaaggaaagacgugc

SEQ ID NO: 351563 - RNA, 19 nt, Artificial Sequence
  Description of Artificial Sequence: Synthetic oligonucleotide
  Sense Strand Starting at position 417 of SEQ ID NO: 317804
uugcguuaaaccugagagu

SEQ ID NO: 351564 - RNA, 19 nt, Artificial Sequence
  Description of Artificial Sequence: Synthetic oligonucleotide
  Antisense Strand to SEQ ID NO: 351563
acucucagguuuaacgcaa

SEQ ID NO: 351565 - RNA, 19 nt, Artificial Sequence
  Description of Artificial Sequence: Synthetic oligonucleotide
  Sense Strand Starting at position 417 of SEQ ID NO: 317805
ugcguuaaaccugagagua

SEQ ID NO: 351566 - RNA, 19 nt, Artificial Sequence
  Description of Artificial Sequence: Synthetic oligonucleotide
  Antisense Strand to SEQ ID NO: 351565
uacucucagguuuaacgca

SEQ ID NO: 351567 - RNA, 19 nt, Artificial Sequence
  Description of Artificial Sequence: Synthetic oligonucleotide
  Sense Strand Starting at position 417 of SEQ ID NO: 317813
accugagaguaccuguaau

SEQ ID NO: 351568 - RNA, 19 nt, Artificial Sequence
  Description of Artificial Sequence: Synthetic oligonucleotide
  Antisense Strand to SEQ ID NO: 351567
auuacagguacucucaggu

SEQ ID NO: 351569 - RNA, 19 nt, Artificial Sequence
  Description of Artificial Sequence: Synthetic oligonucleotide
  Sense Strand Starting at position 417 of SEQ ID NO: 317981
acacuuucgccauauuagu

SEQ ID NO: 351570 - RNA, 19 nt, Artificial Sequence
  Description of Artificial Sequence: Synthetic oligonucleotide
  Antisense Strand to SEQ ID NO: 351569
acuaauauggcgaaagugu

SEQ ID NO: 351571 - RNA, 19 nt, Artificial Sequence
  Description of Artificial Sequence: Synthetic oligonucleotide
  Sense Strand Starting at position 417 of SEQ ID NO: 317991
cauauuagugaaggaguga

SEQ ID NO: 351572 - RNA, 19 nt, Artificial Sequence
  Description of Artificial Sequence: Synthetic oligonucleotide
  Antisense Strand to SEQ ID NO: 351571
ucacuccuucacuaauaug

SEQ ID NO: 351573 - RNA, 19 nt, Artificial Sequence
  Description of Artificial Sequence: Synthetic oligonucleotide
  Sense Strand Starting at position 417 of SEQ ID NO: 318125
gugugcaguauuuguggga

SEQ ID NO: 351574 - RNA, 19 nt, Artificial Sequence
  Description of Artificial Sequence: Synthetic oligonucleotide
  Antisense Strand to SEQ ID NO: 351573
ucccacaaauacugcacac

SEQ ID NO: 351575 - RNA, 19 nt, Artificial Sequence
  Description of Artificial Sequence: Synthetic oligonucleotide
  Sense Strand Starting at position 417 of SEQ ID NO: 318128
ugcaguauuugugggagga

SEQ ID NO: 351576 - RNA, 19 nt, Artificial Sequence
  Description of Artificial Sequence: Synthetic oligonucleotide
  Antisense Strand to SEQ ID NO: 351575
uccucccacaaauacugca

SEQ ID NO: 351577 - RNA, 19 nt, Artificial Sequence
  Description of Artificial Sequence: Synthetic oligonucleotide
  Sense Strand Starting at position 417 of SEQ ID NO: 318130
caguauuugugggaggaag

SEQ ID NO: 351578 - RNA, 19 nt, Artificial Sequence
  Description of Artificial Sequence: Synthetic oligonucleotide
  Antisense Strand to SEQ ID NO: 351577
cuuccucccacaaauacug

SEQ ID NO: 351579 - RNA, 19 nt, Artificial Sequence
  Description of Artificial Sequence: Synthetic oligonucleotide
  Sense Strand Starting at position 417 of SEQ ID NO: 318280
gacugagggucugagaaua

SEQ ID NO: 351580 - RNA, 19 nt, Artificial Sequence
  Description of Artificial Sequence: Synthetic oligonucleotide
  Antisense Strand to SEQ ID NO: 351579
uauucucagacccucaguc

SEQ ID NO: 351581 - RNA, 19 nt, Artificial Sequence
  Description of Artificial Sequence: Synthetic oligonucleotide
  Sense Strand Starting at position 417 of SEQ ID NO: 318430
uagugagacuuggaagaga

SEQ ID NO: 351582 - RNA, 19 nt, Artificial Sequence
  Description of Artificial Sequence: Synthetic oligonucleotide
  Antisense Strand to SEQ ID NO: 351581
ucucuuccaagucucacua

SEQ ID NO: 351583 - RNA, 19 nt, Artificial Sequence
  Description of Artificial Sequence: Synthetic oligonucleotide
  Sense Strand Starting at position 417 of SEQ ID NO: 318803
ggcuuuauuucccucuuga

SEQ ID NO: 351584 - RNA, 19 nt, Artificial Sequence
  Description of Artificial Sequence: Synthetic oligonucleotide
  Antisense Strand to SEQ ID NO: 351583
ucaagagggaaauaaagcc

SEQ ID NO: 351585 - RNA, 19 nt, Artificial Sequence
  Description of Artificial Sequence: Synthetic oligonucleotide
  Sense Strand Starting at position 418 of SEQ ID NO: 315440
gcaggcagcuaauuaauuu

SEQ ID NO: 351586 - RNA, 19 nt, Artificial Sequence
  Description of Artificial Sequence: Synthetic oligonucleotide
  Antisense Strand to SEQ ID NO: 351585
aaauuaauuagcugccugc

SEQ ID NO: 351587 - RNA, 19 nt, Artificial Sequence
  Description of Artificial Sequence: Synthetic oligonucleotide
  Sense Strand Starting at position 418 of SEQ ID NO: 315532
gugccuccagaauaagauu

SEQ ID NO: 351588 - RNA, 19 nt, Artificial Sequence
  Description of Artificial Sequence: Synthetic oligonucleotide
  Antisense Strand to SEQ ID NO: 351587
aaucuuauucuggaggcac

SEQ ID NO: 351589 - RNA, 19 nt, Artificial Sequence
  Description of Artificial Sequence: Synthetic oligonucleotide
  Sense Strand Starting at position 418 of SEQ ID NO: 315940
aagugaucacugcaaagcu

SEQ ID NO: 351590 - RNA, 19 nt, Artificial Sequence
  Description of Artificial Sequence: Synthetic oligonucleotide
  Antisense Strand to SEQ ID NO: 351589
agcuuugcagugaucacuu

SEQ ID NO: 351591 - RNA, 19 nt, Artificial Sequence
  Description of Artificial Sequence: Synthetic oligonucleotide
  Sense Strand Starting at position 418 of SEQ ID NO: 316240
cugugacucguaugugaga

SEQ ID NO: 351592 - RNA, 19 nt, Artificial Sequence
  Description of Artificial Sequence: Synthetic oligonucleotide
  Antisense Strand to SEQ ID NO: 351591
ucucacauacgagucacag

SEQ ID NO: 351593 - RNA, 19 nt, Artificial Sequence
  Description of Artificial Sequence: Synthetic oligonucleotide
  Sense Strand Starting at position 418 of SEQ ID NO: 316242
gugacucguaugugagacu

SEQ ID NO: 351594 - RNA, 19 nt, Artificial Sequence
  Description of Artificial Sequence: Synthetic oligonucleotide
  Antisense Strand to SEQ ID NO: 351593
agucucacauacgagucac

SEQ ID NO: 351595 - RNA, 19 nt, Artificial Sequence
  Description of Artificial Sequence: Synthetic oligonucleotide
  Sense Strand Starting at position 418 of SEQ ID NO: 316274
acucccaguguuugugauu

SEQ ID NO: 351596 - RNA, 19 nt, Artificial Sequence
  Description of Artificial Sequence: Synthetic oligonucleotide
  Antisense Strand to SEQ ID NO: 351595
aaucacaaacacugggagu

SEQ ID NO: 351597 - RNA, 19 nt, Artificial Sequence
  Description of Artificial Sequence: Synthetic oligonucleotide
  Sense Strand Starting at position 418 of SEQ ID NO: 316318
gugagagacacauguguga

SEQ ID NO: 351598 - RNA, 19 nt, Artificial Sequence
  Description of Artificial Sequence: Synthetic oligonucleotide
  Antisense Strand to SEQ ID NO: 351597
ucacacaugugucucucac

SEQ ID NO: 351599 - RNA, 19 nt, Artificial Sequence
  Description of Artificial Sequence: Synthetic oligonucleotide
  Sense Strand Starting at position 418 of SEQ ID NO: 316320
gagagacacaugugugaua

SEQ ID NO: 351600 - RNA, 19 nt, Artificial Sequence
  Description of Artificial Sequence: Synthetic oligonucleotide
  Antisense Strand to SEQ ID NO: 351599
uaucacacaugugucucuc

SEQ ID NO: 351601 - RNA, 19 nt, Artificial Sequence
  Description of Artificial Sequence: Synthetic oligonucleotide
  Sense Strand Starting at position 418 of SEQ ID NO: 316322
gagacacaugugugauaca

SEQ ID NO: 351602 - RNA, 19 nt, Artificial Sequence
  Description of Artificial Sequence: Synthetic oligonucleotide
  Antisense Strand to SEQ ID NO: 351601
uguaucacacaugugucuc

SEQ ID NO: 351603 - RNA, 19 nt, Artificial Sequence
  Description of Artificial Sequence: Synthetic oligonucleotide
  Sense Strand Starting at position 418 of SEQ ID NO: 316331
gugugauacauaugaugga

SEQ ID NO: 351604 - RNA, 19 nt, Artificial Sequence
  Description of Artificial Sequence: Synthetic oligonucleotide
  Antisense Strand to SEQ ID NO: 351603
uccaucauauguaucacac

SEQ ID NO: 351605 - RNA, 19 nt, Artificial Sequence
  Description of Artificial Sequence: Synthetic oligonucleotide
  Sense Strand Starting at position 418 of SEQ ID NO: 316346
uggagauaugcaugugaua

SEQ ID NO: 351606 - RNA, 19 nt, Artificial Sequence
  Description of Artificial Sequence: Synthetic oligonucleotide
  Antisense Strand to SEQ ID NO: 351605
uaucacaugcauaucucca

SEQ ID NO: 351607 - RNA, 19 nt, Artificial Sequence
  Description of Artificial Sequence: Synthetic oligonucleotide
  Sense Strand Starting at position 418 of SEQ ID NO: 316411
ggcacauguguuuaucaga

SEQ ID NO: 351608 - RNA, 19 nt, Artificial Sequence
  Description of Artificial Sequence: Synthetic oligonucleotide
  Antisense Strand to SEQ ID NO: 351607
ucugauaaacacaugugcc

SEQ ID NO: 351609 - RNA, 19 nt, Artificial Sequence
  Description of Artificial Sequence: Synthetic oligonucleotide
  Sense Strand Starting at position 418 of SEQ ID NO: 316430
gacacaacugucugcuaga

SEQ ID NO: 351610 - RNA, 19 nt, Artificial Sequence
  Description of Artificial Sequence: Synthetic oligonucleotide
  Antisense Strand to SEQ ID NO: 351609
ucuagcagacaguuguguc

SEQ ID NO: 351611 - RNA, 19 nt, Artificial Sequence
  Description of Artificial Sequence: Synthetic oligonucleotide
  Sense Strand Starting at position 418 of SEQ ID NO: 316435
aacugucugcuagaggcau

SEQ ID NO: 351612 - RNA, 19 nt, Artificial Sequence
  Description of Artificial Sequence: Synthetic oligonucleotide
  Antisense Strand to SEQ ID NO: 351611
augccucuagcagacaguu

SEQ ID NO: 351613 - RNA, 19 nt, Artificial Sequence
  Description of Artificial Sequence: Synthetic oligonucleotide
  Sense Strand Starting at position 418 of SEQ ID NO: 316513
acgugagaugagugugaga

SEQ ID NO: 351614 - RNA, 19 nt, Artificial Sequence
  Description of Artificial Sequence: Synthetic oligonucleotide
  Antisense Strand to SEQ ID NO: 351613
ucucacacucaucucacgu

SEQ ID NO: 351615 - RNA, 19 nt, Artificial Sequence
  Description of Artificial Sequence: Synthetic oligonucleotide
  Sense Strand Starting at position 418 of SEQ ID NO: 316515
gugagaugagugugagaga

SEQ ID NO: 351616 - RNA, 19 nt, Artificial Sequence
  Description of Artificial Sequence: Synthetic oligonucleotide
  Antisense Strand to SEQ ID NO: 351615
ucucucacacucaucucac

SEQ ID NO: 351617 - RNA, 19 nt, Artificial Sequence
  Description of Artificial Sequence: Synthetic oligonucleotide
  Sense Strand Starting at position 418 of SEQ ID NO: 316516
ugagaugagugugagagau

SEQ ID NO: 351618 - RNA, 19 nt, Artificial Sequence
  Description of Artificial Sequence: Synthetic oligonucleotide
  Antisense Strand to SEQ ID NO: 351617
aucucucacacucaucuca

SEQ ID NO: 351619 - RNA, 19 nt, Artificial Sequence
  Description of Artificial Sequence: Synthetic oligonucleotide
  Sense Strand Starting at position 418 of SEQ ID NO: 316624
gcagaaacuucugcuugug

SEQ ID NO: 351620 - RNA, 19 nt, Artificial Sequence
  Description of Artificial Sequence: Synthetic oligonucleotide
  Antisense Strand to SEQ ID NO: 351619
cacaagcagaaguuucugc

SEQ ID NO: 351621 - RNA, 19 nt, Artificial Sequence
  Description of Artificial Sequence: Synthetic oligonucleotide
  Sense Strand Starting at position 418 of SEQ ID NO: 316627
gaaacuucugcuuguguga

SEQ ID NO: 351622 - RNA, 19 nt, Artificial Sequence
  Description of Artificial Sequence: Synthetic oligonucleotide
  Antisense Strand to SEQ ID NO: 351621
ucacacaagcagaaguuuc

SEQ ID NO: 351623 - RNA, 19 nt, Artificial Sequence
  Description of Artificial Sequence: Synthetic oligonucleotide
  Sense Strand Starting at position 418 of SEQ ID NO: 317523
cagccugagccucagugau

SEQ ID NO: 351624 - RNA, 19 nt, Artificial Sequence
  Description of Artificial Sequence: Synthetic oligonucleotide
  Antisense Strand to SEQ ID NO: 351623
aucacugaggcucaggcug

SEQ ID NO: 351625 - RNA, 19 nt, Artificial Sequence
  Description of Artificial Sequence: Synthetic oligonucleotide
  Sense Strand Starting at position 418 of SEQ ID NO: 317766
gccugugaccacuguguga

SEQ ID NO: 351626 - RNA, 19 nt, Artificial Sequence
  Description of Artificial Sequence: Synthetic oligonucleotide
  Antisense Strand to SEQ ID NO: 351625
ucacacaguggucacaggc

SEQ ID NO: 351627 - RNA, 19 nt, Artificial Sequence
  Description of Artificial Sequence: Synthetic oligonucleotide
  Sense Strand Starting at position 418 of SEQ ID NO: 317841
ggucuccaucucugaucua

SEQ ID NO: 351628 - RNA, 19 nt, Artificial Sequence
  Description of Artificial Sequence: Synthetic oligonucleotide
  Antisense Strand to SEQ ID NO: 351627
uagaucagagauggagacc

SEQ ID NO: 351629 - RNA, 19 nt, Artificial Sequence
  Description of Artificial Sequence: Synthetic oligonucleotide
  Sense Strand Starting at position 418 of SEQ ID NO: 318384
gcugacucaucccugcauu

SEQ ID NO: 351630 - RNA, 19 nt, Artificial Sequence
  Description of Artificial Sequence: Synthetic oligonucleotide
  Antisense Strand to SEQ ID NO: 351629
aaugcagggaugagucagc

SEQ ID NO: 351631 - RNA, 19 nt, Artificial Sequence
  Description of Artificial Sequence: Synthetic oligonucleotide
  Sense Strand Starting at position 418 of SEQ ID NO: 318499
cuguuauuacaguacuugu

SEQ ID NO: 351632 - RNA, 19 nt, Artificial Sequence
  Description of Artificial Sequence: Synthetic oligonucleotide
  Antisense Strand to SEQ ID NO: 351631
acaaguacuguaauaacag

SEQ ID NO: 351633 - RNA, 19 nt, Artificial Sequence
  Description of Artificial Sequence: Synthetic oligonucleotide
  Sense Strand Starting at position 418 of SEQ ID NO: 318509
aguacuugucacuggcuga

SEQ ID NO: 351634 - RNA, 19 nt, Artificial Sequence
  Description of Artificial Sequence: Synthetic oligonucleotide
  Antisense Strand to SEQ ID NO: 351633
ucagccagugacaaguacu

SEQ ID NO: 351635 - RNA, 19 nt, Artificial Sequence
  Description of Artificial Sequence: Synthetic oligonucleotide
  Sense Strand Starting at position 418 of SEQ ID NO: 318510
guacuugucacuggcugau

SEQ ID NO: 351636 - RNA, 19 nt, Artificial Sequence
  Description of Artificial Sequence: Synthetic oligonucleotide
  Antisense Strand to SEQ ID NO: 351635
aucagccagugacaaguac

SEQ ID NO: 351637 - RNA, 19 nt, Artificial Sequence
  Description of Artificial Sequence: Synthetic oligonucleotide
  Sense Strand Starting at position 418 of SEQ ID NO: 318512
acuugucacuggcugauuu

SEQ ID NO: 351638 - RNA, 19 nt, Artificial Sequence
  Description of Artificial Sequence: Synthetic oligonucleotide
  Antisense Strand to SEQ ID NO: 351637
aaaucagccagugacaagu

SEQ ID NO: 351639 - RNA, 19 nt, Artificial Sequence
  Description of Artificial Sequence: Synthetic oligonucleotide
  Sense Strand Starting at position 418 of SEQ ID NO: 318558
guaggaucaccuggucauu

SEQ ID NO: 351640 - RNA, 19 nt, Artificial Sequence
  Description of Artificial Sequence: Synthetic oligonucleotide
  Antisense Strand to SEQ ID NO: 351639
aaugaccaggugauccuac

SEQ ID NO: 351641 - RNA, 19 nt, Artificial Sequence
  Description of Artificial Sequence: Synthetic oligonucleotide
  Sense Strand Starting at position 418 of SEQ ID NO: 318560
aggaucaccuggucauuaa

SEQ ID NO: 351642 - RNA, 19 nt, Artificial Sequence
  Description of Artificial Sequence: Synthetic oligonucleotide
  Antisense Strand to SEQ ID NO: 351641
uuaaugaccaggugauccu

SEQ ID NO: 351643 - RNA, 19 nt, Artificial Sequence
  Description of Artificial Sequence: Synthetic oligonucleotide
  Sense Strand Starting at position 418 of SEQ ID NO: 318563
aucaccuggucauuaagaa

SEQ ID NO: 351644 - RNA, 19 nt, Artificial Sequence
  Description of Artificial Sequence: Synthetic oligonucleotide
  Antisense Strand to SEQ ID NO: 351643
uucuuaaugaccaggugau

SEQ ID NO: 351645 - RNA, 19 nt, Artificial Sequence
  Description of Artificial Sequence: Synthetic oligonucleotide
  Sense Strand Starting at position 418 of SEQ ID NO: 318734
uacagaugcuccucgauua

SEQ ID NO: 351646 - RNA, 19 nt, Artificial Sequence
  Description of Artificial Sequence: Synthetic oligonucleotide
  Antisense Strand to SEQ ID NO: 351645
uaaucgaggagcaucugua

SEQ ID NO: 351647 - RNA, 19 nt, Artificial Sequence
  Description of Artificial Sequence: Synthetic oligonucleotide
  Sense Strand Starting at position 418 of SEQ ID NO: 318735
acagaugcuccucgauuau

SEQ ID NO: 351648 - RNA, 19 nt, Artificial Sequence
  Description of Artificial Sequence: Synthetic oligonucleotide
  Antisense Strand to SEQ ID NO: 351647
auaaucgaggagcaucugu

SEQ ID NO: 351649 - RNA, 19 nt, Artificial Sequence
  Description of Artificial Sequence: Synthetic oligonucleotide
  Sense Strand Starting at position 418 of SEQ ID NO: 318745
cucgauuauaaugggauca

SEQ ID NO: 351650 - RNA, 19 nt, Artificial Sequence
  Description of Artificial Sequence: Synthetic oligonucleotide
  Antisense Strand to SEQ ID NO: 351649
ugaucccauuauaaucgag

SEQ ID NO: 351651 - RNA, 19 nt, Artificial Sequence
  Description of Artificial Sequence: Synthetic oligonucleotide
  Sense Strand Starting at position 418 of SEQ ID NO: 318746
ucgauuauaaugggaucau

SEQ ID NO: 351652 - RNA, 19 nt, Artificial Sequence
  Description of Artificial Sequence: Synthetic oligonucleotide
  Antisense Strand to SEQ ID NO: 351651
augaucccauuauaaucga

SEQ ID NO: 351653 - RNA, 19 nt, Artificial Sequence
  Description of Artificial Sequence: Synthetic oligonucleotide
  Sense Strand Starting at position 418 of SEQ ID NO: 318747
cgauuauaaugggaucaug

SEQ ID NO: 351654 - RNA, 19 nt, Artificial Sequence
  Description of Artificial Sequence: Synthetic oligonucleotide
  Antisense Strand to SEQ ID NO: 351653
caugaucccauuauaaucg

SEQ ID NO: 351655 - RNA, 19 nt, Artificial Sequence
  Description of Artificial Sequence: Synthetic oligonucleotide
  Sense Strand Starting at position 418 of SEQ ID NO: 319019
gguuucuccugggugugua

SEQ ID NO: 351656 - RNA, 19 nt, Artificial Sequence
  Description of Artificial Sequence: Synthetic oligonucleotide
  Antisense Strand to SEQ ID NO: 351655
uacacacccaggagaaacc

SEQ ID NO: 351657 - RNA, 19 nt, Artificial Sequence
  Description of Artificial Sequence: Synthetic oligonucleotide
  Sense Strand Starting at position 418 of SEQ ID NO: 319082
aucguaagucagggauuau

SEQ ID NO: 351658 - RNA, 19 nt, Artificial Sequence
  Description of Artificial Sequence: Synthetic oligonucleotide
  Antisense Strand to SEQ ID NO: 351657
auaaucccugacuuacgau

SEQ ID NO: 351659 - RNA, 19 nt, Artificial Sequence
  Description of Artificial Sequence: Synthetic oligonucleotide
  Sense Strand Starting at position 418 of SEQ ID NO: 319083
ucguaagucagggauuauc

SEQ ID NO: 351660 - RNA, 19 nt, Artificial Sequence
  Description of Artificial Sequence: Synthetic oligonucleotide
  Antisense Strand to SEQ ID NO: 351659
gauaaucccugacuuacga

SEQ ID NO: 351661 - RNA, 19 nt, Artificial Sequence
  Description of Artificial Sequence: Synthetic oligonucleotide
  Sense Strand Starting at position 418 of SEQ ID NO: 319091
cagggauuaucuguacuuu

SEQ ID NO: 351662 - RNA, 19 nt, Artificial Sequence
  Description of Artificial Sequence: Synthetic oligonucleotide
  Antisense Strand to SEQ ID NO: 351661
aaaguacagauaaucccug

SEQ ID NO: 351663 - RNA, 19 nt, Artificial Sequence
  Description of Artificial Sequence: Synthetic oligonucleotide
  Sense Strand Starting at position 418 of SEQ ID NO: 319095
gauuaucuguacuuuggau

SEQ ID NO: 351664 - RNA, 19 nt, Artificial Sequence
  Description of Artificial Sequence: Synthetic oligonucleotide
  Antisense Strand to SEQ ID NO: 351663
auccaaaguacagauaauc

SEQ ID NO: 351665 - RNA, 19 nt, Artificial Sequence
  Description of Artificial Sequence: Synthetic oligonucleotide
  Sense Strand Starting at position 419 of SEQ ID NO: 315828
acacaugggucagaucaca

SEQ ID NO: 351666 - RNA, 19 nt, Artificial Sequence
  Description of Artificial Sequence: Synthetic oligonucleotide
  Antisense Strand to SEQ ID NO: 351665
ugugaucugacccaugugu

SEQ ID NO: 351667 - RNA, 19 nt, Artificial Sequence
  Description of Artificial Sequence: Synthetic oligonucleotide
  Sense Strand Starting at position 419 of SEQ ID NO: 316236
gggaaaugcuaggcaagaa

SEQ ID NO: 351668 - RNA, 19 nt, Artificial Sequence
  Description of Artificial Sequence: Synthetic oligonucleotide
  Antisense Strand to SEQ ID NO: 351667
uucuugccuagcauuuccc

SEQ ID NO: 351669 - RNA, 19 nt, Artificial Sequence
  Description of Artificial Sequence: Synthetic oligonucleotide
  Sense Strand Starting at position 419 of SEQ ID NO: 316523
ucugaucuccacuggaaca

SEQ ID NO: 351670 - RNA, 19 nt, Artificial Sequence
  Description of Artificial Sequence: Synthetic oligonucleotide
  Antisense Strand to SEQ ID NO: 351669
uguuccaguggagaucaga

SEQ ID NO: 351671 - RNA, 19 nt, Artificial Sequence
  Description of Artificial Sequence: Synthetic oligonucleotide
  Sense Strand Starting at position 419 of SEQ ID NO: 316642
ccaguuucccauggccaga

SEQ ID NO: 351672 - RNA, 19 nt, Artificial Sequence
  Description of Artificial Sequence: Synthetic oligonucleotide
  Antisense Strand to SEQ ID NO: 351671
ucuggccaugggaaacugg

SEQ ID NO: 351673 - RNA, 19 nt, Artificial Sequence
  Description of Artificial Sequence: Synthetic oligonucleotide
  Sense Strand Starting at position 419 of SEQ ID NO: 316888
ggccguaccugacucuuau

SEQ ID NO: 351674 - RNA, 19 nt, Artificial Sequence
  Description of Artificial Sequence: Synthetic oligonucleotide
  Antisense Strand to SEQ ID NO: 351673
auaagagucagguacggcc

SEQ ID NO: 351675 - RNA, 19 nt, Artificial Sequence
  Description of Artificial Sequence: Synthetic oligonucleotide
  Sense Strand Starting at position 419 of SEQ ID NO: 316892
guaccugacucuuauagac

SEQ ID NO: 351676 - RNA, 19 nt, Artificial Sequence
  Description of Artificial Sequence: Synthetic oligonucleotide
  Antisense Strand to SEQ ID NO: 351675
gucuauaagagucagguac

SEQ ID NO: 351677 - RNA, 19 nt, Artificial Sequence
  Description of Artificial Sequence: Synthetic oligonucleotide
  Sense Strand Starting at position 419 of SEQ ID NO: 317880
ccguaaagccacugacauu

SEQ ID NO: 351678 - RNA, 19 nt, Artificial Sequence
  Description of Artificial Sequence: Synthetic oligonucleotide
  Antisense Strand to SEQ ID NO: 351677
aaugucaguggcuuuacgg

SEQ ID NO: 351679 - RNA, 19 nt, Artificial Sequence
  Description of Artificial Sequence: Synthetic oligonucleotide
  Sense Strand Starting at position 419 of SEQ ID NO: 317996
acaguucuuucuguuuguu

SEQ ID NO: 351680 - RNA, 19 nt, Artificial Sequence
  Description of Artificial Sequence: Synthetic oligonucleotide
  Antisense Strand to SEQ ID NO: 351679
aacaaacagaaagaacugu

SEQ ID NO: 351681 - RNA, 19 nt, Artificial Sequence
  Description of Artificial Sequence: Synthetic oligonucleotide
  Sense Strand Starting at position 419 of SEQ ID NO: 318310
gaaaucuuuggccaggcga

SEQ ID NO: 351682 - RNA, 19 nt, Artificial Sequence
  Description of Artificial Sequence: Synthetic oligonucleotide
  Antisense Strand to SEQ ID NO: 351681
ucgccuggccaaagauuuc

SEQ ID NO: 351683 - RNA, 19 nt, Artificial Sequence
  Description of Artificial Sequence: Synthetic oligonucleotide
  Sense Strand Starting at position 419 of SEQ ID NO: 318608
aaggaaaucuuuggugaac

SEQ ID NO: 351684 - RNA, 19 nt, Artificial Sequence
  Description of Artificial Sequence: Synthetic oligonucleotide
  Antisense Strand to SEQ ID NO: 351683
guucaccaaagauuuccuu

SEQ ID NO: 351685 - RNA, 19 nt, Artificial Sequence
  Description of Artificial Sequence: Synthetic oligonucleotide
  Sense Strand Starting at position 419 of SEQ ID NO: 318609
aggaaaucuuuggugaacu

SEQ ID NO: 351686 - RNA, 19 nt, Artificial Sequence
  Description of Artificial Sequence: Synthetic oligonucleotide
  Antisense Strand to SEQ ID NO: 351685
aguucaccaaagauuuccu

SEQ ID NO: 351687 - RNA, 19 nt, Artificial Sequence
  Description of Artificial Sequence: Synthetic oligonucleotide
  Sense Strand Starting at position 419 of SEQ ID NO: 318610
ggaaaucuuuggugaacug

SEQ ID NO: 351688 - RNA, 19 nt, Artificial Sequence
  Description of Artificial Sequence: Synthetic oligonucleotide
  Antisense Strand to SEQ ID NO: 351687
caguucaccaaagauuucc

SEQ ID NO: 351689 - RNA, 19 nt, Artificial Sequence
  Description of Artificial Sequence: Synthetic oligonucleotide
  Sense Strand Starting at position 419 of SEQ ID NO: 318684
cguuguguccugagaggac

SEQ ID NO: 351690 - RNA, 19 nt, Artificial Sequence
  Description of Artificial Sequence: Synthetic oligonucleotide
  Antisense Strand to SEQ ID NO: 351689
guccucucaggacacaacg

SEQ ID NO: 351691 - RNA, 19 nt, Artificial Sequence
  Description of Artificial Sequence: Synthetic oligonucleotide
  Sense Strand Starting at position 419 of SEQ ID NO: 318930
ggcccagggcaaugauaaa

SEQ ID NO: 351692 - RNA, 19 nt, Artificial Sequence
  Description of Artificial Sequence: Synthetic oligonucleotide
  Antisense Strand to SEQ ID NO: 351691
uuuaucauugcccugggcc

SEQ ID NO: 351693 - RNA, 19 nt, Artificial Sequence
  Description of Artificial Sequence: Synthetic oligonucleotide
  Sense Strand Starting at position 419 of SEQ ID NO: 319046
cagugaacguguuccacca

SEQ ID NO: 351694 - RNA, 19 nt, Artificial Sequence
  Description of Artificial Sequence: Synthetic oligonucleotide
  Antisense Strand to SEQ ID NO: 351693
ugguggaacacguucacug

SEQ ID NO: 351695 - RNA, 19 nt, Artificial Sequence
  Description of Artificial Sequence: Synthetic oligonucleotide
  Sense Strand Starting at position 419 of SEQ ID NO: 319048
gugaacguguuccaccaua

SEQ ID NO: 351696 - RNA, 19 nt, Artificial Sequence
  Description of Artificial Sequence: Synthetic oligonucleotide
  Antisense Strand to SEQ ID NO: 351695
uaugguggaacacguucac

SEQ ID NO: 351697 - RNA, 19 nt, Artificial Sequence
  Description of Artificial Sequence: Synthetic oligonucleotide
  Sense Strand Starting at position 419 of SEQ ID NO: 319091
ccagcauuaucuggcccau

SEQ ID NO: 351698 - RNA, 19 nt, Artificial Sequence
  Description of Artificial Sequence: Synthetic oligonucleotide
  Antisense Strand to SEQ ID NO: 351697
augggccagauaaugcugg

SEQ ID NO: 351699 - RNA, 19 nt, Artificial Sequence
  Description of Artificial Sequence: Synthetic oligonucleotide
  Sense Strand Starting at position 419 of SEQ ID NO: 319093
agcauuaucuggcccauaa

SEQ ID NO: 351700 - RNA, 19 nt, Artificial Sequence
  Description of Artificial Sequence: Synthetic oligonucleotide
  Antisense Strand to SEQ ID NO: 351699
uuaugggccagauaaugcu

SEQ ID NO: 351701 - RNA, 19 nt, Artificial Sequence
  Description of Artificial Sequence: Synthetic oligonucleotide
  Sense Strand Starting at position 419 of SEQ ID NO: 319104
gcccauaagugcuuucguu

SEQ ID NO: 351702 - RNA, 19 nt, Artificial Sequence
  Description of Artificial Sequence: Synthetic oligonucleotide
  Antisense Strand to SEQ ID NO: 351701
aacgaaagcacuuaugggc

SEQ ID NO: 351703 - RNA, 19 nt, Artificial Sequence
  Description of Artificial Sequence: Synthetic oligonucleotide
  Sense Strand Starting at position 419 of SEQ ID NO: 319111
agugcuuucguuuggcuca

SEQ ID NO: 351704 - RNA, 19 nt, Artificial Sequence
  Description of Artificial Sequence: Synthetic oligonucleotide
  Antisense Strand to SEQ ID NO: 351703
ugagccaaacgaaagcacu

SEQ ID NO: 351705 - RNA, 19 nt, Artificial Sequence
  Description of Artificial Sequence: Synthetic oligonucleotide
  Sense Strand Starting at position 419 of SEQ ID NO: 319154
ugguuaccagcaugcauaa

SEQ ID NO: 351706 - RNA, 19 nt, Artificial Sequence
  Description of Artificial Sequence: Synthetic oligonucleotide
  Antisense Strand to SEQ ID NO: 351705
uuaugcaugcugguaacca

SEQ ID NO: 351707 - RNA, 19 nt, Artificial Sequence
  Description of Artificial Sequence: Synthetic oligonucleotide
  Sense Strand Starting at position 420 of SEQ ID NO: 315515
aagcuccugugaguuaaau

SEQ ID NO: 351708 - RNA, 19 nt, Artificial Sequence
  Description of Artificial Sequence: Synthetic oligonucleotide
  Antisense Strand to SEQ ID NO: 351707
auuuaacucacaggagcuu

SEQ ID NO: 351709 - RNA, 19 nt, Artificial Sequence
  Description of Artificial Sequence: Synthetic oligonucleotide
  Sense Strand Starting at position 420 of SEQ ID NO: 315559
agcaaagcauuauuaaguu

SEQ ID NO: 351710 - RNA, 19 nt, Artificial Sequence
  Description of Artificial Sequence: Synthetic oligonucleotide
  Antisense Strand to SEQ ID NO: 351709
aacuuaauaaugcuuugcu

SEQ ID NO: 351711 - RNA, 19 nt, Artificial Sequence
  Description of Artificial Sequence: Synthetic oligonucleotide
  Sense Strand Starting at position 420 of SEQ ID NO: 315664
ggcugugggucagaacgaa

SEQ ID NO: 351712 - RNA, 19 nt, Artificial Sequence
  Description of Artificial Sequence: Synthetic oligonucleotide
  Antisense Strand to SEQ ID NO: 351711
uucguucugacccacagcc

SEQ ID NO: 351713 - RNA, 19 nt, Artificial Sequence
  Description of Artificial Sequence: Synthetic oligonucleotide
  Sense Strand Starting at position 420 of SEQ ID NO: 315964
uacugugauuuauggguga

SEQ ID NO: 351714 - RNA, 19 nt, Artificial Sequence
  Description of Artificial Sequence: Synthetic oligonucleotide
  Antisense Strand to SEQ ID NO: 351713
ucacccauaaaucacagua

SEQ ID NO: 351715 - RNA, 19 nt, Artificial Sequence
  Description of Artificial Sequence: Synthetic oligonucleotide
  Sense Strand Starting at position 420 of SEQ ID NO: 316069
aucccucuccuugguuauu

SEQ ID NO: 351716 - RNA, 19 nt, Artificial Sequence
  Description of Artificial Sequence: Synthetic oligonucleotide
  Antisense Strand to SEQ ID NO: 351715
aauaaccaaggagagggau

SEQ ID NO: 351717 - RNA, 19 nt, Artificial Sequence
  Description of Artificial Sequence: Synthetic oligonucleotide
  Sense Strand Starting at position 420 of SEQ ID NO: 316070
ucccucuccuugguuauua

SEQ ID NO: 351718 - RNA, 19 nt, Artificial Sequence
  Description of Artificial Sequence: Synthetic oligonucleotide
  Antisense Strand to SEQ ID NO: 351717
uaauaaccaaggagaggga

SEQ ID NO: 351719 - RNA, 19 nt, Artificial Sequence
  Description of Artificial Sequence: Synthetic oligonucleotide
  Sense Strand Starting at position 420 of SEQ ID NO: 316108
caggauuccuaaugauagu

SEQ ID NO: 351720 - RNA, 19 nt, Artificial Sequence
  Description of Artificial Sequence: Synthetic oligonucleotide
  Antisense Strand to SEQ ID NO: 351719
acuaucauuaggaauccug

SEQ ID NO: 351721 - RNA, 19 nt, Artificial Sequence
  Description of Artificial Sequence: Synthetic oligonucleotide
  Sense Strand Starting at position 420 of SEQ ID NO: 316280
cgccauaccuccucaagua

SEQ ID NO: 351722 - RNA, 19 nt, Artificial Sequence
  Description of Artificial Sequence: Synthetic oligonucleotide
  Antisense Strand to SEQ ID NO: 351721
uacuugaggagguauggcg

SEQ ID NO: 351723 - RNA, 19 nt, Artificial Sequence
  Description of Artificial Sequence: Synthetic oligonucleotide
  Sense Strand Starting at position 420 of SEQ ID NO: 316358
cgugaaggccucuggagaa

SEQ ID NO: 351724 - RNA, 19 nt, Artificial Sequence
  Description of Artificial Sequence: Synthetic oligonucleotide
  Antisense Strand to SEQ ID NO: 351723
uucuccagaggccuucacg

SEQ ID NO: 351725 - RNA, 19 nt, Artificial Sequence
  Description of Artificial Sequence: Synthetic oligonucleotide
  Sense Strand Starting at position 420 of SEQ ID NO: 316371
ggagaauuaugccuucggu

SEQ ID NO: 351726 - RNA, 19 nt, Artificial Sequence
  Description of Artificial Sequence: Synthetic oligonucleotide
  Antisense Strand to SEQ ID NO: 351725
accgaaggcauaauucucc

SEQ ID NO: 351727 - RNA, 19 nt, Artificial Sequence
  Description of Artificial Sequence: Synthetic oligonucleotide
  Sense Strand Starting at position 420 of SEQ ID NO: 316388
guuggcaauucucugaacu

SEQ ID NO: 351728 - RNA, 19 nt, Artificial Sequence
  Description of Artificial Sequence: Synthetic oligonucleotide
  Antisense Strand to SEQ ID NO: 351727
aguucagagaauugccaac

SEQ ID NO: 351729 - RNA, 19 nt, Artificial Sequence
  Description of Artificial Sequence: Synthetic oligonucleotide
  Sense Strand Starting at position 420 of SEQ ID NO: 316389
uuggcaauucucugaacuu

SEQ ID NO: 351730 - RNA, 19 nt, Artificial Sequence
  Description of Artificial Sequence: Synthetic oligonucleotide
  Antisense Strand to SEQ ID NO: 351729
aaguucagagaauugccaa

SEQ ID NO: 351731 - RNA, 19 nt, Artificial Sequence
  Description of Artificial Sequence: Synthetic oligonucleotide
  Sense Strand Starting at position 420 of SEQ ID NO: 316390
uggcaauucucugaacuug

SEQ ID NO: 351732 - RNA, 19 nt, Artificial Sequence
  Description of Artificial Sequence: Synthetic oligonucleotide
  Antisense Strand to SEQ ID NO: 351731
caaguucagagaauugcca

SEQ ID NO: 351733 - RNA, 19 nt, Artificial Sequence
  Description of Artificial Sequence: Synthetic oligonucleotide
  Sense Strand Starting at position 420 of SEQ ID NO: 316495
gucugaaguuaacugaaca

SEQ ID NO: 351734 - RNA, 19 nt, Artificial Sequence
  Description of Artificial Sequence: Synthetic oligonucleotide
  Antisense Strand to SEQ ID NO: 351733
uguucaguuaacuucagac

SEQ ID NO: 351735 - RNA, 19 nt, Artificial Sequence
  Description of Artificial Sequence: Synthetic oligonucleotide
  Sense Strand Starting at position 420 of SEQ ID NO: 316528
agacguuuacaaugcacua

SEQ ID NO: 351736 - RNA, 19 nt, Artificial Sequence
  Description of Artificial Sequence: Synthetic oligonucleotide
  Antisense Strand to SEQ ID NO: 351735
uagugcauuguaaacgucu

SEQ ID NO: 351737 - RNA, 19 nt, Artificial Sequence
  Description of Artificial Sequence: Synthetic oligonucleotide
  Sense Strand Starting at position 420 of SEQ ID NO: 316719
gucuuauauuaguuacaca

SEQ ID NO: 351738 - RNA, 19 nt, Artificial Sequence
  Description of Artificial Sequence: Synthetic oligonucleotide
  Antisense Strand to SEQ ID NO: 351737
uguguaacuaauauaagac

SEQ ID NO: 351739 - RNA, 19 nt, Artificial Sequence
  Description of Artificial Sequence: Synthetic oligonucleotide
  Sense Strand Starting at position 420 of SEQ ID NO: 316761
aggcauauagacugcuuua

SEQ ID NO: 351740 - RNA, 19 nt, Artificial Sequence
  Description of Artificial Sequence: Synthetic oligonucleotide
  Antisense Strand to SEQ ID NO: 351739
uaaagcagucuauaugccu

SEQ ID NO: 351741 - RNA, 19 nt, Artificial Sequence
  Description of Artificial Sequence: Synthetic oligonucleotide
  Sense Strand Starting at position 420 of SEQ ID NO: 316766
uauagacugcuuuagugua

SEQ ID NO: 351742 - RNA, 19 nt, Artificial Sequence
  Description of Artificial Sequence: Synthetic oligonucleotide
  Antisense Strand to SEQ ID NO: 351741
uacacuaaagcagucuaua

SEQ ID NO: 351743 - RNA, 19 nt, Artificial Sequence
  Description of Artificial Sequence: Synthetic oligonucleotide
  Sense Strand Starting at position 420 of SEQ ID NO: 316768
uagacugcuuuaguguaaa

SEQ ID NO: 351744 - RNA, 19 nt, Artificial Sequence
  Description of Artificial Sequence: Synthetic oligonucleotide
  Antisense Strand to SEQ ID NO: 351743
uuuacacuaaagcagucua

SEQ ID NO: 351745 - RNA, 19 nt, Artificial Sequence
  Description of Artificial Sequence: Synthetic oligonucleotide
  Sense Strand Starting at position 420 of SEQ ID NO: 316771
acugcuuuaguguaaauau

SEQ ID NO: 351746 - RNA, 19 nt, Artificial Sequence
  Description of Artificial Sequence: Synthetic oligonucleotide
  Antisense Strand to SEQ ID NO: 351745
auauuuacacuaaagcagu

SEQ ID NO: 351747 - RNA, 19 nt, Artificial Sequence
  Description of Artificial Sequence: Synthetic oligonucleotide
  Sense Strand Starting at position 420 of SEQ ID NO: 317407
ucagucugaucaccuugau

SEQ ID NO: 351748 - RNA, 19 nt, Artificial Sequence
  Description of Artificial Sequence: Synthetic oligonucleotide
  Antisense Strand to SEQ ID NO: 351747
aucaaggugaucagacuga

SEQ ID NO: 351749 - RNA, 19 nt, Artificial Sequence
  Description of Artificial Sequence: Synthetic oligonucleotide
  Sense Strand Starting at position 420 of SEQ ID NO: 317410
gucugaucaccuugauguc

SEQ ID NO: 351750 - RNA, 19 nt, Artificial Sequence
  Description of Artificial Sequence: Synthetic oligonucleotide
  Antisense Strand to SEQ ID NO: 351749
gacaucaaggugaucagac

SEQ ID NO: 351751 - RNA, 19 nt, Artificial Sequence
  Description of Artificial Sequence: Synthetic oligonucleotide
  Sense Strand Starting at position 420 of SEQ ID NO: 317503
acguuauacagguaaugca

SEQ ID NO: 351752 - RNA, 19 nt, Artificial Sequence
  Description of Artificial Sequence: Synthetic oligonucleotide
  Antisense Strand to SEQ ID NO: 351751
ugcauuaccuguauaacgu

SEQ ID NO: 351753 - RNA, 19 nt, Artificial Sequence
  Description of Artificial Sequence: Synthetic oligonucleotide
  Sense Strand Starting at position 420 of SEQ ID NO: 317510
acagguaaugcaugauuau

SEQ ID NO: 351754 - RNA, 19 nt, Artificial Sequence
  Description of Artificial Sequence: Synthetic oligonucleotide
  Antisense Strand to SEQ ID NO: 351753
auaaucaugcauuaccugu

SEQ ID NO: 351755 - RNA, 19 nt, Artificial Sequence
  Description of Artificial Sequence: Synthetic oligonucleotide
  Sense Strand Starting at position 420 of SEQ ID NO: 317511
cagguaaugcaugauuauu

SEQ ID NO: 351756 - RNA, 19 nt, Artificial Sequence
  Description of Artificial Sequence: Synthetic oligonucleotide
  Antisense Strand to SEQ ID NO: 351755
aauaaucaugcauuaccug

SEQ ID NO: 351757 - RNA, 19 nt, Artificial Sequence
  Description of Artificial Sequence: Synthetic oligonucleotide
  Sense Strand Starting at position 420 of SEQ ID NO: 317513
gguaaugcaugauuauuga

SEQ ID NO: 351758 - RNA, 19 nt, Artificial Sequence
  Description of Artificial Sequence: Synthetic oligonucleotide
  Antisense Strand to SEQ ID NO: 351757
ucaauaaucaugcauuacc

SEQ ID NO: 351759 - RNA, 19 nt, Artificial Sequence
  Description of Artificial Sequence: Synthetic oligonucleotide
  Sense Strand Starting at position 420 of SEQ ID NO: 317597
aguagcuacugcucagauu

SEQ ID NO: 351760 - RNA, 19 nt, Artificial Sequence
  Description of Artificial Sequence: Synthetic oligonucleotide
  Antisense Strand to SEQ ID NO: 351759
aaucugagcaguagcuacu

SEQ ID NO: 351761 - RNA, 19 nt, Artificial Sequence
  Description of Artificial Sequence: Synthetic oligonucleotide
  Sense Strand Starting at position 420 of SEQ ID NO: 317637
uccaaugaguuguuauaau

SEQ ID NO: 351762 - RNA, 19 nt, Artificial Sequence
  Description of Artificial Sequence: Synthetic oligonucleotide
  Antisense Strand to SEQ ID NO: 351761
auuauaacaacucauugga

SEQ ID NO: 351763 - RNA, 19 nt, Artificial Sequence
  Description of Artificial Sequence: Synthetic oligonucleotide
  Sense Strand Starting at position 420 of SEQ ID NO: 317675
gguggcaaaccauagguaa

SEQ ID NO: 351764 - RNA, 19 nt, Artificial Sequence
  Description of Artificial Sequence: Synthetic oligonucleotide
  Antisense Strand to SEQ ID NO: 351763
uuaccuaugguuugccacc

SEQ ID NO: 351765 - RNA, 19 nt, Artificial Sequence
  Description of Artificial Sequence: Synthetic oligonucleotide
  Sense Strand Starting at position 420 of SEQ ID NO: 318060
ggaauagcauucuaugcau

SEQ ID NO: 351766 - RNA, 19 nt, Artificial Sequence
  Description of Artificial Sequence: Synthetic oligonucleotide
  Antisense Strand to SEQ ID NO: 351765
augcauagaaugcuauucc

SEQ ID NO: 351767 - RNA, 19 nt, Artificial Sequence
  Description of Artificial Sequence: Synthetic oligonucleotide
  Sense Strand Starting at position 420 of SEQ ID NO: 318063
auagcauucuaugcauguu

SEQ ID NO: 351768 - RNA, 19 nt, Artificial Sequence
  Description of Artificial Sequence: Synthetic oligonucleotide
  Antisense Strand to SEQ ID NO: 351767
aacaugcauagaaugcuau

SEQ ID NO: 351769 - RNA, 19 nt, Artificial Sequence
  Description of Artificial Sequence: Synthetic oligonucleotide
  Sense Strand Starting at position 420 of SEQ ID NO: 318071
cuaugcauguugucuaauu

SEQ ID NO: 351770 - RNA, 19 nt, Artificial Sequence
  Description of Artificial Sequence: Synthetic oligonucleotide
  Antisense Strand to SEQ ID NO: 351769
aauuagacaacaugcauag

SEQ ID NO: 351771 - RNA, 19 nt, Artificial Sequence
  Description of Artificial Sequence: Synthetic oligonucleotide
  Sense Strand Starting at position 420 of SEQ ID NO: 318101
cuggcaauuuguugaaugu

SEQ ID NO: 351772 - RNA, 19 nt, Artificial Sequence
  Description of Artificial Sequence: Synthetic oligonucleotide
  Antisense Strand to SEQ ID NO: 351771
acauucaacaaauugccag

SEQ ID NO: 351773 - RNA, 19 nt, Artificial Sequence
  Description of Artificial Sequence: Synthetic oligonucleotide
  Sense Strand Starting at position 420 of SEQ ID NO: 318809
cggagugccuaauagacau

SEQ ID NO: 351774 - RNA, 19 nt, Artificial Sequence
  Description of Artificial Sequence: Synthetic oligonucleotide
  Antisense Strand to SEQ ID NO: 351773
augucuauuaggcacuccg

SEQ ID NO: 351775 - RNA, 19 nt, Artificial Sequence
  Description of Artificial Sequence: Synthetic oligonucleotide
  Sense Strand Starting at position 420 of SEQ ID NO: 318834
guaauauggcccuaauuaa

SEQ ID NO: 351776 - RNA, 19 nt, Artificial Sequence
  Description of Artificial Sequence: Synthetic oligonucleotide
  Antisense Strand to SEQ ID NO: 351775
uuaauuagggccauauuac

SEQ ID NO: 351777 - RNA, 19 nt, Artificial Sequence
  Description of Artificial Sequence: Synthetic oligonucleotide
  Sense Strand Starting at position 420 of SEQ ID NO: 318881
gucuucucaaagcgaaagu

SEQ ID NO: 351778 - RNA, 19 nt, Artificial Sequence
  Description of Artificial Sequence: Synthetic oligonucleotide
  Antisense Strand to SEQ ID NO: 351777
acuuucgcuuugagaagac

SEQ ID NO: 351779 - RNA, 19 nt, Artificial Sequence
  Description of Artificial Sequence: Synthetic oligonucleotide
  Sense Strand Starting at position 420 of SEQ ID NO: 318890
aagcgaaagucccuacuau

SEQ ID NO: 351780 - RNA, 19 nt, Artificial Sequence
  Description of Artificial Sequence: Synthetic oligonucleotide
  Antisense Strand to SEQ ID NO: 351779
auaguagggacuuucgcuu

SEQ ID NO: 351781 - RNA, 19 nt, Artificial Sequence
  Description of Artificial Sequence: Synthetic oligonucleotide
  Sense Strand Starting at position 420 of SEQ ID NO: 318891
agcgaaagucccuacuauc

SEQ ID NO: 351782 - RNA, 19 nt, Artificial Sequence
  Description of Artificial Sequence: Synthetic oligonucleotide
  Antisense Strand to SEQ ID NO: 351781
gauaguagggacuuucgcu

SEQ ID NO: 351783 - RNA, 19 nt, Artificial Sequence
  Description of Artificial Sequence: Synthetic oligonucleotide
  Sense Strand Starting at position 420 of SEQ ID NO: 318934
uaggaauugucccugauuc

SEQ ID NO: 351784 - RNA, 19 nt, Artificial Sequence
  Description of Artificial Sequence: Synthetic oligonucleotide
  Antisense Strand to SEQ ID NO: 351783
gaaucagggacaauuccua

SEQ ID NO: 351785 - RNA, 19 nt, Artificial Sequence
  Description of Artificial Sequence: Synthetic oligonucleotide
  Sense Strand Starting at position 420 of SEQ ID NO: 318935
aggaauugucccugauucc

SEQ ID NO: 351786 - RNA, 19 nt, Artificial Sequence
  Description of Artificial Sequence: Synthetic oligonucleotide
  Antisense Strand to SEQ ID NO: 351785
ggaaucagggacaauuccu

SEQ ID NO: 351787 - RNA, 19 nt, Artificial Sequence
  Description of Artificial Sequence: Synthetic oligonucleotide
  Sense Strand Starting at position 421 of SEQ ID NO: 315512
aagcuccugugaguuaaau

SEQ ID NO: 351788 - RNA, 19 nt, Artificial Sequence
  Description of Artificial Sequence: Synthetic oligonucleotide
  Antisense Strand to SEQ ID NO: 351787
auuuaacucacaggagcuu

SEQ ID NO: 351789 - RNA, 19 nt, Artificial Sequence
  Description of Artificial Sequence: Synthetic oligonucleotide
  Sense Strand Starting at position 421 of SEQ ID NO: 315556
agcaaagcauuauuaaguu

SEQ ID NO: 351790 - RNA, 19 nt, Artificial Sequence
  Description of Artificial Sequence: Synthetic oligonucleotide
  Antisense Strand to SEQ ID NO: 351789
aacuuaauaaugcuuugcu

SEQ ID NO: 351791 - RNA, 19 nt, Artificial Sequence
  Description of Artificial Sequence: Synthetic oligonucleotide
  Sense Strand Starting at position 421 of SEQ ID NO: 315661
ggcugugggucagaacgaa

SEQ ID NO: 351792 - RNA, 19 nt, Artificial Sequence
  Description of Artificial Sequence: Synthetic oligonucleotide
  Antisense Strand to SEQ ID NO: 351791
uucguucugacccacagcc

SEQ ID NO: 351793 - RNA, 19 nt, Artificial Sequence
  Description of Artificial Sequence: Synthetic oligonucleotide
  Sense Strand Starting at position 421 of SEQ ID NO: 315961
uacugugauuuauggguga

SEQ ID NO: 351794 - RNA, 19 nt, Artificial Sequence
  Description of Artificial Sequence: Synthetic oligonucleotide
  Antisense Strand to SEQ ID NO: 351793
ucacccauaaaucacagua

SEQ ID NO: 351795 - RNA, 19 nt, Artificial Sequence
  Description of Artificial Sequence: Synthetic oligonucleotide
  Sense Strand Starting at position 421 of SEQ ID NO: 316066
aucccucuccuugguuauu

SEQ ID NO: 351796 - RNA, 19 nt, Artificial Sequence
  Description of Artificial Sequence: Synthetic oligonucleotide
  Antisense Strand to SEQ ID NO: 351795
aauaaccaaggagagggau

SEQ ID NO: 351797 - RNA, 19 nt, Artificial Sequence
  Description of Artificial Sequence: Synthetic oligonucleotide
  Sense Strand Starting at position 421 of SEQ ID NO: 316067
ucccucuccuugguuauua

SEQ ID NO: 351798 - RNA, 19 nt, Artificial Sequence
  Description of Artificial Sequence: Synthetic oligonucleotide
  Antisense Strand to SEQ ID NO: 351797
uaauaaccaaggagaggga

SEQ ID NO: 351799 - RNA, 19 nt, Artificial Sequence
  Description of Artificial Sequence: Synthetic oligonucleotide
  Sense Strand Starting at position 421 of SEQ ID NO: 316105
caggauuccuaaugauagu

SEQ ID NO: 351800 - RNA, 19 nt, Artificial Sequence
  Description of Artificial Sequence: Synthetic oligonucleotide
  Antisense Strand to SEQ ID NO: 351799
acuaucauuaggaauccug

SEQ ID NO: 351801 - RNA, 19 nt, Artificial Sequence
  Description of Artificial Sequence: Synthetic oligonucleotide
  Sense Strand Starting at position 421 of SEQ ID NO: 316277
cgccauaccuccucaagua

SEQ ID NO: 351802 - RNA, 19 nt, Artificial Sequence
  Description of Artificial Sequence: Synthetic oligonucleotide
  Antisense Strand to SEQ ID NO: 351801
uacuugaggagguauggcg

SEQ ID NO: 351803 - RNA, 19 nt, Artificial Sequence
  Description of Artificial Sequence: Synthetic oligonucleotide
  Sense Strand Starting at position 421 of SEQ ID NO: 316355
cgugaaggccucuggagaa

SEQ ID NO: 351804 - RNA, 19 nt, Artificial Sequence
  Description of Artificial Sequence: Synthetic oligonucleotide
  Antisense Strand to SEQ ID NO: 351803
uucuccagaggccuucacg

SEQ ID NO: 351805 - RNA, 19 nt, Artificial Sequence
  Description of Artificial Sequence: Synthetic oligonucleotide
  Sense Strand Starting at position 421 of SEQ ID NO: 316368
ggagaauuaugccuucggu

SEQ ID NO: 351806 - RNA, 19 nt, Artificial Sequence
  Description of Artificial Sequence: Synthetic oligonucleotide
  Antisense Strand to SEQ ID NO: 351805
accgaaggcauaauucucc

SEQ ID NO: 351807 - RNA, 19 nt, Artificial Sequence
  Description of Artificial Sequence: Synthetic oligonucleotide
  Sense Strand Starting at position 421 of SEQ ID NO: 316385
guuggcaauucucugaacu

SEQ ID NO: 351808 - RNA, 19 nt, Artificial Sequence
  Description of Artificial Sequence: Synthetic oligonucleotide
  Antisense Strand to SEQ ID NO: 351807
aguucagagaauugccaac

SEQ ID NO: 351809 - RNA, 19 nt, Artificial Sequence
  Description of Artificial Sequence: Synthetic oligonucleotide
  Sense Strand Starting at position 421 of SEQ ID NO: 316386
uuggcaauucucugaacuu

SEQ ID NO: 351810 - RNA, 19 nt, Artificial Sequence
  Description of Artificial Sequence: Synthetic oligonucleotide
  Antisense Strand to SEQ ID NO: 351809
aaguucagagaauugccaa

SEQ ID NO: 351811 - RNA, 19 nt, Artificial Sequence
  Description of Artificial Sequence: Synthetic oligonucleotide
  Sense Strand Starting at position 421 of SEQ ID NO: 316387
uggcaauucucugaacuug

SEQ ID NO: 351812 - RNA, 19 nt, Artificial Sequence
  Description of Artificial Sequence: Synthetic oligonucleotide
  Antisense Strand to SEQ ID NO: 351811
caaguucagagaauugcca

SEQ ID NO: 351813 - RNA, 19 nt, Artificial Sequence
  Description of Artificial Sequence: Synthetic oligonucleotide
  Sense Strand Starting at position 421 of SEQ ID NO: 316492
gucugaaguuaacugaaca

SEQ ID NO: 351814 - RNA, 19 nt, Artificial Sequence
  Description of Artificial Sequence: Synthetic oligonucleotide
  Antisense Strand to SEQ ID NO: 351813
uguucaguuaacuucagac

SEQ ID NO: 351815 - RNA, 19 nt, Artificial Sequence
  Description of Artificial Sequence: Synthetic oligonucleotide
  Sense Strand Starting at position 421 of SEQ ID NO: 316525
agacguuuacaaugcacua

SEQ ID NO: 351816 - RNA, 19 nt, Artificial Sequence
  Description of Artificial Sequence: Synthetic oligonucleotide
  Antisense Strand to SEQ ID NO: 351815
uagugcauuguaaacgucu

SEQ ID NO: 351817 - RNA, 19 nt, Artificial Sequence
  Description of Artificial Sequence: Synthetic oligonucleotide
  Sense Strand Starting at position 421 of SEQ ID NO: 316716
gucuuauauuaguuacaca

SEQ ID NO: 351818 - RNA, 19 nt, Artificial Sequence
  Description of Artificial Sequence: Synthetic oligonucleotide
  Antisense Strand to SEQ ID NO: 351817
uguguaacuaauauaagac

SEQ ID NO: 351819 - RNA, 19 nt, Artificial Sequence
  Description of Artificial Sequence: Synthetic oligonucleotide
  Sense Strand Starting at position 421 of SEQ ID NO: 316758
aggcauauagacugcuuua

SEQ ID NO: 351820 - RNA, 19 nt, Artificial Sequence
  Description of Artificial Sequence: Synthetic oligonucleotide
  Antisense Strand to SEQ ID NO: 351819
uaaagcagucuauaugccu

SEQ ID NO: 351821 - RNA, 19 nt, Artificial Sequence
  Description of Artificial Sequence: Synthetic oligonucleotide
  Sense Strand Starting at position 421 of SEQ ID NO: 316763
uauagacugcuuuagugua

SEQ ID NO: 351822 - RNA, 19 nt, Artificial Sequence
  Description of Artificial Sequence: Synthetic oligonucleotide
  Antisense Strand to SEQ ID NO: 351821
uacacuaaagcagucuaua

SEQ ID NO: 351823 - RNA, 19 nt, Artificial Sequence
  Description of Artificial Sequence: Synthetic oligonucleotide
  Sense Strand Starting at position 421 of SEQ ID NO: 316765
uagacugcuuuaguguaaa

SEQ ID NO: 351824 - RNA, 19 nt, Artificial Sequence
  Description of Artificial Sequence: Synthetic oligonucleotide
  Antisense Strand to SEQ ID NO: 351823
uuuacacuaaagcagucua

SEQ ID NO: 351825 - RNA, 19 nt, Artificial Sequence
  Description of Artificial Sequence: Synthetic oligonucleotide
  Sense Strand Starting at position 421 of SEQ ID NO: 316768
acugcuuuaguguaaauau

SEQ ID NO: 351826 - RNA, 19 nt, Artificial Sequence
  Description of Artificial Sequence: Synthetic oligonucleotide
  Antisense Strand to SEQ ID NO: 351825
auauuuacacuaaagcagu

SEQ ID NO: 351827 - RNA, 19 nt, Artificial Sequence
  Description of Artificial Sequence: Synthetic oligonucleotide
  Sense Strand Starting at position 421 of SEQ ID NO: 317404
ucagucugaucaccuugau

SEQ ID NO: 351828 - RNA, 19 nt, Artificial Sequence
  Description of Artificial Sequence: Synthetic oligonucleotide
  Antisense Strand to SEQ ID NO: 351827
aucaaggugaucagacuga

SEQ ID NO: 351829 - RNA, 19 nt, Artificial Sequence
  Description of Artificial Sequence: Synthetic oligonucleotide
  Sense Strand Starting at position 421 of SEQ ID NO: 317407
gucugaucaccuugauguc

SEQ ID NO: 351830 - RNA, 19 nt, Artificial Sequence
  Description of Artificial Sequence: Synthetic oligonucleotide
  Antisense Strand to SEQ ID NO: 351829
gacaucaaggugaucagac

SEQ ID NO: 351831 - RNA, 19 nt, Artificial Sequence
  Description of Artificial Sequence: Synthetic oligonucleotide
  Sense Strand Starting at position 421 of SEQ ID NO: 317500
acguuauacagguaaugca

SEQ ID NO: 351832 - RNA, 19 nt, Artificial Sequence
  Description of Artificial Sequence: Synthetic oligonucleotide
  Antisense Strand to SEQ ID NO: 351831
ugcauuaccuguauaacgu

SEQ ID NO: 351833 - RNA, 19 nt, Artificial Sequence
  Description of Artificial Sequence: Synthetic oligonucleotide
  Sense Strand Starting at position 421 of SEQ ID NO: 317507
acagguaaugcaugauuau

SEQ ID NO: 351834 - RNA, 19 nt, Artificial Sequence
  Description of Artificial Sequence: Synthetic oligonucleotide
  Antisense Strand to SEQ ID NO: 351833
auaaucaugcauuaccugu

SEQ ID NO: 351835 - RNA, 19 nt, Artificial Sequence
  Description of Artificial Sequence: Synthetic oligonucleotide
  Sense Strand Starting at position 421 of SEQ ID NO: 317508
cagguaaugcaugauuauu

SEQ ID NO: 351836 - RNA, 19 nt, Artificial Sequence
  Description of Artificial Sequence: Synthetic oligonucleotide
  Antisense Strand to SEQ ID NO: 351835
aauaaucaugcauuaccug

SEQ ID NO: 351837 - RNA, 19 nt, Artificial Sequence
  Description of Artificial Sequence: Synthetic oligonucleotide
  Sense Strand Starting at position 421 of SEQ ID NO: 317510
gguaaugcaugauuauuga

SEQ ID NO: 351838 - RNA, 19 nt, Artificial Sequence
  Description of Artificial Sequence: Synthetic oligonucleotide
  Antisense Strand to SEQ ID NO: 351837
ucaauaaucaugcauuacc

SEQ ID NO: 351839 - RNA, 19 nt, Artificial Sequence
  Description of Artificial Sequence: Synthetic oligonucleotide
  Sense Strand Starting at position 421 of SEQ ID NO: 317594
aguagcuacugcucagauu

SEQ ID NO: 351840 - RNA, 19 nt, Artificial Sequence
  Description of Artificial Sequence: Synthetic oligonucleotide
  Antisense Strand to SEQ ID NO: 351839
aaucugagcaguagcuacu

SEQ ID NO: 351841 - RNA, 19 nt, Artificial Sequence
  Description of Artificial Sequence: Synthetic oligonucleotide
  Sense Strand Starting at position 421 of SEQ ID NO: 317634
uccaaugaguuguuauaau

SEQ ID NO: 351842 - RNA, 19 nt, Artificial Sequence
  Description of Artificial Sequence: Synthetic oligonucleotide
  Antisense Strand to SEQ ID NO: 351841
auuauaacaacucauugga

SEQ ID NO: 351843 - RNA, 19 nt, Artificial Sequence
  Description of Artificial Sequence: Synthetic oligonucleotide
  Sense Strand Starting at position 421 of SEQ ID NO: 317672
gguggcaaaccauagguaa

SEQ ID NO: 351844 - RNA, 19 nt, Artificial Sequence
  Description of Artificial Sequence: Synthetic oligonucleotide
  Antisense Strand to SEQ ID NO: 351843
uuaccuaugguuugccacc

SEQ ID NO: 351845 - RNA, 19 nt, Artificial Sequence
  Description of Artificial Sequence: Synthetic oligonucleotide
  Sense Strand Starting at position 421 of SEQ ID NO: 318057
ggaauagcauucuaugcau

SEQ ID NO: 351846 - RNA, 19 nt, Artificial Sequence
  Description of Artificial Sequence: Synthetic oligonucleotide
  Antisense Strand to SEQ ID NO: 351845
augcauagaaugcuauucc

SEQ ID NO: 351847 - RNA, 19 nt, Artificial Sequence
  Description of Artificial Sequence: Synthetic oligonucleotide
  Sense Strand Starting at position 421 of SEQ ID NO: 318060
auagcauucuaugcauguu

SEQ ID NO: 351848 - RNA, 19 nt, Artificial Sequence
  Description of Artificial Sequence: Synthetic oligonucleotide
  Antisense Strand to SEQ ID NO: 351847
aacaugcauagaaugcuau

SEQ ID NO: 351849 - RNA, 19 nt, Artificial Sequence
  Description of Artificial Sequence: Synthetic oligonucleotide
  Sense Strand Starting at position 421 of SEQ ID NO: 318068
cuaugcauguugucuaauu

SEQ ID NO: 351850 - RNA, 19 nt, Artificial Sequence
  Description of Artificial Sequence: Synthetic oligonucleotide
  Antisense Strand to SEQ ID NO: 351849
aauuagacaacaugcauag

SEQ ID NO: 351851 - RNA, 19 nt, Artificial Sequence
  Description of Artificial Sequence: Synthetic oligonucleotide
  Sense Strand Starting at position 421 of SEQ ID NO: 318098
cuggcaauuuguugaaugu

SEQ ID NO: 351852 - RNA, 19 nt, Artificial Sequence
  Description of Artificial Sequence: Synthetic oligonucleotide
  Antisense Strand to SEQ ID NO: 351851
acauucaacaaauugccag

SEQ ID NO: 351853 - RNA, 19 nt, Artificial Sequence
  Description of Artificial Sequence: Synthetic oligonucleotide
  Sense Strand Starting at position 421 of SEQ ID NO: 318806
cggagugccuaauagacau

SEQ ID NO: 351854 - RNA, 19 nt, Artificial Sequence
  Description of Artificial Sequence: Synthetic oligonucleotide
  Antisense Strand to SEQ ID NO: 351853
augucuauuaggcacuccg

SEQ ID NO: 351855 - RNA, 19 nt, Artificial Sequence
  Description of Artificial Sequence: Synthetic oligonucleotide
  Sense Strand Starting at position 421 of SEQ ID NO: 318831
guaauauggcccuaauuaa

SEQ ID NO: 351856 - RNA, 19 nt, Artificial Sequence
  Description of Artificial Sequence: Synthetic oligonucleotide
  Antisense Strand to SEQ ID NO: 351855
uuaauuagggccauauuac

SEQ ID NO: 351857 - RNA, 19 nt, Artificial Sequence
  Description of Artificial Sequence: Synthetic oligonucleotide
  Sense Strand Starting at position 421 of SEQ ID NO: 318878
gucuucucaaagcgaaagu

SEQ ID NO: 351858 - RNA, 19 nt, Artificial Sequence
  Description of Artificial Sequence: Synthetic oligonucleotide
  Antisense Strand to SEQ ID NO: 351857
acuuucgcuuugagaagac

SEQ ID NO: 351859 - RNA, 19 nt, Artificial Sequence
  Description of Artificial Sequence: Synthetic oligonucleotide
  Sense Strand Starting at position 421 of SEQ ID NO: 318887
aagcgaaagucccuacuau

SEQ ID NO: 351860 - RNA, 19 nt, Artificial Sequence
  Description of Artificial Sequence: Synthetic oligonucleotide
  Antisense Strand to SEQ ID NO: 351859
auaguagggacuuucgcuu

SEQ ID NO: 351861 - RNA, 19 nt, Artificial Sequence
  Description of Artificial Sequence: Synthetic oligonucleotide
  Sense Strand Starting at position 421 of SEQ ID NO: 318888
agcgaaagucccuacuauc

SEQ ID NO: 351862 - RNA, 19 nt, Artificial Sequence
  Description of Artificial Sequence: Synthetic oligonucleotide
  Antisense Strand to SEQ ID NO: 351861
gauaguagggacuuucgcu

SEQ ID NO: 351863 - RNA, 19 nt, Artificial Sequence
  Description of Artificial Sequence: Synthetic oligonucleotide
  Sense Strand Starting at position 421 of SEQ ID NO: 318931
uaggaauugucccugauuc

SEQ ID NO: 351864 - RNA, 19 nt, Artificial Sequence
  Description of Artificial Sequence: Synthetic oligonucleotide
  Antisense Strand to SEQ ID NO: 351863
gaaucagggacaauuccua

SEQ ID NO: 351865 - RNA, 19 nt, Artificial Sequence
  Description of Artificial Sequence: Synthetic oligonucleotide
  Sense Strand Starting at position 421 of SEQ ID NO: 318932
aggaauugucccugauucc

SEQ ID NO: 351866 - RNA, 19 nt, Artificial Sequence
  Description of Artificial Sequence: Synthetic oligonucleotide
  Antisense Strand to SEQ ID NO: 351865
ggaaucagggacaauuccu

SEQ ID NO: 351867 - RNA, 19 nt, Artificial Sequence
  Description of Artificial Sequence: Synthetic oligonucleotide
  Sense Strand Starting at position 422 of SEQ ID NO: 315280
aaaugaaguuaggugauua

SEQ ID NO: 351868 - RNA, 19 nt, Artificial Sequence
  Description of Artificial Sequence: Synthetic oligonucleotide
  Antisense Strand to SEQ ID NO: 351867
uaaucaccuaacuucauuu

SEQ ID NO: 351869 - RNA, 19 nt, Artificial Sequence
  Description of Artificial Sequence: Synthetic oligonucleotide
  Sense Strand Starting at position 422 of SEQ ID NO: 315370
gguacauauggagguuaca

SEQ ID NO: 351870 - RNA, 19 nt, Artificial Sequence
  Description of Artificial Sequence: Synthetic oligonucleotide
  Antisense Strand to SEQ ID NO: 351869
uguaaccuccauauguacc

SEQ ID NO: 351871 - RNA, 19 nt, Artificial Sequence
  Description of Artificial Sequence: Synthetic oligonucleotide
  Sense Strand Starting at position 422 of SEQ ID NO: 315411
gaguuaagguaucugaaua

SEQ ID NO: 351872 - RNA, 19 nt, Artificial Sequence
  Description of Artificial Sequence: Synthetic oligonucleotide
  Antisense Strand to SEQ ID NO: 351871
uauucagauaccuuaacuc

SEQ ID NO: 351873 - RNA, 19 nt, Artificial Sequence
  Description of Artificial Sequence: Synthetic oligonucleotide
  Sense Strand Starting at position 422 of SEQ ID NO: 315412
aguuaagguaucugaauag

SEQ ID NO: 351874 - RNA, 19 nt, Artificial Sequence
  Description of Artificial Sequence: Synthetic oligonucleotide
  Antisense Strand to SEQ ID NO: 351873
cuauucagauaccuuaacu

SEQ ID NO: 351875 - RNA, 19 nt, Artificial Sequence
  Description of Artificial Sequence: Synthetic oligonucleotide
  Sense Strand Starting at position 422 of SEQ ID NO: 315528
ccaggauguccuuagcuga

SEQ ID NO: 351876 - RNA, 19 nt, Artificial Sequence
  Description of Artificial Sequence: Synthetic oligonucleotide
  Antisense Strand to SEQ ID NO: 351875
ucagcuaaggacauccugg

SEQ ID NO: 351877 - RNA, 19 nt, Artificial Sequence
  Description of Artificial Sequence: Synthetic oligonucleotide
  Sense Strand Starting at position 422 of SEQ ID NO: 315617
acuauacaguuauuccaga

SEQ ID NO: 351878 - RNA, 19 nt, Artificial Sequence
  Description of Artificial Sequence: Synthetic oligonucleotide
  Antisense Strand to SEQ ID NO: 351877
ucuggaauaacuguauagu

SEQ ID NO: 351879 - RNA, 19 nt, Artificial Sequence
  Description of Artificial Sequence: Synthetic oligonucleotide
  Sense Strand Starting at position 422 of SEQ ID NO: 315622
acaguuauuccagaagcga

SEQ ID NO: 351880 - RNA, 19 nt, Artificial Sequence
  Description of Artificial Sequence: Synthetic oligonucleotide
  Antisense Strand to SEQ ID NO: 351879
ucgcuucuggaauaacugu

SEQ ID NO: 351881 - RNA, 19 nt, Artificial Sequence
  Description of Artificial Sequence: Synthetic oligonucleotide
  Sense Strand Starting at position 422 of SEQ ID NO: 315753
ggugcauaagccuauauaa

SEQ ID NO: 351882 - RNA, 19 nt, Artificial Sequence
  Description of Artificial Sequence: Synthetic oligonucleotide
  Antisense Strand to SEQ ID NO: 351881
uuauauaggcuuaugcacc

SEQ ID NO: 351883 - RNA, 19 nt, Artificial Sequence
  Description of Artificial Sequence: Synthetic oligonucleotide
  Sense Strand Starting at position 422 of SEQ ID NO: 315755
ugcauaagccuauauaagu

SEQ ID NO: 351884 - RNA, 19 nt, Artificial Sequence
  Description of Artificial Sequence: Synthetic oligonucleotide
  Antisense Strand to SEQ ID NO: 351883
acuuauauaggcuuaugca

SEQ ID NO: 351885 - RNA, 19 nt, Artificial Sequence
  Description of Artificial Sequence: Synthetic oligonucleotide
  Sense Strand Starting at position 422 of SEQ ID NO: 315857
gagaauauuguuggcgaaa

SEQ ID NO: 351886 - RNA, 19 nt, Artificial Sequence
  Description of Artificial Sequence: Synthetic oligonucleotide
  Antisense Strand to SEQ ID NO: 351885
uuucgccaacaauauucuc

SEQ ID NO: 351887 - RNA, 19 nt, Artificial Sequence
  Description of Artificial Sequence: Synthetic oligonucleotide
  Sense Strand Starting at position 422 of SEQ ID NO: 315931
cuuauuaaccaguaguaug

SEQ ID NO: 351888 - RNA, 19 nt, Artificial Sequence
  Description of Artificial Sequence: Synthetic oligonucleotide
  Antisense Strand to SEQ ID NO: 351887
cauacuacugguuaauaag

SEQ ID NO: 351889 - RNA, 19 nt, Artificial Sequence
  Description of Artificial Sequence: Synthetic oligonucleotide
  Sense Strand Starting at position 422 of SEQ ID NO: 315941
aguaguaugacacagcaga

SEQ ID NO: 351890 - RNA, 19 nt, Artificial Sequence
  Description of Artificial Sequence: Synthetic oligonucleotide
  Antisense Strand to SEQ ID NO: 351889
ucugcugugucauacuacu

SEQ ID NO: 351891 - RNA, 19 nt, Artificial Sequence
  Description of Artificial Sequence: Synthetic oligonucleotide
  Sense Strand Starting at position 422 of SEQ ID NO: 316001
agcaaauguugacuggaga

SEQ ID NO: 351892 - RNA, 19 nt, Artificial Sequence
  Description of Artificial Sequence: Synthetic oligonucleotide
  Antisense Strand to SEQ ID NO: 351891
ucuccagucaacauuugcu

SEQ ID NO: 351893 - RNA, 19 nt, Artificial Sequence
  Description of Artificial Sequence: Synthetic oligonucleotide
  Sense Strand Starting at position 422 of SEQ ID NO: 316002
gcaaauguugacuggagaa

SEQ ID NO: 351894 - RNA, 19 nt, Artificial Sequence
  Description of Artificial Sequence: Synthetic oligonucleotide
  Antisense Strand to SEQ ID NO: 351893
uucuccagucaacauuugc

SEQ ID NO: 351895 - RNA, 19 nt, Artificial Sequence
  Description of Artificial Sequence: Synthetic oligonucleotide
  Sense Strand Starting at position 422 of SEQ ID NO: 316248
ggaggcucucuugaaccua

SEQ ID NO: 351896 - RNA, 19 nt, Artificial Sequence
  Description of Artificial Sequence: Synthetic oligonucleotide
  Antisense Strand to SEQ ID NO: 351895
uagguucaagagagccucc

SEQ ID NO: 351897 - RNA, 19 nt, Artificial Sequence
  Description of Artificial Sequence: Synthetic oligonucleotide
  Sense Strand Starting at position 422 of SEQ ID NO: 316480
ccuagccaucaaggugaaa

SEQ ID NO: 351898 - RNA, 19 nt, Artificial Sequence
  Description of Artificial Sequence: Synthetic oligonucleotide
  Antisense Strand to SEQ ID NO: 351897
uuucaccuugauggcuagg

SEQ ID NO: 351899 - RNA, 19 nt, Artificial Sequence
  Description of Artificial Sequence: Synthetic oligonucleotide
  Sense Strand Starting at position 422 of SEQ ID NO: 316797
acuacucuuguugauuaua

SEQ ID NO: 351900 - RNA, 19 nt, Artificial Sequence
  Description of Artificial Sequence: Synthetic oligonucleotide
  Antisense Strand to SEQ ID NO: 351899
uauaaucaacaagaguagu

SEQ ID NO: 351901 - RNA, 19 nt, Artificial Sequence
  Description of Artificial Sequence: Synthetic oligonucleotide
  Sense Strand Starting at position 422 of SEQ ID NO: 316975
gugauaugcggcucagcuu

SEQ ID NO: 351902 - RNA, 19 nt, Artificial Sequence
  Description of Artificial Sequence: Synthetic oligonucleotide
  Antisense Strand to SEQ ID NO: 351901
aagcugagccgcauaucac

SEQ ID NO: 351903 - RNA, 19 nt, Artificial Sequence
  Description of Artificial Sequence: Synthetic oligonucleotide
  Sense Strand Starting at position 422 of SEQ ID NO: 317672
aagggagaguuuguaauuc

SEQ ID NO: 351904 - RNA, 19 nt, Artificial Sequence
  Description of Artificial Sequence: Synthetic oligonucleotide
  Antisense Strand to SEQ ID NO: 351903
gaauuacaaacucucccuu

SEQ ID NO: 351905 - RNA, 19 nt, Artificial Sequence
  Description of Artificial Sequence: Synthetic oligonucleotide
  Sense Strand Starting at position 422 of SEQ ID NO: 317705
gaguaaauccagugugaga

SEQ ID NO: 351906 - RNA, 19 nt, Artificial Sequence
  Description of Artificial Sequence: Synthetic oligonucleotide
  Antisense Strand to SEQ ID NO: 351905
ucucacacuggauuuacuc

SEQ ID NO: 351907 - RNA, 19 nt, Artificial Sequence
  Description of Artificial Sequence: Synthetic oligonucleotide
  Sense Strand Starting at position 422 of SEQ ID NO: 317707
guaaauccagugugagaga

SEQ ID NO: 351908 - RNA, 19 nt, Artificial Sequence
  Description of Artificial Sequence: Synthetic oligonucleotide
  Antisense Strand to SEQ ID NO: 351907
ucucucacacuggauuuac

SEQ ID NO: 351909 - RNA, 19 nt, Artificial Sequence
  Description of Artificial Sequence: Synthetic oligonucleotide
  Sense Strand Starting at position 422 of SEQ ID NO: 317720
gagagaauuagagguugua

SEQ ID NO: 351910 - RNA, 19 nt, Artificial Sequence
  Description of Artificial Sequence: Synthetic oligonucleotide
  Antisense Strand to SEQ ID NO: 351909
uacaaccucuaauucucuc

SEQ ID NO: 351911 - RNA, 19 nt, Artificial Sequence
  Description of Artificial Sequence: Synthetic oligonucleotide
  Sense Strand Starting at position 422 of SEQ ID NO: 317723
agaauuagagguuguagga

SEQ ID NO: 351912 - RNA, 19 nt, Artificial Sequence
  Description of Artificial Sequence: Synthetic oligonucleotide
  Antisense Strand to SEQ ID NO: 351911
uccuacaaccucuaauucu

SEQ ID NO: 351913 - RNA, 19 nt, Artificial Sequence
  Description of Artificial Sequence: Synthetic oligonucleotide
  Sense Strand Starting at position 422 of SEQ ID NO: 317807
ggaaauugcucauccaagg

SEQ ID NO: 351914 - RNA, 19 nt, Artificial Sequence
  Description of Artificial Sequence: Synthetic oligonucleotide
  Antisense Strand to SEQ ID NO: 351913
ccuuggaugagcaauuucc

SEQ ID NO: 351915 - RNA, 19 nt, Artificial Sequence
  Description of Artificial Sequence: Synthetic oligonucleotide
  Sense Strand Starting at position 422 of SEQ ID NO: 317827
cacacaucucguuagugga

SEQ ID NO: 351916 - RNA, 19 nt, Artificial Sequence
  Description of Artificial Sequence: Synthetic oligonucleotide
  Antisense Strand to SEQ ID NO: 351915
uccacuaacgagaugugug

SEQ ID NO: 351917 - RNA, 19 nt, Artificial Sequence
  Description of Artificial Sequence: Synthetic oligonucleotide
  Sense Strand Starting at position 422 of SEQ ID NO: 318243
ugggauuagguaugugauu

SEQ ID NO: 351918 - RNA, 19 nt, Artificial Sequence
  Description of Artificial Sequence: Synthetic oligonucleotide
  Antisense Strand to SEQ ID NO: 351917
aaucacauaccuaauccca

SEQ ID NO: 351919 - RNA, 19 nt, Artificial Sequence
  Description of Artificial Sequence: Synthetic oligonucleotide
  Sense Strand Starting at position 422 of SEQ ID NO: 318304
uugugaaauggcgaugaua

SEQ ID NO: 351920 - RNA, 19 nt, Artificial Sequence
  Description of Artificial Sequence: Synthetic oligonucleotide
  Antisense Strand to SEQ ID NO: 351919
uaucaucgccauuucacaa

SEQ ID NO: 351921 - RNA, 19 nt, Artificial Sequence
  Description of Artificial Sequence: Synthetic oligonucleotide
  Sense Strand Starting at position 422 of SEQ ID NO: 318307
ugaaauggcgaugauacuu

SEQ ID NO: 351922 - RNA, 19 nt, Artificial Sequence
  Description of Artificial Sequence: Synthetic oligonucleotide
  Antisense Strand to SEQ ID NO: 351921
aaguaucaucgccauuuca

SEQ ID NO: 351923 - RNA, 19 nt, Artificial Sequence
  Description of Artificial Sequence: Synthetic oligonucleotide
  Sense Strand Starting at position 422 of SEQ ID NO: 318453
ugcuaaauuuggcugugau

SEQ ID NO: 351924 - RNA, 19 nt, Artificial Sequence
  Description of Artificial Sequence: Synthetic oligonucleotide
  Antisense Strand to SEQ ID NO: 351923
aucacagccaaauuuagca

SEQ ID NO: 351925 - RNA, 19 nt, Artificial Sequence
  Description of Artificial Sequence: Synthetic oligonucleotide
  Sense Strand Starting at position 422 of SEQ ID NO: 318454
gcuaaauuuggcugugauu

SEQ ID NO: 351926 - RNA, 19 nt, Artificial Sequence
  Description of Artificial Sequence: Synthetic oligonucleotide
  Antisense Strand to SEQ ID NO: 351925
aaucacagccaaauuuagc

SEQ ID NO: 351927 - RNA, 19 nt, Artificial Sequence
  Description of Artificial Sequence: Synthetic oligonucleotide
  Sense Strand Starting at position 422 of SEQ ID NO: 318467
gugauuaacagccaucgaa

SEQ ID NO: 351928 - RNA, 19 nt, Artificial Sequence
  Description of Artificial Sequence: Synthetic oligonucleotide
  Antisense Strand to SEQ ID NO: 351927
uucgauggcuguuaaucac

SEQ ID NO: 351929 - RNA, 19 nt, Artificial Sequence
  Description of Artificial Sequence: Synthetic oligonucleotide
  Sense Strand Starting at position 422 of SEQ ID NO: 318470
auuaacagccaucgaauua

SEQ ID NO: 351930 - RNA, 19 nt, Artificial Sequence
  Description of Artificial Sequence: Synthetic oligonucleotide
  Antisense Strand to SEQ ID NO: 351929
uaauucgauggcuguuaau

SEQ ID NO: 351931 - RNA, 19 nt, Artificial Sequence
  Description of Artificial Sequence: Synthetic oligonucleotide
  Sense Strand Starting at position 422 of SEQ ID NO: 318509
auacauauauguccuugga

SEQ ID NO: 351932 - RNA, 19 nt, Artificial Sequence
  Description of Artificial Sequence: Synthetic oligonucleotide
  Antisense Strand to SEQ ID NO: 351931
uccaaggacauauauguau

SEQ ID NO: 351933 - RNA, 19 nt, Artificial Sequence
  Description of Artificial Sequence: Synthetic oligonucleotide
  Sense Strand Starting at position 422 of SEQ ID NO: 318513
auauauguccuuggaggua

SEQ ID NO: 351934 - RNA, 19 nt, Artificial Sequence
  Description of Artificial Sequence: Synthetic oligonucleotide
  Antisense Strand to SEQ ID NO: 351933
uaccuccaaggacauauau

SEQ ID NO: 351935 - RNA, 19 nt, Artificial Sequence
  Description of Artificial Sequence: Synthetic oligonucleotide
  Sense Strand Starting at position 422 of SEQ ID NO: 318518
uguccuuggagguaaacuu

SEQ ID NO: 351936 - RNA, 19 nt, Artificial Sequence
  Description of Artificial Sequence: Synthetic oligonucleotide
  Antisense Strand to SEQ ID NO: 351935
aaguuuaccuccaaggaca

SEQ ID NO: 351937 - RNA, 19 nt, Artificial Sequence
  Description of Artificial Sequence: Synthetic oligonucleotide
  Sense Strand Starting at position 422 of SEQ ID NO: 318637
ucuuguggauuccuuagga

SEQ ID NO: 351938 - RNA, 19 nt, Artificial Sequence
  Description of Artificial Sequence: Synthetic oligonucleotide
  Antisense Strand to SEQ ID NO: 351937
uccuaaggaauccacaaga

SEQ ID NO: 351939 - RNA, 19 nt, Artificial Sequence
  Description of Artificial Sequence: Synthetic oligonucleotide
  Sense Strand Starting at position 422 of SEQ ID NO: 318694
acuucuuucuuugcgauuu

SEQ ID NO: 351940 - RNA, 19 nt, Artificial Sequence
  Description of Artificial Sequence: Synthetic oligonucleotide
  Antisense Strand to SEQ ID NO: 351939
aaaucgcaaagaaagaagu

SEQ ID NO: 351941 - RNA, 19 nt, Artificial Sequence
  Description of Artificial Sequence: Synthetic oligonucleotide
  Sense Strand Starting at position 422 of SEQ ID NO: 318704
uugcgauuuggaugccuuu

SEQ ID NO: 351942 - RNA, 19 nt, Artificial Sequence
  Description of Artificial Sequence: Synthetic oligonucleotide
  Antisense Strand to SEQ ID NO: 351941
aaaggcauccaaaucgcaa

SEQ ID NO: 351943 - RNA, 19 nt, Artificial Sequence
  Description of Artificial Sequence: Synthetic oligonucleotide
  Sense Strand Starting at position 422 of SEQ ID NO: 318802
ucacuuguuccugaucuua

SEQ ID NO: 351944 - RNA, 19 nt, Artificial Sequence
  Description of Artificial Sequence: Synthetic oligonucleotide
  Antisense Strand to SEQ ID NO: 351943
uaagaucaggaacaaguga

SEQ ID NO: 351945 - RNA, 19 nt, Artificial Sequence
  Description of Artificial Sequence: Synthetic oligonucleotide
  Sense Strand Starting at position 422 of SEQ ID NO: 318898
aggagaggaguuugauagu

SEQ ID NO: 351946 - RNA, 19 nt, Artificial Sequence
  Description of Artificial Sequence: Synthetic oligonucleotide
  Antisense Strand to SEQ ID NO: 351945
acuaucaaacuccucuccu

SEQ ID NO: 351947 - RNA, 19 nt, Artificial Sequence
  Description of Artificial Sequence: Synthetic oligonucleotide
  Sense Strand Starting at position 423 of SEQ ID NO: 315420
uggcaauguucccuaucuu

SEQ ID NO: 351948 - RNA, 19 nt, Artificial Sequence
  Description of Artificial Sequence: Synthetic oligonucleotide
  Antisense Strand to SEQ ID NO: 351947
aagauagggaacauugcca

SEQ ID NO: 351949 - RNA, 19 nt, Artificial Sequence
  Description of Artificial Sequence: Synthetic oligonucleotide
  Sense Strand Starting at position 423 of SEQ ID NO: 315421
ggcaauguucccuaucuuc

SEQ ID NO: 351950 - RNA, 19 nt, Artificial Sequence
  Description of Artificial Sequence: Synthetic oligonucleotide
  Antisense Strand to SEQ ID NO: 351949
gaagauagggaacauugcc

SEQ ID NO: 351951 - RNA, 19 nt, Artificial Sequence
  Description of Artificial Sequence: Synthetic oligonucleotide
  Sense Strand Starting at position 423 of SEQ ID NO: 315903
auaugaucuugauugacug

SEQ ID NO: 351952 - RNA, 19 nt, Artificial Sequence
  Description of Artificial Sequence: Synthetic oligonucleotide
  Antisense Strand to SEQ ID NO: 351951
cagucaaucaagaucauau

SEQ ID NO: 351953 - RNA, 19 nt, Artificial Sequence
  Description of Artificial Sequence: Synthetic oligonucleotide
  Sense Strand Starting at position 423 of SEQ ID NO: 315907
gaucuugauugacugcuau

SEQ ID NO: 351954 - RNA, 19 nt, Artificial Sequence
  Description of Artificial Sequence: Synthetic oligonucleotide
  Antisense Strand to SEQ ID NO: 351953
auagcagucaaucaagauc

SEQ ID NO: 351955 - RNA, 19 nt, Artificial Sequence
  Description of Artificial Sequence: Synthetic oligonucleotide
  Sense Strand Starting at position 423 of SEQ ID NO: 316077
aacuguaaucagcacguua

SEQ ID NO: 351956 - RNA, 19 nt, Artificial Sequence
  Description of Artificial Sequence: Synthetic oligonucleotide
  Antisense Strand to SEQ ID NO: 351955
uaacgugcugauuacaguu

SEQ ID NO: 351957 - RNA, 19 nt, Artificial Sequence
  Description of Artificial Sequence: Synthetic oligonucleotide
  Sense Strand Starting at position 423 of SEQ ID NO: 316079
cuguaaucagcacguuaga

SEQ ID NO: 351958 - RNA, 19 nt, Artificial Sequence
  Description of Artificial Sequence: Synthetic oligonucleotide
  Antisense Strand to SEQ ID NO: 351957
ucuaacgugcugauuacag

SEQ ID NO: 351959 - RNA, 19 nt, Artificial Sequence
  Description of Artificial Sequence: Synthetic oligonucleotide
  Sense Strand Starting at position 423 of SEQ ID NO: 316082
uaaucagcacguuagauga

SEQ ID NO: 351960 - RNA, 19 nt, Artificial Sequence
  Description of Artificial Sequence: Synthetic oligonucleotide
  Antisense Strand to SEQ ID NO: 351959
ucaucuaacgugcugauua

SEQ ID NO: 351961 - RNA, 19 nt, Artificial Sequence
  Description of Artificial Sequence: Synthetic oligonucleotide
  Sense Strand Starting at position 423 of SEQ ID NO: 316172
aggacaaagcaguauguua

SEQ ID NO: 351962 - RNA, 19 nt, Artificial Sequence
  Description of Artificial Sequence: Synthetic oligonucleotide
  Antisense Strand to SEQ ID NO: 351961
uaacauacugcuuuguccu

SEQ ID NO: 351963 - RNA, 19 nt, Artificial Sequence
  Description of Artificial Sequence: Synthetic oligonucleotide
  Sense Strand Starting at position 423 of SEQ ID NO: 316225
ucuuguaagugagcaggau

SEQ ID NO: 351964 - RNA, 19 nt, Artificial Sequence
  Description of Artificial Sequence: Synthetic oligonucleotide
  Antisense Strand to SEQ ID NO: 351963
auccugcucacuuacaaga

SEQ ID NO: 351965 - RNA, 19 nt, Artificial Sequence
  Description of Artificial Sequence: Synthetic oligonucleotide
  Sense Strand Starting at position 423 of SEQ ID NO: 316352
ugagauaaacguggaguga

SEQ ID NO: 351966 - RNA, 19 nt, Artificial Sequence
  Description of Artificial Sequence: Synthetic oligonucleotide
  Antisense Strand to SEQ ID NO: 351965
ucacuccacguuuaucuca

SEQ ID NO: 351967 - RNA, 19 nt, Artificial Sequence
  Description of Artificial Sequence: Synthetic oligonucleotide
  Sense Strand Starting at position 423 of SEQ ID NO: 316413
uaagguggccgggauuauu

SEQ ID NO: 351968 - RNA, 19 nt, Artificial Sequence
  Description of Artificial Sequence: Synthetic oligonucleotide
  Antisense Strand to SEQ ID NO: 351967
aauaaucccggccaccuua

SEQ ID NO: 351969 - RNA, 19 nt, Artificial Sequence
  Description of Artificial Sequence: Synthetic oligonucleotide
  Sense Strand Starting at position 423 of SEQ ID NO: 316533
aguugaaugagugaggcaa

SEQ ID NO: 351970 - RNA, 19 nt, Artificial Sequence
  Description of Artificial Sequence: Synthetic oligonucleotide
  Antisense Strand to SEQ ID NO: 351969
uugccucacucauucaacu

SEQ ID NO: 351971 - RNA, 19 nt, Artificial Sequence
  Description of Artificial Sequence: Synthetic oligonucleotide
  Sense Strand Starting at position 423 of SEQ ID NO: 316552
acuaccuaguuguuugaaa

SEQ ID NO: 351972 - RNA, 19 nt, Artificial Sequence
  Description of Artificial Sequence: Synthetic oligonucleotide
  Antisense Strand to SEQ ID NO: 351971
uuucaaacaacuagguagu

SEQ ID NO: 351973 - RNA, 19 nt, Artificial Sequence
  Description of Artificial Sequence: Synthetic oligonucleotide
  Sense Strand Starting at position 423 of SEQ ID NO: 316694
cgaagcuucugacucagaa

SEQ ID NO: 351974 - RNA, 19 nt, Artificial Sequence
  Description of Artificial Sequence: Synthetic oligonucleotide
  Antisense Strand to SEQ ID NO: 351973
uucugagucagaagcuucg

SEQ ID NO: 351975 - RNA, 19 nt, Artificial Sequence
  Description of Artificial Sequence: Synthetic oligonucleotide
  Sense Strand Starting at position 423 of SEQ ID NO: 317523
ggcgggugagguuaucacu

SEQ ID NO: 351976 - RNA, 19 nt, Artificial Sequence
  Description of Artificial Sequence: Synthetic oligonucleotide
  Antisense Strand to SEQ ID NO: 351975
agugauaaccucacccgcc

SEQ ID NO: 351977 - RNA, 19 nt, Artificial Sequence
  Description of Artificial Sequence: Synthetic oligonucleotide
  Sense Strand Starting at position 423 of SEQ ID NO: 317735
agcucaacgcaugaaacuu

SEQ ID NO: 351978 - RNA, 19 nt, Artificial Sequence
  Description of Artificial Sequence: Synthetic oligonucleotide
  Antisense Strand to SEQ ID NO: 351977
aaguuucaugcguugagcu

SEQ ID NO: 351979 - RNA, 19 nt, Artificial Sequence
  Description of Artificial Sequence: Synthetic oligonucleotide
  Sense Strand Starting at position 423 of SEQ ID NO: 317838
ucucguucucccuaaguau

SEQ ID NO: 351980 - RNA, 19 nt, Artificial Sequence
  Description of Artificial Sequence: Synthetic oligonucleotide
  Antisense Strand to SEQ ID NO: 351979
auacuuagggagaacgaga

SEQ ID NO: 351981 - RNA, 19 nt, Artificial Sequence
  Description of Artificial Sequence: Synthetic oligonucleotide
  Sense Strand Starting at position 423 of SEQ ID NO: 317847
cccuaaguaucggcacuua

SEQ ID NO: 351982 - RNA, 19 nt, Artificial Sequence
  Description of Artificial Sequence: Synthetic oligonucleotide
  Antisense Strand to SEQ ID NO: 351981
uaagugccgauacuuaggg

SEQ ID NO: 351983 - RNA, 19 nt, Artificial Sequence
  Description of Artificial Sequence: Synthetic oligonucleotide
  Sense Strand Starting at position 423 of SEQ ID NO: 317878
cccugugugccuucgcaaa

SEQ ID NO: 351984 - RNA, 19 nt, Artificial Sequence
  Description of Artificial Sequence: Synthetic oligonucleotide
  Antisense Strand to SEQ ID NO: 351983
uuugcgaaggcacacaggg

SEQ ID NO: 351985 - RNA, 19 nt, Artificial Sequence
  Description of Artificial Sequence: Synthetic oligonucleotide
  Sense Strand Starting at position 423 of SEQ ID NO: 317940
gugccauuugagcgcuaau

SEQ ID NO: 351986 - RNA, 19 nt, Artificial Sequence
  Description of Artificial Sequence: Synthetic oligonucleotide
  Antisense Strand to SEQ ID NO: 351985
auuagcgcucaaauggcac

SEQ ID NO: 351987 - RNA, 19 nt, Artificial Sequence
  Description of Artificial Sequence: Synthetic oligonucleotide
  Sense Strand Starting at position 423 of SEQ ID NO: 317982
agauguggucuuuacugga

SEQ ID NO: 351988 - RNA, 19 nt, Artificial Sequence
  Description of Artificial Sequence: Synthetic oligonucleotide
  Antisense Strand to SEQ ID NO: 351987
uccaguaaagaccacaucu

SEQ ID NO: 351989 - RNA, 19 nt, Artificial Sequence
  Description of Artificial Sequence: Synthetic oligonucleotide
  Sense Strand Starting at position 423 of SEQ ID NO: 317986
guggucuuuacuggaucca

SEQ ID NO: 351990 - RNA, 19 nt, Artificial Sequence
  Description of Artificial Sequence: Synthetic oligonucleotide
  Antisense Strand to SEQ ID NO: 351989
uggauccaguaaagaccac

SEQ ID NO: 351991 - RNA, 19 nt, Artificial Sequence
  Description of Artificial Sequence: Synthetic oligonucleotide
  Sense Strand Starting at position 423 of SEQ ID NO: 318005
ccgcuuaguaagcagauga

SEQ ID NO: 351992 - RNA, 19 nt, Artificial Sequence
  Description of Artificial Sequence: Synthetic oligonucleotide
  Antisense Strand to SEQ ID NO: 351991
ucaucugcuuacuaagcgg

SEQ ID NO: 351993 - RNA, 19 nt, Artificial Sequence
  Description of Artificial Sequence: Synthetic oligonucleotide
  Sense Strand Starting at position 423 of SEQ ID NO: 318018
agaugaaggcaauguaguu

SEQ ID NO: 351994 - RNA, 19 nt, Artificial Sequence
  Description of Artificial Sequence: Synthetic oligonucleotide
  Antisense Strand to SEQ ID NO: 351993
aacuacauugccuucaucu

SEQ ID NO: 351995 - RNA, 19 nt, Artificial Sequence
  Description of Artificial Sequence: Synthetic oligonucleotide
  Sense Strand Starting at position 423 of SEQ ID NO: 318067
ugacguggaggcuauaauu

SEQ ID NO: 351996 - RNA, 19 nt, Artificial Sequence
  Description of Artificial Sequence: Synthetic oligonucleotide
  Antisense Strand to SEQ ID NO: 351995
aauuauagccuccacguca

SEQ ID NO: 351997 - RNA, 19 nt, Artificial Sequence
  Description of Artificial Sequence: Synthetic oligonucleotide
  Sense Strand Starting at position 423 of SEQ ID NO: 318403
uuuaaagcaugcuuaguaa

SEQ ID NO: 351998 - RNA, 19 nt, Artificial Sequence
  Description of Artificial Sequence: Synthetic oligonucleotide
  Antisense Strand to SEQ ID NO: 351997
uuacuaagcaugcuuuaaa

SEQ ID NO: 351999 - RNA, 19 nt, Artificial Sequence
  Description of Artificial Sequence: Synthetic oligonucleotide
  Sense Strand Starting at position 423 of SEQ ID NO: 318466
acuguauacuacgucauuu

SEQ ID NO: 352000 - RNA, 19 nt, Artificial Sequence
  Description of Artificial Sequence: Synthetic oligonucleotide
  Antisense Strand to SEQ ID NO: 351999
aaaugacguaguauacagu

SEQ ID NO: 352001 - RNA, 19 nt, Artificial Sequence
  Description of Artificial Sequence: Synthetic oligonucleotide
  Sense Strand Starting at position 423 of SEQ ID NO: 318475
uacgucauuuacgcagauu

SEQ ID NO: 352002 - RNA, 19 nt, Artificial Sequence
  Description of Artificial Sequence: Synthetic oligonucleotide
  Antisense Strand to SEQ ID NO: 352001
aaucugcguaaaugacgua

SEQ ID NO: 352003 - RNA, 19 nt, Artificial Sequence
  Description of Artificial Sequence: Synthetic oligonucleotide
  Sense Strand Starting at position 423 of SEQ ID NO: 318518
acuccaugagcugaguaau

SEQ ID NO: 352004 - RNA, 19 nt, Artificial Sequence
  Description of Artificial Sequence: Synthetic oligonucleotide
  Antisense Strand to SEQ ID NO: 352003
auuacucagcucauggagu

SEQ ID NO: 352005 - RNA, 19 nt, Artificial Sequence
  Description of Artificial Sequence: Synthetic oligonucleotide
  Sense Strand Starting at position 423 of SEQ ID NO: 318521
ccaugagcugaguaauuaa

SEQ ID NO: 352006 - RNA, 19 nt, Artificial Sequence
  Description of Artificial Sequence: Synthetic oligonucleotide
  Antisense Strand to SEQ ID NO: 352005
uuaauuacucagcucaugg

SEQ ID NO: 352007 - RNA, 19 nt, Artificial Sequence
  Description of Artificial Sequence: Synthetic oligonucleotide
  Sense Strand Starting at position 423 of SEQ ID NO: 318609
uucugaagcuucuugcuau

SEQ ID NO: 352008 - RNA, 19 nt, Artificial Sequence
  Description of Artificial Sequence: Synthetic oligonucleotide
  Antisense Strand to SEQ ID NO: 352007
auagcaagaagcuucagaa

SEQ ID NO: 352009 - RNA, 19 nt, Artificial Sequence
  Description of Artificial Sequence: Synthetic oligonucleotide
  Sense Strand Starting at position 423 of SEQ ID NO: 318615
agcuucuugcuauguauaa

SEQ ID NO: 352010 - RNA, 19 nt, Artificial Sequence
  Description of Artificial Sequence: Synthetic oligonucleotide
  Antisense Strand to SEQ ID NO: 352009
uuauacauagcaagaagcu

SEQ ID NO: 352011 - RNA, 19 nt, Artificial Sequence
  Description of Artificial Sequence: Synthetic oligonucleotide
  Sense Strand Starting at position 423 of SEQ ID NO: 318638
uuucuuagucucuaguaaa

SEQ ID NO: 352012 - RNA, 19 nt, Artificial Sequence
  Description of Artificial Sequence: Synthetic oligonucleotide
  Antisense Strand to SEQ ID NO: 352011
uuuacuagagacuaagaaa

SEQ ID NO: 352013 - RNA, 19 nt, Artificial Sequence
  Description of Artificial Sequence: Synthetic oligonucleotide
  Sense Strand Starting at position 423 of SEQ ID NO: 318695
caugguguuugauuauuau

SEQ ID NO: 352014 - RNA, 19 nt, Artificial Sequence
  Description of Artificial Sequence: Synthetic oligonucleotide
  Antisense Strand to SEQ ID NO: 352013
auaauaaucaaacaccaug

SEQ ID NO: 352015 - RNA, 19 nt, Artificial Sequence
  Description of Artificial Sequence: Synthetic oligonucleotide
  Sense Strand Starting at position 423 of SEQ ID NO: 318898
uggugacugucucucacua

SEQ ID NO: 352016 - RNA, 19 nt, Artificial Sequence
  Description of Artificial Sequence: Synthetic oligonucleotide
  Antisense Strand to SEQ ID NO: 352015
uagugagagacagucacca

SEQ ID NO: 352017 - RNA, 19 nt, Artificial Sequence
  Description of Artificial Sequence: Synthetic oligonucleotide
  Sense Strand Starting at position 423 of SEQ ID NO: 319037
agugcagaguguuuagaga

SEQ ID NO: 352018 - RNA, 19 nt, Artificial Sequence
  Description of Artificial Sequence: Synthetic oligonucleotide
  Antisense Strand to SEQ ID NO: 352017
ucucuaaacacucugcacu

SEQ ID NO: 352019 - RNA, 19 nt, Artificial Sequence
  Description of Artificial Sequence: Synthetic oligonucleotide
  Sense Strand Starting at position 423 of SEQ ID NO: 319066
uuuaaagacuggccuuuau

SEQ ID NO: 352020 - RNA, 19 nt, Artificial Sequence
  Description of Artificial Sequence: Synthetic oligonucleotide
  Antisense Strand to SEQ ID NO: 352019
auaaaggccagucuuuaaa

SEQ ID NO: 352021 - RNA, 19 nt, Artificial Sequence
  Description of Artificial Sequence: Synthetic oligonucleotide
  Sense Strand Starting at position 423 of SEQ ID NO: 319077
gccuuuaucgugucucagu

SEQ ID NO: 352022 - RNA, 19 nt, Artificial Sequence
  Description of Artificial Sequence: Synthetic oligonucleotide
  Antisense Strand to SEQ ID NO: 352021
acugagacacgauaaaggc

SEQ ID NO: 352023 - RNA, 19 nt, Artificial Sequence
  Description of Artificial Sequence: Synthetic oligonucleotide
  Sense Strand Starting at position 423 of SEQ ID NO: 319112
cuuugaaggaugcgauguu

SEQ ID NO: 352024 - RNA, 19 nt, Artificial Sequence
  Description of Artificial Sequence: Synthetic oligonucleotide
  Antisense Strand to SEQ ID NO: 352023
aacaucgcauccuucaaag

SEQ ID NO: 352025 - RNA, 19 nt, Artificial Sequence
  Description of Artificial Sequence: Synthetic oligonucleotide
  Sense Strand Starting at position 423 of SEQ ID NO: 319162
ggugacuuucaacggcaga

SEQ ID NO: 352026 - RNA, 19 nt, Artificial Sequence
  Description of Artificial Sequence: Synthetic oligonucleotide
  Antisense Strand to SEQ ID NO: 352025
ucugccguugaaagucacc

SEQ ID NO: 352027 - RNA, 19 nt, Artificial Sequence
  Description of Artificial Sequence: Synthetic oligonucleotide
  Sense Strand Starting at position 424 of SEQ ID NO: 315590
ggagauaucacauggcuau

SEQ ID NO: 352028 - RNA, 19 nt, Artificial Sequence
  Description of Artificial Sequence: Synthetic oligonucleotide
  Antisense Strand to SEQ ID NO: 352027
auagccaugugauaucucc

SEQ ID NO: 352029 - RNA, 19 nt, Artificial Sequence
  Description of Artificial Sequence: Synthetic oligonucleotide
  Sense Strand Starting at position 424 of SEQ ID NO: 315591
gagauaucacauggcuauc

SEQ ID NO: 352030 - RNA, 19 nt, Artificial Sequence
  Description of Artificial Sequence: Synthetic oligonucleotide
  Antisense Strand to SEQ ID NO: 352029
gauagccaugugauaucuc

SEQ ID NO: 352031 - RNA, 19 nt, Artificial Sequence
  Description of Artificial Sequence: Synthetic oligonucleotide
  Sense Strand Starting at position 424 of SEQ ID NO: 315992
acacuaacuuuccugugua

SEQ ID NO: 352032 - RNA, 19 nt, Artificial Sequence
  Description of Artificial Sequence: Synthetic oligonucleotide
  Antisense Strand to SEQ ID NO: 352031
uacacaggaaaguuagugu

SEQ ID NO: 352033 - RNA, 19 nt, Artificial Sequence
  Description of Artificial Sequence: Synthetic oligonucleotide
  Sense Strand Starting at position 424 of SEQ ID NO: 316002
uccuguguauaucucacaa

SEQ ID NO: 352034 - RNA, 19 nt, Artificial Sequence
  Description of Artificial Sequence: Synthetic oligonucleotide
  Antisense Strand to SEQ ID NO: 352033
uugugagauauacacagga

SEQ ID NO: 352035 - RNA, 19 nt, Artificial Sequence
  Description of Artificial Sequence: Synthetic oligonucleotide
  Sense Strand Starting at position 424 of SEQ ID NO: 316139
auuccaaugcuaugggaga

SEQ ID NO: 352036 - RNA, 19 nt, Artificial Sequence
  Description of Artificial Sequence: Synthetic oligonucleotide
  Antisense Strand to SEQ ID NO: 352035
ucucccauagcauuggaau

SEQ ID NO: 352037 - RNA, 19 nt, Artificial Sequence
  Description of Artificial Sequence: Synthetic oligonucleotide
  Sense Strand Starting at position 424 of SEQ ID NO: 316141
uccaaugcuaugggagaga

SEQ ID NO: 352038 - RNA, 19 nt, Artificial Sequence
  Description of Artificial Sequence: Synthetic oligonucleotide
  Antisense Strand to SEQ ID NO: 352037
ucucucccauagcauugga

SEQ ID NO: 352039 - RNA, 19 nt, Artificial Sequence
  Description of Artificial Sequence: Synthetic oligonucleotide
  Sense Strand Starting at position 424 of SEQ ID NO: 316189
aucagagagcaaggguaau

SEQ ID NO: 352040 - RNA, 19 nt, Artificial Sequence
  Description of Artificial Sequence: Synthetic oligonucleotide
  Antisense Strand to SEQ ID NO: 352039
auuacccuugcucucugau

SEQ ID NO: 352041 - RNA, 19 nt, Artificial Sequence
  Description of Artificial Sequence: Synthetic oligonucleotide
  Sense Strand Starting at position 424 of SEQ ID NO: 316200
aggguaauccucugcuauu

SEQ ID NO: 352042 - RNA, 19 nt, Artificial Sequence
  Description of Artificial Sequence: Synthetic oligonucleotide
  Antisense Strand to SEQ ID NO: 352041
aauagcagaggauuacccu

SEQ ID NO: 352043 - RNA, 19 nt, Artificial Sequence
  Description of Artificial Sequence: Synthetic oligonucleotide
  Sense Strand Starting at position 424 of SEQ ID NO: 316201
ggguaauccucugcuauua

SEQ ID NO: 352044 - RNA, 19 nt, Artificial Sequence
  Description of Artificial Sequence: Synthetic oligonucleotide
  Antisense Strand to SEQ ID NO: 352043
uaauagcagaggauuaccc

SEQ ID NO: 352045 - RNA, 19 nt, Artificial Sequence
  Description of Artificial Sequence: Synthetic oligonucleotide
  Sense Strand Starting at position 424 of SEQ ID NO: 316217
uuauuuguucugggagcug

SEQ ID NO: 352046 - RNA, 19 nt, Artificial Sequence
  Description of Artificial Sequence: Synthetic oligonucleotide
  Antisense Strand to SEQ ID NO: 352045
cagcucccagaacaaauaa

SEQ ID NO: 352047 - RNA, 19 nt, Artificial Sequence
  Description of Artificial Sequence: Synthetic oligonucleotide
  Sense Strand Starting at position 424 of SEQ ID NO: 316246
gguuaaucagaugggauuc

SEQ ID NO: 352048 - RNA, 19 nt, Artificial Sequence
  Description of Artificial Sequence: Synthetic oligonucleotide
  Antisense Strand to SEQ ID NO: 352047
gaaucccaucugauuaacc

SEQ ID NO: 352049 - RNA, 19 nt, Artificial Sequence
  Description of Artificial Sequence: Synthetic oligonucleotide
  Sense Strand Starting at position 424 of SEQ ID NO: 316298
aggaaaugguaacaacaga

SEQ ID NO: 352050 - RNA, 19 nt, Artificial Sequence
  Description of Artificial Sequence: Synthetic oligonucleotide
  Antisense Strand to SEQ ID NO: 352049
ucuguuguuaccauuuccu

SEQ ID NO: 352051 - RNA, 19 nt, Artificial Sequence
  Description of Artificial Sequence: Synthetic oligonucleotide
  Sense Strand Starting at position 424 of SEQ ID NO: 316314
agagaccuaucacugcuaa

SEQ ID NO: 352052 - RNA, 19 nt, Artificial Sequence
  Description of Artificial Sequence: Synthetic oligonucleotide
  Antisense Strand to SEQ ID NO: 352051
uuagcagugauaggucucu

SEQ ID NO: 352053 - RNA, 19 nt, Artificial Sequence
  Description of Artificial Sequence: Synthetic oligonucleotide
  Sense Strand Starting at position 424 of SEQ ID NO: 316342
uggguauucccaugaauuc

SEQ ID NO: 352054 - RNA, 19 nt, Artificial Sequence
  Description of Artificial Sequence: Synthetic oligonucleotide
  Antisense Strand to SEQ ID NO: 352053
gaauucaugggaauaccca

SEQ ID NO: 352055 - RNA, 19 nt, Artificial Sequence
  Description of Artificial Sequence: Synthetic oligonucleotide
  Sense Strand Starting at position 424 of SEQ ID NO: 316378
uuuccuagggcuugaaaug

SEQ ID NO: 352056 - RNA, 19 nt, Artificial Sequence
  Description of Artificial Sequence: Synthetic oligonucleotide
  Antisense Strand to SEQ ID NO: 352055
cauuucaagcccuaggaaa

SEQ ID NO: 352057 - RNA, 19 nt, Artificial Sequence
  Description of Artificial Sequence: Synthetic oligonucleotide
  Sense Strand Starting at position 424 of SEQ ID NO: 316410
cuguuuagucagcacaacu

SEQ ID NO: 352058 - RNA, 19 nt, Artificial Sequence
  Description of Artificial Sequence: Synthetic oligonucleotide
  Antisense Strand to SEQ ID NO: 352057
aguugugcugacuaaacag

SEQ ID NO: 352059 - RNA, 19 nt, Artificial Sequence
  Description of Artificial Sequence: Synthetic oligonucleotide
  Sense Strand Starting at position 424 of SEQ ID NO: 316420
agcacaacuccuggauauc

SEQ ID NO: 352060 - RNA, 19 nt, Artificial Sequence
  Description of Artificial Sequence: Synthetic oligonucleotide
  Antisense Strand to SEQ ID NO: 352059
gauauccaggaguugugcu

SEQ ID NO: 352061 - RNA, 19 nt, Artificial Sequence
  Description of Artificial Sequence: Synthetic oligonucleotide
  Sense Strand Starting at position 424 of SEQ ID NO: 316421
gcacaacuccuggauauca

SEQ ID NO: 352062 - RNA, 19 nt, Artificial Sequence
  Description of Artificial Sequence: Synthetic oligonucleotide
  Antisense Strand to SEQ ID NO: 352061
ugauauccaggaguugugc

SEQ ID NO: 352063 - RNA, 19 nt, Artificial Sequence
  Description of Artificial Sequence: Synthetic oligonucleotide
  Sense Strand Starting at position 424 of SEQ ID NO: 316468
aggcccucaguaugaagaa

SEQ ID NO: 352064 - RNA, 19 nt, Artificial Sequence
  Description of Artificial Sequence: Synthetic oligonucleotide
  Antisense Strand to SEQ ID NO: 352063
uucuucauacugagggccu

SEQ ID NO: 352065 - RNA, 19 nt, Artificial Sequence
  Description of Artificial Sequence: Synthetic oligonucleotide
  Sense Strand Starting at position 424 of SEQ ID NO: 316537
gcucaaacuggucgagaga

SEQ ID NO: 352066 - RNA, 19 nt, Artificial Sequence
  Description of Artificial Sequence: Synthetic oligonucleotide
  Antisense Strand to SEQ ID NO: 352065
ucucucgaccaguuugagc

SEQ ID NO: 352067 - RNA, 19 nt, Artificial Sequence
  Description of Artificial Sequence: Synthetic oligonucleotide
  Sense Strand Starting at position 424 of SEQ ID NO: 317023
uaggaaaugucaccgagug

SEQ ID NO: 352068 - RNA, 19 nt, Artificial Sequence
  Description of Artificial Sequence: Synthetic oligonucleotide
  Antisense Strand to SEQ ID NO: 352067
cacucggugacauuuccua

SEQ ID NO: 352069 - RNA, 19 nt, Artificial Sequence
  Description of Artificial Sequence: Synthetic oligonucleotide
  Sense Strand Starting at position 424 of SEQ ID NO: 317025
ggaaaugucaccgagugca

SEQ ID NO: 352070 - RNA, 19 nt, Artificial Sequence
  Description of Artificial Sequence: Synthetic oligonucleotide
  Antisense Strand to SEQ ID NO: 352069
ugcacucggugacauuucc

SEQ ID NO: 352071 - RNA, 19 nt, Artificial Sequence
  Description of Artificial Sequence: Synthetic oligonucleotide
  Sense Strand Starting at position 424 of SEQ ID NO: 317053
aucagaucugagugucucu

SEQ ID NO: 352072 - RNA, 19 nt, Artificial Sequence
  Description of Artificial Sequence: Synthetic oligonucleotide
  Antisense Strand to SEQ ID NO: 352071
agagacacucagaucugau

SEQ ID NO: 352073 - RNA, 19 nt, Artificial Sequence
  Description of Artificial Sequence: Synthetic oligonucleotide
  Sense Strand Starting at position 424 of SEQ ID NO: 317058
aucugagugucucuaugac

SEQ ID NO: 352074 - RNA, 19 nt, Artificial Sequence
  Description of Artificial Sequence: Synthetic oligonucleotide
  Antisense Strand to SEQ ID NO: 352073
gucauagagacacucagau

SEQ ID NO: 352075 - RNA, 19 nt, Artificial Sequence
  Description of Artificial Sequence: Synthetic oligonucleotide
  Sense Strand Starting at position 424 of SEQ ID NO: 317342
aguuacagaucucccaaga

SEQ ID NO: 352076 - RNA, 19 nt, Artificial Sequence
  Description of Artificial Sequence: Synthetic oligonucleotide
  Antisense Strand to SEQ ID NO: 352075
ucuugggagaucuguaacu

SEQ ID NO: 352077 - RNA, 19 nt, Artificial Sequence
  Description of Artificial Sequence: Synthetic oligonucleotide
  Sense Strand Starting at position 424 of SEQ ID NO: 317366
acaacucauucugggauuu

SEQ ID NO: 352078 - RNA, 19 nt, Artificial Sequence
  Description of Artificial Sequence: Synthetic oligonucleotide
  Antisense Strand to SEQ ID NO: 352077
aaaucccagaaugaguugu

SEQ ID NO: 352079 - RNA, 19 nt, Artificial Sequence
  Description of Artificial Sequence: Synthetic oligonucleotide
  Sense Strand Starting at position 424 of SEQ ID NO: 317384
uucuaaagaccgugucaua

SEQ ID NO: 352080 - RNA, 19 nt, Artificial Sequence
  Description of Artificial Sequence: Synthetic oligonucleotide
  Antisense Strand to SEQ ID NO: 352079
uaugacacggucuuuagaa

SEQ ID NO: 352081 - RNA, 19 nt, Artificial Sequence
  Description of Artificial Sequence: Synthetic oligonucleotide
  Sense Strand Starting at position 424 of SEQ ID NO: 317442
auucuaacccuugguguga

SEQ ID NO: 352082 - RNA, 19 nt, Artificial Sequence
  Description of Artificial Sequence: Synthetic oligonucleotide
  Antisense Strand to SEQ ID NO: 352081
ucacaccaaggguuagaau

SEQ ID NO: 352083 - RNA, 19 nt, Artificial Sequence
  Description of Artificial Sequence: Synthetic oligonucleotide
  Sense Strand Starting at position 424 of SEQ ID NO: 317443
uucuaacccuuggugugau

SEQ ID NO: 352084 - RNA, 19 nt, Artificial Sequence
  Description of Artificial Sequence: Synthetic oligonucleotide
  Antisense Strand to SEQ ID NO: 352083
aucacaccaaggguuagaa

SEQ ID NO: 352085 - RNA, 19 nt, Artificial Sequence
  Description of Artificial Sequence: Synthetic oligonucleotide
  Sense Strand Starting at position 424 of SEQ ID NO: 317817
ucccauuuaugauacagua

SEQ ID NO: 352086 - RNA, 19 nt, Artificial Sequence
  Description of Artificial Sequence: Synthetic oligonucleotide
  Antisense Strand to SEQ ID NO: 352085
uacuguaucauaaauggga

SEQ ID NO: 352087 - RNA, 19 nt, Artificial Sequence
  Description of Artificial Sequence: Synthetic oligonucleotide
  Sense Strand Starting at position 424 of SEQ ID NO: 318092
auagaaggcugagaaauaa

SEQ ID NO: 352088 - RNA, 19 nt, Artificial Sequence
  Description of Artificial Sequence: Synthetic oligonucleotide
  Antisense Strand to SEQ ID NO: 352087
uuauuucucagccuucuau

SEQ ID NO: 352089 - RNA, 19 nt, Artificial Sequence
  Description of Artificial Sequence: Synthetic oligonucleotide
  Sense Strand Starting at position 424 of SEQ ID NO: 318215
cuguaaguggacugagaca

SEQ ID NO: 352090 - RNA, 19 nt, Artificial Sequence
  Description of Artificial Sequence: Synthetic oligonucleotide
  Antisense Strand to SEQ ID NO: 352089
ugucucaguccacuuacag

SEQ ID NO: 352091 - RNA, 19 nt, Artificial Sequence
  Description of Artificial Sequence: Synthetic oligonucleotide
  Sense Strand Starting at position 424 of SEQ ID NO: 318228
gagacagaguaggaauaaa

SEQ ID NO: 352092 - RNA, 19 nt, Artificial Sequence
  Description of Artificial Sequence: Synthetic oligonucleotide
  Antisense Strand to SEQ ID NO: 352091
uuuauuccuacucugucuc

SEQ ID NO: 352093 - RNA, 19 nt, Artificial Sequence
  Description of Artificial Sequence: Synthetic oligonucleotide
  Sense Strand Starting at position 424 of SEQ ID NO: 318295
caaauugccgaaugaguga

SEQ ID NO: 352094 - RNA, 19 nt, Artificial Sequence
  Description of Artificial Sequence: Synthetic oligonucleotide
  Antisense Strand to SEQ ID NO: 352093
ucacucauucggcaauuug

SEQ ID NO: 352095 - RNA, 19 nt, Artificial Sequence
  Description of Artificial Sequence: Synthetic oligonucleotide
  Sense Strand Starting at position 424 of SEQ ID NO: 318829
gagagaaugguccggacau

SEQ ID NO: 352096 - RNA, 19 nt, Artificial Sequence
  Description of Artificial Sequence: Synthetic oligonucleotide
  Antisense Strand to SEQ ID NO: 352095
auguccggaccauucucuc

SEQ ID NO: 352097 - RNA, 19 nt, Artificial Sequence
  Description of Artificial Sequence: Synthetic oligonucleotide
  Sense Strand Starting at position 424 of SEQ ID NO: 318840
ccggacauugucuaggaga

SEQ ID NO: 352098 - RNA, 19 nt, Artificial Sequence
  Description of Artificial Sequence: Synthetic oligonucleotide
  Antisense Strand to SEQ ID NO: 352097
ucuccuagacaauguccgg

SEQ ID NO: 352099 - RNA, 19 nt, Artificial Sequence
  Description of Artificial Sequence: Synthetic oligonucleotide
  Sense Strand Starting at position 424 of SEQ ID NO: 319130
cucuuagauucugaauuug

SEQ ID NO: 352100 - RNA, 19 nt, Artificial Sequence
  Description of Artificial Sequence: Synthetic oligonucleotide
  Antisense Strand to SEQ ID NO: 352099
caaauucagaaucuaagag

SEQ ID NO: 352101 - RNA, 19 nt, Artificial Sequence
  Description of Artificial Sequence: Synthetic oligonucleotide
  Sense Strand Starting at position 424 of SEQ ID NO: 319138
uucugaauuugucuggcau

SEQ ID NO: 352102 - RNA, 19 nt, Artificial Sequence
  Description of Artificial Sequence: Synthetic oligonucleotide
  Antisense Strand to SEQ ID NO: 352101
augccagacaaauucagaa

SEQ ID NO: 352103 - RNA, 19 nt, Artificial Sequence
  Description of Artificial Sequence: Synthetic oligonucleotide
  Sense Strand Starting at position 424 of SEQ ID NO: 319139
ucugaauuugucuggcauc

SEQ ID NO: 352104 - RNA, 19 nt, Artificial Sequence
  Description of Artificial Sequence: Synthetic oligonucleotide
  Antisense Strand to SEQ ID NO: 352103
gaugccagacaaauucaga

SEQ ID NO: 352105 - RNA, 19 nt, Artificial Sequence
  Description of Artificial Sequence: Synthetic oligonucleotide
  Sense Strand Starting at position 424 of SEQ ID NO: 319216
uggcauuugugaucuugcu

SEQ ID NO: 352106 - RNA, 19 nt, Artificial Sequence
  Description of Artificial Sequence: Synthetic oligonucleotide
  Antisense Strand to SEQ ID NO: 352105
agcaagaucacaaaugcca

SEQ ID NO: 352107 - RNA, 19 nt, Artificial Sequence
  Description of Artificial Sequence: Synthetic oligonucleotide
  Sense Strand Starting at position 425 of SEQ ID NO: 315264
acugcaguugaugaucaaa

SEQ ID NO: 352108 - RNA, 19 nt, Artificial Sequence
  Description of Artificial Sequence: Synthetic oligonucleotide
  Antisense Strand to SEQ ID NO: 352107
uuugaucaucaacugcagu

SEQ ID NO: 352109 - RNA, 19 nt, Artificial Sequence
  Description of Artificial Sequence: Synthetic oligonucleotide
  Sense Strand Starting at position 425 of SEQ ID NO: 315285
guuuaaccuuucccuagga

SEQ ID NO: 352110 - RNA, 19 nt, Artificial Sequence
  Description of Artificial Sequence: Synthetic oligonucleotide
  Antisense Strand to SEQ ID NO: 352109
uccuagggaaagguuaaac

SEQ ID NO: 352111 - RNA, 19 nt, Artificial Sequence
  Description of Artificial Sequence: Synthetic oligonucleotide
  Sense Strand Starting at position 425 of SEQ ID NO: 315308
gcuagaauauguuuccaag

SEQ ID NO: 352112 - RNA, 19 nt, Artificial Sequence
  Description of Artificial Sequence: Synthetic oligonucleotide
  Antisense Strand to SEQ ID NO: 352111
cuuggaaacauauucuagc

SEQ ID NO: 352113 - RNA, 19 nt, Artificial Sequence
  Description of Artificial Sequence: Synthetic oligonucleotide
  Sense Strand Starting at position 425 of SEQ ID NO: 315340
ugugacuguguauaauuga

SEQ ID NO: 352114 - RNA, 19 nt, Artificial Sequence
  Description of Artificial Sequence: Synthetic oligonucleotide
  Antisense Strand to SEQ ID NO: 352113
ucaauuauacacagucaca

SEQ ID NO: 352115 - RNA, 19 nt, Artificial Sequence
  Description of Artificial Sequence: Synthetic oligonucleotide
  Sense Strand Starting at position 425 of SEQ ID NO: 315382
agaagugagguguaaccau

SEQ ID NO: 352116 - RNA, 19 nt, Artificial Sequence
  Description of Artificial Sequence: Synthetic oligonucleotide
  Antisense Strand to SEQ ID NO: 352115
augguuacaccucacuucu

SEQ ID NO: 352117 - RNA, 19 nt, Artificial Sequence
  Description of Artificial Sequence: Synthetic oligonucleotide
  Sense Strand Starting at position 425 of SEQ ID NO: 315534
guggaauaaacuugggucu

SEQ ID NO: 352118 - RNA, 19 nt, Artificial Sequence
  Description of Artificial Sequence: Synthetic oligonucleotide
  Antisense Strand to SEQ ID NO: 352117
agacccaaguuuauuccac

SEQ ID NO: 352119 - RNA, 19 nt, Artificial Sequence
  Description of Artificial Sequence: Synthetic oligonucleotide
  Sense Strand Starting at position 425 of SEQ ID NO: 315573
gcacccaucuaaucaggaa

SEQ ID NO: 352120 - RNA, 19 nt, Artificial Sequence
  Description of Artificial Sequence: Synthetic oligonucleotide
  Antisense Strand to SEQ ID NO: 352119
uuccugauuagaugggugc

SEQ ID NO: 352121 - RNA, 19 nt, Artificial Sequence
  Description of Artificial Sequence: Synthetic oligonucleotide
  Sense Strand Starting at position 425 of SEQ ID NO: 315605
cuuuacaugcgugagaaau

SEQ ID NO: 352122 - RNA, 19 nt, Artificial Sequence
  Description of Artificial Sequence: Synthetic oligonucleotide
  Antisense Strand to SEQ ID NO: 352121
auuucucacgcauguaaag

SEQ ID NO: 352123 - RNA, 19 nt, Artificial Sequence
  Description of Artificial Sequence: Synthetic oligonucleotide
  Sense Strand Starting at position 425 of SEQ ID NO: 315633
ucauguuagagugaguaua

SEQ ID NO: 352124 - RNA, 19 nt, Artificial Sequence
  Description of Artificial Sequence: Synthetic oligonucleotide
  Antisense Strand to SEQ ID NO: 352123
uauacucacucuaacauga

SEQ ID NO: 352125 - RNA, 19 nt, Artificial Sequence
  Description of Artificial Sequence: Synthetic oligonucleotide
  Sense Strand Starting at position 425 of SEQ ID NO: 315635
auguuagagugaguauaca

SEQ ID NO: 352126 - RNA, 19 nt, Artificial Sequence
  Description of Artificial Sequence: Synthetic oligonucleotide
  Antisense Strand to SEQ ID NO: 352125
uguauacucacucuaacau

SEQ ID NO: 352127 - RNA, 19 nt, Artificial Sequence
  Description of Artificial Sequence: Synthetic oligonucleotide
  Sense Strand Starting at position 425 of SEQ ID NO: 315749
accaauuggcuacaugauu

SEQ ID NO: 352128 - RNA, 19 nt, Artificial Sequence
  Description of Artificial Sequence: Synthetic oligonucleotide
  Antisense Strand to SEQ ID NO: 352127
aaucauguagccaauuggu

SEQ ID NO: 352129 - RNA, 19 nt, Artificial Sequence
  Description of Artificial Sequence: Synthetic oligonucleotide
  Sense Strand Starting at position 425 of SEQ ID NO: 315821
guacucacacuguaaaguu

SEQ ID NO: 352130 - RNA, 19 nt, Artificial Sequence
  Description of Artificial Sequence: Synthetic oligonucleotide
  Antisense Strand to SEQ ID NO: 352129
aacuuuacagugugaguac

SEQ ID NO: 352131 - RNA, 19 nt, Artificial Sequence
  Description of Artificial Sequence: Synthetic oligonucleotide
  Sense Strand Starting at position 425 of SEQ ID NO: 316041
ggcaucggaguuuauugaa

SEQ ID NO: 352132 - RNA, 19 nt, Artificial Sequence
  Description of Artificial Sequence: Synthetic oligonucleotide
  Antisense Strand to SEQ ID NO: 352131
uucaauaaacuccgaugcc

SEQ ID NO: 352133 - RNA, 19 nt, Artificial Sequence
  Description of Artificial Sequence: Synthetic oligonucleotide
  Sense Strand Starting at position 425 of SEQ ID NO: 316188
acggaaggucuuggaggua

SEQ ID NO: 352134 - RNA, 19 nt, Artificial Sequence
  Description of Artificial Sequence: Synthetic oligonucleotide
  Antisense Strand to SEQ ID NO: 352133
uaccuccaagaccuuccgu

SEQ ID NO: 352135 - RNA, 19 nt, Artificial Sequence
  Description of Artificial Sequence: Synthetic oligonucleotide
  Sense Strand Starting at position 425 of SEQ ID NO: 316294
uucugucuagagcauuaga

SEQ ID NO: 352136 - RNA, 19 nt, Artificial Sequence
  Description of Artificial Sequence: Synthetic oligonucleotide
  Antisense Strand to SEQ ID NO: 352135
ucuaaugcucuagacagaa

SEQ ID NO: 352137 - RNA, 19 nt, Artificial Sequence
  Description of Artificial Sequence: Synthetic oligonucleotide
  Sense Strand Starting at position 425 of SEQ ID NO: 316297
ugucuagagcauuagaaua

SEQ ID NO: 352138 - RNA, 19 nt, Artificial Sequence
  Description of Artificial Sequence: Synthetic oligonucleotide
  Antisense Strand to SEQ ID NO: 352137
uauucuaaugcucuagaca

SEQ ID NO: 352139 - RNA, 19 nt, Artificial Sequence
  Description of Artificial Sequence: Synthetic oligonucleotide
  Sense Strand Starting at position 425 of SEQ ID NO: 316711
agaguaggaucacuguuaa

SEQ ID NO: 352140 - RNA, 19 nt, Artificial Sequence
  Description of Artificial Sequence: Synthetic oligonucleotide
  Antisense Strand to SEQ ID NO: 352139
uuaacagugauccuacucu

SEQ ID NO: 352141 - RNA, 19 nt, Artificial Sequence
  Description of Artificial Sequence: Synthetic oligonucleotide
  Sense Strand Starting at position 425 of SEQ ID NO: 316903
cuacuugcccgucuguauu

SEQ ID NO: 352142 - RNA, 19 nt, Artificial Sequence
  Description of Artificial Sequence: Synthetic oligonucleotide
  Antisense Strand to SEQ ID NO: 352141
aauacagacgggcaaguag

SEQ ID NO: 352143 - RNA, 19 nt, Artificial Sequence
  Description of Artificial Sequence: Synthetic oligonucleotide
  Sense Strand Starting at position 425 of SEQ ID NO: 317285
aagucaguacuuuggauag

SEQ ID NO: 352144 - RNA, 19 nt, Artificial Sequence
  Description of Artificial Sequence: Synthetic oligonucleotide
  Antisense Strand to SEQ ID NO: 352143
cuauccaaaguacugacuu

SEQ ID NO: 352145 - RNA, 19 nt, Artificial Sequence
  Description of Artificial Sequence: Synthetic oligonucleotide
  Sense Strand Starting at position 425 of SEQ ID NO: 317289
caguacuuuggauagcauu

SEQ ID NO: 352146 - RNA, 19 nt, Artificial Sequence
  Description of Artificial Sequence: Synthetic oligonucleotide
  Antisense Strand to SEQ ID NO: 352145
aaugcuauccaaaguacug

SEQ ID NO: 352147 - RNA, 19 nt, Artificial Sequence
  Description of Artificial Sequence: Synthetic oligonucleotide
  Sense Strand Starting at position 425 of SEQ ID NO: 317322
accuuagacccuugagcaa

SEQ ID NO: 352148 - RNA, 19 nt, Artificial Sequence
  Description of Artificial Sequence: Synthetic oligonucleotide
  Antisense Strand to SEQ ID NO: 352147
uugcucaagggucuaaggu

SEQ ID NO: 352149 - RNA, 19 nt, Artificial Sequence
  Description of Artificial Sequence: Synthetic oligonucleotide
  Sense Strand Starting at position 425 of SEQ ID NO: 317378
ucccaacuguuuccugaga

SEQ ID NO: 352150 - RNA, 19 nt, Artificial Sequence
  Description of Artificial Sequence: Synthetic oligonucleotide
  Antisense Strand to SEQ ID NO: 352149
ucucaggaaacaguuggga

SEQ ID NO: 352151 - RNA, 19 nt, Artificial Sequence
  Description of Artificial Sequence: Synthetic oligonucleotide
  Sense Strand Starting at position 425 of SEQ ID NO: 317379
cccaacuguuuccugagaa

SEQ ID NO: 352152 - RNA, 19 nt, Artificial Sequence
  Description of Artificial Sequence: Synthetic oligonucleotide
  Antisense Strand to SEQ ID NO: 352151
uucucaggaaacaguuggg

SEQ ID NO: 352153 - RNA, 19 nt, Artificial Sequence
  Description of Artificial Sequence: Synthetic oligonucleotide
  Sense Strand Starting at position 425 of SEQ ID NO: 317415
aggcucuuaugauuagauu

SEQ ID NO: 352154 - RNA, 19 nt, Artificial Sequence
  Description of Artificial Sequence: Synthetic oligonucleotide
  Antisense Strand to SEQ ID NO: 352153
aaucuaaucauaagagccu

SEQ ID NO: 352155 - RNA, 19 nt, Artificial Sequence
  Description of Artificial Sequence: Synthetic oligonucleotide
  Sense Strand Starting at position 425 of SEQ ID NO: 317416
ggcucuuaugauuagauuc

SEQ ID NO: 352156 - RNA, 19 nt, Artificial Sequence
  Description of Artificial Sequence: Synthetic oligonucleotide
  Antisense Strand to SEQ ID NO: 352155
gaaucuaaucauaagagcc

SEQ ID NO: 352157 - RNA, 19 nt, Artificial Sequence
  Description of Artificial Sequence: Synthetic oligonucleotide
  Sense Strand Starting at position 425 of SEQ ID NO: 317605
uuguuagaucagggaggua

SEQ ID NO: 352158 - RNA, 19 nt, Artificial Sequence
  Description of Artificial Sequence: Synthetic oligonucleotide
  Antisense Strand to SEQ ID NO: 352157
uaccucccugaucuaacaa

SEQ ID NO: 352159 - RNA, 19 nt, Artificial Sequence
  Description of Artificial Sequence: Synthetic oligonucleotide
  Sense Strand Starting at position 425 of SEQ ID NO: 317810
ugcauauguauggaagcaa

SEQ ID NO: 352160 - RNA, 19 nt, Artificial Sequence
  Description of Artificial Sequence: Synthetic oligonucleotide
  Antisense Strand to SEQ ID NO: 352159
uugcuuccauacauaugca

SEQ ID NO: 352161 - RNA, 19 nt, Artificial Sequence
  Description of Artificial Sequence: Synthetic oligonucleotide
  Sense Strand Starting at position 425 of SEQ ID NO: 317822
gaagcaagcucauuaagag

SEQ ID NO: 352162 - RNA, 19 nt, Artificial Sequence
  Description of Artificial Sequence: Synthetic oligonucleotide
  Antisense Strand to SEQ ID NO: 352161
cucuuaaugagcuugcuuc

SEQ ID NO: 352163 - RNA, 19 nt, Artificial Sequence
  Description of Artificial Sequence: Synthetic oligonucleotide
  Sense Strand Starting at position 425 of SEQ ID NO: 317938
uuuagcuucuauuugugau

SEQ ID NO: 352164 - RNA, 19 nt, Artificial Sequence
  Description of Artificial Sequence: Synthetic oligonucleotide
  Antisense Strand to SEQ ID NO: 352163
aucacaaauagaagcuaaa

SEQ ID NO: 352165 - RNA, 19 nt, Artificial Sequence
  Description of Artificial Sequence: Synthetic oligonucleotide
  Sense Strand Starting at position 425 of SEQ ID NO: 318040
guaguuugucaugagagaa

SEQ ID NO: 352166 - RNA, 19 nt, Artificial Sequence
  Description of Artificial Sequence: Synthetic oligonucleotide
  Antisense Strand to SEQ ID NO: 352165
uucucucaugacaaacuac

SEQ ID NO: 352167 - RNA, 19 nt, Artificial Sequence
  Description of Artificial Sequence: Synthetic oligonucleotide
  Sense Strand Starting at position 425 of SEQ ID NO: 318092
gguuaucaugaagggcauu

SEQ ID NO: 352168 - RNA, 19 nt, Artificial Sequence
  Description of Artificial Sequence: Synthetic oligonucleotide
  Antisense Strand to SEQ ID NO: 352167
aaugcccuucaugauaacc

SEQ ID NO: 352169 - RNA, 19 nt, Artificial Sequence
  Description of Artificial Sequence: Synthetic oligonucleotide
  Sense Strand Starting at position 425 of SEQ ID NO: 318242
gugugcuugcugguacaca

SEQ ID NO: 352170 - RNA, 19 nt, Artificial Sequence
  Description of Artificial Sequence: Synthetic oligonucleotide
  Antisense Strand to SEQ ID NO: 352169
uguguaccagcaagcacac

SEQ ID NO: 352171 - RNA, 19 nt, Artificial Sequence
  Description of Artificial Sequence: Synthetic oligonucleotide
  Sense Strand Starting at position 425 of SEQ ID NO: 318271
uuguguaaugcugagagga

SEQ ID NO: 352172 - RNA, 19 nt, Artificial Sequence
  Description of Artificial Sequence: Synthetic oligonucleotide
  Antisense Strand to SEQ ID NO: 352171
uccucucagcauuacacaa

SEQ ID NO: 352173 - RNA, 19 nt, Artificial Sequence
  Description of Artificial Sequence: Synthetic oligonucleotide
  Sense Strand Starting at position 425 of SEQ ID NO: 318281
cugagaggauuauccuauc

SEQ ID NO: 352174 - RNA, 19 nt, Artificial Sequence
  Description of Artificial Sequence: Synthetic oligonucleotide
  Antisense Strand to SEQ ID NO: 352173
gauaggauaauccucucag

SEQ ID NO: 352175 - RNA, 19 nt, Artificial Sequence
  Description of Artificial Sequence: Synthetic oligonucleotide
  Sense Strand Starting at position 425 of SEQ ID NO: 318287
ggauuauccuauccugaug

SEQ ID NO: 352176 - RNA, 19 nt, Artificial Sequence
  Description of Artificial Sequence: Synthetic oligonucleotide
  Antisense Strand to SEQ ID NO: 352175
caucaggauaggauaaucc

SEQ ID NO: 352177 - RNA, 19 nt, Artificial Sequence
  Description of Artificial Sequence: Synthetic oligonucleotide
  Sense Strand Starting at position 425 of SEQ ID NO: 318326
ggaauaugccauuaucuug

SEQ ID NO: 352178 - RNA, 19 nt, Artificial Sequence
  Description of Artificial Sequence: Synthetic oligonucleotide
  Antisense Strand to SEQ ID NO: 352177
caagauaauggcauauucc

SEQ ID NO: 352179 - RNA, 19 nt, Artificial Sequence
  Description of Artificial Sequence: Synthetic oligonucleotide
  Sense Strand Starting at position 425 of SEQ ID NO: 318332
ugccauuaucuugaaagug

SEQ ID NO: 352180 - RNA, 19 nt, Artificial Sequence
  Description of Artificial Sequence: Synthetic oligonucleotide
  Antisense Strand to SEQ ID NO: 352179
cacuuucaagauaauggca

SEQ ID NO: 352181 - RNA, 19 nt, Artificial Sequence
  Description of Artificial Sequence: Synthetic oligonucleotide
  Sense Strand Starting at position 425 of SEQ ID NO: 318344
gaaagugaguuccugauaa

SEQ ID NO: 352182 - RNA, 19 nt, Artificial Sequence
  Description of Artificial Sequence: Synthetic oligonucleotide
  Antisense Strand to SEQ ID NO: 352181
uuaucaggaacucacuuuc

SEQ ID NO: 352183 - RNA, 19 nt, Artificial Sequence
  Description of Artificial Sequence: Synthetic oligonucleotide
  Sense Strand Starting at position 425 of SEQ ID NO: 318435
gaaggcucucagcagguau

SEQ ID NO: 352184 - RNA, 19 nt, Artificial Sequence
  Description of Artificial Sequence: Synthetic oligonucleotide
  Antisense Strand to SEQ ID NO: 352183
auaccugcugagagccuuc

SEQ ID NO: 352185 - RNA, 19 nt, Artificial Sequence
  Description of Artificial Sequence: Synthetic oligonucleotide
  Sense Strand Starting at position 425 of SEQ ID NO: 318891
aggccaugagugcaacuaa

SEQ ID NO: 352186 - RNA, 19 nt, Artificial Sequence
  Description of Artificial Sequence: Synthetic oligonucleotide
  Antisense Strand to SEQ ID NO: 352185
uuaguugcacucauggccu

SEQ ID NO: 352187 - RNA, 19 nt, Artificial Sequence
  Description of Artificial Sequence: Synthetic oligonucleotide
  Sense Strand Starting at position 426 of SEQ ID NO: 315363
ugagauuauagugagcguu

SEQ ID NO: 352188 - RNA, 19 nt, Artificial Sequence
  Description of Artificial Sequence: Synthetic oligonucleotide
  Antisense Strand to SEQ ID NO: 352187
aacgcucacuauaaucuca

SEQ ID NO: 352189 - RNA, 19 nt, Artificial Sequence
  Description of Artificial Sequence: Synthetic oligonucleotide
  Sense Strand Starting at position 426 of SEQ ID NO: 315365
agauuauagugagcguuaa

SEQ ID NO: 352190 - RNA, 19 nt, Artificial Sequence
  Description of Artificial Sequence: Synthetic oligonucleotide
  Antisense Strand to SEQ ID NO: 352189
uuaacgcucacuauaaucu

SEQ ID NO: 352191 - RNA, 19 nt, Artificial Sequence
  Description of Artificial Sequence: Synthetic oligonucleotide
  Sense Strand Starting at position 426 of SEQ ID NO: 315366
gauuauagugagcguuaaa

SEQ ID NO: 352192 - RNA, 19 nt, Artificial Sequence
  Description of Artificial Sequence: Synthetic oligonucleotide
  Antisense Strand to SEQ ID NO: 352191
uuuaacgcucacuauaauc

SEQ ID NO: 352193 - RNA, 19 nt, Artificial Sequence
  Description of Artificial Sequence: Synthetic oligonucleotide
  Sense Strand Starting at position 426 of SEQ ID NO: 315369
uauagugagcguuaaacac

SEQ ID NO: 352194 - RNA, 19 nt, Artificial Sequence
  Description of Artificial Sequence: Synthetic oligonucleotide
  Antisense Strand to SEQ ID NO: 352193
guguuuaacgcucacuaua

SEQ ID NO: 352195 - RNA, 19 nt, Artificial Sequence
  Description of Artificial Sequence: Synthetic oligonucleotide
  Sense Strand Starting at position 426 of SEQ ID NO: 315377
gcguuaaacaccuauggaa

SEQ ID NO: 352196 - RNA, 19 nt, Artificial Sequence
  Description of Artificial Sequence: Synthetic oligonucleotide
  Antisense Strand to SEQ ID NO: 352195
uuccauagguguuuaacgc

SEQ ID NO: 352197 - RNA, 19 nt, Artificial Sequence
  Description of Artificial Sequence: Synthetic oligonucleotide
  Sense Strand Starting at position 426 of SEQ ID NO: 315613
caguuuggguagucaacua

SEQ ID NO: 352198 - RNA, 19 nt, Artificial Sequence
  Description of Artificial Sequence: Synthetic oligonucleotide
  Antisense Strand to SEQ ID NO: 352197
uaguugacuacccaaacug

SEQ ID NO: 352199 - RNA, 19 nt, Artificial Sequence
  Description of Artificial Sequence: Synthetic oligonucleotide
  Sense Strand Starting at position 426 of SEQ ID NO: 315941
ggcguucuccagcagaaag

SEQ ID NO: 352200 - RNA, 19 nt, Artificial Sequence
  Description of Artificial Sequence: Synthetic oligonucleotide
  Antisense Strand to SEQ ID NO: 352199
cuuucugcuggagaacgcc

SEQ ID NO: 352201 - RNA, 19 nt, Artificial Sequence
  Description of Artificial Sequence: Synthetic oligonucleotide
  Sense Strand Starting at position 426 of SEQ ID NO: 316305
cagagcuccgaguaacuga

SEQ ID NO: 352202 - RNA, 19 nt, Artificial Sequence
  Description of Artificial Sequence: Synthetic oligonucleotide
  Antisense Strand to SEQ ID NO: 352201
ucaguuacucggagcucug

SEQ ID NO: 352203 - RNA, 19 nt, Artificial Sequence
  Description of Artificial Sequence: Synthetic oligonucleotide
  Sense Strand Starting at position 426 of SEQ ID NO: 316481
caugaugcgcucgauggaa

SEQ ID NO: 352204 - RNA, 19 nt, Artificial Sequence
  Description of Artificial Sequence: Synthetic oligonucleotide
  Antisense Strand to SEQ ID NO: 352203
uuccaucgagcgcaucaug

SEQ ID NO: 352205 - RNA, 19 nt, Artificial Sequence
  Description of Artificial Sequence: Synthetic oligonucleotide
  Sense Strand Starting at position 426 of SEQ ID NO: 317129
gucacuugaaguggaauga

SEQ ID NO: 352206 - RNA, 19 nt, Artificial Sequence
  Description of Artificial Sequence: Synthetic oligonucleotide
  Antisense Strand to SEQ ID NO: 352205
ucauuccacuucaagugac

SEQ ID NO: 352207 - RNA, 19 nt, Artificial Sequence
  Description of Artificial Sequence: Synthetic oligonucleotide
  Sense Strand Starting at position 426 of SEQ ID NO: 317275
gcgguuugcgaauagggaa

SEQ ID NO: 352208 - RNA, 19 nt, Artificial Sequence
  Description of Artificial Sequence: Synthetic oligonucleotide
  Antisense Strand to SEQ ID NO: 352207
uucccuauucgcaaaccgc

SEQ ID NO: 352209 - RNA, 19 nt, Artificial Sequence
  Description of Artificial Sequence: Synthetic oligonucleotide
  Sense Strand Starting at position 426 of SEQ ID NO: 317319
gggaggaaucgugaugguu

SEQ ID NO: 352210 - RNA, 19 nt, Artificial Sequence
  Description of Artificial Sequence: Synthetic oligonucleotide
  Antisense Strand to SEQ ID NO: 352209
aaccaucacgauuccuccc

SEQ ID NO: 352211 - RNA, 19 nt, Artificial Sequence
  Description of Artificial Sequence: Synthetic oligonucleotide
  Sense Strand Starting at position 426 of SEQ ID NO: 317384
gcagaguuccgugcgugau

SEQ ID NO: 352212 - RNA, 19 nt, Artificial Sequence
  Description of Artificial Sequence: Synthetic oligonucleotide
  Antisense Strand to SEQ ID NO: 352211
aucacgcacggaacucugc

SEQ ID NO: 352213 - RNA, 19 nt, Artificial Sequence
  Description of Artificial Sequence: Synthetic oligonucleotide
  Sense Strand Starting at position 426 of SEQ ID NO: 317490
agucuaguagccgaaguau

SEQ ID NO: 352214 - RNA, 19 nt, Artificial Sequence
  Description of Artificial Sequence: Synthetic oligonucleotide
  Antisense Strand to SEQ ID NO: 352213
auacuucggcuacuagacu

SEQ ID NO: 352215 - RNA, 19 nt, Artificial Sequence
  Description of Artificial Sequence: Synthetic oligonucleotide
  Sense Strand Starting at position 426 of SEQ ID NO: 317501
cgaaguaucccuuagcccu

SEQ ID NO: 352216 - RNA, 19 nt, Artificial Sequence
  Description of Artificial Sequence: Synthetic oligonucleotide
  Antisense Strand to SEQ ID NO: 352215
agggcuaagggauacuucg

SEQ ID NO: 352217 - RNA, 19 nt, Artificial Sequence
  Description of Artificial Sequence: Synthetic oligonucleotide
  Sense Strand Starting at position 426 of SEQ ID NO: 317911
guugauuuaugaucggguu

SEQ ID NO: 352218 - RNA, 19 nt, Artificial Sequence
  Description of Artificial Sequence: Synthetic oligonucleotide
  Antisense Strand to SEQ ID NO: 352217
aacccgaucauaaaucaac

SEQ ID NO: 352219 - RNA, 19 nt, Artificial Sequence
  Description of Artificial Sequence: Synthetic oligonucleotide
  Sense Strand Starting at position 426 of SEQ ID NO: 317942
ccgaguucugcuucugguu

SEQ ID NO: 352220 - RNA, 19 nt, Artificial Sequence
  Description of Artificial Sequence: Synthetic oligonucleotide
  Antisense Strand to SEQ ID NO: 352219
aaccagaagcagaacucgg

SEQ ID NO: 352221 - RNA, 19 nt, Artificial Sequence
  Description of Artificial Sequence: Synthetic oligonucleotide
  Sense Strand Starting at position 426 of SEQ ID NO: 317943
cgaguucugcuucugguuu

SEQ ID NO: 352222 - RNA, 19 nt, Artificial Sequence
  Description of Artificial Sequence: Synthetic oligonucleotide
  Antisense Strand to SEQ ID NO: 352221
aaaccagaagcagaacucg

SEQ ID NO: 352223 - RNA, 19 nt, Artificial Sequence
  Description of Artificial Sequence: Synthetic oligonucleotide
  Sense Strand Starting at position 426 of SEQ ID NO: 318017
cuguuuguauaauugagaa

SEQ ID NO: 352224 - RNA, 19 nt, Artificial Sequence
  Description of Artificial Sequence: Synthetic oligonucleotide
  Antisense Strand to SEQ ID NO: 352223
uucucaauuauacaaacag

SEQ ID NO: 352225 - RNA, 19 nt, Artificial Sequence
  Description of Artificial Sequence: Synthetic oligonucleotide
  Sense Strand Starting at position 426 of SEQ ID NO: 318243
gaaggauuaucagagagga

SEQ ID NO: 352226 - RNA, 19 nt, Artificial Sequence
  Description of Artificial Sequence: Synthetic oligonucleotide
  Antisense Strand to SEQ ID NO: 352225
uccucucugauaauccuuc

SEQ ID NO: 352227 - RNA, 19 nt, Artificial Sequence
  Description of Artificial Sequence: Synthetic oligonucleotide
  Sense Strand Starting at position 426 of SEQ ID NO: 318356
guaaguucggaggaauuca

SEQ ID NO: 352228 - RNA, 19 nt, Artificial Sequence
  Description of Artificial Sequence: Synthetic oligonucleotide
  Antisense Strand to SEQ ID NO: 352227
ugaauuccuccgaacuuac

SEQ ID NO: 352229 - RNA, 19 nt, Artificial Sequence
  Description of Artificial Sequence: Synthetic oligonucleotide
  Sense Strand Starting at position 426 of SEQ ID NO: 318511
ggugcucuuggcgacaaca

SEQ ID NO: 352230 - RNA, 19 nt, Artificial Sequence
  Description of Artificial Sequence: Synthetic oligonucleotide
  Antisense Strand to SEQ ID NO: 352229
uguugucgccaagagcacc

SEQ ID NO: 352231 - RNA, 19 nt, Artificial Sequence
  Description of Artificial Sequence: Synthetic oligonucleotide
  Sense Strand Starting at position 426 of SEQ ID NO: 318513
ugcucuuggcgacaacaaa

SEQ ID NO: 352232 - RNA, 19 nt, Artificial Sequence
  Description of Artificial Sequence: Synthetic oligonucleotide
  Antisense Strand to SEQ ID NO: 352231
uuuguugucgccaagagca

SEQ ID NO: 352233 - RNA, 19 nt, Artificial Sequence
  Description of Artificial Sequence: Synthetic oligonucleotide
  Sense Strand Starting at position 426 of SEQ ID NO: 318541
ggcugaggguucuuacgga

SEQ ID NO: 352234 - RNA, 19 nt, Artificial Sequence
  Description of Artificial Sequence: Synthetic oligonucleotide
  Antisense Strand to SEQ ID NO: 352233
uccguaagaacccucagcc

SEQ ID NO: 352235 - RNA, 19 nt, Artificial Sequence
  Description of Artificial Sequence: Synthetic oligonucleotide
  Sense Strand Starting at position 426 of SEQ ID NO: 318582
gagagcgagcgagagaauu

SEQ ID NO: 352236 - RNA, 19 nt, Artificial Sequence
  Description of Artificial Sequence: Synthetic oligonucleotide
  Antisense Strand to SEQ ID NO: 352235
aauucucucgcucgcucuc

SEQ ID NO: 352237 - RNA, 19 nt, Artificial Sequence
  Description of Artificial Sequence: Synthetic oligonucleotide
  Sense Strand Starting at position 426 of SEQ ID NO: 318588
gagcgagagaauuagguuu

SEQ ID NO: 352238 - RNA, 19 nt, Artificial Sequence
  Description of Artificial Sequence: Synthetic oligonucleotide
  Antisense Strand to SEQ ID NO: 352237
aaaccuaauucucucgcuc

SEQ ID NO: 352239 - RNA, 19 nt, Artificial Sequence
  Description of Artificial Sequence: Synthetic oligonucleotide
  Sense Strand Starting at position 426 of SEQ ID NO: 318668
ggacaauuauaucuugcua

SEQ ID NO: 352240 - RNA, 19 nt, Artificial Sequence
  Description of Artificial Sequence: Synthetic oligonucleotide
  Antisense Strand to SEQ ID NO: 352239
uagcaagauauaauugucc

SEQ ID NO: 352241 - RNA, 19 nt, Artificial Sequence
  Description of Artificial Sequence: Synthetic oligonucleotide
  Sense Strand Starting at position 426 of SEQ ID NO: 318708
agcuuuguagccgcaauca

SEQ ID NO: 352242 - RNA, 19 nt, Artificial Sequence
  Description of Artificial Sequence: Synthetic oligonucleotide
  Antisense Strand to SEQ ID NO: 352241
ugauugcggcuacaaagcu

SEQ ID NO: 352243 - RNA, 19 nt, Artificial Sequence
  Description of Artificial Sequence: Synthetic oligonucleotide
  Sense Strand Starting at position 426 of SEQ ID NO: 318734
agaggauuaccguggauau

SEQ ID NO: 352244 - RNA, 19 nt, Artificial Sequence
  Description of Artificial Sequence: Synthetic oligonucleotide
  Antisense Strand to SEQ ID NO: 352243
auauccacgguaauccucu

SEQ ID NO: 352245 - RNA, 19 nt, Artificial Sequence
  Description of Artificial Sequence: Synthetic oligonucleotide
  Sense Strand Starting at position 426 of SEQ ID NO: 318735
gaggauuaccguggauaua

SEQ ID NO: 352246 - RNA, 19 nt, Artificial Sequence
  Description of Artificial Sequence: Synthetic oligonucleotide
  Antisense Strand to SEQ ID NO: 352245
uauauccacgguaauccuc

SEQ ID NO: 352247 - RNA, 19 nt, Artificial Sequence
  Description of Artificial Sequence: Synthetic oligonucleotide
  Sense Strand Starting at position 426 of SEQ ID NO: 318745
guggauauaauaugagcaa

SEQ ID NO: 352248 - RNA, 19 nt, Artificial Sequence
  Description of Artificial Sequence: Synthetic oligonucleotide
  Antisense Strand to SEQ ID NO: 352247
uugcucauauuauauccac

SEQ ID NO: 352249 - RNA, 19 nt, Artificial Sequence
  Description of Artificial Sequence: Synthetic oligonucleotide
  Sense Strand Starting at position 426 of SEQ ID NO: 318833
agguaaacccucuguuucu

SEQ ID NO: 352250 - RNA, 19 nt, Artificial Sequence
  Description of Artificial Sequence: Synthetic oligonucleotide
  Antisense Strand to SEQ ID NO: 352249
agaaacagaggguuuaccu

SEQ ID NO: 352251 - RNA, 19 nt, Artificial Sequence
  Description of Artificial Sequence: Synthetic oligonucleotide
  Sense Strand Starting at position 426 of SEQ ID NO: 318834
gguaaacccucuguuucuu

SEQ ID NO: 352252 - RNA, 19 nt, Artificial Sequence
  Description of Artificial Sequence: Synthetic oligonucleotide
  Antisense Strand to SEQ ID NO: 352251
aagaaacagaggguuuacc

SEQ ID NO: 352253 - RNA, 19 nt, Artificial Sequence
  Description of Artificial Sequence: Synthetic oligonucleotide
  Sense Strand Starting at position 426 of SEQ ID NO: 318867
ucuugagagggcugaguau

SEQ ID NO: 352254 - RNA, 19 nt, Artificial Sequence
  Description of Artificial Sequence: Synthetic oligonucleotide
  Antisense Strand to SEQ ID NO: 352253
auacucagcccucucaaga

SEQ ID NO: 352255 - RNA, 19 nt, Artificial Sequence
  Description of Artificial Sequence: Synthetic oligonucleotide
  Sense Strand Starting at position 426 of SEQ ID NO: 318908
ugcgaaacaucccuggaga

SEQ ID NO: 352256 - RNA, 19 nt, Artificial Sequence
  Description of Artificial Sequence: Synthetic oligonucleotide
  Antisense Strand to SEQ ID NO: 352255
ucuccagggauguuucgca

SEQ ID NO: 352257 - RNA, 19 nt, Artificial Sequence
  Description of Artificial Sequence: Synthetic oligonucleotide
  Sense Strand Starting at position 426 of SEQ ID NO: 318909
gcgaaacaucccuggagaa

SEQ ID NO: 352258 - RNA, 19 nt, Artificial Sequence
  Description of Artificial Sequence: Synthetic oligonucleotide
  Antisense Strand to SEQ ID NO: 352257
uucuccagggauguuucgc

SEQ ID NO: 352259 - RNA, 19 nt, Artificial Sequence
  Description of Artificial Sequence: Synthetic oligonucleotide
  Sense Strand Starting at position 426 of SEQ ID NO: 318910
cgaaacaucccuggagaac

SEQ ID NO: 352260 - RNA, 19 nt, Artificial Sequence
  Description of Artificial Sequence: Synthetic oligonucleotide
  Antisense Strand to SEQ ID NO: 352259
guucuccagggauguuucg

SEQ ID NO: 352261 - RNA, 19 nt, Artificial Sequence
  Description of Artificial Sequence: Synthetic oligonucleotide
  Sense Strand Starting at position 426 of SEQ ID NO: 319053
uaggcaggauuuggacaua

SEQ ID NO: 352262 - RNA, 19 nt, Artificial Sequence
  Description of Artificial Sequence: Synthetic oligonucleotide
  Antisense Strand to SEQ ID NO: 352261
uauguccaaauccugccua

SEQ ID NO: 352263 - RNA, 19 nt, Artificial Sequence
  Description of Artificial Sequence: Synthetic oligonucleotide
  Sense Strand Starting at position 426 of SEQ ID NO: 319216
ucauaagucuguucccaua

SEQ ID NO: 352264 - RNA, 19 nt, Artificial Sequence
  Description of Artificial Sequence: Synthetic oligonucleotide
  Antisense Strand to SEQ ID NO: 352263
uaugggaacagacuuauga

SEQ ID NO: 352265 - RNA, 19 nt, Artificial Sequence
  Description of Artificial Sequence: Synthetic oligonucleotide
  Sense Strand Starting at position 426 of SEQ ID NO: 319218
auaagucuguucccauaac

SEQ ID NO: 352266 - RNA, 19 nt, Artificial Sequence
  Description of Artificial Sequence: Synthetic oligonucleotide
  Antisense Strand to SEQ ID NO: 352265
guuaugggaacagacuuau

SEQ ID NO: 352267 - RNA, 19 nt, Artificial Sequence
  Description of Artificial Sequence: Synthetic oligonucleotide
  Sense Strand Starting at position 427 of SEQ ID NO: 317331
cacagaugguuccguccau

SEQ ID NO: 352268 - RNA, 19 nt, Artificial Sequence
  Description of Artificial Sequence: Synthetic oligonucleotide
  Antisense Strand to SEQ ID NO: 352267
auggacggaaccaucugug

SEQ ID NO: 352269 - RNA, 19 nt, Artificial Sequence
  Description of Artificial Sequence: Synthetic oligonucleotide
  Sense Strand Starting at position 427 of SEQ ID NO: 317335
gaugguuccguccauccau

SEQ ID NO: 352270 - RNA, 19 nt, Artificial Sequence
  Description of Artificial Sequence: Synthetic oligonucleotide
  Antisense Strand to SEQ ID NO: 352269
auggauggacggaaccauc

SEQ ID NO: 352271 - RNA, 19 nt, Artificial Sequence
  Description of Artificial Sequence: Synthetic oligonucleotide
  Sense Strand Starting at position 427 of SEQ ID NO: 317741
agacucugcugagaacuca

SEQ ID NO: 352272 - RNA, 19 nt, Artificial Sequence
  Description of Artificial Sequence: Synthetic oligonucleotide
  Antisense Strand to SEQ ID NO: 352271
ugaguucucagcagagucu

SEQ ID NO: 352273 - RNA, 19 nt, Artificial Sequence
  Description of Artificial Sequence: Synthetic oligonucleotide
  Sense Strand Starting at position 427 of SEQ ID NO: 317755
acucacaguugaguuacaa

SEQ ID NO: 352274 - RNA, 19 nt, Artificial Sequence
  Description of Artificial Sequence: Synthetic oligonucleotide
  Antisense Strand to SEQ ID NO: 352273
uuguaacucaacugugagu

SEQ ID NO: 352275 - RNA, 19 nt, Artificial Sequence
  Description of Artificial Sequence: Synthetic oligonucleotide
  Sense Strand Starting at position 427 of SEQ ID NO: 317800
uuggaauauuaugacugaa

SEQ ID NO: 352276 - RNA, 19 nt, Artificial Sequence
  Description of Artificial Sequence: Synthetic oligonucleotide
  Antisense Strand to SEQ ID NO: 352275
uucagucauaauauuccaa

SEQ ID NO: 352277 - RNA, 19 nt, Artificial Sequence
  Description of Artificial Sequence: Synthetic oligonucleotide
  Sense Strand Starting at position 427 of SEQ ID NO: 317862
gaaagagugaugugugcuu

SEQ ID NO: 352278 - RNA, 19 nt, Artificial Sequence
  Description of Artificial Sequence: Synthetic oligonucleotide
  Antisense Strand to SEQ ID NO: 352277
aagcacacaucacucuuuc

SEQ ID NO: 352279 - RNA, 19 nt, Artificial Sequence
  Description of Artificial Sequence: Synthetic oligonucleotide
  Sense Strand Starting at position 427 of SEQ ID NO: 317864
aagagugaugugugcuucu

SEQ ID NO: 352280 - RNA, 19 nt, Artificial Sequence
  Description of Artificial Sequence: Synthetic oligonucleotide
  Antisense Strand to SEQ ID NO: 352279
agaagcacacaucacucuu

SEQ ID NO: 352281 - RNA, 19 nt, Artificial Sequence
  Description of Artificial Sequence: Synthetic oligonucleotide
  Sense Strand Starting at position 427 of SEQ ID NO: 318014
auguacuugccacauggau

SEQ ID NO: 352282 - RNA, 19 nt, Artificial Sequence
  Description of Artificial Sequence: Synthetic oligonucleotide
  Antisense Strand to SEQ ID NO: 352281
auccauguggcaaguacau

SEQ ID NO: 352283 - RNA, 19 nt, Artificial Sequence
  Description of Artificial Sequence: Synthetic oligonucleotide
  Sense Strand Starting at position 427 of SEQ ID NO: 318053
uucugaccauggcagaaua

SEQ ID NO: 352284 - RNA, 19 nt, Artificial Sequence
  Description of Artificial Sequence: Synthetic oligonucleotide
  Antisense Strand to SEQ ID NO: 352283
uauucugccauggucagaa

SEQ ID NO: 352285 - RNA, 19 nt, Artificial Sequence
  Description of Artificial Sequence: Synthetic oligonucleotide
  Sense Strand Starting at position 427 of SEQ ID NO: 318072
aaagauguggugcagacua

SEQ ID NO: 352286 - RNA, 19 nt, Artificial Sequence
  Description of Artificial Sequence: Synthetic oligonucleotide
  Antisense Strand to SEQ ID NO: 352285
uagucugcaccacaucuuu

SEQ ID NO: 352287 - RNA, 19 nt, Artificial Sequence
  Description of Artificial Sequence: Synthetic oligonucleotide
  Sense Strand Starting at position 427 of SEQ ID NO: 318139
ccucuuaaagaaggugaua

SEQ ID NO: 352288 - RNA, 19 nt, Artificial Sequence
  Description of Artificial Sequence: Synthetic oligonucleotide
  Antisense Strand to SEQ ID NO: 352287
uaucaccuucuuuaagagg

SEQ ID NO: 352289 - RNA, 19 nt, Artificial Sequence
  Description of Artificial Sequence: Synthetic oligonucleotide
  Sense Strand Starting at position 427 of SEQ ID NO: 318162
agcuaagauuugcaggaua

SEQ ID NO: 352290 - RNA, 19 nt, Artificial Sequence
  Description of Artificial Sequence: Synthetic oligonucleotide
  Antisense Strand to SEQ ID NO: 352289
uauccugcaaaucuuagcu

SEQ ID NO: 352291 - RNA, 19 nt, Artificial Sequence
  Description of Artificial Sequence: Synthetic oligonucleotide
  Sense Strand Starting at position 427 of SEQ ID NO: 318206
ucaaaugagugguugccaa

SEQ ID NO: 352292 - RNA, 19 nt, Artificial Sequence
  Description of Artificial Sequence: Synthetic oligonucleotide
  Antisense Strand to SEQ ID NO: 352291
uuggcaaccacucauuuga

SEQ ID NO: 352293 - RNA, 19 nt, Artificial Sequence
  Description of Artificial Sequence: Synthetic oligonucleotide
  Sense Strand Starting at position 427 of SEQ ID NO: 318210
augagugguugccaacuuu

SEQ ID NO: 352294 - RNA, 19 nt, Artificial Sequence
  Description of Artificial Sequence: Synthetic oligonucleotide
  Antisense Strand to SEQ ID NO: 352293
aaaguuggcaaccacucau

SEQ ID NO: 352295 - RNA, 19 nt, Artificial Sequence
  Description of Artificial Sequence: Synthetic oligonucleotide
  Sense Strand Starting at position 427 of SEQ ID NO: 318237
gcaucucucugcuacaaga

SEQ ID NO: 352296 - RNA, 19 nt, Artificial Sequence
  Description of Artificial Sequence: Synthetic oligonucleotide
  Antisense Strand to SEQ ID NO: 352295
ucuuguagcagagagaugc

SEQ ID NO: 352297 - RNA, 19 nt, Artificial Sequence
  Description of Artificial Sequence: Synthetic oligonucleotide
  Sense Strand Starting at position 427 of SEQ ID NO: 318313
gcauacugcgggcauagaa

SEQ ID NO: 352298 - RNA, 19 nt, Artificial Sequence
  Description of Artificial Sequence: Synthetic oligonucleotide
  Antisense Strand to SEQ ID NO: 352297
uucuaugcccgcaguaugc

SEQ ID NO: 352299 - RNA, 19 nt, Artificial Sequence
  Description of Artificial Sequence: Synthetic oligonucleotide
  Sense Strand Starting at position 427 of SEQ ID NO: 318527
ggagaucucugccagcaaa

SEQ ID NO: 352300 - RNA, 19 nt, Artificial Sequence
  Description of Artificial Sequence: Synthetic oligonucleotide
  Antisense Strand to SEQ ID NO: 352299
uuugcuggcagagaucucc

SEQ ID NO: 352301 - RNA, 19 nt, Artificial Sequence
  Description of Artificial Sequence: Synthetic oligonucleotide
  Sense Strand Starting at position 427 of SEQ ID NO: 318561
ucauguuaggcccaguguu

SEQ ID NO: 352302 - RNA, 19 nt, Artificial Sequence
  Description of Artificial Sequence: Synthetic oligonucleotide
  Antisense Strand to SEQ ID NO: 352301
aacacugggccuaacauga

SEQ ID NO: 352303 - RNA, 19 nt, Artificial Sequence
  Description of Artificial Sequence: Synthetic oligonucleotide
  Sense Strand Starting at position 427 of SEQ ID NO: 318573
caguguugucccugaaaca

SEQ ID NO: 352304 - RNA, 19 nt, Artificial Sequence
  Description of Artificial Sequence: Synthetic oligonucleotide
  Antisense Strand to SEQ ID NO: 352303
uguuucagggacaacacug

SEQ ID NO: 352305 - RNA, 19 nt, Artificial Sequence
  Description of Artificial Sequence: Synthetic oligonucleotide
  Sense Strand Starting at position 427 of SEQ ID NO: 318574
aguguugucccugaaacau

SEQ ID NO: 352306 - RNA, 19 nt, Artificial Sequence
  Description of Artificial Sequence: Synthetic oligonucleotide
  Antisense Strand to SEQ ID NO: 352305
auguuucagggacaacacu

SEQ ID NO: 352307 - RNA, 19 nt, Artificial Sequence
  Description of Artificial Sequence: Synthetic oligonucleotide
  Sense Strand Starting at position 427 of SEQ ID NO: 318625
ccuggaaugugagccacau

SEQ ID NO: 352308 - RNA, 19 nt, Artificial Sequence
  Description of Artificial Sequence: Synthetic oligonucleotide
  Antisense Strand to SEQ ID NO: 352307
auguggcucacauuccagg

SEQ ID NO: 352309 - RNA, 19 nt, Artificial Sequence
  Description of Artificial Sequence: Synthetic oligonucleotide
  Sense Strand Starting at position 427 of SEQ ID NO: 318629
gaaugugagccacauguau

SEQ ID NO: 352310 - RNA, 19 nt, Artificial Sequence
  Description of Artificial Sequence: Synthetic oligonucleotide
  Antisense Strand to SEQ ID NO: 352309
auacauguggcucacauuc

SEQ ID NO: 352311 - RNA, 19 nt, Artificial Sequence
  Description of Artificial Sequence: Synthetic oligonucleotide
  Sense Strand Starting at position 427 of SEQ ID NO: 319075
auguauuaaugagguguuu

SEQ ID NO: 352312 - RNA, 19 nt, Artificial Sequence
  Description of Artificial Sequence: Synthetic oligonucleotide
  Antisense Strand to SEQ ID NO: 352311
aaacaccucauuaauacau

SEQ ID NO: 352313 - RNA, 19 nt, Artificial Sequence
  Description of Artificial Sequence: Synthetic oligonucleotide
  Sense Strand Starting at position 427 of SEQ ID NO: 319077
guauuaaugagguguuuga

SEQ ID NO: 352314 - RNA, 19 nt, Artificial Sequence
  Description of Artificial Sequence: Synthetic oligonucleotide
  Antisense Strand to SEQ ID NO: 352313
ucaaacaccucauuaauac

SEQ ID NO: 352315 - RNA, 19 nt, Artificial Sequence
  Description of Artificial Sequence: Synthetic oligonucleotide
  Sense Strand Starting at position 427 of SEQ ID NO: 319081
uaaugagguguuugacacu

SEQ ID NO: 352316 - RNA, 19 nt, Artificial Sequence
  Description of Artificial Sequence: Synthetic oligonucleotide
  Antisense Strand to SEQ ID NO: 352315
agugucaaacaccucauua

SEQ ID NO: 352317 - RNA, 19 nt, Artificial Sequence
  Description of Artificial Sequence: Synthetic oligonucleotide
  Sense Strand Starting at position 427 of SEQ ID NO: 319084
ugagguguuugacacucuu

SEQ ID NO: 352318 - RNA, 19 nt, Artificial Sequence
  Description of Artificial Sequence: Synthetic oligonucleotide
  Antisense Strand to SEQ ID NO: 352317
aagagugucaaacaccuca

SEQ ID NO: 352319 - RNA, 19 nt, Artificial Sequence
  Description of Artificial Sequence: Synthetic oligonucleotide
  Sense Strand Starting at position 428 of SEQ ID NO: 315341
ggugucaucuaagcaagaa

SEQ ID NO: 352320 - RNA, 19 nt, Artificial Sequence
  Description of Artificial Sequence: Synthetic oligonucleotide
  Antisense Strand to SEQ ID NO: 352319
uucuugcuuagaugacacc

SEQ ID NO: 352321 - RNA, 19 nt, Artificial Sequence
  Description of Artificial Sequence: Synthetic oligonucleotide
  Sense Strand Starting at position 428 of SEQ ID NO: 315413
agaaauacuuagucagcua

SEQ ID NO: 352322 - RNA, 19 nt, Artificial Sequence
  Description of Artificial Sequence: Synthetic oligonucleotide
  Antisense Strand to SEQ ID NO: 352321
uagcugacuaaguauuucu

SEQ ID NO: 352323 - RNA, 19 nt, Artificial Sequence
  Description of Artificial Sequence: Synthetic oligonucleotide
  Sense Strand Starting at position 428 of SEQ ID NO: 315420
cuuagucagcuagaauauu

SEQ ID NO: 352324 - RNA, 19 nt, Artificial Sequence
  Description of Artificial Sequence: Synthetic oligonucleotide
  Antisense Strand to SEQ ID NO: 352323
aauauucuagcugacuaag

SEQ ID NO: 352325 - RNA, 19 nt, Artificial Sequence
  Description of Artificial Sequence: Synthetic oligonucleotide
  Sense Strand Starting at position 428 of SEQ ID NO: 315535
cucucauauguguacauca

SEQ ID NO: 352326 - RNA, 19 nt, Artificial Sequence
  Description of Artificial Sequence: Synthetic oligonucleotide
  Antisense Strand to SEQ ID NO: 352325
ugauguacacauaugagag

SEQ ID NO: 352327 - RNA, 19 nt, Artificial Sequence
  Description of Artificial Sequence: Synthetic oligonucleotide
  Sense Strand Starting at position 428 of SEQ ID NO: 315537
cucauauguguacaucauu

SEQ ID NO: 352328 - RNA, 19 nt, Artificial Sequence
  Description of Artificial Sequence: Synthetic oligonucleotide
  Antisense Strand to SEQ ID NO: 352327
aaugauguacacauaugag

SEQ ID NO: 352329 - RNA, 19 nt, Artificial Sequence
  Description of Artificial Sequence: Synthetic oligonucleotide
  Sense Strand Starting at position 428 of SEQ ID NO: 315562
cguggagaugcccaucaau

SEQ ID NO: 352330 - RNA, 19 nt, Artificial Sequence
  Description of Artificial Sequence: Synthetic oligonucleotide
  Antisense Strand to SEQ ID NO: 352329
auugaugggcaucuccacg

SEQ ID NO: 352331 - RNA, 19 nt, Artificial Sequence
  Description of Artificial Sequence: Synthetic oligonucleotide
  Sense Strand Starting at position 428 of SEQ ID NO: 315565
ggagaugcccaucaaugua

SEQ ID NO: 352332 - RNA, 19 nt, Artificial Sequence
  Description of Artificial Sequence: Synthetic oligonucleotide
  Antisense Strand to SEQ ID NO: 352331
uacauugaugggcaucucc

SEQ ID NO: 352333 - RNA, 19 nt, Artificial Sequence
  Description of Artificial Sequence: Synthetic oligonucleotide
  Sense Strand Starting at position 428 of SEQ ID NO: 315589
agaauaaucugccugaacu

SEQ ID NO: 352334 - RNA, 19 nt, Artificial Sequence
  Description of Artificial Sequence: Synthetic oligonucleotide
  Antisense Strand to SEQ ID NO: 352333
aguucaggcagauuauucu

SEQ ID NO: 352335 - RNA, 19 nt, Artificial Sequence
  Description of Artificial Sequence: Synthetic oligonucleotide
  Sense Strand Starting at position 428 of SEQ ID NO: 315821
acugacauuccugguuuaa

SEQ ID NO: 352336 - RNA, 19 nt, Artificial Sequence
  Description of Artificial Sequence: Synthetic oligonucleotide
  Antisense Strand to SEQ ID NO: 352335
uuaaaccaggaaugucagu

SEQ ID NO: 352337 - RNA, 19 nt, Artificial Sequence
  Description of Artificial Sequence: Synthetic oligonucleotide
  Sense Strand Starting at position 428 of SEQ ID NO: 315869
ccgaguucuggguaaugaa

SEQ ID NO: 352338 - RNA, 19 nt, Artificial Sequence
  Description of Artificial Sequence: Synthetic oligonucleotide
  Antisense Strand to SEQ ID NO: 352337
uucauuacccagaacucgg

SEQ ID NO: 352339 - RNA, 19 nt, Artificial Sequence
  Description of Artificial Sequence: Synthetic oligonucleotide
  Sense Strand Starting at position 428 of SEQ ID NO: 315915
ucuucugauuucgccagaa

SEQ ID NO: 352340 - RNA, 19 nt, Artificial Sequence
  Description of Artificial Sequence: Synthetic oligonucleotide
  Antisense Strand to SEQ ID NO: 352339
uucuggcgaaaucagaaga

SEQ ID NO: 352341 - RNA, 19 nt, Artificial Sequence
  Description of Artificial Sequence: Synthetic oligonucleotide
  Sense Strand Starting at position 428 of SEQ ID NO: 315956
cuggauaucugaccaccau

SEQ ID NO: 352342 - RNA, 19 nt, Artificial Sequence
  Description of Artificial Sequence: Synthetic oligonucleotide
  Antisense Strand to SEQ ID NO: 352341
augguggucagauauccag

SEQ ID NO: 352343 - RNA, 19 nt, Artificial Sequence
  Description of Artificial Sequence: Synthetic oligonucleotide
  Sense Strand Starting at position 428 of SEQ ID NO: 316062
uaaucuugugguuagaaua

SEQ ID NO: 352344 - RNA, 19 nt, Artificial Sequence
  Description of Artificial Sequence: Synthetic oligonucleotide
  Antisense Strand to SEQ ID NO: 352343
uauucuaaccacaagauua

SEQ ID NO: 352345 - RNA, 19 nt, Artificial Sequence
  Description of Artificial Sequence: Synthetic oligonucleotide
  Sense Strand Starting at position 428 of SEQ ID NO: 316165
agauuugcuuaugaggaga

SEQ ID NO: 352346 - RNA, 19 nt, Artificial Sequence
  Description of Artificial Sequence: Synthetic oligonucleotide
  Antisense Strand to SEQ ID NO: 352345
ucuccucauaagcaaaucu

SEQ ID NO: 352347 - RNA, 19 nt, Artificial Sequence
  Description of Artificial Sequence: Synthetic oligonucleotide
  Sense Strand Starting at position 428 of SEQ ID NO: 316193
uguacauguccagaacuag

SEQ ID NO: 352348 - RNA, 19 nt, Artificial Sequence
  Description of Artificial Sequence: Synthetic oligonucleotide
  Antisense Strand to SEQ ID NO: 352347
cuaguucuggacauguaca

SEQ ID NO: 352349 - RNA, 19 nt, Artificial Sequence
  Description of Artificial Sequence: Synthetic oligonucleotide
  Sense Strand Starting at position 428 of SEQ ID NO: 316214
aaugcauuaugcuuggaag

SEQ ID NO: 352350 - RNA, 19 nt, Artificial Sequence
  Description of Artificial Sequence: Synthetic oligonucleotide
  Antisense Strand to SEQ ID NO: 352349
cuuccaagcauaaugcauu

SEQ ID NO: 352351 - RNA, 19 nt, Artificial Sequence
  Description of Artificial Sequence: Synthetic oligonucleotide
  Sense Strand Starting at position 428 of SEQ ID NO: 316237
gcaguacucccauacacug

SEQ ID NO: 352352 - RNA, 19 nt, Artificial Sequence
  Description of Artificial Sequence: Synthetic oligonucleotide
  Antisense Strand to SEQ ID NO: 352351
caguguaugggaguacugc

SEQ ID NO: 352353 - RNA, 19 nt, Artificial Sequence
  Description of Artificial Sequence: Synthetic oligonucleotide
  Sense Strand Starting at position 428 of SEQ ID NO: 316248
auacacuguucuucuuaga

SEQ ID NO: 352354 - RNA, 19 nt, Artificial Sequence
  Description of Artificial Sequence: Synthetic oligonucleotide
  Antisense Strand to SEQ ID NO: 352353
ucuaagaagaacaguguau

SEQ ID NO: 352355 - RNA, 19 nt, Artificial Sequence
  Description of Artificial Sequence: Synthetic oligonucleotide
  Sense Strand Starting at position 428 of SEQ ID NO: 316333
guaggauguggucauacac

SEQ ID NO: 352356 - RNA, 19 nt, Artificial Sequence
  Description of Artificial Sequence: Synthetic oligonucleotide
  Antisense Strand to SEQ ID NO: 352355
guguaugaccacauccuac

SEQ ID NO: 352357 - RNA, 19 nt, Artificial Sequence
  Description of Artificial Sequence: Synthetic oligonucleotide
  Sense Strand Starting at position 428 of SEQ ID NO: 316407
uuagcaaugcauuauugga

SEQ ID NO: 352358 - RNA, 19 nt, Artificial Sequence
  Description of Artificial Sequence: Synthetic oligonucleotide
  Antisense Strand to SEQ ID NO: 352357
uccaauaaugcauugcuaa

SEQ ID NO: 352359 - RNA, 19 nt, Artificial Sequence
  Description of Artificial Sequence: Synthetic oligonucleotide
  Sense Strand Starting at position 428 of SEQ ID NO: 316409
agcaaugcauuauuggaua

SEQ ID NO: 352360 - RNA, 19 nt, Artificial Sequence
  Description of Artificial Sequence: Synthetic oligonucleotide
  Antisense Strand to SEQ ID NO: 352359
uauccaauaaugcauugcu

SEQ ID NO: 352361 - RNA, 19 nt, Artificial Sequence
  Description of Artificial Sequence: Synthetic oligonucleotide
  Sense Strand Starting at position 428 of SEQ ID NO: 316596
acgcaacugauggaguauu

SEQ ID NO: 352362 - RNA, 19 nt, Artificial Sequence
  Description of Artificial Sequence: Synthetic oligonucleotide
  Antisense Strand to SEQ ID NO: 352361
aauacuccaucaguugcgu

SEQ ID NO: 352363 - RNA, 19 nt, Artificial Sequence
  Description of Artificial Sequence: Synthetic oligonucleotide
  Sense Strand Starting at position 428 of SEQ ID NO: 316849
ugggaaguucaauggaagu

SEQ ID NO: 352364 - RNA, 19 nt, Artificial Sequence
  Description of Artificial Sequence: Synthetic oligonucleotide
  Antisense Strand to SEQ ID NO: 352363
acuuccauugaacuuccca

SEQ ID NO: 352365 - RNA, 19 nt, Artificial Sequence
  Description of Artificial Sequence: Synthetic oligonucleotide
  Sense Strand Starting at position 428 of SEQ ID NO: 316862
ggaaguuggccggaagaug

SEQ ID NO: 352366 - RNA, 19 nt, Artificial Sequence
  Description of Artificial Sequence: Synthetic oligonucleotide
  Antisense Strand to SEQ ID NO: 352365
caucuuccggccaacuucc

SEQ ID NO: 352367 - RNA, 19 nt, Artificial Sequence
  Description of Artificial Sequence: Synthetic oligonucleotide
  Sense Strand Starting at position 428 of SEQ ID NO: 316917
ucugaugauuucgcccgua

SEQ ID NO: 352368 - RNA, 19 nt, Artificial Sequence
  Description of Artificial Sequence: Synthetic oligonucleotide
  Antisense Strand to SEQ ID NO: 352367
uacgggcgaaaucaucaga

SEQ ID NO: 352369 - RNA, 19 nt, Artificial Sequence
  Description of Artificial Sequence: Synthetic oligonucleotide
  Sense Strand Starting at position 428 of SEQ ID NO: 316959
ccugaaagaugggauuucu

SEQ ID NO: 352370 - RNA, 19 nt, Artificial Sequence
  Description of Artificial Sequence: Synthetic oligonucleotide
  Antisense Strand to SEQ ID NO: 352369
agaaaucccaucuuucagg

SEQ ID NO: 352371 - RNA, 19 nt, Artificial Sequence
  Description of Artificial Sequence: Synthetic oligonucleotide
  Sense Strand Starting at position 428 of SEQ ID NO: 317051
uugcgacgcgcaucugaua

SEQ ID NO: 352372 - RNA, 19 nt, Artificial Sequence
  Description of Artificial Sequence: Synthetic oligonucleotide
  Antisense Strand to SEQ ID NO: 352371
uaucagaugcgcgucgcaa

SEQ ID NO: 352373 - RNA, 19 nt, Artificial Sequence
  Description of Artificial Sequence: Synthetic oligonucleotide
  Sense Strand Starting at position 428 of SEQ ID NO: 317170
gguguagugacagaucauc

SEQ ID NO: 352374 - RNA, 19 nt, Artificial Sequence
  Description of Artificial Sequence: Synthetic oligonucleotide
  Antisense Strand to SEQ ID NO: 352373
gaugaucugucacuacacc

SEQ ID NO: 352375 - RNA, 19 nt, Artificial Sequence
  Description of Artificial Sequence: Synthetic oligonucleotide
  Sense Strand Starting at position 428 of SEQ ID NO: 317305
caauacgguccucaguuau

SEQ ID NO: 352376 - RNA, 19 nt, Artificial Sequence
  Description of Artificial Sequence: Synthetic oligonucleotide
  Antisense Strand to SEQ ID NO: 352375
auaacugaggaccguauug

SEQ ID NO: 352377 - RNA, 19 nt, Artificial Sequence
  Description of Artificial Sequence: Synthetic oligonucleotide
  Sense Strand Starting at position 428 of SEQ ID NO: 317667
gggugagaguaguuaugga

SEQ ID NO: 352378 - RNA, 19 nt, Artificial Sequence
  Description of Artificial Sequence: Synthetic oligonucleotide
  Antisense Strand to SEQ ID NO: 352377
uccauaacuacucucaccc

SEQ ID NO: 352379 - RNA, 19 nt, Artificial Sequence
  Description of Artificial Sequence: Synthetic oligonucleotide
  Sense Strand Starting at position 428 of SEQ ID NO: 317686
gcugucaaagguuaauauu

SEQ ID NO: 352380 - RNA, 19 nt, Artificial Sequence
  Description of Artificial Sequence: Synthetic oligonucleotide
  Antisense Strand to SEQ ID NO: 352379
aauauuaaccuuugacagc

SEQ ID NO: 352381 - RNA, 19 nt, Artificial Sequence
  Description of Artificial Sequence: Synthetic oligonucleotide
  Sense Strand Starting at position 428 of SEQ ID NO: 317879
aggcgucuuauugauaaua

SEQ ID NO: 352382 - RNA, 19 nt, Artificial Sequence
  Description of Artificial Sequence: Synthetic oligonucleotide
  Antisense Strand to SEQ ID NO: 352381
uauuaucaauaagacgccu

SEQ ID NO: 352383 - RNA, 19 nt, Artificial Sequence
  Description of Artificial Sequence: Synthetic oligonucleotide
  Sense Strand Starting at position 428 of SEQ ID NO: 317935
guugcagggauagaguauu

SEQ ID NO: 352384 - RNA, 19 nt, Artificial Sequence
  Description of Artificial Sequence: Synthetic oligonucleotide
  Antisense Strand to SEQ ID NO: 352383
aauacucuaucccugcaac

SEQ ID NO: 352385 - RNA, 19 nt, Artificial Sequence
  Description of Artificial Sequence: Synthetic oligonucleotide
  Sense Strand Starting at position 428 of SEQ ID NO: 318207
aggagaugugcagauuagu

SEQ ID NO: 352386 - RNA, 19 nt, Artificial Sequence
  Description of Artificial Sequence: Synthetic oligonucleotide
  Antisense Strand to SEQ ID NO: 352385
acuaaucugcacaucuccu

SEQ ID NO: 352387 - RNA, 19 nt, Artificial Sequence
  Description of Artificial Sequence: Synthetic oligonucleotide
  Sense Strand Starting at position 428 of SEQ ID NO: 318385
augccugagggccaugauu

SEQ ID NO: 352388 - RNA, 19 nt, Artificial Sequence
  Description of Artificial Sequence: Synthetic oligonucleotide
  Antisense Strand to SEQ ID NO: 352387
aaucauggcccucaggcau

SEQ ID NO: 352389 - RNA, 19 nt, Artificial Sequence
  Description of Artificial Sequence: Synthetic oligonucleotide
  Sense Strand Starting at position 428 of SEQ ID NO: 318408
auauuaaccacggaugguu

SEQ ID NO: 352390 - RNA, 19 nt, Artificial Sequence
  Description of Artificial Sequence: Synthetic oligonucleotide
  Antisense Strand to SEQ ID NO: 352389
aaccauccgugguuaauau

SEQ ID NO: 352391 - RNA, 19 nt, Artificial Sequence
  Description of Artificial Sequence: Synthetic oligonucleotide
  Sense Strand Starting at position 428 of SEQ ID NO: 318582
acguguuuggaagaaucau

SEQ ID NO: 352392 - RNA, 19 nt, Artificial Sequence
  Description of Artificial Sequence: Synthetic oligonucleotide
  Antisense Strand to SEQ ID NO: 352391
augauucuuccaaacacgu

SEQ ID NO: 352393 - RNA, 19 nt, Artificial Sequence
  Description of Artificial Sequence: Synthetic oligonucleotide
  Sense Strand Starting at position 428 of SEQ ID NO: 318667
gcuccuuaagaacaauagu

SEQ ID NO: 352394 - RNA, 19 nt, Artificial Sequence
  Description of Artificial Sequence: Synthetic oligonucleotide
  Antisense Strand to SEQ ID NO: 352393
acuauuguucuuaaggagc

SEQ ID NO: 352395 - RNA, 19 nt, Artificial Sequence
  Description of Artificial Sequence: Synthetic oligonucleotide
  Sense Strand Starting at position 428 of SEQ ID NO: 318887
cucagaaccuaagugucau

SEQ ID NO: 352396 - RNA, 19 nt, Artificial Sequence
  Description of Artificial Sequence: Synthetic oligonucleotide
  Antisense Strand to SEQ ID NO: 352395
augacacuuagguucugag

SEQ ID NO: 352397 - RNA, 19 nt, Artificial Sequence
  Description of Artificial Sequence: Synthetic oligonucleotide
  Sense Strand Starting at position 428 of SEQ ID NO: 318924
agccaucuauaguccagaa

SEQ ID NO: 352398 - RNA, 19 nt, Artificial Sequence
  Description of Artificial Sequence: Synthetic oligonucleotide
  Antisense Strand to SEQ ID NO: 352397
uucuggacuauagauggcu

SEQ ID NO: 352399 - RNA, 19 nt, Artificial Sequence
  Description of Artificial Sequence: Synthetic oligonucleotide
  Sense Strand Starting at position 429 of SEQ ID NO: 315280
ccuggcuugaccuggaaau

SEQ ID NO: 352400 - RNA, 19 nt, Artificial Sequence
  Description of Artificial Sequence: Synthetic oligonucleotide
  Antisense Strand to SEQ ID NO: 352399
auuuccaggucaagccagg

SEQ ID NO: 352401 - RNA, 19 nt, Artificial Sequence
  Description of Artificial Sequence: Synthetic oligonucleotide
  Sense Strand Starting at position 429 of SEQ ID NO: 315281
cuggcuugaccuggaaauc

SEQ ID NO: 352402 - RNA, 19 nt, Artificial Sequence
  Description of Artificial Sequence: Synthetic oligonucleotide
  Antisense Strand to SEQ ID NO: 352401
gauuuccaggucaagccag

SEQ ID NO: 352403 - RNA, 19 nt, Artificial Sequence
  Description of Artificial Sequence: Synthetic oligonucleotide
  Sense Strand Starting at position 429 of SEQ ID NO: 315503
gagugugcuaaguauggua

SEQ ID NO: 352404 - RNA, 19 nt, Artificial Sequence
  Description of Artificial Sequence: Synthetic oligonucleotide
  Antisense Strand to SEQ ID NO: 352403
uaccauacuuagcacacuc

SEQ ID NO: 352405 - RNA, 19 nt, Artificial Sequence
  Description of Artificial Sequence: Synthetic oligonucleotide
  Sense Strand Starting at position 429 of SEQ ID NO: 315522
auaggacagaaacguuaau

SEQ ID NO: 352406 - RNA, 19 nt, Artificial Sequence
  Description of Artificial Sequence: Synthetic oligonucleotide
  Antisense Strand to SEQ ID NO: 352405
auuaacguuucuguccuau

SEQ ID NO: 352407 - RNA, 19 nt, Artificial Sequence
  Description of Artificial Sequence: Synthetic oligonucleotide
  Sense Strand Starting at position 429 of SEQ ID NO: 315531
aaacguuaaugagcagagu

SEQ ID NO: 352408 - RNA, 19 nt, Artificial Sequence
  Description of Artificial Sequence: Synthetic oligonucleotide
  Antisense Strand to SEQ ID NO: 352407
acucugcucauuaacguuu

SEQ ID NO: 352409 - RNA, 19 nt, Artificial Sequence
  Description of Artificial Sequence: Synthetic oligonucleotide
  Sense Strand Starting at position 429 of SEQ ID NO: 315540
ugagcagaguccuuggaaa

SEQ ID NO: 352410 - RNA, 19 nt, Artificial Sequence
  Description of Artificial Sequence: Synthetic oligonucleotide
  Antisense Strand to SEQ ID NO: 352409
uuuccaaggacucugcuca

SEQ ID NO: 352411 - RNA, 19 nt, Artificial Sequence
  Description of Artificial Sequence: Synthetic oligonucleotide
  Sense Strand Starting at position 429 of SEQ ID NO: 315656
gggcgucugaaagaugcaa

SEQ ID NO: 352412 - RNA, 19 nt, Artificial Sequence
  Description of Artificial Sequence: Synthetic oligonucleotide
  Antisense Strand to SEQ ID NO: 352411
uugcaucuuucagacgccc

SEQ ID NO: 352413 - RNA, 19 nt, Artificial Sequence
  Description of Artificial Sequence: Synthetic oligonucleotide
  Sense Strand Starting at position 429 of SEQ ID NO: 315732
ucuacuaggugucuaucau

SEQ ID NO: 352414 - RNA, 19 nt, Artificial Sequence
  Description of Artificial Sequence: Synthetic oligonucleotide
  Antisense Strand to SEQ ID NO: 352413
augauagacaccuaguaga

SEQ ID NO: 352415 - RNA, 19 nt, Artificial Sequence
  Description of Artificial Sequence: Synthetic oligonucleotide
  Sense Strand Starting at position 429 of SEQ ID NO: 315733
cuacuaggugucuaucaug

SEQ ID NO: 352416 - RNA, 19 nt, Artificial Sequence
  Description of Artificial Sequence: Synthetic oligonucleotide
  Antisense Strand to SEQ ID NO: 352415
caugauagacaccuaguag

SEQ ID NO: 352417 - RNA, 19 nt, Artificial Sequence
  Description of Artificial Sequence: Synthetic oligonucleotide
  Sense Strand Starting at position 429 of SEQ ID NO: 315739
ggugucuaucauggauuau

SEQ ID NO: 352418 - RNA, 19 nt, Artificial Sequence
  Description of Artificial Sequence: Synthetic oligonucleotide
  Antisense Strand to SEQ ID NO: 352417
auaauccaugauagacacc

SEQ ID NO: 352419 - RNA, 19 nt, Artificial Sequence
  Description of Artificial Sequence: Synthetic oligonucleotide
  Sense Strand Starting at position 429 of SEQ ID NO: 315740
gugucuaucauggauuaug

SEQ ID NO: 352420 - RNA, 19 nt, Artificial Sequence
  Description of Artificial Sequence: Synthetic oligonucleotide
  Antisense Strand to SEQ ID NO: 352419
cauaauccaugauagacac

SEQ ID NO: 352421 - RNA, 19 nt, Artificial Sequence
  Description of Artificial Sequence: Synthetic oligonucleotide
  Sense Strand Starting at position 429 of SEQ ID NO: 315775
cuguauuaaucuuuagguc

SEQ ID NO: 352422 - RNA, 19 nt, Artificial Sequence
  Description of Artificial Sequence: Synthetic oligonucleotide
  Antisense Strand to SEQ ID NO: 352421
gaccuaaagauuaauacag

SEQ ID NO: 352423 - RNA, 19 nt, Artificial Sequence
  Description of Artificial Sequence: Synthetic oligonucleotide
  Sense Strand Starting at position 429 of SEQ ID NO: 315954
uuggaauaagugcaucuau

SEQ ID NO: 352424 - RNA, 19 nt, Artificial Sequence
  Description of Artificial Sequence: Synthetic oligonucleotide
  Antisense Strand to SEQ ID NO: 352423
auagaugcacuuauuccaa

SEQ ID NO: 352425 - RNA, 19 nt, Artificial Sequence
  Description of Artificial Sequence: Synthetic oligonucleotide
  Sense Strand Starting at position 429 of SEQ ID NO: 315975
auguaauucuucuccuggu

SEQ ID NO: 352426 - RNA, 19 nt, Artificial Sequence
  Description of Artificial Sequence: Synthetic oligonucleotide
  Antisense Strand to SEQ ID NO: 352425
accaggagaagaauuacau

SEQ ID NO: 352427 - RNA, 19 nt, Artificial Sequence
  Description of Artificial Sequence: Synthetic oligonucleotide
  Sense Strand Starting at position 429 of SEQ ID NO: 316054
cugacagagugguugaaag

SEQ ID NO: 352428 - RNA, 19 nt, Artificial Sequence
  Description of Artificial Sequence: Synthetic oligonucleotide
  Antisense Strand to SEQ ID NO: 352427
cuuucaaccacucugucag

SEQ ID NO: 352429 - RNA, 19 nt, Artificial Sequence
  Description of Artificial Sequence: Synthetic oligonucleotide
  Sense Strand Starting at position 429 of SEQ ID NO: 316111
gaggaauccugguucccuu

SEQ ID NO: 352430 - RNA, 19 nt, Artificial Sequence
  Description of Artificial Sequence: Synthetic oligonucleotide
  Antisense Strand to SEQ ID NO: 352429
aagggaaccaggauuccuc

SEQ ID NO: 352431 - RNA, 19 nt, Artificial Sequence
  Description of Artificial Sequence: Synthetic oligonucleotide
  Sense Strand Starting at position 429 of SEQ ID NO: 316146
gugcuuugaggagggagaa

SEQ ID NO: 352432 - RNA, 19 nt, Artificial Sequence
  Description of Artificial Sequence: Synthetic oligonucleotide
  Antisense Strand to SEQ ID NO: 352431
uucucccuccucaaagcac

SEQ ID NO: 352433 - RNA, 19 nt, Artificial Sequence
  Description of Artificial Sequence: Synthetic oligonucleotide
  Sense Strand Starting at position 429 of SEQ ID NO: 316565
ucacaagguuagucaaagu

SEQ ID NO: 352434 - RNA, 19 nt, Artificial Sequence
  Description of Artificial Sequence: Synthetic oligonucleotide
  Antisense Strand to SEQ ID NO: 352433
acuuugacuaaccuuguga

SEQ ID NO: 352435 - RNA, 19 nt, Artificial Sequence
  Description of Artificial Sequence: Synthetic oligonucleotide
  Sense Strand Starting at position 429 of SEQ ID NO: 316744
aguuuagucacacugcguu

SEQ ID NO: 352436 - RNA, 19 nt, Artificial Sequence
  Description of Artificial Sequence: Synthetic oligonucleotide
  Antisense Strand to SEQ ID NO: 352435
aacgcagugugacuaaacu

SEQ ID NO: 352437 - RNA, 19 nt, Artificial Sequence
  Description of Artificial Sequence: Synthetic oligonucleotide
  Sense Strand Starting at position 429 of SEQ ID NO: 316836
uuguaagguguccaaagua

SEQ ID NO: 352438 - RNA, 19 nt, Artificial Sequence
  Description of Artificial Sequence: Synthetic oligonucleotide
  Antisense Strand to SEQ ID NO: 352437
uacuuuggacaccuuacaa

SEQ ID NO: 352439 - RNA, 19 nt, Artificial Sequence
  Description of Artificial Sequence: Synthetic oligonucleotide
  Sense Strand Starting at position 429 of SEQ ID NO: 317395
ggcacaguuggugauuauu

SEQ ID NO: 352440 - RNA, 19 nt, Artificial Sequence
  Description of Artificial Sequence: Synthetic oligonucleotide
  Antisense Strand to SEQ ID NO: 352439
aauaaucaccaacugugcc

SEQ ID NO: 352441 - RNA, 19 nt, Artificial Sequence
  Description of Artificial Sequence: Synthetic oligonucleotide
  Sense Strand Starting at position 429 of SEQ ID NO: 317404
ggugauuauuuagggaauc

SEQ ID NO: 352442 - RNA, 19 nt, Artificial Sequence
  Description of Artificial Sequence: Synthetic oligonucleotide
  Antisense Strand to SEQ ID NO: 352441
gauucccuaaauaaucacc

SEQ ID NO: 352443 - RNA, 19 nt, Artificial Sequence
  Description of Artificial Sequence: Synthetic oligonucleotide
  Sense Strand Starting at position 429 of SEQ ID NO: 317428
ucuggaaugacucaguagu

SEQ ID NO: 352444 - RNA, 19 nt, Artificial Sequence
  Description of Artificial Sequence: Synthetic oligonucleotide
  Antisense Strand to SEQ ID NO: 352443
acuacugagucauuccaga

SEQ ID NO: 352445 - RNA, 19 nt, Artificial Sequence
  Description of Artificial Sequence: Synthetic oligonucleotide
  Sense Strand Starting at position 429 of SEQ ID NO: 317430
uggaaugacucaguaguuu

SEQ ID NO: 352446 - RNA, 19 nt, Artificial Sequence
  Description of Artificial Sequence: Synthetic oligonucleotide
  Antisense Strand to SEQ ID NO: 352445
aaacuacugagucauucca

SEQ ID NO: 352447 - RNA, 19 nt, Artificial Sequence
  Description of Artificial Sequence: Synthetic oligonucleotide
  Sense Strand Starting at position 429 of SEQ ID NO: 317434
augacucaguaguuuaaau

SEQ ID NO: 352448 - RNA, 19 nt, Artificial Sequence
  Description of Artificial Sequence: Synthetic oligonucleotide
  Antisense Strand to SEQ ID NO: 352447
auuuaaacuacugagucau

SEQ ID NO: 352449 - RNA, 19 nt, Artificial Sequence
  Description of Artificial Sequence: Synthetic oligonucleotide
  Sense Strand Starting at position 429 of SEQ ID NO: 318517
auccuacgugauugagguu

SEQ ID NO: 352450 - RNA, 19 nt, Artificial Sequence
  Description of Artificial Sequence: Synthetic oligonucleotide
  Antisense Strand to SEQ ID NO: 352449
aaccucaaucacguaggau

SEQ ID NO: 352451 - RNA, 19 nt, Artificial Sequence
  Description of Artificial Sequence: Synthetic oligonucleotide
  Sense Strand Starting at position 429 of SEQ ID NO: 318524
gugauugagguuuggauga

SEQ ID NO: 352452 - RNA, 19 nt, Artificial Sequence
  Description of Artificial Sequence: Synthetic oligonucleotide
  Antisense Strand to SEQ ID NO: 352451
ucauccaaaccucaaucac

SEQ ID NO: 352453 - RNA, 19 nt, Artificial Sequence
  Description of Artificial Sequence: Synthetic oligonucleotide
  Sense Strand Starting at position 429 of SEQ ID NO: 318704
uaagcuugagcacguagaa

SEQ ID NO: 352454 - RNA, 19 nt, Artificial Sequence
  Description of Artificial Sequence: Synthetic oligonucleotide
  Antisense Strand to SEQ ID NO: 352453
uucuacgugcucaagcuua

SEQ ID NO: 352455 - RNA, 19 nt, Artificial Sequence
  Description of Artificial Sequence: Synthetic oligonucleotide
  Sense Strand Starting at position 429 of SEQ ID NO: 318717
guagaauucucuguuuagu

SEQ ID NO: 352456 - RNA, 19 nt, Artificial Sequence
  Description of Artificial Sequence: Synthetic oligonucleotide
  Antisense Strand to SEQ ID NO: 352455
acuaaacagagaauucuac

SEQ ID NO: 352457 - RNA, 19 nt, Artificial Sequence
  Description of Artificial Sequence: Synthetic oligonucleotide
  Sense Strand Starting at position 429 of SEQ ID NO: 318719
agaauucucuguuuaguua

SEQ ID NO: 352458 - RNA, 19 nt, Artificial Sequence
  Description of Artificial Sequence: Synthetic oligonucleotide
  Antisense Strand to SEQ ID NO: 352457
uaacuaaacagagaauucu

SEQ ID NO: 352459 - RNA, 19 nt, Artificial Sequence
  Description of Artificial Sequence: Synthetic oligonucleotide
  Sense Strand Starting at position 429 of SEQ ID NO: 318723
uucucuguuuaguuaggaa

SEQ ID NO: 352460 - RNA, 19 nt, Artificial Sequence
  Description of Artificial Sequence: Synthetic oligonucleotide
  Antisense Strand to SEQ ID NO: 352459
uuccuaacuaaacagagaa

SEQ ID NO: 352461 - RNA, 19 nt, Artificial Sequence
  Description of Artificial Sequence: Synthetic oligonucleotide
  Sense Strand Starting at position 429 of SEQ ID NO: 318856
cuugguucugucuggaaag

SEQ ID NO: 352462 - RNA, 19 nt, Artificial Sequence
  Description of Artificial Sequence: Synthetic oligonucleotide
  Antisense Strand to SEQ ID NO: 352461
cuuuccagacagaaccaag

SEQ ID NO: 352463 - RNA, 19 nt, Artificial Sequence
  Description of Artificial Sequence: Synthetic oligonucleotide
  Sense Strand Starting at position 429 of SEQ ID NO: 318858
ugguucugucuggaaagcu

SEQ ID NO: 352464 - RNA, 19 nt, Artificial Sequence
  Description of Artificial Sequence: Synthetic oligonucleotide
  Antisense Strand to SEQ ID NO: 352463
agcuuuccagacagaacca

SEQ ID NO: 352465 - RNA, 19 nt, Artificial Sequence
  Description of Artificial Sequence: Synthetic oligonucleotide
  Sense Strand Starting at position 429 of SEQ ID NO: 318999
caggucuccagacgugaau

SEQ ID NO: 352466 - RNA, 19 nt, Artificial Sequence
  Description of Artificial Sequence: Synthetic oligonucleotide
  Antisense Strand to SEQ ID NO: 352465
auucacgucuggagaccug

SEQ ID NO: 352467 - RNA, 19 nt, Artificial Sequence
  Description of Artificial Sequence: Synthetic oligonucleotide
  Sense Strand Starting at position 429 of SEQ ID NO: 319011
cgugaaugugacgacaucu

SEQ ID NO: 352468 - RNA, 19 nt, Artificial Sequence
  Description of Artificial Sequence: Synthetic oligonucleotide
  Antisense Strand to SEQ ID NO: 352467
agaugucgucacauucacg

SEQ ID NO: 352469 - RNA, 19 nt, Artificial Sequence
  Description of Artificial Sequence: Synthetic oligonucleotide
  Sense Strand Starting at position 429 of SEQ ID NO: 319024
acaucugauguuggagaca

SEQ ID NO: 352470 - RNA, 19 nt, Artificial Sequence
  Description of Artificial Sequence: Synthetic oligonucleotide
  Antisense Strand to SEQ ID NO: 352469
ugucuccaacaucagaugu

SEQ ID NO: 352471 - RNA, 19 nt, Artificial Sequence
  Description of Artificial Sequence: Synthetic oligonucleotide
  Sense Strand Starting at position 429 of SEQ ID NO: 319120
ggcuauugguuucuacuua

SEQ ID NO: 352472 - RNA, 19 nt, Artificial Sequence
  Description of Artificial Sequence: Synthetic oligonucleotide
  Antisense Strand to SEQ ID NO: 352471
uaaguagaaaccaauagcc

SEQ ID NO: 352473 - RNA, 19 nt, Artificial Sequence
  Description of Artificial Sequence: Synthetic oligonucleotide
  Sense Strand Starting at position 429 of SEQ ID NO: 319182
ucacgaagcaucuaggaua

SEQ ID NO: 352474 - RNA, 19 nt, Artificial Sequence
  Description of Artificial Sequence: Synthetic oligonucleotide
  Antisense Strand to SEQ ID NO: 352473
uauccuagaugcuucguga

SEQ ID NO: 352475 - RNA, 19 nt, Artificial Sequence
  Description of Artificial Sequence: Synthetic oligonucleotide
  Sense Strand Starting at position 429 of SEQ ID NO: 319197
gauagugcgaaaggauuaa

SEQ ID NO: 352476 - RNA, 19 nt, Artificial Sequence
  Description of Artificial Sequence: Synthetic oligonucleotide
  Antisense Strand to SEQ ID NO: 352475
uuaauccuuucgcacuauc

SEQ ID NO: 352477 - RNA, 19 nt, Artificial Sequence
  Description of Artificial Sequence: Synthetic oligonucleotide
  Sense Strand Starting at position 429 of SEQ ID NO: 319201
gugcgaaaggauuaaaugu

SEQ ID NO: 352478 - RNA, 19 nt, Artificial Sequence
  Description of Artificial Sequence: Synthetic oligonucleotide
  Antisense Strand to SEQ ID NO: 352477
acauuuaauccuuucgcac

SEQ ID NO: 352479 - RNA, 19 nt, Artificial Sequence
  Description of Artificial Sequence: Synthetic oligonucleotide
  Sense Strand Starting at position 430 of SEQ ID NO: 315294
aagguaaggucuuucucua

SEQ ID NO: 352480 - RNA, 19 nt, Artificial Sequence
  Description of Artificial Sequence: Synthetic oligonucleotide
  Antisense Strand to SEQ ID NO: 352479
uagagaaagaccuuaccuu

SEQ ID NO: 352481 - RNA, 19 nt, Artificial Sequence
  Description of Artificial Sequence: Synthetic oligonucleotide
  Sense Strand Starting at position 430 of SEQ ID NO: 315606
uggucaaguguuagugguu

SEQ ID NO: 352482 - RNA, 19 nt, Artificial Sequence
  Description of Artificial Sequence: Synthetic oligonucleotide
  Antisense Strand to SEQ ID NO: 352481
aaccacuaacacuugacca

SEQ ID NO: 352483 - RNA, 19 nt, Artificial Sequence
  Description of Artificial Sequence: Synthetic oligonucleotide
  Sense Strand Starting at position 430 of SEQ ID NO: 315646
cuuggaacaccguauacaa

SEQ ID NO: 352484 - RNA, 19 nt, Artificial Sequence
  Description of Artificial Sequence: Synthetic oligonucleotide
  Antisense Strand to SEQ ID NO: 352483
uuguauacgguguuccaag

SEQ ID NO: 352485 - RNA, 19 nt, Artificial Sequence
  Description of Artificial Sequence: Synthetic oligonucleotide
  Sense Strand Starting at position 430 of SEQ ID NO: 315859
guuguaguuccgagucaag

SEQ ID NO: 352486 - RNA, 19 nt, Artificial Sequence
  Description of Artificial Sequence: Synthetic oligonucleotide
  Antisense Strand to SEQ ID NO: 352485
cuugacucggaacuacaac

SEQ ID NO: 352487 - RNA, 19 nt, Artificial Sequence
  Description of Artificial Sequence: Synthetic oligonucleotide
  Sense Strand Starting at position 430 of SEQ ID NO: 315905
gagacuucgucucccagga

SEQ ID NO: 352488 - RNA, 19 nt, Artificial Sequence
  Description of Artificial Sequence: Synthetic oligonucleotide
  Antisense Strand to SEQ ID NO: 352487
uccugggagacgaagucuc

SEQ ID NO: 352489 - RNA, 19 nt, Artificial Sequence
  Description of Artificial Sequence: Synthetic oligonucleotide
  Sense Strand Starting at position 430 of SEQ ID NO: 315910
uucgucucccaggagacau

SEQ ID NO: 352490 - RNA, 19 nt, Artificial Sequence
  Description of Artificial Sequence: Synthetic oligonucleotide
  Antisense Strand to SEQ ID NO: 352489
augucuccugggagacgaa

SEQ ID NO: 352491 - RNA, 19 nt, Artificial Sequence
  Description of Artificial Sequence: Synthetic oligonucleotide
  Sense Strand Starting at position 430 of SEQ ID NO: 316063
guagauccggcuuaacauc

SEQ ID NO: 352492 - RNA, 19 nt, Artificial Sequence
  Description of Artificial Sequence: Synthetic oligonucleotide
  Antisense Strand to SEQ ID NO: 352491
gauguuaagccggaucuac

SEQ ID NO: 352493 - RNA, 19 nt, Artificial Sequence
  Description of Artificial Sequence: Synthetic oligonucleotide
  Sense Strand Starting at position 430 of SEQ ID NO: 316175
gcacauuucugagagacca

SEQ ID NO: 352494 - RNA, 19 nt, Artificial Sequence
  Description of Artificial Sequence: Synthetic oligonucleotide
  Antisense Strand to SEQ ID NO: 352493
uggucucucagaaaugugc

SEQ ID NO: 352495 - RNA, 19 nt, Artificial Sequence
  Description of Artificial Sequence: Synthetic oligonucleotide
  Sense Strand Starting at position 430 of SEQ ID NO: 316306
ccuuguuucccagauaagc

SEQ ID NO: 352496 - RNA, 19 nt, Artificial Sequence
  Description of Artificial Sequence: Synthetic oligonucleotide
  Antisense Strand to SEQ ID NO: 352495
gcuuaucugggaaacaagg

SEQ ID NO: 352497 - RNA, 19 nt, Artificial Sequence
  Description of Artificial Sequence: Synthetic oligonucleotide
  Sense Strand Starting at position 430 of SEQ ID NO: 316378
gagaaaucugcagaugcau

SEQ ID NO: 352498 - RNA, 19 nt, Artificial Sequence
  Description of Artificial Sequence: Synthetic oligonucleotide
  Antisense Strand to SEQ ID NO: 352497
augcaucugcagauuucuc

SEQ ID NO: 352499 - RNA, 19 nt, Artificial Sequence
  Description of Artificial Sequence: Synthetic oligonucleotide
  Sense Strand Starting at position 430 of SEQ ID NO: 316518
cgaccaaguaccgaugagu

SEQ ID NO: 352500 - RNA, 19 nt, Artificial Sequence
  Description of Artificial Sequence: Synthetic oligonucleotide
  Antisense Strand to SEQ ID NO: 352499
acucaucgguacuuggucg

SEQ ID NO: 352501 - RNA, 19 nt, Artificial Sequence
  Description of Artificial Sequence: Synthetic oligonucleotide
  Sense Strand Starting at position 430 of SEQ ID NO: 316521
ccaaguaccgaugaguucu

SEQ ID NO: 352502 - RNA, 19 nt, Artificial Sequence
  Description of Artificial Sequence: Synthetic oligonucleotide
  Antisense Strand to SEQ ID NO: 352501
agaacucaucgguacuugg

SEQ ID NO: 352503 - RNA, 19 nt, Artificial Sequence
  Description of Artificial Sequence: Synthetic oligonucleotide
  Sense Strand Starting at position 430 of SEQ ID NO: 316685
guguuuaacacagaccugu

SEQ ID NO: 352504 - RNA, 19 nt, Artificial Sequence
  Description of Artificial Sequence: Synthetic oligonucleotide
  Antisense Strand to SEQ ID NO: 352503
acaggucuguguuaaacac

SEQ ID NO: 352505 - RNA, 19 nt, Artificial Sequence
  Description of Artificial Sequence: Synthetic oligonucleotide
  Sense Strand Starting at position 430 of SEQ ID NO: 316724
ugucuaugaaacugacgaa

SEQ ID NO: 352506 - RNA, 19 nt, Artificial Sequence
  Description of Artificial Sequence: Synthetic oligonucleotide
  Antisense Strand to SEQ ID NO: 352505
uucgucaguuucauagaca

SEQ ID NO: 352507 - RNA, 19 nt, Artificial Sequence
  Description of Artificial Sequence: Synthetic oligonucleotide
  Sense Strand Starting at position 430 of SEQ ID NO: 316933
ggaagaguacucgggacag

SEQ ID NO: 352508 - RNA, 19 nt, Artificial Sequence
  Description of Artificial Sequence: Synthetic oligonucleotide
  Antisense Strand to SEQ ID NO: 352507
cugucccgaguacucuucc

SEQ ID NO: 352509 - RNA, 19 nt, Artificial Sequence
  Description of Artificial Sequence: Synthetic oligonucleotide
  Sense Strand Starting at position 430 of SEQ ID NO: 317084
gauguugacagcugggaau

SEQ ID NO: 352510 - RNA, 19 nt, Artificial Sequence
  Description of Artificial Sequence: Synthetic oligonucleotide
  Antisense Strand to SEQ ID NO: 352509
auucccagcugucaacauc

SEQ ID NO: 352511 - RNA, 19 nt, Artificial Sequence
  Description of Artificial Sequence: Synthetic oligonucleotide
  Sense Strand Starting at position 430 of SEQ ID NO: 317433
gcauaaaucgcacaaucuu

SEQ ID NO: 352512 - RNA, 19 nt, Artificial Sequence
  Description of Artificial Sequence: Synthetic oligonucleotide
  Antisense Strand to SEQ ID NO: 352511
aagauugugcgauuuaugc

SEQ ID NO: 352513 - RNA, 19 nt, Artificial Sequence
  Description of Artificial Sequence: Synthetic oligonucleotide
  Sense Strand Starting at position 430 of SEQ ID NO: 317804
uagcauuugucguuacgaa

SEQ ID NO: 352514 - RNA, 19 nt, Artificial Sequence
  Description of Artificial Sequence: Synthetic oligonucleotide
  Antisense Strand to SEQ ID NO: 352513
uucguaacgacaaaugcua

SEQ ID NO: 352515 - RNA, 19 nt, Artificial Sequence
  Description of Artificial Sequence: Synthetic oligonucleotide
  Sense Strand Starting at position 430 of SEQ ID NO: 317805
agcauuugucguuacgaag

SEQ ID NO: 352516 - RNA, 19 nt, Artificial Sequence
  Description of Artificial Sequence: Synthetic oligonucleotide
  Antisense Strand to SEQ ID NO: 352515
cuucguaacgacaaaugcu

SEQ ID NO: 352517 - RNA, 19 nt, Artificial Sequence
  Description of Artificial Sequence: Synthetic oligonucleotide
  Sense Strand Starting at position 430 of SEQ ID NO: 317880
gcaagaucccugcagaugu

SEQ ID NO: 352518 - RNA, 19 nt, Artificial Sequence
  Description of Artificial Sequence: Synthetic oligonucleotide
  Antisense Strand to SEQ ID NO: 352517
acaucugcagggaucuugc

SEQ ID NO: 352519 - RNA, 19 nt, Artificial Sequence
  Description of Artificial Sequence: Synthetic oligonucleotide
  Sense Strand Starting at position 430 of SEQ ID NO: 317986
cgaaaucuagagugaccuu

SEQ ID NO: 352520 - RNA, 19 nt, Artificial Sequence
  Description of Artificial Sequence: Synthetic oligonucleotide
  Antisense Strand to SEQ ID NO: 352519
aaggucacucuagauuucg

SEQ ID NO: 352521 - RNA, 19 nt, Artificial Sequence
  Description of Artificial Sequence: Synthetic oligonucleotide
  Sense Strand Starting at position 430 of SEQ ID NO: 318125
gugggugcuggagaaauca

SEQ ID NO: 352522 - RNA, 19 nt, Artificial Sequence
  Description of Artificial Sequence: Synthetic oligonucleotide
  Antisense Strand to SEQ ID NO: 352521
ugauuucuccagcacccac

SEQ ID NO: 352523 - RNA, 19 nt, Artificial Sequence
  Description of Artificial Sequence: Synthetic oligonucleotide
  Sense Strand Starting at position 430 of SEQ ID NO: 318179
ugucuagugacguaugaaa

SEQ ID NO: 352524 - RNA, 19 nt, Artificial Sequence
  Description of Artificial Sequence: Synthetic oligonucleotide
  Antisense Strand to SEQ ID NO: 352523
uuucauacgucacuagaca

SEQ ID NO: 352525 - RNA, 19 nt, Artificial Sequence
  Description of Artificial Sequence: Synthetic oligonucleotide
  Sense Strand Starting at position 430 of SEQ ID NO: 318307
uugccauuacaucgggaaa

SEQ ID NO: 352526 - RNA, 19 nt, Artificial Sequence
  Description of Artificial Sequence: Synthetic oligonucleotide
  Antisense Strand to SEQ ID NO: 352525
uuucccgauguaauggcaa

SEQ ID NO: 352527 - RNA, 19 nt, Artificial Sequence
  Description of Artificial Sequence: Synthetic oligonucleotide
  Sense Strand Starting at position 430 of SEQ ID NO: 318437
aggcaauuacaucaagucu

SEQ ID NO: 352528 - RNA, 19 nt, Artificial Sequence
  Description of Artificial Sequence: Synthetic oligonucleotide
  Antisense Strand to SEQ ID NO: 352527
agacuugauguaauugccu

SEQ ID NO: 352529 - RNA, 19 nt, Artificial Sequence
  Description of Artificial Sequence: Synthetic oligonucleotide
  Sense Strand Starting at position 430 of SEQ ID NO: 318451
agucuuagaucucucauua

SEQ ID NO: 352530 - RNA, 19 nt, Artificial Sequence
  Description of Artificial Sequence: Synthetic oligonucleotide
  Antisense Strand to SEQ ID NO: 352529
uaaugagagaucuaagacu

SEQ ID NO: 352531 - RNA, 19 nt, Artificial Sequence
  Description of Artificial Sequence: Synthetic oligonucleotide
  Sense Strand Starting at position 430 of SEQ ID NO: 318479
uuugaaucccauggagagu

SEQ ID NO: 352532 - RNA, 19 nt, Artificial Sequence
  Description of Artificial Sequence: Synthetic oligonucleotide
  Antisense Strand to SEQ ID NO: 352531
acucuccaugggauucaaa

SEQ ID NO: 352533 - RNA, 19 nt, Artificial Sequence
  Description of Artificial Sequence: Synthetic oligonucleotide
  Sense Strand Starting at position 430 of SEQ ID NO: 318500
caagguguccuacaaagug

SEQ ID NO: 352534 - RNA, 19 nt, Artificial Sequence
  Description of Artificial Sequence: Synthetic oligonucleotide
  Antisense Strand to SEQ ID NO: 352533
cacuuuguaggacaccuug

SEQ ID NO: 352535 - RNA, 19 nt, Artificial Sequence
  Description of Artificial Sequence: Synthetic oligonucleotide
  Sense Strand Starting at position 430 of SEQ ID NO: 318567
gucacauuggauuauaguu

SEQ ID NO: 352536 - RNA, 19 nt, Artificial Sequence
  Description of Artificial Sequence: Synthetic oligonucleotide
  Antisense Strand to SEQ ID NO: 352535
aacuauaauccaaugugac

SEQ ID NO: 352537 - RNA, 19 nt, Artificial Sequence
  Description of Artificial Sequence: Synthetic oligonucleotide
  Sense Strand Starting at position 430 of SEQ ID NO: 318671
gcaggaaugugagcaauau

SEQ ID NO: 352538 - RNA, 19 nt, Artificial Sequence
  Description of Artificial Sequence: Synthetic oligonucleotide
  Antisense Strand to SEQ ID NO: 352537
auauugcucacauuccugc

SEQ ID NO: 352539 - RNA, 19 nt, Artificial Sequence
  Description of Artificial Sequence: Synthetic oligonucleotide
  Sense Strand Starting at position 430 of SEQ ID NO: 318675
gaaugugagcaauauaugu

SEQ ID NO: 352540 - RNA, 19 nt, Artificial Sequence
  Description of Artificial Sequence: Synthetic oligonucleotide
  Antisense Strand to SEQ ID NO: 352539
acauauauugcucacauuc

SEQ ID NO: 352541 - RNA, 19 nt, Artificial Sequence
  Description of Artificial Sequence: Synthetic oligonucleotide
  Sense Strand Starting at position 430 of SEQ ID NO: 318680
ugagcaauauauguacaga

SEQ ID NO: 352542 - RNA, 19 nt, Artificial Sequence
  Description of Artificial Sequence: Synthetic oligonucleotide
  Antisense Strand to SEQ ID NO: 352541
ucuguacauauauugcuca

SEQ ID NO: 352543 - RNA, 19 nt, Artificial Sequence
  Description of Artificial Sequence: Synthetic oligonucleotide
  Sense Strand Starting at position 430 of SEQ ID NO: 318839
agcugaucgacaugagaga

SEQ ID NO: 352544 - RNA, 19 nt, Artificial Sequence
  Description of Artificial Sequence: Synthetic oligonucleotide
  Antisense Strand to SEQ ID NO: 352543
ucucucaugucgaucagcu

SEQ ID NO: 352545 - RNA, 19 nt, Artificial Sequence
  Description of Artificial Sequence: Synthetic oligonucleotide
  Sense Strand Starting at position 430 of SEQ ID NO: 318879
ccagacuaaacguggaaga

SEQ ID NO: 352546 - RNA, 19 nt, Artificial Sequence
  Description of Artificial Sequence: Synthetic oligonucleotide
  Antisense Strand to SEQ ID NO: 352545
ucuuccacguuuagucugg

SEQ ID NO: 352547 - RNA, 19 nt, Artificial Sequence
  Description of Artificial Sequence: Synthetic oligonucleotide
  Sense Strand Starting at position 430 of SEQ ID NO: 318944
cugagaaagcaucagccua

SEQ ID NO: 352548 - RNA, 19 nt, Artificial Sequence
  Description of Artificial Sequence: Synthetic oligonucleotide
  Antisense Strand to SEQ ID NO: 352547
uaggcugaugcuuucucag

SEQ ID NO: 352549 - RNA, 19 nt, Artificial Sequence
  Description of Artificial Sequence: Synthetic oligonucleotide
  Sense Strand Starting at position 430 of SEQ ID NO: 319007
gaacauacucagggucuaa

SEQ ID NO: 352550 - RNA, 19 nt, Artificial Sequence
  Description of Artificial Sequence: Synthetic oligonucleotide
  Antisense Strand to SEQ ID NO: 352549
uuagacccugaguauguuc

SEQ ID NO: 352551 - RNA, 19 nt, Artificial Sequence
  Description of Artificial Sequence: Synthetic oligonucleotide
  Sense Strand Starting at position 430 of SEQ ID NO: 319025
aacaguggugucuaaugau

SEQ ID NO: 352552 - RNA, 19 nt, Artificial Sequence
  Description of Artificial Sequence: Synthetic oligonucleotide
  Antisense Strand to SEQ ID NO: 352551
aucauuagacaccacuguu

SEQ ID NO: 352553 - RNA, 19 nt, Artificial Sequence
  Description of Artificial Sequence: Synthetic oligonucleotide
  Sense Strand Starting at position 430 of SEQ ID NO: 319032
gugucuaaugauuauugca

SEQ ID NO: 352554 - RNA, 19 nt, Artificial Sequence
  Description of Artificial Sequence: Synthetic oligonucleotide
  Antisense Strand to SEQ ID NO: 352553
ugcaauaaucauuagacac

SEQ ID NO: 352555 - RNA, 19 nt, Artificial Sequence
  Description of Artificial Sequence: Synthetic oligonucleotide
  Sense Strand Starting at position 430 of SEQ ID NO: 319063
agccuaauaugagcacaua

SEQ ID NO: 352556 - RNA, 19 nt, Artificial Sequence
  Description of Artificial Sequence: Synthetic oligonucleotide
  Antisense Strand to SEQ ID NO: 352555
uaugugcucauauuaggcu

SEQ ID NO: 352557 - RNA, 19 nt, Artificial Sequence
  Description of Artificial Sequence: Synthetic oligonucleotide
  Sense Strand Starting at position 430 of SEQ ID NO: 319211
agacaaucagugggagguu

SEQ ID NO: 352558 - RNA, 19 nt, Artificial Sequence
  Description of Artificial Sequence: Synthetic oligonucleotide
  Antisense Strand to SEQ ID NO: 352557
aaccucccacugauugucu

SEQ ID NO: 352559 - RNA, 19 nt, Artificial Sequence
  Description of Artificial Sequence: Synthetic oligonucleotide
  Sense Strand Starting at position 431 of SEQ ID NO: 315364
uuuacagaguaucuuugua

SEQ ID NO: 352560 - RNA, 19 nt, Artificial Sequence
  Description of Artificial Sequence: Synthetic oligonucleotide
  Antisense Strand to SEQ ID NO: 352559
uacaaagauacucuguaaa

SEQ ID NO: 352561 - RNA, 19 nt, Artificial Sequence
  Description of Artificial Sequence: Synthetic oligonucleotide
  Sense Strand Starting at position 431 of SEQ ID NO: 315376
cuuuguauugguuaguaua

SEQ ID NO: 352562 - RNA, 19 nt, Artificial Sequence
  Description of Artificial Sequence: Synthetic oligonucleotide
  Antisense Strand to SEQ ID NO: 352561
uauacuaaccaauacaaag

SEQ ID NO: 352563 - RNA, 19 nt, Artificial Sequence
  Description of Artificial Sequence: Synthetic oligonucleotide
  Sense Strand Starting at position 431 of SEQ ID NO: 315406
cccacauugcuuugggaaa

SEQ ID NO: 352564 - RNA, 19 nt, Artificial Sequence
  Description of Artificial Sequence: Synthetic oligonucleotide
  Antisense Strand to SEQ ID NO: 352563
uuucccaaagcaauguggg

SEQ ID NO: 352565 - RNA, 19 nt, Artificial Sequence
  Description of Artificial Sequence: Synthetic oligonucleotide
  Sense Strand Starting at position 431 of SEQ ID NO: 315437
uucucaucagaguaguaga

SEQ ID NO: 352566 - RNA, 19 nt, Artificial Sequence
  Description of Artificial Sequence: Synthetic oligonucleotide
  Antisense Strand to SEQ ID NO: 352565
ucuacuacucugaugagaa

SEQ ID NO: 352567 - RNA, 19 nt, Artificial Sequence
  Description of Artificial Sequence: Synthetic oligonucleotide
  Sense Strand Starting at position 431 of SEQ ID NO: 315447
aguaguagaccuuaauuac

SEQ ID NO: 352568 - RNA, 19 nt, Artificial Sequence
  Description of Artificial Sequence: Synthetic oligonucleotide
  Antisense Strand to SEQ ID NO: 352567
guaauuaaggucuacuacu

SEQ ID NO: 352569 - RNA, 19 nt, Artificial Sequence
  Description of Artificial Sequence: Synthetic oligonucleotide
  Sense Strand Starting at position 431 of SEQ ID NO: 315457
cuuaauuacccagguggaa

SEQ ID NO: 352570 - RNA, 19 nt, Artificial Sequence
  Description of Artificial Sequence: Synthetic oligonucleotide
  Antisense Strand to SEQ ID NO: 352569
uuccaccuggguaauuaag

SEQ ID NO: 352571 - RNA, 19 nt, Artificial Sequence
  Description of Artificial Sequence: Synthetic oligonucleotide
  Sense Strand Starting at position 431 of SEQ ID NO: 315600
agaaauguuuacuuggaau

SEQ ID NO: 352572 - RNA, 19 nt, Artificial Sequence
  Description of Artificial Sequence: Synthetic oligonucleotide
  Antisense Strand to SEQ ID NO: 352571
auuccaaguaaacauuucu

SEQ ID NO: 352573 - RNA, 19 nt, Artificial Sequence
  Description of Artificial Sequence: Synthetic oligonucleotide
  Sense Strand Starting at position 431 of SEQ ID NO: 315715
augcauucucucuaguauu

SEQ ID NO: 352574 - RNA, 19 nt, Artificial Sequence
  Description of Artificial Sequence: Synthetic oligonucleotide
  Antisense Strand to SEQ ID NO: 352573
aauacuagagagaaugcau

SEQ ID NO: 352575 - RNA, 19 nt, Artificial Sequence
  Description of Artificial Sequence: Synthetic oligonucleotide
  Sense Strand Starting at position 431 of SEQ ID NO: 315781
augguaguguaguuaaaca

SEQ ID NO: 352576 - RNA, 19 nt, Artificial Sequence
  Description of Artificial Sequence: Synthetic oligonucleotide
  Antisense Strand to SEQ ID NO: 352575
uguuuaacuacacuaccau

SEQ ID NO: 352577 - RNA, 19 nt, Artificial Sequence
  Description of Artificial Sequence: Synthetic oligonucleotide
  Sense Strand Starting at position 431 of SEQ ID NO: 315786
aguguaguuaaacagugua

SEQ ID NO: 352578 - RNA, 19 nt, Artificial Sequence
  Description of Artificial Sequence: Synthetic oligonucleotide
  Antisense Strand to SEQ ID NO: 352577
uacacuguuuaacuacacu

SEQ ID NO: 352579 - RNA, 19 nt, Artificial Sequence
  Description of Artificial Sequence: Synthetic oligonucleotide
  Sense Strand Starting at position 431 of SEQ ID NO: 315868
aaucauuaauugguaugga

SEQ ID NO: 352580 - RNA, 19 nt, Artificial Sequence
  Description of Artificial Sequence: Synthetic oligonucleotide
  Antisense Strand to SEQ ID NO: 352579
uccauaccaauuaaugauu

SEQ ID NO: 352581 - RNA, 19 nt, Artificial Sequence
  Description of Artificial Sequence: Synthetic oligonucleotide
  Sense Strand Starting at position 431 of SEQ ID NO: 316008
ggaguacagugagcagaau

SEQ ID NO: 352582 - RNA, 19 nt, Artificial Sequence
  Description of Artificial Sequence: Synthetic oligonucleotide
  Antisense Strand to SEQ ID NO: 352581
auucugcucacuguacucc

SEQ ID NO: 352583 - RNA, 19 nt, Artificial Sequence
  Description of Artificial Sequence: Synthetic oligonucleotide
  Sense Strand Starting at position 431 of SEQ ID NO: 316009
gaguacagugagcagaauu

SEQ ID NO: 352584 - RNA, 19 nt, Artificial Sequence
  Description of Artificial Sequence: Synthetic oligonucleotide
  Antisense Strand to SEQ ID NO: 352583
aauucugcucacuguacuc

SEQ ID NO: 352585 - RNA, 19 nt, Artificial Sequence
  Description of Artificial Sequence: Synthetic oligonucleotide
  Sense Strand Starting at position 431 of SEQ ID NO: 316080
augugaugugcccauggau

SEQ ID NO: 352586 - RNA, 19 nt, Artificial Sequence
  Description of Artificial Sequence: Synthetic oligonucleotide
  Antisense Strand to SEQ ID NO: 352585
auccaugggcacaucacau

SEQ ID NO: 352587 - RNA, 19 nt, Artificial Sequence
  Description of Artificial Sequence: Synthetic oligonucleotide
  Sense Strand Starting at position 431 of SEQ ID NO: 316136
cuugauagguaucucccaa

SEQ ID NO: 352588 - RNA, 19 nt, Artificial Sequence
  Description of Artificial Sequence: Synthetic oligonucleotide
  Antisense Strand to SEQ ID NO: 352587
uugggagauaccuaucaag

SEQ ID NO: 352589 - RNA, 19 nt, Artificial Sequence
  Description of Artificial Sequence: Synthetic oligonucleotide
  Sense Strand Starting at position 431 of SEQ ID NO: 316534
uguguaucacuauaguaaa

SEQ ID NO: 352590 - RNA, 19 nt, Artificial Sequence
  Description of Artificial Sequence: Synthetic oligonucleotide
  Antisense Strand to SEQ ID NO: 352589
uuuacuauagugauacaca

SEQ ID NO: 352591 - RNA, 19 nt, Artificial Sequence
  Description of Artificial Sequence: Synthetic oligonucleotide
  Sense Strand Starting at position 431 of SEQ ID NO: 316557
accuacugucaggauaguu

SEQ ID NO: 352592 - RNA, 19 nt, Artificial Sequence
  Description of Artificial Sequence: Synthetic oligonucleotide
  Antisense Strand to SEQ ID NO: 352591
aacuauccugacaguaggu

SEQ ID NO: 352593 - RNA, 19 nt, Artificial Sequence
  Description of Artificial Sequence: Synthetic oligonucleotide
  Sense Strand Starting at position 431 of SEQ ID NO: 316565
ucaggauaguuccucuauu

SEQ ID NO: 352594 - RNA, 19 nt, Artificial Sequence
  Description of Artificial Sequence: Synthetic oligonucleotide
  Antisense Strand to SEQ ID NO: 352593
aauagaggaacuauccuga

SEQ ID NO: 352595 - RNA, 19 nt, Artificial Sequence
  Description of Artificial Sequence: Synthetic oligonucleotide
  Sense Strand Starting at position 431 of SEQ ID NO: 316739
gccucuucucagcaaggau

SEQ ID NO: 352596 - RNA, 19 nt, Artificial Sequence
  Description of Artificial Sequence: Synthetic oligonucleotide
  Antisense Strand to SEQ ID NO: 352595
auccuugcugagaagaggc

SEQ ID NO: 352597 - RNA, 19 nt, Artificial Sequence
  Description of Artificial Sequence: Synthetic oligonucleotide
  Sense Strand Starting at position 431 of SEQ ID NO: 316796
uugaucacaccugguaauu

SEQ ID NO: 352598 - RNA, 19 nt, Artificial Sequence
  Description of Artificial Sequence: Synthetic oligonucleotide
  Antisense Strand to SEQ ID NO: 352597
aauuaccaggugugaucaa

SEQ ID NO: 352599 - RNA, 19 nt, Artificial Sequence
  Description of Artificial Sequence: Synthetic oligonucleotide
  Sense Strand Starting at position 431 of SEQ ID NO: 316951
agugauagcucugcaaagg

SEQ ID NO: 352600 - RNA, 19 nt, Artificial Sequence
  Description of Artificial Sequence: Synthetic oligonucleotide
  Antisense Strand to SEQ ID NO: 352599
ccuuugcagagcuaucacu

SEQ ID NO: 352601 - RNA, 19 nt, Artificial Sequence
  Description of Artificial Sequence: Synthetic oligonucleotide
  Sense Strand Starting at position 431 of SEQ ID NO: 316952
gugauagcucugcaaagga

SEQ ID NO: 352602 - RNA, 19 nt, Artificial Sequence
  Description of Artificial Sequence: Synthetic oligonucleotide
  Antisense Strand to SEQ ID NO: 352601
uccuuugcagagcuaucac

SEQ ID NO: 352603 - RNA, 19 nt, Artificial Sequence
  Description of Artificial Sequence: Synthetic oligonucleotide
  Sense Strand Starting at position 431 of SEQ ID NO: 317269
agcugcucuccagauuaga

SEQ ID NO: 352604 - RNA, 19 nt, Artificial Sequence
  Description of Artificial Sequence: Synthetic oligonucleotide
  Antisense Strand to SEQ ID NO: 352603
ucuaaucuggagagcagcu

SEQ ID NO: 352605 - RNA, 19 nt, Artificial Sequence
  Description of Artificial Sequence: Synthetic oligonucleotide
  Sense Strand Starting at position 431 of SEQ ID NO: 317349
cacaucuuggcugagagua

SEQ ID NO: 352606 - RNA, 19 nt, Artificial Sequence
  Description of Artificial Sequence: Synthetic oligonucleotide
  Antisense Strand to SEQ ID NO: 352605
uacucucagccaagaugug

SEQ ID NO: 352607 - RNA, 19 nt, Artificial Sequence
  Description of Artificial Sequence: Synthetic oligonucleotide
  Sense Strand Starting at position 431 of SEQ ID NO: 317364
aguagaaacuucccaagca

SEQ ID NO: 352608 - RNA, 19 nt, Artificial Sequence
  Description of Artificial Sequence: Synthetic oligonucleotide
  Antisense Strand to SEQ ID NO: 352607
ugcuugggaaguuucuacu

SEQ ID NO: 352609 - RNA, 19 nt, Artificial Sequence
  Description of Artificial Sequence: Synthetic oligonucleotide
  Sense Strand Starting at position 431 of SEQ ID NO: 317508
cagccaugagcugauguaa

SEQ ID NO: 352610 - RNA, 19 nt, Artificial Sequence
  Description of Artificial Sequence: Synthetic oligonucleotide
  Antisense Strand to SEQ ID NO: 352609
uuacaucagcucauggcug

SEQ ID NO: 352611 - RNA, 19 nt, Artificial Sequence
  Description of Artificial Sequence: Synthetic oligonucleotide
  Sense Strand Starting at position 431 of SEQ ID NO: 317528
ccuuguuugugauuuaagu

SEQ ID NO: 352612 - RNA, 19 nt, Artificial Sequence
  Description of Artificial Sequence: Synthetic oligonucleotide
  Antisense Strand to SEQ ID NO: 352611
acuuaaaucacaaacaagg

SEQ ID NO: 352613 - RNA, 19 nt, Artificial Sequence
  Description of Artificial Sequence: Synthetic oligonucleotide
  Sense Strand Starting at position 431 of SEQ ID NO: 317592
guaaacauucgcuauuauu

SEQ ID NO: 352614 - RNA, 19 nt, Artificial Sequence
  Description of Artificial Sequence: Synthetic oligonucleotide
  Antisense Strand to SEQ ID NO: 352613
aauaauagcgaauguuuac

SEQ ID NO: 352615 - RNA, 19 nt, Artificial Sequence
  Description of Artificial Sequence: Synthetic oligonucleotide
  Sense Strand Starting at position 431 of SEQ ID NO: 317602
gcuauuauuaacgcugugu

SEQ ID NO: 352616 - RNA, 19 nt, Artificial Sequence
  Description of Artificial Sequence: Synthetic oligonucleotide
  Antisense Strand to SEQ ID NO: 352615
acacagcguuaauaauagc

SEQ ID NO: 352617 - RNA, 19 nt, Artificial Sequence
  Description of Artificial Sequence: Synthetic oligonucleotide
  Sense Strand Starting at position 431 of SEQ ID NO: 317650
cauuuagugucacaggaga

SEQ ID NO: 352618 - RNA, 19 nt, Artificial Sequence
  Description of Artificial Sequence: Synthetic oligonucleotide
  Antisense Strand to SEQ ID NO: 352617
ucuccugugacacuaaaug

SEQ ID NO: 352619 - RNA, 19 nt, Artificial Sequence
  Description of Artificial Sequence: Synthetic oligonucleotide
  Sense Strand Starting at position 431 of SEQ ID NO: 318008
ccuacuccuggugaucuaa

SEQ ID NO: 352620 - RNA, 19 nt, Artificial Sequence
  Description of Artificial Sequence: Synthetic oligonucleotide
  Antisense Strand to SEQ ID NO: 352619
uuagaucaccaggaguagg

SEQ ID NO: 352621 - RNA, 19 nt, Artificial Sequence
  Description of Artificial Sequence: Synthetic oligonucleotide
  Sense Strand Starting at position 431 of SEQ ID NO: 318451
auguaaguauacucuucua

SEQ ID NO: 352622 - RNA, 19 nt, Artificial Sequence
  Description of Artificial Sequence: Synthetic oligonucleotide
  Antisense Strand to SEQ ID NO: 352621
uagaagaguauacuuacau

SEQ ID NO: 352623 - RNA, 19 nt, Artificial Sequence
  Description of Artificial Sequence: Synthetic oligonucleotide
  Sense Strand Starting at position 431 of SEQ ID NO: 318643
uugaacaguucuguaaucu

SEQ ID NO: 352624 - RNA, 19 nt, Artificial Sequence
  Description of Artificial Sequence: Synthetic oligonucleotide
  Antisense Strand to SEQ ID NO: 352623
agauuacagaacuguucaa

SEQ ID NO: 352625 - RNA, 19 nt, Artificial Sequence
  Description of Artificial Sequence: Synthetic oligonucleotide
  Sense Strand Starting at position 431 of SEQ ID NO: 318644
ugaacaguucuguaaucuu

SEQ ID NO: 352626 - RNA, 19 nt, Artificial Sequence
  Description of Artificial Sequence: Synthetic oligonucleotide
  Antisense Strand to SEQ ID NO: 352625
aagauuacagaacuguuca

SEQ ID NO: 352627 - RNA, 19 nt, Artificial Sequence
  Description of Artificial Sequence: Synthetic oligonucleotide
  Sense Strand Starting at position 431 of SEQ ID NO: 318709
gaauguuccuuaguuuaga

SEQ ID NO: 352628 - RNA, 19 nt, Artificial Sequence
  Description of Artificial Sequence: Synthetic oligonucleotide
  Antisense Strand to SEQ ID NO: 352627
ucuaaacuaaggaacauuc

SEQ ID NO: 352629 - RNA, 19 nt, Artificial Sequence
  Description of Artificial Sequence: Synthetic oligonucleotide
  Sense Strand Starting at position 431 of SEQ ID NO: 318750
ugagauugaaauuguguau

SEQ ID NO: 352630 - RNA, 19 nt, Artificial Sequence
  Description of Artificial Sequence: Synthetic oligonucleotide
  Antisense Strand to SEQ ID NO: 352629
auacacaauuucaaucuca

SEQ ID NO: 352631 - RNA, 19 nt, Artificial Sequence
  Description of Artificial Sequence: Synthetic oligonucleotide
  Sense Strand Starting at position 431 of SEQ ID NO: 318979
acuuucuuagagugaagaa

SEQ ID NO: 352632 - RNA, 19 nt, Artificial Sequence
  Description of Artificial Sequence: Synthetic oligonucleotide
  Antisense Strand to SEQ ID NO: 352631
uucuucacucuaagaaagu

SEQ ID NO: 352633 - RNA, 19 nt, Artificial Sequence
  Description of Artificial Sequence: Synthetic oligonucleotide
  Sense Strand Starting at position 431 of SEQ ID NO: 319108
augcucaaaugaucucaga

SEQ ID NO: 352634 - RNA, 19 nt, Artificial Sequence
  Description of Artificial Sequence: Synthetic oligonucleotide
  Antisense Strand to SEQ ID NO: 352633
ucugagaucauuugagcau

SEQ ID NO: 352635 - RNA, 19 nt, Artificial Sequence
  Description of Artificial Sequence: Synthetic oligonucleotide
  Sense Strand Starting at position 431 of SEQ ID NO: 319124
agaugugguccucauguuu

SEQ ID NO: 352636 - RNA, 19 nt, Artificial Sequence
  Description of Artificial Sequence: Synthetic oligonucleotide
  Antisense Strand to SEQ ID NO: 352635
aaacaugaggaccacaucu

SEQ ID NO: 352637 - RNA, 19 nt, Artificial Sequence
  Description of Artificial Sequence: Synthetic oligonucleotide
  Sense Strand Starting at position 431 of SEQ ID NO: 319215
uggaauuagccauaucuuc

SEQ ID NO: 352638 - RNA, 19 nt, Artificial Sequence
  Description of Artificial Sequence: Synthetic oligonucleotide
  Antisense Strand to SEQ ID NO: 352637
gaagauauggcuaauucca

SEQ ID NO: 352639 - RNA, 19 nt, Artificial Sequence
  Description of Artificial Sequence: Synthetic oligonucleotide
  Sense Strand Starting at position 432 of SEQ ID NO: 315280
ugaguuguaguuuauggua

SEQ ID NO: 352640 - RNA, 19 nt, Artificial Sequence
  Description of Artificial Sequence: Synthetic oligonucleotide
  Antisense Strand to SEQ ID NO: 352639
uaccauaaacuacaacuca

SEQ ID NO: 352641 - RNA, 19 nt, Artificial Sequence
  Description of Artificial Sequence: Synthetic oligonucleotide
  Sense Strand Starting at position 432 of SEQ ID NO: 315289
guuuaugguacagauggua

SEQ ID NO: 352642 - RNA, 19 nt, Artificial Sequence
  Description of Artificial Sequence: Synthetic oligonucleotide
  Antisense Strand to SEQ ID NO: 352641
uaccaucuguaccauaaac

SEQ ID NO: 352643 - RNA, 19 nt, Artificial Sequence
  Description of Artificial Sequence: Synthetic oligonucleotide
  Sense Strand Starting at position 432 of SEQ ID NO: 315325
acaauaauugaugguuucu

SEQ ID NO: 352644 - RNA, 19 nt, Artificial Sequence
  Description of Artificial Sequence: Synthetic oligonucleotide
  Antisense Strand to SEQ ID NO: 352643
agaaaccaucaauuauugu

SEQ ID NO: 352645 - RNA, 19 nt, Artificial Sequence
  Description of Artificial Sequence: Synthetic oligonucleotide
  Sense Strand Starting at position 432 of SEQ ID NO: 315511
gggcuucccuagguuugaa

SEQ ID NO: 352646 - RNA, 19 nt, Artificial Sequence
  Description of Artificial Sequence: Synthetic oligonucleotide
  Antisense Strand to SEQ ID NO: 352645
uucaaaccuagggaagccc

SEQ ID NO: 352647 - RNA, 19 nt, Artificial Sequence
  Description of Artificial Sequence: Synthetic oligonucleotide
  Sense Strand Starting at position 432 of SEQ ID NO: 315514
cuucccuagguuugaaaua

SEQ ID NO: 352648 - RNA, 19 nt, Artificial Sequence
  Description of Artificial Sequence: Synthetic oligonucleotide
  Antisense Strand to SEQ ID NO: 352647
uauuucaaaccuagggaag

SEQ ID NO: 352649 - RNA, 19 nt, Artificial Sequence
  Description of Artificial Sequence: Synthetic oligonucleotide
  Sense Strand Starting at position 432 of SEQ ID NO: 315559
aguacuaaccugcaguuua

SEQ ID NO: 352650 - RNA, 19 nt, Artificial Sequence
  Description of Artificial Sequence: Synthetic oligonucleotide
  Antisense Strand to SEQ ID NO: 352649
uaaacugcagguuaguacu

SEQ ID NO: 352651 - RNA, 19 nt, Artificial Sequence
  Description of Artificial Sequence: Synthetic oligonucleotide
  Sense Strand Starting at position 432 of SEQ ID NO: 315868
acauacaccucagugguua

SEQ ID NO: 352652 - RNA, 19 nt, Artificial Sequence
  Description of Artificial Sequence: Synthetic oligonucleotide
  Antisense Strand to SEQ ID NO: 352651
uaaccacugagguguaugu

SEQ ID NO: 352653 - RNA, 19 nt, Artificial Sequence
  Description of Artificial Sequence: Synthetic oligonucleotide
  Sense Strand Starting at position 432 of SEQ ID NO: 316011
gaauucugaguuugaauug

SEQ ID NO: 352654 - RNA, 19 nt, Artificial Sequence
  Description of Artificial Sequence: Synthetic oligonucleotide
  Antisense Strand to SEQ ID NO: 352653
caauucaaacucagaauuc

SEQ ID NO: 352655 - RNA, 19 nt, Artificial Sequence
  Description of Artificial Sequence: Synthetic oligonucleotide
  Sense Strand Starting at position 432 of SEQ ID NO: 316063
agggacaauucugucacau

SEQ ID NO: 352656 - RNA, 19 nt, Artificial Sequence
  Description of Artificial Sequence: Synthetic oligonucleotide
  Antisense Strand to SEQ ID NO: 352655
augugacagaauugucccu

SEQ ID NO: 352657 - RNA, 19 nt, Artificial Sequence
  Description of Artificial Sequence: Synthetic oligonucleotide
  Sense Strand Starting at position 432 of SEQ ID NO: 316156
cuauuccaguguucuaaag

SEQ ID NO: 352658 - RNA, 19 nt, Artificial Sequence
  Description of Artificial Sequence: Synthetic oligonucleotide
  Antisense Strand to SEQ ID NO: 352657
cuuuagaacacuggaauag

SEQ ID NO: 352659 - RNA, 19 nt, Artificial Sequence
  Description of Artificial Sequence: Synthetic oligonucleotide
  Sense Strand Starting at position 432 of SEQ ID NO: 316268
guuaucauacuguaagagu

SEQ ID NO: 352660 - RNA, 19 nt, Artificial Sequence
  Description of Artificial Sequence: Synthetic oligonucleotide
  Antisense Strand to SEQ ID NO: 352659
acucuuacaguaugauaac

SEQ ID NO: 352661 - RNA, 19 nt, Artificial Sequence
  Description of Artificial Sequence: Synthetic oligonucleotide
  Sense Strand Starting at position 432 of SEQ ID NO: 316317
agauguaacuaauuauggu

SEQ ID NO: 352662 - RNA, 19 nt, Artificial Sequence
  Description of Artificial Sequence: Synthetic oligonucleotide
  Antisense Strand to SEQ ID NO: 352661
accauaauuaguuacaucu

SEQ ID NO: 352663 - RNA, 19 nt, Artificial Sequence
  Description of Artificial Sequence: Synthetic oligonucleotide
  Sense Strand Starting at position 432 of SEQ ID NO: 316356
acaguuacucuauaaguuu

SEQ ID NO: 352664 - RNA, 19 nt, Artificial Sequence
  Description of Artificial Sequence: Synthetic oligonucleotide
  Antisense Strand to SEQ ID NO: 352663
aaacuuauagaguaacugu

SEQ ID NO: 352665 - RNA, 19 nt, Artificial Sequence
  Description of Artificial Sequence: Synthetic oligonucleotide
  Sense Strand Starting at position 432 of SEQ ID NO: 316430
agaaaugauagcuguaagu

SEQ ID NO: 352666 - RNA, 19 nt, Artificial Sequence
  Description of Artificial Sequence: Synthetic oligonucleotide
  Antisense Strand to SEQ ID NO: 352665
acuuacagcuaucauuucu

SEQ ID NO: 352667 - RNA, 19 nt, Artificial Sequence
  Description of Artificial Sequence: Synthetic oligonucleotide
  Sense Strand Starting at position 432 of SEQ ID NO: 316432
aaaugauagcuguaaguga

SEQ ID NO: 352668 - RNA, 19 nt, Artificial Sequence
  Description of Artificial Sequence: Synthetic oligonucleotide
  Antisense Strand to SEQ ID NO: 352667
ucacuuacagcuaucauuu

SEQ ID NO: 352669 - RNA, 19 nt, Artificial Sequence
  Description of Artificial Sequence: Synthetic oligonucleotide
  Sense Strand Starting at position 432 of SEQ ID NO: 316504
cuaugauaguuacuuccuu

SEQ ID NO: 352670 - RNA, 19 nt, Artificial Sequence
  Description of Artificial Sequence: Synthetic oligonucleotide
  Antisense Strand to SEQ ID NO: 352669
aaggaaguaacuaucauag

SEQ ID NO: 352671 - RNA, 19 nt, Artificial Sequence
  Description of Artificial Sequence: Synthetic oligonucleotide
  Sense Strand Starting at position 432 of SEQ ID NO: 316509
auaguuacuuccuuguaca

SEQ ID NO: 352672 - RNA, 19 nt, Artificial Sequence
  Description of Artificial Sequence: Synthetic oligonucleotide
  Antisense Strand to SEQ ID NO: 352671
uguacaaggaaguaacuau

SEQ ID NO: 352673 - RNA, 19 nt, Artificial Sequence
  Description of Artificial Sequence: Synthetic oligonucleotide
  Sense Strand Starting at position 432 of SEQ ID NO: 316730
aguuugaguccggaggaga

SEQ ID NO: 352674 - RNA, 19 nt, Artificial Sequence
  Description of Artificial Sequence: Synthetic oligonucleotide
  Antisense Strand to SEQ ID NO: 352673
ucuccuccggacucaaacu

SEQ ID NO: 352675 - RNA, 19 nt, Artificial Sequence
  Description of Artificial Sequence: Synthetic oligonucleotide
  Sense Strand Starting at position 432 of SEQ ID NO: 316745
gagagauaggguugcugca

SEQ ID NO: 352676 - RNA, 19 nt, Artificial Sequence
  Description of Artificial Sequence: Synthetic oligonucleotide
  Antisense Strand to SEQ ID NO: 352675
ugcagcaacccuaucucuc

SEQ ID NO: 352677 - RNA, 19 nt, Artificial Sequence
  Description of Artificial Sequence: Synthetic oligonucleotide
  Sense Strand Starting at position 432 of SEQ ID NO: 316971
auuggaugcgcuuugcgaa

SEQ ID NO: 352678 - RNA, 19 nt, Artificial Sequence
  Description of Artificial Sequence: Synthetic oligonucleotide
  Antisense Strand to SEQ ID NO: 352677
uucgcaaagcgcauccaau

SEQ ID NO: 352679 - RNA, 19 nt, Artificial Sequence
  Description of Artificial Sequence: Synthetic oligonucleotide
  Sense Strand Starting at position 432 of SEQ ID NO: 317359
gauguuccggccgugugaa

SEQ ID NO: 352680 - RNA, 19 nt, Artificial Sequence
  Description of Artificial Sequence: Synthetic oligonucleotide
  Antisense Strand to SEQ ID NO: 352679
uucacacggccggaacauc

SEQ ID NO: 352681 - RNA, 19 nt, Artificial Sequence
  Description of Artificial Sequence: Synthetic oligonucleotide
  Sense Strand Starting at position 432 of SEQ ID NO: 317481
gucgauccgcuuguaacuu

SEQ ID NO: 352682 - RNA, 19 nt, Artificial Sequence
  Description of Artificial Sequence: Synthetic oligonucleotide
  Antisense Strand to SEQ ID NO: 352681
aaguuacaagcggaucgac

SEQ ID NO: 352683 - RNA, 19 nt, Artificial Sequence
  Description of Artificial Sequence: Synthetic oligonucleotide
  Sense Strand Starting at position 432 of SEQ ID NO: 318048
agccaaaugugauugaauu

SEQ ID NO: 352684 - RNA, 19 nt, Artificial Sequence
  Description of Artificial Sequence: Synthetic oligonucleotide
  Antisense Strand to SEQ ID NO: 352683
aauucaaucacauuuggcu

SEQ ID NO: 352685 - RNA, 19 nt, Artificial Sequence
  Description of Artificial Sequence: Synthetic oligonucleotide
  Sense Strand Starting at position 432 of SEQ ID NO: 318049
gccaaaugugauugaauua

SEQ ID NO: 352686 - RNA, 19 nt, Artificial Sequence
  Description of Artificial Sequence: Synthetic oligonucleotide
  Antisense Strand to SEQ ID NO: 352685
uaauucaaucacauuuggc

SEQ ID NO: 352687 - RNA, 19 nt, Artificial Sequence
  Description of Artificial Sequence: Synthetic oligonucleotide
  Sense Strand Starting at position 432 of SEQ ID NO: 318114
acuucuugugaaugagaau

SEQ ID NO: 352688 - RNA, 19 nt, Artificial Sequence
  Description of Artificial Sequence: Synthetic oligonucleotide
  Antisense Strand to SEQ ID NO: 352687
auucucauucacaagaagu

SEQ ID NO: 352689 - RNA, 19 nt, Artificial Sequence
  Description of Artificial Sequence: Synthetic oligonucleotide
  Sense Strand Starting at position 432 of SEQ ID NO: 318198
aaauuagggacguggcauu

SEQ ID NO: 352690 - RNA, 19 nt, Artificial Sequence
  Description of Artificial Sequence: Synthetic oligonucleotide
  Antisense Strand to SEQ ID NO: 352689
aaugccacgucccuaauuu

SEQ ID NO: 352691 - RNA, 19 nt, Artificial Sequence
  Description of Artificial Sequence: Synthetic oligonucleotide
  Sense Strand Starting at position 432 of SEQ ID NO: 318209
guggcauucuuauuugcaa

SEQ ID NO: 352692 - RNA, 19 nt, Artificial Sequence
  Description of Artificial Sequence: Synthetic oligonucleotide
  Antisense Strand to SEQ ID NO: 352691
uugcaaauaagaaugccac

SEQ ID NO: 352693 - RNA, 19 nt, Artificial Sequence
  Description of Artificial Sequence: Synthetic oligonucleotide
  Sense Strand Starting at position 432 of SEQ ID NO: 318313
uguacauaugucuguagaa

SEQ ID NO: 352694 - RNA, 19 nt, Artificial Sequence
  Description of Artificial Sequence: Synthetic oligonucleotide
  Antisense Strand to SEQ ID NO: 352693
uucuacagacauauguaca

SEQ ID NO: 352695 - RNA, 19 nt, Artificial Sequence
  Description of Artificial Sequence: Synthetic oligonucleotide
  Sense Strand Starting at position 432 of SEQ ID NO: 318314
guacauaugucuguagaau

SEQ ID NO: 352696 - RNA, 19 nt, Artificial Sequence
  Description of Artificial Sequence: Synthetic oligonucleotide
  Antisense Strand to SEQ ID NO: 352695
auucuacagacauauguac

SEQ ID NO: 352697 - RNA, 19 nt, Artificial Sequence
  Description of Artificial Sequence: Synthetic oligonucleotide
  Sense Strand Starting at position 432 of SEQ ID NO: 318326
guagaauuauuguuuccau

SEQ ID NO: 352698 - RNA, 19 nt, Artificial Sequence
  Description of Artificial Sequence: Synthetic oligonucleotide
  Antisense Strand to SEQ ID NO: 352697
auggaaacaauaauucuac

SEQ ID NO: 352699 - RNA, 19 nt, Artificial Sequence
  Description of Artificial Sequence: Synthetic oligonucleotide
  Sense Strand Starting at position 432 of SEQ ID NO: 318393
cuuaguguggaguggagaa

SEQ ID NO: 352700 - RNA, 19 nt, Artificial Sequence
  Description of Artificial Sequence: Synthetic oligonucleotide
  Antisense Strand to SEQ ID NO: 352699
uucuccacuccacacuaag

SEQ ID NO: 352701 - RNA, 19 nt, Artificial Sequence
  Description of Artificial Sequence: Synthetic oligonucleotide
  Sense Strand Starting at position 432 of SEQ ID NO: 318407
gagaaaggauguuugcaga

SEQ ID NO: 352702 - RNA, 19 nt, Artificial Sequence
  Description of Artificial Sequence: Synthetic oligonucleotide
  Antisense Strand to SEQ ID NO: 352701
ucugcaaacauccuuucuc

SEQ ID NO: 352703 - RNA, 19 nt, Artificial Sequence
  Description of Artificial Sequence: Synthetic oligonucleotide
  Sense Strand Starting at position 432 of SEQ ID NO: 318423
agaguuguuaguggaaaug

SEQ ID NO: 352704 - RNA, 19 nt, Artificial Sequence
  Description of Artificial Sequence: Synthetic oligonucleotide
  Antisense Strand to SEQ ID NO: 352703
cauuuccacuaacaacucu

SEQ ID NO: 352705 - RNA, 19 nt, Artificial Sequence
  Description of Artificial Sequence: Synthetic oligonucleotide
  Sense Strand Starting at position 432 of SEQ ID NO: 318433
guggaaaugguguggaaua

SEQ ID NO: 352706 - RNA, 19 nt, Artificial Sequence
  Description of Artificial Sequence: Synthetic oligonucleotide
  Antisense Strand to SEQ ID NO: 352705
uauuccacaccauuuccac

SEQ ID NO: 352707 - RNA, 19 nt, Artificial Sequence
  Description of Artificial Sequence: Synthetic oligonucleotide
  Sense Strand Starting at position 432 of SEQ ID NO: 318642
uuugcaauuguguacuaac

SEQ ID NO: 352708 - RNA, 19 nt, Artificial Sequence
  Description of Artificial Sequence: Synthetic oligonucleotide
  Antisense Strand to SEQ ID NO: 352707
guuaguacacaauugcaaa

SEQ ID NO: 352709 - RNA, 19 nt, Artificial Sequence
  Description of Artificial Sequence: Synthetic oligonucleotide
  Sense Strand Starting at position 432 of SEQ ID NO: 318829
augaaaguuguaugaugca

SEQ ID NO: 352710 - RNA, 19 nt, Artificial Sequence
  Description of Artificial Sequence: Synthetic oligonucleotide
  Antisense Strand to SEQ ID NO: 352709
ugcaucauacaacuuucau

SEQ ID NO: 352711 - RNA, 19 nt, Artificial Sequence
  Description of Artificial Sequence: Synthetic oligonucleotide
  Sense Strand Starting at position 432 of SEQ ID NO: 318930
ucccucugauaggcaaaua

SEQ ID NO: 352712 - RNA, 19 nt, Artificial Sequence
  Description of Artificial Sequence: Synthetic oligonucleotide
  Antisense Strand to SEQ ID NO: 352711
uauuugccuaucagaggga

SEQ ID NO: 352713 - RNA, 19 nt, Artificial Sequence
  Description of Artificial Sequence: Synthetic oligonucleotide
  Sense Strand Starting at position 432 of SEQ ID NO: 318940
aggcaaauauguuuccuaa

SEQ ID NO: 352714 - RNA, 19 nt, Artificial Sequence
  Description of Artificial Sequence: Synthetic oligonucleotide
  Antisense Strand to SEQ ID NO: 352713
uuaggaaacauauuugccu

SEQ ID NO: 352715 - RNA, 19 nt, Artificial Sequence
  Description of Artificial Sequence: Synthetic oligonucleotide
  Sense Strand Starting at position 432 of SEQ ID NO: 319034
gcugguucccaugaaauau

SEQ ID NO: 352716 - RNA, 19 nt, Artificial Sequence
  Description of Artificial Sequence: Synthetic oligonucleotide
  Antisense Strand to SEQ ID NO: 352715
auauuucaugggaaccagc

SEQ ID NO: 352717 - RNA, 19 nt, Artificial Sequence
  Description of Artificial Sequence: Synthetic oligonucleotide
  Sense Strand Starting at position 432 of SEQ ID NO: 319172
uguguuacuccugaaacau

SEQ ID NO: 352718 - RNA, 19 nt, Artificial Sequence
  Description of Artificial Sequence: Synthetic oligonucleotide
  Antisense Strand to SEQ ID NO: 352717
auguuucaggaguaacaca

SEQ ID NO: 352719 - RNA, 19 nt, Artificial Sequence
  Description of Artificial Sequence: Synthetic oligonucleotide
  Sense Strand Starting at position 433 of SEQ ID NO: 315376
ucacuagggucacuauagu

SEQ ID NO: 352720 - RNA, 19 nt, Artificial Sequence
  Description of Artificial Sequence: Synthetic oligonucleotide
  Antisense Strand to SEQ ID NO: 352719
acuauagugacccuaguga

SEQ ID NO: 352721 - RNA, 19 nt, Artificial Sequence
  Description of Artificial Sequence: Synthetic oligonucleotide
  Sense Strand Starting at position 433 of SEQ ID NO: 315385
ucacuauagugaccugguu

SEQ ID NO: 352722 - RNA, 19 nt, Artificial Sequence
  Description of Artificial Sequence: Synthetic oligonucleotide
  Antisense Strand to SEQ ID NO: 352721
aaccaggucacuauaguga

SEQ ID NO: 352723 - RNA, 19 nt, Artificial Sequence
  Description of Artificial Sequence: Synthetic oligonucleotide
  Sense Strand Starting at position 433 of SEQ ID NO: 315398
cugguuuccucaggaagag

SEQ ID NO: 352724 - RNA, 19 nt, Artificial Sequence
  Description of Artificial Sequence: Synthetic oligonucleotide
  Antisense Strand to SEQ ID NO: 352723
cucuuccugaggaaaccag

SEQ ID NO: 352725 - RNA, 19 nt, Artificial Sequence
  Description of Artificial Sequence: Synthetic oligonucleotide
  Sense Strand Starting at position 433 of SEQ ID NO: 315443
ccugguucuccuuaggaag

SEQ ID NO: 352726 - RNA, 19 nt, Artificial Sequence
  Description of Artificial Sequence: Synthetic oligonucleotide
  Antisense Strand to SEQ ID NO: 352725
cuuccuaaggagaaccagg

SEQ ID NO: 352727 - RNA, 19 nt, Artificial Sequence
  Description of Artificial Sequence: Synthetic oligonucleotide
  Sense Strand Starting at position 433 of SEQ ID NO: 315446
gguucuccuuaggaagaga

SEQ ID NO: 352728 - RNA, 19 nt, Artificial Sequence
  Description of Artificial Sequence: Synthetic oligonucleotide
  Antisense Strand to SEQ ID NO: 352727
ucucuuccuaaggagaacc

SEQ ID NO: 352729 - RNA, 19 nt, Artificial Sequence
  Description of Artificial Sequence: Synthetic oligonucleotide
  Sense Strand Starting at position 433 of SEQ ID NO: 315555
ggauacacauucucugcau

SEQ ID NO: 352730 - RNA, 19 nt, Artificial Sequence
  Description of Artificial Sequence: Synthetic oligonucleotide
  Antisense Strand to SEQ ID NO: 352729
augcagagaauguguaucc

SEQ ID NO: 352731 - RNA, 19 nt, Artificial Sequence
  Description of Artificial Sequence: Synthetic oligonucleotide
  Sense Strand Starting at position 433 of SEQ ID NO: 315569
ugcauacauuccguguaca

SEQ ID NO: 352732 - RNA, 19 nt, Artificial Sequence
  Description of Artificial Sequence: Synthetic oligonucleotide
  Antisense Strand to SEQ ID NO: 352731
uguacacggaauguaugca

SEQ ID NO: 352733 - RNA, 19 nt, Artificial Sequence
  Description of Artificial Sequence: Synthetic oligonucleotide
  Sense Strand Starting at position 433 of SEQ ID NO: 315570
gcauacauuccguguacau

SEQ ID NO: 352734 - RNA, 19 nt, Artificial Sequence
  Description of Artificial Sequence: Synthetic oligonucleotide
  Antisense Strand to SEQ ID NO: 352733
auguacacggaauguaugc

SEQ ID NO: 352735 - RNA, 19 nt, Artificial Sequence
  Description of Artificial Sequence: Synthetic oligonucleotide
  Sense Strand Starting at position 433 of SEQ ID NO: 315622
caugcuauguguguacaca

SEQ ID NO: 352736 - RNA, 19 nt, Artificial Sequence
  Description of Artificial Sequence: Synthetic oligonucleotide
  Antisense Strand to SEQ ID NO: 352735
uguguacacacauagcaug

SEQ ID NO: 352737 - RNA, 19 nt, Artificial Sequence
  Description of Artificial Sequence: Synthetic oligonucleotide
  Sense Strand Starting at position 433 of SEQ ID NO: 315725
cugggaagccuccaacuau

SEQ ID NO: 352738 - RNA, 19 nt, Artificial Sequence
  Description of Artificial Sequence: Synthetic oligonucleotide
  Antisense Strand to SEQ ID NO: 352737
auaguuggaggcuucccag

SEQ ID NO: 352739 - RNA, 19 nt, Artificial Sequence
  Description of Artificial Sequence: Synthetic oligonucleotide
  Sense Strand Starting at position 433 of SEQ ID NO: 315833
ucaggaagacccuggugua

SEQ ID NO: 352740 - RNA, 19 nt, Artificial Sequence
  Description of Artificial Sequence: Synthetic oligonucleotide
  Antisense Strand to SEQ ID NO: 352739
uacaccagggucuuccuga

SEQ ID NO: 352741 - RNA, 19 nt, Artificial Sequence
  Description of Artificial Sequence: Synthetic oligonucleotide
  Sense Strand Starting at position 433 of SEQ ID NO: 315932
ugaccuuggacaggucaau

SEQ ID NO: 352742 - RNA, 19 nt, Artificial Sequence
  Description of Artificial Sequence: Synthetic oligonucleotide
  Antisense Strand to SEQ ID NO: 352741
auugaccuguccaagguca

SEQ ID NO: 352743 - RNA, 19 nt, Artificial Sequence
  Description of Artificial Sequence: Synthetic oligonucleotide
  Sense Strand Starting at position 433 of SEQ ID NO: 316020
ggagauaacuuagaaggcu

SEQ ID NO: 352744 - RNA, 19 nt, Artificial Sequence
  Description of Artificial Sequence: Synthetic oligonucleotide
  Antisense Strand to SEQ ID NO: 352743
agccuucuaaguuaucucc

SEQ ID NO: 352745 - RNA, 19 nt, Artificial Sequence
  Description of Artificial Sequence: Synthetic oligonucleotide
  Sense Strand Starting at position 433 of SEQ ID NO: 316109
auuauaacuucggcagcaa

SEQ ID NO: 352746 - RNA, 19 nt, Artificial Sequence
  Description of Artificial Sequence: Synthetic oligonucleotide
  Antisense Strand to SEQ ID NO: 352745
uugcugccgaaguuauaau

SEQ ID NO: 352747 - RNA, 19 nt, Artificial Sequence
  Description of Artificial Sequence: Synthetic oligonucleotide
  Sense Strand Starting at position 433 of SEQ ID NO: 316480
gguguagagaaaugcaaca

SEQ ID NO: 352748 - RNA, 19 nt, Artificial Sequence
  Description of Artificial Sequence: Synthetic oligonucleotide
  Antisense Strand to SEQ ID NO: 352747
uguugcauuucucuacacc

SEQ ID NO: 352749 - RNA, 19 nt, Artificial Sequence
  Description of Artificial Sequence: Synthetic oligonucleotide
  Sense Strand Starting at position 433 of SEQ ID NO: 317611
ccugcuaaccaguaguaaa

SEQ ID NO: 352750 - RNA, 19 nt, Artificial Sequence
  Description of Artificial Sequence: Synthetic oligonucleotide
  Antisense Strand to SEQ ID NO: 352749
uuuacuacugguuagcagg

SEQ ID NO: 352751 - RNA, 19 nt, Artificial Sequence
  Description of Artificial Sequence: Synthetic oligonucleotide
  Sense Strand Starting at position 433 of SEQ ID NO: 317621
aguaguaaaucagacaaac

SEQ ID NO: 352752 - RNA, 19 nt, Artificial Sequence
  Description of Artificial Sequence: Synthetic oligonucleotide
  Antisense Strand to SEQ ID NO: 352751
guuugucugauuuacuacu

SEQ ID NO: 352753 - RNA, 19 nt, Artificial Sequence
  Description of Artificial Sequence: Synthetic oligonucleotide
  Sense Strand Starting at position 433 of SEQ ID NO: 317632
agacaaacguauugcacaa

SEQ ID NO: 352754 - RNA, 19 nt, Artificial Sequence
  Description of Artificial Sequence: Synthetic oligonucleotide
  Antisense Strand to SEQ ID NO: 352753
uugugcaauacguuugucu

SEQ ID NO: 352755 - RNA, 19 nt, Artificial Sequence
  Description of Artificial Sequence: Synthetic oligonucleotide
  Sense Strand Starting at position 433 of SEQ ID NO: 317687
guguaauuccaccauaacc

SEQ ID NO: 352756 - RNA, 19 nt, Artificial Sequence
  Description of Artificial Sequence: Synthetic oligonucleotide
  Antisense Strand to SEQ ID NO: 352755
gguuaugguggaauuacac

SEQ ID NO: 352757 - RNA, 19 nt, Artificial Sequence
  Description of Artificial Sequence: Synthetic oligonucleotide
  Sense Strand Starting at position 433 of SEQ ID NO: 317740
aggcuuguugcaugucuua

SEQ ID NO: 352758 - RNA, 19 nt, Artificial Sequence
  Description of Artificial Sequence: Synthetic oligonucleotide
  Antisense Strand to SEQ ID NO: 352757
uaagacaugcaacaagccu

SEQ ID NO: 352759 - RNA, 19 nt, Artificial Sequence
  Description of Artificial Sequence: Synthetic oligonucleotide
  Sense Strand Starting at position 433 of SEQ ID NO: 317742
gcuuguugcaugucuuagu

SEQ ID NO: 352760 - RNA, 19 nt, Artificial Sequence
  Description of Artificial Sequence: Synthetic oligonucleotide
  Antisense Strand to SEQ ID NO: 352759
acuaagacaugcaacaagc

SEQ ID NO: 352761 - RNA, 19 nt, Artificial Sequence
  Description of Artificial Sequence: Synthetic oligonucleotide
  Sense Strand Starting at position 433 of SEQ ID NO: 317751
augucuuaguuuccaguua

SEQ ID NO: 352762 - RNA, 19 nt, Artificial Sequence
  Description of Artificial Sequence: Synthetic oligonucleotide
  Antisense Strand to SEQ ID NO: 352761
uaacuggaaacuaagacau

SEQ ID NO: 352763 - RNA, 19 nt, Artificial Sequence
  Description of Artificial Sequence: Synthetic oligonucleotide
  Sense Strand Starting at position 433 of SEQ ID NO: 317764
caguuacugcuguaacaag

SEQ ID NO: 352764 - RNA, 19 nt, Artificial Sequence
  Description of Artificial Sequence: Synthetic oligonucleotide
  Antisense Strand to SEQ ID NO: 352763
cuuguuacagcaguaacug

SEQ ID NO: 352765 - RNA, 19 nt, Artificial Sequence
  Description of Artificial Sequence: Synthetic oligonucleotide
  Sense Strand Starting at position 433 of SEQ ID NO: 317834
ucaguucuguagguucgau

SEQ ID NO: 352766 - RNA, 19 nt, Artificial Sequence
  Description of Artificial Sequence: Synthetic oligonucleotide
  Antisense Strand to SEQ ID NO: 352765
aucgaaccuacagaacuga

SEQ ID NO: 352767 - RNA, 19 nt, Artificial Sequence
  Description of Artificial Sequence: Synthetic oligonucleotide
  Sense Strand Starting at position 433 of SEQ ID NO: 317860
acaggucuugcugagcuaa

SEQ ID NO: 352768 - RNA, 19 nt, Artificial Sequence
  Description of Artificial Sequence: Synthetic oligonucleotide
  Antisense Strand to SEQ ID NO: 352767
uuagcucagcaagaccugu

SEQ ID NO: 352769 - RNA, 19 nt, Artificial Sequence
  Description of Artificial Sequence: Synthetic oligonucleotide
  Sense Strand Starting at position 433 of SEQ ID NO: 317884
aaguguuggcaggaugcau

SEQ ID NO: 352770 - RNA, 19 nt, Artificial Sequence
  Description of Artificial Sequence: Synthetic oligonucleotide
  Antisense Strand to SEQ ID NO: 352769
augcauccugccaacacuu

SEQ ID NO: 352771 - RNA, 19 nt, Artificial Sequence
  Description of Artificial Sequence: Synthetic oligonucleotide
  Sense Strand Starting at position 433 of SEQ ID NO: 318343
gguggagucucucagaccu

SEQ ID NO: 352772 - RNA, 19 nt, Artificial Sequence
  Description of Artificial Sequence: Synthetic oligonucleotide
  Antisense Strand to SEQ ID NO: 352771
aggucugagagacuccacc

SEQ ID NO: 352773 - RNA, 19 nt, Artificial Sequence
  Description of Artificial Sequence: Synthetic oligonucleotide
  Sense Strand Starting at position 433 of SEQ ID NO: 318720
acuggagugcuaugacuca

SEQ ID NO: 352774 - RNA, 19 nt, Artificial Sequence
  Description of Artificial Sequence: Synthetic oligonucleotide
  Antisense Strand to SEQ ID NO: 352773
ugagucauagcacuccagu

SEQ ID NO: 352775 - RNA, 19 nt, Artificial Sequence
  Description of Artificial Sequence: Synthetic oligonucleotide
  Sense Strand Starting at position 433 of SEQ ID NO: 318813
ugguuaguccaacaugauc

SEQ ID NO: 352776 - RNA, 19 nt, Artificial Sequence
  Description of Artificial Sequence: Synthetic oligonucleotide
  Antisense Strand to SEQ ID NO: 352775
gaucauguuggacuaacca

SEQ ID NO: 352777 - RNA, 19 nt, Artificial Sequence
  Description of Artificial Sequence: Synthetic oligonucleotide
  Sense Strand Starting at position 433 of SEQ ID NO: 318909
guucacagguccugagagu

SEQ ID NO: 352778 - RNA, 19 nt, Artificial Sequence
  Description of Artificial Sequence: Synthetic oligonucleotide
  Antisense Strand to SEQ ID NO: 352777
acucucaggaccugugaac

SEQ ID NO: 352779 - RNA, 19 nt, Artificial Sequence
  Description of Artificial Sequence: Synthetic oligonucleotide
  Sense Strand Starting at position 433 of SEQ ID NO: 318923
agaguuaggaugugaacgu

SEQ ID NO: 352780 - RNA, 19 nt, Artificial Sequence
  Description of Artificial Sequence: Synthetic oligonucleotide
  Antisense Strand to SEQ ID NO: 352779
acguucacauccuaacucu

SEQ ID NO: 352781 - RNA, 19 nt, Artificial Sequence
  Description of Artificial Sequence: Synthetic oligonucleotide
  Sense Strand Starting at position 433 of SEQ ID NO: 318927
uuaggaugugaacgucuuu

SEQ ID NO: 352782 - RNA, 19 nt, Artificial Sequence
  Description of Artificial Sequence: Synthetic oligonucleotide
  Antisense Strand to SEQ ID NO: 352781
aaagacguucacauccuaa

SEQ ID NO: 352783 - RNA, 19 nt, Artificial Sequence
  Description of Artificial Sequence: Synthetic oligonucleotide
  Sense Strand Starting at position 433 of SEQ ID NO: 318948
gggcuauuacucugccuac

SEQ ID NO: 352784 - RNA, 19 nt, Artificial Sequence
  Description of Artificial Sequence: Synthetic oligonucleotide
  Antisense Strand to SEQ ID NO: 352783
guaggcagaguaauagccc

SEQ ID NO: 352785 - RNA, 19 nt, Artificial Sequence
  Description of Artificial Sequence: Synthetic oligonucleotide
  Sense Strand Starting at position 433 of SEQ ID NO: 318970
agcauacauugagcacuua

SEQ ID NO: 352786 - RNA, 19 nt, Artificial Sequence
  Description of Artificial Sequence: Synthetic oligonucleotide
  Antisense Strand to SEQ ID NO: 352785
uaagugcucaauguaugcu

SEQ ID NO: 352787 - RNA, 19 nt, Artificial Sequence
  Description of Artificial Sequence: Synthetic oligonucleotide
  Sense Strand Starting at position 433 of SEQ ID NO: 318981
agcacuuacucuguacuca

SEQ ID NO: 352788 - RNA, 19 nt, Artificial Sequence
  Description of Artificial Sequence: Synthetic oligonucleotide
  Antisense Strand to SEQ ID NO: 352787
ugaguacagaguaagugcu

SEQ ID NO: 352789 - RNA, 19 nt, Artificial Sequence
  Description of Artificial Sequence: Synthetic oligonucleotide
  Sense Strand Starting at position 433 of SEQ ID NO: 318982
gcacuuacucuguacucau

SEQ ID NO: 352790 - RNA, 19 nt, Artificial Sequence
  Description of Artificial Sequence: Synthetic oligonucleotide
  Antisense Strand to SEQ ID NO: 352789
augaguacagaguaagugc

SEQ ID NO: 352791 - RNA, 19 nt, Artificial Sequence
  Description of Artificial Sequence: Synthetic oligonucleotide
  Sense Strand Starting at position 433 of SEQ ID NO: 319009
ugugcuagguucugagaua

SEQ ID NO: 352792 - RNA, 19 nt, Artificial Sequence
  Description of Artificial Sequence: Synthetic oligonucleotide
  Antisense Strand to SEQ ID NO: 352791
uaucucagaaccuagcaca

SEQ ID NO: 352793 - RNA, 19 nt, Artificial Sequence
  Description of Artificial Sequence: Synthetic oligonucleotide
  Sense Strand Starting at position 433 of SEQ ID NO: 319016
gguucugagauauggcaga

SEQ ID NO: 352794 - RNA, 19 nt, Artificial Sequence
  Description of Artificial Sequence: Synthetic oligonucleotide
  Antisense Strand to SEQ ID NO: 352793
ucugccauaucucagaacc

SEQ ID NO: 352795 - RNA, 19 nt, Artificial Sequence
  Description of Artificial Sequence: Synthetic oligonucleotide
  Sense Strand Starting at position 433 of SEQ ID NO: 319040
aggccagcccucuguugau

SEQ ID NO: 352796 - RNA, 19 nt, Artificial Sequence
  Description of Artificial Sequence: Synthetic oligonucleotide
  Antisense Strand to SEQ ID NO: 352795
aucaacagagggcuggccu

SEQ ID NO: 352797 - RNA, 19 nt, Artificial Sequence
  Description of Artificial Sequence: Synthetic oligonucleotide
  Sense Strand Starting at position 433 of SEQ ID NO: 319043
ccagcccucuguugauaaa

SEQ ID NO: 352798 - RNA, 19 nt, Artificial Sequence
  Description of Artificial Sequence: Synthetic oligonucleotide
  Antisense Strand to SEQ ID NO: 352797
uuuaucaacagagggcugg

SEQ ID NO: 352799 - RNA, 19 nt, Artificial Sequence
  Description of Artificial Sequence: Synthetic oligonucleotide
  Sense Strand Starting at position 434 of SEQ ID NO: 315283
aacuuucgucuauaauggu

SEQ ID NO: 352800 - RNA, 19 nt, Artificial Sequence
  Description of Artificial Sequence: Synthetic oligonucleotide
  Antisense Strand to SEQ ID NO: 352799
accauuauagacgaaaguu

SEQ ID NO: 352801 - RNA, 19 nt, Artificial Sequence
  Description of Artificial Sequence: Synthetic oligonucleotide
  Sense Strand Starting at position 434 of SEQ ID NO: 315292
cuauaauggugacccucaa

SEQ ID NO: 352802 - RNA, 19 nt, Artificial Sequence
  Description of Artificial Sequence: Synthetic oligonucleotide
  Antisense Strand to SEQ ID NO: 352801
uugagggucaccauuauag

SEQ ID NO: 352803 - RNA, 19 nt, Artificial Sequence
  Description of Artificial Sequence: Synthetic oligonucleotide
  Sense Strand Starting at position 434 of SEQ ID NO: 315355
ugugguaaguucuucuacu

SEQ ID NO: 352804 - RNA, 19 nt, Artificial Sequence
  Description of Artificial Sequence: Synthetic oligonucleotide
  Antisense Strand to SEQ ID NO: 352803
aguagaagaacuuaccaca

SEQ ID NO: 352805 - RNA, 19 nt, Artificial Sequence
  Description of Artificial Sequence: Synthetic oligonucleotide
  Sense Strand Starting at position 434 of SEQ ID NO: 315356
gugguaaguucuucuacuu

SEQ ID NO: 352806 - RNA, 19 nt, Artificial Sequence
  Description of Artificial Sequence: Synthetic oligonucleotide
  Antisense Strand to SEQ ID NO: 352805
aaguagaagaacuuaccac

SEQ ID NO: 352807 - RNA, 19 nt, Artificial Sequence
  Description of Artificial Sequence: Synthetic oligonucleotide
  Sense Strand Starting at position 434 of SEQ ID NO: 315474
ccuagagcuuccucacaga

SEQ ID NO: 352808 - RNA, 19 nt, Artificial Sequence
  Description of Artificial Sequence: Synthetic oligonucleotide
  Antisense Strand to SEQ ID NO: 352807
ucugugaggaagcucuagg

SEQ ID NO: 352809 - RNA, 19 nt, Artificial Sequence
  Description of Artificial Sequence: Synthetic oligonucleotide
  Sense Strand Starting at position 434 of SEQ ID NO: 315543
caucgucugaugugagcua

SEQ ID NO: 352810 - RNA, 19 nt, Artificial Sequence
  Description of Artificial Sequence: Synthetic oligonucleotide
  Antisense Strand to SEQ ID NO: 352809
uagcucacaucagacgaug

SEQ ID NO: 352811 - RNA, 19 nt, Artificial Sequence
  Description of Artificial Sequence: Synthetic oligonucleotide
  Sense Strand Starting at position 434 of SEQ ID NO: 315554
gugagcuauuuauaaaguc

SEQ ID NO: 352812 - RNA, 19 nt, Artificial Sequence
  Description of Artificial Sequence: Synthetic oligonucleotide
  Antisense Strand to SEQ ID NO: 352811
gacuuuauaaauagcucac

SEQ ID NO: 352813 - RNA, 19 nt, Artificial Sequence
  Description of Artificial Sequence: Synthetic oligonucleotide
  Sense Strand Starting at position 434 of SEQ ID NO: 315587
accggaauaucuuucugaa

SEQ ID NO: 352814 - RNA, 19 nt, Artificial Sequence
  Description of Artificial Sequence: Synthetic oligonucleotide
  Antisense Strand to SEQ ID NO: 352813
uucagaaagauauuccggu

SEQ ID NO: 352815 - RNA, 19 nt, Artificial Sequence
  Description of Artificial Sequence: Synthetic oligonucleotide
  Sense Strand Starting at position 434 of SEQ ID NO: 315589
cggaauaucuuucugaaau

SEQ ID NO: 352816 - RNA, 19 nt, Artificial Sequence
  Description of Artificial Sequence: Synthetic oligonucleotide
  Antisense Strand to SEQ ID NO: 352815
auuucagaaagauauuccg

SEQ ID NO: 352817 - RNA, 19 nt, Artificial Sequence
  Description of Artificial Sequence: Synthetic oligonucleotide
  Sense Strand Starting at position 434 of SEQ ID NO: 315675
uuaaaugaacgcuauccuu

SEQ ID NO: 352818 - RNA, 19 nt, Artificial Sequence
  Description of Artificial Sequence: Synthetic oligonucleotide
  Antisense Strand to SEQ ID NO: 352817
aaggauagcguucauuuaa

SEQ ID NO: 352819 - RNA, 19 nt, Artificial Sequence
  Description of Artificial Sequence: Synthetic oligonucleotide
  Sense Strand Starting at position 434 of SEQ ID NO: 315842
uaaacaaagugagaauugu

SEQ ID NO: 352820 - RNA, 19 nt, Artificial Sequence
  Description of Artificial Sequence: Synthetic oligonucleotide
  Antisense Strand to SEQ ID NO: 352819
acaauucucacuuuguuua

SEQ ID NO: 352821 - RNA, 19 nt, Artificial Sequence
  Description of Artificial Sequence: Synthetic oligonucleotide
  Sense Strand Starting at position 434 of SEQ ID NO: 315903
cagagacuuuauccucguu

SEQ ID NO: 352822 - RNA, 19 nt, Artificial Sequence
  Description of Artificial Sequence: Synthetic oligonucleotide
  Antisense Strand to SEQ ID NO: 352821
aacgaggauaaagucucug

SEQ ID NO: 352823 - RNA, 19 nt, Artificial Sequence
  Description of Artificial Sequence: Synthetic oligonucleotide
  Sense Strand Starting at position 434 of SEQ ID NO: 315905
gagacuuuauccucguuaa

SEQ ID NO: 352824 - RNA, 19 nt, Artificial Sequence
  Description of Artificial Sequence: Synthetic oligonucleotide
  Antisense Strand to SEQ ID NO: 352823
uuaacgaggauaaagucuc

SEQ ID NO: 352825 - RNA, 19 nt, Artificial Sequence
  Description of Artificial Sequence: Synthetic oligonucleotide
  Sense Strand Starting at position 434 of SEQ ID NO: 315906
agacuuuauccucguuaac

SEQ ID NO: 352826 - RNA, 19 nt, Artificial Sequence
  Description of Artificial Sequence: Synthetic oligonucleotide
  Antisense Strand to SEQ ID NO: 352825
guuaacgaggauaaagucu

SEQ ID NO: 352827 - RNA, 19 nt, Artificial Sequence
  Description of Artificial Sequence: Synthetic oligonucleotide
  Sense Strand Starting at position 434 of SEQ ID NO: 315908
acuuuauccucguuaacag

SEQ ID NO: 352828 - RNA, 19 nt, Artificial Sequence
  Description of Artificial Sequence: Synthetic oligonucleotide
  Antisense Strand to SEQ ID NO: 352827
cuguuaacgaggauaaagu

SEQ ID NO: 352829 - RNA, 19 nt, Artificial Sequence
  Description of Artificial Sequence: Synthetic oligonucleotide
  Sense Strand Starting at position 434 of SEQ ID NO: 316169
aguguuauuccagagcaga

SEQ ID NO: 352830 - RNA, 19 nt, Artificial Sequence
  Description of Artificial Sequence: Synthetic oligonucleotide
  Antisense Strand to SEQ ID NO: 352829
ucugcucuggaauaacacu

SEQ ID NO: 352831 - RNA, 19 nt, Artificial Sequence
  Description of Artificial Sequence: Synthetic oligonucleotide
  Sense Strand Starting at position 434 of SEQ ID NO: 316588
ugauuaagccugggaggga

SEQ ID NO: 352832 - RNA, 19 nt, Artificial Sequence
  Description of Artificial Sequence: Synthetic oligonucleotide
  Antisense Strand to SEQ ID NO: 352831
ucccucccaggcuuaauca

SEQ ID NO: 352833 - RNA, 19 nt, Artificial Sequence
  Description of Artificial Sequence: Synthetic oligonucleotide
  Sense Strand Starting at position 434 of SEQ ID NO: 316964
cccggaccucugggaaagu

SEQ ID NO: 352834 - RNA, 19 nt, Artificial Sequence
  Description of Artificial Sequence: Synthetic oligonucleotide
  Antisense Strand to SEQ ID NO: 352833
acuuucccagagguccggg

SEQ ID NO: 352835 - RNA, 19 nt, Artificial Sequence
  Description of Artificial Sequence: Synthetic oligonucleotide
  Sense Strand Starting at position 434 of SEQ ID NO: 316975
gggaaaguucgcgggcaca

SEQ ID NO: 352836 - RNA, 19 nt, Artificial Sequence
  Description of Artificial Sequence: Synthetic oligonucleotide
  Antisense Strand to SEQ ID NO: 352835
ugugcccgcgaacuuuccc

SEQ ID NO: 352837 - RNA, 19 nt, Artificial Sequence
  Description of Artificial Sequence: Synthetic oligonucleotide
  Sense Strand Starting at position 434 of SEQ ID NO: 317548
cagaaagugacacgucgaa

SEQ ID NO: 352838 - RNA, 19 nt, Artificial Sequence
  Description of Artificial Sequence: Synthetic oligonucleotide
  Antisense Strand to SEQ ID NO: 352837
uucgacgugucacuuucug

SEQ ID NO: 352839 - RNA, 19 nt, Artificial Sequence
  Description of Artificial Sequence: Synthetic oligonucleotide
  Sense Strand Starting at position 434 of SEQ ID NO: 317552
aagugacacgucgaagauu

SEQ ID NO: 352840 - RNA, 19 nt, Artificial Sequence
  Description of Artificial Sequence: Synthetic oligonucleotide
  Antisense Strand to SEQ ID NO: 352839
aaucuucgacgugucacuu

SEQ ID NO: 352841 - RNA, 19 nt, Artificial Sequence
  Description of Artificial Sequence: Synthetic oligonucleotide
  Sense Strand Starting at position 434 of SEQ ID NO: 317638
agcggauuccucggacaaa

SEQ ID NO: 352842 - RNA, 19 nt, Artificial Sequence
  Description of Artificial Sequence: Synthetic oligonucleotide
  Antisense Strand to SEQ ID NO: 352841
uuuguccgaggaauccgcu

SEQ ID NO: 352843 - RNA, 19 nt, Artificial Sequence
  Description of Artificial Sequence: Synthetic oligonucleotide
  Sense Strand Starting at position 434 of SEQ ID NO: 317715
agaggaaucuacccguuuc

SEQ ID NO: 352844 - RNA, 19 nt, Artificial Sequence
  Description of Artificial Sequence: Synthetic oligonucleotide
  Antisense Strand to SEQ ID NO: 352843
gaaacggguagauuccucu

SEQ ID NO: 352845 - RNA, 19 nt, Artificial Sequence
  Description of Artificial Sequence: Synthetic oligonucleotide
  Sense Strand Starting at position 434 of SEQ ID NO: 318194
gggauuccgccaugucaau

SEQ ID NO: 352846 - RNA, 19 nt, Artificial Sequence
  Description of Artificial Sequence: Synthetic oligonucleotide
  Antisense Strand to SEQ ID NO: 352845
auugacauggcggaauccc

SEQ ID NO: 352847 - RNA, 19 nt, Artificial Sequence
  Description of Artificial Sequence: Synthetic oligonucleotide
  Sense Strand Starting at position 434 of SEQ ID NO: 318251
accguaaaccgccgaauau

SEQ ID NO: 352848 - RNA, 19 nt, Artificial Sequence
  Description of Artificial Sequence: Synthetic oligonucleotide
  Antisense Strand to SEQ ID NO: 352847
auauucggcgguuuacggu

SEQ ID NO: 352849 - RNA, 19 nt, Artificial Sequence
  Description of Artificial Sequence: Synthetic oligonucleotide
  Sense Strand Starting at position 434 of SEQ ID NO: 318252
ccguaaaccgccgaauaua

SEQ ID NO: 352850 - RNA, 19 nt, Artificial Sequence
  Description of Artificial Sequence: Synthetic oligonucleotide
  Antisense Strand to SEQ ID NO: 352849
uauauucggcgguuuacgg

SEQ ID NO: 352851 - RNA, 19 nt, Artificial Sequence
  Description of Artificial Sequence: Synthetic oligonucleotide
  Sense Strand Starting at position 434 of SEQ ID NO: 318413
ucugcagaucgccaaagua

SEQ ID NO: 352852 - RNA, 19 nt, Artificial Sequence
  Description of Artificial Sequence: Synthetic oligonucleotide
  Antisense Strand to SEQ ID NO: 352851
uacuuuggcgaucugcaga

SEQ ID NO: 352853 - RNA, 19 nt, Artificial Sequence
  Description of Artificial Sequence: Synthetic oligonucleotide
  Sense Strand Starting at position 434 of SEQ ID NO: 318439
ggcaauguuuacucaguga

SEQ ID NO: 352854 - RNA, 19 nt, Artificial Sequence
  Description of Artificial Sequence: Synthetic oligonucleotide
  Antisense Strand to SEQ ID NO: 352853
ucacugaguaaacauugcc

SEQ ID NO: 352855 - RNA, 19 nt, Artificial Sequence
  Description of Artificial Sequence: Synthetic oligonucleotide
  Sense Strand Starting at position 434 of SEQ ID NO: 318443
auguuuacucagugauaau

SEQ ID NO: 352856 - RNA, 19 nt, Artificial Sequence
  Description of Artificial Sequence: Synthetic oligonucleotide
  Antisense Strand to SEQ ID NO: 352855
auuaucacugaguaaacau

SEQ ID NO: 352857 - RNA, 19 nt, Artificial Sequence
  Description of Artificial Sequence: Synthetic oligonucleotide
  Sense Strand Starting at position 434 of SEQ ID NO: 318453
agugauaauuaagccuaaa

SEQ ID NO: 352858 - RNA, 19 nt, Artificial Sequence
  Description of Artificial Sequence: Synthetic oligonucleotide
  Antisense Strand to SEQ ID NO: 352857
uuuaggcuuaauuaucacu

SEQ ID NO: 352859 - RNA, 19 nt, Artificial Sequence
  Description of Artificial Sequence: Synthetic oligonucleotide
  Sense Strand Starting at position 434 of SEQ ID NO: 318529
gcaaccuugugagcuauau

SEQ ID NO: 352860 - RNA, 19 nt, Artificial Sequence
  Description of Artificial Sequence: Synthetic oligonucleotide
  Antisense Strand to SEQ ID NO: 352859
auauagcucacaagguugc

SEQ ID NO: 352861 - RNA, 19 nt, Artificial Sequence
  Description of Artificial Sequence: Synthetic oligonucleotide
  Sense Strand Starting at position 434 of SEQ ID NO: 318533
ccuugugagcuauauuacu

SEQ ID NO: 352862 - RNA, 19 nt, Artificial Sequence
  Description of Artificial Sequence: Synthetic oligonucleotide
  Antisense Strand to SEQ ID NO: 352861
aguaauauagcucacaagg

SEQ ID NO: 352863 - RNA, 19 nt, Artificial Sequence
  Description of Artificial Sequence: Synthetic oligonucleotide
  Sense Strand Starting at position 434 of SEQ ID NO: 318790
ggaacucugucgcucaagu

SEQ ID NO: 352864 - RNA, 19 nt, Artificial Sequence
  Description of Artificial Sequence: Synthetic oligonucleotide
  Antisense Strand to SEQ ID NO: 352863
acuugagcgacagaguucc

SEQ ID NO: 352865 - RNA, 19 nt, Artificial Sequence
  Description of Artificial Sequence: Synthetic oligonucleotide
  Sense Strand Starting at position 434 of SEQ ID NO: 318792
aacucugucgcucaaguga

SEQ ID NO: 352866 - RNA, 19 nt, Artificial Sequence
  Description of Artificial Sequence: Synthetic oligonucleotide
  Antisense Strand to SEQ ID NO: 352865
ucacuugagcgacagaguu

SEQ ID NO: 352867 - RNA, 19 nt, Artificial Sequence
  Description of Artificial Sequence: Synthetic oligonucleotide
  Sense Strand Starting at position 434 of SEQ ID NO: 318882
ugcguuucucagggacaaa

SEQ ID NO: 352868 - RNA, 19 nt, Artificial Sequence
  Description of Artificial Sequence: Synthetic oligonucleotide
  Antisense Strand to SEQ ID NO: 352867
uuugucccugagaaacgca

SEQ ID NO: 352869 - RNA, 19 nt, Artificial Sequence
  Description of Artificial Sequence: Synthetic oligonucleotide
  Sense Strand Starting at position 434 of SEQ ID NO: 318883
gcguuucucagggacaaag

SEQ ID NO: 352870 - RNA, 19 nt, Artificial Sequence
  Description of Artificial Sequence: Synthetic oligonucleotide
  Antisense Strand to SEQ ID NO: 352869
cuuugucccugagaaacgc

SEQ ID NO: 352871 - RNA, 19 nt, Artificial Sequence
  Description of Artificial Sequence: Synthetic oligonucleotide
  Sense Strand Starting at position 434 of SEQ ID NO: 319115
auccauagcuguccaggua

SEQ ID NO: 352872 - RNA, 19 nt, Artificial Sequence
  Description of Artificial Sequence: Synthetic oligonucleotide
  Antisense Strand to SEQ ID NO: 352871
uaccuggacagcuauggau

SEQ ID NO: 352873 - RNA, 19 nt, Artificial Sequence
  Description of Artificial Sequence: Synthetic oligonucleotide
  Sense Strand Starting at position 434 of SEQ ID NO: 319116
uccauagcuguccagguau

SEQ ID NO: 352874 - RNA, 19 nt, Artificial Sequence
  Description of Artificial Sequence: Synthetic oligonucleotide
  Antisense Strand to SEQ ID NO: 352873
auaccuggacagcuaugga

SEQ ID NO: 352875 - RNA, 19 nt, Artificial Sequence
  Description of Artificial Sequence: Synthetic oligonucleotide
  Sense Strand Starting at position 434 of SEQ ID NO: 319123
cuguccagguauucugaau

SEQ ID NO: 352876 - RNA, 19 nt, Artificial Sequence
  Description of Artificial Sequence: Synthetic oligonucleotide
  Antisense Strand to SEQ ID NO: 352875
auucagaauaccuggacag

SEQ ID NO: 352877 - RNA, 19 nt, Artificial Sequence
  Description of Artificial Sequence: Synthetic oligonucleotide
  Sense Strand Starting at position 434 of SEQ ID NO: 319174
aggagcauucagggaguca

SEQ ID NO: 352878 - RNA, 19 nt, Artificial Sequence
  Description of Artificial Sequence: Synthetic oligonucleotide
  Antisense Strand to SEQ ID NO: 352877
ugacucccugaaugcuccu

SEQ ID NO: 352879 - RNA, 19 nt, Artificial Sequence
  Description of Artificial Sequence: Synthetic oligonucleotide
  Sense Strand Starting at position 435 of SEQ ID NO: 315243
aguguuauuccagagcaga

SEQ ID NO: 352880 - RNA, 19 nt, Artificial Sequence
  Description of Artificial Sequence: Synthetic oligonucleotide
  Antisense Strand to SEQ ID NO: 352879
ucugcucuggaauaacacu

SEQ ID NO: 352881 - RNA, 19 nt, Artificial Sequence
  Description of Artificial Sequence: Synthetic oligonucleotide
  Sense Strand Starting at position 435 of SEQ ID NO: 315662
ugauuaagccugggaggga

SEQ ID NO: 352882 - RNA, 19 nt, Artificial Sequence
  Description of Artificial Sequence: Synthetic oligonucleotide
  Antisense Strand to SEQ ID NO: 352881
ucccucccaggcuuaauca

SEQ ID NO: 352883 - RNA, 19 nt, Artificial Sequence
  Description of Artificial Sequence: Synthetic oligonucleotide
  Sense Strand Starting at position 435 of SEQ ID NO: 315759
gcggccaaauucuaaauuu

SEQ ID NO: 352884 - RNA, 19 nt, Artificial Sequence
  Description of Artificial Sequence: Synthetic oligonucleotide
  Antisense Strand to SEQ ID NO: 352883
aaauuuagaauuuggccgc

SEQ ID NO: 352885 - RNA, 19 nt, Artificial Sequence
  Description of Artificial Sequence: Synthetic oligonucleotide
  Sense Strand Starting at position 435 of SEQ ID NO: 316038
cccggaccucugggaaagu

SEQ ID NO: 352886 - RNA, 19 nt, Artificial Sequence
  Description of Artificial Sequence: Synthetic oligonucleotide
  Antisense Strand to SEQ ID NO: 352885
acuuucccagagguccggg

SEQ ID NO: 352887 - RNA, 19 nt, Artificial Sequence
  Description of Artificial Sequence: Synthetic oligonucleotide
  Sense Strand Starting at position 435 of SEQ ID NO: 316049
gggaaaguucgcgggcaca

SEQ ID NO: 352888 - RNA, 19 nt, Artificial Sequence
  Description of Artificial Sequence: Synthetic oligonucleotide
  Antisense Strand to SEQ ID NO: 352887
ugugcccgcgaacuuuccc

SEQ ID NO: 352889 - RNA, 19 nt, Artificial Sequence
  Description of Artificial Sequence: Synthetic oligonucleotide
  Sense Strand Starting at position 435 of SEQ ID NO: 316622
cagaaagugacacgucgaa

SEQ ID NO: 352890 - RNA, 19 nt, Artificial Sequence
  Description of Artificial Sequence: Synthetic oligonucleotide
  Antisense Strand to SEQ ID NO: 352889
uucgacgugucacuuucug

SEQ ID NO: 352891 - RNA, 19 nt, Artificial Sequence
  Description of Artificial Sequence: Synthetic oligonucleotide
  Sense Strand Starting at position 435 of SEQ ID NO: 316626
aagugacacgucgaagauu

SEQ ID NO: 352892 - RNA, 19 nt, Artificial Sequence
  Description of Artificial Sequence: Synthetic oligonucleotide
  Antisense Strand to SEQ ID NO: 352891
aaucuucgacgugucacuu

SEQ ID NO: 352893 - RNA, 19 nt, Artificial Sequence
  Description of Artificial Sequence: Synthetic oligonucleotide
  Sense Strand Starting at position 435 of SEQ ID NO: 316712
agcggauuccucggacaaa

SEQ ID NO: 352894 - RNA, 19 nt, Artificial Sequence
  Description of Artificial Sequence: Synthetic oligonucleotide
  Antisense Strand to SEQ ID NO: 352893
uuuguccgaggaauccgcu

SEQ ID NO: 352895 - RNA, 19 nt, Artificial Sequence
  Description of Artificial Sequence: Synthetic oligonucleotide
  Sense Strand Starting at position 435 of SEQ ID NO: 316789
agaggaaucuacccguuuc

SEQ ID NO: 352896 - RNA, 19 nt, Artificial Sequence
  Description of Artificial Sequence: Synthetic oligonucleotide
  Antisense Strand to SEQ ID NO: 352895
gaaacggguagauuccucu

SEQ ID NO: 352897 - RNA, 19 nt, Artificial Sequence
  Description of Artificial Sequence: Synthetic oligonucleotide
  Sense Strand Starting at position 435 of SEQ ID NO: 317268
gggauuccgccaugucaau

SEQ ID NO: 352898 - RNA, 19 nt, Artificial Sequence
  Description of Artificial Sequence: Synthetic oligonucleotide
  Antisense Strand to SEQ ID NO: 352897
auugacauggcggaauccc

SEQ ID NO: 352899 - RNA, 19 nt, Artificial Sequence
  Description of Artificial Sequence: Synthetic oligonucleotide
  Sense Strand Starting at position 435 of SEQ ID NO: 317325
accguaaaccgccgaauau

SEQ ID NO: 352900 - RNA, 19 nt, Artificial Sequence
  Description of Artificial Sequence: Synthetic oligonucleotide
  Antisense Strand to SEQ ID NO: 352899
auauucggcgguuuacggu

SEQ ID NO: 352901 - RNA, 19 nt, Artificial Sequence
  Description of Artificial Sequence: Synthetic oligonucleotide
  Sense Strand Starting at position 435 of SEQ ID NO: 317326
ccguaaaccgccgaauaua

SEQ ID NO: 352902 - RNA, 19 nt, Artificial Sequence
  Description of Artificial Sequence: Synthetic oligonucleotide
  Antisense Strand to SEQ ID NO: 352901
uauauucggcgguuuacgg

SEQ ID NO: 352903 - RNA, 19 nt, Artificial Sequence
  Description of Artificial Sequence: Synthetic oligonucleotide
  Sense Strand Starting at position 435 of SEQ ID NO: 317487
ucugcagaucgccaaagua

SEQ ID NO: 352904 - RNA, 19 nt, Artificial Sequence
  Description of Artificial Sequence: Synthetic oligonucleotide
  Antisense Strand to SEQ ID NO: 352903
uacuuuggcgaucugcaga

SEQ ID NO: 352905 - RNA, 19 nt, Artificial Sequence
  Description of Artificial Sequence: Synthetic oligonucleotide
  Sense Strand Starting at position 435 of SEQ ID NO: 317513
ggcaauguuuacucaguga

SEQ ID NO: 352906 - RNA, 19 nt, Artificial Sequence
  Description of Artificial Sequence: Synthetic oligonucleotide
  Antisense Strand to SEQ ID NO: 352905
ucacugaguaaacauugcc

SEQ ID NO: 352907 - RNA, 19 nt, Artificial Sequence
  Description of Artificial Sequence: Synthetic oligonucleotide
  Sense Strand Starting at position 435 of SEQ ID NO: 317517
auguuuacucagugauaau

SEQ ID NO: 352908 - RNA, 19 nt, Artificial Sequence
  Description of Artificial Sequence: Synthetic oligonucleotide
  Antisense Strand to SEQ ID NO: 352907
auuaucacugaguaaacau

SEQ ID NO: 352909 - RNA, 19 nt, Artificial Sequence
  Description of Artificial Sequence: Synthetic oligonucleotide
  Sense Strand Starting at position 435 of SEQ ID NO: 317527
agugauaauuaagccuaaa

SEQ ID NO: 352910 - RNA, 19 nt, Artificial Sequence
  Description of Artificial Sequence: Synthetic oligonucleotide
  Antisense Strand to SEQ ID NO: 352909
uuuaggcuuaauuaucacu

SEQ ID NO: 352911 - RNA, 19 nt, Artificial Sequence
  Description of Artificial Sequence: Synthetic oligonucleotide
  Sense Strand Starting at position 435 of SEQ ID NO: 317603
gcaaccuugugagcuauau

SEQ ID NO: 352912 - RNA, 19 nt, Artificial Sequence
  Description of Artificial Sequence: Synthetic oligonucleotide
  Antisense Strand to SEQ ID NO: 352911
auauagcucacaagguugc

SEQ ID NO: 352913 - RNA, 19 nt, Artificial Sequence
  Description of Artificial Sequence: Synthetic oligonucleotide
  Sense Strand Starting at position 435 of SEQ ID NO: 317607
ccuugugagcuauauuacu

SEQ ID NO: 352914 - RNA, 19 nt, Artificial Sequence
  Description of Artificial Sequence: Synthetic oligonucleotide
  Antisense Strand to SEQ ID NO: 352913
aguaauauagcucacaagg

SEQ ID NO: 352915 - RNA, 19 nt, Artificial Sequence
  Description of Artificial Sequence: Synthetic oligonucleotide
  Sense Strand Starting at position 435 of SEQ ID NO: 317864
ggaacucugucgcucaagu

SEQ ID NO: 352916 - RNA, 19 nt, Artificial Sequence
  Description of Artificial Sequence: Synthetic oligonucleotide
  Antisense Strand to SEQ ID NO: 352915
acuugagcgacagaguucc

SEQ ID NO: 352917 - RNA, 19 nt, Artificial Sequence
  Description of Artificial Sequence: Synthetic oligonucleotide
  Sense Strand Starting at position 435 of SEQ ID NO: 317866
aacucugucgcucaaguga

SEQ ID NO: 352918 - RNA, 19 nt, Artificial Sequence
  Description of Artificial Sequence: Synthetic oligonucleotide
  Antisense Strand to SEQ ID NO: 352917
ucacuugagcgacagaguu

SEQ ID NO: 352919 - RNA, 19 nt, Artificial Sequence
  Description of Artificial Sequence: Synthetic oligonucleotide
  Sense Strand Starting at position 435 of SEQ ID NO: 317956
ugcguuucucagggacaaa

SEQ ID NO: 352920 - RNA, 19 nt, Artificial Sequence
  Description of Artificial Sequence: Synthetic oligonucleotide
  Antisense Strand to SEQ ID NO: 352919
uuugucccugagaaacgca

SEQ ID NO: 352921 - RNA, 19 nt, Artificial Sequence
  Description of Artificial Sequence: Synthetic oligonucleotide
  Sense Strand Starting at position 435 of SEQ ID NO: 317957
gcguuucucagggacaaag

SEQ ID NO: 352922 - RNA, 19 nt, Artificial Sequence
  Description of Artificial Sequence: Synthetic oligonucleotide
  Antisense Strand to SEQ ID NO: 352921
cuuugucccugagaaacgc

SEQ ID NO: 352923 - RNA, 19 nt, Artificial Sequence
  Description of Artificial Sequence: Synthetic oligonucleotide
  Sense Strand Starting at position 435 of SEQ ID NO: 318189
auccauagcuguccaggua

SEQ ID NO: 352924 - RNA, 19 nt, Artificial Sequence
  Description of Artificial Sequence: Synthetic oligonucleotide
  Antisense Strand to SEQ ID NO: 352923
uaccuggacagcuauggau

SEQ ID NO: 352925 - RNA, 19 nt, Artificial Sequence
  Description of Artificial Sequence: Synthetic oligonucleotide
  Sense Strand Starting at position 435 of SEQ ID NO: 318190
uccauagcuguccagguau

SEQ ID NO: 352926 - RNA, 19 nt, Artificial Sequence
  Description of Artificial Sequence: Synthetic oligonucleotide
  Antisense Strand to SEQ ID NO: 352925
auaccuggacagcuaugga

SEQ ID NO: 352927 - RNA, 19 nt, Artificial Sequence
  Description of Artificial Sequence: Synthetic oligonucleotide
  Sense Strand Starting at position 435 of SEQ ID NO: 318197
cuguccagguauucugaau

SEQ ID NO: 352928 - RNA, 19 nt, Artificial Sequence
  Description of Artificial Sequence: Synthetic oligonucleotide
  Antisense Strand to SEQ ID NO: 352927
auucagaauaccuggacag

SEQ ID NO: 352929 - RNA, 19 nt, Artificial Sequence
  Description of Artificial Sequence: Synthetic oligonucleotide
  Sense Strand Starting at position 435 of SEQ ID NO: 318248
aggagcauucagggaguca

SEQ ID NO: 352930 - RNA, 19 nt, Artificial Sequence
  Description of Artificial Sequence: Synthetic oligonucleotide
  Antisense Strand to SEQ ID NO: 352929
ugacucccugaaugcuccu

SEQ ID NO: 352931 - RNA, 19 nt, Artificial Sequence
  Description of Artificial Sequence: Synthetic oligonucleotide
  Sense Strand Starting at position 435 of SEQ ID NO: 318313
aguacauaauacucuguua

SEQ ID NO: 352932 - RNA, 19 nt, Artificial Sequence
  Description of Artificial Sequence: Synthetic oligonucleotide
  Antisense Strand to SEQ ID NO: 352931
uaacagaguauuauguacu

SEQ ID NO: 352933 - RNA, 19 nt, Artificial Sequence
  Description of Artificial Sequence: Synthetic oligonucleotide
  Sense Strand Starting at position 435 of SEQ ID NO: 318526
cuccaauucuaggucauag

SEQ ID NO: 352934 - RNA, 19 nt, Artificial Sequence
  Description of Artificial Sequence: Synthetic oligonucleotide
  Antisense Strand to SEQ ID NO: 352933
cuaugaccuagaauuggag

SEQ ID NO: 352935 - RNA, 19 nt, Artificial Sequence
  Description of Artificial Sequence: Synthetic oligonucleotide
  Sense Strand Starting at position 435 of SEQ ID NO: 318538
gucauaguccugcaugaga

SEQ ID NO: 352936 - RNA, 19 nt, Artificial Sequence
  Description of Artificial Sequence: Synthetic oligonucleotide
  Antisense Strand to SEQ ID NO: 352935
ucucaugcaggacuaugac

SEQ ID NO: 352937 - RNA, 19 nt, Artificial Sequence
  Description of Artificial Sequence: Synthetic oligonucleotide
  Sense Strand Starting at position 435 of SEQ ID NO: 318540
cauaguccugcaugagaag

SEQ ID NO: 352938 - RNA, 19 nt, Artificial Sequence
  Description of Artificial Sequence: Synthetic oligonucleotide
  Antisense Strand to SEQ ID NO: 352937
cuucucaugcaggacuaug

SEQ ID NO: 352939 - RNA, 19 nt, Artificial Sequence
  Description of Artificial Sequence: Synthetic oligonucleotide
  Sense Strand Starting at position 435 of SEQ ID NO: 318577
aguaguuccuuagugccaa

SEQ ID NO: 352940 - RNA, 19 nt, Artificial Sequence
  Description of Artificial Sequence: Synthetic oligonucleotide
  Antisense Strand to SEQ ID NO: 352939
uuggcacuaaggaacuacu

SEQ ID NO: 352941 - RNA, 19 nt, Artificial Sequence
  Description of Artificial Sequence: Synthetic oligonucleotide
  Sense Strand Starting at position 435 of SEQ ID NO: 318643
gcuccagacucuuuggcuu

SEQ ID NO: 352942 - RNA, 19 nt, Artificial Sequence
  Description of Artificial Sequence: Synthetic oligonucleotide
  Antisense Strand to SEQ ID NO: 352941
aagccaaagagucuggagc

SEQ ID NO: 352943 - RNA, 19 nt, Artificial Sequence
  Description of Artificial Sequence: Synthetic oligonucleotide
  Sense Strand Starting at position 435 of SEQ ID NO: 318731
gugccuucccucugaaaca

SEQ ID NO: 352944 - RNA, 19 nt, Artificial Sequence
  Description of Artificial Sequence: Synthetic oligonucleotide
  Antisense Strand to SEQ ID NO: 352943
uguuucagagggaaggcac

SEQ ID NO: 352945 - RNA, 19 nt, Artificial Sequence
  Description of Artificial Sequence: Synthetic oligonucleotide
  Sense Strand Starting at position 435 of SEQ ID NO: 318783
auccuugaucuccggcuaa

SEQ ID NO: 352946 - RNA, 19 nt, Artificial Sequence
  Description of Artificial Sequence: Synthetic oligonucleotide
  Antisense Strand to SEQ ID NO: 352945
uuagccggagaucaaggau

SEQ ID NO: 352947 - RNA, 19 nt, Artificial Sequence
  Description of Artificial Sequence: Synthetic oligonucleotide
  Sense Strand Starting at position 435 of SEQ ID NO: 318852
ucuuauaauccuugucagu

SEQ ID NO: 352948 - RNA, 19 nt, Artificial Sequence
  Description of Artificial Sequence: Synthetic oligonucleotide
  Antisense Strand to SEQ ID NO: 352947
acugacaaggauuauaaga

SEQ ID NO: 352949 - RNA, 19 nt, Artificial Sequence
  Description of Artificial Sequence: Synthetic oligonucleotide
  Sense Strand Starting at position 435 of SEQ ID NO: 318854
uuauaauccuugucaguuc

SEQ ID NO: 352950 - RNA, 19 nt, Artificial Sequence
  Description of Artificial Sequence: Synthetic oligonucleotide
  Antisense Strand to SEQ ID NO: 352949
gaacugacaaggauuauaa

SEQ ID NO: 352951 - RNA, 19 nt, Artificial Sequence
  Description of Artificial Sequence: Synthetic oligonucleotide
  Sense Strand Starting at position 435 of SEQ ID NO: 318861
ccuugucaguucucacauu

SEQ ID NO: 352952 - RNA, 19 nt, Artificial Sequence
  Description of Artificial Sequence: Synthetic oligonucleotide
  Antisense Strand to SEQ ID NO: 352951
aaugugagaacugacaagg

SEQ ID NO: 352953 - RNA, 19 nt, Artificial Sequence
  Description of Artificial Sequence: Synthetic oligonucleotide
  Sense Strand Starting at position 435 of SEQ ID NO: 318872
cucacauugcucugaaguu

SEQ ID NO: 352954 - RNA, 19 nt, Artificial Sequence
  Description of Artificial Sequence: Synthetic oligonucleotide
  Antisense Strand to SEQ ID NO: 352953
aacuucagagcaaugugag

SEQ ID NO: 352955 - RNA, 19 nt, Artificial Sequence
  Description of Artificial Sequence: Synthetic oligonucleotide
  Sense Strand Starting at position 435 of SEQ ID NO: 319172
gccugaaguuaguuauacu

SEQ ID NO: 352956 - RNA, 19 nt, Artificial Sequence
  Description of Artificial Sequence: Synthetic oligonucleotide
  Antisense Strand to SEQ ID NO: 352955
aguauaacuaacuucaggc

SEQ ID NO: 352957 - RNA, 19 nt, Artificial Sequence
  Description of Artificial Sequence: Synthetic oligonucleotide
  Sense Strand Starting at position 435 of SEQ ID NO: 319197
cuuccacuugacugaguuu

SEQ ID NO: 352958 - RNA, 19 nt, Artificial Sequence
  Description of Artificial Sequence: Synthetic oligonucleotide
  Antisense Strand to SEQ ID NO: 352957
aaacucagucaaguggaag

SEQ ID NO: 352959 - RNA, 19 nt, Artificial Sequence
  Description of Artificial Sequence: Synthetic oligonucleotide
  Sense Strand Starting at position 436 of SEQ ID NO: 315353
gcccuuuccgcggugaauu

SEQ ID NO: 352960 - RNA, 19 nt, Artificial Sequence
  Description of Artificial Sequence: Synthetic oligonucleotide
  Antisense Strand to SEQ ID NO: 352959
aauucaccgcggaaagggc

SEQ ID NO: 352961 - RNA, 19 nt, Artificial Sequence
  Description of Artificial Sequence: Synthetic oligonucleotide
  Sense Strand Starting at position 436 of SEQ ID NO: 315354
cccuuuccgcggugaauuu

SEQ ID NO: 352962 - RNA, 19 nt, Artificial Sequence
  Description of Artificial Sequence: Synthetic oligonucleotide
  Antisense Strand to SEQ ID NO: 352961
aaauucaccgcggaaaggg

SEQ ID NO: 352963 - RNA, 19 nt, Artificial Sequence
  Description of Artificial Sequence: Synthetic oligonucleotide
  Sense Strand Starting at position 436 of SEQ ID NO: 315688
cagagaucgaggcgcgaau

SEQ ID NO: 352964 - RNA, 19 nt, Artificial Sequence
  Description of Artificial Sequence: Synthetic oligonucleotide
  Antisense Strand to SEQ ID NO: 352963
auucgcgccucgaucucug

SEQ ID NO: 352965 - RNA, 19 nt, Artificial Sequence
  Description of Artificial Sequence: Synthetic oligonucleotide
  Sense Strand Starting at position 436 of SEQ ID NO: 315725
ugucguggucccaguaaga

SEQ ID NO: 352966 - RNA, 19 nt, Artificial Sequence
  Description of Artificial Sequence: Synthetic oligonucleotide
  Antisense Strand to SEQ ID NO: 352965
ucuuacugggaccacgaca

SEQ ID NO: 352967 - RNA, 19 nt, Artificial Sequence
  Description of Artificial Sequence: Synthetic oligonucleotide
  Sense Strand Starting at position 436 of SEQ ID NO: 315736
caguaagagcaaugcauca

SEQ ID NO: 352968 - RNA, 19 nt, Artificial Sequence
  Description of Artificial Sequence: Synthetic oligonucleotide
  Antisense Strand to SEQ ID NO: 352967
ugaugcauugcucuuacug

SEQ ID NO: 352969 - RNA, 19 nt, Artificial Sequence
  Description of Artificial Sequence: Synthetic oligonucleotide
  Sense Strand Starting at position 436 of SEQ ID NO: 316206
ccacgaguuguugaggaag

SEQ ID NO: 352970 - RNA, 19 nt, Artificial Sequence
  Description of Artificial Sequence: Synthetic oligonucleotide
  Antisense Strand to SEQ ID NO: 352969
cuuccucaacaacucgugg

SEQ ID NO: 352971 - RNA, 19 nt, Artificial Sequence
  Description of Artificial Sequence: Synthetic oligonucleotide
  Sense Strand Starting at position 436 of SEQ ID NO: 316209
cgaguuguugaggaagcca

SEQ ID NO: 352972 - RNA, 19 nt, Artificial Sequence
  Description of Artificial Sequence: Synthetic oligonucleotide
  Antisense Strand to SEQ ID NO: 352971
uggcuuccucaacaacucg

SEQ ID NO: 352973 - RNA, 19 nt, Artificial Sequence
  Description of Artificial Sequence: Synthetic oligonucleotide
  Sense Strand Starting at position 436 of SEQ ID NO: 316531
uucuuauucuucucguaga

SEQ ID NO: 352974 - RNA, 19 nt, Artificial Sequence
  Description of Artificial Sequence: Synthetic oligonucleotide
  Antisense Strand to SEQ ID NO: 352973
ucuacgagaagaauaagaa

SEQ ID NO: 352975 - RNA, 19 nt, Artificial Sequence
  Description of Artificial Sequence: Synthetic oligonucleotide
  Sense Strand Starting at position 436 of SEQ ID NO: 316551
cgggaacuucgcgaugaug

SEQ ID NO: 352976 - RNA, 19 nt, Artificial Sequence
  Description of Artificial Sequence: Synthetic oligonucleotide
  Antisense Strand to SEQ ID NO: 352975
caucaucgcgaaguucccg

SEQ ID NO: 352977 - RNA, 19 nt, Artificial Sequence
  Description of Artificial Sequence: Synthetic oligonucleotide
  Sense Strand Starting at position 436 of SEQ ID NO: 316553
ggaacuucgcgaugaugua

SEQ ID NO: 352978 - RNA, 19 nt, Artificial Sequence
  Description of Artificial Sequence: Synthetic oligonucleotide
  Antisense Strand to SEQ ID NO: 352977
uacaucaucgcgaaguucc

SEQ ID NO: 352979 - RNA, 19 nt, Artificial Sequence
  Description of Artificial Sequence: Synthetic oligonucleotide
  Sense Strand Starting at position 436 of SEQ ID NO: 316559
ucgcgaugauguacuggua

SEQ ID NO: 352980 - RNA, 19 nt, Artificial Sequence
  Description of Artificial Sequence: Synthetic oligonucleotide
  Antisense Strand to SEQ ID NO: 352979
uaccaguacaucaucgcga

SEQ ID NO: 352981 - RNA, 19 nt, Artificial Sequence
  Description of Artificial Sequence: Synthetic oligonucleotide
  Sense Strand Starting at position 436 of SEQ ID NO: 316562
cgaugauguacugguagau

SEQ ID NO: 352982 - RNA, 19 nt, Artificial Sequence
  Description of Artificial Sequence: Synthetic oligonucleotide
  Antisense Strand to SEQ ID NO: 352981
aucuaccaguacaucaucg

SEQ ID NO: 352983 - RNA, 19 nt, Artificial Sequence
  Description of Artificial Sequence: Synthetic oligonucleotide
  Sense Strand Starting at position 436 of SEQ ID NO: 317550
cggcuuucaggugaaagaa

SEQ ID NO: 352984 - RNA, 19 nt, Artificial Sequence
  Description of Artificial Sequence: Synthetic oligonucleotide
  Antisense Strand to SEQ ID NO: 352983
uucuuucaccugaaagccg

SEQ ID NO: 352985 - RNA, 19 nt, Artificial Sequence
  Description of Artificial Sequence: Synthetic oligonucleotide
  Sense Strand Starting at position 436 of SEQ ID NO: 317873
caggaauccguguacuaau

SEQ ID NO: 352986 - RNA, 19 nt, Artificial Sequence
  Description of Artificial Sequence: Synthetic oligonucleotide
  Antisense Strand to SEQ ID NO: 352985
auuaguacacggauuccug

SEQ ID NO: 352987 - RNA, 19 nt, Artificial Sequence
  Description of Artificial Sequence: Synthetic oligonucleotide
  Sense Strand Starting at position 436 of SEQ ID NO: 318044
aggagcuguccuugagaug

SEQ ID NO: 352988 - RNA, 19 nt, Artificial Sequence
  Description of Artificial Sequence: Synthetic oligonucleotide
  Antisense Strand to SEQ ID NO: 352987
caucucaaggacagcuccu

SEQ ID NO: 352989 - RNA, 19 nt, Artificial Sequence
  Description of Artificial Sequence: Synthetic oligonucleotide
  Sense Strand Starting at position 436 of SEQ ID NO: 318049
cuguccuugagauggguga

SEQ ID NO: 352990 - RNA, 19 nt, Artificial Sequence
  Description of Artificial Sequence: Synthetic oligonucleotide
  Antisense Strand to SEQ ID NO: 352989
ucacccaucucaaggacag

SEQ ID NO: 352991 - RNA, 19 nt, Artificial Sequence
  Description of Artificial Sequence: Synthetic oligonucleotide
  Sense Strand Starting at position 436 of SEQ ID NO: 318051
guccuugagaugggugaga

SEQ ID NO: 352992 - RNA, 19 nt, Artificial Sequence
  Description of Artificial Sequence: Synthetic oligonucleotide
  Antisense Strand to SEQ ID NO: 352991
ucucacccaucucaaggac

SEQ ID NO: 352993 - RNA, 19 nt, Artificial Sequence
  Description of Artificial Sequence: Synthetic oligonucleotide
  Sense Strand Starting at position 436 of SEQ ID NO: 318053
ccuugagaugggugagaua

SEQ ID NO: 352994 - RNA, 19 nt, Artificial Sequence
  Description of Artificial Sequence: Synthetic oligonucleotide
  Antisense Strand to SEQ ID NO: 352993
uaucucacccaucucaagg

SEQ ID NO: 352995 - RNA, 19 nt, Artificial Sequence
  Description of Artificial Sequence: Synthetic oligonucleotide
  Sense Strand Starting at position 436 of SEQ ID NO: 318078
gcaugugugcugcucagaa

SEQ ID NO: 352996 - RNA, 19 nt, Artificial Sequence
  Description of Artificial Sequence: Synthetic oligonucleotide
  Antisense Strand to SEQ ID NO: 352995
uucugagcagcacacaugc

SEQ ID NO: 352997 - RNA, 19 nt, Artificial Sequence
  Description of Artificial Sequence: Synthetic oligonucleotide
  Sense Strand Starting at position 436 of SEQ ID NO: 318080
augugugcugcucagaaac

SEQ ID NO: 352998 - RNA, 19 nt, Artificial Sequence
  Description of Artificial Sequence: Synthetic oligonucleotide
  Antisense Strand to SEQ ID NO: 352997
guuucugagcagcacacau

SEQ ID NO: 352999 - RNA, 19 nt, Artificial Sequence
  Description of Artificial Sequence: Synthetic oligonucleotide
  Sense Strand Starting at position 436 of SEQ ID NO: 318109
acauguacaaggugugaga

SEQ ID NO: 353000 - RNA, 19 nt, Artificial Sequence
  Description of Artificial Sequence: Synthetic oligonucleotide
  Antisense Strand to SEQ ID NO: 352999
ucucacaccuuguacaugu

SEQ ID NO: 353001 - RNA, 19 nt, Artificial Sequence
  Description of Artificial Sequence: Synthetic oligonucleotide
  Sense Strand Starting at position 436 of SEQ ID NO: 318111
auguacaaggugugagauu

SEQ ID NO: 353002 - RNA, 19 nt, Artificial Sequence
  Description of Artificial Sequence: Synthetic oligonucleotide
  Antisense Strand to SEQ ID NO: 353001
aaucucacaccuuguacau

SEQ ID NO: 353003 - RNA, 19 nt, Artificial Sequence
  Description of Artificial Sequence: Synthetic oligonucleotide
  Sense Strand Starting at position 436 of SEQ ID NO: 318112
uguacaaggugugagauuu

SEQ ID NO: 353004 - RNA, 19 nt, Artificial Sequence
  Description of Artificial Sequence: Synthetic oligonucleotide
  Antisense Strand to SEQ ID NO: 353003
aaaucucacaccuuguaca

SEQ ID NO: 353005 - RNA, 19 nt, Artificial Sequence
  Description of Artificial Sequence: Synthetic oligonucleotide
  Sense Strand Starting at position 436 of SEQ ID NO: 318120
gugugagauuuguauuuac

SEQ ID NO: 353006 - RNA, 19 nt, Artificial Sequence
  Description of Artificial Sequence: Synthetic oligonucleotide
  Antisense Strand to SEQ ID NO: 353005
guaaauacaaaucucacac

SEQ ID NO: 353007 - RNA, 19 nt, Artificial Sequence
  Description of Artificial Sequence: Synthetic oligonucleotide
  Sense Strand Starting at position 436 of SEQ ID NO: 318127
auuuguauuuacgagguaa

SEQ ID NO: 353008 - RNA, 19 nt, Artificial Sequence
  Description of Artificial Sequence: Synthetic oligonucleotide
  Antisense Strand to SEQ ID NO: 353007
uuaccucguaaauacaaau

SEQ ID NO: 353009 - RNA, 19 nt, Artificial Sequence
  Description of Artificial Sequence: Synthetic oligonucleotide
  Sense Strand Starting at position 436 of SEQ ID NO: 318182
caaguauuagaguaaaugu

SEQ ID NO: 353010 - RNA, 19 nt, Artificial Sequence
  Description of Artificial Sequence: Synthetic oligonucleotide
  Antisense Strand to SEQ ID NO: 353009
acauuuacucuaauacuug

SEQ ID NO: 353011 - RNA, 19 nt, Artificial Sequence
  Description of Artificial Sequence: Synthetic oligonucleotide
  Sense Strand Starting at position 436 of SEQ ID NO: 318193
guaaauguagcugguggau

SEQ ID NO: 353012 - RNA, 19 nt, Artificial Sequence
  Description of Artificial Sequence: Synthetic oligonucleotide
  Antisense Strand to SEQ ID NO: 353011
auccaccagcuacauuuac

SEQ ID NO: 353013 - RNA, 19 nt, Artificial Sequence
  Description of Artificial Sequence: Synthetic oligonucleotide
  Sense Strand Starting at position 436 of SEQ ID NO: 318369
cucuccugaugagacauuu

SEQ ID NO: 353014 - RNA, 19 nt, Artificial Sequence
  Description of Artificial Sequence: Synthetic oligonucleotide
  Antisense Strand to SEQ ID NO: 353013
aaaugucucaucaggagag

SEQ ID NO: 353015 - RNA, 19 nt, Artificial Sequence
  Description of Artificial Sequence: Synthetic oligonucleotide
  Sense Strand Starting at position 436 of SEQ ID NO: 318412
aggaguuaguugucaccua

SEQ ID NO: 353016 - RNA, 19 nt, Artificial Sequence
  Description of Artificial Sequence: Synthetic oligonucleotide
  Antisense Strand to SEQ ID NO: 353015
uaggugacaacuaacuccu

SEQ ID NO: 353017 - RNA, 19 nt, Artificial Sequence
  Description of Artificial Sequence: Synthetic oligonucleotide
  Sense Strand Starting at position 436 of SEQ ID NO: 318440
gaauucugaugggaaucca

SEQ ID NO: 353018 - RNA, 19 nt, Artificial Sequence
  Description of Artificial Sequence: Synthetic oligonucleotide
  Antisense Strand to SEQ ID NO: 353017
uggauucccaucagaauuc

SEQ ID NO: 353019 - RNA, 19 nt, Artificial Sequence
  Description of Artificial Sequence: Synthetic oligonucleotide
  Sense Strand Starting at position 436 of SEQ ID NO: 318509
uuaacagugugcuccuuaa

SEQ ID NO: 353020 - RNA, 19 nt, Artificial Sequence
  Description of Artificial Sequence: Synthetic oligonucleotide
  Antisense Strand to SEQ ID NO: 353019
uuaaggagcacacuguuaa

SEQ ID NO: 353021 - RNA, 19 nt, Artificial Sequence
  Description of Artificial Sequence: Synthetic oligonucleotide
  Sense Strand Starting at position 436 of SEQ ID NO: 318513
cagugugcuccuuaacagu

SEQ ID NO: 353022 - RNA, 19 nt, Artificial Sequence
  Description of Artificial Sequence: Synthetic oligonucleotide
  Antisense Strand to SEQ ID NO: 353021
acuguuaaggagcacacug

SEQ ID NO: 353023 - RNA, 19 nt, Artificial Sequence
  Description of Artificial Sequence: Synthetic oligonucleotide
  Sense Strand Starting at position 436 of SEQ ID NO: 318562
gcagucauaaaguaugaga

SEQ ID NO: 353024 - RNA, 19 nt, Artificial Sequence
  Description of Artificial Sequence: Synthetic oligonucleotide
  Antisense Strand to SEQ ID NO: 353023
ucucauacuuuaugacugc

SEQ ID NO: 353025 - RNA, 19 nt, Artificial Sequence
  Description of Artificial Sequence: Synthetic oligonucleotide
  Sense Strand Starting at position 436 of SEQ ID NO: 318678
cauauagcugugcauuagu

SEQ ID NO: 353026 - RNA, 19 nt, Artificial Sequence
  Description of Artificial Sequence: Synthetic oligonucleotide
  Antisense Strand to SEQ ID NO: 353025
acuaaugcacagcuauaug

SEQ ID NO: 353027 - RNA, 19 nt, Artificial Sequence
  Description of Artificial Sequence: Synthetic oligonucleotide
  Sense Strand Starting at position 436 of SEQ ID NO: 318681
auagcugugcauuagugau

SEQ ID NO: 353028 - RNA, 19 nt, Artificial Sequence
  Description of Artificial Sequence: Synthetic oligonucleotide
  Antisense Strand to SEQ ID NO: 353027
aucacuaaugcacagcuau

SEQ ID NO: 353029 - RNA, 19 nt, Artificial Sequence
  Description of Artificial Sequence: Synthetic oligonucleotide
  Sense Strand Starting at position 436 of SEQ ID NO: 318753
cuguuuagacucugagggu

SEQ ID NO: 353030 - RNA, 19 nt, Artificial Sequence
  Description of Artificial Sequence: Synthetic oligonucleotide
  Antisense Strand to SEQ ID NO: 353029
acccucagagucuaaacag

SEQ ID NO: 353031 - RNA, 19 nt, Artificial Sequence
  Description of Artificial Sequence: Synthetic oligonucleotide
  Sense Strand Starting at position 436 of SEQ ID NO: 318762
cucugaggguucuccugaa

SEQ ID NO: 353032 - RNA, 19 nt, Artificial Sequence
  Description of Artificial Sequence: Synthetic oligonucleotide
  Antisense Strand to SEQ ID NO: 353031
uucaggagaacccucagag

SEQ ID NO: 353033 - RNA, 19 nt, Artificial Sequence
  Description of Artificial Sequence: Synthetic oligonucleotide
  Sense Strand Starting at position 436 of SEQ ID NO: 318832
aaguguugucugcugcuca

SEQ ID NO: 353034 - RNA, 19 nt, Artificial Sequence
  Description of Artificial Sequence: Synthetic oligonucleotide
  Antisense Strand to SEQ ID NO: 353033
ugagcagcagacaacacuu

SEQ ID NO: 353035 - RNA, 19 nt, Artificial Sequence
  Description of Artificial Sequence: Synthetic oligonucleotide
  Sense Strand Starting at position 436 of SEQ ID NO: 318866
ugcauucugagaugaaagg

SEQ ID NO: 353036 - RNA, 19 nt, Artificial Sequence
  Description of Artificial Sequence: Synthetic oligonucleotide
  Antisense Strand to SEQ ID NO: 353035
ccuuucaucucagaaugca

SEQ ID NO: 353037 - RNA, 19 nt, Artificial Sequence
  Description of Artificial Sequence: Synthetic oligonucleotide
  Sense Strand Starting at position 436 of SEQ ID NO: 319088
cugcuuucugagcaggagu

SEQ ID NO: 353038 - RNA, 19 nt, Artificial Sequence
  Description of Artificial Sequence: Synthetic oligonucleotide
  Antisense Strand to SEQ ID NO: 353037
acuccugcucagaaagcag

SEQ ID NO: 353039 - RNA, 19 nt, Artificial Sequence
  Description of Artificial Sequence: Synthetic oligonucleotide
  Sense Strand Starting at position 437 of SEQ ID NO: 315246
cagccuggguggucaagaa

SEQ ID NO: 353040 - RNA, 19 nt, Artificial Sequence
  Description of Artificial Sequence: Synthetic oligonucleotide
  Antisense Strand to SEQ ID NO: 353039
uucuugaccacccaggcug

SEQ ID NO: 353041 - RNA, 19 nt, Artificial Sequence
  Description of Artificial Sequence: Synthetic oligonucleotide
  Sense Strand Starting at position 437 of SEQ ID NO: 315455
cugcacuccugcucagaaa

SEQ ID NO: 353042 - RNA, 19 nt, Artificial Sequence
  Description of Artificial Sequence: Synthetic oligonucleotide
  Antisense Strand to SEQ ID NO: 353041
uuucugagcaggagugcag

SEQ ID NO: 353043 - RNA, 19 nt, Artificial Sequence
  Description of Artificial Sequence: Synthetic oligonucleotide
  Sense Strand Starting at position 437 of SEQ ID NO: 315481
cagggauucugcggaagug

SEQ ID NO: 353044 - RNA, 19 nt, Artificial Sequence
  Description of Artificial Sequence: Synthetic oligonucleotide
  Antisense Strand to SEQ ID NO: 353043
cacuuccgcagaaucccug

SEQ ID NO: 353045 - RNA, 19 nt, Artificial Sequence
  Description of Artificial Sequence: Synthetic oligonucleotide
  Sense Strand Starting at position 437 of SEQ ID NO: 315699
agaucagaggccugaguga

SEQ ID NO: 353046 - RNA, 19 nt, Artificial Sequence
  Description of Artificial Sequence: Synthetic oligonucleotide
  Antisense Strand to SEQ ID NO: 353045
ucacucaggccucugaucu

SEQ ID NO: 353047 - RNA, 19 nt, Artificial Sequence
  Description of Artificial Sequence: Synthetic oligonucleotide
  Sense Strand Starting at position 437 of SEQ ID NO: 315789
ggagaacccucagagucua

SEQ ID NO: 353048 - RNA, 19 nt, Artificial Sequence
  Description of Artificial Sequence: Synthetic oligonucleotide
  Antisense Strand to SEQ ID NO: 353047
uagacucugaggguucucc

SEQ ID NO: 353049 - RNA, 19 nt, Artificial Sequence
  Description of Artificial Sequence: Synthetic oligonucleotide
  Sense Strand Starting at position 437 of SEQ ID NO: 315991
acuuuaugacugcagacuu

SEQ ID NO: 353050 - RNA, 19 nt, Artificial Sequence
  Description of Artificial Sequence: Synthetic oligonucleotide
  Antisense Strand to SEQ ID NO: 353049
aagucugcagucauaaagu

SEQ ID NO: 353051 - RNA, 19 nt, Artificial Sequence
  Description of Artificial Sequence: Synthetic oligonucleotide
  Sense Strand Starting at position 437 of SEQ ID NO: 316039
uaaggagcacacuguuaaa

SEQ ID NO: 353052 - RNA, 19 nt, Artificial Sequence
  Description of Artificial Sequence: Synthetic oligonucleotide
  Antisense Strand to SEQ ID NO: 353051
uuuaacagugugcuccuua

SEQ ID NO: 353053 - RNA, 19 nt, Artificial Sequence
  Description of Artificial Sequence: Synthetic oligonucleotide
  Sense Strand Starting at position 437 of SEQ ID NO: 316086
cucuguacaugcugaaaua

SEQ ID NO: 353054 - RNA, 19 nt, Artificial Sequence
  Description of Artificial Sequence: Synthetic oligonucleotide
  Antisense Strand to SEQ ID NO: 353053
uauuucagcauguacagag

SEQ ID NO: 353055 - RNA, 19 nt, Artificial Sequence
  Description of Artificial Sequence: Synthetic oligonucleotide
  Sense Strand Starting at position 437 of SEQ ID NO: 316087
ucuguacaugcugaaauaa

SEQ ID NO: 353056 - RNA, 19 nt, Artificial Sequence
  Description of Artificial Sequence: Synthetic oligonucleotide
  Antisense Strand to SEQ ID NO: 353055
uuauuucagcauguacaga

SEQ ID NO: 353057 - RNA, 19 nt, Artificial Sequence
  Description of Artificial Sequence: Synthetic oligonucleotide
  Sense Strand Starting at position 437 of SEQ ID NO: 316108
ggauucccaucagaauucu

SEQ ID NO: 353058 - RNA, 19 nt, Artificial Sequence
  Description of Artificial Sequence: Synthetic oligonucleotide
  Antisense Strand to SEQ ID NO: 353057
agaauucugaugggaaucc

SEQ ID NO: 353059 - RNA, 19 nt, Artificial Sequence
  Description of Artificial Sequence: Synthetic oligonucleotide
  Sense Strand Starting at position 437 of SEQ ID NO: 316117
ucagaauucugcuuaaggu

SEQ ID NO: 353060 - RNA, 19 nt, Artificial Sequence
  Description of Artificial Sequence: Synthetic oligonucleotide
  Antisense Strand to SEQ ID NO: 353059
accuuaagcagaauucuga

SEQ ID NO: 353061 - RNA, 19 nt, Artificial Sequence
  Description of Artificial Sequence: Synthetic oligonucleotide
  Sense Strand Starting at position 437 of SEQ ID NO: 316118
cagaauucugcuuaaggua

SEQ ID NO: 353062 - RNA, 19 nt, Artificial Sequence
  Description of Artificial Sequence: Synthetic oligonucleotide
  Antisense Strand to SEQ ID NO: 353061
uaccuuaagcagaauucug

SEQ ID NO: 353063 - RNA, 19 nt, Artificial Sequence
  Description of Artificial Sequence: Synthetic oligonucleotide
  Sense Strand Starting at position 437 of SEQ ID NO: 316130
uaagguaggugacaacuaa

SEQ ID NO: 353064 - RNA, 19 nt, Artificial Sequence
  Description of Artificial Sequence: Synthetic oligonucleotide
  Antisense Strand to SEQ ID NO: 353063
uuaguugucaccuaccuua

SEQ ID NO: 353065 - RNA, 19 nt, Artificial Sequence
  Description of Artificial Sequence: Synthetic oligonucleotide
  Sense Strand Starting at position 437 of SEQ ID NO: 316148
acuccugauucuuuggaga

SEQ ID NO: 353066 - RNA, 19 nt, Artificial Sequence
  Description of Artificial Sequence: Synthetic oligonucleotide
  Antisense Strand to SEQ ID NO: 353065
ucuccaaagaaucaggagu

SEQ ID NO: 353067 - RNA, 19 nt, Artificial Sequence
  Description of Artificial Sequence: Synthetic oligonucleotide
  Sense Strand Starting at position 437 of SEQ ID NO: 316150
uccugauucuuuggagaaa

SEQ ID NO: 353068 - RNA, 19 nt, Artificial Sequence
  Description of Artificial Sequence: Synthetic oligonucleotide
  Antisense Strand to SEQ ID NO: 353067
uuucuccaaagaaucagga

SEQ ID NO: 353069 - RNA, 19 nt, Artificial Sequence
  Description of Artificial Sequence: Synthetic oligonucleotide
  Sense Strand Starting at position 437 of SEQ ID NO: 316151
ccugauucuuuggagaaag

SEQ ID NO: 353070 - RNA, 19 nt, Artificial Sequence
  Description of Artificial Sequence: Synthetic oligonucleotide
  Antisense Strand to SEQ ID NO: 353069
cuuucuccaaagaaucagg

SEQ ID NO: 353071 - RNA, 19 nt, Artificial Sequence
  Description of Artificial Sequence: Synthetic oligonucleotide
  Sense Strand Starting at position 437 of SEQ ID NO: 316162
ggagaaagaucagaacaaa

SEQ ID NO: 353072 - RNA, 19 nt, Artificial Sequence
  Description of Artificial Sequence: Synthetic oligonucleotide
  Antisense Strand to SEQ ID NO: 353071
uuuguucugaucuuucucc

SEQ ID NO: 353073 - RNA, 19 nt, Artificial Sequence
  Description of Artificial Sequence: Synthetic oligonucleotide
  Sense Strand Starting at position 437 of SEQ ID NO: 316176
acaaaugucucaucaggag

SEQ ID NO: 353074 - RNA, 19 nt, Artificial Sequence
  Description of Artificial Sequence: Synthetic oligonucleotide
  Antisense Strand to SEQ ID NO: 353073
cuccugaugagacauuugu

SEQ ID NO: 353075 - RNA, 19 nt, Artificial Sequence
  Description of Artificial Sequence: Synthetic oligonucleotide
  Sense Strand Starting at position 437 of SEQ ID NO: 316179
aaugucucaucaggagaga

SEQ ID NO: 353076 - RNA, 19 nt, Artificial Sequence
  Description of Artificial Sequence: Synthetic oligonucleotide
  Antisense Strand to SEQ ID NO: 353075
ucucuccugaugagacauu

SEQ ID NO: 353077 - RNA, 19 nt, Artificial Sequence
  Description of Artificial Sequence: Synthetic oligonucleotide
  Sense Strand Starting at position 437 of SEQ ID NO: 316224
ugauguuugucuucccagu

SEQ ID NO: 353078 - RNA, 19 nt, Artificial Sequence
  Description of Artificial Sequence: Synthetic oligonucleotide
  Antisense Strand to SEQ ID NO: 353077
acugggaagacaaacauca

SEQ ID NO: 353079 - RNA, 19 nt, Artificial Sequence
  Description of Artificial Sequence: Synthetic oligonucleotide
  Sense Strand Starting at position 437 of SEQ ID NO: 316273
agaggcaucgaagaauugu

SEQ ID NO: 353080 - RNA, 19 nt, Artificial Sequence
  Description of Artificial Sequence: Synthetic oligonucleotide
  Antisense Strand to SEQ ID NO: 353079
acaauucuucgaugccucu

SEQ ID NO: 353081 - RNA, 19 nt, Artificial Sequence
  Description of Artificial Sequence: Synthetic oligonucleotide
  Sense Strand Starting at position 437 of SEQ ID NO: 316279
aucgaagaauugugaaaga

SEQ ID NO: 353082 - RNA, 19 nt, Artificial Sequence
  Description of Artificial Sequence: Synthetic oligonucleotide
  Antisense Strand to SEQ ID NO: 353081
ucuuucacaauucuucgau

SEQ ID NO: 353083 - RNA, 19 nt, Artificial Sequence
  Description of Artificial Sequence: Synthetic oligonucleotide
  Sense Strand Starting at position 437 of SEQ ID NO: 316464
uguguuucugagcagcaca

SEQ ID NO: 353084 - RNA, 19 nt, Artificial Sequence
  Description of Artificial Sequence: Synthetic oligonucleotide
  Antisense Strand to SEQ ID NO: 353083
ugugcugcucagaaacaca

SEQ ID NO: 353085 - RNA, 19 nt, Artificial Sequence
  Description of Artificial Sequence: Synthetic oligonucleotide
  Sense Strand Starting at position 437 of SEQ ID NO: 316522
cuccaugacuuccauaugu

SEQ ID NO: 353086 - RNA, 19 nt, Artificial Sequence
  Description of Artificial Sequence: Synthetic oligonucleotide
  Antisense Strand to SEQ ID NO: 353085
acauauggaagucauggag

SEQ ID NO: 353087 - RNA, 19 nt, Artificial Sequence
  Description of Artificial Sequence: Synthetic oligonucleotide
  Sense Strand Starting at position 437 of SEQ ID NO: 316524
ccaugacuuccauauguga

SEQ ID NO: 353088 - RNA, 19 nt, Artificial Sequence
  Description of Artificial Sequence: Synthetic oligonucleotide
  Antisense Strand to SEQ ID NO: 353087
ucacauauggaagucaugg

SEQ ID NO: 353089 - RNA, 19 nt, Artificial Sequence
  Description of Artificial Sequence: Synthetic oligonucleotide
  Sense Strand Starting at position 437 of SEQ ID NO: 316591
ccgccuguguuagugcaau

SEQ ID NO: 353090 - RNA, 19 nt, Artificial Sequence
  Description of Artificial Sequence: Synthetic oligonucleotide
  Antisense Strand to SEQ ID NO: 353089
auugcacuaacacaggcgg

SEQ ID NO: 353091 - RNA, 19 nt, Artificial Sequence
  Description of Artificial Sequence: Synthetic oligonucleotide
  Sense Strand Starting at position 437 of SEQ ID NO: 316597
guguuagugcaauagcuga

SEQ ID NO: 353092 - RNA, 19 nt, Artificial Sequence
  Description of Artificial Sequence: Synthetic oligonucleotide
  Antisense Strand to SEQ ID NO: 353091
ucagcuauugcacuaacac

SEQ ID NO: 353093 - RNA, 19 nt, Artificial Sequence
  Description of Artificial Sequence: Synthetic oligonucleotide
  Sense Strand Starting at position 437 of SEQ ID NO: 316669
guaggauuaguacacggau

SEQ ID NO: 353094 - RNA, 19 nt, Artificial Sequence
  Description of Artificial Sequence: Synthetic oligonucleotide
  Antisense Strand to SEQ ID NO: 353093
auccguguacuaauccuac

SEQ ID NO: 353095 - RNA, 19 nt, Artificial Sequence
  Description of Artificial Sequence: Synthetic oligonucleotide
  Sense Strand Starting at position 437 of SEQ ID NO: 316750
gacgacuauuuccagagau

SEQ ID NO: 353096 - RNA, 19 nt, Artificial Sequence
  Description of Artificial Sequence: Synthetic oligonucleotide
  Antisense Strand to SEQ ID NO: 353095
aucucuggaaauagucguc

SEQ ID NO: 353097 - RNA, 19 nt, Artificial Sequence
  Description of Artificial Sequence: Synthetic oligonucleotide
  Sense Strand Starting at position 437 of SEQ ID NO: 316827
cgaggcuucuucguacagu

SEQ ID NO: 353098 - RNA, 19 nt, Artificial Sequence
  Description of Artificial Sequence: Synthetic oligonucleotide
  Antisense Strand to SEQ ID NO: 353097
acuguacgaagaagccucg

SEQ ID NO: 353099 - RNA, 19 nt, Artificial Sequence
  Description of Artificial Sequence: Synthetic oligonucleotide
  Sense Strand Starting at position 437 of SEQ ID NO: 317391
gcgggucgugcuucgggaa

SEQ ID NO: 353100 - RNA, 19 nt, Artificial Sequence
  Description of Artificial Sequence: Synthetic oligonucleotide
  Antisense Strand to SEQ ID NO: 353099
uucccgaagcacgacccgc

SEQ ID NO: 353101 - RNA, 19 nt, Artificial Sequence
  Description of Artificial Sequence: Synthetic oligonucleotide
  Sense Strand Starting at position 437 of SEQ ID NO: 317392
cgggucgugcuucgggaaa

SEQ ID NO: 353102 - RNA, 19 nt, Artificial Sequence
  Description of Artificial Sequence: Synthetic oligonucleotide
  Antisense Strand to SEQ ID NO: 353101
uuucccgaagcacgacccg

SEQ ID NO: 353103 - RNA, 19 nt, Artificial Sequence
  Description of Artificial Sequence: Synthetic oligonucleotide
  Sense Strand Starting at position 437 of SEQ ID NO: 317634
ucuccagaaguuugagacu

SEQ ID NO: 353104 - RNA, 19 nt, Artificial Sequence
  Description of Artificial Sequence: Synthetic oligonucleotide
  Antisense Strand to SEQ ID NO: 353103
agucucaaacuucuggaga

SEQ ID NO: 353105 - RNA, 19 nt, Artificial Sequence
  Description of Artificial Sequence: Synthetic oligonucleotide
  Sense Strand Starting at position 437 of SEQ ID NO: 317643
guuugagacuuggccguaa

SEQ ID NO: 353106 - RNA, 19 nt, Artificial Sequence
  Description of Artificial Sequence: Synthetic oligonucleotide
  Antisense Strand to SEQ ID NO: 353105
uuacggccaagucucaaac

SEQ ID NO: 353107 - RNA, 19 nt, Artificial Sequence
  Description of Artificial Sequence: Synthetic oligonucleotide
  Sense Strand Starting at position 437 of SEQ ID NO: 317993
guacaucaucgcgaaguuc

SEQ ID NO: 353108 - RNA, 19 nt, Artificial Sequence
  Description of Artificial Sequence: Synthetic oligonucleotide
  Antisense Strand to SEQ ID NO: 353107
gaacuucgcgaugauguac

SEQ ID NO: 353109 - RNA, 19 nt, Artificial Sequence
  Description of Artificial Sequence: Synthetic oligonucleotide
  Sense Strand Starting at position 437 of SEQ ID NO: 318011
cccguucuacgagaagaau

SEQ ID NO: 353110 - RNA, 19 nt, Artificial Sequence
  Description of Artificial Sequence: Synthetic oligonucleotide
  Antisense Strand to SEQ ID NO: 353109
auucuucucguagaacggg

SEQ ID NO: 353111 - RNA, 19 nt, Artificial Sequence
  Description of Artificial Sequence: Synthetic oligonucleotide
  Sense Strand Starting at position 437 of SEQ ID NO: 318149
cgaagacauguucgagaag

SEQ ID NO: 353112 - RNA, 19 nt, Artificial Sequence
  Description of Artificial Sequence: Synthetic oligonucleotide
  Antisense Strand to SEQ ID NO: 353111
cuucucgaacaugucuucg

SEQ ID NO: 353113 - RNA, 19 nt, Artificial Sequence
  Description of Artificial Sequence: Synthetic oligonucleotide
  Sense Strand Starting at position 437 of SEQ ID NO: 318854
gcugcauucgcgccucgau

SEQ ID NO: 353114 - RNA, 19 nt, Artificial Sequence
  Description of Artificial Sequence: Synthetic oligonucleotide
  Antisense Strand to SEQ ID NO: 353113
aucgaggcgcgaaugcagc

SEQ ID NO: 353115 - RNA, 19 nt, Artificial Sequence
  Description of Artificial Sequence: Synthetic oligonucleotide
  Sense Strand Starting at position 437 of SEQ ID NO: 319093
cccugaccucugugaccuu

SEQ ID NO: 353116 - RNA, 19 nt, Artificial Sequence
  Description of Artificial Sequence: Synthetic oligonucleotide
  Antisense Strand to SEQ ID NO: 353115
aaggucacagaggucaggg

SEQ ID NO: 353117 - RNA, 19 nt, Artificial Sequence
  Description of Artificial Sequence: Synthetic oligonucleotide
  Sense Strand Starting at position 437 of SEQ ID NO: 319179
agcgucuccugcccaaauu

SEQ ID NO: 353118 - RNA, 19 nt, Artificial Sequence
  Description of Artificial Sequence: Synthetic oligonucleotide
  Antisense Strand to SEQ ID NO: 353117
aauuugggcaggagacgcu

SEQ ID NO: 353119 - RNA, 19 nt, Artificial Sequence
  Description of Artificial Sequence: Synthetic oligonucleotide
  Sense Strand Starting at position 438 of SEQ ID NO: 315276
cuguuuauuuaguccuuau

SEQ ID NO: 353120 - RNA, 19 nt, Artificial Sequence
  Description of Artificial Sequence: Synthetic oligonucleotide
  Antisense Strand to SEQ ID NO: 353119
auaaggacuaaauaaacag

SEQ ID NO: 353121 - RNA, 19 nt, Artificial Sequence
  Description of Artificial Sequence: Synthetic oligonucleotide
  Sense Strand Starting at position 438 of SEQ ID NO: 315378
cuuuguuuccgggagcgga

SEQ ID NO: 353122 - RNA, 19 nt, Artificial Sequence
  Description of Artificial Sequence: Synthetic oligonucleotide
  Antisense Strand to SEQ ID NO: 353121
uccgcucccggaaacaaag

SEQ ID NO: 353123 - RNA, 19 nt, Artificial Sequence
  Description of Artificial Sequence: Synthetic oligonucleotide
  Sense Strand Starting at position 438 of SEQ ID NO: 315969
cggacucgucucgggaaag

SEQ ID NO: 353124 - RNA, 19 nt, Artificial Sequence
  Description of Artificial Sequence: Synthetic oligonucleotide
  Antisense Strand to SEQ ID NO: 353123
cuuucccgagacgaguccg

SEQ ID NO: 353125 - RNA, 19 nt, Artificial Sequence
  Description of Artificial Sequence: Synthetic oligonucleotide
  Sense Strand Starting at position 438 of SEQ ID NO: 316031
cgcaggugcguguuugaau

SEQ ID NO: 353126 - RNA, 19 nt, Artificial Sequence
  Description of Artificial Sequence: Synthetic oligonucleotide
  Antisense Strand to SEQ ID NO: 353125
auucaaacacgcaccugcg

SEQ ID NO: 353127 - RNA, 19 nt, Artificial Sequence
  Description of Artificial Sequence: Synthetic oligonucleotide
  Sense Strand Starting at position 438 of SEQ ID NO: 316825
aauggucucucggugcaaa

SEQ ID NO: 353128 - RNA, 19 nt, Artificial Sequence
  Description of Artificial Sequence: Synthetic oligonucleotide
  Antisense Strand to SEQ ID NO: 353127
uuugcaccgagagaccauu

SEQ ID NO: 353129 - RNA, 19 nt, Artificial Sequence
  Description of Artificial Sequence: Synthetic oligonucleotide
  Sense Strand Starting at position 438 of SEQ ID NO: 316828
ggucucucggugcaaacua

SEQ ID NO: 353130 - RNA, 19 nt, Artificial Sequence
  Description of Artificial Sequence: Synthetic oligonucleotide
  Antisense Strand to SEQ ID NO: 353129
uaguuugcaccgagagacc

SEQ ID NO: 353131 - RNA, 19 nt, Artificial Sequence
  Description of Artificial Sequence: Synthetic oligonucleotide
  Sense Strand Starting at position 438 of SEQ ID NO: 317255
cccgacaucccggaacaaa

SEQ ID NO: 353132 - RNA, 19 nt, Artificial Sequence
  Description of Artificial Sequence: Synthetic oligonucleotide
  Antisense Strand to SEQ ID NO: 353131
uuuguuccgggaugucggg

SEQ ID NO: 353133 - RNA, 19 nt, Artificial Sequence
  Description of Artificial Sequence: Synthetic oligonucleotide
  Sense Strand Starting at position 438 of SEQ ID NO: 317669
gaguguuaacuagggacga

SEQ ID NO: 353134 - RNA, 19 nt, Artificial Sequence
  Description of Artificial Sequence: Synthetic oligonucleotide
  Antisense Strand to SEQ ID NO: 353133
ucgucccuaguuaacacuc

SEQ ID NO: 353135 - RNA, 19 nt, Artificial Sequence
  Description of Artificial Sequence: Synthetic oligonucleotide
  Sense Strand Starting at position 438 of SEQ ID NO: 317690
augggaaugcgauggcuau

SEQ ID NO: 353136 - RNA, 19 nt, Artificial Sequence
  Description of Artificial Sequence: Synthetic oligonucleotide
  Antisense Strand to SEQ ID NO: 353135
auagccaucgcauucccau

SEQ ID NO: 353137 - RNA, 19 nt, Artificial Sequence
  Description of Artificial Sequence: Synthetic oligonucleotide
  Sense Strand Starting at position 438 of SEQ ID NO: 317691
ugggaaugcgauggcuauu

SEQ ID NO: 353138 - RNA, 19 nt, Artificial Sequence
  Description of Artificial Sequence: Synthetic oligonucleotide
  Antisense Strand to SEQ ID NO: 353137
aauagccaucgcauuccca

SEQ ID NO: 353139 - RNA, 19 nt, Artificial Sequence
  Description of Artificial Sequence: Synthetic oligonucleotide
  Sense Strand Starting at position 438 of SEQ ID NO: 317701
auggcuauuugcuuggauu

SEQ ID NO: 353140 - RNA, 19 nt, Artificial Sequence
  Description of Artificial Sequence: Synthetic oligonucleotide
  Antisense Strand to SEQ ID NO: 353139
aauccaagcaaauagccau

SEQ ID NO: 353141 - RNA, 19 nt, Artificial Sequence
  Description of Artificial Sequence: Synthetic oligonucleotide
  Sense Strand Starting at position 438 of SEQ ID NO: 317702
uggcuauuugcuuggauuc

SEQ ID NO: 353142 - RNA, 19 nt, Artificial Sequence
  Description of Artificial Sequence: Synthetic oligonucleotide
  Antisense Strand to SEQ ID NO: 353141
gaauccaagcaaauagcca

SEQ ID NO: 353143 - RNA, 19 nt, Artificial Sequence
  Description of Artificial Sequence: Synthetic oligonucleotide
  Sense Strand Starting at position 438 of SEQ ID NO: 317703
ggcuauuugcuuggauucu

SEQ ID NO: 353144 - RNA, 19 nt, Artificial Sequence
  Description of Artificial Sequence: Synthetic oligonucleotide
  Antisense Strand to SEQ ID NO: 353143
agaauccaagcaaauagcc

SEQ ID NO: 353145 - RNA, 19 nt, Artificial Sequence
  Description of Artificial Sequence: Synthetic oligonucleotide
  Sense Strand Starting at position 438 of SEQ ID NO: 317753
caggcuagaaugugaguuu

SEQ ID NO: 353146 - RNA, 19 nt, Artificial Sequence
  Description of Artificial Sequence: Synthetic oligonucleotide
  Antisense Strand to SEQ ID NO: 353145
aaacucacauucuagccug

SEQ ID NO: 353147 - RNA, 19 nt, Artificial Sequence
  Description of Artificial Sequence: Synthetic oligonucleotide
  Sense Strand Starting at position 438 of SEQ ID NO: 317756
gcuagaaugugaguuuccu

SEQ ID NO: 353148 - RNA, 19 nt, Artificial Sequence
  Description of Artificial Sequence: Synthetic oligonucleotide
  Antisense Strand to SEQ ID NO: 353147
aggaaacucacauucuagc

SEQ ID NO: 353149 - RNA, 19 nt, Artificial Sequence
  Description of Artificial Sequence: Synthetic oligonucleotide
  Sense Strand Starting at position 438 of SEQ ID NO: 317764
gugaguuuccuccaguuaa

SEQ ID NO: 353150 - RNA, 19 nt, Artificial Sequence
  Description of Artificial Sequence: Synthetic oligonucleotide
  Antisense Strand to SEQ ID NO: 353149
uuaacuggaggaaacucac

SEQ ID NO: 353151 - RNA, 19 nt, Artificial Sequence
  Description of Artificial Sequence: Synthetic oligonucleotide
  Sense Strand Starting at position 438 of SEQ ID NO: 317896
cugcacuuuguccaaugaa

SEQ ID NO: 353152 - RNA, 19 nt, Artificial Sequence
  Description of Artificial Sequence: Synthetic oligonucleotide
  Antisense Strand to SEQ ID NO: 353151
uucauuggacaaagugcag

SEQ ID NO: 353153 - RNA, 19 nt, Artificial Sequence
  Description of Artificial Sequence: Synthetic oligonucleotide
  Sense Strand Starting at position 438 of SEQ ID NO: 317920
gcgaguucgggaggugaaa

SEQ ID NO: 353154 - RNA, 19 nt, Artificial Sequence
  Description of Artificial Sequence: Synthetic oligonucleotide
  Antisense Strand to SEQ ID NO: 353153
uuucaccucccgaacucgc

SEQ ID NO: 353155 - RNA, 19 nt, Artificial Sequence
  Description of Artificial Sequence: Synthetic oligonucleotide
  Sense Strand Starting at position 438 of SEQ ID NO: 318020
gaaucaggagagugugaau

SEQ ID NO: 353156 - RNA, 19 nt, Artificial Sequence
  Description of Artificial Sequence: Synthetic oligonucleotide
  Antisense Strand to SEQ ID NO: 353155
auucacacucuccugauuc

SEQ ID NO: 353157 - RNA, 19 nt, Artificial Sequence
  Description of Artificial Sequence: Synthetic oligonucleotide
  Sense Strand Starting at position 438 of SEQ ID NO: 318171
caugucaguccguuguuua

SEQ ID NO: 353158 - RNA, 19 nt, Artificial Sequence
  Description of Artificial Sequence: Synthetic oligonucleotide
  Antisense Strand to SEQ ID NO: 353157
uaaacaacggacugacaug

SEQ ID NO: 353159 - RNA, 19 nt, Artificial Sequence
  Description of Artificial Sequence: Synthetic oligonucleotide
  Sense Strand Starting at position 438 of SEQ ID NO: 318285
uuugaaguuugguugaauu

SEQ ID NO: 353160 - RNA, 19 nt, Artificial Sequence
  Description of Artificial Sequence: Synthetic oligonucleotide
  Antisense Strand to SEQ ID NO: 353159
aauucaaccaaacuucaaa

SEQ ID NO: 353161 - RNA, 19 nt, Artificial Sequence
  Description of Artificial Sequence: Synthetic oligonucleotide
  Sense Strand Starting at position 438 of SEQ ID NO: 318414
ggaagcagaguauguguuu

SEQ ID NO: 353162 - RNA, 19 nt, Artificial Sequence
  Description of Artificial Sequence: Synthetic oligonucleotide
  Antisense Strand to SEQ ID NO: 353161
aaacacauacucugcuucc

SEQ ID NO: 353163 - RNA, 19 nt, Artificial Sequence
  Description of Artificial Sequence: Synthetic oligonucleotide
  Sense Strand Starting at position 438 of SEQ ID NO: 318419
cagaguauguguuuccaaa

SEQ ID NO: 353164 - RNA, 19 nt, Artificial Sequence
  Description of Artificial Sequence: Synthetic oligonucleotide
  Antisense Strand to SEQ ID NO: 353163
uuuggaaacacauacucug

SEQ ID NO: 353165 - RNA, 19 nt, Artificial Sequence
  Description of Artificial Sequence: Synthetic oligonucleotide
  Sense Strand Starting at position 438 of SEQ ID NO: 318453
cuguaagaccucuaugucu

SEQ ID NO: 353166 - RNA, 19 nt, Artificial Sequence
  Description of Artificial Sequence: Synthetic oligonucleotide
  Antisense Strand to SEQ ID NO: 353165
agacauagaggucuuacag

SEQ ID NO: 353167 - RNA, 19 nt, Artificial Sequence
  Description of Artificial Sequence: Synthetic oligonucleotide
  Sense Strand Starting at position 438 of SEQ ID NO: 318622
cccuguggauuccuacaaa

SEQ ID NO: 353168 - RNA, 19 nt, Artificial Sequence
  Description of Artificial Sequence: Synthetic oligonucleotide
  Antisense Strand to SEQ ID NO: 353167
uuuguaggaauccacaggg

SEQ ID NO: 353169 - RNA, 19 nt, Artificial Sequence
  Description of Artificial Sequence: Synthetic oligonucleotide
  Sense Strand Starting at position 438 of SEQ ID NO: 318625
uguggauuccuacaaagua

SEQ ID NO: 353170 - RNA, 19 nt, Artificial Sequence
  Description of Artificial Sequence: Synthetic oligonucleotide
  Antisense Strand to SEQ ID NO: 353169
uacuuuguaggaauccaca

SEQ ID NO: 353171 - RNA, 19 nt, Artificial Sequence
  Description of Artificial Sequence: Synthetic oligonucleotide
  Sense Strand Starting at position 438 of SEQ ID NO: 318677
cccuuuggucuugagacca

SEQ ID NO: 353172 - RNA, 19 nt, Artificial Sequence
  Description of Artificial Sequence: Synthetic oligonucleotide
  Antisense Strand to SEQ ID NO: 353171
uggucucaagaccaaaggg

SEQ ID NO: 353173 - RNA, 19 nt, Artificial Sequence
  Description of Artificial Sequence: Synthetic oligonucleotide
  Sense Strand Starting at position 438 of SEQ ID NO: 318695
agcacaguuguagauaaua

SEQ ID NO: 353174 - RNA, 19 nt, Artificial Sequence
  Description of Artificial Sequence: Synthetic oligonucleotide
  Antisense Strand to SEQ ID NO: 353173
uauuaucuacaacugugcu

SEQ ID NO: 353175 - RNA, 19 nt, Artificial Sequence
  Description of Artificial Sequence: Synthetic oligonucleotide
  Sense Strand Starting at position 438 of SEQ ID NO: 318731
uuaaauucuuucgcguaau

SEQ ID NO: 353176 - RNA, 19 nt, Artificial Sequence
  Description of Artificial Sequence: Synthetic oligonucleotide
  Antisense Strand to SEQ ID NO: 353175
auuacgcgaaagaauuuaa

SEQ ID NO: 353177 - RNA, 19 nt, Artificial Sequence
  Description of Artificial Sequence: Synthetic oligonucleotide
  Sense Strand Starting at position 438 of SEQ ID NO: 318816
auaagacuaucgcuuugaa

SEQ ID NO: 353178 - RNA, 19 nt, Artificial Sequence
  Description of Artificial Sequence: Synthetic oligonucleotide
  Antisense Strand to SEQ ID NO: 353177
uucaaagcgauagucuuau

SEQ ID NO: 353179 - RNA, 19 nt, Artificial Sequence
  Description of Artificial Sequence: Synthetic oligonucleotide
  Sense Strand Starting at position 438 of SEQ ID NO: 318819
agacuaucgcuuugaaauu

SEQ ID NO: 353180 - RNA, 19 nt, Artificial Sequence
  Description of Artificial Sequence: Synthetic oligonucleotide
  Antisense Strand to SEQ ID NO: 353179
aauuucaaagcgauagucu

SEQ ID NO: 353181 - RNA, 19 nt, Artificial Sequence
  Description of Artificial Sequence: Synthetic oligonucleotide
  Sense Strand Starting at position 438 of SEQ ID NO: 318832
gaaauuguaucuuucgcaa

SEQ ID NO: 353182 - RNA, 19 nt, Artificial Sequence
  Description of Artificial Sequence: Synthetic oligonucleotide
  Antisense Strand to SEQ ID NO: 353181
uugcgaaagauacaauuuc

SEQ ID NO: 353183 - RNA, 19 nt, Artificial Sequence
  Description of Artificial Sequence: Synthetic oligonucleotide
  Sense Strand Starting at position 438 of SEQ ID NO: 318835
auuguaucuuucgcaaguu

SEQ ID NO: 353184 - RNA, 19 nt, Artificial Sequence
  Description of Artificial Sequence: Synthetic oligonucleotide
  Antisense Strand to SEQ ID NO: 353183
aacuugcgaaagauacaau

SEQ ID NO: 353185 - RNA, 19 nt, Artificial Sequence
  Description of Artificial Sequence: Synthetic oligonucleotide
  Sense Strand Starting at position 438 of SEQ ID NO: 318871
aagccauucgcugaugcua

SEQ ID NO: 353186 - RNA, 19 nt, Artificial Sequence
  Description of Artificial Sequence: Synthetic oligonucleotide
  Antisense Strand to SEQ ID NO: 353185
uagcaucagcgaauggcuu

SEQ ID NO: 353187 - RNA, 19 nt, Artificial Sequence
  Description of Artificial Sequence: Synthetic oligonucleotide
  Sense Strand Starting at position 438 of SEQ ID NO: 318964
guuccaugcuauccagaua

SEQ ID NO: 353188 - RNA, 19 nt, Artificial Sequence
  Description of Artificial Sequence: Synthetic oligonucleotide
  Antisense Strand to SEQ ID NO: 353187
uaucuggauagcauggaac

SEQ ID NO: 353189 - RNA, 19 nt, Artificial Sequence
  Description of Artificial Sequence: Synthetic oligonucleotide
  Sense Strand Starting at position 438 of SEQ ID NO: 319037
guuuguauggaauguccua

SEQ ID NO: 353190 - RNA, 19 nt, Artificial Sequence
  Description of Artificial Sequence: Synthetic oligonucleotide
  Antisense Strand to SEQ ID NO: 353189
uaggacauuccauacaaac

SEQ ID NO: 353191 - RNA, 19 nt, Artificial Sequence
  Description of Artificial Sequence: Synthetic oligonucleotide
  Sense Strand Starting at position 438 of SEQ ID NO: 319069
uaggguucgacgucuuguu

SEQ ID NO: 353192 - RNA, 19 nt, Artificial Sequence
  Description of Artificial Sequence: Synthetic oligonucleotide
  Antisense Strand to SEQ ID NO: 353191
aacaagacgucgaacccua

SEQ ID NO: 353193 - RNA, 19 nt, Artificial Sequence
  Description of Artificial Sequence: Synthetic oligonucleotide
  Sense Strand Starting at position 438 of SEQ ID NO: 319077
gacgucuuguuugucaaga

SEQ ID NO: 353194 - RNA, 19 nt, Artificial Sequence
  Description of Artificial Sequence: Synthetic oligonucleotide
  Antisense Strand to SEQ ID NO: 353193
ucuugacaaacaagacguc

SEQ ID NO: 353195 - RNA, 19 nt, Artificial Sequence
  Description of Artificial Sequence: Synthetic oligonucleotide
  Sense Strand Starting at position 438 of SEQ ID NO: 319078
acgucuuguuugucaagac

SEQ ID NO: 353196 - RNA, 19 nt, Artificial Sequence
  Description of Artificial Sequence: Synthetic oligonucleotide
  Antisense Strand to SEQ ID NO: 353195
gucuugacaaacaagacgu

SEQ ID NO: 353197 - RNA, 19 nt, Artificial Sequence
  Description of Artificial Sequence: Synthetic oligonucleotide
  Sense Strand Starting at position 438 of SEQ ID NO: 319082
cuuguuugucaagacauaa

SEQ ID NO: 353198 - RNA, 19 nt, Artificial Sequence
  Description of Artificial Sequence: Synthetic oligonucleotide
  Antisense Strand to SEQ ID NO: 353197
uuaugucuugacaaacaag

SEQ ID NO: 353199 - RNA, 19 nt, Artificial Sequence
  Description of Artificial Sequence: Synthetic oligonucleotide
  Sense Strand Starting at position 439 of SEQ ID NO: 315512
cuguuuauuuaguccuuau

SEQ ID NO: 353200 - RNA, 19 nt, Artificial Sequence
  Description of Artificial Sequence: Synthetic oligonucleotide
  Antisense Strand to SEQ ID NO: 353199
auaaggacuaaauaaacag

SEQ ID NO: 353201 - RNA, 19 nt, Artificial Sequence
  Description of Artificial Sequence: Synthetic oligonucleotide
  Sense Strand Starting at position 439 of SEQ ID NO: 315572
ggcagcgauuucgaagcaa

SEQ ID NO: 353202 - RNA, 19 nt, Artificial Sequence
  Description of Artificial Sequence: Synthetic oligonucleotide
  Antisense Strand to SEQ ID NO: 353201
uugcuucgaaaucgcugcc

SEQ ID NO: 353203 - RNA, 19 nt, Artificial Sequence
  Description of Artificial Sequence: Synthetic oligonucleotide
  Sense Strand Starting at position 439 of SEQ ID NO: 315614
cuuuguuuccgggagcgga

SEQ ID NO: 353204 - RNA, 19 nt, Artificial Sequence
  Description of Artificial Sequence: Synthetic oligonucleotide
  Antisense Strand to SEQ ID NO: 353203
uccgcucccggaaacaaag

SEQ ID NO: 353205 - RNA, 19 nt, Artificial Sequence
  Description of Artificial Sequence: Synthetic oligonucleotide
  Sense Strand Starting at position 439 of SEQ ID NO: 315919
gagucgucucggcgggaca

SEQ ID NO: 353206 - RNA, 19 nt, Artificial Sequence
  Description of Artificial Sequence: Synthetic oligonucleotide
  Antisense Strand to SEQ ID NO: 353205
ugucccgccgagacgacuc

SEQ ID NO: 353207 - RNA, 19 nt, Artificial Sequence
  Description of Artificial Sequence: Synthetic oligonucleotide
  Sense Strand Starting at position 439 of SEQ ID NO: 316205
cggacucgucucgggaaag

SEQ ID NO: 353208 - RNA, 19 nt, Artificial Sequence
  Description of Artificial Sequence: Synthetic oligonucleotide
  Antisense Strand to SEQ ID NO: 353207
cuuucccgagacgaguccg

SEQ ID NO: 353209 - RNA, 19 nt, Artificial Sequence
  Description of Artificial Sequence: Synthetic oligonucleotide
  Sense Strand Starting at position 439 of SEQ ID NO: 316267
cgcaggugcguguuugaau

SEQ ID NO: 353210 - RNA, 19 nt, Artificial Sequence
  Description of Artificial Sequence: Synthetic oligonucleotide
  Antisense Strand to SEQ ID NO: 353209
auucaaacacgcaccugcg

SEQ ID NO: 353211 - RNA, 19 nt, Artificial Sequence
  Description of Artificial Sequence: Synthetic oligonucleotide
  Sense Strand Starting at position 439 of SEQ ID NO: 317061
aauggucucucggugcaaa

SEQ ID NO: 353212 - RNA, 19 nt, Artificial Sequence
  Description of Artificial Sequence: Synthetic oligonucleotide
  Antisense Strand to SEQ ID NO: 353211
uuugcaccgagagaccauu

SEQ ID NO: 353213 - RNA, 19 nt, Artificial Sequence
  Description of Artificial Sequence: Synthetic oligonucleotide
  Sense Strand Starting at position 439 of SEQ ID NO: 317064
ggucucucggugcaaacua

SEQ ID NO: 353214 - RNA, 19 nt, Artificial Sequence
  Description of Artificial Sequence: Synthetic oligonucleotide
  Antisense Strand to SEQ ID NO: 353213
uaguuugcaccgagagacc

SEQ ID NO: 353215 - RNA, 19 nt, Artificial Sequence
  Description of Artificial Sequence: Synthetic oligonucleotide
  Sense Strand Starting at position 439 of SEQ ID NO: 317491
cccgacaucccggaacaaa

SEQ ID NO: 353216 - RNA, 19 nt, Artificial Sequence
  Description of Artificial Sequence: Synthetic oligonucleotide
  Antisense Strand to SEQ ID NO: 353215
uuuguuccgggaugucggg

SEQ ID NO: 353217 - RNA, 19 nt, Artificial Sequence
  Description of Artificial Sequence: Synthetic oligonucleotide
  Sense Strand Starting at position 439 of SEQ ID NO: 317905
gaguguuaacuagggacga

SEQ ID NO: 353218 - RNA, 19 nt, Artificial Sequence
  Description of Artificial Sequence: Synthetic oligonucleotide
  Antisense Strand to SEQ ID NO: 353217
ucgucccuaguuaacacuc

SEQ ID NO: 353219 - RNA, 19 nt, Artificial Sequence
  Description of Artificial Sequence: Synthetic oligonucleotide
  Sense Strand Starting at position 439 of SEQ ID NO: 317926
augggaaugcgauggcuau

SEQ ID NO: 353220 - RNA, 19 nt, Artificial Sequence
  Description of Artificial Sequence: Synthetic oligonucleotide
  Antisense Strand to SEQ ID NO: 353219
auagccaucgcauucccau

SEQ ID NO: 353221 - RNA, 19 nt, Artificial Sequence
  Description of Artificial Sequence: Synthetic oligonucleotide
  Sense Strand Starting at position 439 of SEQ ID NO: 317927
ugggaaugcgauggcuauu

SEQ ID NO: 353222 - RNA, 19 nt, Artificial Sequence
  Description of Artificial Sequence: Synthetic oligonucleotide
  Antisense Strand to SEQ ID NO: 353221
aauagccaucgcauuccca

SEQ ID NO: 353223 - RNA, 19 nt, Artificial Sequence
  Description of Artificial Sequence: Synthetic oligonucleotide
  Sense Strand Starting at position 439 of SEQ ID NO: 317937
auggcuauuugcuuggauu

SEQ ID NO: 353224 - RNA, 19 nt, Artificial Sequence
  Description of Artificial Sequence: Synthetic oligonucleotide
  Antisense Strand to SEQ ID NO: 353223
aauccaagcaaauagccau

SEQ ID NO: 353225 - RNA, 19 nt, Artificial Sequence
  Description of Artificial Sequence: Synthetic oligonucleotide
  Sense Strand Starting at position 439 of SEQ ID NO: 317938
uggcuauuugcuuggauuc

SEQ ID NO: 353226 - RNA, 19 nt, Artificial Sequence
  Description of Artificial Sequence: Synthetic oligonucleotide
  Antisense Strand to SEQ ID NO: 353225
gaauccaagcaaauagcca

SEQ ID NO: 353227 - RNA, 19 nt, Artificial Sequence
  Description of Artificial Sequence: Synthetic oligonucleotide
  Sense Strand Starting at position 439 of SEQ ID NO: 317939
ggcuauuugcuuggauucu

SEQ ID NO: 353228 - RNA, 19 nt, Artificial Sequence
  Description of Artificial Sequence: Synthetic oligonucleotide
  Antisense Strand to SEQ ID NO: 353227
agaauccaagcaaauagcc

SEQ ID NO: 353229 - RNA, 19 nt, Artificial Sequence
  Description of Artificial Sequence: Synthetic oligonucleotide
  Sense Strand Starting at position 439 of SEQ ID NO: 317989
caggcuagaaugugaguuu

SEQ ID NO: 353230 - RNA, 19 nt, Artificial Sequence
  Description of Artificial Sequence: Synthetic oligonucleotide
  Antisense Strand to SEQ ID NO: 353229
aaacucacauucuagccug

SEQ ID NO: 353231 - RNA, 19 nt, Artificial Sequence
  Description of Artificial Sequence: Synthetic oligonucleotide
  Sense Strand Starting at position 439 of SEQ ID NO: 317992
gcuagaaugugaguuuccu

SEQ ID NO: 353232 - RNA, 19 nt, Artificial Sequence
  Description of Artificial Sequence: Synthetic oligonucleotide
  Antisense Strand to SEQ ID NO: 353231
aggaaacucacauucuagc

SEQ ID NO: 353233 - RNA, 19 nt, Artificial Sequence
  Description of Artificial Sequence: Synthetic oligonucleotide
  Sense Strand Starting at position 439 of SEQ ID NO: 318000
gugaguuuccuccaguuaa

SEQ ID NO: 353234 - RNA, 19 nt, Artificial Sequence
  Description of Artificial Sequence: Synthetic oligonucleotide
  Antisense Strand to SEQ ID NO: 353233
uuaacuggaggaaacucac

SEQ ID NO: 353235 - RNA, 19 nt, Artificial Sequence
  Description of Artificial Sequence: Synthetic oligonucleotide
  Sense Strand Starting at position 439 of SEQ ID NO: 318132
cugcacuuuguccaaugaa

SEQ ID NO: 353236 - RNA, 19 nt, Artificial Sequence
  Description of Artificial Sequence: Synthetic oligonucleotide
  Antisense Strand to SEQ ID NO: 353235
uucauuggacaaagugcag

SEQ ID NO: 353237 - RNA, 19 nt, Artificial Sequence
  Description of Artificial Sequence: Synthetic oligonucleotide
  Sense Strand Starting at position 439 of SEQ ID NO: 318156
gcgaguucgggaggugaaa

SEQ ID NO: 353238 - RNA, 19 nt, Artificial Sequence
  Description of Artificial Sequence: Synthetic oligonucleotide
  Antisense Strand to SEQ ID NO: 353237
uuucaccucccgaacucgc

SEQ ID NO: 353239 - RNA, 19 nt, Artificial Sequence
  Description of Artificial Sequence: Synthetic oligonucleotide
  Sense Strand Starting at position 439 of SEQ ID NO: 318256
gaaucaggagagugugaau

SEQ ID NO: 353240 - RNA, 19 nt, Artificial Sequence
  Description of Artificial Sequence: Synthetic oligonucleotide
  Antisense Strand to SEQ ID NO: 353239
auucacacucuccugauuc

SEQ ID NO: 353241 - RNA, 19 nt, Artificial Sequence
  Description of Artificial Sequence: Synthetic oligonucleotide
  Sense Strand Starting at position 439 of SEQ ID NO: 318407
caugucaguccguuguuua

SEQ ID NO: 353242 - RNA, 19 nt, Artificial Sequence
  Description of Artificial Sequence: Synthetic oligonucleotide
  Antisense Strand to SEQ ID NO: 353241
uaaacaacggacugacaug

SEQ ID NO: 353243 - RNA, 19 nt, Artificial Sequence
  Description of Artificial Sequence: Synthetic oligonucleotide
  Sense Strand Starting at position 439 of SEQ ID NO: 318408
augucaguccguuguuuaa

SEQ ID NO: 353244 - RNA, 19 nt, Artificial Sequence
  Description of Artificial Sequence: Synthetic oligonucleotide
  Antisense Strand to SEQ ID NO: 353243
uuaaacaacggacugacau

SEQ ID NO: 353245 - RNA, 19 nt, Artificial Sequence
  Description of Artificial Sequence: Synthetic oligonucleotide
  Sense Strand Starting at position 439 of SEQ ID NO: 318410
gucaguccguuguuuaaca

SEQ ID NO: 353246 - RNA, 19 nt, Artificial Sequence
  Description of Artificial Sequence: Synthetic oligonucleotide
  Antisense Strand to SEQ ID NO: 353245
uguuaaacaacggacugac

SEQ ID NO: 353247 - RNA, 19 nt, Artificial Sequence
  Description of Artificial Sequence: Synthetic oligonucleotide
  Sense Strand Starting at position 439 of SEQ ID NO: 318521
uuugaaguuugguugaauu

SEQ ID NO: 353248 - RNA, 19 nt, Artificial Sequence
  Description of Artificial Sequence: Synthetic oligonucleotide
  Antisense Strand to SEQ ID NO: 353247
aauucaaccaaacuucaaa

SEQ ID NO: 353249 - RNA, 19 nt, Artificial Sequence
  Description of Artificial Sequence: Synthetic oligonucleotide
  Sense Strand Starting at position 439 of SEQ ID NO: 318650
ggaagcagaguauguguuu

SEQ ID NO: 353250 - RNA, 19 nt, Artificial Sequence
  Description of Artificial Sequence: Synthetic oligonucleotide
  Antisense Strand to SEQ ID NO: 353249
aaacacauacucugcuucc

SEQ ID NO: 353251 - RNA, 19 nt, Artificial Sequence
  Description of Artificial Sequence: Synthetic oligonucleotide
  Sense Strand Starting at position 439 of SEQ ID NO: 318655
cagaguauguguuuccaaa

SEQ ID NO: 353252 - RNA, 19 nt, Artificial Sequence
  Description of Artificial Sequence: Synthetic oligonucleotide
  Antisense Strand to SEQ ID NO: 353251
uuuggaaacacauacucug

SEQ ID NO: 353253 - RNA, 19 nt, Artificial Sequence
  Description of Artificial Sequence: Synthetic oligonucleotide
  Sense Strand Starting at position 439 of SEQ ID NO: 318689
cuguaagaccucuaugucu

SEQ ID NO: 353254 - RNA, 19 nt, Artificial Sequence
  Description of Artificial Sequence: Synthetic oligonucleotide
  Antisense Strand to SEQ ID NO: 353253
agacauagaggucuuacag

SEQ ID NO: 353255 - RNA, 19 nt, Artificial Sequence
  Description of Artificial Sequence: Synthetic oligonucleotide
  Sense Strand Starting at position 439 of SEQ ID NO: 318858
cccuguggauuccuacaaa

SEQ ID NO: 353256 - RNA, 19 nt, Artificial Sequence
  Description of Artificial Sequence: Synthetic oligonucleotide
  Antisense Strand to SEQ ID NO: 353255
uuuguaggaauccacaggg

SEQ ID NO: 353257 - RNA, 19 nt, Artificial Sequence
  Description of Artificial Sequence: Synthetic oligonucleotide
  Sense Strand Starting at position 439 of SEQ ID NO: 318861
uguggauuccuacaaagua

SEQ ID NO: 353258 - RNA, 19 nt, Artificial Sequence
  Description of Artificial Sequence: Synthetic oligonucleotide
  Antisense Strand to SEQ ID NO: 353257
uacuuuguaggaauccaca

SEQ ID NO: 353259 - RNA, 19 nt, Artificial Sequence
  Description of Artificial Sequence: Synthetic oligonucleotide
  Sense Strand Starting at position 439 of SEQ ID NO: 318913
cccuuuggucuugagacca

SEQ ID NO: 353260 - RNA, 19 nt, Artificial Sequence
  Description of Artificial Sequence: Synthetic oligonucleotide
  Antisense Strand to SEQ ID NO: 353259
uggucucaagaccaaaggg

SEQ ID NO: 353261 - RNA, 19 nt, Artificial Sequence
  Description of Artificial Sequence: Synthetic oligonucleotide
  Sense Strand Starting at position 439 of SEQ ID NO: 318931
agcacaguuguagauaaua

SEQ ID NO: 353262 - RNA, 19 nt, Artificial Sequence
  Description of Artificial Sequence: Synthetic oligonucleotide
  Antisense Strand to SEQ ID NO: 353261
uauuaucuacaacugugcu

SEQ ID NO: 353263 - RNA, 19 nt, Artificial Sequence
  Description of Artificial Sequence: Synthetic oligonucleotide
  Sense Strand Starting at position 439 of SEQ ID NO: 318964
uuauuaaauucuuucgcgu

SEQ ID NO: 353264 - RNA, 19 nt, Artificial Sequence
  Description of Artificial Sequence: Synthetic oligonucleotide
  Antisense Strand to SEQ ID NO: 353263
acgcgaaagaauuuaauaa

SEQ ID NO: 353265 - RNA, 19 nt, Artificial Sequence
  Description of Artificial Sequence: Synthetic oligonucleotide
  Sense Strand Starting at position 439 of SEQ ID NO: 318967
uuaaauucuuucgcguaau

SEQ ID NO: 353266 - RNA, 19 nt, Artificial Sequence
  Description of Artificial Sequence: Synthetic oligonucleotide
  Antisense Strand to SEQ ID NO: 353265
auuacgcgaaagaauuuaa

SEQ ID NO: 353267 - RNA, 19 nt, Artificial Sequence
  Description of Artificial Sequence: Synthetic oligonucleotide
  Sense Strand Starting at position 439 of SEQ ID NO: 319052
auaagacuaucgcuuugaa

SEQ ID NO: 353268 - RNA, 19 nt, Artificial Sequence
  Description of Artificial Sequence: Synthetic oligonucleotide
  Antisense Strand to SEQ ID NO: 353267
uucaaagcgauagucuuau

SEQ ID NO: 353269 - RNA, 19 nt, Artificial Sequence
  Description of Artificial Sequence: Synthetic oligonucleotide
  Sense Strand Starting at position 439 of SEQ ID NO: 319055
agacuaucgcuuugaaauu

SEQ ID NO: 353270 - RNA, 19 nt, Artificial Sequence
  Description of Artificial Sequence: Synthetic oligonucleotide
  Antisense Strand to SEQ ID NO: 353269
aauuucaaagcgauagucu

SEQ ID NO: 353271 - RNA, 19 nt, Artificial Sequence
  Description of Artificial Sequence: Synthetic oligonucleotide
  Sense Strand Starting at position 439 of SEQ ID NO: 319068
gaaauuguaucuuucgcaa

SEQ ID NO: 353272 - RNA, 19 nt, Artificial Sequence
  Description of Artificial Sequence: Synthetic oligonucleotide
  Antisense Strand to SEQ ID NO: 353271
uugcgaaagauacaauuuc

SEQ ID NO: 353273 - RNA, 19 nt, Artificial Sequence
  Description of Artificial Sequence: Synthetic oligonucleotide
  Sense Strand Starting at position 439 of SEQ ID NO: 319071
auuguaucuuucgcaaguu

SEQ ID NO: 353274 - RNA, 19 nt, Artificial Sequence
  Description of Artificial Sequence: Synthetic oligonucleotide
  Antisense Strand to SEQ ID NO: 353273
aacuugcgaaagauacaau

SEQ ID NO: 353275 - RNA, 19 nt, Artificial Sequence
  Description of Artificial Sequence: Synthetic oligonucleotide
  Sense Strand Starting at position 439 of SEQ ID NO: 319107
aagccauucgcugaugcua

SEQ ID NO: 353276 - RNA, 19 nt, Artificial Sequence
  Description of Artificial Sequence: Synthetic oligonucleotide
  Antisense Strand to SEQ ID NO: 353275
uagcaucagcgaauggcuu

SEQ ID NO: 353277 - RNA, 19 nt, Artificial Sequence
  Description of Artificial Sequence: Synthetic oligonucleotide
  Sense Strand Starting at position 439 of SEQ ID NO: 319200
guuccaugcuauccagaua

SEQ ID NO: 353278 - RNA, 19 nt, Artificial Sequence
  Description of Artificial Sequence: Synthetic oligonucleotide
  Antisense Strand to SEQ ID NO: 353277
uaucuggauagcauggaac

SEQ ID NO: 353279 - RNA, 19 nt, Artificial Sequence
  Description of Artificial Sequence: Synthetic oligonucleotide
  Sense Strand Starting at position 440 of SEQ ID NO: 315325
cgaacucuagggugagaca

SEQ ID NO: 353280 - RNA, 19 nt, Artificial Sequence
  Description of Artificial Sequence: Synthetic oligonucleotide
  Antisense Strand to SEQ ID NO: 353279
ugucucacccuagaguucg

SEQ ID NO: 353281 - RNA, 19 nt, Artificial Sequence
  Description of Artificial Sequence: Synthetic oligonucleotide
  Sense Strand Starting at position 440 of SEQ ID NO: 315390
ccuaauuaggacuguuauu

SEQ ID NO: 353282 - RNA, 19 nt, Artificial Sequence
  Description of Artificial Sequence: Synthetic oligonucleotide
  Antisense Strand to SEQ ID NO: 353281
aauaacaguccuaauuagg

SEQ ID NO: 353283 - RNA, 19 nt, Artificial Sequence
  Description of Artificial Sequence: Synthetic oligonucleotide
  Sense Strand Starting at position 440 of SEQ ID NO: 315395
uuaggacuguuauucuaaa

SEQ ID NO: 353284 - RNA, 19 nt, Artificial Sequence
  Description of Artificial Sequence: Synthetic oligonucleotide
  Antisense Strand to SEQ ID NO: 353283
uuuagaauaacaguccuaa

SEQ ID NO: 353285 - RNA, 19 nt, Artificial Sequence
  Description of Artificial Sequence: Synthetic oligonucleotide
  Sense Strand Starting at position 440 of SEQ ID NO: 315396
uaggacuguuauucuaaag

SEQ ID NO: 353286 - RNA, 19 nt, Artificial Sequence
  Description of Artificial Sequence: Synthetic oligonucleotide
  Antisense Strand to SEQ ID NO: 353285
cuuuagaauaacaguccua

SEQ ID NO: 353287 - RNA, 19 nt, Artificial Sequence
  Description of Artificial Sequence: Synthetic oligonucleotide
  Sense Strand Starting at position 440 of SEQ ID NO: 315528
aacugaguugcagguaaau

SEQ ID NO: 353288 - RNA, 19 nt, Artificial Sequence
  Description of Artificial Sequence: Synthetic oligonucleotide
  Antisense Strand to SEQ ID NO: 353287
auuuaccugcaacucaguu

SEQ ID NO: 353289 - RNA, 19 nt, Artificial Sequence
  Description of Artificial Sequence: Synthetic oligonucleotide
  Sense Strand Starting at position 440 of SEQ ID NO: 315710
ucugaaguaugcccaacau

SEQ ID NO: 353290 - RNA, 19 nt, Artificial Sequence
  Description of Artificial Sequence: Synthetic oligonucleotide
  Antisense Strand to SEQ ID NO: 353289
auguugggcauacuucaga

SEQ ID NO: 353291 - RNA, 19 nt, Artificial Sequence
  Description of Artificial Sequence: Synthetic oligonucleotide
  Sense Strand Starting at position 440 of SEQ ID NO: 315751
acccaauacuggcugagaa

SEQ ID NO: 353292 - RNA, 19 nt, Artificial Sequence
  Description of Artificial Sequence: Synthetic oligonucleotide
  Antisense Strand to SEQ ID NO: 353291
uucucagccaguauugggu

SEQ ID NO: 353293 - RNA, 19 nt, Artificial Sequence
  Description of Artificial Sequence: Synthetic oligonucleotide
  Sense Strand Starting at position 440 of SEQ ID NO: 315752
cccaauacuggcugagaac

SEQ ID NO: 353294 - RNA, 19 nt, Artificial Sequence
  Description of Artificial Sequence: Synthetic oligonucleotide
  Antisense Strand to SEQ ID NO: 353293
guucucagccaguauuggg

SEQ ID NO: 353295 - RNA, 19 nt, Artificial Sequence
  Description of Artificial Sequence: Synthetic oligonucleotide
  Sense Strand Starting at position 440 of SEQ ID NO: 315767
gaaccuauuguguaccagu

SEQ ID NO: 353296 - RNA, 19 nt, Artificial Sequence
  Description of Artificial Sequence: Synthetic oligonucleotide
  Antisense Strand to SEQ ID NO: 353295
acugguacacaauagguuc

SEQ ID NO: 353297 - RNA, 19 nt, Artificial Sequence
  Description of Artificial Sequence: Synthetic oligonucleotide
  Sense Strand Starting at position 440 of SEQ ID NO: 315849
ggucuauggcuagaggaca

SEQ ID NO: 353298 - RNA, 19 nt, Artificial Sequence
  Description of Artificial Sequence: Synthetic oligonucleotide
  Antisense Strand to SEQ ID NO: 353297
uguccucuagccauagacc

SEQ ID NO: 353299 - RNA, 19 nt, Artificial Sequence
  Description of Artificial Sequence: Synthetic oligonucleotide
  Sense Strand Starting at position 440 of SEQ ID NO: 315932
ucaaauggccuguacucau

SEQ ID NO: 353300 - RNA, 19 nt, Artificial Sequence
  Description of Artificial Sequence: Synthetic oligonucleotide
  Antisense Strand to SEQ ID NO: 353299
augaguacaggccauuuga

SEQ ID NO: 353301 - RNA, 19 nt, Artificial Sequence
  Description of Artificial Sequence: Synthetic oligonucleotide
  Sense Strand Starting at position 440 of SEQ ID NO: 316006
agggaaucuuaucuucugu

SEQ ID NO: 353302 - RNA, 19 nt, Artificial Sequence
  Description of Artificial Sequence: Synthetic oligonucleotide
  Antisense Strand to SEQ ID NO: 353301
acagaagauaagauucccu

SEQ ID NO: 353303 - RNA, 19 nt, Artificial Sequence
  Description of Artificial Sequence: Synthetic oligonucleotide
  Sense Strand Starting at position 440 of SEQ ID NO: 316019
uucugugggcuuuaauauc

SEQ ID NO: 353304 - RNA, 19 nt, Artificial Sequence
  Description of Artificial Sequence: Synthetic oligonucleotide
  Antisense Strand to SEQ ID NO: 353303
gauauuaaagcccacagaa

SEQ ID NO: 353305 - RNA, 19 nt, Artificial Sequence
  Description of Artificial Sequence: Synthetic oligonucleotide
  Sense Strand Starting at position 440 of SEQ ID NO: 316104
agacaagagucacuuuauu

SEQ ID NO: 353306 - RNA, 19 nt, Artificial Sequence
  Description of Artificial Sequence: Synthetic oligonucleotide
  Antisense Strand to SEQ ID NO: 353305
aauaaagugacucuugucu

SEQ ID NO: 353307 - RNA, 19 nt, Artificial Sequence
  Description of Artificial Sequence: Synthetic oligonucleotide
  Sense Strand Starting at position 440 of SEQ ID NO: 316167
guucuaugcccuuaagacu

SEQ ID NO: 353308 - RNA, 19 nt, Artificial Sequence
  Description of Artificial Sequence: Synthetic oligonucleotide
  Antisense Strand to SEQ ID NO: 353307
agucuuaagggcauagaac

SEQ ID NO: 353309 - RNA, 19 nt, Artificial Sequence
  Description of Artificial Sequence: Synthetic oligonucleotide
  Sense Strand Starting at position 440 of SEQ ID NO: 316462
cuaucaaagaaaugugcga

SEQ ID NO: 353310 - RNA, 19 nt, Artificial Sequence
  Description of Artificial Sequence: Synthetic oligonucleotide
  Antisense Strand to SEQ ID NO: 353309
ucgcacauuucuuugauag

SEQ ID NO: 353311 - RNA, 19 nt, Artificial Sequence
  Description of Artificial Sequence: Synthetic oligonucleotide
  Sense Strand Starting at position 440 of SEQ ID NO: 316660
augcuugcccaugaaauua

SEQ ID NO: 353312 - RNA, 19 nt, Artificial Sequence
  Description of Artificial Sequence: Synthetic oligonucleotide
  Antisense Strand to SEQ ID NO: 353311
uaauuucaugggcaagcau

SEQ ID NO: 353313 - RNA, 19 nt, Artificial Sequence
  Description of Artificial Sequence: Synthetic oligonucleotide
  Sense Strand Starting at position 440 of SEQ ID NO: 316889
accuuuagugugcaauaag

SEQ ID NO: 353314 - RNA, 19 nt, Artificial Sequence
  Description of Artificial Sequence: Synthetic oligonucleotide
  Antisense Strand to SEQ ID NO: 353313
cuuauugcacacuaaaggu

SEQ ID NO: 353315 - RNA, 19 nt, Artificial Sequence
  Description of Artificial Sequence: Synthetic oligonucleotide
  Sense Strand Starting at position 440 of SEQ ID NO: 316892
uuuagugugcaauaagagu

SEQ ID NO: 353316 - RNA, 19 nt, Artificial Sequence
  Description of Artificial Sequence: Synthetic oligonucleotide
  Antisense Strand to SEQ ID NO: 353315
acucuuauugcacacuaaa

SEQ ID NO: 353317 - RNA, 19 nt, Artificial Sequence
  Description of Artificial Sequence: Synthetic oligonucleotide
  Sense Strand Starting at position 440 of SEQ ID NO: 316974
gcuauugucauggaaaguu

SEQ ID NO: 353318 - RNA, 19 nt, Artificial Sequence
  Description of Artificial Sequence: Synthetic oligonucleotide
  Antisense Strand to SEQ ID NO: 353317
aacuuuccaugacaauagc

SEQ ID NO: 353319 - RNA, 19 nt, Artificial Sequence
  Description of Artificial Sequence: Synthetic oligonucleotide
  Sense Strand Starting at position 440 of SEQ ID NO: 317207
guuaauaaaugcuucuaag

SEQ ID NO: 353320 - RNA, 19 nt, Artificial Sequence
  Description of Artificial Sequence: Synthetic oligonucleotide
  Antisense Strand to SEQ ID NO: 353319
cuuagaagcauuuauuaac

SEQ ID NO: 353321 - RNA, 19 nt, Artificial Sequence
  Description of Artificial Sequence: Synthetic oligonucleotide
  Sense Strand Starting at position 440 of SEQ ID NO: 317372
caguuaaccggucaugaaa

SEQ ID NO: 353322 - RNA, 19 nt, Artificial Sequence
  Description of Artificial Sequence: Synthetic oligonucleotide
  Antisense Strand to SEQ ID NO: 353321
uuucaugaccgguuaacug

SEQ ID NO: 353323 - RNA, 19 nt, Artificial Sequence
  Description of Artificial Sequence: Synthetic oligonucleotide
  Sense Strand Starting at position 440 of SEQ ID NO: 317446
ggacauaucuuccuuggau

SEQ ID NO: 353324 - RNA, 19 nt, Artificial Sequence
  Description of Artificial Sequence: Synthetic oligonucleotide
  Antisense Strand to SEQ ID NO: 353323
auccaaggaagauaugucc

SEQ ID NO: 353325 - RNA, 19 nt, Artificial Sequence
  Description of Artificial Sequence: Synthetic oligonucleotide
  Sense Strand Starting at position 440 of SEQ ID NO: 317447
gacauaucuuccuuggaug

SEQ ID NO: 353326 - RNA, 19 nt, Artificial Sequence
  Description of Artificial Sequence: Synthetic oligonucleotide
  Antisense Strand to SEQ ID NO: 353325
cauccaaggaagauauguc

SEQ ID NO: 353327 - RNA, 19 nt, Artificial Sequence
  Description of Artificial Sequence: Synthetic oligonucleotide
  Sense Strand Starting at position 440 of SEQ ID NO: 317553
augaucuaaguguacacua

SEQ ID NO: 353328 - RNA, 19 nt, Artificial Sequence
  Description of Artificial Sequence: Synthetic oligonucleotide
  Antisense Strand to SEQ ID NO: 353327
uaguguacacuuagaucau

SEQ ID NO: 353329 - RNA, 19 nt, Artificial Sequence
  Description of Artificial Sequence: Synthetic oligonucleotide
  Sense Strand Starting at position 440 of SEQ ID NO: 317558
cuaaguguacacuacauga

SEQ ID NO: 353330 - RNA, 19 nt, Artificial Sequence
  Description of Artificial Sequence: Synthetic oligonucleotide
  Antisense Strand to SEQ ID NO: 353329
ucauguaguguacacuuag

SEQ ID NO: 353331 - RNA, 19 nt, Artificial Sequence
  Description of Artificial Sequence: Synthetic oligonucleotide
  Sense Strand Starting at position 440 of SEQ ID NO: 317632
ugaauauggugcuuucuaa

SEQ ID NO: 353332 - RNA, 19 nt, Artificial Sequence
  Description of Artificial Sequence: Synthetic oligonucleotide
  Antisense Strand to SEQ ID NO: 353331
uuagaaagcaccauauuca

SEQ ID NO: 353333 - RNA, 19 nt, Artificial Sequence
  Description of Artificial Sequence: Synthetic oligonucleotide
  Sense Strand Starting at position 440 of SEQ ID NO: 318012
agucuuagacacuguuuga

SEQ ID NO: 353334 - RNA, 19 nt, Artificial Sequence
  Description of Artificial Sequence: Synthetic oligonucleotide
  Antisense Strand to SEQ ID NO: 353333
ucaaacagugucuaagacu

SEQ ID NO: 353335 - RNA, 19 nt, Artificial Sequence
  Description of Artificial Sequence: Synthetic oligonucleotide
  Sense Strand Starting at position 440 of SEQ ID NO: 318051
cagcauuaucugcaggaua

SEQ ID NO: 353336 - RNA, 19 nt, Artificial Sequence
  Description of Artificial Sequence: Synthetic oligonucleotide
  Antisense Strand to SEQ ID NO: 353335
uauccugcagauaaugcug

SEQ ID NO: 353337 - RNA, 19 nt, Artificial Sequence
  Description of Artificial Sequence: Synthetic oligonucleotide
  Sense Strand Starting at position 440 of SEQ ID NO: 318054
cauuaucugcaggauaguu

SEQ ID NO: 353338 - RNA, 19 nt, Artificial Sequence
  Description of Artificial Sequence: Synthetic oligonucleotide
  Antisense Strand to SEQ ID NO: 353337
aacuauccugcagauaaug

SEQ ID NO: 353339 - RNA, 19 nt, Artificial Sequence
  Description of Artificial Sequence: Synthetic oligonucleotide
  Sense Strand Starting at position 440 of SEQ ID NO: 318059
ucugcaggauaguuacaaa

SEQ ID NO: 353340 - RNA, 19 nt, Artificial Sequence
  Description of Artificial Sequence: Synthetic oligonucleotide
  Antisense Strand to SEQ ID NO: 353339
uuuguaacuauccugcaga

SEQ ID NO: 353341 - RNA, 19 nt, Artificial Sequence
  Description of Artificial Sequence: Synthetic oligonucleotide
  Sense Strand Starting at position 440 of SEQ ID NO: 318079
caggauuuguuaggacaaa

SEQ ID NO: 353342 - RNA, 19 nt, Artificial Sequence
  Description of Artificial Sequence: Synthetic oligonucleotide
  Antisense Strand to SEQ ID NO: 353341
uuuguccuaacaaauccug

SEQ ID NO: 353343 - RNA, 19 nt, Artificial Sequence
  Description of Artificial Sequence: Synthetic oligonucleotide
  Sense Strand Starting at position 440 of SEQ ID NO: 318080
aggauuuguuaggacaaag

SEQ ID NO: 353344 - RNA, 19 nt, Artificial Sequence
  Description of Artificial Sequence: Synthetic oligonucleotide
  Antisense Strand to SEQ ID NO: 353343
cuuuguccuaacaaauccu

SEQ ID NO: 353345 - RNA, 19 nt, Artificial Sequence
  Description of Artificial Sequence: Synthetic oligonucleotide
  Sense Strand Starting at position 440 of SEQ ID NO: 318291
guacccucucaacauuagu

SEQ ID NO: 353346 - RNA, 19 nt, Artificial Sequence
  Description of Artificial Sequence: Synthetic oligonucleotide
  Antisense Strand to SEQ ID NO: 353345
acuaauguugagaggguac

SEQ ID NO: 353347 - RNA, 19 nt, Artificial Sequence
  Description of Artificial Sequence: Synthetic oligonucleotide
  Sense Strand Starting at position 440 of SEQ ID NO: 318505
gaagguaugugggcuaaac

SEQ ID NO: 353348 - RNA, 19 nt, Artificial Sequence
  Description of Artificial Sequence: Synthetic oligonucleotide
  Antisense Strand to SEQ ID NO: 353347
guuuagcccacauaccuuc

SEQ ID NO: 353349 - RNA, 19 nt, Artificial Sequence
  Description of Artificial Sequence: Synthetic oligonucleotide
  Sense Strand Starting at position 440 of SEQ ID NO: 318692
acaggagucaguuaaaugu

SEQ ID NO: 353350 - RNA, 19 nt, Artificial Sequence
  Description of Artificial Sequence: Synthetic oligonucleotide
  Antisense Strand to SEQ ID NO: 353349
acauuuaacugacuccugu

SEQ ID NO: 353351 - RNA, 19 nt, Artificial Sequence
  Description of Artificial Sequence: Synthetic oligonucleotide
  Sense Strand Starting at position 440 of SEQ ID NO: 318968
gugacucuguaccuacaaa

SEQ ID NO: 353352 - RNA, 19 nt, Artificial Sequence
  Description of Artificial Sequence: Synthetic oligonucleotide
  Antisense Strand to SEQ ID NO: 353351
uuuguagguacagagucac

SEQ ID NO: 353353 - RNA, 19 nt, Artificial Sequence
  Description of Artificial Sequence: Synthetic oligonucleotide
  Sense Strand Starting at position 440 of SEQ ID NO: 318980
cuacaaagaucuguuugau

SEQ ID NO: 353354 - RNA, 19 nt, Artificial Sequence
  Description of Artificial Sequence: Synthetic oligonucleotide
  Antisense Strand to SEQ ID NO: 353353
aucaaacagaucuuuguag

SEQ ID NO: 353355 - RNA, 19 nt, Artificial Sequence
  Description of Artificial Sequence: Synthetic oligonucleotide
  Sense Strand Starting at position 440 of SEQ ID NO: 319003
gcauauaaaguguacauau

SEQ ID NO: 353356 - RNA, 19 nt, Artificial Sequence
  Description of Artificial Sequence: Synthetic oligonucleotide
  Antisense Strand to SEQ ID NO: 353355
auauguacacuuuauaugc

SEQ ID NO: 353357 - RNA, 19 nt, Artificial Sequence
  Description of Artificial Sequence: Synthetic oligonucleotide
  Sense Strand Starting at position 440 of SEQ ID NO: 319050
gugcauauauacucacaca

SEQ ID NO: 353358 - RNA, 19 nt, Artificial Sequence
  Description of Artificial Sequence: Synthetic oligonucleotide
  Antisense Strand to SEQ ID NO: 353357
ugugugaguauauaugcac

SEQ ID NO: 353359 - RNA, 19 nt, Artificial Sequence
  Description of Artificial Sequence: Synthetic oligonucleotide
  Sense Strand Starting at position 441 of SEQ ID NO: 315259
cuuaauauuugguugcuua

SEQ ID NO: 353360 - RNA, 19 nt, Artificial Sequence
  Description of Artificial Sequence: Synthetic oligonucleotide
  Antisense Strand to SEQ ID NO: 353359
uaagcaaccaaauauuaag

SEQ ID NO: 353361 - RNA, 19 nt, Artificial Sequence
  Description of Artificial Sequence: Synthetic oligonucleotide
  Sense Strand Starting at position 441 of SEQ ID NO: 315287
uuagaaaugacaggugcuu

SEQ ID NO: 353362 - RNA, 19 nt, Artificial Sequence
  Description of Artificial Sequence: Synthetic oligonucleotide
  Antisense Strand to SEQ ID NO: 353361
aagcaccugucauuucuaa

SEQ ID NO: 353363 - RNA, 19 nt, Artificial Sequence
  Description of Artificial Sequence: Synthetic oligonucleotide
  Sense Strand Starting at position 441 of SEQ ID NO: 315337
auaacugucuugccugaaa

SEQ ID NO: 353364 - RNA, 19 nt, Artificial Sequence
  Description of Artificial Sequence: Synthetic oligonucleotide
  Antisense Strand to SEQ ID NO: 353363
uuucaggcaagacaguuau

SEQ ID NO: 353365 - RNA, 19 nt, Artificial Sequence
  Description of Artificial Sequence: Synthetic oligonucleotide
  Sense Strand Starting at position 441 of SEQ ID NO: 315348
gccugaaagggcuaaugca

SEQ ID NO: 353366 - RNA, 19 nt, Artificial Sequence
  Description of Artificial Sequence: Synthetic oligonucleotide
  Antisense Strand to SEQ ID NO: 353365
ugcauuagcccuuucaggc

SEQ ID NO: 353367 - RNA, 19 nt, Artificial Sequence
  Description of Artificial Sequence: Synthetic oligonucleotide
  Sense Strand Starting at position 441 of SEQ ID NO: 315356
gggcuaaugcaguacuaau

SEQ ID NO: 353368 - RNA, 19 nt, Artificial Sequence
  Description of Artificial Sequence: Synthetic oligonucleotide
  Antisense Strand to SEQ ID NO: 353367
auuaguacugcauuagccc

SEQ ID NO: 353369 - RNA, 19 nt, Artificial Sequence
  Description of Artificial Sequence: Synthetic oligonucleotide
  Sense Strand Starting at position 441 of SEQ ID NO: 315407
agccgaaugcguucucagu

SEQ ID NO: 353370 - RNA, 19 nt, Artificial Sequence
  Description of Artificial Sequence: Synthetic oligonucleotide
  Antisense Strand to SEQ ID NO: 353369
acugagaacgcauucggcu

SEQ ID NO: 353371 - RNA, 19 nt, Artificial Sequence
  Description of Artificial Sequence: Synthetic oligonucleotide
  Sense Strand Starting at position 441 of SEQ ID NO: 315408
gccgaaugcguucucaguu

SEQ ID NO: 353372 - RNA, 19 nt, Artificial Sequence
  Description of Artificial Sequence: Synthetic oligonucleotide
  Antisense Strand to SEQ ID NO: 353371
aacugagaacgcauucggc

SEQ ID NO: 353373 - RNA, 19 nt, Artificial Sequence
  Description of Artificial Sequence: Synthetic oligonucleotide
  Sense Strand Starting at position 441 of SEQ ID NO: 315620
uuacuuaguggucaaucuu

SEQ ID NO: 353374 - RNA, 19 nt, Artificial Sequence
  Description of Artificial Sequence: Synthetic oligonucleotide
  Antisense Strand to SEQ ID NO: 353373
aagauugaccacuaaguaa

SEQ ID NO: 353375 - RNA, 19 nt, Artificial Sequence
  Description of Artificial Sequence: Synthetic oligonucleotide
  Sense Strand Starting at position 441 of SEQ ID NO: 315645
caaggaagcuuuguauucu

SEQ ID NO: 353376 - RNA, 19 nt, Artificial Sequence
  Description of Artificial Sequence: Synthetic oligonucleotide
  Antisense Strand to SEQ ID NO: 353375
agaauacaaagcuuccuug

SEQ ID NO: 353377 - RNA, 19 nt, Artificial Sequence
  Description of Artificial Sequence: Synthetic oligonucleotide
  Sense Strand Starting at position 441 of SEQ ID NO: 315712
aucuuaaugugaucauguu

SEQ ID NO: 353378 - RNA, 19 nt, Artificial Sequence
  Description of Artificial Sequence: Synthetic oligonucleotide
  Antisense Strand to SEQ ID NO: 353377
aacaugaucacauuaagau

SEQ ID NO: 353379 - RNA, 19 nt, Artificial Sequence
  Description of Artificial Sequence: Synthetic oligonucleotide
  Sense Strand Starting at position 441 of SEQ ID NO: 315713
ucuuaaugugaucauguuc

SEQ ID NO: 353380 - RNA, 19 nt, Artificial Sequence
  Description of Artificial Sequence: Synthetic oligonucleotide
  Antisense Strand to SEQ ID NO: 353379
gaacaugaucacauuaaga

SEQ ID NO: 353381 - RNA, 19 nt, Artificial Sequence
  Description of Artificial Sequence: Synthetic oligonucleotide
  Sense Strand Starting at position 441 of SEQ ID NO: 315946
ucuuaagcagauuagucau

SEQ ID NO: 353382 - RNA, 19 nt, Artificial Sequence
  Description of Artificial Sequence: Synthetic oligonucleotide
  Antisense Strand to SEQ ID NO: 353381
augacuaaucugcuuaaga

SEQ ID NO: 353383 - RNA, 19 nt, Artificial Sequence
  Description of Artificial Sequence: Synthetic oligonucleotide
  Sense Strand Starting at position 441 of SEQ ID NO: 315949
uaagcagauuagucauuga

SEQ ID NO: 353384 - RNA, 19 nt, Artificial Sequence
  Description of Artificial Sequence: Synthetic oligonucleotide
  Antisense Strand to SEQ ID NO: 353383
ucaaugacuaaucugcuua

SEQ ID NO: 353385 - RNA, 19 nt, Artificial Sequence
  Description of Artificial Sequence: Synthetic oligonucleotide
  Sense Strand Starting at position 441 of SEQ ID NO: 315952
gcagauuagucauugauag

SEQ ID NO: 353386 - RNA, 19 nt, Artificial Sequence
  Description of Artificial Sequence: Synthetic oligonucleotide
  Antisense Strand to SEQ ID NO: 353385
cuaucaaugacuaaucugc

SEQ ID NO: 353387 - RNA, 19 nt, Artificial Sequence
  Description of Artificial Sequence: Synthetic oligonucleotide
  Sense Strand Starting at position 441 of SEQ ID NO: 315953
cagauuagucauugauagu

SEQ ID NO: 353388 - RNA, 19 nt, Artificial Sequence
  Description of Artificial Sequence: Synthetic oligonucleotide
  Antisense Strand to SEQ ID NO: 353387
acuaucaaugacuaaucug

SEQ ID NO: 353389 - RNA, 19 nt, Artificial Sequence
  Description of Artificial Sequence: Synthetic oligonucleotide
  Sense Strand Starting at position 441 of SEQ ID NO: 316423
gcaacagaggcuuagaauc

SEQ ID NO: 353390 - RNA, 19 nt, Artificial Sequence
  Description of Artificial Sequence: Synthetic oligonucleotide
  Antisense Strand to SEQ ID NO: 353389
gauucuaagccucuguugc

SEQ ID NO: 353391 - RNA, 19 nt, Artificial Sequence
  Description of Artificial Sequence: Synthetic oligonucleotide
  Sense Strand Starting at position 441 of SEQ ID NO: 316522
gugugaacucgucgaauuu

SEQ ID NO: 353392 - RNA, 19 nt, Artificial Sequence
  Description of Artificial Sequence: Synthetic oligonucleotide
  Antisense Strand to SEQ ID NO: 353391
aaauucgacgaguucacac

SEQ ID NO: 353393 - RNA, 19 nt, Artificial Sequence
  Description of Artificial Sequence: Synthetic oligonucleotide
  Sense Strand Starting at position 441 of SEQ ID NO: 316624
auggaaggcuccuuguaua

SEQ ID NO: 353394 - RNA, 19 nt, Artificial Sequence
  Description of Artificial Sequence: Synthetic oligonucleotide
  Antisense Strand to SEQ ID NO: 353393
uauacaaggagccuuccau

SEQ ID NO: 353395 - RNA, 19 nt, Artificial Sequence
  Description of Artificial Sequence: Synthetic oligonucleotide
  Sense Strand Starting at position 441 of SEQ ID NO: 316703
uggcgagggcuucaccaaa

SEQ ID NO: 353396 - RNA, 19 nt, Artificial Sequence
  Description of Artificial Sequence: Synthetic oligonucleotide
  Antisense Strand to SEQ ID NO: 353395
uuuggugaagcccucgcca

SEQ ID NO: 353397 - RNA, 19 nt, Artificial Sequence
  Description of Artificial Sequence: Synthetic oligonucleotide
  Sense Strand Starting at position 441 of SEQ ID NO: 317100
gagcgaaaccggcaaagau

SEQ ID NO: 353398 - RNA, 19 nt, Artificial Sequence
  Description of Artificial Sequence: Synthetic oligonucleotide
  Antisense Strand to SEQ ID NO: 353397
aucuuugccgguuucgcuc

SEQ ID NO: 353399 - RNA, 19 nt, Artificial Sequence
  Description of Artificial Sequence: Synthetic oligonucleotide
  Sense Strand Starting at position 441 of SEQ ID NO: 317606
cgucuuugagacugacaaa

SEQ ID NO: 353400 - RNA, 19 nt, Artificial Sequence
  Description of Artificial Sequence: Synthetic oligonucleotide
  Antisense Strand to SEQ ID NO: 353399
uuugucagucucaaagacg

SEQ ID NO: 353401 - RNA, 19 nt, Artificial Sequence
  Description of Artificial Sequence: Synthetic oligonucleotide
  Sense Strand Starting at position 441 of SEQ ID NO: 317619
gacaaagaguuguccuaac

SEQ ID NO: 353402 - RNA, 19 nt, Artificial Sequence
  Description of Artificial Sequence: Synthetic oligonucleotide
  Antisense Strand to SEQ ID NO: 353401
guuaggacaacucuuuguc

SEQ ID NO: 353403 - RNA, 19 nt, Artificial Sequence
  Description of Artificial Sequence: Synthetic oligonucleotide
  Sense Strand Starting at position 441 of SEQ ID NO: 317630
guccuaaccuuuccgagaa

SEQ ID NO: 353404 - RNA, 19 nt, Artificial Sequence
  Description of Artificial Sequence: Synthetic oligonucleotide
  Antisense Strand to SEQ ID NO: 353403
uucucggaaagguuaggac

SEQ ID NO: 353405 - RNA, 19 nt, Artificial Sequence
  Description of Artificial Sequence: Synthetic oligonucleotide
  Sense Strand Starting at position 441 of SEQ ID NO: 317855
gucggucucgccaaagugu

SEQ ID NO: 353406 - RNA, 19 nt, Artificial Sequence
  Description of Artificial Sequence: Synthetic oligonucleotide
  Antisense Strand to SEQ ID NO: 353405
acacuuuggcgagaccgac

SEQ ID NO: 353407 - RNA, 19 nt, Artificial Sequence
  Description of Artificial Sequence: Synthetic oligonucleotide
  Sense Strand Starting at position 441 of SEQ ID NO: 318086
ggaugaccuucucuauuag

SEQ ID NO: 353408 - RNA, 19 nt, Artificial Sequence
  Description of Artificial Sequence: Synthetic oligonucleotide
  Antisense Strand to SEQ ID NO: 353407
cuaauagagaaggucaucc

SEQ ID NO: 353409 - RNA, 19 nt, Artificial Sequence
  Description of Artificial Sequence: Synthetic oligonucleotide
  Sense Strand Starting at position 441 of SEQ ID NO: 318103
agaaauagucacugcucuu

SEQ ID NO: 353410 - RNA, 19 nt, Artificial Sequence
  Description of Artificial Sequence: Synthetic oligonucleotide
  Antisense Strand to SEQ ID NO: 353409
aagagcagugacuauuucu

SEQ ID NO: 353411 - RNA, 19 nt, Artificial Sequence
  Description of Artificial Sequence: Synthetic oligonucleotide
  Sense Strand Starting at position 441 of SEQ ID NO: 318129
auugaaagcugaguauagu

SEQ ID NO: 353412 - RNA, 19 nt, Artificial Sequence
  Description of Artificial Sequence: Synthetic oligonucleotide
  Antisense Strand to SEQ ID NO: 353411
acuauacucagcuuucaau

SEQ ID NO: 353413 - RNA, 19 nt, Artificial Sequence
  Description of Artificial Sequence: Synthetic oligonucleotide
  Sense Strand Starting at position 441 of SEQ ID NO: 318222
guccauuucggcgacucua

SEQ ID NO: 353414 - RNA, 19 nt, Artificial Sequence
  Description of Artificial Sequence: Synthetic oligonucleotide
  Antisense Strand to SEQ ID NO: 353413
uagagucgccgaaauggac

SEQ ID NO: 353415 - RNA, 19 nt, Artificial Sequence
  Description of Artificial Sequence: Synthetic oligonucleotide
  Sense Strand Starting at position 441 of SEQ ID NO: 318364
aaaggaguagugugacauc

SEQ ID NO: 353416 - RNA, 19 nt, Artificial Sequence
  Description of Artificial Sequence: Synthetic oligonucleotide
  Antisense Strand to SEQ ID NO: 353415
gaugucacacuacuccuuu

SEQ ID NO: 353417 - RNA, 19 nt, Artificial Sequence
  Description of Artificial Sequence: Synthetic oligonucleotide
  Sense Strand Starting at position 441 of SEQ ID NO: 318373
gugugacaucaaugaaugc

SEQ ID NO: 353418 - RNA, 19 nt, Artificial Sequence
  Description of Artificial Sequence: Synthetic oligonucleotide
  Antisense Strand to SEQ ID NO: 353417
gcauucauugaugucacac

SEQ ID NO: 353419 - RNA, 19 nt, Artificial Sequence
  Description of Artificial Sequence: Synthetic oligonucleotide
  Sense Strand Starting at position 441 of SEQ ID NO: 318476
ugaugugaaguguauuaaa

SEQ ID NO: 353420 - RNA, 19 nt, Artificial Sequence
  Description of Artificial Sequence: Synthetic oligonucleotide
  Antisense Strand to SEQ ID NO: 353419
uuuaauacacuucacauca

SEQ ID NO: 353421 - RNA, 19 nt, Artificial Sequence
  Description of Artificial Sequence: Synthetic oligonucleotide
  Sense Strand Starting at position 441 of SEQ ID NO: 318485
guguauuaaaugcagguua

SEQ ID NO: 353422 - RNA, 19 nt, Artificial Sequence
  Description of Artificial Sequence: Synthetic oligonucleotide
  Antisense Strand to SEQ ID NO: 353421
uaaccugcauuuaauacac

SEQ ID NO: 353423 - RNA, 19 nt, Artificial Sequence
  Description of Artificial Sequence: Synthetic oligonucleotide
  Sense Strand Starting at position 441 of SEQ ID NO: 318539
ucaagcaaaugccugaauu

SEQ ID NO: 353424 - RNA, 19 nt, Artificial Sequence
  Description of Artificial Sequence: Synthetic oligonucleotide
  Antisense Strand to SEQ ID NO: 353423
aauucaggcauuugcuuga

SEQ ID NO: 353425 - RNA, 19 nt, Artificial Sequence
  Description of Artificial Sequence: Synthetic oligonucleotide
  Sense Strand Starting at position 441 of SEQ ID NO: 318620
cgaagugaccaucaaagua

SEQ ID NO: 353426 - RNA, 19 nt, Artificial Sequence
  Description of Artificial Sequence: Synthetic oligonucleotide
  Antisense Strand to SEQ ID NO: 353425
uacuuugauggucacuucg

SEQ ID NO: 353427 - RNA, 19 nt, Artificial Sequence
  Description of Artificial Sequence: Synthetic oligonucleotide
  Sense Strand Starting at position 441 of SEQ ID NO: 318806
uuaaaucugccagaaaguc

SEQ ID NO: 353428 - RNA, 19 nt, Artificial Sequence
  Description of Artificial Sequence: Synthetic oligonucleotide
  Antisense Strand to SEQ ID NO: 353427
gacuuucuggcagauuuaa

SEQ ID NO: 353429 - RNA, 19 nt, Artificial Sequence
  Description of Artificial Sequence: Synthetic oligonucleotide
  Sense Strand Starting at position 441 of SEQ ID NO: 318826
cccgacuaucaguagaguu

SEQ ID NO: 353430 - RNA, 19 nt, Artificial Sequence
  Description of Artificial Sequence: Synthetic oligonucleotide
  Antisense Strand to SEQ ID NO: 353429
aacucuacugauagucggg

SEQ ID NO: 353431 - RNA, 19 nt, Artificial Sequence
  Description of Artificial Sequence: Synthetic oligonucleotide
  Sense Strand Starting at position 441 of SEQ ID NO: 318828
cgacuaucaguagaguucu

SEQ ID NO: 353432 - RNA, 19 nt, Artificial Sequence
  Description of Artificial Sequence: Synthetic oligonucleotide
  Antisense Strand to SEQ ID NO: 353431
agaacucuacugauagucg

SEQ ID NO: 353433 - RNA, 19 nt, Artificial Sequence
  Description of Artificial Sequence: Synthetic oligonucleotide
  Sense Strand Starting at position 441 of SEQ ID NO: 318920
ggaagugcucuccaaccaa

SEQ ID NO: 353434 - RNA, 19 nt, Artificial Sequence
  Description of Artificial Sequence: Synthetic oligonucleotide
  Antisense Strand to SEQ ID NO: 353433
uugguuggagagcacuucc

SEQ ID NO: 353435 - RNA, 19 nt, Artificial Sequence
  Description of Artificial Sequence: Synthetic oligonucleotide
  Sense Strand Starting at position 441 of SEQ ID NO: 319038
ugggauguacuuugaauau

SEQ ID NO: 353436 - RNA, 19 nt, Artificial Sequence
  Description of Artificial Sequence: Synthetic oligonucleotide
  Antisense Strand to SEQ ID NO: 353435
auauucaaaguacauccca

SEQ ID NO: 353437 - RNA, 19 nt, Artificial Sequence
  Description of Artificial Sequence: Synthetic oligonucleotide
  Sense Strand Starting at position 441 of SEQ ID NO: 319042
auguacuuugaauaugcaa

SEQ ID NO: 353438 - RNA, 19 nt, Artificial Sequence
  Description of Artificial Sequence: Synthetic oligonucleotide
  Antisense Strand to SEQ ID NO: 353437
uugcauauucaaaguacau

SEQ ID NO: 353439 - RNA, 19 nt, Artificial Sequence
  Description of Artificial Sequence: Synthetic oligonucleotide
  Sense Strand Starting at position 442 of SEQ ID NO: 315419
agagaugauccgcagccaa

SEQ ID NO: 353440 - RNA, 19 nt, Artificial Sequence
  Description of Artificial Sequence: Synthetic oligonucleotide
  Antisense Strand to SEQ ID NO: 353439
uuggcugcggaucaucucu

SEQ ID NO: 353441 - RNA, 19 nt, Artificial Sequence
  Description of Artificial Sequence: Synthetic oligonucleotide
  Sense Strand Starting at position 442 of SEQ ID NO: 315542
gcaugaacccgagauugca

SEQ ID NO: 353442 - RNA, 19 nt, Artificial Sequence
  Description of Artificial Sequence: Synthetic oligonucleotide
  Antisense Strand to SEQ ID NO: 353441
ugcaaucucggguucaugc

SEQ ID NO: 353443 - RNA, 19 nt, Artificial Sequence
  Description of Artificial Sequence: Synthetic oligonucleotide
  Sense Strand Starting at position 442 of SEQ ID NO: 315578
ucaaaucugcuugggaaug

SEQ ID NO: 353444 - RNA, 19 nt, Artificial Sequence
  Description of Artificial Sequence: Synthetic oligonucleotide
  Antisense Strand to SEQ ID NO: 353443
cauucccaagcagauuuga

SEQ ID NO: 353445 - RNA, 19 nt, Artificial Sequence
  Description of Artificial Sequence: Synthetic oligonucleotide
  Sense Strand Starting at position 442 of SEQ ID NO: 315583
ucugcuugggaaugacaua

SEQ ID NO: 353446 - RNA, 19 nt, Artificial Sequence
  Description of Artificial Sequence: Synthetic oligonucleotide
  Antisense Strand to SEQ ID NO: 353445
uaugucauucccaagcaga

SEQ ID NO: 353447 - RNA, 19 nt, Artificial Sequence
  Description of Artificial Sequence: Synthetic oligonucleotide
  Sense Strand Starting at position 442 of SEQ ID NO: 315595
ugacauacuugauucugga

SEQ ID NO: 353448 - RNA, 19 nt, Artificial Sequence
  Description of Artificial Sequence: Synthetic oligonucleotide
  Antisense Strand to SEQ ID NO: 353447
uccagaaucaaguauguca

SEQ ID NO: 353449 - RNA, 19 nt, Artificial Sequence
  Description of Artificial Sequence: Synthetic oligonucleotide
  Sense Strand Starting at position 442 of SEQ ID NO: 315611
ggaacaaacugcucacuuu

SEQ ID NO: 353450 - RNA, 19 nt, Artificial Sequence
  Description of Artificial Sequence: Synthetic oligonucleotide
  Antisense Strand to SEQ ID NO: 353449
aaagugagcaguuuguucc

SEQ ID NO: 353451 - RNA, 19 nt, Artificial Sequence
  Description of Artificial Sequence: Synthetic oligonucleotide
  Sense Strand Starting at position 442 of SEQ ID NO: 315633
cgugguuugaacuaaugaa

SEQ ID NO: 353452 - RNA, 19 nt, Artificial Sequence
  Description of Artificial Sequence: Synthetic oligonucleotide
  Antisense Strand to SEQ ID NO: 353451
uucauuaguucaaaccacg

SEQ ID NO: 353453 - RNA, 19 nt, Artificial Sequence
  Description of Artificial Sequence: Synthetic oligonucleotide
  Sense Strand Starting at position 442 of SEQ ID NO: 315770
ugauuaauagccuguaaua

SEQ ID NO: 353454 - RNA, 19 nt, Artificial Sequence
  Description of Artificial Sequence: Synthetic oligonucleotide
  Antisense Strand to SEQ ID NO: 353453
uauuacaggcuauuaauca

SEQ ID NO: 353455 - RNA, 19 nt, Artificial Sequence
  Description of Artificial Sequence: Synthetic oligonucleotide
  Sense Strand Starting at position 442 of SEQ ID NO: 315946
ccaccuuggcuccaacaga

SEQ ID NO: 353456 - RNA, 19 nt, Artificial Sequence
  Description of Artificial Sequence: Synthetic oligonucleotide
  Antisense Strand to SEQ ID NO: 353455
ucuguuggagccaaggugg

SEQ ID NO: 353457 - RNA, 19 nt, Artificial Sequence
  Description of Artificial Sequence: Synthetic oligonucleotide
  Sense Strand Starting at position 442 of SEQ ID NO: 316008
aagugaagguguccaagga

SEQ ID NO: 353458 - RNA, 19 nt, Artificial Sequence
  Description of Artificial Sequence: Synthetic oligonucleotide
  Antisense Strand to SEQ ID NO: 353457
uccuuggacaccuucacuu

SEQ ID NO: 353459 - RNA, 19 nt, Artificial Sequence
  Description of Artificial Sequence: Synthetic oligonucleotide
  Sense Strand Starting at position 442 of SEQ ID NO: 316012
gaagguguccaaggaauua

SEQ ID NO: 353460 - RNA, 19 nt, Artificial Sequence
  Description of Artificial Sequence: Synthetic oligonucleotide
  Antisense Strand to SEQ ID NO: 353459
uaauuccuuggacaccuuc

SEQ ID NO: 353461 - RNA, 19 nt, Artificial Sequence
  Description of Artificial Sequence: Synthetic oligonucleotide
  Sense Strand Starting at position 442 of SEQ ID NO: 316255
accaguguggauuauccaa

SEQ ID NO: 353462 - RNA, 19 nt, Artificial Sequence
  Description of Artificial Sequence: Synthetic oligonucleotide
  Antisense Strand to SEQ ID NO: 353461
uuggauaauccacacuggu

SEQ ID NO: 353463 - RNA, 19 nt, Artificial Sequence
  Description of Artificial Sequence: Synthetic oligonucleotide
  Sense Strand Starting at position 442 of SEQ ID NO: 316472
cacagaguugagcaaccua

SEQ ID NO: 353464 - RNA, 19 nt, Artificial Sequence
  Description of Artificial Sequence: Synthetic oligonucleotide
  Antisense Strand to SEQ ID NO: 353463
uagguugcucaacucugug

SEQ ID NO: 353465 - RNA, 19 nt, Artificial Sequence
  Description of Artificial Sequence: Synthetic oligonucleotide
  Sense Strand Starting at position 442 of SEQ ID NO: 316498
ucuggaguugcagauaaua

SEQ ID NO: 353466 - RNA, 19 nt, Artificial Sequence
  Description of Artificial Sequence: Synthetic oligonucleotide
  Antisense Strand to SEQ ID NO: 353465
uauuaucugcaacuccaga

SEQ ID NO: 353467 - RNA, 19 nt, Artificial Sequence
  Description of Artificial Sequence: Synthetic oligonucleotide
  Sense Strand Starting at position 442 of SEQ ID NO: 316525
gccucaagaccaugaggau

SEQ ID NO: 353468 - RNA, 19 nt, Artificial Sequence
  Description of Artificial Sequence: Synthetic oligonucleotide
  Antisense Strand to SEQ ID NO: 353467
auccucauggucuugaggc

SEQ ID NO: 353469 - RNA, 19 nt, Artificial Sequence
  Description of Artificial Sequence: Synthetic oligonucleotide
  Sense Strand Starting at position 442 of SEQ ID NO: 316613
cgcccaaguagagaagaau

SEQ ID NO: 353470 - RNA, 19 nt, Artificial Sequence
  Description of Artificial Sequence: Synthetic oligonucleotide
  Antisense Strand to SEQ ID NO: 353469
auucuucucuacuugggcg

SEQ ID NO: 353471 - RNA, 19 nt, Artificial Sequence
  Description of Artificial Sequence: Synthetic oligonucleotide
  Sense Strand Starting at position 442 of SEQ ID NO: 316774
ugaauccaugcaugacaau

SEQ ID NO: 353472 - RNA, 19 nt, Artificial Sequence
  Description of Artificial Sequence: Synthetic oligonucleotide
  Antisense Strand to SEQ ID NO: 353471
auugucaugcauggauuca

SEQ ID NO: 353473 - RNA, 19 nt, Artificial Sequence
  Description of Artificial Sequence: Synthetic oligonucleotide
  Sense Strand Starting at position 442 of SEQ ID NO: 316858
augucuauaucacugauga

SEQ ID NO: 353474 - RNA, 19 nt, Artificial Sequence
  Description of Artificial Sequence: Synthetic oligonucleotide
  Antisense Strand to SEQ ID NO: 353473
ucaucagugauauagacau

SEQ ID NO: 353475 - RNA, 19 nt, Artificial Sequence
  Description of Artificial Sequence: Synthetic oligonucleotide
  Sense Strand Starting at position 442 of SEQ ID NO: 316859
ugucuauaucacugaugag

SEQ ID NO: 353476 - RNA, 19 nt, Artificial Sequence
  Description of Artificial Sequence: Synthetic oligonucleotide
  Antisense Strand to SEQ ID NO: 353475
cucaucagugauauagaca

SEQ ID NO: 353477 - RNA, 19 nt, Artificial Sequence
  Description of Artificial Sequence: Synthetic oligonucleotide
  Sense Strand Starting at position 442 of SEQ ID NO: 316963
augagauauguaugcaaag

SEQ ID NO: 353478 - RNA, 19 nt, Artificial Sequence
  Description of Artificial Sequence: Synthetic oligonucleotide
  Antisense Strand to SEQ ID NO: 353477
cuuugcauacauaucucau

SEQ ID NO: 353479 - RNA, 19 nt, Artificial Sequence
  Description of Artificial Sequence: Synthetic oligonucleotide
  Sense Strand Starting at position 442 of SEQ ID NO: 316964
ugagauauguaugcaaaga

SEQ ID NO: 353480 - RNA, 19 nt, Artificial Sequence
  Description of Artificial Sequence: Synthetic oligonucleotide
  Antisense Strand to SEQ ID NO: 353479
ucuuugcauacauaucuca

SEQ ID NO: 353481 - RNA, 19 nt, Artificial Sequence
  Description of Artificial Sequence: Synthetic oligonucleotide
  Sense Strand Starting at position 442 of SEQ ID NO: 316974
augcaaagauaugucucaa

SEQ ID NO: 353482 - RNA, 19 nt, Artificial Sequence
  Description of Artificial Sequence: Synthetic oligonucleotide
  Antisense Strand to SEQ ID NO: 353481
uugagacauaucuuugcau

SEQ ID NO: 353483 - RNA, 19 nt, Artificial Sequence
  Description of Artificial Sequence: Synthetic oligonucleotide
  Sense Strand Starting at position 442 of SEQ ID NO: 317206
uggaguuguaccguuuguu

SEQ ID NO: 353484 - RNA, 19 nt, Artificial Sequence
  Description of Artificial Sequence: Synthetic oligonucleotide
  Antisense Strand to SEQ ID NO: 353483
aacaaacgguacaacucca

SEQ ID NO: 353485 - RNA, 19 nt, Artificial Sequence
  Description of Artificial Sequence: Synthetic oligonucleotide
  Sense Strand Starting at position 442 of SEQ ID NO: 317207
ggaguuguaccguuuguuu

SEQ ID NO: 353486 - RNA, 19 nt, Artificial Sequence
  Description of Artificial Sequence: Synthetic oligonucleotide
  Antisense Strand to SEQ ID NO: 353485
aaacaaacgguacaacucc

SEQ ID NO: 353487 - RNA, 19 nt, Artificial Sequence
  Description of Artificial Sequence: Synthetic oligonucleotide
  Sense Strand Starting at position 442 of SEQ ID NO: 317309
accauauuaggauguguau

SEQ ID NO: 353488 - RNA, 19 nt, Artificial Sequence
  Description of Artificial Sequence: Synthetic oligonucleotide
  Antisense Strand to SEQ ID NO: 353487
auacacauccuaauauggu

SEQ ID NO: 353489 - RNA, 19 nt, Artificial Sequence
  Description of Artificial Sequence: Synthetic oligonucleotide
  Sense Strand Starting at position 442 of SEQ ID NO: 317315
uuaggauguguaugguaaa

SEQ ID NO: 353490 - RNA, 19 nt, Artificial Sequence
  Description of Artificial Sequence: Synthetic oligonucleotide
  Antisense Strand to SEQ ID NO: 353489
uuuaccauacacauccuaa

SEQ ID NO: 353491 - RNA, 19 nt, Artificial Sequence
  Description of Artificial Sequence: Synthetic oligonucleotide
  Sense Strand Starting at position 442 of SEQ ID NO: 317647
ucuuucucugaagguuaaa

SEQ ID NO: 353492 - RNA, 19 nt, Artificial Sequence
  Description of Artificial Sequence: Synthetic oligonucleotide
  Antisense Strand to SEQ ID NO: 353491
uuuaaccuucagagaaaga

SEQ ID NO: 353493 - RNA, 19 nt, Artificial Sequence
  Description of Artificial Sequence: Synthetic oligonucleotide
  Sense Strand Starting at position 442 of SEQ ID NO: 317757
gugucacugagugaagagu

SEQ ID NO: 353494 - RNA, 19 nt, Artificial Sequence
  Description of Artificial Sequence: Synthetic oligonucleotide
  Antisense Strand to SEQ ID NO: 353493
acucuucacucagugacac

SEQ ID NO: 353495 - RNA, 19 nt, Artificial Sequence
  Description of Artificial Sequence: Synthetic oligonucleotide
  Sense Strand Starting at position 442 of SEQ ID NO: 317806
accugaaauuucuaggaug

SEQ ID NO: 353496 - RNA, 19 nt, Artificial Sequence
  Description of Artificial Sequence: Synthetic oligonucleotide
  Antisense Strand to SEQ ID NO: 353495
cauccuagaaauuucaggu

SEQ ID NO: 353497 - RNA, 19 nt, Artificial Sequence
  Description of Artificial Sequence: Synthetic oligonucleotide
  Sense Strand Starting at position 442 of SEQ ID NO: 317809
ugaaauuucuaggaugguu

SEQ ID NO: 353498 - RNA, 19 nt, Artificial Sequence
  Description of Artificial Sequence: Synthetic oligonucleotide
  Antisense Strand to SEQ ID NO: 353497
aaccauccuagaaauuuca

SEQ ID NO: 353499 - RNA, 19 nt, Artificial Sequence
  Description of Artificial Sequence: Synthetic oligonucleotide
  Sense Strand Starting at position 442 of SEQ ID NO: 318045
caugaucacuuaguacgaa

SEQ ID NO: 353500 - RNA, 19 nt, Artificial Sequence
  Description of Artificial Sequence: Synthetic oligonucleotide
  Antisense Strand to SEQ ID NO: 353499
uucguacuaagugaucaug

SEQ ID NO: 353501 - RNA, 19 nt, Artificial Sequence
  Description of Artificial Sequence: Synthetic oligonucleotide
  Sense Strand Starting at position 442 of SEQ ID NO: 318231
aucuuuauucccuagguga

SEQ ID NO: 353502 - RNA, 19 nt, Artificial Sequence
  Description of Artificial Sequence: Synthetic oligonucleotide
  Antisense Strand to SEQ ID NO: 353501
ucaccuagggaauaaagau

SEQ ID NO: 353503 - RNA, 19 nt, Artificial Sequence
  Description of Artificial Sequence: Synthetic oligonucleotide
  Sense Strand Starting at position 442 of SEQ ID NO: 318233
cuuuauucccuaggugaga

SEQ ID NO: 353504 - RNA, 19 nt, Artificial Sequence
  Description of Artificial Sequence: Synthetic oligonucleotide
  Antisense Strand to SEQ ID NO: 353503
ucucaccuagggaauaaag

SEQ ID NO: 353505 - RNA, 19 nt, Artificial Sequence
  Description of Artificial Sequence: Synthetic oligonucleotide
  Sense Strand Starting at position 442 of SEQ ID NO: 318378
agaaaccuucuguguacca

SEQ ID NO: 353506 - RNA, 19 nt, Artificial Sequence
  Description of Artificial Sequence: Synthetic oligonucleotide
  Antisense Strand to SEQ ID NO: 353505
ugguacacagaagguuucu

SEQ ID NO: 353507 - RNA, 19 nt, Artificial Sequence
  Description of Artificial Sequence: Synthetic oligonucleotide
  Sense Strand Starting at position 442 of SEQ ID NO: 318588
uuaucagauccauaucgua

SEQ ID NO: 353508 - RNA, 19 nt, Artificial Sequence
  Description of Artificial Sequence: Synthetic oligonucleotide
  Antisense Strand to SEQ ID NO: 353507
uacgauauggaucugauaa

SEQ ID NO: 353509 - RNA, 19 nt, Artificial Sequence
  Description of Artificial Sequence: Synthetic oligonucleotide
  Sense Strand Starting at position 442 of SEQ ID NO: 318809
caaagauaugauggccagu

SEQ ID NO: 353510 - RNA, 19 nt, Artificial Sequence
  Description of Artificial Sequence: Synthetic oligonucleotide
  Antisense Strand to SEQ ID NO: 353509
acuggccaucauaucuuug

SEQ ID NO: 353511 - RNA, 19 nt, Artificial Sequence
  Description of Artificial Sequence: Synthetic oligonucleotide
  Sense Strand Starting at position 442 of SEQ ID NO: 318929
auugcuagcuauuuaugua

SEQ ID NO: 353512 - RNA, 19 nt, Artificial Sequence
  Description of Artificial Sequence: Synthetic oligonucleotide
  Antisense Strand to SEQ ID NO: 353511
uacauaaauagcuagcaau

SEQ ID NO: 353513 - RNA, 19 nt, Artificial Sequence
  Description of Artificial Sequence: Synthetic oligonucleotide
  Sense Strand Starting at position 442 of SEQ ID NO: 319080
gcgcuacagcucucagcau

SEQ ID NO: 353514 - RNA, 19 nt, Artificial Sequence
  Description of Artificial Sequence: Synthetic oligonucleotide
  Antisense Strand to SEQ ID NO: 353513
augcugagagcuguagcgc

SEQ ID NO: 353515 - RNA, 19 nt, Artificial Sequence
  Description of Artificial Sequence: Synthetic oligonucleotide
  Sense Strand Starting at position 442 of SEQ ID NO: 319196
gaaaguauugugcagaaca

SEQ ID NO: 353516 - RNA, 19 nt, Artificial Sequence
  Description of Artificial Sequence: Synthetic oligonucleotide
  Antisense Strand to SEQ ID NO: 353515
uguucugcacaauacuuuc

SEQ ID NO: 353517 - RNA, 19 nt, Artificial Sequence
  Description of Artificial Sequence: Synthetic oligonucleotide
  Sense Strand Starting at position 442 of SEQ ID NO: 319198
aaguauugugcagaacauu

SEQ ID NO: 353518 - RNA, 19 nt, Artificial Sequence
  Description of Artificial Sequence: Synthetic oligonucleotide
  Antisense Strand to SEQ ID NO: 353517
aauguucugcacaauacuu

SEQ ID NO: 353519 - RNA, 19 nt, Artificial Sequence
  Description of Artificial Sequence: Synthetic oligonucleotide
  Sense Strand Starting at position 443 of SEQ ID NO: 315246
uucuguauaucuguuaaag

SEQ ID NO: 353520 - RNA, 19 nt, Artificial Sequence
  Description of Artificial Sequence: Synthetic oligonucleotide
  Antisense Strand to SEQ ID NO: 353519
cuuuaacagauauacagaa

SEQ ID NO: 353521 - RNA, 19 nt, Artificial Sequence
  Description of Artificial Sequence: Synthetic oligonucleotide
  Sense Strand Starting at position 443 of SEQ ID NO: 315412
agacuaagauaccaagaaa

SEQ ID NO: 353522 - RNA, 19 nt, Artificial Sequence
  Description of Artificial Sequence: Synthetic oligonucleotide
  Antisense Strand to SEQ ID NO: 353521
uuucuugguaucuuagucu

SEQ ID NO: 353523 - RNA, 19 nt, Artificial Sequence
  Description of Artificial Sequence: Synthetic oligonucleotide
  Sense Strand Starting at position 443 of SEQ ID NO: 315542
acaaauuguccuuaaggca

SEQ ID NO: 353524 - RNA, 19 nt, Artificial Sequence
  Description of Artificial Sequence: Synthetic oligonucleotide
  Antisense Strand to SEQ ID NO: 353523
ugccuuaaggacaauuugu

SEQ ID NO: 353525 - RNA, 19 nt, Artificial Sequence
  Description of Artificial Sequence: Synthetic oligonucleotide
  Sense Strand Starting at position 443 of SEQ ID NO: 315685
auguuucuucuaugagagg

SEQ ID NO: 353526 - RNA, 19 nt, Artificial Sequence
  Description of Artificial Sequence: Synthetic oligonucleotide
  Antisense Strand to SEQ ID NO: 353525
ccucucauagaagaaacau

SEQ ID NO: 353527 - RNA, 19 nt, Artificial Sequence
  Description of Artificial Sequence: Synthetic oligonucleotide
  Sense Strand Starting at position 443 of SEQ ID NO: 315863
cccugaccaccauauaguu

SEQ ID NO: 353528 - RNA, 19 nt, Artificial Sequence
  Description of Artificial Sequence: Synthetic oligonucleotide
  Antisense Strand to SEQ ID NO: 353527
aacuauaugguggucaggg

SEQ ID NO: 353529 - RNA, 19 nt, Artificial Sequence
  Description of Artificial Sequence: Synthetic oligonucleotide
  Sense Strand Starting at position 443 of SEQ ID NO: 316014
gucaaaucauguguuuaaa

SEQ ID NO: 353530 - RNA, 19 nt, Artificial Sequence
  Description of Artificial Sequence: Synthetic oligonucleotide
  Antisense Strand to SEQ ID NO: 353529
uuuaaacacaugauuugac

SEQ ID NO: 353531 - RNA, 19 nt, Artificial Sequence
  Description of Artificial Sequence: Synthetic oligonucleotide
  Sense Strand Starting at position 443 of SEQ ID NO: 316052
gacuaagagagccguuaga

SEQ ID NO: 353532 - RNA, 19 nt, Artificial Sequence
  Description of Artificial Sequence: Synthetic oligonucleotide
  Antisense Strand to SEQ ID NO: 353531
ucuaacggcucucuuaguc

SEQ ID NO: 353533 - RNA, 19 nt, Artificial Sequence
  Description of Artificial Sequence: Synthetic oligonucleotide
  Sense Strand Starting at position 443 of SEQ ID NO: 316295
uuggcaugaaauugguaca

SEQ ID NO: 353534 - RNA, 19 nt, Artificial Sequence
  Description of Artificial Sequence: Synthetic oligonucleotide
  Antisense Strand to SEQ ID NO: 353533
uguaccaauuucaugccaa

SEQ ID NO: 353535 - RNA, 19 nt, Artificial Sequence
  Description of Artificial Sequence: Synthetic oligonucleotide
  Sense Strand Starting at position 443 of SEQ ID NO: 316296
uggcaugaaauugguacaa

SEQ ID NO: 353536 - RNA, 19 nt, Artificial Sequence
  Description of Artificial Sequence: Synthetic oligonucleotide
  Antisense Strand to SEQ ID NO: 353535
uuguaccaauuucaugcca

SEQ ID NO: 353537 - RNA, 19 nt, Artificial Sequence
  Description of Artificial Sequence: Synthetic oligonucleotide
  Sense Strand Starting at position 443 of SEQ ID NO: 316533
gcuuacuuagcugauuaua

SEQ ID NO: 353538 - RNA, 19 nt, Artificial Sequence
  Description of Artificial Sequence: Synthetic oligonucleotide
  Antisense Strand to SEQ ID NO: 353537
uauaaucagcuaaguaagc

SEQ ID NO: 353539 - RNA, 19 nt, Artificial Sequence
  Description of Artificial Sequence: Synthetic oligonucleotide
  Sense Strand Starting at position 443 of SEQ ID NO: 316541
agcugauuauauccaaaga

SEQ ID NO: 353540 - RNA, 19 nt, Artificial Sequence
  Description of Artificial Sequence: Synthetic oligonucleotide
  Antisense Strand to SEQ ID NO: 353539
ucuuuggauauaaucagcu

SEQ ID NO: 353541 - RNA, 19 nt, Artificial Sequence
  Description of Artificial Sequence: Synthetic oligonucleotide
  Sense Strand Starting at position 443 of SEQ ID NO: 316599
aggaaacgguccucucaaa

SEQ ID NO: 353542 - RNA, 19 nt, Artificial Sequence
  Description of Artificial Sequence: Synthetic oligonucleotide
  Antisense Strand to SEQ ID NO: 353541
uuugagaggaccguuuccu

SEQ ID NO: 353543 - RNA, 19 nt, Artificial Sequence
  Description of Artificial Sequence: Synthetic oligonucleotide
  Sense Strand Starting at position 443 of SEQ ID NO: 316709
cagagaaugucugcacaag

SEQ ID NO: 353544 - RNA, 19 nt, Artificial Sequence
  Description of Artificial Sequence: Synthetic oligonucleotide
  Antisense Strand to SEQ ID NO: 353543
cuugugcagacauucucug

SEQ ID NO: 353545 - RNA, 19 nt, Artificial Sequence
  Description of Artificial Sequence: Synthetic oligonucleotide
  Sense Strand Starting at position 443 of SEQ ID NO: 316797
aaaugaagaguuuggcgaa

SEQ ID NO: 353546 - RNA, 19 nt, Artificial Sequence
  Description of Artificial Sequence: Synthetic oligonucleotide
  Antisense Strand to SEQ ID NO: 353545
uucgccaaacucuucauuu

SEQ ID NO: 353547 - RNA, 19 nt, Artificial Sequence
  Description of Artificial Sequence: Synthetic oligonucleotide
  Sense Strand Starting at position 443 of SEQ ID NO: 317001
gagguuugccuccacagua

SEQ ID NO: 353548 - RNA, 19 nt, Artificial Sequence
  Description of Artificial Sequence: Synthetic oligonucleotide
  Antisense Strand to SEQ ID NO: 353547
uacuguggaggcaaaccuc

SEQ ID NO: 353549 - RNA, 19 nt, Artificial Sequence
  Description of Artificial Sequence: Synthetic oligonucleotide
  Sense Strand Starting at position 443 of SEQ ID NO: 317025
cugggcucucacuaaauga

SEQ ID NO: 353550 - RNA, 19 nt, Artificial Sequence
  Description of Artificial Sequence: Synthetic oligonucleotide
  Antisense Strand to SEQ ID NO: 353549
ucauuuagugagagcccag

SEQ ID NO: 353551 - RNA, 19 nt, Artificial Sequence
  Description of Artificial Sequence: Synthetic oligonucleotide
  Sense Strand Starting at position 443 of SEQ ID NO: 317088
guugaaagaucaguuggag

SEQ ID NO: 353552 - RNA, 19 nt, Artificial Sequence
  Description of Artificial Sequence: Synthetic oligonucleotide
  Antisense Strand to SEQ ID NO: 353551
cuccaacugaucuuucaac

SEQ ID NO: 353553 - RNA, 19 nt, Artificial Sequence
  Description of Artificial Sequence: Synthetic oligonucleotide
  Sense Strand Starting at position 443 of SEQ ID NO: 317091
gaaagaucaguuggagcuu

SEQ ID NO: 353554 - RNA, 19 nt, Artificial Sequence
  Description of Artificial Sequence: Synthetic oligonucleotide
  Antisense Strand to SEQ ID NO: 353553
aagcuccaacugaucuuuc

SEQ ID NO: 353555 - RNA, 19 nt, Artificial Sequence
  Description of Artificial Sequence: Synthetic oligonucleotide
  Sense Strand Starting at position 443 of SEQ ID NO: 317284
cgggaaaccugcucuugag

SEQ ID NO: 353556 - RNA, 19 nt, Artificial Sequence
  Description of Artificial Sequence: Synthetic oligonucleotide
  Antisense Strand to SEQ ID NO: 353555
cucaagagcagguuucccg

SEQ ID NO: 353557 - RNA, 19 nt, Artificial Sequence
  Description of Artificial Sequence: Synthetic oligonucleotide
  Sense Strand Starting at position 443 of SEQ ID NO: 317428
cccguauuccagggauaug

SEQ ID NO: 353558 - RNA, 19 nt, Artificial Sequence
  Description of Artificial Sequence: Synthetic oligonucleotide
  Antisense Strand to SEQ ID NO: 353557
cauaucccuggaauacggg

SEQ ID NO: 353559 - RNA, 19 nt, Artificial Sequence
  Description of Artificial Sequence: Synthetic oligonucleotide
  Sense Strand Starting at position 443 of SEQ ID NO: 317438
agggauaugcccuggaucu

SEQ ID NO: 353560 - RNA, 19 nt, Artificial Sequence
  Description of Artificial Sequence: Synthetic oligonucleotide
  Antisense Strand to SEQ ID NO: 353559
agauccagggcauaucccu

SEQ ID NO: 353561 - RNA, 19 nt, Artificial Sequence
  Description of Artificial Sequence: Synthetic oligonucleotide
  Sense Strand Starting at position 443 of SEQ ID NO: 317439
gggauaugcccuggaucug

SEQ ID NO: 353562 - RNA, 19 nt, Artificial Sequence
  Description of Artificial Sequence: Synthetic oligonucleotide
  Antisense Strand to SEQ ID NO: 353561
cagauccagggcauauccc

SEQ ID NO: 353563 - RNA, 19 nt, Artificial Sequence
  Description of Artificial Sequence: Synthetic oligonucleotide
  Sense Strand Starting at position 443 of SEQ ID NO: 317506
cuaccuguuuaucuccaga

SEQ ID NO: 353564 - RNA, 19 nt, Artificial Sequence
  Description of Artificial Sequence: Synthetic oligonucleotide
  Antisense Strand to SEQ ID NO: 353563
ucuggagauaaacagguag

SEQ ID NO: 353565 - RNA, 19 nt, Artificial Sequence
  Description of Artificial Sequence: Synthetic oligonucleotide
  Sense Strand Starting at position 443 of SEQ ID NO: 317508
accuguuuaucuccagaug

SEQ ID NO: 353566 - RNA, 19 nt, Artificial Sequence
  Description of Artificial Sequence: Synthetic oligonucleotide
  Antisense Strand to SEQ ID NO: 353565
caucuggagauaaacaggu

SEQ ID NO: 353567 - RNA, 19 nt, Artificial Sequence
  Description of Artificial Sequence: Synthetic oligonucleotide
  Sense Strand Starting at position 443 of SEQ ID NO: 317511
uguuuaucuccagaugccu

SEQ ID NO: 353568 - RNA, 19 nt, Artificial Sequence
  Description of Artificial Sequence: Synthetic oligonucleotide
  Antisense Strand to SEQ ID NO: 353567
aggcaucuggagauaaaca

SEQ ID NO: 353569 - RNA, 19 nt, Artificial Sequence
  Description of Artificial Sequence: Synthetic oligonucleotide
  Sense Strand Starting at position 443 of SEQ ID NO: 318272
uggaguauccaaugcaaau

SEQ ID NO: 353570 - RNA, 19 nt, Artificial Sequence
  Description of Artificial Sequence: Synthetic oligonucleotide
  Antisense Strand to SEQ ID NO: 353569
auuugcauuggauacucca

SEQ ID NO: 353571 - RNA, 19 nt, Artificial Sequence
  Description of Artificial Sequence: Synthetic oligonucleotide
  Sense Strand Starting at position 443 of SEQ ID NO: 318516
cuauaaguaguucgagaug

SEQ ID NO: 353572 - RNA, 19 nt, Artificial Sequence
  Description of Artificial Sequence: Synthetic oligonucleotide
  Antisense Strand to SEQ ID NO: 353571
caucucgaacuacuuauag

SEQ ID NO: 353573 - RNA, 19 nt, Artificial Sequence
  Description of Artificial Sequence: Synthetic oligonucleotide
  Sense Strand Starting at position 443 of SEQ ID NO: 318537
gcuagagagcucuaagcag

SEQ ID NO: 353574 - RNA, 19 nt, Artificial Sequence
  Description of Artificial Sequence: Synthetic oligonucleotide
  Antisense Strand to SEQ ID NO: 353573
cugcuuagagcucucuagc

SEQ ID NO: 353575 - RNA, 19 nt, Artificial Sequence
  Description of Artificial Sequence: Synthetic oligonucleotide
  Sense Strand Starting at position 443 of SEQ ID NO: 318574
cuaguuauggaaugaacac

SEQ ID NO: 353576 - RNA, 19 nt, Artificial Sequence
  Description of Artificial Sequence: Synthetic oligonucleotide
  Antisense Strand to SEQ ID NO: 353575
guguucauuccauaacuag

SEQ ID NO: 353577 - RNA, 19 nt, Artificial Sequence
  Description of Artificial Sequence: Synthetic oligonucleotide
  Sense Strand Starting at position 443 of SEQ ID NO: 318625
uguucuguccuacagauau

SEQ ID NO: 353578 - RNA, 19 nt, Artificial Sequence
  Description of Artificial Sequence: Synthetic oligonucleotide
  Antisense Strand to SEQ ID NO: 353577
auaucuguaggacagaaca

SEQ ID NO: 353579 - RNA, 19 nt, Artificial Sequence
  Description of Artificial Sequence: Synthetic oligonucleotide
  Sense Strand Starting at position 443 of SEQ ID NO: 318636
acagauauguaacugcuua

SEQ ID NO: 353580 - RNA, 19 nt, Artificial Sequence
  Description of Artificial Sequence: Synthetic oligonucleotide
  Antisense Strand to SEQ ID NO: 353579
uaagcaguuacauaucugu

SEQ ID NO: 353581 - RNA, 19 nt, Artificial Sequence
  Description of Artificial Sequence: Synthetic oligonucleotide
  Sense Strand Starting at position 443 of SEQ ID NO: 318680
agggcaguucuguaaagga

SEQ ID NO: 353582 - RNA, 19 nt, Artificial Sequence
  Description of Artificial Sequence: Synthetic oligonucleotide
  Antisense Strand to SEQ ID NO: 353581
uccuuuacagaacugcccu

SEQ ID NO: 353583 - RNA, 19 nt, Artificial Sequence
  Description of Artificial Sequence: Synthetic oligonucleotide
  Sense Strand Starting at position 443 of SEQ ID NO: 318753
ucaauaaagucagugcaua

SEQ ID NO: 353584 - RNA, 19 nt, Artificial Sequence
  Description of Artificial Sequence: Synthetic oligonucleotide
  Antisense Strand to SEQ ID NO: 353583
uaugcacugacuuuauuga

SEQ ID NO: 353585 - RNA, 19 nt, Artificial Sequence
  Description of Artificial Sequence: Synthetic oligonucleotide
  Sense Strand Starting at position 443 of SEQ ID NO: 318880
uaauuuagccugcgguuau

SEQ ID NO: 353586 - RNA, 19 nt, Artificial Sequence
  Description of Artificial Sequence: Synthetic oligonucleotide
  Antisense Strand to SEQ ID NO: 353585
auaaccgcaggcuaaauua

SEQ ID NO: 353587 - RNA, 19 nt, Artificial Sequence
  Description of Artificial Sequence: Synthetic oligonucleotide
  Sense Strand Starting at position 443 of SEQ ID NO: 318893
gguuauuccugauugcaag

SEQ ID NO: 353588 - RNA, 19 nt, Artificial Sequence
  Description of Artificial Sequence: Synthetic oligonucleotide
  Antisense Strand to SEQ ID NO: 353587
cuugcaaucaggaauaacc

SEQ ID NO: 353589 - RNA, 19 nt, Artificial Sequence
  Description of Artificial Sequence: Synthetic oligonucleotide
  Sense Strand Starting at position 443 of SEQ ID NO: 319046
cuguaaucaguuuagcauu

SEQ ID NO: 353590 - RNA, 19 nt, Artificial Sequence
  Description of Artificial Sequence: Synthetic oligonucleotide
  Antisense Strand to SEQ ID NO: 353589
aaugcuaaacugauuacag

SEQ ID NO: 353591 - RNA, 19 nt, Artificial Sequence
  Description of Artificial Sequence: Synthetic oligonucleotide
  Sense Strand Starting at position 443 of SEQ ID NO: 319058
uagcauuugccuugugcaa

SEQ ID NO: 353592 - RNA, 19 nt, Artificial Sequence
  Description of Artificial Sequence: Synthetic oligonucleotide
  Antisense Strand to SEQ ID NO: 353591
uugcacaaggcaaaugcua

SEQ ID NO: 353593 - RNA, 19 nt, Artificial Sequence
  Description of Artificial Sequence: Synthetic oligonucleotide
  Sense Strand Starting at position 443 of SEQ ID NO: 319075
aaacgaguccuggguaacu

SEQ ID NO: 353594 - RNA, 19 nt, Artificial Sequence
  Description of Artificial Sequence: Synthetic oligonucleotide
  Antisense Strand to SEQ ID NO: 353593
aguuacccaggacucguuu

SEQ ID NO: 353595 - RNA, 19 nt, Artificial Sequence
  Description of Artificial Sequence: Synthetic oligonucleotide
  Sense Strand Starting at position 443 of SEQ ID NO: 319077
acgaguccuggguaacuaa

SEQ ID NO: 353596 - RNA, 19 nt, Artificial Sequence
  Description of Artificial Sequence: Synthetic oligonucleotide
  Antisense Strand to SEQ ID NO: 353595
uuaguuacccaggacucgu

SEQ ID NO: 353597 - RNA, 19 nt, Artificial Sequence
  Description of Artificial Sequence: Synthetic oligonucleotide
  Sense Strand Starting at position 443 of SEQ ID NO: 319084
cuggguaacuaaguuacaa

SEQ ID NO: 353598 - RNA, 19 nt, Artificial Sequence
  Description of Artificial Sequence: Synthetic oligonucleotide
  Antisense Strand to SEQ ID NO: 353597
uuguaacuuaguuacccag

SEQ ID NO: 353599 - RNA, 19 nt, Artificial Sequence
  Description of Artificial Sequence: Synthetic oligonucleotide
  Sense Strand Starting at position 444 of SEQ ID NO: 315344
agaauuuacuccgagagca

SEQ ID NO: 353600 - RNA, 19 nt, Artificial Sequence
  Description of Artificial Sequence: Synthetic oligonucleotide
  Antisense Strand to SEQ ID NO: 353599
ugcucucggaguaaauucu

SEQ ID NO: 353601 - RNA, 19 nt, Artificial Sequence
  Description of Artificial Sequence: Synthetic oligonucleotide
  Sense Strand Starting at position 444 of SEQ ID NO: 315349
uuacuccgagagcauuaaa

SEQ ID NO: 353602 - RNA, 19 nt, Artificial Sequence
  Description of Artificial Sequence: Synthetic oligonucleotide
  Antisense Strand to SEQ ID NO: 353601
uuuaaugcucucggaguaa

SEQ ID NO: 353603 - RNA, 19 nt, Artificial Sequence
  Description of Artificial Sequence: Synthetic oligonucleotide
  Sense Strand Starting at position 444 of SEQ ID NO: 315448
uuagaaaguccauacugua

SEQ ID NO: 353604 - RNA, 19 nt, Artificial Sequence
  Description of Artificial Sequence: Synthetic oligonucleotide
  Antisense Strand to SEQ ID NO: 353603
uacaguauggacuuucuaa

SEQ ID NO: 353605 - RNA, 19 nt, Artificial Sequence
  Description of Artificial Sequence: Synthetic oligonucleotide
  Sense Strand Starting at position 444 of SEQ ID NO: 315458
cauacuguacugcagagau

SEQ ID NO: 353606 - RNA, 19 nt, Artificial Sequence
  Description of Artificial Sequence: Synthetic oligonucleotide
  Antisense Strand to SEQ ID NO: 353605
aucucugcaguacaguaug

SEQ ID NO: 353607 - RNA, 19 nt, Artificial Sequence
  Description of Artificial Sequence: Synthetic oligonucleotide
  Sense Strand Starting at position 444 of SEQ ID NO: 315579
aagucaacacucgagguuu

SEQ ID NO: 353608 - RNA, 19 nt, Artificial Sequence
  Description of Artificial Sequence: Synthetic oligonucleotide
  Antisense Strand to SEQ ID NO: 353607
aaaccucgaguguugacuu

SEQ ID NO: 353609 - RNA, 19 nt, Artificial Sequence
  Description of Artificial Sequence: Synthetic oligonucleotide
  Sense Strand Starting at position 444 of SEQ ID NO: 315581
gucaacacucgagguuuga

SEQ ID NO: 353610 - RNA, 19 nt, Artificial Sequence
  Description of Artificial Sequence: Synthetic oligonucleotide
  Antisense Strand to SEQ ID NO: 353609
ucaaaccucgaguguugac

SEQ ID NO: 353611 - RNA, 19 nt, Artificial Sequence
  Description of Artificial Sequence: Synthetic oligonucleotide
  Sense Strand Starting at position 444 of SEQ ID NO: 315591
gagguuugacucuggucaa

SEQ ID NO: 353612 - RNA, 19 nt, Artificial Sequence
  Description of Artificial Sequence: Synthetic oligonucleotide
  Antisense Strand to SEQ ID NO: 353611
uugaccagagucaaaccuc

SEQ ID NO: 353613 - RNA, 19 nt, Artificial Sequence
  Description of Artificial Sequence: Synthetic oligonucleotide
  Sense Strand Starting at position 444 of SEQ ID NO: 315594
guuugacucuggucaaacu

SEQ ID NO: 353614 - RNA, 19 nt, Artificial Sequence
  Description of Artificial Sequence: Synthetic oligonucleotide
  Antisense Strand to SEQ ID NO: 353613
aguuugaccagagucaaac

SEQ ID NO: 353615 - RNA, 19 nt, Artificial Sequence
  Description of Artificial Sequence: Synthetic oligonucleotide
  Sense Strand Starting at position 444 of SEQ ID NO: 315595
uuugacucuggucaaacua

SEQ ID NO: 353616 - RNA, 19 nt, Artificial Sequence
  Description of Artificial Sequence: Synthetic oligonucleotide
  Antisense Strand to SEQ ID NO: 353615
uaguuugaccagagucaaa

SEQ ID NO: 353617 - RNA, 19 nt, Artificial Sequence
  Description of Artificial Sequence: Synthetic oligonucleotide
  Sense Strand Starting at position 444 of SEQ ID NO: 315691
ugggcuuuccaauauauaa

SEQ ID NO: 353618 - RNA, 19 nt, Artificial Sequence
  Description of Artificial Sequence: Synthetic oligonucleotide
  Antisense Strand to SEQ ID NO: 353617
uuauauauuggaaagccca

SEQ ID NO: 353619 - RNA, 19 nt, Artificial Sequence
  Description of Artificial Sequence: Synthetic oligonucleotide
  Sense Strand Starting at position 444 of SEQ ID NO: 315780
gcagaaaugcagcauuaaa

SEQ ID NO: 353620 - RNA, 19 nt, Artificial Sequence
  Description of Artificial Sequence: Synthetic oligonucleotide
  Antisense Strand to SEQ ID NO: 353619
uuuaaugcugcauuucugc

SEQ ID NO: 353621 - RNA, 19 nt, Artificial Sequence
  Description of Artificial Sequence: Synthetic oligonucleotide
  Sense Strand Starting at position 444 of SEQ ID NO: 315886
acaauaccugcaggaauau

SEQ ID NO: 353622 - RNA, 19 nt, Artificial Sequence
  Description of Artificial Sequence: Synthetic oligonucleotide
  Antisense Strand to SEQ ID NO: 353621
auauuccugcagguauugu

SEQ ID NO: 353623 - RNA, 19 nt, Artificial Sequence
  Description of Artificial Sequence: Synthetic oligonucleotide
  Sense Strand Starting at position 444 of SEQ ID NO: 315989
guuugcacccaauguaaua

SEQ ID NO: 353624 - RNA, 19 nt, Artificial Sequence
  Description of Artificial Sequence: Synthetic oligonucleotide
  Antisense Strand to SEQ ID NO: 353623
uauuacauugggugcaaac

SEQ ID NO: 353625 - RNA, 19 nt, Artificial Sequence
  Description of Artificial Sequence: Synthetic oligonucleotide
  Sense Strand Starting at position 444 of SEQ ID NO: 316122
agcugcuaucuugaugcaa

SEQ ID NO: 353626 - RNA, 19 nt, Artificial Sequence
  Description of Artificial Sequence: Synthetic oligonucleotide
  Antisense Strand to SEQ ID NO: 353625
uugcaucaagauagcagcu

SEQ ID NO: 353627 - RNA, 19 nt, Artificial Sequence
  Description of Artificial Sequence: Synthetic oligonucleotide
  Sense Strand Starting at position 444 of SEQ ID NO: 316312
acaucugcaguugaugaaa

SEQ ID NO: 353628 - RNA, 19 nt, Artificial Sequence
  Description of Artificial Sequence: Synthetic oligonucleotide
  Antisense Strand to SEQ ID NO: 353627
uuucaucaacugcagaugu

SEQ ID NO: 353629 - RNA, 19 nt, Artificial Sequence
  Description of Artificial Sequence: Synthetic oligonucleotide
  Sense Strand Starting at position 444 of SEQ ID NO: 316496
ggagucagccuauggcaga

SEQ ID NO: 353630 - RNA, 19 nt, Artificial Sequence
  Description of Artificial Sequence: Synthetic oligonucleotide
  Antisense Strand to SEQ ID NO: 353629
ucugccauaggcugacucc

SEQ ID NO: 353631 - RNA, 19 nt, Artificial Sequence
  Description of Artificial Sequence: Synthetic oligonucleotide
  Sense Strand Starting at position 444 of SEQ ID NO: 316680
uguguuuagcccgcacaau

SEQ ID NO: 353632 - RNA, 19 nt, Artificial Sequence
  Description of Artificial Sequence: Synthetic oligonucleotide
  Antisense Strand to SEQ ID NO: 353631
auugugcgggcuaaacaca

SEQ ID NO: 353633 - RNA, 19 nt, Artificial Sequence
  Description of Artificial Sequence: Synthetic oligonucleotide
  Sense Strand Starting at position 444 of SEQ ID NO: 316778
agugucugccgaguuauuc

SEQ ID NO: 353634 - RNA, 19 nt, Artificial Sequence
  Description of Artificial Sequence: Synthetic oligonucleotide
  Antisense Strand to SEQ ID NO: 353633
gaauaacucggcagacacu

SEQ ID NO: 353635 - RNA, 19 nt, Artificial Sequence
  Description of Artificial Sequence: Synthetic oligonucleotide
  Sense Strand Starting at position 444 of SEQ ID NO: 316862
cuggcagucgcucuguaau

SEQ ID NO: 353636 - RNA, 19 nt, Artificial Sequence
  Description of Artificial Sequence: Synthetic oligonucleotide
  Antisense Strand to SEQ ID NO: 353635
auuacagagcgacugccag

SEQ ID NO: 353637 - RNA, 19 nt, Artificial Sequence
  Description of Artificial Sequence: Synthetic oligonucleotide
  Sense Strand Starting at position 444 of SEQ ID NO: 316937
cuugcuuugcggcuguuaa

SEQ ID NO: 353638 - RNA, 19 nt, Artificial Sequence
  Description of Artificial Sequence: Synthetic oligonucleotide
  Antisense Strand to SEQ ID NO: 353637
uuaacagccgcaaagcaag

SEQ ID NO: 353639 - RNA, 19 nt, Artificial Sequence
  Description of Artificial Sequence: Synthetic oligonucleotide
  Sense Strand Starting at position 444 of SEQ ID NO: 317258
cucagauccaaggguguau

SEQ ID NO: 353640 - RNA, 19 nt, Artificial Sequence
  Description of Artificial Sequence: Synthetic oligonucleotide
  Antisense Strand to SEQ ID NO: 353639
auacacccuuggaucugag

SEQ ID NO: 353641 - RNA, 19 nt, Artificial Sequence
  Description of Artificial Sequence: Synthetic oligonucleotide
  Sense Strand Starting at position 444 of SEQ ID NO: 317561
aaacccauguguuugaagu

SEQ ID NO: 353642 - RNA, 19 nt, Artificial Sequence
  Description of Artificial Sequence: Synthetic oligonucleotide
  Antisense Strand to SEQ ID NO: 353641
acuucaaacacauggguuu

SEQ ID NO: 353643 - RNA, 19 nt, Artificial Sequence
  Description of Artificial Sequence: Synthetic oligonucleotide
  Sense Strand Starting at position 444 of SEQ ID NO: 317646
guguuuacacacuauauau

SEQ ID NO: 353644 - RNA, 19 nt, Artificial Sequence
  Description of Artificial Sequence: Synthetic oligonucleotide
  Antisense Strand to SEQ ID NO: 353643
auauauaguguguaaacac

SEQ ID NO: 353645 - RNA, 19 nt, Artificial Sequence
  Description of Artificial Sequence: Synthetic oligonucleotide
  Sense Strand Starting at position 444 of SEQ ID NO: 317806
gccgaauacauacaaguga

SEQ ID NO: 353646 - RNA, 19 nt, Artificial Sequence
  Description of Artificial Sequence: Synthetic oligonucleotide
  Antisense Strand to SEQ ID NO: 353645
ucacuuguauguauucggc

SEQ ID NO: 353647 - RNA, 19 nt, Artificial Sequence
  Description of Artificial Sequence: Synthetic oligonucleotide
  Sense Strand Starting at position 444 of SEQ ID NO: 318144
gugaacaaaguuugaucaa

SEQ ID NO: 353648 - RNA, 19 nt, Artificial Sequence
  Description of Artificial Sequence: Synthetic oligonucleotide
  Antisense Strand to SEQ ID NO: 353647
uugaucaaacuuuguucac

SEQ ID NO: 353649 - RNA, 19 nt, Artificial Sequence
  Description of Artificial Sequence: Synthetic oligonucleotide
  Sense Strand Starting at position 444 of SEQ ID NO: 318407
aagaccaaaucgucaugua

SEQ ID NO: 353650 - RNA, 19 nt, Artificial Sequence
  Description of Artificial Sequence: Synthetic oligonucleotide
  Antisense Strand to SEQ ID NO: 353649
uacaugacgauuuggucuu

SEQ ID NO: 353651 - RNA, 19 nt, Artificial Sequence
  Description of Artificial Sequence: Synthetic oligonucleotide
  Sense Strand Starting at position 444 of SEQ ID NO: 318408
agaccaaaucgucauguau

SEQ ID NO: 353652 - RNA, 19 nt, Artificial Sequence
  Description of Artificial Sequence: Synthetic oligonucleotide
  Antisense Strand to SEQ ID NO: 353651
auacaugacgauuuggucu

SEQ ID NO: 353653 - RNA, 19 nt, Artificial Sequence
  Description of Artificial Sequence: Synthetic oligonucleotide
  Sense Strand Starting at position 444 of SEQ ID NO: 318442
uguuguaaguuaccauaug

SEQ ID NO: 353654 - RNA, 19 nt, Artificial Sequence
  Description of Artificial Sequence: Synthetic oligonucleotide
  Antisense Strand to SEQ ID NO: 353653
cauaugguaacuuacaaca

SEQ ID NO: 353655 - RNA, 19 nt, Artificial Sequence
  Description of Artificial Sequence: Synthetic oligonucleotide
  Sense Strand Starting at position 444 of SEQ ID NO: 318542
ucagcuuaugauuguaauc

SEQ ID NO: 353656 - RNA, 19 nt, Artificial Sequence
  Description of Artificial Sequence: Synthetic oligonucleotide
  Antisense Strand to SEQ ID NO: 353655
gauuacaaucauaagcuga

SEQ ID NO: 353657 - RNA, 19 nt, Artificial Sequence
  Description of Artificial Sequence: Synthetic oligonucleotide
  Sense Strand Starting at position 444 of SEQ ID NO: 318604
ucaauucuguaucuagaga

SEQ ID NO: 353658 - RNA, 19 nt, Artificial Sequence
  Description of Artificial Sequence: Synthetic oligonucleotide
  Antisense Strand to SEQ ID NO: 353657
ucucuagauacagaauuga

SEQ ID NO: 353659 - RNA, 19 nt, Artificial Sequence
  Description of Artificial Sequence: Synthetic oligonucleotide
  Sense Strand Starting at position 444 of SEQ ID NO: 318632
auguuaagacuguaaagca

SEQ ID NO: 353660 - RNA, 19 nt, Artificial Sequence
  Description of Artificial Sequence: Synthetic oligonucleotide
  Antisense Strand to SEQ ID NO: 353659
ugcuuuacagucuuaacau

SEQ ID NO: 353661 - RNA, 19 nt, Artificial Sequence
  Description of Artificial Sequence: Synthetic oligonucleotide
  Sense Strand Starting at position 444 of SEQ ID NO: 318654
cgcugaauuugcuucuuga

SEQ ID NO: 353662 - RNA, 19 nt, Artificial Sequence
  Description of Artificial Sequence: Synthetic oligonucleotide
  Antisense Strand to SEQ ID NO: 353661
ucaagaagcaaauucagcg

SEQ ID NO: 353663 - RNA, 19 nt, Artificial Sequence
  Description of Artificial Sequence: Synthetic oligonucleotide
  Sense Strand Starting at position 444 of SEQ ID NO: 318706
ccacgcuugcagucuguua

SEQ ID NO: 353664 - RNA, 19 nt, Artificial Sequence
  Description of Artificial Sequence: Synthetic oligonucleotide
  Antisense Strand to SEQ ID NO: 353663
uaacagacugcaagcgugg

SEQ ID NO: 353665 - RNA, 19 nt, Artificial Sequence
  Description of Artificial Sequence: Synthetic oligonucleotide
  Sense Strand Starting at position 444 of SEQ ID NO: 318819
cgcgcauaugcucccugaa

SEQ ID NO: 353666 - RNA, 19 nt, Artificial Sequence
  Description of Artificial Sequence: Synthetic oligonucleotide
  Antisense Strand to SEQ ID NO: 353665
uucagggagcauaugcgcg

SEQ ID NO: 353667 - RNA, 19 nt, Artificial Sequence
  Description of Artificial Sequence: Synthetic oligonucleotide
  Sense Strand Starting at position 444 of SEQ ID NO: 318846
gcaugcugucauggaaaua

SEQ ID NO: 353668 - RNA, 19 nt, Artificial Sequence
  Description of Artificial Sequence: Synthetic oligonucleotide
  Antisense Strand to SEQ ID NO: 353667
uauuuccaugacagcaugc

SEQ ID NO: 353669 - RNA, 19 nt, Artificial Sequence
  Description of Artificial Sequence: Synthetic oligonucleotide
  Sense Strand Starting at position 444 of SEQ ID NO: 318858
ggaaauaccacuggucuga

SEQ ID NO: 353670 - RNA, 19 nt, Artificial Sequence
  Description of Artificial Sequence: Synthetic oligonucleotide
  Antisense Strand to SEQ ID NO: 353669
ucagaccagugguauuucc

SEQ ID NO: 353671 - RNA, 19 nt, Artificial Sequence
  Description of Artificial Sequence: Synthetic oligonucleotide
  Sense Strand Starting at position 444 of SEQ ID NO: 318914
uuucuaguugaguaaguga

SEQ ID NO: 353672 - RNA, 19 nt, Artificial Sequence
  Description of Artificial Sequence: Synthetic oligonucleotide
  Antisense Strand to SEQ ID NO: 353671
ucacuuacucaacuagaaa

SEQ ID NO: 353673 - RNA, 19 nt, Artificial Sequence
  Description of Artificial Sequence: Synthetic oligonucleotide
  Sense Strand Starting at position 444 of SEQ ID NO: 318925
guaagugaccuuggguaag

SEQ ID NO: 353674 - RNA, 19 nt, Artificial Sequence
  Description of Artificial Sequence: Synthetic oligonucleotide
  Antisense Strand to SEQ ID NO: 353673
cuuacccaaggucacuuac

SEQ ID NO: 353675 - RNA, 19 nt, Artificial Sequence
  Description of Artificial Sequence: Synthetic oligonucleotide
  Sense Strand Starting at position 444 of SEQ ID NO: 318993
guaacaaagcaguguuaga

SEQ ID NO: 353676 - RNA, 19 nt, Artificial Sequence
  Description of Artificial Sequence: Synthetic oligonucleotide
  Antisense Strand to SEQ ID NO: 353675
ucuaacacugcuuuguuac

SEQ ID NO: 353677 - RNA, 19 nt, Artificial Sequence
  Description of Artificial Sequence: Synthetic oligonucleotide
  Sense Strand Starting at position 444 of SEQ ID NO: 319217
acugaacugccuuaugcaa

SEQ ID NO: 353678 - RNA, 19 nt, Artificial Sequence
  Description of Artificial Sequence: Synthetic oligonucleotide
  Antisense Strand to SEQ ID NO: 353677
uugcauaaggcaguucagu

SEQ ID NO: 353679 - RNA, 19 nt, Artificial Sequence
  Description of Artificial Sequence: Synthetic oligonucleotide
  Sense Strand Starting at position 445 of SEQ ID NO: 316034
cuggacaguucccugcaaa

SEQ ID NO: 353680 - RNA, 19 nt, Artificial Sequence
  Description of Artificial Sequence: Synthetic oligonucleotide
  Antisense Strand to SEQ ID NO: 353679
uuugcagggaacuguccag

SEQ ID NO: 353681 - RNA, 19 nt, Artificial Sequence
  Description of Artificial Sequence: Synthetic oligonucleotide
  Sense Strand Starting at position 445 of SEQ ID NO: 316035
uggacaguucccugcaaag

SEQ ID NO: 353682 - RNA, 19 nt, Artificial Sequence
  Description of Artificial Sequence: Synthetic oligonucleotide
  Antisense Strand to SEQ ID NO: 353681
cuuugcagggaacugucca

SEQ ID NO: 353683 - RNA, 19 nt, Artificial Sequence
  Description of Artificial Sequence: Synthetic oligonucleotide
  Sense Strand Starting at position 445 of SEQ ID NO: 316037
gacaguucccugcaaagaa

SEQ ID NO: 353684 - RNA, 19 nt, Artificial Sequence
  Description of Artificial Sequence: Synthetic oligonucleotide
  Antisense Strand to SEQ ID NO: 353683
uucuuugcagggaacuguc

SEQ ID NO: 353685 - RNA, 19 nt, Artificial Sequence
  Description of Artificial Sequence: Synthetic oligonucleotide
  Sense Strand Starting at position 445 of SEQ ID NO: 316182
ggcugaaccacuugugagu

SEQ ID NO: 353686 - RNA, 19 nt, Artificial Sequence
  Description of Artificial Sequence: Synthetic oligonucleotide
  Antisense Strand to SEQ ID NO: 353685
acucacaagugguucagcc

SEQ ID NO: 353687 - RNA, 19 nt, Artificial Sequence
  Description of Artificial Sequence: Synthetic oligonucleotide
  Sense Strand Starting at position 445 of SEQ ID NO: 316437
gacucugguucugugaaca

SEQ ID NO: 353688 - RNA, 19 nt, Artificial Sequence
  Description of Artificial Sequence: Synthetic oligonucleotide
  Antisense Strand to SEQ ID NO: 353687
uguucacagaaccagaguc

SEQ ID NO: 353689 - RNA, 19 nt, Artificial Sequence
  Description of Artificial Sequence: Synthetic oligonucleotide
  Sense Strand Starting at position 445 of SEQ ID NO: 316447
cugugaacacaaugagagu

SEQ ID NO: 353690 - RNA, 19 nt, Artificial Sequence
  Description of Artificial Sequence: Synthetic oligonucleotide
  Antisense Strand to SEQ ID NO: 353689
acucucauuguguucacag

SEQ ID NO: 353691 - RNA, 19 nt, Artificial Sequence
  Description of Artificial Sequence: Synthetic oligonucleotide
  Sense Strand Starting at position 445 of SEQ ID NO: 316456
caaugagaguuugagaaag

SEQ ID NO: 353692 - RNA, 19 nt, Artificial Sequence
  Description of Artificial Sequence: Synthetic oligonucleotide
  Antisense Strand to SEQ ID NO: 353691
cuuucucaaacucucauug

SEQ ID NO: 353693 - RNA, 19 nt, Artificial Sequence
  Description of Artificial Sequence: Synthetic oligonucleotide
  Sense Strand Starting at position 445 of SEQ ID NO: 316790
ggcagagucccauagucua

SEQ ID NO: 353694 - RNA, 19 nt, Artificial Sequence
  Description of Artificial Sequence: Synthetic oligonucleotide
  Antisense Strand to SEQ ID NO: 353693
uagacuaugggacucugcc

SEQ ID NO: 353695 - RNA, 19 nt, Artificial Sequence
  Description of Artificial Sequence: Synthetic oligonucleotide
  Sense Strand Starting at position 445 of SEQ ID NO: 316847
gcucuucugccagugucau

SEQ ID NO: 353696 - RNA, 19 nt, Artificial Sequence
  Description of Artificial Sequence: Synthetic oligonucleotide
  Antisense Strand to SEQ ID NO: 353695
augacacuggcagaagagc

SEQ ID NO: 353697 - RNA, 19 nt, Artificial Sequence
  Description of Artificial Sequence: Synthetic oligonucleotide
  Sense Strand Starting at position 445 of SEQ ID NO: 316857
cagugucaugagugaacac

SEQ ID NO: 353698 - RNA, 19 nt, Artificial Sequence
  Description of Artificial Sequence: Synthetic oligonucleotide
  Antisense Strand to SEQ ID NO: 353697
guguucacucaugacacug

SEQ ID NO: 353699 - RNA, 19 nt, Artificial Sequence
  Description of Artificial Sequence: Synthetic oligonucleotide
  Sense Strand Starting at position 445 of SEQ ID NO: 316858
agugucaugagugaacaca

SEQ ID NO: 353700 - RNA, 19 nt, Artificial Sequence
  Description of Artificial Sequence: Synthetic oligonucleotide
  Antisense Strand to SEQ ID NO: 353699
uguguucacucaugacacu

SEQ ID NO: 353701 - RNA, 19 nt, Artificial Sequence
  Description of Artificial Sequence: Synthetic oligonucleotide
  Sense Strand Starting at position 445 of SEQ ID NO: 317297
acucuuauuggcugaagag

SEQ ID NO: 353702 - RNA, 19 nt, Artificial Sequence
  Description of Artificial Sequence: Synthetic oligonucleotide
  Antisense Strand to SEQ ID NO: 353701
cucuucagccaauaagagu

SEQ ID NO: 353703 - RNA, 19 nt, Artificial Sequence
  Description of Artificial Sequence: Synthetic oligonucleotide
  Sense Strand Starting at position 445 of SEQ ID NO: 317298
cucuuauuggcugaagagu

SEQ ID NO: 353704 - RNA, 19 nt, Artificial Sequence
  Description of Artificial Sequence: Synthetic oligonucleotide
  Antisense Strand to SEQ ID NO: 353703
acucuucagccaauaagag

SEQ ID NO: 353705 - RNA, 19 nt, Artificial Sequence
  Description of Artificial Sequence: Synthetic oligonucleotide
  Sense Strand Starting at position 445 of SEQ ID NO: 317610
aguguuaacguuguaugca

SEQ ID NO: 353706 - RNA, 19 nt, Artificial Sequence
  Description of Artificial Sequence: Synthetic oligonucleotide
  Antisense Strand to SEQ ID NO: 353705
ugcauacaacguuaacacu

SEQ ID NO: 353707 - RNA, 19 nt, Artificial Sequence
  Description of Artificial Sequence: Synthetic oligonucleotide
  Sense Strand Starting at position 445 of SEQ ID NO: 317641
uuucuuaaaugcuuggaaa

SEQ ID NO: 353708 - RNA, 19 nt, Artificial Sequence
  Description of Artificial Sequence: Synthetic oligonucleotide
  Antisense Strand to SEQ ID NO: 353707
uuuccaagcauuuaagaaa

SEQ ID NO: 353709 - RNA, 19 nt, Artificial Sequence
  Description of Artificial Sequence: Synthetic oligonucleotide
  Sense Strand Starting at position 445 of SEQ ID NO: 317642
uucuuaaaugcuuggaaac

SEQ ID NO: 353710 - RNA, 19 nt, Artificial Sequence
  Description of Artificial Sequence: Synthetic oligonucleotide
  Antisense Strand to SEQ ID NO: 353709
guuuccaagcauuuaagaa

SEQ ID NO: 353711 - RNA, 19 nt, Artificial Sequence
  Description of Artificial Sequence: Synthetic oligonucleotide
  Sense Strand Starting at position 445 of SEQ ID NO: 317643
ucuuaaaugcuuggaaaca

SEQ ID NO: 353712 - RNA, 19 nt, Artificial Sequence
  Description of Artificial Sequence: Synthetic oligonucleotide
  Antisense Strand to SEQ ID NO: 353711
uguuuccaagcauuuaaga

SEQ ID NO: 353713 - RNA, 19 nt, Artificial Sequence
  Description of Artificial Sequence: Synthetic oligonucleotide
  Sense Strand Starting at position 445 of SEQ ID NO: 317668
gucaaauuaugguugaguc

SEQ ID NO: 353714 - RNA, 19 nt, Artificial Sequence
  Description of Artificial Sequence: Synthetic oligonucleotide
  Antisense Strand to SEQ ID NO: 353713
gacucaaccauaauuugac

SEQ ID NO: 353715 - RNA, 19 nt, Artificial Sequence
  Description of Artificial Sequence: Synthetic oligonucleotide
  Sense Strand Starting at position 445 of SEQ ID NO: 317669
ucaaauuaugguugagucu

SEQ ID NO: 353716 - RNA, 19 nt, Artificial Sequence
  Description of Artificial Sequence: Synthetic oligonucleotide
  Antisense Strand to SEQ ID NO: 353715
agacucaaccauaauuuga

SEQ ID NO: 353717 - RNA, 19 nt, Artificial Sequence
  Description of Artificial Sequence: Synthetic oligonucleotide
  Sense Strand Starting at position 445 of SEQ ID NO: 317670
caaauuaugguugagucua

SEQ ID NO: 353718 - RNA, 19 nt, Artificial Sequence
  Description of Artificial Sequence: Synthetic oligonucleotide
  Antisense Strand to SEQ ID NO: 353717
uagacucaaccauaauuug

SEQ ID NO: 353719 - RNA, 19 nt, Artificial Sequence
  Description of Artificial Sequence: Synthetic oligonucleotide
  Sense Strand Starting at position 445 of SEQ ID NO: 317672
aauuaugguugagucuauu

SEQ ID NO: 353720 - RNA, 19 nt, Artificial Sequence
  Description of Artificial Sequence: Synthetic oligonucleotide
  Antisense Strand to SEQ ID NO: 353719
aauagacucaaccauaauu

SEQ ID NO: 353721 - RNA, 19 nt, Artificial Sequence
  Description of Artificial Sequence: Synthetic oligonucleotide
  Sense Strand Starting at position 445 of SEQ ID NO: 317675
uaugguugagucuauuaga

SEQ ID NO: 353722 - RNA, 19 nt, Artificial Sequence
  Description of Artificial Sequence: Synthetic oligonucleotide
  Antisense Strand to SEQ ID NO: 353721
ucuaauagacucaaccaua

SEQ ID NO: 353723 - RNA, 19 nt, Artificial Sequence
  Description of Artificial Sequence: Synthetic oligonucleotide
  Sense Strand Starting at position 445 of SEQ ID NO: 317697
acacauagaugaugaaaua

SEQ ID NO: 353724 - RNA, 19 nt, Artificial Sequence
  Description of Artificial Sequence: Synthetic oligonucleotide
  Antisense Strand to SEQ ID NO: 353723
uauuucaucaucuaugugu

SEQ ID NO: 353725 - RNA, 19 nt, Artificial Sequence
  Description of Artificial Sequence: Synthetic oligonucleotide
  Sense Strand Starting at position 445 of SEQ ID NO: 317805
cauugauuagguugagcca

SEQ ID NO: 353726 - RNA, 19 nt, Artificial Sequence
  Description of Artificial Sequence: Synthetic oligonucleotide
  Antisense Strand to SEQ ID NO: 353725
uggcucaaccuaaucaaug

SEQ ID NO: 353727 - RNA, 19 nt, Artificial Sequence
  Description of Artificial Sequence: Synthetic oligonucleotide
  Sense Strand Starting at position 445 of SEQ ID NO: 317841
cccugauucuagguggaaa

SEQ ID NO: 353728 - RNA, 19 nt, Artificial Sequence
  Description of Artificial Sequence: Synthetic oligonucleotide
  Antisense Strand to SEQ ID NO: 353727
uuuccaccuagaaucaggg

SEQ ID NO: 353729 - RNA, 19 nt, Artificial Sequence
  Description of Artificial Sequence: Synthetic oligonucleotide
  Sense Strand Starting at position 445 of SEQ ID NO: 317904
cauuguguucuguggaauu

SEQ ID NO: 353730 - RNA, 19 nt, Artificial Sequence
  Description of Artificial Sequence: Synthetic oligonucleotide
  Antisense Strand to SEQ ID NO: 353729
aauuccacagaacacaaug

SEQ ID NO: 353731 - RNA, 19 nt, Artificial Sequence
  Description of Artificial Sequence: Synthetic oligonucleotide
  Sense Strand Starting at position 445 of SEQ ID NO: 318047
cgucaaagcccacauuauu

SEQ ID NO: 353732 - RNA, 19 nt, Artificial Sequence
  Description of Artificial Sequence: Synthetic oligonucleotide
  Antisense Strand to SEQ ID NO: 353731
aauaaugugggcuuugacg

SEQ ID NO: 353733 - RNA, 19 nt, Artificial Sequence
  Description of Artificial Sequence: Synthetic oligonucleotide
  Sense Strand Starting at position 445 of SEQ ID NO: 318289
gaaugagacuuucuauguu

SEQ ID NO: 353734 - RNA, 19 nt, Artificial Sequence
  Description of Artificial Sequence: Synthetic oligonucleotide
  Antisense Strand to SEQ ID NO: 353733
aacauagaaagucucauuc

SEQ ID NO: 353735 - RNA, 19 nt, Artificial Sequence
  Description of Artificial Sequence: Synthetic oligonucleotide
  Sense Strand Starting at position 445 of SEQ ID NO: 318299
uucuauguuagggaguacu

SEQ ID NO: 353736 - RNA, 19 nt, Artificial Sequence
  Description of Artificial Sequence: Synthetic oligonucleotide
  Antisense Strand to SEQ ID NO: 353735
aguacucccuaacauagaa

SEQ ID NO: 353737 - RNA, 19 nt, Artificial Sequence
  Description of Artificial Sequence: Synthetic oligonucleotide
  Sense Strand Starting at position 445 of SEQ ID NO: 318453
aagaauuagugguagacag

SEQ ID NO: 353738 - RNA, 19 nt, Artificial Sequence
  Description of Artificial Sequence: Synthetic oligonucleotide
  Antisense Strand to SEQ ID NO: 353737
cugucuaccacuaauucuu

SEQ ID NO: 353739 - RNA, 19 nt, Artificial Sequence
  Description of Artificial Sequence: Synthetic oligonucleotide
  Sense Strand Starting at position 445 of SEQ ID NO: 318480
uagugaaauugucugaaug

SEQ ID NO: 353740 - RNA, 19 nt, Artificial Sequence
  Description of Artificial Sequence: Synthetic oligonucleotide
  Antisense Strand to SEQ ID NO: 353739
cauucagacaauuucacua

SEQ ID NO: 353741 - RNA, 19 nt, Artificial Sequence
  Description of Artificial Sequence: Synthetic oligonucleotide
  Sense Strand Starting at position 445 of SEQ ID NO: 318481
agugaaauugucugaaugu

SEQ ID NO: 353742 - RNA, 19 nt, Artificial Sequence
  Description of Artificial Sequence: Synthetic oligonucleotide
  Antisense Strand to SEQ ID NO: 353741
acauucagacaauuucacu

SEQ ID NO: 353743 - RNA, 19 nt, Artificial Sequence
  Description of Artificial Sequence: Synthetic oligonucleotide
  Sense Strand Starting at position 445 of SEQ ID NO: 318503
uggaacuuaucauaauaug

SEQ ID NO: 353744 - RNA, 19 nt, Artificial Sequence
  Description of Artificial Sequence: Synthetic oligonucleotide
  Antisense Strand to SEQ ID NO: 353743
cauauuaugauaaguucca

SEQ ID NO: 353745 - RNA, 19 nt, Artificial Sequence
  Description of Artificial Sequence: Synthetic oligonucleotide
  Sense Strand Starting at position 445 of SEQ ID NO: 318736
ugcuacuuacuugauagua

SEQ ID NO: 353746 - RNA, 19 nt, Artificial Sequence
  Description of Artificial Sequence: Synthetic oligonucleotide
  Antisense Strand to SEQ ID NO: 353745
uacuaucaaguaaguagca

SEQ ID NO: 353747 - RNA, 19 nt, Artificial Sequence
  Description of Artificial Sequence: Synthetic oligonucleotide
  Sense Strand Starting at position 445 of SEQ ID NO: 318748
gauaguaaguacuugauaa

SEQ ID NO: 353748 - RNA, 19 nt, Artificial Sequence
  Description of Artificial Sequence: Synthetic oligonucleotide
  Antisense Strand to SEQ ID NO: 353747
uuaucaaguacuuacuauc

SEQ ID NO: 353749 - RNA, 19 nt, Artificial Sequence
  Description of Artificial Sequence: Synthetic oligonucleotide
  Sense Strand Starting at position 445 of SEQ ID NO: 318760
uugauaagacaucgacuuc

SEQ ID NO: 353750 - RNA, 19 nt, Artificial Sequence
  Description of Artificial Sequence: Synthetic oligonucleotide
  Antisense Strand to SEQ ID NO: 353749
gaagucgaugucuuaucaa

SEQ ID NO: 353751 - RNA, 19 nt, Artificial Sequence
  Description of Artificial Sequence: Synthetic oligonucleotide
  Sense Strand Starting at position 445 of SEQ ID NO: 318802
gugcccucucaagauauga

SEQ ID NO: 353752 - RNA, 19 nt, Artificial Sequence
  Description of Artificial Sequence: Synthetic oligonucleotide
  Antisense Strand to SEQ ID NO: 353751
ucauaucuugagagggcac

SEQ ID NO: 353753 - RNA, 19 nt, Artificial Sequence
  Description of Artificial Sequence: Synthetic oligonucleotide
  Sense Strand Starting at position 445 of SEQ ID NO: 318807
cucucaagauaugagaaua

SEQ ID NO: 353754 - RNA, 19 nt, Artificial Sequence
  Description of Artificial Sequence: Synthetic oligonucleotide
  Antisense Strand to SEQ ID NO: 353753
uauucucauaucuugagag

SEQ ID NO: 353755 - RNA, 19 nt, Artificial Sequence
  Description of Artificial Sequence: Synthetic oligonucleotide
  Sense Strand Starting at position 445 of SEQ ID NO: 319050
uuguaacugccauaugaug

SEQ ID NO: 353756 - RNA, 19 nt, Artificial Sequence
  Description of Artificial Sequence: Synthetic oligonucleotide
  Antisense Strand to SEQ ID NO: 353755
caucauauggcaguuacaa

SEQ ID NO: 353757 - RNA, 19 nt, Artificial Sequence
  Description of Artificial Sequence: Synthetic oligonucleotide
  Sense Strand Starting at position 445 of SEQ ID NO: 319064
ugauguacuuucuuagaaa

SEQ ID NO: 353758 - RNA, 19 nt, Artificial Sequence
  Description of Artificial Sequence: Synthetic oligonucleotide
  Antisense Strand to SEQ ID NO: 353757
uuucuaagaaaguacauca

SEQ ID NO: 353759 - RNA, 19 nt, Artificial Sequence
  Description of Artificial Sequence: Synthetic oligonucleotide
  Sense Strand Starting at position 446 of SEQ ID NO: 315294
ucugguuggcuacaauauu

SEQ ID NO: 353760 - RNA, 19 nt, Artificial Sequence
  Description of Artificial Sequence: Synthetic oligonucleotide
  Antisense Strand to SEQ ID NO: 353759
aauauuguagccaaccaga

SEQ ID NO: 353761 - RNA, 19 nt, Artificial Sequence
  Description of Artificial Sequence: Synthetic oligonucleotide
  Sense Strand Starting at position 446 of SEQ ID NO: 315462
gccagagagcuauguaaug

SEQ ID NO: 353762 - RNA, 19 nt, Artificial Sequence
  Description of Artificial Sequence: Synthetic oligonucleotide
  Antisense Strand to SEQ ID NO: 353761
cauuacauagcucucuggc

SEQ ID NO: 353763 - RNA, 19 nt, Artificial Sequence
  Description of Artificial Sequence: Synthetic oligonucleotide
  Sense Strand Starting at position 446 of SEQ ID NO: 315472
uauguaauguggccagaug

SEQ ID NO: 353764 - RNA, 19 nt, Artificial Sequence
  Description of Artificial Sequence: Synthetic oligonucleotide
  Antisense Strand to SEQ ID NO: 353763
caucuggccacauuacaua

SEQ ID NO: 353765 - RNA, 19 nt, Artificial Sequence
  Description of Artificial Sequence: Synthetic oligonucleotide
  Sense Strand Starting at position 446 of SEQ ID NO: 315664
gacgcugacucuuuagacu

SEQ ID NO: 353766 - RNA, 19 nt, Artificial Sequence
  Description of Artificial Sequence: Synthetic oligonucleotide
  Antisense Strand to SEQ ID NO: 353765
agucuaaagagucagcguc

SEQ ID NO: 353767 - RNA, 19 nt, Artificial Sequence
  Description of Artificial Sequence: Synthetic oligonucleotide
  Sense Strand Starting at position 446 of SEQ ID NO: 315675
uuuagacuuccacaggcua

SEQ ID NO: 353768 - RNA, 19 nt, Artificial Sequence
  Description of Artificial Sequence: Synthetic oligonucleotide
  Antisense Strand to SEQ ID NO: 353767
uagccuguggaagucuaaa

SEQ ID NO: 353769 - RNA, 19 nt, Artificial Sequence
  Description of Artificial Sequence: Synthetic oligonucleotide
  Sense Strand Starting at position 446 of SEQ ID NO: 315731
ggaagauuaugguuuguca

SEQ ID NO: 353770 - RNA, 19 nt, Artificial Sequence
  Description of Artificial Sequence: Synthetic oligonucleotide
  Antisense Strand to SEQ ID NO: 353769
ugacaaaccauaaucuucc

SEQ ID NO: 353771 - RNA, 19 nt, Artificial Sequence
  Description of Artificial Sequence: Synthetic oligonucleotide
  Sense Strand Starting at position 446 of SEQ ID NO: 315733
aagauuaugguuugucaaa

SEQ ID NO: 353772 - RNA, 19 nt, Artificial Sequence
  Description of Artificial Sequence: Synthetic oligonucleotide
  Antisense Strand to SEQ ID NO: 353771
uuugacaaaccauaaucuu

SEQ ID NO: 353773 - RNA, 19 nt, Artificial Sequence
  Description of Artificial Sequence: Synthetic oligonucleotide
  Sense Strand Starting at position 446 of SEQ ID NO: 315751
aaucaagugcuugaucaug

SEQ ID NO: 353774 - RNA, 19 nt, Artificial Sequence
  Description of Artificial Sequence: Synthetic oligonucleotide
  Antisense Strand to SEQ ID NO: 353773
caugaucaagcacuugauu

SEQ ID NO: 353775 - RNA, 19 nt, Artificial Sequence
  Description of Artificial Sequence: Synthetic oligonucleotide
  Sense Strand Starting at position 446 of SEQ ID NO: 315760
cuugaucauguaugagaca

SEQ ID NO: 353776 - RNA, 19 nt, Artificial Sequence
  Description of Artificial Sequence: Synthetic oligonucleotide
  Antisense Strand to SEQ ID NO: 353775
ugucucauacaugaucaag

SEQ ID NO: 353777 - RNA, 19 nt, Artificial Sequence
  Description of Artificial Sequence: Synthetic oligonucleotide
  Sense Strand Starting at position 446 of SEQ ID NO: 316039
gaggaugaauggucuccua

SEQ ID NO: 353778 - RNA, 19 nt, Artificial Sequence
  Description of Artificial Sequence: Synthetic oligonucleotide
  Antisense Strand to SEQ ID NO: 353777
uaggagaccauucauccuc

SEQ ID NO: 353779 - RNA, 19 nt, Artificial Sequence
  Description of Artificial Sequence: Synthetic oligonucleotide
  Sense Strand Starting at position 446 of SEQ ID NO: 316042
gaugaauggucuccuaguu

SEQ ID NO: 353780 - RNA, 19 nt, Artificial Sequence
  Description of Artificial Sequence: Synthetic oligonucleotide
  Antisense Strand to SEQ ID NO: 353779
aacuaggagaccauucauc

SEQ ID NO: 353781 - RNA, 19 nt, Artificial Sequence
  Description of Artificial Sequence: Synthetic oligonucleotide
  Sense Strand Starting at position 446 of SEQ ID NO: 316052
cuccuaguugagcaaaguu

SEQ ID NO: 353782 - RNA, 19 nt, Artificial Sequence
  Description of Artificial Sequence: Synthetic oligonucleotide
  Antisense Strand to SEQ ID NO: 353781
aacuuugcucaacuaggag

SEQ ID NO: 353783 - RNA, 19 nt, Artificial Sequence
  Description of Artificial Sequence: Synthetic oligonucleotide
  Sense Strand Starting at position 446 of SEQ ID NO: 316124
uugugugacagggaguaaa

SEQ ID NO: 353784 - RNA, 19 nt, Artificial Sequence
  Description of Artificial Sequence: Synthetic oligonucleotide
  Antisense Strand to SEQ ID NO: 353783
uuuacucccugucacacaa

SEQ ID NO: 353785 - RNA, 19 nt, Artificial Sequence
  Description of Artificial Sequence: Synthetic oligonucleotide
  Sense Strand Starting at position 446 of SEQ ID NO: 316439
cuaaguggcuuucugaaga

SEQ ID NO: 353786 - RNA, 19 nt, Artificial Sequence
  Description of Artificial Sequence: Synthetic oligonucleotide
  Antisense Strand to SEQ ID NO: 353785
ucuucagaaagccacuuag

SEQ ID NO: 353787 - RNA, 19 nt, Artificial Sequence
  Description of Artificial Sequence: Synthetic oligonucleotide
  Sense Strand Starting at position 446 of SEQ ID NO: 316452
ugaagacccucuguugcaa

SEQ ID NO: 353788 - RNA, 19 nt, Artificial Sequence
  Description of Artificial Sequence: Synthetic oligonucleotide
  Antisense Strand to SEQ ID NO: 353787
uugcaacagagggucuuca

SEQ ID NO: 353789 - RNA, 19 nt, Artificial Sequence
  Description of Artificial Sequence: Synthetic oligonucleotide
  Sense Strand Starting at position 446 of SEQ ID NO: 316506
accauugcucuguaacaga

SEQ ID NO: 353790 - RNA, 19 nt, Artificial Sequence
  Description of Artificial Sequence: Synthetic oligonucleotide
  Antisense Strand to SEQ ID NO: 353789
ucuguuacagagcaauggu

SEQ ID NO: 353791 - RNA, 19 nt, Artificial Sequence
  Description of Artificial Sequence: Synthetic oligonucleotide
  Sense Strand Starting at position 446 of SEQ ID NO: 316516
uguaacagaugucugcaaa

SEQ ID NO: 353792 - RNA, 19 nt, Artificial Sequence
  Description of Artificial Sequence: Synthetic oligonucleotide
  Antisense Strand to SEQ ID NO: 353791
uuugcagacaucuguuaca

SEQ ID NO: 353793 - RNA, 19 nt, Artificial Sequence
  Description of Artificial Sequence: Synthetic oligonucleotide
  Sense Strand Starting at position 446 of SEQ ID NO: 316517
guaacagaugucugcaaac

SEQ ID NO: 353794 - RNA, 19 nt, Artificial Sequence
  Description of Artificial Sequence: Synthetic oligonucleotide
  Antisense Strand to SEQ ID NO: 353793
guuugcagacaucuguuac

SEQ ID NO: 353795 - RNA, 19 nt, Artificial Sequence
  Description of Artificial Sequence: Synthetic oligonucleotide
  Sense Strand Starting at position 446 of SEQ ID NO: 316849
ggucaaguuccauacgaag

SEQ ID NO: 353796 - RNA, 19 nt, Artificial Sequence
  Description of Artificial Sequence: Synthetic oligonucleotide
  Antisense Strand to SEQ ID NO: 353795
cuucguauggaacuugacc

SEQ ID NO: 353797 - RNA, 19 nt, Artificial Sequence
  Description of Artificial Sequence: Synthetic oligonucleotide
  Sense Strand Starting at position 446 of SEQ ID NO: 317549
gggaauagccacgaauguu

SEQ ID NO: 353798 - RNA, 19 nt, Artificial Sequence
  Description of Artificial Sequence: Synthetic oligonucleotide
  Antisense Strand to SEQ ID NO: 353797
aacauucguggcuauuccc

SEQ ID NO: 353799 - RNA, 19 nt, Artificial Sequence
  Description of Artificial Sequence: Synthetic oligonucleotide
  Sense Strand Starting at position 446 of SEQ ID NO: 317773
uguaaauagcuugccguua

SEQ ID NO: 353800 - RNA, 19 nt, Artificial Sequence
  Description of Artificial Sequence: Synthetic oligonucleotide
  Antisense Strand to SEQ ID NO: 353799
uaacggcaagcuauuuaca

SEQ ID NO: 353801 - RNA, 19 nt, Artificial Sequence
  Description of Artificial Sequence: Synthetic oligonucleotide
  Sense Strand Starting at position 446 of SEQ ID NO: 317788
guuacuagugcugggaaac

SEQ ID NO: 353802 - RNA, 19 nt, Artificial Sequence
  Description of Artificial Sequence: Synthetic oligonucleotide
  Antisense Strand to SEQ ID NO: 353801
guuucccagcacuaguaac

SEQ ID NO: 353803 - RNA, 19 nt, Artificial Sequence
  Description of Artificial Sequence: Synthetic oligonucleotide
  Sense Strand Starting at position 446 of SEQ ID NO: 317789
uuacuagugcugggaaaca

SEQ ID NO: 353804 - RNA, 19 nt, Artificial Sequence
  Description of Artificial Sequence: Synthetic oligonucleotide
  Antisense Strand to SEQ ID NO: 353803
uguuucccagcacuaguaa

SEQ ID NO: 353805 - RNA, 19 nt, Artificial Sequence
  Description of Artificial Sequence: Synthetic oligonucleotide
  Sense Strand Starting at position 446 of SEQ ID NO: 317815
auaagagaaucggugguuu

SEQ ID NO: 353806 - RNA, 19 nt, Artificial Sequence
  Description of Artificial Sequence: Synthetic oligonucleotide
  Antisense Strand to SEQ ID NO: 353805
aaaccaccgauucucuuau

SEQ ID NO: 353807 - RNA, 19 nt, Artificial Sequence
  Description of Artificial Sequence: Synthetic oligonucleotide
  Sense Strand Starting at position 446 of SEQ ID NO: 317817
aagagaaucggugguuuag

SEQ ID NO: 353808 - RNA, 19 nt, Artificial Sequence
  Description of Artificial Sequence: Synthetic oligonucleotide
  Antisense Strand to SEQ ID NO: 353807
cuaaaccaccgauucucuu

SEQ ID NO: 353809 - RNA, 19 nt, Artificial Sequence
  Description of Artificial Sequence: Synthetic oligonucleotide
  Sense Strand Starting at position 446 of SEQ ID NO: 317996
ggaauugaugcugauuguu

SEQ ID NO: 353810 - RNA, 19 nt, Artificial Sequence
  Description of Artificial Sequence: Synthetic oligonucleotide
  Antisense Strand to SEQ ID NO: 353809
aacaaucagcaucaauucc

SEQ ID NO: 353811 - RNA, 19 nt, Artificial Sequence
  Description of Artificial Sequence: Synthetic oligonucleotide
  Sense Strand Starting at position 446 of SEQ ID NO: 318001
ugaugcugauuguuggaaa

SEQ ID NO: 353812 - RNA, 19 nt, Artificial Sequence
  Description of Artificial Sequence: Synthetic oligonucleotide
  Antisense Strand to SEQ ID NO: 353811
uuuccaacaaucagcauca

SEQ ID NO: 353813 - RNA, 19 nt, Artificial Sequence
  Description of Artificial Sequence: Synthetic oligonucleotide
  Sense Strand Starting at position 446 of SEQ ID NO: 318353
uuucccuuagaauguauga

SEQ ID NO: 353814 - RNA, 19 nt, Artificial Sequence
  Description of Artificial Sequence: Synthetic oligonucleotide
  Antisense Strand to SEQ ID NO: 353813
ucauacauucuaagggaaa

SEQ ID NO: 353815 - RNA, 19 nt, Artificial Sequence
  Description of Artificial Sequence: Synthetic oligonucleotide
  Sense Strand Starting at position 446 of SEQ ID NO: 318424
ugaauccaucuguaaguca

SEQ ID NO: 353816 - RNA, 19 nt, Artificial Sequence
  Description of Artificial Sequence: Synthetic oligonucleotide
  Antisense Strand to SEQ ID NO: 353815
ugacuuacagauggauuca

SEQ ID NO: 353817 - RNA, 19 nt, Artificial Sequence
  Description of Artificial Sequence: Synthetic oligonucleotide
  Sense Strand Starting at position 446 of SEQ ID NO: 318427
auccaucuguaagucaauu

SEQ ID NO: 353818 - RNA, 19 nt, Artificial Sequence
  Description of Artificial Sequence: Synthetic oligonucleotide
  Antisense Strand to SEQ ID NO: 353817
aauugacuuacagauggau

SEQ ID NO: 353819 - RNA, 19 nt, Artificial Sequence
  Description of Artificial Sequence: Synthetic oligonucleotide
  Sense Strand Starting at position 446 of SEQ ID NO: 318469
acaucuggguuguuaucua

SEQ ID NO: 353820 - RNA, 19 nt, Artificial Sequence
  Description of Artificial Sequence: Synthetic oligonucleotide
  Antisense Strand to SEQ ID NO: 353819
uagauaacaacccagaugu

SEQ ID NO: 353821 - RNA, 19 nt, Artificial Sequence
  Description of Artificial Sequence: Synthetic oligonucleotide
  Sense Strand Starting at position 446 of SEQ ID NO: 318474
uggguuguuaucuaugcua

SEQ ID NO: 353822 - RNA, 19 nt, Artificial Sequence
  Description of Artificial Sequence: Synthetic oligonucleotide
  Antisense Strand to SEQ ID NO: 353821
uagcauagauaacaaccca

SEQ ID NO: 353823 - RNA, 19 nt, Artificial Sequence
  Description of Artificial Sequence: Synthetic oligonucleotide
  Sense Strand Starting at position 446 of SEQ ID NO: 318573
acaaguaaaucagcuugau

SEQ ID NO: 353824 - RNA, 19 nt, Artificial Sequence
  Description of Artificial Sequence: Synthetic oligonucleotide
  Antisense Strand to SEQ ID NO: 353823
aucaagcugauuuacuugu

SEQ ID NO: 353825 - RNA, 19 nt, Artificial Sequence
  Description of Artificial Sequence: Synthetic oligonucleotide
  Sense Strand Starting at position 446 of SEQ ID NO: 318692
cagugacuguaaucagaaa

SEQ ID NO: 353826 - RNA, 19 nt, Artificial Sequence
  Description of Artificial Sequence: Synthetic oligonucleotide
  Antisense Strand to SEQ ID NO: 353825
uuucugauuacagucacug

SEQ ID NO: 353827 - RNA, 19 nt, Artificial Sequence
  Description of Artificial Sequence: Synthetic oligonucleotide
  Sense Strand Starting at position 446 of SEQ ID NO: 318776
gacacaagacuugguccaa

SEQ ID NO: 353828 - RNA, 19 nt, Artificial Sequence
  Description of Artificial Sequence: Synthetic oligonucleotide
  Antisense Strand to SEQ ID NO: 353827
uuggaccaagucuuguguc

SEQ ID NO: 353829 - RNA, 19 nt, Artificial Sequence
  Description of Artificial Sequence: Synthetic oligonucleotide
  Sense Strand Starting at position 446 of SEQ ID NO: 318835
ccaucaguauuaguauuga

SEQ ID NO: 353830 - RNA, 19 nt, Artificial Sequence
  Description of Artificial Sequence: Synthetic oligonucleotide
  Antisense Strand to SEQ ID NO: 353829
ucaauacuaauacugaugg

SEQ ID NO: 353831 - RNA, 19 nt, Artificial Sequence
  Description of Artificial Sequence: Synthetic oligonucleotide
  Sense Strand Starting at position 446 of SEQ ID NO: 318840
aguauuaguauugaugguu

SEQ ID NO: 353832 - RNA, 19 nt, Artificial Sequence
  Description of Artificial Sequence: Synthetic oligonucleotide
  Antisense Strand to SEQ ID NO: 353831
aaccaucaauacuaauacu

SEQ ID NO: 353833 - RNA, 19 nt, Artificial Sequence
  Description of Artificial Sequence: Synthetic oligonucleotide
  Sense Strand Starting at position 446 of SEQ ID NO: 318945
ugucaucaugcugaaugga

SEQ ID NO: 353834 - RNA, 19 nt, Artificial Sequence
  Description of Artificial Sequence: Synthetic oligonucleotide
  Antisense Strand to SEQ ID NO: 353833
uccauucagcaugaugaca

SEQ ID NO: 353835 - RNA, 19 nt, Artificial Sequence
  Description of Artificial Sequence: Synthetic oligonucleotide
  Sense Strand Starting at position 446 of SEQ ID NO: 319042
gacuguguucucggaaaug

SEQ ID NO: 353836 - RNA, 19 nt, Artificial Sequence
  Description of Artificial Sequence: Synthetic oligonucleotide
  Antisense Strand to SEQ ID NO: 353835
cauuuccgagaacacaguc

SEQ ID NO: 353837 - RNA, 19 nt, Artificial Sequence
  Description of Artificial Sequence: Synthetic oligonucleotide
  Sense Strand Starting at position 446 of SEQ ID NO: 319054
ggaaaugucaggcagccaa

SEQ ID NO: 353838 - RNA, 19 nt, Artificial Sequence
  Description of Artificial Sequence: Synthetic oligonucleotide
  Antisense Strand to SEQ ID NO: 353837
uuggcugccugacauuucc

SEQ ID NO: 353839 - RNA, 19 nt, Artificial Sequence
  Description of Artificial Sequence: Synthetic oligonucleotide
  Sense Strand Starting at position 447 of SEQ ID NO: 315346
agagcuaacuaguuguaug

SEQ ID NO: 353840 - RNA, 19 nt, Artificial Sequence
  Description of Artificial Sequence: Synthetic oligonucleotide
  Antisense Strand to SEQ ID NO: 353839
cauacaacuaguuagcucu

SEQ ID NO: 353841 - RNA, 19 nt, Artificial Sequence
  Description of Artificial Sequence: Synthetic oligonucleotide
  Sense Strand Starting at position 447 of SEQ ID NO: 315357
guuguaugacccugggcaa

SEQ ID NO: 353842 - RNA, 19 nt, Artificial Sequence
  Description of Artificial Sequence: Synthetic oligonucleotide
  Antisense Strand to SEQ ID NO: 353841
uugcccagggucauacaac

SEQ ID NO: 353843 - RNA, 19 nt, Artificial Sequence
  Description of Artificial Sequence: Synthetic oligonucleotide
  Sense Strand Starting at position 447 of SEQ ID NO: 315520
auguuaaaccauugugcuu

SEQ ID NO: 353844 - RNA, 19 nt, Artificial Sequence
  Description of Artificial Sequence: Synthetic oligonucleotide
  Antisense Strand to SEQ ID NO: 353843
aagcacaaugguuuaacau

SEQ ID NO: 353845 - RNA, 19 nt, Artificial Sequence
  Description of Artificial Sequence: Synthetic oligonucleotide
  Sense Strand Starting at position 447 of SEQ ID NO: 315525
aaaccauugugcuuggaag

SEQ ID NO: 353846 - RNA, 19 nt, Artificial Sequence
  Description of Artificial Sequence: Synthetic oligonucleotide
  Antisense Strand to SEQ ID NO: 353845
cuuccaagcacaaugguuu

SEQ ID NO: 353847 - RNA, 19 nt, Artificial Sequence
  Description of Artificial Sequence: Synthetic oligonucleotide
  Sense Strand Starting at position 447 of SEQ ID NO: 315526
aaccauugugcuuggaagu

SEQ ID NO: 353848 - RNA, 19 nt, Artificial Sequence
  Description of Artificial Sequence: Synthetic oligonucleotide
  Antisense Strand to SEQ ID NO: 353847
acuuccaagcacaaugguu

SEQ ID NO: 353849 - RNA, 19 nt, Artificial Sequence
  Description of Artificial Sequence: Synthetic oligonucleotide
  Sense Strand Starting at position 447 of SEQ ID NO: 315537
uuggaagugguguggguua

SEQ ID NO: 353850 - RNA, 19 nt, Artificial Sequence
  Description of Artificial Sequence: Synthetic oligonucleotide
  Antisense Strand to SEQ ID NO: 353849
uaacccacaccacuuccaa

SEQ ID NO: 353851 - RNA, 19 nt, Artificial Sequence
  Description of Artificial Sequence: Synthetic oligonucleotide
  Sense Strand Starting at position 447 of SEQ ID NO: 315539
ggaagugguguggguuaau

SEQ ID NO: 353852 - RNA, 19 nt, Artificial Sequence
  Description of Artificial Sequence: Synthetic oligonucleotide
  Antisense Strand to SEQ ID NO: 353851
auuaacccacaccacuucc

SEQ ID NO: 353853 - RNA, 19 nt, Artificial Sequence
  Description of Artificial Sequence: Synthetic oligonucleotide
  Sense Strand Starting at position 447 of SEQ ID NO: 315548
guggguuaauggucaagag

SEQ ID NO: 353854 - RNA, 19 nt, Artificial Sequence
  Description of Artificial Sequence: Synthetic oligonucleotide
  Antisense Strand to SEQ ID NO: 353853
cucuugaccauuaacccac

SEQ ID NO: 353855 - RNA, 19 nt, Artificial Sequence
  Description of Artificial Sequence: Synthetic oligonucleotide
  Sense Strand Starting at position 447 of SEQ ID NO: 315612
gcauuuaauagcugagagc

SEQ ID NO: 353856 - RNA, 19 nt, Artificial Sequence
  Description of Artificial Sequence: Synthetic oligonucleotide
  Antisense Strand to SEQ ID NO: 353855
gcucucagcuauuaaaugc

SEQ ID NO: 353857 - RNA, 19 nt, Artificial Sequence
  Description of Artificial Sequence: Synthetic oligonucleotide
  Sense Strand Starting at position 447 of SEQ ID NO: 315621
agcugagagcauuggguaa

SEQ ID NO: 353858 - RNA, 19 nt, Artificial Sequence
  Description of Artificial Sequence: Synthetic oligonucleotide
  Antisense Strand to SEQ ID NO: 353857
uuacccaaugcucucagcu

SEQ ID NO: 353859 - RNA, 19 nt, Artificial Sequence
  Description of Artificial Sequence: Synthetic oligonucleotide
  Sense Strand Starting at position 447 of SEQ ID NO: 315625
gagagcauuggguaaccuu

SEQ ID NO: 353860 - RNA, 19 nt, Artificial Sequence
  Description of Artificial Sequence: Synthetic oligonucleotide
  Antisense Strand to SEQ ID NO: 353859
aagguuacccaaugcucuc

SEQ ID NO: 353861 - RNA, 19 nt, Artificial Sequence
  Description of Artificial Sequence: Synthetic oligonucleotide
  Sense Strand Starting at position 447 of SEQ ID NO: 315633
uggguaaccuucgcugacu

SEQ ID NO: 353862 - RNA, 19 nt, Artificial Sequence
  Description of Artificial Sequence: Synthetic oligonucleotide
  Antisense Strand to SEQ ID NO: 353861
agucagcgaagguuaccca

SEQ ID NO: 353863 - RNA, 19 nt, Artificial Sequence
  Description of Artificial Sequence: Synthetic oligonucleotide
  Sense Strand Starting at position 447 of SEQ ID NO: 315636
guaaccuucgcugacucaa

SEQ ID NO: 353864 - RNA, 19 nt, Artificial Sequence
  Description of Artificial Sequence: Synthetic oligonucleotide
  Antisense Strand to SEQ ID NO: 353863
uugagucagcgaagguuac

SEQ ID NO: 353865 - RNA, 19 nt, Artificial Sequence
  Description of Artificial Sequence: Synthetic oligonucleotide
  Sense Strand Starting at position 447 of SEQ ID NO: 315874
augcuaagggugugguuaa

SEQ ID NO: 353866 - RNA, 19 nt, Artificial Sequence
  Description of Artificial Sequence: Synthetic oligonucleotide
  Antisense Strand to SEQ ID NO: 353865
uuaaccacacccuuagcau

SEQ ID NO: 353867 - RNA, 19 nt, Artificial Sequence
  Description of Artificial Sequence: Synthetic oligonucleotide
  Sense Strand Starting at position 447 of SEQ ID NO: 315885
gugguuaaacuguaauaug

SEQ ID NO: 353868 - RNA, 19 nt, Artificial Sequence
  Description of Artificial Sequence: Synthetic oligonucleotide
  Antisense Strand to SEQ ID NO: 353867
cauauuacaguuuaaccac

SEQ ID NO: 353869 - RNA, 19 nt, Artificial Sequence
  Description of Artificial Sequence: Synthetic oligonucleotide
  Sense Strand Starting at position 447 of SEQ ID NO: 316025
ucaaauguuuaguuucuga

SEQ ID NO: 353870 - RNA, 19 nt, Artificial Sequence
  Description of Artificial Sequence: Synthetic oligonucleotide
  Antisense Strand to SEQ ID NO: 353869
ucagaaacuaaacauuuga

SEQ ID NO: 353871 - RNA, 19 nt, Artificial Sequence
  Description of Artificial Sequence: Synthetic oligonucleotide
  Sense Strand Starting at position 447 of SEQ ID NO: 316032
uuuaguuucugaccucacu

SEQ ID NO: 353872 - RNA, 19 nt, Artificial Sequence
  Description of Artificial Sequence: Synthetic oligonucleotide
  Antisense Strand to SEQ ID NO: 353871
agugaggucagaaacuaaa

SEQ ID NO: 353873 - RNA, 19 nt, Artificial Sequence
  Description of Artificial Sequence: Synthetic oligonucleotide
  Sense Strand Starting at position 447 of SEQ ID NO: 316044
ccucacuuuccuggagacu

SEQ ID NO: 353874 - RNA, 19 nt, Artificial Sequence
  Description of Artificial Sequence: Synthetic oligonucleotide
  Antisense Strand to SEQ ID NO: 353873
agucuccaggaaagugagg

SEQ ID NO: 353875 - RNA, 19 nt, Artificial Sequence
  Description of Artificial Sequence: Synthetic oligonucleotide
  Sense Strand Starting at position 447 of SEQ ID NO: 316120
agcggcuucugagcaaaga

SEQ ID NO: 353876 - RNA, 19 nt, Artificial Sequence
  Description of Artificial Sequence: Synthetic oligonucleotide
  Antisense Strand to SEQ ID NO: 353875
ucuuugcucagaagccgcu

SEQ ID NO: 353877 - RNA, 19 nt, Artificial Sequence
  Description of Artificial Sequence: Synthetic oligonucleotide
  Sense Strand Starting at position 447 of SEQ ID NO: 316130
gagcaaagaguuuguuggu

SEQ ID NO: 353878 - RNA, 19 nt, Artificial Sequence
  Description of Artificial Sequence: Synthetic oligonucleotide
  Antisense Strand to SEQ ID NO: 353877
accaacaaacucuuugcuc

SEQ ID NO: 353879 - RNA, 19 nt, Artificial Sequence
  Description of Artificial Sequence: Synthetic oligonucleotide
  Sense Strand Starting at position 447 of SEQ ID NO: 316131
agcaaagaguuuguugguu

SEQ ID NO: 353880 - RNA, 19 nt, Artificial Sequence
  Description of Artificial Sequence: Synthetic oligonucleotide
  Antisense Strand to SEQ ID NO: 353879
aaccaacaaacucuuugcu

SEQ ID NO: 353881 - RNA, 19 nt, Artificial Sequence
  Description of Artificial Sequence: Synthetic oligonucleotide
  Sense Strand Starting at position 447 of SEQ ID NO: 316135
aagaguuuguugguuuguu

SEQ ID NO: 353882 - RNA, 19 nt, Artificial Sequence
  Description of Artificial Sequence: Synthetic oligonucleotide
  Antisense Strand to SEQ ID NO: 353881
aacaaaccaacaaacucuu

SEQ ID NO: 353883 - RNA, 19 nt, Artificial Sequence
  Description of Artificial Sequence: Synthetic oligonucleotide
  Sense Strand Starting at position 447 of SEQ ID NO: 316163
ucaggaaggucguuagagu

SEQ ID NO: 353884 - RNA, 19 nt, Artificial Sequence
  Description of Artificial Sequence: Synthetic oligonucleotide
  Antisense Strand to SEQ ID NO: 353883
acucuaacgaccuuccuga

SEQ ID NO: 353885 - RNA, 19 nt, Artificial Sequence
  Description of Artificial Sequence: Synthetic oligonucleotide
  Sense Strand Starting at position 447 of SEQ ID NO: 316251
agcaauggaucuucucuua

SEQ ID NO: 353886 - RNA, 19 nt, Artificial Sequence
  Description of Artificial Sequence: Synthetic oligonucleotide
  Antisense Strand to SEQ ID NO: 353885
uaagagaagauccauugcu

SEQ ID NO: 353887 - RNA, 19 nt, Artificial Sequence
  Description of Artificial Sequence: Synthetic oligonucleotide
  Sense Strand Starting at position 447 of SEQ ID NO: 316308
cguuacauugcccagauga

SEQ ID NO: 353888 - RNA, 19 nt, Artificial Sequence
  Description of Artificial Sequence: Synthetic oligonucleotide
  Antisense Strand to SEQ ID NO: 353887
ucaucugggcaauguaacg

SEQ ID NO: 353889 - RNA, 19 nt, Artificial Sequence
  Description of Artificial Sequence: Synthetic oligonucleotide
  Sense Strand Starting at position 447 of SEQ ID NO: 316310
uuacauugcccagaugaua

SEQ ID NO: 353890 - RNA, 19 nt, Artificial Sequence
  Description of Artificial Sequence: Synthetic oligonucleotide
  Antisense Strand to SEQ ID NO: 353889
uaucaucugggcaauguaa

SEQ ID NO: 353891 - RNA, 19 nt, Artificial Sequence
  Description of Artificial Sequence: Synthetic oligonucleotide
  Sense Strand Starting at position 447 of SEQ ID NO: 316674
gauuuaaguuucguaagca

SEQ ID NO: 353892 - RNA, 19 nt, Artificial Sequence
  Description of Artificial Sequence: Synthetic oligonucleotide
  Antisense Strand to SEQ ID NO: 353891
ugcuuacgaaacuuaaauc

SEQ ID NO: 353893 - RNA, 19 nt, Artificial Sequence
  Description of Artificial Sequence: Synthetic oligonucleotide
  Sense Strand Starting at position 447 of SEQ ID NO: 316904
uccacaucugcggaagaga

SEQ ID NO: 353894 - RNA, 19 nt, Artificial Sequence
  Description of Artificial Sequence: Synthetic oligonucleotide
  Antisense Strand to SEQ ID NO: 353893
ucucuuccgcagaugugga

SEQ ID NO: 353895 - RNA, 19 nt, Artificial Sequence
  Description of Artificial Sequence: Synthetic oligonucleotide
  Sense Strand Starting at position 447 of SEQ ID NO: 317761
ccugcucugcugggaagau

SEQ ID NO: 353896 - RNA, 19 nt, Artificial Sequence
  Description of Artificial Sequence: Synthetic oligonucleotide
  Antisense Strand to SEQ ID NO: 353895
aucuucccagcagagcagg

SEQ ID NO: 353897 - RNA, 19 nt, Artificial Sequence
  Description of Artificial Sequence: Synthetic oligonucleotide
  Sense Strand Starting at position 447 of SEQ ID NO: 318017
ggcgccuuuccugccauaa

SEQ ID NO: 353898 - RNA, 19 nt, Artificial Sequence
  Description of Artificial Sequence: Synthetic oligonucleotide
  Antisense Strand to SEQ ID NO: 353897
uuauggcaggaaaggcgcc

SEQ ID NO: 353899 - RNA, 19 nt, Artificial Sequence
  Description of Artificial Sequence: Synthetic oligonucleotide
  Sense Strand Starting at position 447 of SEQ ID NO: 318018
gcgccuuuccugccauaac

SEQ ID NO: 353900 - RNA, 19 nt, Artificial Sequence
  Description of Artificial Sequence: Synthetic oligonucleotide
  Antisense Strand to SEQ ID NO: 353899
guuauggcaggaaaggcgc

SEQ ID NO: 353901 - RNA, 19 nt, Artificial Sequence
  Description of Artificial Sequence: Synthetic oligonucleotide
  Sense Strand Starting at position 447 of SEQ ID NO: 318194
gcaguuuagccgcugagau

SEQ ID NO: 353902 - RNA, 19 nt, Artificial Sequence
  Description of Artificial Sequence: Synthetic oligonucleotide
  Antisense Strand to SEQ ID NO: 353901
aucucagcggcuaaacugc

SEQ ID NO: 353903 - RNA, 19 nt, Artificial Sequence
  Description of Artificial Sequence: Synthetic oligonucleotide
  Sense Strand Starting at position 447 of SEQ ID NO: 318196
aguuuagccgcugagaucu

SEQ ID NO: 353904 - RNA, 19 nt, Artificial Sequence
  Description of Artificial Sequence: Synthetic oligonucleotide
  Antisense Strand to SEQ ID NO: 353903
agaucucagcggcuaaacu

SEQ ID NO: 353905 - RNA, 19 nt, Artificial Sequence
  Description of Artificial Sequence: Synthetic oligonucleotide
  Sense Strand Starting at position 447 of SEQ ID NO: 318290
cuggaaaccuccuuucguu

SEQ ID NO: 353906 - RNA, 19 nt, Artificial Sequence
  Description of Artificial Sequence: Synthetic oligonucleotide
  Antisense Strand to SEQ ID NO: 353905
aacgaaaggagguuuccag

SEQ ID NO: 353907 - RNA, 19 nt, Artificial Sequence
  Description of Artificial Sequence: Synthetic oligonucleotide
  Sense Strand Starting at position 447 of SEQ ID NO: 318718
gucagcuuugucucugcua

SEQ ID NO: 353908 - RNA, 19 nt, Artificial Sequence
  Description of Artificial Sequence: Synthetic oligonucleotide
  Antisense Strand to SEQ ID NO: 353907
uagcagagacaaagcugac

SEQ ID NO: 353909 - RNA, 19 nt, Artificial Sequence
  Description of Artificial Sequence: Synthetic oligonucleotide
  Sense Strand Starting at position 447 of SEQ ID NO: 318750
cagccauggcuuuagaucu

SEQ ID NO: 353910 - RNA, 19 nt, Artificial Sequence
  Description of Artificial Sequence: Synthetic oligonucleotide
  Antisense Strand to SEQ ID NO: 353909
agaucuaaagccauggcug

SEQ ID NO: 353911 - RNA, 19 nt, Artificial Sequence
  Description of Artificial Sequence: Synthetic oligonucleotide
  Sense Strand Starting at position 447 of SEQ ID NO: 318757
ggcuuuagaucugcaggga

SEQ ID NO: 353912 - RNA, 19 nt, Artificial Sequence
  Description of Artificial Sequence: Synthetic oligonucleotide
  Antisense Strand to SEQ ID NO: 353911
ucccugcagaucuaaagcc

SEQ ID NO: 353913 - RNA, 19 nt, Artificial Sequence
  Description of Artificial Sequence: Synthetic oligonucleotide
  Sense Strand Starting at position 447 of SEQ ID NO: 318996
auagauguuccgcaccaga

SEQ ID NO: 353914 - RNA, 19 nt, Artificial Sequence
  Description of Artificial Sequence: Synthetic oligonucleotide
  Antisense Strand to SEQ ID NO: 353913
ucuggugcggaacaucuau

SEQ ID NO: 353915 - RNA, 19 nt, Artificial Sequence
  Description of Artificial Sequence: Synthetic oligonucleotide
  Sense Strand Starting at position 447 of SEQ ID NO: 319027
gucacugugcaaggauuga

SEQ ID NO: 353916 - RNA, 19 nt, Artificial Sequence
  Description of Artificial Sequence: Synthetic oligonucleotide
  Antisense Strand to SEQ ID NO: 353915
ucaauccuugcacagugac

SEQ ID NO: 353917 - RNA, 19 nt, Artificial Sequence
  Description of Artificial Sequence: Synthetic oligonucleotide
  Sense Strand Starting at position 447 of SEQ ID NO: 319065
aguucugcccucgaauaac

SEQ ID NO: 353918 - RNA, 19 nt, Artificial Sequence
  Description of Artificial Sequence: Synthetic oligonucleotide
  Antisense Strand to SEQ ID NO: 353917
guuauucgagggcagaacu

SEQ ID NO: 353919 - RNA, 19 nt, Artificial Sequence
  Description of Artificial Sequence: Synthetic oligonucleotide
  Sense Strand Starting at position 448 of SEQ ID NO: 315276
gccaaauagugagaauuua

SEQ ID NO: 353920 - RNA, 19 nt, Artificial Sequence
  Description of Artificial Sequence: Synthetic oligonucleotide
  Antisense Strand to SEQ ID NO: 353919
uaaauucucacuauuuggc

SEQ ID NO: 353921 - RNA, 19 nt, Artificial Sequence
  Description of Artificial Sequence: Synthetic oligonucleotide
  Sense Strand Starting at position 448 of SEQ ID NO: 315337
aucuacaauugauaggaaa

SEQ ID NO: 353922 - RNA, 19 nt, Artificial Sequence
  Description of Artificial Sequence: Synthetic oligonucleotide
  Antisense Strand to SEQ ID NO: 353921
uuuccuaucaauuguagau

SEQ ID NO: 353923 - RNA, 19 nt, Artificial Sequence
  Description of Artificial Sequence: Synthetic oligonucleotide
  Sense Strand Starting at position 448 of SEQ ID NO: 315405
ugcaguaguccagggaaag

SEQ ID NO: 353924 - RNA, 19 nt, Artificial Sequence
  Description of Artificial Sequence: Synthetic oligonucleotide
  Antisense Strand to SEQ ID NO: 353923
cuuucccuggacuacugca

SEQ ID NO: 353925 - RNA, 19 nt, Artificial Sequence
  Description of Artificial Sequence: Synthetic oligonucleotide
  Sense Strand Starting at position 448 of SEQ ID NO: 315480
cuaggucauuggucugaca

SEQ ID NO: 353926 - RNA, 19 nt, Artificial Sequence
  Description of Artificial Sequence: Synthetic oligonucleotide
  Antisense Strand to SEQ ID NO: 353925
ugucagaccaaugaccuag

SEQ ID NO: 353927 - RNA, 19 nt, Artificial Sequence
  Description of Artificial Sequence: Synthetic oligonucleotide
  Sense Strand Starting at position 448 of SEQ ID NO: 315482
aggucauuggucugacauc

SEQ ID NO: 353928 - RNA, 19 nt, Artificial Sequence
  Description of Artificial Sequence: Synthetic oligonucleotide
  Antisense Strand to SEQ ID NO: 353927
gaugucagaccaaugaccu

SEQ ID NO: 353929 - RNA, 19 nt, Artificial Sequence
  Description of Artificial Sequence: Synthetic oligonucleotide
  Sense Strand Starting at position 448 of SEQ ID NO: 315509
aaccgagaacgucaauguu

SEQ ID NO: 353930 - RNA, 19 nt, Artificial Sequence
  Description of Artificial Sequence: Synthetic oligonucleotide
  Antisense Strand to SEQ ID NO: 353929
aacauugacguucucgguu

SEQ ID NO: 353931 - RNA, 19 nt, Artificial Sequence
  Description of Artificial Sequence: Synthetic oligonucleotide
  Sense Strand Starting at position 448 of SEQ ID NO: 315512
cgagaacgucaauguuaac

SEQ ID NO: 353932 - RNA, 19 nt, Artificial Sequence
  Description of Artificial Sequence: Synthetic oligonucleotide
  Antisense Strand to SEQ ID NO: 353931
guuaacauugacguucucg

SEQ ID NO: 353933 - RNA, 19 nt, Artificial Sequence
  Description of Artificial Sequence: Synthetic oligonucleotide
  Sense Strand Starting at position 448 of SEQ ID NO: 315518
cgucaauguuaacuacuca

SEQ ID NO: 353934 - RNA, 19 nt, Artificial Sequence
  Description of Artificial Sequence: Synthetic oligonucleotide
  Antisense Strand to SEQ ID NO: 353933
ugaguaguuaacauugacg

SEQ ID NO: 353935 - RNA, 19 nt, Artificial Sequence
  Description of Artificial Sequence: Synthetic oligonucleotide
  Sense Strand Starting at position 448 of SEQ ID NO: 315826
auacucauguauuagaaga

SEQ ID NO: 353936 - RNA, 19 nt, Artificial Sequence
  Description of Artificial Sequence: Synthetic oligonucleotide
  Antisense Strand to SEQ ID NO: 353935
ucuucuaauacaugaguau

SEQ ID NO: 353937 - RNA, 19 nt, Artificial Sequence
  Description of Artificial Sequence: Synthetic oligonucleotide
  Sense Strand Starting at position 448 of SEQ ID NO: 315828
acucauguauuagaagaag

SEQ ID NO: 353938 - RNA, 19 nt, Artificial Sequence
  Description of Artificial Sequence: Synthetic oligonucleotide
  Antisense Strand to SEQ ID NO: 353937
cuucuucuaauacaugagu

SEQ ID NO: 353939 - RNA, 19 nt, Artificial Sequence
  Description of Artificial Sequence: Synthetic oligonucleotide
  Sense Strand Starting at position 448 of SEQ ID NO: 315885
gaugcuggcuuagugagau

SEQ ID NO: 353940 - RNA, 19 nt, Artificial Sequence
  Description of Artificial Sequence: Synthetic oligonucleotide
  Antisense Strand to SEQ ID NO: 353939
aucucacuaagccagcauc

SEQ ID NO: 353941 - RNA, 19 nt, Artificial Sequence
  Description of Artificial Sequence: Synthetic oligonucleotide
  Sense Strand Starting at position 448 of SEQ ID NO: 315899
gagauugacugacagacaa

SEQ ID NO: 353942 - RNA, 19 nt, Artificial Sequence
  Description of Artificial Sequence: Synthetic oligonucleotide
  Antisense Strand to SEQ ID NO: 353941
uugucugucagucaaucuc

SEQ ID NO: 353943 - RNA, 19 nt, Artificial Sequence
  Description of Artificial Sequence: Synthetic oligonucleotide
  Sense Strand Starting at position 448 of SEQ ID NO: 316026
cagauaugugaacgcugaa

SEQ ID NO: 353944 - RNA, 19 nt, Artificial Sequence
  Description of Artificial Sequence: Synthetic oligonucleotide
  Antisense Strand to SEQ ID NO: 353943
uucagcguucacauaucug

SEQ ID NO: 353945 - RNA, 19 nt, Artificial Sequence
  Description of Artificial Sequence: Synthetic oligonucleotide
  Sense Strand Starting at position 448 of SEQ ID NO: 316098
cauaguaauggauguccuu

SEQ ID NO: 353946 - RNA, 19 nt, Artificial Sequence
  Description of Artificial Sequence: Synthetic oligonucleotide
  Antisense Strand to SEQ ID NO: 353945
aaggacauccauuacuaug

SEQ ID NO: 353947 - RNA, 19 nt, Artificial Sequence
  Description of Artificial Sequence: Synthetic oligonucleotide
  Sense Strand Starting at position 448 of SEQ ID NO: 316453
aagggugaauuccaaagau

SEQ ID NO: 353948 - RNA, 19 nt, Artificial Sequence
  Description of Artificial Sequence: Synthetic oligonucleotide
  Antisense Strand to SEQ ID NO: 353947
aucuuuggaauucacccuu

SEQ ID NO: 353949 - RNA, 19 nt, Artificial Sequence
  Description of Artificial Sequence: Synthetic oligonucleotide
  Sense Strand Starting at position 448 of SEQ ID NO: 316465
caaagauuccgcgauacac

SEQ ID NO: 353950 - RNA, 19 nt, Artificial Sequence
  Description of Artificial Sequence: Synthetic oligonucleotide
  Antisense Strand to SEQ ID NO: 353949
guguaucgcggaaucuuug

SEQ ID NO: 353951 - RNA, 19 nt, Artificial Sequence
  Description of Artificial Sequence: Synthetic oligonucleotide
  Sense Strand Starting at position 448 of SEQ ID NO: 316735
guccgacguguuguuucaa

SEQ ID NO: 353952 - RNA, 19 nt, Artificial Sequence
  Description of Artificial Sequence: Synthetic oligonucleotide
  Antisense Strand to SEQ ID NO: 353951
uugaaacaacacgucggac

SEQ ID NO: 353953 - RNA, 19 nt, Artificial Sequence
  Description of Artificial Sequence: Synthetic oligonucleotide
  Sense Strand Starting at position 448 of SEQ ID NO: 316936
cggucaguaccuuguagaa

SEQ ID NO: 353954 - RNA, 19 nt, Artificial Sequence
  Description of Artificial Sequence: Synthetic oligonucleotide
  Antisense Strand to SEQ ID NO: 353953
uucuacaagguacugaccg

SEQ ID NO: 353955 - RNA, 19 nt, Artificial Sequence
  Description of Artificial Sequence: Synthetic oligonucleotide
  Sense Strand Starting at position 448 of SEQ ID NO: 317392
ccggcauccugaccuuaaa

SEQ ID NO: 353956 - RNA, 19 nt, Artificial Sequence
  Description of Artificial Sequence: Synthetic oligonucleotide
  Antisense Strand to SEQ ID NO: 353955
uuuaaggucaggaugccgg

SEQ ID NO: 353957 - RNA, 19 nt, Artificial Sequence
  Description of Artificial Sequence: Synthetic oligonucleotide
  Sense Strand Starting at position 448 of SEQ ID NO: 317695
aacagaguuuaggugaauu

SEQ ID NO: 353958 - RNA, 19 nt, Artificial Sequence
  Description of Artificial Sequence: Synthetic oligonucleotide
  Antisense Strand to SEQ ID NO: 353957
aauucaccuaaacucuguu

SEQ ID NO: 353959 - RNA, 19 nt, Artificial Sequence
  Description of Artificial Sequence: Synthetic oligonucleotide
  Sense Strand Starting at position 448 of SEQ ID NO: 317703
uuaggugaauucgccuuau

SEQ ID NO: 353960 - RNA, 19 nt, Artificial Sequence
  Description of Artificial Sequence: Synthetic oligonucleotide
  Antisense Strand to SEQ ID NO: 353959
auaaggcgaauucaccuaa

SEQ ID NO: 353961 - RNA, 19 nt, Artificial Sequence
  Description of Artificial Sequence: Synthetic oligonucleotide
  Sense Strand Starting at position 448 of SEQ ID NO: 317707
gugaauucgccuuauuaaa

SEQ ID NO: 353962 - RNA, 19 nt, Artificial Sequence
  Description of Artificial Sequence: Synthetic oligonucleotide
  Antisense Strand to SEQ ID NO: 353961
uuuaauaaggcgaauucac

SEQ ID NO: 353963 - RNA, 19 nt, Artificial Sequence
  Description of Artificial Sequence: Synthetic oligonucleotide
  Sense Strand Starting at position 448 of SEQ ID NO: 317769
cuguuaaaugcaugcaaau

SEQ ID NO: 353964 - RNA, 19 nt, Artificial Sequence
  Description of Artificial Sequence: Synthetic oligonucleotide
  Antisense Strand to SEQ ID NO: 353963
auuugcaugcauuuaacag

SEQ ID NO: 353965 - RNA, 19 nt, Artificial Sequence
  Description of Artificial Sequence: Synthetic oligonucleotide
  Sense Strand Starting at position 448 of SEQ ID NO: 317778
gcaugcaaauuuccgcaaa

SEQ ID NO: 353966 - RNA, 19 nt, Artificial Sequence
  Description of Artificial Sequence: Synthetic oligonucleotide
  Antisense Strand to SEQ ID NO: 353965
uuugcggaaauuugcaugc

SEQ ID NO: 353967 - RNA, 19 nt, Artificial Sequence
  Description of Artificial Sequence: Synthetic oligonucleotide
  Sense Strand Starting at position 448 of SEQ ID NO: 317807
gcagaaccaucuccaguuu

SEQ ID NO: 353968 - RNA, 19 nt, Artificial Sequence
  Description of Artificial Sequence: Synthetic oligonucleotide
  Antisense Strand to SEQ ID NO: 353967
aaacuggagaugguucugc

SEQ ID NO: 353969 - RNA, 19 nt, Artificial Sequence
  Description of Artificial Sequence: Synthetic oligonucleotide
  Sense Strand Starting at position 448 of SEQ ID NO: 317914
auaagugcuccuuguuaua

SEQ ID NO: 353970 - RNA, 19 nt, Artificial Sequence
  Description of Artificial Sequence: Synthetic oligonucleotide
  Antisense Strand to SEQ ID NO: 353969
uauaacaaggagcacuuau

SEQ ID NO: 353971 - RNA, 19 nt, Artificial Sequence
  Description of Artificial Sequence: Synthetic oligonucleotide
  Sense Strand Starting at position 448 of SEQ ID NO: 318067
acgucugcaucucugaaga

SEQ ID NO: 353972 - RNA, 19 nt, Artificial Sequence
  Description of Artificial Sequence: Synthetic oligonucleotide
  Antisense Strand to SEQ ID NO: 353971
ucuucagagaugcagacgu

SEQ ID NO: 353973 - RNA, 19 nt, Artificial Sequence
  Description of Artificial Sequence: Synthetic oligonucleotide
  Sense Strand Starting at position 448 of SEQ ID NO: 318096
aaaugagggcugugaaagu

SEQ ID NO: 353974 - RNA, 19 nt, Artificial Sequence
  Description of Artificial Sequence: Synthetic oligonucleotide
  Antisense Strand to SEQ ID NO: 353973
acuuucacagcccucauuu

SEQ ID NO: 353975 - RNA, 19 nt, Artificial Sequence
  Description of Artificial Sequence: Synthetic oligonucleotide
  Sense Strand Starting at position 448 of SEQ ID NO: 318106
ugugaaagugcucacuguu

SEQ ID NO: 353976 - RNA, 19 nt, Artificial Sequence
  Description of Artificial Sequence: Synthetic oligonucleotide
  Antisense Strand to SEQ ID NO: 353975
aacagugagcacuuucaca

SEQ ID NO: 353977 - RNA, 19 nt, Artificial Sequence
  Description of Artificial Sequence: Synthetic oligonucleotide
  Sense Strand Starting at position 448 of SEQ ID NO: 318119
acuguuguuauguacagga

SEQ ID NO: 353978 - RNA, 19 nt, Artificial Sequence
  Description of Artificial Sequence: Synthetic oligonucleotide
  Antisense Strand to SEQ ID NO: 353977
uccuguacauaacaacagu

SEQ ID NO: 353979 - RNA, 19 nt, Artificial Sequence
  Description of Artificial Sequence: Synthetic oligonucleotide
  Sense Strand Starting at position 448 of SEQ ID NO: 318121
uguuguuauguacaggaua

SEQ ID NO: 353980 - RNA, 19 nt, Artificial Sequence
  Description of Artificial Sequence: Synthetic oligonucleotide
  Antisense Strand to SEQ ID NO: 353979
uauccuguacauaacaaca

SEQ ID NO: 353981 - RNA, 19 nt, Artificial Sequence
  Description of Artificial Sequence: Synthetic oligonucleotide
  Sense Strand Starting at position 448 of SEQ ID NO: 318727
uaaaguguugaucaucaug

SEQ ID NO: 353982 - RNA, 19 nt, Artificial Sequence
  Description of Artificial Sequence: Synthetic oligonucleotide
  Antisense Strand to SEQ ID NO: 353981
caugaugaucaacacuuua

SEQ ID NO: 353983 - RNA, 19 nt, Artificial Sequence
  Description of Artificial Sequence: Synthetic oligonucleotide
  Sense Strand Starting at position 448 of SEQ ID NO: 318729
aaguguugaucaucaugag

SEQ ID NO: 353984 - RNA, 19 nt, Artificial Sequence
  Description of Artificial Sequence: Synthetic oligonucleotide
  Antisense Strand to SEQ ID NO: 353983
cucaugaugaucaacacuu

SEQ ID NO: 353985 - RNA, 19 nt, Artificial Sequence
  Description of Artificial Sequence: Synthetic oligonucleotide
  Sense Strand Starting at position 448 of SEQ ID NO: 318858
ugucccauuugcuuucuua

SEQ ID NO: 353986 - RNA, 19 nt, Artificial Sequence
  Description of Artificial Sequence: Synthetic oligonucleotide
  Antisense Strand to SEQ ID NO: 353985
uaagaaagcaaaugggaca

SEQ ID NO: 353987 - RNA, 19 nt, Artificial Sequence
  Description of Artificial Sequence: Synthetic oligonucleotide
  Sense Strand Starting at position 448 of SEQ ID NO: 319056
ggaaaucacuauccuguuu

SEQ ID NO: 353988 - RNA, 19 nt, Artificial Sequence
  Description of Artificial Sequence: Synthetic oligonucleotide
  Antisense Strand to SEQ ID NO: 353987
aaacaggauagugauuucc

SEQ ID NO: 353989 - RNA, 19 nt, Artificial Sequence
  Description of Artificial Sequence: Synthetic oligonucleotide
  Sense Strand Starting at position 448 of SEQ ID NO: 319078
accuauauagauuggccua

SEQ ID NO: 353990 - RNA, 19 nt, Artificial Sequence
  Description of Artificial Sequence: Synthetic oligonucleotide
  Antisense Strand to SEQ ID NO: 353989
uaggccaaucuauauaggu

SEQ ID NO: 353991 - RNA, 19 nt, Artificial Sequence
  Description of Artificial Sequence: Synthetic oligonucleotide
  Sense Strand Starting at position 448 of SEQ ID NO: 319083
uauagauuggccuagucua

SEQ ID NO: 353992 - RNA, 19 nt, Artificial Sequence
  Description of Artificial Sequence: Synthetic oligonucleotide
  Antisense Strand to SEQ ID NO: 353991
uagacuaggccaaucuaua

SEQ ID NO: 353993 - RNA, 19 nt, Artificial Sequence
  Description of Artificial Sequence: Synthetic oligonucleotide
  Sense Strand Starting at position 448 of SEQ ID NO: 319088
auuggccuagucuagauau

SEQ ID NO: 353994 - RNA, 19 nt, Artificial Sequence
  Description of Artificial Sequence: Synthetic oligonucleotide
  Antisense Strand to SEQ ID NO: 353993
auaucuagacuaggccaau

SEQ ID NO: 353995 - RNA, 19 nt, Artificial Sequence
  Description of Artificial Sequence: Synthetic oligonucleotide
  Sense Strand Starting at position 448 of SEQ ID NO: 319114
aaaugaaaucgcggaauau

SEQ ID NO: 353996 - RNA, 19 nt, Artificial Sequence
  Description of Artificial Sequence: Synthetic oligonucleotide
  Antisense Strand to SEQ ID NO: 353995
auauuccgcgauuucauuu

SEQ ID NO: 353997 - RNA, 19 nt, Artificial Sequence
  Description of Artificial Sequence: Synthetic oligonucleotide
  Sense Strand Starting at position 448 of SEQ ID NO: 319115
aaugaaaucgcggaauaug

SEQ ID NO: 353998 - RNA, 19 nt, Artificial Sequence
  Description of Artificial Sequence: Synthetic oligonucleotide
  Antisense Strand to SEQ ID NO: 353997
cauauuccgcgauuucauu

SEQ ID NO: 353999 - RNA, 19 nt, Artificial Sequence
  Description of Artificial Sequence: Synthetic oligonucleotide
  Sense Strand Starting at position 449 of SEQ ID NO: 315252
aaagcugugucuuuggaau

SEQ ID NO: 354000 - RNA, 19 nt, Artificial Sequence
  Description of Artificial Sequence: Synthetic oligonucleotide
  Antisense Strand to SEQ ID NO: 353999
auuccaaagacacagcuuu

SEQ ID NO: 354001 - RNA, 19 nt, Artificial Sequence
  Description of Artificial Sequence: Synthetic oligonucleotide
  Sense Strand Starting at position 449 of SEQ ID NO: 315347
gccauuucuugcguaccua

SEQ ID NO: 354002 - RNA, 19 nt, Artificial Sequence
  Description of Artificial Sequence: Synthetic oligonucleotide
  Antisense Strand to SEQ ID NO: 354001
uagguacgcaagaaauggc

SEQ ID NO: 354003 - RNA, 19 nt, Artificial Sequence
  Description of Artificial Sequence: Synthetic oligonucleotide
  Sense Strand Starting at position 449 of SEQ ID NO: 315366
cuuuguauucuugagucag

SEQ ID NO: 354004 - RNA, 19 nt, Artificial Sequence
  Description of Artificial Sequence: Synthetic oligonucleotide
  Antisense Strand to SEQ ID NO: 354003
cugacucaagaauacaaag

SEQ ID NO: 354005 - RNA, 19 nt, Artificial Sequence
  Description of Artificial Sequence: Synthetic oligonucleotide
  Sense Strand Starting at position 449 of SEQ ID NO: 315392
uagccuuggugaccaauau

SEQ ID NO: 354006 - RNA, 19 nt, Artificial Sequence
  Description of Artificial Sequence: Synthetic oligonucleotide
  Antisense Strand to SEQ ID NO: 354005
auauuggucaccaaggcua

SEQ ID NO: 354007 - RNA, 19 nt, Artificial Sequence
  Description of Artificial Sequence: Synthetic oligonucleotide
  Sense Strand Starting at position 449 of SEQ ID NO: 315400
gugaccaauaugggucaaa

SEQ ID NO: 354008 - RNA, 19 nt, Artificial Sequence
  Description of Artificial Sequence: Synthetic oligonucleotide
  Antisense Strand to SEQ ID NO: 354007
uuugacccauauuggucac

SEQ ID NO: 354009 - RNA, 19 nt, Artificial Sequence
  Description of Artificial Sequence: Synthetic oligonucleotide
  Sense Strand Starting at position 449 of SEQ ID NO: 315448
augggugauuccucucauc

SEQ ID NO: 354010 - RNA, 19 nt, Artificial Sequence
  Description of Artificial Sequence: Synthetic oligonucleotide
  Antisense Strand to SEQ ID NO: 354009
gaugagaggaaucacccau

SEQ ID NO: 354011 - RNA, 19 nt, Artificial Sequence
  Description of Artificial Sequence: Synthetic oligonucleotide
  Sense Strand Starting at position 449 of SEQ ID NO: 315559
gggcaaaggucaucggaac

SEQ ID NO: 354012 - RNA, 19 nt, Artificial Sequence
  Description of Artificial Sequence: Synthetic oligonucleotide
  Antisense Strand to SEQ ID NO: 354011
guuccgaugaccuuugccc

SEQ ID NO: 354013 - RNA, 19 nt, Artificial Sequence
  Description of Artificial Sequence: Synthetic oligonucleotide
  Sense Strand Starting at position 449 of SEQ ID NO: 315560
ggcaaaggucaucggaaca

SEQ ID NO: 354014 - RNA, 19 nt, Artificial Sequence
  Description of Artificial Sequence: Synthetic oligonucleotide
  Antisense Strand to SEQ ID NO: 354013
uguuccgaugaccuuugcc

SEQ ID NO: 354015 - RNA, 19 nt, Artificial Sequence
  Description of Artificial Sequence: Synthetic oligonucleotide
  Sense Strand Starting at position 449 of SEQ ID NO: 315587
aggaucacugccugagacu

SEQ ID NO: 354016 - RNA, 19 nt, Artificial Sequence
  Description of Artificial Sequence: Synthetic oligonucleotide
  Antisense Strand to SEQ ID NO: 354015
agucucaggcagugauccu

SEQ ID NO: 354017 - RNA, 19 nt, Artificial Sequence
  Description of Artificial Sequence: Synthetic oligonucleotide
  Sense Strand Starting at position 449 of SEQ ID NO: 315598
cugagacuguuaccaaucu

SEQ ID NO: 354018 - RNA, 19 nt, Artificial Sequence
  Description of Artificial Sequence: Synthetic oligonucleotide
  Antisense Strand to SEQ ID NO: 354017
agauugguaacagucucag

SEQ ID NO: 354019 - RNA, 19 nt, Artificial Sequence
  Description of Artificial Sequence: Synthetic oligonucleotide
  Sense Strand Starting at position 449 of SEQ ID NO: 315605
uguuaccaaucucuaaagu

SEQ ID NO: 354020 - RNA, 19 nt, Artificial Sequence
  Description of Artificial Sequence: Synthetic oligonucleotide
  Antisense Strand to SEQ ID NO: 354019
acuuuagagauugguaaca

SEQ ID NO: 354021 - RNA, 19 nt, Artificial Sequence
  Description of Artificial Sequence: Synthetic oligonucleotide
  Sense Strand Starting at position 449 of SEQ ID NO: 315606
guuaccaaucucuaaagua

SEQ ID NO: 354022 - RNA, 19 nt, Artificial Sequence
  Description of Artificial Sequence: Synthetic oligonucleotide
  Antisense Strand to SEQ ID NO: 354021
uacuuuagagauugguaac

SEQ ID NO: 354023 - RNA, 19 nt, Artificial Sequence
  Description of Artificial Sequence: Synthetic oligonucleotide
  Sense Strand Starting at position 449 of SEQ ID NO: 315856
gagauccaucacugugaca

SEQ ID NO: 354024 - RNA, 19 nt, Artificial Sequence
  Description of Artificial Sequence: Synthetic oligonucleotide
  Antisense Strand to SEQ ID NO: 354023
ugucacagugauggaucuc

SEQ ID NO: 354025 - RNA, 19 nt, Artificial Sequence
  Description of Artificial Sequence: Synthetic oligonucleotide
  Sense Strand Starting at position 449 of SEQ ID NO: 315867
cugugacaauuagcucuua

SEQ ID NO: 354026 - RNA, 19 nt, Artificial Sequence
  Description of Artificial Sequence: Synthetic oligonucleotide
  Antisense Strand to SEQ ID NO: 354025
uaagagcuaauugucacag

SEQ ID NO: 354027 - RNA, 19 nt, Artificial Sequence
  Description of Artificial Sequence: Synthetic oligonucleotide
  Sense Strand Starting at position 449 of SEQ ID NO: 315868
ugugacaauuagcucuuau

SEQ ID NO: 354028 - RNA, 19 nt, Artificial Sequence
  Description of Artificial Sequence: Synthetic oligonucleotide
  Antisense Strand to SEQ ID NO: 354027
auaagagcuaauugucaca

SEQ ID NO: 354029 - RNA, 19 nt, Artificial Sequence
  Description of Artificial Sequence: Synthetic oligonucleotide
  Sense Strand Starting at position 449 of SEQ ID NO: 315941
cagaacagugguugucaca

SEQ ID NO: 354030 - RNA, 19 nt, Artificial Sequence
  Description of Artificial Sequence: Synthetic oligonucleotide
  Antisense Strand to SEQ ID NO: 354029
ugugacaaccacuguucug

SEQ ID NO: 354031 - RNA, 19 nt, Artificial Sequence
  Description of Artificial Sequence: Synthetic oligonucleotide
  Sense Strand Starting at position 449 of SEQ ID NO: 315948
gugguugucacagaaggga

SEQ ID NO: 354032 - RNA, 19 nt, Artificial Sequence
  Description of Artificial Sequence: Synthetic oligonucleotide
  Antisense Strand to SEQ ID NO: 354031
ucccuucugugacaaccac

SEQ ID NO: 354033 - RNA, 19 nt, Artificial Sequence
  Description of Artificial Sequence: Synthetic oligonucleotide
  Sense Strand Starting at position 449 of SEQ ID NO: 316172
agauuaagcccuggauccu

SEQ ID NO: 354034 - RNA, 19 nt, Artificial Sequence
  Description of Artificial Sequence: Synthetic oligonucleotide
  Antisense Strand to SEQ ID NO: 354033
aggauccagggcuuaaucu

SEQ ID NO: 354035 - RNA, 19 nt, Artificial Sequence
  Description of Artificial Sequence: Synthetic oligonucleotide
  Sense Strand Starting at position 449 of SEQ ID NO: 316216
uuucucugucgggaaagga

SEQ ID NO: 354036 - RNA, 19 nt, Artificial Sequence
  Description of Artificial Sequence: Synthetic oligonucleotide
  Antisense Strand to SEQ ID NO: 354035
uccuuucccgacagagaaa

SEQ ID NO: 354037 - RNA, 19 nt, Artificial Sequence
  Description of Artificial Sequence: Synthetic oligonucleotide
  Sense Strand Starting at position 449 of SEQ ID NO: 316363
gagaauacaugugcuuuaa

SEQ ID NO: 354038 - RNA, 19 nt, Artificial Sequence
  Description of Artificial Sequence: Synthetic oligonucleotide
  Antisense Strand to SEQ ID NO: 354037
uuaaagcacauguauucuc

SEQ ID NO: 354039 - RNA, 19 nt, Artificial Sequence
  Description of Artificial Sequence: Synthetic oligonucleotide
  Sense Strand Starting at position 449 of SEQ ID NO: 316393
gcgguuaacgugucaacca

SEQ ID NO: 354040 - RNA, 19 nt, Artificial Sequence
  Description of Artificial Sequence: Synthetic oligonucleotide
  Antisense Strand to SEQ ID NO: 354039
ugguugacacguuaaccgc

SEQ ID NO: 354041 - RNA, 19 nt, Artificial Sequence
  Description of Artificial Sequence: Synthetic oligonucleotide
  Sense Strand Starting at position 449 of SEQ ID NO: 316602
ugaauaggucuuggccaaa

SEQ ID NO: 354042 - RNA, 19 nt, Artificial Sequence
  Description of Artificial Sequence: Synthetic oligonucleotide
  Antisense Strand to SEQ ID NO: 354041
uuuggccaagaccuauuca

SEQ ID NO: 354043 - RNA, 19 nt, Artificial Sequence
  Description of Artificial Sequence: Synthetic oligonucleotide
  Sense Strand Starting at position 449 of SEQ ID NO: 317508
guucgaguugaaucgugca

SEQ ID NO: 354044 - RNA, 19 nt, Artificial Sequence
  Description of Artificial Sequence: Synthetic oligonucleotide
  Antisense Strand to SEQ ID NO: 354043
ugcacgauucaacucgaac

SEQ ID NO: 354045 - RNA, 19 nt, Artificial Sequence
  Description of Artificial Sequence: Synthetic oligonucleotide
  Sense Strand Starting at position 449 of SEQ ID NO: 317555
uaccaaagaguccgaagaa

SEQ ID NO: 354046 - RNA, 19 nt, Artificial Sequence
  Description of Artificial Sequence: Synthetic oligonucleotide
  Antisense Strand to SEQ ID NO: 354045
uucuucggacucuuuggua

SEQ ID NO: 354047 - RNA, 19 nt, Artificial Sequence
  Description of Artificial Sequence: Synthetic oligonucleotide
  Sense Strand Starting at position 449 of SEQ ID NO: 317650
auguauuggugggccuaau

SEQ ID NO: 354048 - RNA, 19 nt, Artificial Sequence
  Description of Artificial Sequence: Synthetic oligonucleotide
  Antisense Strand to SEQ ID NO: 354047
auuaggcccaccaauacau

SEQ ID NO: 354049 - RNA, 19 nt, Artificial Sequence
  Description of Artificial Sequence: Synthetic oligonucleotide
  Sense Strand Starting at position 449 of SEQ ID NO: 317694
ucuuaauaucagggucuua

SEQ ID NO: 354050 - RNA, 19 nt, Artificial Sequence
  Description of Artificial Sequence: Synthetic oligonucleotide
  Antisense Strand to SEQ ID NO: 354049
uaagacccugauauuaaga

SEQ ID NO: 354051 - RNA, 19 nt, Artificial Sequence
  Description of Artificial Sequence: Synthetic oligonucleotide
  Sense Strand Starting at position 449 of SEQ ID NO: 317731
aaacuacguguuuaugaac

SEQ ID NO: 354052 - RNA, 19 nt, Artificial Sequence
  Description of Artificial Sequence: Synthetic oligonucleotide
  Antisense Strand to SEQ ID NO: 354051
guucauaaacacguaguuu

SEQ ID NO: 354053 - RNA, 19 nt, Artificial Sequence
  Description of Artificial Sequence: Synthetic oligonucleotide
  Sense Strand Starting at position 449 of SEQ ID NO: 317792
uuauaagauggguguugca

SEQ ID NO: 354054 - RNA, 19 nt, Artificial Sequence
  Description of Artificial Sequence: Synthetic oligonucleotide
  Antisense Strand to SEQ ID NO: 354053
ugcaacacccaucuuauaa

SEQ ID NO: 354055 - RNA, 19 nt, Artificial Sequence
  Description of Artificial Sequence: Synthetic oligonucleotide
  Sense Strand Starting at position 449 of SEQ ID NO: 317820
ggaacugaauacgauagaa

SEQ ID NO: 354056 - RNA, 19 nt, Artificial Sequence
  Description of Artificial Sequence: Synthetic oligonucleotide
  Antisense Strand to SEQ ID NO: 354055
uucuaucguauucaguucc

SEQ ID NO: 354057 - RNA, 19 nt, Artificial Sequence
  Description of Artificial Sequence: Synthetic oligonucleotide
  Sense Strand Starting at position 449 of SEQ ID NO: 318014
gugguauccagucaggaac

SEQ ID NO: 354058 - RNA, 19 nt, Artificial Sequence
  Description of Artificial Sequence: Synthetic oligonucleotide
  Antisense Strand to SEQ ID NO: 354057
guuccugacuggauaccac

SEQ ID NO: 354059 - RNA, 19 nt, Artificial Sequence
  Description of Artificial Sequence: Synthetic oligonucleotide
  Sense Strand Starting at position 449 of SEQ ID NO: 318070
guugucuggguacaauaau

SEQ ID NO: 354060 - RNA, 19 nt, Artificial Sequence
  Description of Artificial Sequence: Synthetic oligonucleotide
  Antisense Strand to SEQ ID NO: 354059
auuauuguacccagacaac

SEQ ID NO: 354061 - RNA, 19 nt, Artificial Sequence
  Description of Artificial Sequence: Synthetic oligonucleotide
  Sense Strand Starting at position 449 of SEQ ID NO: 318235
agaagugauuuccacucuu

SEQ ID NO: 354062 - RNA, 19 nt, Artificial Sequence
  Description of Artificial Sequence: Synthetic oligonucleotide
  Antisense Strand to SEQ ID NO: 354061
aagaguggaaaucacuucu

SEQ ID NO: 354063 - RNA, 19 nt, Artificial Sequence
  Description of Artificial Sequence: Synthetic oligonucleotide
  Sense Strand Starting at position 449 of SEQ ID NO: 318319
aauguaguggucuaagaga

SEQ ID NO: 354064 - RNA, 19 nt, Artificial Sequence
  Description of Artificial Sequence: Synthetic oligonucleotide
  Antisense Strand to SEQ ID NO: 354063
ucucuuagaccacuacauu

SEQ ID NO: 354065 - RNA, 19 nt, Artificial Sequence
  Description of Artificial Sequence: Synthetic oligonucleotide
  Sense Strand Starting at position 449 of SEQ ID NO: 318403
uuggucaucugguccaaua

SEQ ID NO: 354066 - RNA, 19 nt, Artificial Sequence
  Description of Artificial Sequence: Synthetic oligonucleotide
  Antisense Strand to SEQ ID NO: 354065
uauuggaccagaugaccaa

SEQ ID NO: 354067 - RNA, 19 nt, Artificial Sequence
  Description of Artificial Sequence: Synthetic oligonucleotide
  Sense Strand Starting at position 449 of SEQ ID NO: 318405
ggucaucugguccaauauc

SEQ ID NO: 354068 - RNA, 19 nt, Artificial Sequence
  Description of Artificial Sequence: Synthetic oligonucleotide
  Antisense Strand to SEQ ID NO: 354067
gauauuggaccagaugacc

SEQ ID NO: 354069 - RNA, 19 nt, Artificial Sequence
  Description of Artificial Sequence: Synthetic oligonucleotide
  Sense Strand Starting at position 449 of SEQ ID NO: 318413
gguccaauauccuuguuug

SEQ ID NO: 354070 - RNA, 19 nt, Artificial Sequence
  Description of Artificial Sequence: Synthetic oligonucleotide
  Antisense Strand to SEQ ID NO: 354069
caaacaaggauauuggacc

SEQ ID NO: 354071 - RNA, 19 nt, Artificial Sequence
  Description of Artificial Sequence: Synthetic oligonucleotide
  Sense Strand Starting at position 449 of SEQ ID NO: 318414
guccaauauccuuguuuga

SEQ ID NO: 354072 - RNA, 19 nt, Artificial Sequence
  Description of Artificial Sequence: Synthetic oligonucleotide
  Antisense Strand to SEQ ID NO: 354071
ucaaacaaggauauuggac

SEQ ID NO: 354073 - RNA, 19 nt, Artificial Sequence
  Description of Artificial Sequence: Synthetic oligonucleotide
  Sense Strand Starting at position 449 of SEQ ID NO: 318682
agucuaggccuccagaauu

SEQ ID NO: 354074 - RNA, 19 nt, Artificial Sequence
  Description of Artificial Sequence: Synthetic oligonucleotide
  Antisense Strand to SEQ ID NO: 354073
aauucuggaggccuagacu

SEQ ID NO: 354075 - RNA, 19 nt, Artificial Sequence
  Description of Artificial Sequence: Synthetic oligonucleotide
  Sense Strand Starting at position 449 of SEQ ID NO: 318749
ucagcuaauuugcuaaagu

SEQ ID NO: 354076 - RNA, 19 nt, Artificial Sequence
  Description of Artificial Sequence: Synthetic oligonucleotide
  Antisense Strand to SEQ ID NO: 354075
acuuuagcaaauuagcuga

SEQ ID NO: 354077 - RNA, 19 nt, Artificial Sequence
  Description of Artificial Sequence: Synthetic oligonucleotide
  Sense Strand Starting at position 449 of SEQ ID NO: 318919
cguguucagcuaucccgaa

SEQ ID NO: 354078 - RNA, 19 nt, Artificial Sequence
  Description of Artificial Sequence: Synthetic oligonucleotide
  Antisense Strand to SEQ ID NO: 354077
uucgggauagcugaacacg

SEQ ID NO: 354079 - RNA, 19 nt, Artificial Sequence
  Description of Artificial Sequence: Synthetic oligonucleotide
  Sense Strand Starting at position 450 of SEQ ID NO: 315245
ucaugucuuagcugggauu

SEQ ID NO: 354080 - RNA, 19 nt, Artificial Sequence
  Description of Artificial Sequence: Synthetic oligonucleotide
  Antisense Strand to SEQ ID NO: 354079
aaucccagcuaagacauga

SEQ ID NO: 354081 - RNA, 19 nt, Artificial Sequence
  Description of Artificial Sequence: Synthetic oligonucleotide
  Sense Strand Starting at position 450 of SEQ ID NO: 315246
caugucuuagcugggauua

SEQ ID NO: 354082 - RNA, 19 nt, Artificial Sequence
  Description of Artificial Sequence: Synthetic oligonucleotide
  Antisense Strand to SEQ ID NO: 354081
uaaucccagcuaagacaug

SEQ ID NO: 354083 - RNA, 19 nt, Artificial Sequence
  Description of Artificial Sequence: Synthetic oligonucleotide
  Sense Strand Starting at position 450 of SEQ ID NO: 315502
uucugaucauuugcuuagu

SEQ ID NO: 354084 - RNA, 19 nt, Artificial Sequence
  Description of Artificial Sequence: Synthetic oligonucleotide
  Antisense Strand to SEQ ID NO: 354083
acuaagcaaaugaucagaa

SEQ ID NO: 354085 - RNA, 19 nt, Artificial Sequence
  Description of Artificial Sequence: Synthetic oligonucleotide
  Sense Strand Starting at position 450 of SEQ ID NO: 315537
gacuguggcaaucguagaa

SEQ ID NO: 354086 - RNA, 19 nt, Artificial Sequence
  Description of Artificial Sequence: Synthetic oligonucleotide
  Antisense Strand to SEQ ID NO: 354085
uucuacgauugccacaguc

SEQ ID NO: 354087 - RNA, 19 nt, Artificial Sequence
  Description of Artificial Sequence: Synthetic oligonucleotide
  Sense Strand Starting at position 450 of SEQ ID NO: 315541
guggcaaucguagaaauca

SEQ ID NO: 354088 - RNA, 19 nt, Artificial Sequence
  Description of Artificial Sequence: Synthetic oligonucleotide
  Antisense Strand to SEQ ID NO: 354087
ugauuucuacgauugccac

SEQ ID NO: 354089 - RNA, 19 nt, Artificial Sequence
  Description of Artificial Sequence: Synthetic oligonucleotide
  Sense Strand Starting at position 450 of SEQ ID NO: 315706
ggaauccacuagucaggua

SEQ ID NO: 354090 - RNA, 19 nt, Artificial Sequence
  Description of Artificial Sequence: Synthetic oligonucleotide
  Antisense Strand to SEQ ID NO: 354089
uaccugacuaguggauucc

SEQ ID NO: 354091 - RNA, 19 nt, Artificial Sequence
  Description of Artificial Sequence: Synthetic oligonucleotide
  Sense Strand Starting at position 450 of SEQ ID NO: 315860
uagugucagggcuggauuu

SEQ ID NO: 354092 - RNA, 19 nt, Artificial Sequence
  Description of Artificial Sequence: Synthetic oligonucleotide
  Antisense Strand to SEQ ID NO: 354091
aaauccagcccugacacua

SEQ ID NO: 354093 - RNA, 19 nt, Artificial Sequence
  Description of Artificial Sequence: Synthetic oligonucleotide
  Sense Strand Starting at position 450 of SEQ ID NO: 317084
cguugugagcaguucgacu

SEQ ID NO: 354094 - RNA, 19 nt, Artificial Sequence
  Description of Artificial Sequence: Synthetic oligonucleotide
  Antisense Strand to SEQ ID NO: 354093
agucgaacugcucacaacg

SEQ ID NO: 354095 - RNA, 19 nt, Artificial Sequence
  Description of Artificial Sequence: Synthetic oligonucleotide
  Sense Strand Starting at position 450 of SEQ ID NO: 317423
aacguuucccgugucugua

SEQ ID NO: 354096 - RNA, 19 nt, Artificial Sequence
  Description of Artificial Sequence: Synthetic oligonucleotide
  Antisense Strand to SEQ ID NO: 354095
uacagacacgggaaacguu

SEQ ID NO: 354097 - RNA, 19 nt, Artificial Sequence
  Description of Artificial Sequence: Synthetic oligonucleotide
  Sense Strand Starting at position 450 of SEQ ID NO: 317435
gucuguaccuucucucaau

SEQ ID NO: 354098 - RNA, 19 nt, Artificial Sequence
  Description of Artificial Sequence: Synthetic oligonucleotide
  Antisense Strand to SEQ ID NO: 354097
auugagagaagguacagac

SEQ ID NO: 354099 - RNA, 19 nt, Artificial Sequence
  Description of Artificial Sequence: Synthetic oligonucleotide
  Sense Strand Starting at position 450 of SEQ ID NO: 317578
gauagaaggguucguuuac

SEQ ID NO: 354100 - RNA, 19 nt, Artificial Sequence
  Description of Artificial Sequence: Synthetic oligonucleotide
  Antisense Strand to SEQ ID NO: 354099
guaaacgaacccuucuauc

SEQ ID NO: 354101 - RNA, 19 nt, Artificial Sequence
  Description of Artificial Sequence: Synthetic oligonucleotide
  Sense Strand Starting at position 450 of SEQ ID NO: 317579
auagaaggguucguuuacu

SEQ ID NO: 354102 - RNA, 19 nt, Artificial Sequence
  Description of Artificial Sequence: Synthetic oligonucleotide
  Antisense Strand to SEQ ID NO: 354101
aguaaacgaacccuucuau

SEQ ID NO: 354103 - RNA, 19 nt, Artificial Sequence
  Description of Artificial Sequence: Synthetic oligonucleotide
  Sense Strand Starting at position 450 of SEQ ID NO: 317599
uuuaaucaucccuacggga

SEQ ID NO: 354104 - RNA, 19 nt, Artificial Sequence
  Description of Artificial Sequence: Synthetic oligonucleotide
  Antisense Strand to SEQ ID NO: 354103
ucccguagggaugauuaaa

SEQ ID NO: 354105 - RNA, 19 nt, Artificial Sequence
  Description of Artificial Sequence: Synthetic oligonucleotide
  Sense Strand Starting at position 450 of SEQ ID NO: 317636
ugaauuccugcaugauaac

SEQ ID NO: 354106 - RNA, 19 nt, Artificial Sequence
  Description of Artificial Sequence: Synthetic oligonucleotide
  Antisense Strand to SEQ ID NO: 354105
guuaucaugcaggaauuca

SEQ ID NO: 354107 - RNA, 19 nt, Artificial Sequence
  Description of Artificial Sequence: Synthetic oligonucleotide
  Sense Strand Starting at position 450 of SEQ ID NO: 317712
ugaaguaacugcguuuaug

SEQ ID NO: 354108 - RNA, 19 nt, Artificial Sequence
  Description of Artificial Sequence: Synthetic oligonucleotide
  Antisense Strand to SEQ ID NO: 354107
cauaaacgcaguuacuuca

SEQ ID NO: 354109 - RNA, 19 nt, Artificial Sequence
  Description of Artificial Sequence: Synthetic oligonucleotide
  Sense Strand Starting at position 450 of SEQ ID NO: 317723
cguuuauguggaagcguuu

SEQ ID NO: 354110 - RNA, 19 nt, Artificial Sequence
  Description of Artificial Sequence: Synthetic oligonucleotide
  Antisense Strand to SEQ ID NO: 354109
aaacgcuuccacauaaacg

SEQ ID NO: 354111 - RNA, 19 nt, Artificial Sequence
  Description of Artificial Sequence: Synthetic oligonucleotide
  Sense Strand Starting at position 450 of SEQ ID NO: 317729
uguggaagcguuuagguua

SEQ ID NO: 354112 - RNA, 19 nt, Artificial Sequence
  Description of Artificial Sequence: Synthetic oligonucleotide
  Antisense Strand to SEQ ID NO: 354111
uaaccuaaacgcuuccaca

SEQ ID NO: 354113 - RNA, 19 nt, Artificial Sequence
  Description of Artificial Sequence: Synthetic oligonucleotide
  Sense Strand Starting at position 450 of SEQ ID NO: 317732
ggaagcguuuagguuauau

SEQ ID NO: 354114 - RNA, 19 nt, Artificial Sequence
  Description of Artificial Sequence: Synthetic oligonucleotide
  Antisense Strand to SEQ ID NO: 354113
auauaaccuaaacgcuucc

SEQ ID NO: 354115 - RNA, 19 nt, Artificial Sequence
  Description of Artificial Sequence: Synthetic oligonucleotide
  Sense Strand Starting at position 450 of SEQ ID NO: 317734
aagcguuuagguuauauca

SEQ ID NO: 354116 - RNA, 19 nt, Artificial Sequence
  Description of Artificial Sequence: Synthetic oligonucleotide
  Antisense Strand to SEQ ID NO: 354115
ugauauaaccuaaacgcuu

SEQ ID NO: 354117 - RNA, 19 nt, Artificial Sequence
  Description of Artificial Sequence: Synthetic oligonucleotide
  Sense Strand Starting at position 450 of SEQ ID NO: 317775
cucggauauuuacaucuaa

SEQ ID NO: 354118 - RNA, 19 nt, Artificial Sequence
  Description of Artificial Sequence: Synthetic oligonucleotide
  Antisense Strand to SEQ ID NO: 354117
uuagauguaaauauccgag

SEQ ID NO: 354119 - RNA, 19 nt, Artificial Sequence
  Description of Artificial Sequence: Synthetic oligonucleotide
  Sense Strand Starting at position 450 of SEQ ID NO: 317869
auuccuuuagcauggaaac

SEQ ID NO: 354120 - RNA, 19 nt, Artificial Sequence
  Description of Artificial Sequence: Synthetic oligonucleotide
  Antisense Strand to SEQ ID NO: 354119
guuuccaugcuaaaggaau

SEQ ID NO: 354121 - RNA, 19 nt, Artificial Sequence
  Description of Artificial Sequence: Synthetic oligonucleotide
  Sense Strand Starting at position 450 of SEQ ID NO: 317906
aguagccuuugcuuaauuu

SEQ ID NO: 354122 - RNA, 19 nt, Artificial Sequence
  Description of Artificial Sequence: Synthetic oligonucleotide
  Antisense Strand to SEQ ID NO: 354121
aaauuaagcaaaggcuacu

SEQ ID NO: 354123 - RNA, 19 nt, Artificial Sequence
  Description of Artificial Sequence: Synthetic oligonucleotide
  Sense Strand Starting at position 450 of SEQ ID NO: 317907
guagccuuugcuuaauuua

SEQ ID NO: 354124 - RNA, 19 nt, Artificial Sequence
  Description of Artificial Sequence: Synthetic oligonucleotide
  Antisense Strand to SEQ ID NO: 354123
uaaauuaagcaaaggcuac

SEQ ID NO: 354125 - RNA, 19 nt, Artificial Sequence
  Description of Artificial Sequence: Synthetic oligonucleotide
  Sense Strand Starting at position 450 of SEQ ID NO: 317914
uugcuuaauuuagucaugu

SEQ ID NO: 354126 - RNA, 19 nt, Artificial Sequence
  Description of Artificial Sequence: Synthetic oligonucleotide
  Antisense Strand to SEQ ID NO: 354125
acaugacuaaauuaagcaa

SEQ ID NO: 354127 - RNA, 19 nt, Artificial Sequence
  Description of Artificial Sequence: Synthetic oligonucleotide
  Sense Strand Starting at position 450 of SEQ ID NO: 317915
ugcuuaauuuagucauguc

SEQ ID NO: 354128 - RNA, 19 nt, Artificial Sequence
  Description of Artificial Sequence: Synthetic oligonucleotide
  Antisense Strand to SEQ ID NO: 354127
gacaugacuaaauuaagca

SEQ ID NO: 354129 - RNA, 19 nt, Artificial Sequence
  Description of Artificial Sequence: Synthetic oligonucleotide
  Sense Strand Starting at position 450 of SEQ ID NO: 317936
aaugucauguggcuuccaa

SEQ ID NO: 354130 - RNA, 19 nt, Artificial Sequence
  Description of Artificial Sequence: Synthetic oligonucleotide
  Antisense Strand to SEQ ID NO: 354129
uuggaagccacaugacauu

SEQ ID NO: 354131 - RNA, 19 nt, Artificial Sequence
  Description of Artificial Sequence: Synthetic oligonucleotide
  Sense Strand Starting at position 450 of SEQ ID NO: 318136
gaacguuuccuguauaugu

SEQ ID NO: 354132 - RNA, 19 nt, Artificial Sequence
  Description of Artificial Sequence: Synthetic oligonucleotide
  Antisense Strand to SEQ ID NO: 354131
acauauacaggaaacguuc

SEQ ID NO: 354133 - RNA, 19 nt, Artificial Sequence
  Description of Artificial Sequence: Synthetic oligonucleotide
  Sense Strand Starting at position 450 of SEQ ID NO: 318147
guauauguagcauggauaa

SEQ ID NO: 354134 - RNA, 19 nt, Artificial Sequence
  Description of Artificial Sequence: Synthetic oligonucleotide
  Antisense Strand to SEQ ID NO: 354133
uuauccaugcuacauauac

SEQ ID NO: 354135 - RNA, 19 nt, Artificial Sequence
  Description of Artificial Sequence: Synthetic oligonucleotide
  Sense Strand Starting at position 450 of SEQ ID NO: 318347
auaacaauauaggaagagu

SEQ ID NO: 354136 - RNA, 19 nt, Artificial Sequence
  Description of Artificial Sequence: Synthetic oligonucleotide
  Antisense Strand to SEQ ID NO: 354135
acucuuccuauauuguuau

SEQ ID NO: 354137 - RNA, 19 nt, Artificial Sequence
  Description of Artificial Sequence: Synthetic oligonucleotide
  Sense Strand Starting at position 450 of SEQ ID NO: 318398
uuuaauaguggaggaaagu

SEQ ID NO: 354138 - RNA, 19 nt, Artificial Sequence
  Description of Artificial Sequence: Synthetic oligonucleotide
  Antisense Strand to SEQ ID NO: 354137
acuuuccuccacuauuaaa

SEQ ID NO: 354139 - RNA, 19 nt, Artificial Sequence
  Description of Artificial Sequence: Synthetic oligonucleotide
  Sense Strand Starting at position 450 of SEQ ID NO: 318413
aaguuuggacucggaaacu

SEQ ID NO: 354140 - RNA, 19 nt, Artificial Sequence
  Description of Artificial Sequence: Synthetic oligonucleotide
  Antisense Strand to SEQ ID NO: 354139
aguuuccgaguccaaacuu

SEQ ID NO: 354141 - RNA, 19 nt, Artificial Sequence
  Description of Artificial Sequence: Synthetic oligonucleotide
  Sense Strand Starting at position 450 of SEQ ID NO: 318444
uuggcaugucaaggagaau

SEQ ID NO: 354142 - RNA, 19 nt, Artificial Sequence
  Description of Artificial Sequence: Synthetic oligonucleotide
  Antisense Strand to SEQ ID NO: 354141
auucuccuugacaugccaa

SEQ ID NO: 354143 - RNA, 19 nt, Artificial Sequence
  Description of Artificial Sequence: Synthetic oligonucleotide
  Sense Strand Starting at position 450 of SEQ ID NO: 318453
caaggagaauaucauguau

SEQ ID NO: 354144 - RNA, 19 nt, Artificial Sequence
  Description of Artificial Sequence: Synthetic oligonucleotide
  Antisense Strand to SEQ ID NO: 354143
auacaugauauucuccuug

SEQ ID NO: 354145 - RNA, 19 nt, Artificial Sequence
  Description of Artificial Sequence: Synthetic oligonucleotide
  Sense Strand Starting at position 450 of SEQ ID NO: 318476
uuagcauaaugugcuugau

SEQ ID NO: 354146 - RNA, 19 nt, Artificial Sequence
  Description of Artificial Sequence: Synthetic oligonucleotide
  Antisense Strand to SEQ ID NO: 354145
aucaagcacauuaugcuaa

SEQ ID NO: 354147 - RNA, 19 nt, Artificial Sequence
  Description of Artificial Sequence: Synthetic oligonucleotide
  Sense Strand Starting at position 450 of SEQ ID NO: 318478
agcauaaugugcuugauuu

SEQ ID NO: 354148 - RNA, 19 nt, Artificial Sequence
  Description of Artificial Sequence: Synthetic oligonucleotide
  Antisense Strand to SEQ ID NO: 354147
aaaucaagcacauuaugcu

SEQ ID NO: 354149 - RNA, 19 nt, Artificial Sequence
  Description of Artificial Sequence: Synthetic oligonucleotide
  Sense Strand Starting at position 450 of SEQ ID NO: 319095
gcucauuugugagaguaaa

SEQ ID NO: 354150 - RNA, 19 nt, Artificial Sequence
  Description of Artificial Sequence: Synthetic oligonucleotide
  Antisense Strand to SEQ ID NO: 354149
uuuacucucacaaaugagc

SEQ ID NO: 354151 - RNA, 19 nt, Artificial Sequence
  Description of Artificial Sequence: Synthetic oligonucleotide
  Sense Strand Starting at position 450 of SEQ ID NO: 319117
cagagaggauccuuagguu

SEQ ID NO: 354152 - RNA, 19 nt, Artificial Sequence
  Description of Artificial Sequence: Synthetic oligonucleotide
  Antisense Strand to SEQ ID NO: 354151
aaccuaaggauccucucug

SEQ ID NO: 354153 - RNA, 19 nt, Artificial Sequence
  Description of Artificial Sequence: Synthetic oligonucleotide
  Sense Strand Starting at position 450 of SEQ ID NO: 319121
gaggauccuuagguuaagu

SEQ ID NO: 354154 - RNA, 19 nt, Artificial Sequence
  Description of Artificial Sequence: Synthetic oligonucleotide
  Antisense Strand to SEQ ID NO: 354153
acuuaaccuaaggauccuc

SEQ ID NO: 354155 - RNA, 19 nt, Artificial Sequence
  Description of Artificial Sequence: Synthetic oligonucleotide
  Sense Strand Starting at position 450 of SEQ ID NO: 319126
uccuuagguuaaguucuua

SEQ ID NO: 354156 - RNA, 19 nt, Artificial Sequence
  Description of Artificial Sequence: Synthetic oligonucleotide
  Antisense Strand to SEQ ID NO: 354155
uaagaacuuaaccuaagga

SEQ ID NO: 354157 - RNA, 19 nt, Artificial Sequence
  Description of Artificial Sequence: Synthetic oligonucleotide
  Sense Strand Starting at position 450 of SEQ ID NO: 319197
agguauuuauaggacagau

SEQ ID NO: 354158 - RNA, 19 nt, Artificial Sequence
  Description of Artificial Sequence: Synthetic oligonucleotide
  Antisense Strand to SEQ ID NO: 354157
aucuguccuauaaauaccu

SEQ ID NO: 354159 - RNA, 19 nt, Artificial Sequence
  Description of Artificial Sequence: Synthetic oligonucleotide
  Sense Strand Starting at position 451 of SEQ ID NO: 315293
acauuauuuguuggccuua

SEQ ID NO: 354160 - RNA, 19 nt, Artificial Sequence
  Description of Artificial Sequence: Synthetic oligonucleotide
  Antisense Strand to SEQ ID NO: 354159
uaaggccaacaaauaaugu

SEQ ID NO: 354161 - RNA, 19 nt, Artificial Sequence
  Description of Artificial Sequence: Synthetic oligonucleotide
  Sense Strand Starting at position 451 of SEQ ID NO: 315445
ucaugucuuagcugggauu

SEQ ID NO: 354162 - RNA, 19 nt, Artificial Sequence
  Description of Artificial Sequence: Synthetic oligonucleotide
  Antisense Strand to SEQ ID NO: 354161
aaucccagcuaagacauga

SEQ ID NO: 354163 - RNA, 19 nt, Artificial Sequence
  Description of Artificial Sequence: Synthetic oligonucleotide
  Sense Strand Starting at position 451 of SEQ ID NO: 315446
caugucuuagcugggauua

SEQ ID NO: 354164 - RNA, 19 nt, Artificial Sequence
  Description of Artificial Sequence: Synthetic oligonucleotide
  Antisense Strand to SEQ ID NO: 354163
uaaucccagcuaagacaug

SEQ ID NO: 354165 - RNA, 19 nt, Artificial Sequence
  Description of Artificial Sequence: Synthetic oligonucleotide
  Sense Strand Starting at position 451 of SEQ ID NO: 315702
uucugaucauuugcuuagu

SEQ ID NO: 354166 - RNA, 19 nt, Artificial Sequence
  Description of Artificial Sequence: Synthetic oligonucleotide
  Antisense Strand to SEQ ID NO: 354165
acuaagcaaaugaucagaa

SEQ ID NO: 354167 - RNA, 19 nt, Artificial Sequence
  Description of Artificial Sequence: Synthetic oligonucleotide
  Sense Strand Starting at position 451 of SEQ ID NO: 315737
gacuguggcaaucguagaa

SEQ ID NO: 354168 - RNA, 19 nt, Artificial Sequence
  Description of Artificial Sequence: Synthetic oligonucleotide
  Antisense Strand to SEQ ID NO: 354167
uucuacgauugccacaguc

SEQ ID NO: 354169 - RNA, 19 nt, Artificial Sequence
  Description of Artificial Sequence: Synthetic oligonucleotide
  Sense Strand Starting at position 451 of SEQ ID NO: 315741
guggcaaucguagaaauca

SEQ ID NO: 354170 - RNA, 19 nt, Artificial Sequence
  Description of Artificial Sequence: Synthetic oligonucleotide
  Antisense Strand to SEQ ID NO: 354169
ugauuucuacgauugccac

SEQ ID NO: 354171 - RNA, 19 nt, Artificial Sequence
  Description of Artificial Sequence: Synthetic oligonucleotide
  Sense Strand Starting at position 451 of SEQ ID NO: 315906
ggaauccacuagucaggua

SEQ ID NO: 354172 - RNA, 19 nt, Artificial Sequence
  Description of Artificial Sequence: Synthetic oligonucleotide
  Antisense Strand to SEQ ID NO: 354171
uaccugacuaguggauucc

SEQ ID NO: 354173 - RNA, 19 nt, Artificial Sequence
  Description of Artificial Sequence: Synthetic oligonucleotide
  Sense Strand Starting at position 451 of SEQ ID NO: 316060
uagugucagggcuggauuu

SEQ ID NO: 354174 - RNA, 19 nt, Artificial Sequence
  Description of Artificial Sequence: Synthetic oligonucleotide
  Antisense Strand to SEQ ID NO: 354173
aaauccagcccugacacua

SEQ ID NO: 354175 - RNA, 19 nt, Artificial Sequence
  Description of Artificial Sequence: Synthetic oligonucleotide
  Sense Strand Starting at position 451 of SEQ ID NO: 317284
cguugugagcaguucgacu

SEQ ID NO: 354176 - RNA, 19 nt, Artificial Sequence
  Description of Artificial Sequence: Synthetic oligonucleotide
  Antisense Strand to SEQ ID NO: 354175
agucgaacugcucacaacg

SEQ ID NO: 354177 - RNA, 19 nt, Artificial Sequence
  Description of Artificial Sequence: Synthetic oligonucleotide
  Sense Strand Starting at position 451 of SEQ ID NO: 317623
aacguuucccgugucugua

SEQ ID NO: 354178 - RNA, 19 nt, Artificial Sequence
  Description of Artificial Sequence: Synthetic oligonucleotide
  Antisense Strand to SEQ ID NO: 354177
uacagacacgggaaacguu

SEQ ID NO: 354179 - RNA, 19 nt, Artificial Sequence
  Description of Artificial Sequence: Synthetic oligonucleotide
  Sense Strand Starting at position 451 of SEQ ID NO: 317635
gucuguaccuucucucaau

SEQ ID NO: 354180 - RNA, 19 nt, Artificial Sequence
  Description of Artificial Sequence: Synthetic oligonucleotide
  Antisense Strand to SEQ ID NO: 354179
auugagagaagguacagac

SEQ ID NO: 354181 - RNA, 19 nt, Artificial Sequence
  Description of Artificial Sequence: Synthetic oligonucleotide
  Sense Strand Starting at position 451 of SEQ ID NO: 317778
gauagaaggguucguuuac

SEQ ID NO: 354182 - RNA, 19 nt, Artificial Sequence
  Description of Artificial Sequence: Synthetic oligonucleotide
  Antisense Strand to SEQ ID NO: 354181
guaaacgaacccuucuauc

SEQ ID NO: 354183 - RNA, 19 nt, Artificial Sequence
  Description of Artificial Sequence: Synthetic oligonucleotide
  Sense Strand Starting at position 451 of SEQ ID NO: 317779
auagaaggguucguuuacu

SEQ ID NO: 354184 - RNA, 19 nt, Artificial Sequence
  Description of Artificial Sequence: Synthetic oligonucleotide
  Antisense Strand to SEQ ID NO: 354183
aguaaacgaacccuucuau

SEQ ID NO: 354185 - RNA, 19 nt, Artificial Sequence
  Description of Artificial Sequence: Synthetic oligonucleotide
  Sense Strand Starting at position 451 of SEQ ID NO: 317799
uuuaaucaucccuacggga

SEQ ID NO: 354186 - RNA, 19 nt, Artificial Sequence
  Description of Artificial Sequence: Synthetic oligonucleotide
  Antisense Strand to SEQ ID NO: 354185
ucccguagggaugauuaaa

SEQ ID NO: 354187 - RNA, 19 nt, Artificial Sequence
  Description of Artificial Sequence: Synthetic oligonucleotide
  Sense Strand Starting at position 451 of SEQ ID NO: 317836
ugaauuccugcaugauaac

SEQ ID NO: 354188 - RNA, 19 nt, Artificial Sequence
  Description of Artificial Sequence: Synthetic oligonucleotide
  Antisense Strand to SEQ ID NO: 354187
guuaucaugcaggaauuca

SEQ ID NO: 354189 - RNA, 19 nt, Artificial Sequence
  Description of Artificial Sequence: Synthetic oligonucleotide
  Sense Strand Starting at position 451 of SEQ ID NO: 317912
ugaaguaacugcguuuaug

SEQ ID NO: 354190 - RNA, 19 nt, Artificial Sequence
  Description of Artificial Sequence: Synthetic oligonucleotide
  Antisense Strand to SEQ ID NO: 354189
cauaaacgcaguuacuuca

SEQ ID NO: 354191 - RNA, 19 nt, Artificial Sequence
  Description of Artificial Sequence: Synthetic oligonucleotide
  Sense Strand Starting at position 451 of SEQ ID NO: 317923
cguuuauguggaagcguuu

SEQ ID NO: 354192 - RNA, 19 nt, Artificial Sequence
  Description of Artificial Sequence: Synthetic oligonucleotide
  Antisense Strand to SEQ ID NO: 354191
aaacgcuuccacauaaacg

SEQ ID NO: 354193 - RNA, 19 nt, Artificial Sequence
  Description of Artificial Sequence: Synthetic oligonucleotide
  Sense Strand Starting at position 451 of SEQ ID NO: 317929
uguggaagcguuuagguua

SEQ ID NO: 354194 - RNA, 19 nt, Artificial Sequence
  Description of Artificial Sequence: Synthetic oligonucleotide
  Antisense Strand to SEQ ID NO: 354193
uaaccuaaacgcuuccaca

SEQ ID NO: 354195 - RNA, 19 nt, Artificial Sequence
  Description of Artificial Sequence: Synthetic oligonucleotide
  Sense Strand Starting at position 451 of SEQ ID NO: 317932
ggaagcguuuagguuauau

SEQ ID NO: 354196 - RNA, 19 nt, Artificial Sequence
  Description of Artificial Sequence: Synthetic oligonucleotide
  Antisense Strand to SEQ ID NO: 354195
auauaaccuaaacgcuucc

SEQ ID NO: 354197 - RNA, 19 nt, Artificial Sequence
  Description of Artificial Sequence: Synthetic oligonucleotide
  Sense Strand Starting at position 451 of SEQ ID NO: 317934
aagcguuuagguuauauca

SEQ ID NO: 354198 - RNA, 19 nt, Artificial Sequence
  Description of Artificial Sequence: Synthetic oligonucleotide
  Antisense Strand to SEQ ID NO: 354197
ugauauaaccuaaacgcuu

SEQ ID NO: 354199 - RNA, 19 nt, Artificial Sequence
  Description of Artificial Sequence: Synthetic oligonucleotide
  Sense Strand Starting at position 451 of SEQ ID NO: 317975
cucggauauuuacaucuaa

SEQ ID NO: 354200 - RNA, 19 nt, Artificial Sequence
  Description of Artificial Sequence: Synthetic oligonucleotide
  Antisense Strand to SEQ ID NO: 354199
uuagauguaaauauccgag

SEQ ID NO: 354201 - RNA, 19 nt, Artificial Sequence
  Description of Artificial Sequence: Synthetic oligonucleotide
  Sense Strand Starting at position 451 of SEQ ID NO: 318021
cuagaaaucucugucgccu

SEQ ID NO: 354202 - RNA, 19 nt, Artificial Sequence
  Description of Artificial Sequence: Synthetic oligonucleotide
  Antisense Strand to SEQ ID NO: 354201
aggcgacagagauuucuag

SEQ ID NO: 354203 - RNA, 19 nt, Artificial Sequence
  Description of Artificial Sequence: Synthetic oligonucleotide
  Sense Strand Starting at position 451 of SEQ ID NO: 318069
auuccuuuagcauggaaac

SEQ ID NO: 354204 - RNA, 19 nt, Artificial Sequence
  Description of Artificial Sequence: Synthetic oligonucleotide
  Antisense Strand to SEQ ID NO: 354203
guuuccaugcuaaaggaau

SEQ ID NO: 354205 - RNA, 19 nt, Artificial Sequence
  Description of Artificial Sequence: Synthetic oligonucleotide
  Sense Strand Starting at position 451 of SEQ ID NO: 318104
acaguagccuuugcuuaau

SEQ ID NO: 354206 - RNA, 19 nt, Artificial Sequence
  Description of Artificial Sequence: Synthetic oligonucleotide
  Antisense Strand to SEQ ID NO: 354205
auuaagcaaaggcuacugu

SEQ ID NO: 354207 - RNA, 19 nt, Artificial Sequence
  Description of Artificial Sequence: Synthetic oligonucleotide
  Sense Strand Starting at position 451 of SEQ ID NO: 318106
aguagccuuugcuuaauuu

SEQ ID NO: 354208 - RNA, 19 nt, Artificial Sequence
  Description of Artificial Sequence: Synthetic oligonucleotide
  Antisense Strand to SEQ ID NO: 354207
aaauuaagcaaaggcuacu

SEQ ID NO: 354209 - RNA, 19 nt, Artificial Sequence
  Description of Artificial Sequence: Synthetic oligonucleotide
  Sense Strand Starting at position 451 of SEQ ID NO: 318107
guagccuuugcuuaauuua

SEQ ID NO: 354210 - RNA, 19 nt, Artificial Sequence
  Description of Artificial Sequence: Synthetic oligonucleotide
  Antisense Strand to SEQ ID NO: 354209
uaaauuaagcaaaggcuac

SEQ ID NO: 354211 - RNA, 19 nt, Artificial Sequence
  Description of Artificial Sequence: Synthetic oligonucleotide
  Sense Strand Starting at position 451 of SEQ ID NO: 318114
uugcuuaauuuagucaugu

SEQ ID NO: 354212 - RNA, 19 nt, Artificial Sequence
  Description of Artificial Sequence: Synthetic oligonucleotide
  Antisense Strand to SEQ ID NO: 354211
acaugacuaaauuaagcaa

SEQ ID NO: 354213 - RNA, 19 nt, Artificial Sequence
  Description of Artificial Sequence: Synthetic oligonucleotide
  Sense Strand Starting at position 451 of SEQ ID NO: 318115
ugcuuaauuuagucauguc

SEQ ID NO: 354214 - RNA, 19 nt, Artificial Sequence
  Description of Artificial Sequence: Synthetic oligonucleotide
  Antisense Strand to SEQ ID NO: 354213
gacaugacuaaauuaagca

SEQ ID NO: 354215 - RNA, 19 nt, Artificial Sequence
  Description of Artificial Sequence: Synthetic oligonucleotide
  Sense Strand Starting at position 451 of SEQ ID NO: 318136
aaugucauguggcuuccaa

SEQ ID NO: 354216 - RNA, 19 nt, Artificial Sequence
  Description of Artificial Sequence: Synthetic oligonucleotide
  Antisense Strand to SEQ ID NO: 354215
uuggaagccacaugacauu

SEQ ID NO: 354217 - RNA, 19 nt, Artificial Sequence
  Description of Artificial Sequence: Synthetic oligonucleotide
  Sense Strand Starting at position 451 of SEQ ID NO: 318332
augugaacguuuccuguau

SEQ ID NO: 354218 - RNA, 19 nt, Artificial Sequence
  Description of Artificial Sequence: Synthetic oligonucleotide
  Antisense Strand to SEQ ID NO: 354217
auacaggaaacguucacau

SEQ ID NO: 354219 - RNA, 19 nt, Artificial Sequence
  Description of Artificial Sequence: Synthetic oligonucleotide
  Sense Strand Starting at position 451 of SEQ ID NO: 318333
ugugaacguuuccuguaua

SEQ ID NO: 354220 - RNA, 19 nt, Artificial Sequence
  Description of Artificial Sequence: Synthetic oligonucleotide
  Antisense Strand to SEQ ID NO: 354219
uauacaggaaacguucaca

SEQ ID NO: 354221 - RNA, 19 nt, Artificial Sequence
  Description of Artificial Sequence: Synthetic oligonucleotide
  Sense Strand Starting at position 451 of SEQ ID NO: 318336
gaacguuuccuguauaugu

SEQ ID NO: 354222 - RNA, 19 nt, Artificial Sequence
  Description of Artificial Sequence: Synthetic oligonucleotide
  Antisense Strand to SEQ ID NO: 354221
acauauacaggaaacguuc

SEQ ID NO: 354223 - RNA, 19 nt, Artificial Sequence
  Description of Artificial Sequence: Synthetic oligonucleotide
  Sense Strand Starting at position 451 of SEQ ID NO: 318347
guauauguagcauggauaa

SEQ ID NO: 354224 - RNA, 19 nt, Artificial Sequence
  Description of Artificial Sequence: Synthetic oligonucleotide
  Antisense Strand to SEQ ID NO: 354223
uuauccaugcuacauauac

SEQ ID NO: 354225 - RNA, 19 nt, Artificial Sequence
  Description of Artificial Sequence: Synthetic oligonucleotide
  Sense Strand Starting at position 451 of SEQ ID NO: 318547
auaacaauauaggaagagu

SEQ ID NO: 354226 - RNA, 19 nt, Artificial Sequence
  Description of Artificial Sequence: Synthetic oligonucleotide
  Antisense Strand to SEQ ID NO: 354225
acucuuccuauauuguuau

SEQ ID NO: 354227 - RNA, 19 nt, Artificial Sequence
  Description of Artificial Sequence: Synthetic oligonucleotide
  Sense Strand Starting at position 451 of SEQ ID NO: 318598
uuuaauaguggaggaaagu

SEQ ID NO: 354228 - RNA, 19 nt, Artificial Sequence
  Description of Artificial Sequence: Synthetic oligonucleotide
  Antisense Strand to SEQ ID NO: 354227
acuuuccuccacuauuaaa

SEQ ID NO: 354229 - RNA, 19 nt, Artificial Sequence
  Description of Artificial Sequence: Synthetic oligonucleotide
  Sense Strand Starting at position 451 of SEQ ID NO: 318613
aaguuuggacucggaaacu

SEQ ID NO: 354230 - RNA, 19 nt, Artificial Sequence
  Description of Artificial Sequence: Synthetic oligonucleotide
  Antisense Strand to SEQ ID NO: 354229
aguuuccgaguccaaacuu

SEQ ID NO: 354231 - RNA, 19 nt, Artificial Sequence
  Description of Artificial Sequence: Synthetic oligonucleotide
  Sense Strand Starting at position 451 of SEQ ID NO: 318644
uuggcaugucaaggagaau

SEQ ID NO: 354232 - RNA, 19 nt, Artificial Sequence
  Description of Artificial Sequence: Synthetic oligonucleotide
  Antisense Strand to SEQ ID NO: 354231
auucuccuugacaugccaa

SEQ ID NO: 354233 - RNA, 19 nt, Artificial Sequence
  Description of Artificial Sequence: Synthetic oligonucleotide
  Sense Strand Starting at position 451 of SEQ ID NO: 318653
caaggagaauaucauguau

SEQ ID NO: 354234 - RNA, 19 nt, Artificial Sequence
  Description of Artificial Sequence: Synthetic oligonucleotide
  Antisense Strand to SEQ ID NO: 354233
auacaugauauucuccuug

SEQ ID NO: 354235 - RNA, 19 nt, Artificial Sequence
  Description of Artificial Sequence: Synthetic oligonucleotide
  Sense Strand Starting at position 451 of SEQ ID NO: 318676
uuagcauaaugugcuugau

SEQ ID NO: 354236 - RNA, 19 nt, Artificial Sequence
  Description of Artificial Sequence: Synthetic oligonucleotide
  Antisense Strand to SEQ ID NO: 354235
aucaagcacauuaugcuaa

SEQ ID NO: 354237 - RNA, 19 nt, Artificial Sequence
  Description of Artificial Sequence: Synthetic oligonucleotide
  Sense Strand Starting at position 451 of SEQ ID NO: 318678
agcauaaugugcuugauuu

SEQ ID NO: 354238 - RNA, 19 nt, Artificial Sequence
  Description of Artificial Sequence: Synthetic oligonucleotide
  Antisense Strand to SEQ ID NO: 354237
aaaucaagcacauuaugcu

SEQ ID NO: 354239 - RNA, 19 nt, Artificial Sequence
  Description of Artificial Sequence: Synthetic oligonucleotide
  Sense Strand Starting at position 452 of SEQ ID NO: 315242
gccgaaauccuggcguuuc

SEQ ID NO: 354240 - RNA, 19 nt, Artificial Sequence
  Description of Artificial Sequence: Synthetic oligonucleotide
  Antisense Strand to SEQ ID NO: 354239
gaaacgccaggauuucggc

SEQ ID NO: 354241 - RNA, 19 nt, Artificial Sequence
  Description of Artificial Sequence: Synthetic oligonucleotide
  Sense Strand Starting at position 452 of SEQ ID NO: 315328
ugaggcauuuaacaucaga

SEQ ID NO: 354242 - RNA, 19 nt, Artificial Sequence
  Description of Artificial Sequence: Synthetic oligonucleotide
  Antisense Strand to SEQ ID NO: 354241
ucugauguuaaaugccuca

SEQ ID NO: 354243 - RNA, 19 nt, Artificial Sequence
  Description of Artificial Sequence: Synthetic oligonucleotide
  Sense Strand Starting at position 452 of SEQ ID NO: 315527
aagucuacucuauggauga

SEQ ID NO: 354244 - RNA, 19 nt, Artificial Sequence
  Description of Artificial Sequence: Synthetic oligonucleotide
  Antisense Strand to SEQ ID NO: 354243
ucauccauagaguagacuu

SEQ ID NO: 354245 - RNA, 19 nt, Artificial Sequence
  Description of Artificial Sequence: Synthetic oligonucleotide
  Sense Strand Starting at position 452 of SEQ ID NO: 315606
cguaauaagcuauaugaaa

SEQ ID NO: 354246 - RNA, 19 nt, Artificial Sequence
  Description of Artificial Sequence: Synthetic oligonucleotide
  Antisense Strand to SEQ ID NO: 354245
uuucauauagcuuauuacg

SEQ ID NO: 354247 - RNA, 19 nt, Artificial Sequence
  Description of Artificial Sequence: Synthetic oligonucleotide
  Sense Strand Starting at position 452 of SEQ ID NO: 315677
aauugcuaugacgaagacu

SEQ ID NO: 354248 - RNA, 19 nt, Artificial Sequence
  Description of Artificial Sequence: Synthetic oligonucleotide
  Antisense Strand to SEQ ID NO: 354247
agucuucgucauagcaauu

SEQ ID NO: 354249 - RNA, 19 nt, Artificial Sequence
  Description of Artificial Sequence: Synthetic oligonucleotide
  Sense Strand Starting at position 452 of SEQ ID NO: 315685
ugacgaagacugggaaagu

SEQ ID NO: 354250 - RNA, 19 nt, Artificial Sequence
  Description of Artificial Sequence: Synthetic oligonucleotide
  Antisense Strand to SEQ ID NO: 354249
acuuucccagucuucguca

SEQ ID NO: 354251 - RNA, 19 nt, Artificial Sequence
  Description of Artificial Sequence: Synthetic oligonucleotide
  Sense Strand Starting at position 452 of SEQ ID NO: 315694
cugggaaagugguuaaaug

SEQ ID NO: 354252 - RNA, 19 nt, Artificial Sequence
  Description of Artificial Sequence: Synthetic oligonucleotide
  Antisense Strand to SEQ ID NO: 354251
cauuuaaccacuuucccag

SEQ ID NO: 354253 - RNA, 19 nt, Artificial Sequence
  Description of Artificial Sequence: Synthetic oligonucleotide
  Sense Strand Starting at position 452 of SEQ ID NO: 315806
aggaaucaguaaucuagua

SEQ ID NO: 354254 - RNA, 19 nt, Artificial Sequence
  Description of Artificial Sequence: Synthetic oligonucleotide
  Antisense Strand to SEQ ID NO: 354253
uacuagauuacugauuccu

SEQ ID NO: 354255 - RNA, 19 nt, Artificial Sequence
  Description of Artificial Sequence: Synthetic oligonucleotide
  Sense Strand Starting at position 452 of SEQ ID NO: 315921
auacauauuuaggauguga

SEQ ID NO: 354256 - RNA, 19 nt, Artificial Sequence
  Description of Artificial Sequence: Synthetic oligonucleotide
  Antisense Strand to SEQ ID NO: 354255
ucacauccuaaauauguau

SEQ ID NO: 354257 - RNA, 19 nt, Artificial Sequence
  Description of Artificial Sequence: Synthetic oligonucleotide
  Sense Strand Starting at position 452 of SEQ ID NO: 315939
agagcaaucuagcuuaaac

SEQ ID NO: 354258 - RNA, 19 nt, Artificial Sequence
  Description of Artificial Sequence: Synthetic oligonucleotide
  Antisense Strand to SEQ ID NO: 354257
guuuaagcuagauugcucu

SEQ ID NO: 354259 - RNA, 19 nt, Artificial Sequence
  Description of Artificial Sequence: Synthetic oligonucleotide
  Sense Strand Starting at position 452 of SEQ ID NO: 315977
gccaguguugaccagauga

SEQ ID NO: 354260 - RNA, 19 nt, Artificial Sequence
  Description of Artificial Sequence: Synthetic oligonucleotide
  Antisense Strand to SEQ ID NO: 354259
ucaucuggucaacacuggc

SEQ ID NO: 354261 - RNA, 19 nt, Artificial Sequence
  Description of Artificial Sequence: Synthetic oligonucleotide
  Sense Strand Starting at position 452 of SEQ ID NO: 316100
uggguaguagggugacaaa

SEQ ID NO: 354262 - RNA, 19 nt, Artificial Sequence
  Description of Artificial Sequence: Synthetic oligonucleotide
  Antisense Strand to SEQ ID NO: 354261
uuugucacccuacuaccca

SEQ ID NO: 354263 - RNA, 19 nt, Artificial Sequence
  Description of Artificial Sequence: Synthetic oligonucleotide
  Sense Strand Starting at position 452 of SEQ ID NO: 316110
ggugacaaaucauuccagu

SEQ ID NO: 354264 - RNA, 19 nt, Artificial Sequence
  Description of Artificial Sequence: Synthetic oligonucleotide
  Antisense Strand to SEQ ID NO: 354263
acuggaaugauuugucacc

SEQ ID NO: 354265 - RNA, 19 nt, Artificial Sequence
  Description of Artificial Sequence: Synthetic oligonucleotide
  Sense Strand Starting at position 452 of SEQ ID NO: 316186
ggcaaauugguguauaaag

SEQ ID NO: 354266 - RNA, 19 nt, Artificial Sequence
  Description of Artificial Sequence: Synthetic oligonucleotide
  Antisense Strand to SEQ ID NO: 354265
cuuuauacaccaauuugcc

SEQ ID NO: 354267 - RNA, 19 nt, Artificial Sequence
  Description of Artificial Sequence: Synthetic oligonucleotide
  Sense Strand Starting at position 452 of SEQ ID NO: 316279
uaaugaugaugucuugaua

SEQ ID NO: 354268 - RNA, 19 nt, Artificial Sequence
  Description of Artificial Sequence: Synthetic oligonucleotide
  Antisense Strand to SEQ ID NO: 354267
uaucaagacaucaucauua

SEQ ID NO: 354269 - RNA, 19 nt, Artificial Sequence
  Description of Artificial Sequence: Synthetic oligonucleotide
  Sense Strand Starting at position 452 of SEQ ID NO: 316282
ugaugaugucuugauauuc

SEQ ID NO: 354270 - RNA, 19 nt, Artificial Sequence
  Description of Artificial Sequence: Synthetic oligonucleotide
  Antisense Strand to SEQ ID NO: 354269
gaauaucaagacaucauca

SEQ ID NO: 354271 - RNA, 19 nt, Artificial Sequence
  Description of Artificial Sequence: Synthetic oligonucleotide
  Sense Strand Starting at position 452 of SEQ ID NO: 316415
gaaguuggugcuuagacua

SEQ ID NO: 354272 - RNA, 19 nt, Artificial Sequence
  Description of Artificial Sequence: Synthetic oligonucleotide
  Antisense Strand to SEQ ID NO: 354271
uagucuaagcaccaacuuc

SEQ ID NO: 354273 - RNA, 19 nt, Artificial Sequence
  Description of Artificial Sequence: Synthetic oligonucleotide
  Sense Strand Starting at position 452 of SEQ ID NO: 316623
augucaaacagaggugauu

SEQ ID NO: 354274 - RNA, 19 nt, Artificial Sequence
  Description of Artificial Sequence: Synthetic oligonucleotide
  Antisense Strand to SEQ ID NO: 354273
aaucaccucuguuugacau

SEQ ID NO: 354275 - RNA, 19 nt, Artificial Sequence
  Description of Artificial Sequence: Synthetic oligonucleotide
  Sense Strand Starting at position 452 of SEQ ID NO: 316690
augugcuaccauuaaagau

SEQ ID NO: 354276 - RNA, 19 nt, Artificial Sequence
  Description of Artificial Sequence: Synthetic oligonucleotide
  Antisense Strand to SEQ ID NO: 354275
aucuuuaaugguagcacau

SEQ ID NO: 354277 - RNA, 19 nt, Artificial Sequence
  Description of Artificial Sequence: Synthetic oligonucleotide
  Sense Strand Starting at position 452 of SEQ ID NO: 316870
auaugauccagauguaggu

SEQ ID NO: 354278 - RNA, 19 nt, Artificial Sequence
  Description of Artificial Sequence: Synthetic oligonucleotide
  Antisense Strand to SEQ ID NO: 354277
accuacaucuggaucauau

SEQ ID NO: 354279 - RNA, 19 nt, Artificial Sequence
  Description of Artificial Sequence: Synthetic oligonucleotide
  Sense Strand Starting at position 452 of SEQ ID NO: 316876
uccagauguaggugaagga

SEQ ID NO: 354280 - RNA, 19 nt, Artificial Sequence
  Description of Artificial Sequence: Synthetic oligonucleotide
  Antisense Strand to SEQ ID NO: 354279
uccuucaccuacaucugga

SEQ ID NO: 354281 - RNA, 19 nt, Artificial Sequence
  Description of Artificial Sequence: Synthetic oligonucleotide
  Sense Strand Starting at position 452 of SEQ ID NO: 317109
gcaaauaucuaccuggauc

SEQ ID NO: 354282 - RNA, 19 nt, Artificial Sequence
  Description of Artificial Sequence: Synthetic oligonucleotide
  Antisense Strand to SEQ ID NO: 354281
gauccagguagauauuugc

SEQ ID NO: 354283 - RNA, 19 nt, Artificial Sequence
  Description of Artificial Sequence: Synthetic oligonucleotide
  Sense Strand Starting at position 452 of SEQ ID NO: 317268
aagugagguuaagcauuaa

SEQ ID NO: 354284 - RNA, 19 nt, Artificial Sequence
  Description of Artificial Sequence: Synthetic oligonucleotide
  Antisense Strand to SEQ ID NO: 354283
uuaaugcuuaaccucacuu

SEQ ID NO: 354285 - RNA, 19 nt, Artificial Sequence
  Description of Artificial Sequence: Synthetic oligonucleotide
  Sense Strand Starting at position 452 of SEQ ID NO: 317272
gagguuaagcauuaauccu

SEQ ID NO: 354286 - RNA, 19 nt, Artificial Sequence
  Description of Artificial Sequence: Synthetic oligonucleotide
  Antisense Strand to SEQ ID NO: 354285
aggauuaaugcuuaaccuc

SEQ ID NO: 354287 - RNA, 19 nt, Artificial Sequence
  Description of Artificial Sequence: Synthetic oligonucleotide
  Sense Strand Starting at position 452 of SEQ ID NO: 317379
uaauuacacguuugaagac

SEQ ID NO: 354288 - RNA, 19 nt, Artificial Sequence
  Description of Artificial Sequence: Synthetic oligonucleotide
  Antisense Strand to SEQ ID NO: 354287
gucuucaaacguguaauua

SEQ ID NO: 354289 - RNA, 19 nt, Artificial Sequence
  Description of Artificial Sequence: Synthetic oligonucleotide
  Sense Strand Starting at position 452 of SEQ ID NO: 317465
cugccuuagcaugaauaca

SEQ ID NO: 354290 - RNA, 19 nt, Artificial Sequence
  Description of Artificial Sequence: Synthetic oligonucleotide
  Antisense Strand to SEQ ID NO: 354289
uguauucaugcuaaggcag

SEQ ID NO: 354291 - RNA, 19 nt, Artificial Sequence
  Description of Artificial Sequence: Synthetic oligonucleotide
  Sense Strand Starting at position 452 of SEQ ID NO: 317737
ccaauaaauggucauguca

SEQ ID NO: 354292 - RNA, 19 nt, Artificial Sequence
  Description of Artificial Sequence: Synthetic oligonucleotide
  Antisense Strand to SEQ ID NO: 354291
ugacaugaccauuuauugg

SEQ ID NO: 354293 - RNA, 19 nt, Artificial Sequence
  Description of Artificial Sequence: Synthetic oligonucleotide
  Sense Strand Starting at position 452 of SEQ ID NO: 317744
auggucaugucauugaaau

SEQ ID NO: 354294 - RNA, 19 nt, Artificial Sequence
  Description of Artificial Sequence: Synthetic oligonucleotide
  Antisense Strand to SEQ ID NO: 354293
auuucaaugacaugaccau

SEQ ID NO: 354295 - RNA, 19 nt, Artificial Sequence
  Description of Artificial Sequence: Synthetic oligonucleotide
  Sense Strand Starting at position 452 of SEQ ID NO: 317862
aguguugugagagaaauuc

SEQ ID NO: 354296 - RNA, 19 nt, Artificial Sequence
  Description of Artificial Sequence: Synthetic oligonucleotide
  Antisense Strand to SEQ ID NO: 354295
gaauuucucucacaacacu

SEQ ID NO: 354297 - RNA, 19 nt, Artificial Sequence
  Description of Artificial Sequence: Synthetic oligonucleotide
  Sense Strand Starting at position 452 of SEQ ID NO: 318093
ucuucuuaggcucgauuua

SEQ ID NO: 354298 - RNA, 19 nt, Artificial Sequence
  Description of Artificial Sequence: Synthetic oligonucleotide
  Antisense Strand to SEQ ID NO: 354297
uaaaucgagccuaagaaga

SEQ ID NO: 354299 - RNA, 19 nt, Artificial Sequence
  Description of Artificial Sequence: Synthetic oligonucleotide
  Sense Strand Starting at position 452 of SEQ ID NO: 318100
aggcucgauuuaguguuua

SEQ ID NO: 354300 - RNA, 19 nt, Artificial Sequence
  Description of Artificial Sequence: Synthetic oligonucleotide
  Antisense Strand to SEQ ID NO: 354299
uaaacacuaaaucgagccu

SEQ ID NO: 354301 - RNA, 19 nt, Artificial Sequence
  Description of Artificial Sequence: Synthetic oligonucleotide
  Sense Strand Starting at position 452 of SEQ ID NO: 318249
ucaacuuaaugcuuaggga

SEQ ID NO: 354302 - RNA, 19 nt, Artificial Sequence
  Description of Artificial Sequence: Synthetic oligonucleotide
  Antisense Strand to SEQ ID NO: 354301
ucccuaagcauuaaguuga

SEQ ID NO: 354303 - RNA, 19 nt, Artificial Sequence
  Description of Artificial Sequence: Synthetic oligonucleotide
  Sense Strand Starting at position 452 of SEQ ID NO: 318670
uucuguaauguuuagaaac

SEQ ID NO: 354304 - RNA, 19 nt, Artificial Sequence
  Description of Artificial Sequence: Synthetic oligonucleotide
  Antisense Strand to SEQ ID NO: 354303
guuucuaaacauuacagaa

SEQ ID NO: 354305 - RNA, 19 nt, Artificial Sequence
  Description of Artificial Sequence: Synthetic oligonucleotide
  Sense Strand Starting at position 452 of SEQ ID NO: 318680
uuuagaaacguugaagcau

SEQ ID NO: 354306 - RNA, 19 nt, Artificial Sequence
  Description of Artificial Sequence: Synthetic oligonucleotide
  Antisense Strand to SEQ ID NO: 354305
augcuucaacguuucuaaa

SEQ ID NO: 354307 - RNA, 19 nt, Artificial Sequence
  Description of Artificial Sequence: Synthetic oligonucleotide
  Sense Strand Starting at position 452 of SEQ ID NO: 318726
gccuucuuugaagagccaa

SEQ ID NO: 354308 - RNA, 19 nt, Artificial Sequence
  Description of Artificial Sequence: Synthetic oligonucleotide
  Antisense Strand to SEQ ID NO: 354307
uuggcucuucaaagaaggc

SEQ ID NO: 354309 - RNA, 19 nt, Artificial Sequence
  Description of Artificial Sequence: Synthetic oligonucleotide
  Sense Strand Starting at position 452 of SEQ ID NO: 318949
aguauuucuuggcuacacu

SEQ ID NO: 354310 - RNA, 19 nt, Artificial Sequence
  Description of Artificial Sequence: Synthetic oligonucleotide
  Antisense Strand to SEQ ID NO: 354309
aguguagccaagaaauacu

SEQ ID NO: 354311 - RNA, 19 nt, Artificial Sequence
  Description of Artificial Sequence: Synthetic oligonucleotide
  Sense Strand Starting at position 452 of SEQ ID NO: 319008
ugggaaacauuauacauuu

SEQ ID NO: 354312 - RNA, 19 nt, Artificial Sequence
  Description of Artificial Sequence: Synthetic oligonucleotide
  Antisense Strand to SEQ ID NO: 354311
aaauguauaauguuuccca

SEQ ID NO: 354313 - RNA, 19 nt, Artificial Sequence
  Description of Artificial Sequence: Synthetic oligonucleotide
  Sense Strand Starting at position 452 of SEQ ID NO: 319103
ucuggauaucuauauggcu

SEQ ID NO: 354314 - RNA, 19 nt, Artificial Sequence
  Description of Artificial Sequence: Synthetic oligonucleotide
  Antisense Strand to SEQ ID NO: 354313
agccauauagauauccaga

SEQ ID NO: 354315 - RNA, 19 nt, Artificial Sequence
  Description of Artificial Sequence: Synthetic oligonucleotide
  Sense Strand Starting at position 452 of SEQ ID NO: 319157
ucaucuauugaaugaagua

SEQ ID NO: 354316 - RNA, 19 nt, Artificial Sequence
  Description of Artificial Sequence: Synthetic oligonucleotide
  Antisense Strand to SEQ ID NO: 354315
uacuucauucaauagauga

SEQ ID NO: 354317 - RNA, 19 nt, Artificial Sequence
  Description of Artificial Sequence: Synthetic oligonucleotide
  Sense Strand Starting at position 452 of SEQ ID NO: 319169
ugaaguauacccugaccac

SEQ ID NO: 354318 - RNA, 19 nt, Artificial Sequence
  Description of Artificial Sequence: Synthetic oligonucleotide
  Antisense Strand to SEQ ID NO: 354317
guggucaggguauacuuca

SEQ ID NO: 354319 - RNA, 19 nt, Artificial Sequence
  Description of Artificial Sequence: Synthetic oligonucleotide
  Sense Strand Starting at position 453 of SEQ ID NO: 315249
uucugaagacuaugcuaua

SEQ ID NO: 354320 - RNA, 19 nt, Artificial Sequence
  Description of Artificial Sequence: Synthetic oligonucleotide
  Antisense Strand to SEQ ID NO: 354319
uauagcauagucuucagaa

SEQ ID NO: 354321 - RNA, 19 nt, Artificial Sequence
  Description of Artificial Sequence: Synthetic oligonucleotide
  Sense Strand Starting at position 453 of SEQ ID NO: 315250
ucugaagacuaugcuauau

SEQ ID NO: 354322 - RNA, 19 nt, Artificial Sequence
  Description of Artificial Sequence: Synthetic oligonucleotide
  Antisense Strand to SEQ ID NO: 354321
auauagcauagucuucaga

SEQ ID NO: 354323 - RNA, 19 nt, Artificial Sequence
  Description of Artificial Sequence: Synthetic oligonucleotide
  Sense Strand Starting at position 453 of SEQ ID NO: 315355
agaagucuccuguauuauu

SEQ ID NO: 354324 - RNA, 19 nt, Artificial Sequence
  Description of Artificial Sequence: Synthetic oligonucleotide
  Antisense Strand to SEQ ID NO: 354323
aauaauacaggagacuucu

SEQ ID NO: 354325 - RNA, 19 nt, Artificial Sequence
  Description of Artificial Sequence: Synthetic oligonucleotide
  Sense Strand Starting at position 453 of SEQ ID NO: 315552
ucucgaguacuggauuaca

SEQ ID NO: 354326 - RNA, 19 nt, Artificial Sequence
  Description of Artificial Sequence: Synthetic oligonucleotide
  Antisense Strand to SEQ ID NO: 354325
uguaauccaguacucgaga

SEQ ID NO: 354327 - RNA, 19 nt, Artificial Sequence
  Description of Artificial Sequence: Synthetic oligonucleotide
  Sense Strand Starting at position 453 of SEQ ID NO: 315867
cuguuuaugggcuacaaua

SEQ ID NO: 354328 - RNA, 19 nt, Artificial Sequence
  Description of Artificial Sequence: Synthetic oligonucleotide
  Antisense Strand to SEQ ID NO: 354327
uauuguagcccauaaacag

SEQ ID NO: 354329 - RNA, 19 nt, Artificial Sequence
  Description of Artificial Sequence: Synthetic oligonucleotide
  Sense Strand Starting at position 453 of SEQ ID NO: 316034
gcaauacaacacuggaauu

SEQ ID NO: 354330 - RNA, 19 nt, Artificial Sequence
  Description of Artificial Sequence: Synthetic oligonucleotide
  Antisense Strand to SEQ ID NO: 354329
aauuccaguguuguauugc

SEQ ID NO: 354331 - RNA, 19 nt, Artificial Sequence
  Description of Artificial Sequence: Synthetic oligonucleotide
  Sense Strand Starting at position 453 of SEQ ID NO: 316231
gacaguuaugcuggaaacu

SEQ ID NO: 354332 - RNA, 19 nt, Artificial Sequence
  Description of Artificial Sequence: Synthetic oligonucleotide
  Antisense Strand to SEQ ID NO: 354331
aguuuccagcauaacuguc

SEQ ID NO: 354333 - RNA, 19 nt, Artificial Sequence
  Description of Artificial Sequence: Synthetic oligonucleotide
  Sense Strand Starting at position 453 of SEQ ID NO: 316232
acaguuaugcuggaaacuc

SEQ ID NO: 354334 - RNA, 19 nt, Artificial Sequence
  Description of Artificial Sequence: Synthetic oligonucleotide
  Antisense Strand to SEQ ID NO: 354333
gaguuuccagcauaacugu

SEQ ID NO: 354335 - RNA, 19 nt, Artificial Sequence
  Description of Artificial Sequence: Synthetic oligonucleotide
  Sense Strand Starting at position 453 of SEQ ID NO: 316470
ggaguuauuccuggaggau

SEQ ID NO: 354336 - RNA, 19 nt, Artificial Sequence
  Description of Artificial Sequence: Synthetic oligonucleotide
  Antisense Strand to SEQ ID NO: 354335
auccuccaggaauaacucc

SEQ ID NO: 354337 - RNA, 19 nt, Artificial Sequence
  Description of Artificial Sequence: Synthetic oligonucleotide
  Sense Strand Starting at position 453 of SEQ ID NO: 316479
ccuggaggaucacuccuaa

SEQ ID NO: 354338 - RNA, 19 nt, Artificial Sequence
  Description of Artificial Sequence: Synthetic oligonucleotide
  Antisense Strand to SEQ ID NO: 354337
uuaggagugauccuccagg

SEQ ID NO: 354339 - RNA, 19 nt, Artificial Sequence
  Description of Artificial Sequence: Synthetic oligonucleotide
  Sense Strand Starting at position 453 of SEQ ID NO: 316592
uggcaccugaguuauaaag

SEQ ID NO: 354340 - RNA, 19 nt, Artificial Sequence
  Description of Artificial Sequence: Synthetic oligonucleotide
  Antisense Strand to SEQ ID NO: 354339
cuuuauaacucaggugcca

SEQ ID NO: 354341 - RNA, 19 nt, Artificial Sequence
  Description of Artificial Sequence: Synthetic oligonucleotide
  Sense Strand Starting at position 453 of SEQ ID NO: 316632
gcauacgaucuuuaaacaa

SEQ ID NO: 354342 - RNA, 19 nt, Artificial Sequence
  Description of Artificial Sequence: Synthetic oligonucleotide
  Antisense Strand to SEQ ID NO: 354341
uuguuuaaagaucguaugc

SEQ ID NO: 354343 - RNA, 19 nt, Artificial Sequence
  Description of Artificial Sequence: Synthetic oligonucleotide
  Sense Strand Starting at position 453 of SEQ ID NO: 316699
ggcaucaccuacucugaga

SEQ ID NO: 354344 - RNA, 19 nt, Artificial Sequence
  Description of Artificial Sequence: Synthetic oligonucleotide
  Antisense Strand to SEQ ID NO: 354343
ucucagaguaggugaugcc

SEQ ID NO: 354345 - RNA, 19 nt, Artificial Sequence
  Description of Artificial Sequence: Synthetic oligonucleotide
  Sense Strand Starting at position 453 of SEQ ID NO: 316864
gcaguucgccaagcaguaa

SEQ ID NO: 354346 - RNA, 19 nt, Artificial Sequence
  Description of Artificial Sequence: Synthetic oligonucleotide
  Antisense Strand to SEQ ID NO: 354345
uuacugcuuggcgaacugc

SEQ ID NO: 354347 - RNA, 19 nt, Artificial Sequence
  Description of Artificial Sequence: Synthetic oligonucleotide
  Sense Strand Starting at position 453 of SEQ ID NO: 316931
gguucuucgcgcuuuauaa

SEQ ID NO: 354348 - RNA, 19 nt, Artificial Sequence
  Description of Artificial Sequence: Synthetic oligonucleotide
  Antisense Strand to SEQ ID NO: 354347
uuauaaagcgcgaagaacc

SEQ ID NO: 354349 - RNA, 19 nt, Artificial Sequence
  Description of Artificial Sequence: Synthetic oligonucleotide
  Sense Strand Starting at position 453 of SEQ ID NO: 316932
guucuucgcgcuuuauaaa

SEQ ID NO: 354350 - RNA, 19 nt, Artificial Sequence
  Description of Artificial Sequence: Synthetic oligonucleotide
  Antisense Strand to SEQ ID NO: 354349
uuuauaaagcgcgaagaac

SEQ ID NO: 354351 - RNA, 19 nt, Artificial Sequence
  Description of Artificial Sequence: Synthetic oligonucleotide
  Sense Strand Starting at position 453 of SEQ ID NO: 317398
cgcggcucucuguuaauau

SEQ ID NO: 354352 - RNA, 19 nt, Artificial Sequence
  Description of Artificial Sequence: Synthetic oligonucleotide
  Antisense Strand to SEQ ID NO: 354351
auauuaacagagagccgcg

SEQ ID NO: 354353 - RNA, 19 nt, Artificial Sequence
  Description of Artificial Sequence: Synthetic oligonucleotide
  Sense Strand Starting at position 453 of SEQ ID NO: 317501
guaggagcguggguaauuu

SEQ ID NO: 354354 - RNA, 19 nt, Artificial Sequence
  Description of Artificial Sequence: Synthetic oligonucleotide
  Antisense Strand to SEQ ID NO: 354353
aaauuacccacgcuccuac

SEQ ID NO: 354355 - RNA, 19 nt, Artificial Sequence
  Description of Artificial Sequence: Synthetic oligonucleotide
  Sense Strand Starting at position 453 of SEQ ID NO: 317778
agaguucuauaagugaauc

SEQ ID NO: 354356 - RNA, 19 nt, Artificial Sequence
  Description of Artificial Sequence: Synthetic oligonucleotide
  Antisense Strand to SEQ ID NO: 354355
gauucacuuauagaacucu

SEQ ID NO: 354357 - RNA, 19 nt, Artificial Sequence
  Description of Artificial Sequence: Synthetic oligonucleotide
  Sense Strand Starting at position 453 of SEQ ID NO: 317954
ggcucaauauuugucuagu

SEQ ID NO: 354358 - RNA, 19 nt, Artificial Sequence
  Description of Artificial Sequence: Synthetic oligonucleotide
  Antisense Strand to SEQ ID NO: 354357
acuagacaaauauugagcc

SEQ ID NO: 354359 - RNA, 19 nt, Artificial Sequence
  Description of Artificial Sequence: Synthetic oligonucleotide
  Sense Strand Starting at position 453 of SEQ ID NO: 317955
gcucaauauuugucuaguc

SEQ ID NO: 354360 - RNA, 19 nt, Artificial Sequence
  Description of Artificial Sequence: Synthetic oligonucleotide
  Antisense Strand to SEQ ID NO: 354359
gacuagacaaauauugagc

SEQ ID NO: 354361 - RNA, 19 nt, Artificial Sequence
  Description of Artificial Sequence: Synthetic oligonucleotide
  Sense Strand Starting at position 453 of SEQ ID NO: 318113
guuaaauucccuuaggagc

SEQ ID NO: 354362 - RNA, 19 nt, Artificial Sequence
  Description of Artificial Sequence: Synthetic oligonucleotide
  Antisense Strand to SEQ ID NO: 354361
gcuccuaagggaauuuaac

SEQ ID NO: 354363 - RNA, 19 nt, Artificial Sequence
  Description of Artificial Sequence: Synthetic oligonucleotide
  Sense Strand Starting at position 453 of SEQ ID NO: 318209
cggagcugcauuuguaauc

SEQ ID NO: 354364 - RNA, 19 nt, Artificial Sequence
  Description of Artificial Sequence: Synthetic oligonucleotide
  Antisense Strand to SEQ ID NO: 354363
gauuacaaaugcagcuccg

SEQ ID NO: 354365 - RNA, 19 nt, Artificial Sequence
  Description of Artificial Sequence: Synthetic oligonucleotide
  Sense Strand Starting at position 453 of SEQ ID NO: 318226
uccagaucucaauggacua

SEQ ID NO: 354366 - RNA, 19 nt, Artificial Sequence
  Description of Artificial Sequence: Synthetic oligonucleotide
  Antisense Strand to SEQ ID NO: 354365
uaguccauugagaucugga

SEQ ID NO: 354367 - RNA, 19 nt, Artificial Sequence
  Description of Artificial Sequence: Synthetic oligonucleotide
  Sense Strand Starting at position 453 of SEQ ID NO: 318331
guucacaucggugaagaca

SEQ ID NO: 354368 - RNA, 19 nt, Artificial Sequence
  Description of Artificial Sequence: Synthetic oligonucleotide
  Antisense Strand to SEQ ID NO: 354367
ugucuucaccgaugugaac

SEQ ID NO: 354369 - RNA, 19 nt, Artificial Sequence
  Description of Artificial Sequence: Synthetic oligonucleotide
  Sense Strand Starting at position 453 of SEQ ID NO: 318351
ggcagaccuuucuuccaaa

SEQ ID NO: 354370 - RNA, 19 nt, Artificial Sequence
  Description of Artificial Sequence: Synthetic oligonucleotide
  Antisense Strand to SEQ ID NO: 354369
uuuggaagaaaggucugcc

SEQ ID NO: 354371 - RNA, 19 nt, Artificial Sequence
  Description of Artificial Sequence: Synthetic oligonucleotide
  Sense Strand Starting at position 453 of SEQ ID NO: 318437
ucagaaagacuguguaagu

SEQ ID NO: 354372 - RNA, 19 nt, Artificial Sequence
  Description of Artificial Sequence: Synthetic oligonucleotide
  Antisense Strand to SEQ ID NO: 354371
acuuacacagucuuucuga

SEQ ID NO: 354373 - RNA, 19 nt, Artificial Sequence
  Description of Artificial Sequence: Synthetic oligonucleotide
  Sense Strand Starting at position 453 of SEQ ID NO: 318438
cagaaagacuguguaaguu

SEQ ID NO: 354374 - RNA, 19 nt, Artificial Sequence
  Description of Artificial Sequence: Synthetic oligonucleotide
  Antisense Strand to SEQ ID NO: 354373
aacuuacacagucuuucug

SEQ ID NO: 354375 - RNA, 19 nt, Artificial Sequence
  Description of Artificial Sequence: Synthetic oligonucleotide
  Sense Strand Starting at position 453 of SEQ ID NO: 318485
ccagucucagcagaaauau

SEQ ID NO: 354376 - RNA, 19 nt, Artificial Sequence
  Description of Artificial Sequence: Synthetic oligonucleotide
  Antisense Strand to SEQ ID NO: 354375
auauuucugcugagacugg

SEQ ID NO: 354377 - RNA, 19 nt, Artificial Sequence
  Description of Artificial Sequence: Synthetic oligonucleotide
  Sense Strand Starting at position 453 of SEQ ID NO: 318526
cguaaauaacacuaggagu

SEQ ID NO: 354378 - RNA, 19 nt, Artificial Sequence
  Description of Artificial Sequence: Synthetic oligonucleotide
  Antisense Strand to SEQ ID NO: 354377
acuccuaguguuauuuacg

SEQ ID NO: 354379 - RNA, 19 nt, Artificial Sequence
  Description of Artificial Sequence: Synthetic oligonucleotide
  Sense Strand Starting at position 453 of SEQ ID NO: 318539
aggaguuaaucuucuguaa

SEQ ID NO: 354380 - RNA, 19 nt, Artificial Sequence
  Description of Artificial Sequence: Synthetic oligonucleotide
  Antisense Strand to SEQ ID NO: 354379
uuacagaagauuaacuccu

SEQ ID NO: 354381 - RNA, 19 nt, Artificial Sequence
  Description of Artificial Sequence: Synthetic oligonucleotide
  Sense Strand Starting at position 453 of SEQ ID NO: 318583
ugcagucguguguugauua

SEQ ID NO: 354382 - RNA, 19 nt, Artificial Sequence
  Description of Artificial Sequence: Synthetic oligonucleotide
  Antisense Strand to SEQ ID NO: 354381
uaaucaacacacgacugca

SEQ ID NO: 354383 - RNA, 19 nt, Artificial Sequence
  Description of Artificial Sequence: Synthetic oligonucleotide
  Sense Strand Starting at position 453 of SEQ ID NO: 318586
agucguguguugauuaaug

SEQ ID NO: 354384 - RNA, 19 nt, Artificial Sequence
  Description of Artificial Sequence: Synthetic oligonucleotide
  Antisense Strand to SEQ ID NO: 354383
cauuaaucaacacacgacu

SEQ ID NO: 354385 - RNA, 19 nt, Artificial Sequence
  Description of Artificial Sequence: Synthetic oligonucleotide
  Sense Strand Starting at position 453 of SEQ ID NO: 318613
acauucugagaaugcauau

SEQ ID NO: 354386 - RNA, 19 nt, Artificial Sequence
  Description of Artificial Sequence: Synthetic oligonucleotide
  Antisense Strand to SEQ ID NO: 354385
auaugcauucucagaaugu

SEQ ID NO: 354387 - RNA, 19 nt, Artificial Sequence
  Description of Artificial Sequence: Synthetic oligonucleotide
  Sense Strand Starting at position 453 of SEQ ID NO: 318762
cacugauuaguguaggcaa

SEQ ID NO: 354388 - RNA, 19 nt, Artificial Sequence
  Description of Artificial Sequence: Synthetic oligonucleotide
  Antisense Strand to SEQ ID NO: 354387
uugccuacacuaaucagug

SEQ ID NO: 354389 - RNA, 19 nt, Artificial Sequence
  Description of Artificial Sequence: Synthetic oligonucleotide
  Sense Strand Starting at position 453 of SEQ ID NO: 318798
auaacuguguaucuaaaca

SEQ ID NO: 354390 - RNA, 19 nt, Artificial Sequence
  Description of Artificial Sequence: Synthetic oligonucleotide
  Antisense Strand to SEQ ID NO: 354389
uguuuagauacacaguuau

SEQ ID NO: 354391 - RNA, 19 nt, Artificial Sequence
  Description of Artificial Sequence: Synthetic oligonucleotide
  Sense Strand Starting at position 453 of SEQ ID NO: 318930
ggcaguauuaagugagaau

SEQ ID NO: 354392 - RNA, 19 nt, Artificial Sequence
  Description of Artificial Sequence: Synthetic oligonucleotide
  Antisense Strand to SEQ ID NO: 354391
auucucacuuaauacugcc

SEQ ID NO: 354393 - RNA, 19 nt, Artificial Sequence
  Description of Artificial Sequence: Synthetic oligonucleotide
  Sense Strand Starting at position 453 of SEQ ID NO: 318931
gcaguauuaagugagaaug

SEQ ID NO: 354394 - RNA, 19 nt, Artificial Sequence
  Description of Artificial Sequence: Synthetic oligonucleotide
  Antisense Strand to SEQ ID NO: 354393
cauucucacuuaauacugc

SEQ ID NO: 354395 - RNA, 19 nt, Artificial Sequence
  Description of Artificial Sequence: Synthetic oligonucleotide
  Sense Strand Starting at position 453 of SEQ ID NO: 318947
augaaagcccuaggaaauu

SEQ ID NO: 354396 - RNA, 19 nt, Artificial Sequence
  Description of Artificial Sequence: Synthetic oligonucleotide
  Antisense Strand to SEQ ID NO: 354395
aauuuccuagggcuuucau

SEQ ID NO: 354397 - RNA, 19 nt, Artificial Sequence
  Description of Artificial Sequence: Synthetic oligonucleotide
  Sense Strand Starting at position 453 of SEQ ID NO: 318997
guaccuuuaggccauacua

SEQ ID NO: 354398 - RNA, 19 nt, Artificial Sequence
  Description of Artificial Sequence: Synthetic oligonucleotide
  Antisense Strand to SEQ ID NO: 354397
uaguauggccuaaagguac

SEQ ID NO: 354399 - RNA, 19 nt, Artificial Sequence
  Description of Artificial Sequence: Synthetic oligonucleotide
  Sense Strand Starting at position 454 of SEQ ID NO: 315448
ggaccuguuuccuuagucu

SEQ ID NO: 354400 - RNA, 19 nt, Artificial Sequence
  Description of Artificial Sequence: Synthetic oligonucleotide
  Antisense Strand to SEQ ID NO: 354399
agacuaaggaaacaggucc

SEQ ID NO: 354401 - RNA, 19 nt, Artificial Sequence
  Description of Artificial Sequence: Synthetic oligonucleotide
  Sense Strand Starting at position 454 of SEQ ID NO: 315537
cugacuuuguuaccuacua

SEQ ID NO: 354402 - RNA, 19 nt, Artificial Sequence
  Description of Artificial Sequence: Synthetic oligonucleotide
  Antisense Strand to SEQ ID NO: 354401
uaguagguaacaaagucag

SEQ ID NO: 354403 - RNA, 19 nt, Artificial Sequence
  Description of Artificial Sequence: Synthetic oligonucleotide
  Sense Strand Starting at position 454 of SEQ ID NO: 315595
ccuauagaauaagcaugau

SEQ ID NO: 354404 - RNA, 19 nt, Artificial Sequence
  Description of Artificial Sequence: Synthetic oligonucleotide
  Antisense Strand to SEQ ID NO: 354403
aucaugcuuauucuauagg

SEQ ID NO: 354405 - RNA, 19 nt, Artificial Sequence
  Description of Artificial Sequence: Synthetic oligonucleotide
  Sense Strand Starting at position 454 of SEQ ID NO: 315651
uuuccaggacuuuaugagu

SEQ ID NO: 354406 - RNA, 19 nt, Artificial Sequence
  Description of Artificial Sequence: Synthetic oligonucleotide
  Antisense Strand to SEQ ID NO: 354405
acucauaaaguccuggaaa

SEQ ID NO: 354407 - RNA, 19 nt, Artificial Sequence
  Description of Artificial Sequence: Synthetic oligonucleotide
  Sense Strand Starting at position 454 of SEQ ID NO: 315656
aggacuuuaugaguuaaua

SEQ ID NO: 354408 - RNA, 19 nt, Artificial Sequence
  Description of Artificial Sequence: Synthetic oligonucleotide
  Antisense Strand to SEQ ID NO: 354407
uauuaacucauaaaguccu

SEQ ID NO: 354409 - RNA, 19 nt, Artificial Sequence
  Description of Artificial Sequence: Synthetic oligonucleotide
  Sense Strand Starting at position 454 of SEQ ID NO: 315689
aaaguaaauccagacgcau

SEQ ID NO: 354410 - RNA, 19 nt, Artificial Sequence
  Description of Artificial Sequence: Synthetic oligonucleotide
  Antisense Strand to SEQ ID NO: 354409
augcgucuggauuuacuuu

SEQ ID NO: 354411 - RNA, 19 nt, Artificial Sequence
  Description of Artificial Sequence: Synthetic oligonucleotide
  Sense Strand Starting at position 454 of SEQ ID NO: 315806
aguguuagaacuggcaaau

SEQ ID NO: 354412 - RNA, 19 nt, Artificial Sequence
  Description of Artificial Sequence: Synthetic oligonucleotide
  Antisense Strand to SEQ ID NO: 354411
auuugccaguucuaacacu

SEQ ID NO: 354413 - RNA, 19 nt, Artificial Sequence
  Description of Artificial Sequence: Synthetic oligonucleotide
  Sense Strand Starting at position 454 of SEQ ID NO: 315817
uggcaaaugucugcucuaa

SEQ ID NO: 354414 - RNA, 19 nt, Artificial Sequence
  Description of Artificial Sequence: Synthetic oligonucleotide
  Antisense Strand to SEQ ID NO: 354413
uuagagcagacauuugcca

SEQ ID NO: 354415 - RNA, 19 nt, Artificial Sequence
  Description of Artificial Sequence: Synthetic oligonucleotide
  Sense Strand Starting at position 454 of SEQ ID NO: 315835
accucccuucuguguuaua

SEQ ID NO: 354416 - RNA, 19 nt, Artificial Sequence
  Description of Artificial Sequence: Synthetic oligonucleotide
  Antisense Strand to SEQ ID NO: 354415
uauaacacagaagggaggu

SEQ ID NO: 354417 - RNA, 19 nt, Artificial Sequence
  Description of Artificial Sequence: Synthetic oligonucleotide
  Sense Strand Starting at position 454 of SEQ ID NO: 315934
uucugcuuucuaggacaau

SEQ ID NO: 354418 - RNA, 19 nt, Artificial Sequence
  Description of Artificial Sequence: Synthetic oligonucleotide
  Antisense Strand to SEQ ID NO: 354417
auuguccuagaaagcagaa

SEQ ID NO: 354419 - RNA, 19 nt, Artificial Sequence
  Description of Artificial Sequence: Synthetic oligonucleotide
  Sense Strand Starting at position 454 of SEQ ID NO: 315937
ugcuuucuaggacaaugau

SEQ ID NO: 354420 - RNA, 19 nt, Artificial Sequence
  Description of Artificial Sequence: Synthetic oligonucleotide
  Antisense Strand to SEQ ID NO: 354419
aucauuguccuagaaagca

SEQ ID NO: 354421 - RNA, 19 nt, Artificial Sequence
  Description of Artificial Sequence: Synthetic oligonucleotide
  Sense Strand Starting at position 454 of SEQ ID NO: 316152
ugcauucccgaguuugcua

SEQ ID NO: 354422 - RNA, 19 nt, Artificial Sequence
  Description of Artificial Sequence: Synthetic oligonucleotide
  Antisense Strand to SEQ ID NO: 354421
uagcaaacucgggaaugca

SEQ ID NO: 354423 - RNA, 19 nt, Artificial Sequence
  Description of Artificial Sequence: Synthetic oligonucleotide
  Sense Strand Starting at position 454 of SEQ ID NO: 316176
cgaucaugcccugggauca

SEQ ID NO: 354424 - RNA, 19 nt, Artificial Sequence
  Description of Artificial Sequence: Synthetic oligonucleotide
  Antisense Strand to SEQ ID NO: 354423
ugaucccagggcaugaucg

SEQ ID NO: 354425 - RNA, 19 nt, Artificial Sequence
  Description of Artificial Sequence: Synthetic oligonucleotide
  Sense Strand Starting at position 454 of SEQ ID NO: 317488
ugcagcugucuguuugcaa

SEQ ID NO: 354426 - RNA, 19 nt, Artificial Sequence
  Description of Artificial Sequence: Synthetic oligonucleotide
  Antisense Strand to SEQ ID NO: 354425
uugcaaacagacagcugca

SEQ ID NO: 354427 - RNA, 19 nt, Artificial Sequence
  Description of Artificial Sequence: Synthetic oligonucleotide
  Sense Strand Starting at position 454 of SEQ ID NO: 317687
agaggaguggcaugcucuu

SEQ ID NO: 354428 - RNA, 19 nt, Artificial Sequence
  Description of Artificial Sequence: Synthetic oligonucleotide
  Antisense Strand to SEQ ID NO: 354427
aagagcaugccacuccucu

SEQ ID NO: 354429 - RNA, 19 nt, Artificial Sequence
  Description of Artificial Sequence: Synthetic oligonucleotide
  Sense Strand Starting at position 454 of SEQ ID NO: 318016
gcuauuugagguugagugu

SEQ ID NO: 354430 - RNA, 19 nt, Artificial Sequence
  Description of Artificial Sequence: Synthetic oligonucleotide
  Antisense Strand to SEQ ID NO: 354429
acacucaaccucaaauagc

SEQ ID NO: 354431 - RNA, 19 nt, Artificial Sequence
  Description of Artificial Sequence: Synthetic oligonucleotide
  Sense Strand Starting at position 454 of SEQ ID NO: 318041
cagacagaaugauaaaugu

SEQ ID NO: 354432 - RNA, 19 nt, Artificial Sequence
  Description of Artificial Sequence: Synthetic oligonucleotide
  Antisense Strand to SEQ ID NO: 354431
acauuuaucauucugucug

SEQ ID NO: 354433 - RNA, 19 nt, Artificial Sequence
  Description of Artificial Sequence: Synthetic oligonucleotide
  Sense Strand Starting at position 454 of SEQ ID NO: 318051
gauaaaugugaagguucca

SEQ ID NO: 354434 - RNA, 19 nt, Artificial Sequence
  Description of Artificial Sequence: Synthetic oligonucleotide
  Antisense Strand to SEQ ID NO: 354433
uggaaccuucacauuuauc

SEQ ID NO: 354435 - RNA, 19 nt, Artificial Sequence
  Description of Artificial Sequence: Synthetic oligonucleotide
  Sense Strand Starting at position 454 of SEQ ID NO: 318201
ccugguugcauugaaggaa

SEQ ID NO: 354436 - RNA, 19 nt, Artificial Sequence
  Description of Artificial Sequence: Synthetic oligonucleotide
  Antisense Strand to SEQ ID NO: 354435
uuccuucaaugcaaccagg

SEQ ID NO: 354437 - RNA, 19 nt, Artificial Sequence
  Description of Artificial Sequence: Synthetic oligonucleotide
  Sense Strand Starting at position 454 of SEQ ID NO: 318205
guugcauugaaggaacuuu

SEQ ID NO: 354438 - RNA, 19 nt, Artificial Sequence
  Description of Artificial Sequence: Synthetic oligonucleotide
  Antisense Strand to SEQ ID NO: 354437
aaaguuccuucaaugcaac

SEQ ID NO: 354439 - RNA, 19 nt, Artificial Sequence
  Description of Artificial Sequence: Synthetic oligonucleotide
  Sense Strand Starting at position 454 of SEQ ID NO: 318456
ugacuaaugugagaggaag

SEQ ID NO: 354440 - RNA, 19 nt, Artificial Sequence
  Description of Artificial Sequence: Synthetic oligonucleotide
  Antisense Strand to SEQ ID NO: 354439
cuuccucucacauuaguca

SEQ ID NO: 354441 - RNA, 19 nt, Artificial Sequence
  Description of Artificial Sequence: Synthetic oligonucleotide
  Sense Strand Starting at position 454 of SEQ ID NO: 318519
agaauagacuugccauuaa

SEQ ID NO: 354442 - RNA, 19 nt, Artificial Sequence
  Description of Artificial Sequence: Synthetic oligonucleotide
  Antisense Strand to SEQ ID NO: 354441
uuaauggcaagucuauucu

SEQ ID NO: 354443 - RNA, 19 nt, Artificial Sequence
  Description of Artificial Sequence: Synthetic oligonucleotide
  Sense Strand Starting at position 454 of SEQ ID NO: 318599
acaugugacauucgagaug

SEQ ID NO: 354444 - RNA, 19 nt, Artificial Sequence
  Description of Artificial Sequence: Synthetic oligonucleotide
  Antisense Strand to SEQ ID NO: 354443
caucucgaaugucacaugu

SEQ ID NO: 354445 - RNA, 19 nt, Artificial Sequence
  Description of Artificial Sequence: Synthetic oligonucleotide
  Sense Strand Starting at position 454 of SEQ ID NO: 318611
cgagauguccucuagacag

SEQ ID NO: 354446 - RNA, 19 nt, Artificial Sequence
  Description of Artificial Sequence: Synthetic oligonucleotide
  Antisense Strand to SEQ ID NO: 354445
cugucuagaggacaucucg

SEQ ID NO: 354447 - RNA, 19 nt, Artificial Sequence
  Description of Artificial Sequence: Synthetic oligonucleotide
  Sense Strand Starting at position 454 of SEQ ID NO: 318654
gcaguuguaggauagcuga

SEQ ID NO: 354448 - RNA, 19 nt, Artificial Sequence
  Description of Artificial Sequence: Synthetic oligonucleotide
  Antisense Strand to SEQ ID NO: 354447
ucagcuauccuacaacugc

SEQ ID NO: 354449 - RNA, 19 nt, Artificial Sequence
  Description of Artificial Sequence: Synthetic oligonucleotide
  Sense Strand Starting at position 454 of SEQ ID NO: 318717
gcagcacucagauaguguu

SEQ ID NO: 354450 - RNA, 19 nt, Artificial Sequence
  Description of Artificial Sequence: Synthetic oligonucleotide
  Antisense Strand to SEQ ID NO: 354449
aacacuaucugagugcugc

SEQ ID NO: 354451 - RNA, 19 nt, Artificial Sequence
  Description of Artificial Sequence: Synthetic oligonucleotide
  Sense Strand Starting at position 454 of SEQ ID NO: 318867
uucuucugauggcuguaaa

SEQ ID NO: 354452 - RNA, 19 nt, Artificial Sequence
  Description of Artificial Sequence: Synthetic oligonucleotide
  Antisense Strand to SEQ ID NO: 354451
uuuacagccaucagaagaa

SEQ ID NO: 354453 - RNA, 19 nt, Artificial Sequence
  Description of Artificial Sequence: Synthetic oligonucleotide
  Sense Strand Starting at position 454 of SEQ ID NO: 318868
ucuucugauggcuguaaag

SEQ ID NO: 354454 - RNA, 19 nt, Artificial Sequence
  Description of Artificial Sequence: Synthetic oligonucleotide
  Antisense Strand to SEQ ID NO: 354453
cuuuacagccaucagaaga

SEQ ID NO: 354455 - RNA, 19 nt, Artificial Sequence
  Description of Artificial Sequence: Synthetic oligonucleotide
  Sense Strand Starting at position 454 of SEQ ID NO: 318870
uucugauggcuguaaagca

SEQ ID NO: 354456 - RNA, 19 nt, Artificial Sequence
  Description of Artificial Sequence: Synthetic oligonucleotide
  Antisense Strand to SEQ ID NO: 354455
ugcuuuacagccaucagaa

SEQ ID NO: 354457 - RNA, 19 nt, Artificial Sequence
  Description of Artificial Sequence: Synthetic oligonucleotide
  Sense Strand Starting at position 454 of SEQ ID NO: 318886
gcagccaugcugucugcaa

SEQ ID NO: 354458 - RNA, 19 nt, Artificial Sequence
  Description of Artificial Sequence: Synthetic oligonucleotide
  Antisense Strand to SEQ ID NO: 354457
uugcagacagcauggcugc

SEQ ID NO: 354459 - RNA, 19 nt, Artificial Sequence
  Description of Artificial Sequence: Synthetic oligonucleotide
  Sense Strand Starting at position 454 of SEQ ID NO: 318894
gcugucugcaaccaagagu

SEQ ID NO: 354460 - RNA, 19 nt, Artificial Sequence
  Description of Artificial Sequence: Synthetic oligonucleotide
  Antisense Strand to SEQ ID NO: 354459
acucuugguugcagacagc

SEQ ID NO: 354461 - RNA, 19 nt, Artificial Sequence
  Description of Artificial Sequence: Synthetic oligonucleotide
  Sense Strand Starting at position 454 of SEQ ID NO: 319119
aggugaaauaguggguuau

SEQ ID NO: 354462 - RNA, 19 nt, Artificial Sequence
  Description of Artificial Sequence: Synthetic oligonucleotide
  Antisense Strand to SEQ ID NO: 354461
auaacccacuauuucaccu

SEQ ID NO: 354463 - RNA, 19 nt, Artificial Sequence
  Description of Artificial Sequence: Synthetic oligonucleotide
  Sense Strand Starting at position 454 of SEQ ID NO: 319120
ggugaaauaguggguuaug

SEQ ID NO: 354464 - RNA, 19 nt, Artificial Sequence
  Description of Artificial Sequence: Synthetic oligonucleotide
  Antisense Strand to SEQ ID NO: 354463
cauaacccacuauuucacc

SEQ ID NO: 354465 - RNA, 19 nt, Artificial Sequence
  Description of Artificial Sequence: Synthetic oligonucleotide
  Sense Strand Starting at position 454 of SEQ ID NO: 319121
gugaaauaguggguuaugu

SEQ ID NO: 354466 - RNA, 19 nt, Artificial Sequence
  Description of Artificial Sequence: Synthetic oligonucleotide
  Antisense Strand to SEQ ID NO: 354465
acauaacccacuauuucac

SEQ ID NO: 354467 - RNA, 19 nt, Artificial Sequence
  Description of Artificial Sequence: Synthetic oligonucleotide
  Sense Strand Starting at position 454 of SEQ ID NO: 319123
gaaauaguggguuaugugu

SEQ ID NO: 354468 - RNA, 19 nt, Artificial Sequence
  Description of Artificial Sequence: Synthetic oligonucleotide
  Antisense Strand to SEQ ID NO: 354467
acacauaacccacuauuuc

SEQ ID NO: 354469 - RNA, 19 nt, Artificial Sequence
  Description of Artificial Sequence: Synthetic oligonucleotide
  Sense Strand Starting at position 454 of SEQ ID NO: 319139
ugugguuguucuccuggaa

SEQ ID NO: 354470 - RNA, 19 nt, Artificial Sequence
  Description of Artificial Sequence: Synthetic oligonucleotide
  Antisense Strand to SEQ ID NO: 354469
uuccaggagaacaaccaca

SEQ ID NO: 354471 - RNA, 19 nt, Artificial Sequence
  Description of Artificial Sequence: Synthetic oligonucleotide
  Sense Strand Starting at position 454 of SEQ ID NO: 319152
cuggaaucccauuguaaug

SEQ ID NO: 354472 - RNA, 19 nt, Artificial Sequence
  Description of Artificial Sequence: Synthetic oligonucleotide
  Antisense Strand to SEQ ID NO: 354471
cauuacaaugggauuccag

SEQ ID NO: 354473 - RNA, 19 nt, Artificial Sequence
  Description of Artificial Sequence: Synthetic oligonucleotide
  Sense Strand Starting at position 454 of SEQ ID NO: 319176
guggacagugcuuagcaau

SEQ ID NO: 354474 - RNA, 19 nt, Artificial Sequence
  Description of Artificial Sequence: Synthetic oligonucleotide
  Antisense Strand to SEQ ID NO: 354473
auugcuaagcacuguccac

SEQ ID NO: 354475 - RNA, 19 nt, Artificial Sequence
  Description of Artificial Sequence: Synthetic oligonucleotide
  Sense Strand Starting at position 454 of SEQ ID NO: 319196
ucuggauugaauugugucu

SEQ ID NO: 354476 - RNA, 19 nt, Artificial Sequence
  Description of Artificial Sequence: Synthetic oligonucleotide
  Antisense Strand to SEQ ID NO: 354475
agacacaauucaauccaga

SEQ ID NO: 354477 - RNA, 19 nt, Artificial Sequence
  Description of Artificial Sequence: Synthetic oligonucleotide
  Sense Strand Starting at position 454 of SEQ ID NO: 319201
auugaauugugucuuccaa

SEQ ID NO: 354478 - RNA, 19 nt, Artificial Sequence
  Description of Artificial Sequence: Synthetic oligonucleotide
  Antisense Strand to SEQ ID NO: 354477
uuggaagacacaauucaau

SEQ ID NO: 354479 - RNA, 19 nt, Artificial Sequence
  Description of Artificial Sequence: Synthetic oligonucleotide
  Sense Strand Starting at position 455 of SEQ ID NO: 315491
uucggauucagggagugua

SEQ ID NO: 354480 - RNA, 19 nt, Artificial Sequence
  Description of Artificial Sequence: Synthetic oligonucleotide
  Antisense Strand to SEQ ID NO: 354479
uacacucccugaauccgaa

SEQ ID NO: 354481 - RNA, 19 nt, Artificial Sequence
  Description of Artificial Sequence: Synthetic oligonucleotide
  Sense Strand Starting at position 455 of SEQ ID NO: 315494
ggauucagggaguguauua

SEQ ID NO: 354482 - RNA, 19 nt, Artificial Sequence
  Description of Artificial Sequence: Synthetic oligonucleotide
  Antisense Strand to SEQ ID NO: 354481
uaauacacucccugaaucc

SEQ ID NO: 354483 - RNA, 19 nt, Artificial Sequence
  Description of Artificial Sequence: Synthetic oligonucleotide
  Sense Strand Starting at position 455 of SEQ ID NO: 315601
gggcuucuuugaccaagau

SEQ ID NO: 354484 - RNA, 19 nt, Artificial Sequence
  Description of Artificial Sequence: Synthetic oligonucleotide
  Antisense Strand to SEQ ID NO: 354483
aucuuggucaaagaagccc

SEQ ID NO: 354485 - RNA, 19 nt, Artificial Sequence
  Description of Artificial Sequence: Synthetic oligonucleotide
  Sense Strand Starting at position 455 of SEQ ID NO: 315602
ggcuucuuugaccaagauu

SEQ ID NO: 354486 - RNA, 19 nt, Artificial Sequence
  Description of Artificial Sequence: Synthetic oligonucleotide
  Antisense Strand to SEQ ID NO: 354485
aaucuuggucaaagaagcc

SEQ ID NO: 354487 - RNA, 19 nt, Artificial Sequence
  Description of Artificial Sequence: Synthetic oligonucleotide
  Sense Strand Starting at position 455 of SEQ ID NO: 315967
acuuauuauccaggauguu

SEQ ID NO: 354488 - RNA, 19 nt, Artificial Sequence
  Description of Artificial Sequence: Synthetic oligonucleotide
  Antisense Strand to SEQ ID NO: 354487
aacauccuggauaauaagu

SEQ ID NO: 354489 - RNA, 19 nt, Artificial Sequence
  Description of Artificial Sequence: Synthetic oligonucleotide
  Sense Strand Starting at position 455 of SEQ ID NO: 316048
ccugguuuccaacagguaa

SEQ ID NO: 354490 - RNA, 19 nt, Artificial Sequence
  Description of Artificial Sequence: Synthetic oligonucleotide
  Antisense Strand to SEQ ID NO: 354489
uuaccuguuggaaaccagg

SEQ ID NO: 354491 - RNA, 19 nt, Artificial Sequence
  Description of Artificial Sequence: Synthetic oligonucleotide
  Sense Strand Starting at position 455 of SEQ ID NO: 316288
aaauaagaccugcacguuu

SEQ ID NO: 354492 - RNA, 19 nt, Artificial Sequence
  Description of Artificial Sequence: Synthetic oligonucleotide
  Antisense Strand to SEQ ID NO: 354491
aaacgugcaggucuuauuu

SEQ ID NO: 354493 - RNA, 19 nt, Artificial Sequence
  Description of Artificial Sequence: Synthetic oligonucleotide
  Sense Strand Starting at position 455 of SEQ ID NO: 316336
ucaugcaugcacgaaauaa

SEQ ID NO: 354494 - RNA, 19 nt, Artificial Sequence
  Description of Artificial Sequence: Synthetic oligonucleotide
  Antisense Strand to SEQ ID NO: 354493
uuauuucgugcaugcauga

SEQ ID NO: 354495 - RNA, 19 nt, Artificial Sequence
  Description of Artificial Sequence: Synthetic oligonucleotide
  Sense Strand Starting at position 455 of SEQ ID NO: 316396
aggcaauacucaguucuga

SEQ ID NO: 354496 - RNA, 19 nt, Artificial Sequence
  Description of Artificial Sequence: Synthetic oligonucleotide
  Antisense Strand to SEQ ID NO: 354495
ucagaacugaguauugccu

SEQ ID NO: 354497 - RNA, 19 nt, Artificial Sequence
  Description of Artificial Sequence: Synthetic oligonucleotide
  Sense Strand Starting at position 455 of SEQ ID NO: 316537
accucaaaugcugagcauu

SEQ ID NO: 354498 - RNA, 19 nt, Artificial Sequence
  Description of Artificial Sequence: Synthetic oligonucleotide
  Antisense Strand to SEQ ID NO: 354497
aaugcucagcauuugaggu

SEQ ID NO: 354499 - RNA, 19 nt, Artificial Sequence
  Description of Artificial Sequence: Synthetic oligonucleotide
  Sense Strand Starting at position 455 of SEQ ID NO: 316672
cugggaugcaaccaucagu

SEQ ID NO: 354500 - RNA, 19 nt, Artificial Sequence
  Description of Artificial Sequence: Synthetic oligonucleotide
  Antisense Strand to SEQ ID NO: 354499
acugaugguugcaucccag

SEQ ID NO: 354501 - RNA, 19 nt, Artificial Sequence
  Description of Artificial Sequence: Synthetic oligonucleotide
  Sense Strand Starting at position 455 of SEQ ID NO: 317358
acugcauugagagggugau

SEQ ID NO: 354502 - RNA, 19 nt, Artificial Sequence
  Description of Artificial Sequence: Synthetic oligonucleotide
  Antisense Strand to SEQ ID NO: 354501
aucacccucucaaugcagu

SEQ ID NO: 354503 - RNA, 19 nt, Artificial Sequence
  Description of Artificial Sequence: Synthetic oligonucleotide
  Sense Strand Starting at position 455 of SEQ ID NO: 317401
ccagucaauccaggagaua

SEQ ID NO: 354504 - RNA, 19 nt, Artificial Sequence
  Description of Artificial Sequence: Synthetic oligonucleotide
  Antisense Strand to SEQ ID NO: 354503
uaucuccuggauugacugg

SEQ ID NO: 354505 - RNA, 19 nt, Artificial Sequence
  Description of Artificial Sequence: Synthetic oligonucleotide
  Sense Strand Starting at position 455 of SEQ ID NO: 317592
aauaauuguggagguuaau

SEQ ID NO: 354506 - RNA, 19 nt, Artificial Sequence
  Description of Artificial Sequence: Synthetic oligonucleotide
  Antisense Strand to SEQ ID NO: 354505
auuaaccuccacaauuauu

SEQ ID NO: 354507 - RNA, 19 nt, Artificial Sequence
  Description of Artificial Sequence: Synthetic oligonucleotide
  Sense Strand Starting at position 455 of SEQ ID NO: 317699
cuuagauaugcacaagcau

SEQ ID NO: 354508 - RNA, 19 nt, Artificial Sequence
  Description of Artificial Sequence: Synthetic oligonucleotide
  Antisense Strand to SEQ ID NO: 354507
augcuugugcauaucuaag

SEQ ID NO: 354509 - RNA, 19 nt, Artificial Sequence
  Description of Artificial Sequence: Synthetic oligonucleotide
  Sense Strand Starting at position 455 of SEQ ID NO: 317813
guuuaagaauuggcaucca

SEQ ID NO: 354510 - RNA, 19 nt, Artificial Sequence
  Description of Artificial Sequence: Synthetic oligonucleotide
  Antisense Strand to SEQ ID NO: 354509
uggaugccaauucuuaaac

SEQ ID NO: 354511 - RNA, 19 nt, Artificial Sequence
  Description of Artificial Sequence: Synthetic oligonucleotide
  Sense Strand Starting at position 455 of SEQ ID NO: 317874
acauauaccuguuuguaaa

SEQ ID NO: 354512 - RNA, 19 nt, Artificial Sequence
  Description of Artificial Sequence: Synthetic oligonucleotide
  Antisense Strand to SEQ ID NO: 354511
uuuacaaacagguauaugu

SEQ ID NO: 354513 - RNA, 19 nt, Artificial Sequence
  Description of Artificial Sequence: Synthetic oligonucleotide
  Sense Strand Starting at position 455 of SEQ ID NO: 317934
caaacaggucuguguaaua

SEQ ID NO: 354514 - RNA, 19 nt, Artificial Sequence
  Description of Artificial Sequence: Synthetic oligonucleotide
  Antisense Strand to SEQ ID NO: 354513
uauuacacagaccuguuug

SEQ ID NO: 354515 - RNA, 19 nt, Artificial Sequence
  Description of Artificial Sequence: Synthetic oligonucleotide
  Sense Strand Starting at position 455 of SEQ ID NO: 317948
uaauauugacggugaucaa

SEQ ID NO: 354516 - RNA, 19 nt, Artificial Sequence
  Description of Artificial Sequence: Synthetic oligonucleotide
  Antisense Strand to SEQ ID NO: 354515
uugaucaccgucaauauua

SEQ ID NO: 354517 - RNA, 19 nt, Artificial Sequence
  Description of Artificial Sequence: Synthetic oligonucleotide
  Sense Strand Starting at position 455 of SEQ ID NO: 318027
acgauaagucaugaagccu

SEQ ID NO: 354518 - RNA, 19 nt, Artificial Sequence
  Description of Artificial Sequence: Synthetic oligonucleotide
  Antisense Strand to SEQ ID NO: 354517
aggcuucaugacuuaucgu

SEQ ID NO: 354519 - RNA, 19 nt, Artificial Sequence
  Description of Artificial Sequence: Synthetic oligonucleotide
  Sense Strand Starting at position 455 of SEQ ID NO: 318087
aggaacaugugacucuuaa

SEQ ID NO: 354520 - RNA, 19 nt, Artificial Sequence
  Description of Artificial Sequence: Synthetic oligonucleotide
  Antisense Strand to SEQ ID NO: 354519
uuaagagucacauguuccu

SEQ ID NO: 354521 - RNA, 19 nt, Artificial Sequence
  Description of Artificial Sequence: Synthetic oligonucleotide
  Sense Strand Starting at position 455 of SEQ ID NO: 318270
ucucucugaguguauaaua

SEQ ID NO: 354522 - RNA, 19 nt, Artificial Sequence
  Description of Artificial Sequence: Synthetic oligonucleotide
  Antisense Strand to SEQ ID NO: 354521
uauuauacacucagagaga

SEQ ID NO: 354523 - RNA, 19 nt, Artificial Sequence
  Description of Artificial Sequence: Synthetic oligonucleotide
  Sense Strand Starting at position 455 of SEQ ID NO: 318286
auagcuuuacuccagagac

SEQ ID NO: 354524 - RNA, 19 nt, Artificial Sequence
  Description of Artificial Sequence: Synthetic oligonucleotide
  Antisense Strand to SEQ ID NO: 354523
gucucuggaguaaagcuau

SEQ ID NO: 354525 - RNA, 19 nt, Artificial Sequence
  Description of Artificial Sequence: Synthetic oligonucleotide
  Sense Strand Starting at position 455 of SEQ ID NO: 318288
agcuuuacuccagagacug

SEQ ID NO: 354526 - RNA, 19 nt, Artificial Sequence
  Description of Artificial Sequence: Synthetic oligonucleotide
  Antisense Strand to SEQ ID NO: 354525
cagucucuggaguaaagcu

SEQ ID NO: 354527 - RNA, 19 nt, Artificial Sequence
  Description of Artificial Sequence: Synthetic oligonucleotide
  Sense Strand Starting at position 455 of SEQ ID NO: 318314
cugaaauucgggugacauu

SEQ ID NO: 354528 - RNA, 19 nt, Artificial Sequence
  Description of Artificial Sequence: Synthetic oligonucleotide
  Antisense Strand to SEQ ID NO: 354527
aaugucacccgaauuucag

SEQ ID NO: 354529 - RNA, 19 nt, Artificial Sequence
  Description of Artificial Sequence: Synthetic oligonucleotide
  Sense Strand Starting at position 455 of SEQ ID NO: 318321
ucgggugacauuugcaagu

SEQ ID NO: 354530 - RNA, 19 nt, Artificial Sequence
  Description of Artificial Sequence: Synthetic oligonucleotide
  Antisense Strand to SEQ ID NO: 354529
acuugcaaaugucacccga

SEQ ID NO: 354531 - RNA, 19 nt, Artificial Sequence
  Description of Artificial Sequence: Synthetic oligonucleotide
  Sense Strand Starting at position 455 of SEQ ID NO: 318334
gcaagugaauaucucaaag

SEQ ID NO: 354532 - RNA, 19 nt, Artificial Sequence
  Description of Artificial Sequence: Synthetic oligonucleotide
  Antisense Strand to SEQ ID NO: 354531
cuuugagauauucacuugc

SEQ ID NO: 354533 - RNA, 19 nt, Artificial Sequence
  Description of Artificial Sequence: Synthetic oligonucleotide
  Sense Strand Starting at position 455 of SEQ ID NO: 318514
ucaauaagugcuuaguaca

SEQ ID NO: 354534 - RNA, 19 nt, Artificial Sequence
  Description of Artificial Sequence: Synthetic oligonucleotide
  Antisense Strand to SEQ ID NO: 354533
uguacuaagcacuuauuga

SEQ ID NO: 354535 - RNA, 19 nt, Artificial Sequence
  Description of Artificial Sequence: Synthetic oligonucleotide
  Sense Strand Starting at position 455 of SEQ ID NO: 318638
cuuaauuauuccucaggag

SEQ ID NO: 354536 - RNA, 19 nt, Artificial Sequence
  Description of Artificial Sequence: Synthetic oligonucleotide
  Antisense Strand to SEQ ID NO: 354535
cuccugaggaauaauuaag

SEQ ID NO: 354537 - RNA, 19 nt, Artificial Sequence
  Description of Artificial Sequence: Synthetic oligonucleotide
  Sense Strand Starting at position 455 of SEQ ID NO: 318639
uuaauuauuccucaggagu

SEQ ID NO: 354538 - RNA, 19 nt, Artificial Sequence
  Description of Artificial Sequence: Synthetic oligonucleotide
  Antisense Strand to SEQ ID NO: 354537
acuccugaggaauaauuaa

SEQ ID NO: 354539 - RNA, 19 nt, Artificial Sequence
  Description of Artificial Sequence: Synthetic oligonucleotide
  Sense Strand Starting at position 455 of SEQ ID NO: 318642
auuauuccucaggagucuu

SEQ ID NO: 354540 - RNA, 19 nt, Artificial Sequence
  Description of Artificial Sequence: Synthetic oligonucleotide
  Antisense Strand to SEQ ID NO: 354539
aagacuccugaggaauaau

SEQ ID NO: 354541 - RNA, 19 nt, Artificial Sequence
  Description of Artificial Sequence: Synthetic oligonucleotide
  Sense Strand Starting at position 455 of SEQ ID NO: 318650
ucaggagucuuccugagag

SEQ ID NO: 354542 - RNA, 19 nt, Artificial Sequence
  Description of Artificial Sequence: Synthetic oligonucleotide
  Antisense Strand to SEQ ID NO: 354541
cucucaggaagacuccuga

SEQ ID NO: 354543 - RNA, 19 nt, Artificial Sequence
  Description of Artificial Sequence: Synthetic oligonucleotide
  Sense Strand Starting at position 455 of SEQ ID NO: 318652
aggagucuuccugagagug

SEQ ID NO: 354544 - RNA, 19 nt, Artificial Sequence
  Description of Artificial Sequence: Synthetic oligonucleotide
  Antisense Strand to SEQ ID NO: 354543
cacucucaggaagacuccu

SEQ ID NO: 354545 - RNA, 19 nt, Artificial Sequence
  Description of Artificial Sequence: Synthetic oligonucleotide
  Sense Strand Starting at position 455 of SEQ ID NO: 318748
cagaauuaguuucugaguu

SEQ ID NO: 354546 - RNA, 19 nt, Artificial Sequence
  Description of Artificial Sequence: Synthetic oligonucleotide
  Antisense Strand to SEQ ID NO: 354545
aacucagaaacuaauucug

SEQ ID NO: 354547 - RNA, 19 nt, Artificial Sequence
  Description of Artificial Sequence: Synthetic oligonucleotide
  Sense Strand Starting at position 455 of SEQ ID NO: 318861
uggcuccuaccagaaacau

SEQ ID NO: 354548 - RNA, 19 nt, Artificial Sequence
  Description of Artificial Sequence: Synthetic oligonucleotide
  Antisense Strand to SEQ ID NO: 354547
auguuucugguaggagcca

SEQ ID NO: 354549 - RNA, 19 nt, Artificial Sequence
  Description of Artificial Sequence: Synthetic oligonucleotide
  Sense Strand Starting at position 455 of SEQ ID NO: 318993
gguguuuaaacaggauaac

SEQ ID NO: 354550 - RNA, 19 nt, Artificial Sequence
  Description of Artificial Sequence: Synthetic oligonucleotide
  Antisense Strand to SEQ ID NO: 354549
guuauccuguuuaaacacc

SEQ ID NO: 354551 - RNA, 19 nt, Artificial Sequence
  Description of Artificial Sequence: Synthetic oligonucleotide
  Sense Strand Starting at position 455 of SEQ ID NO: 319060
gggacuaauuccuuucccu

SEQ ID NO: 354552 - RNA, 19 nt, Artificial Sequence
  Description of Artificial Sequence: Synthetic oligonucleotide
  Antisense Strand to SEQ ID NO: 354551
agggaaaggaauuaguccc

SEQ ID NO: 354553 - RNA, 19 nt, Artificial Sequence
  Description of Artificial Sequence: Synthetic oligonucleotide
  Sense Strand Starting at position 455 of SEQ ID NO: 319191
gggcacaagcauugaugaa

SEQ ID NO: 354554 - RNA, 19 nt, Artificial Sequence
  Description of Artificial Sequence: Synthetic oligonucleotide
  Antisense Strand to SEQ ID NO: 354553
uucaucaaugcuugugccc

SEQ ID NO: 354555 - RNA, 19 nt, Artificial Sequence
  Description of Artificial Sequence: Synthetic oligonucleotide
  Sense Strand Starting at position 455 of SEQ ID NO: 319201
auugaugaacuuugugacu

SEQ ID NO: 354556 - RNA, 19 nt, Artificial Sequence
  Description of Artificial Sequence: Synthetic oligonucleotide
  Antisense Strand to SEQ ID NO: 354555
agucacaaaguucaucaau

SEQ ID NO: 354557 - RNA, 19 nt, Artificial Sequence
  Description of Artificial Sequence: Synthetic oligonucleotide
  Sense Strand Starting at position 455 of SEQ ID NO: 319206
ugaacuuugugacuaaaua

SEQ ID NO: 354558 - RNA, 19 nt, Artificial Sequence
  Description of Artificial Sequence: Synthetic oligonucleotide
  Antisense Strand to SEQ ID NO: 354557
uauuuagucacaaaguuca

SEQ ID NO: 354559 - RNA, 19 nt, Artificial Sequence
  Description of Artificial Sequence: Synthetic oligonucleotide
  Sense Strand Starting at position 456 of SEQ ID NO: 315400
ucgauuccugcggauccua

SEQ ID NO: 354560 - RNA, 19 nt, Artificial Sequence
  Description of Artificial Sequence: Synthetic oligonucleotide
  Antisense Strand to SEQ ID NO: 354559
uaggauccgcaggaaucga

SEQ ID NO: 354561 - RNA, 19 nt, Artificial Sequence
  Description of Artificial Sequence: Synthetic oligonucleotide
  Sense Strand Starting at position 456 of SEQ ID NO: 315574
gcgagucgaggugauugaa

SEQ ID NO: 354562 - RNA, 19 nt, Artificial Sequence
  Description of Artificial Sequence: Synthetic oligonucleotide
  Antisense Strand to SEQ ID NO: 354561
uucaaucaccucgacucgc

SEQ ID NO: 354563 - RNA, 19 nt, Artificial Sequence
  Description of Artificial Sequence: Synthetic oligonucleotide
  Sense Strand Starting at position 456 of SEQ ID NO: 315577
agucgaggugauugaagaa

SEQ ID NO: 354564 - RNA, 19 nt, Artificial Sequence
  Description of Artificial Sequence: Synthetic oligonucleotide
  Antisense Strand to SEQ ID NO: 354563
uucuucaaucaccucgacu

SEQ ID NO: 354565 - RNA, 19 nt, Artificial Sequence
  Description of Artificial Sequence: Synthetic oligonucleotide
  Sense Strand Starting at position 456 of SEQ ID NO: 315625
gcgcggguuccauguaguu

SEQ ID NO: 354566 - RNA, 19 nt, Artificial Sequence
  Description of Artificial Sequence: Synthetic oligonucleotide
  Antisense Strand to SEQ ID NO: 354565
aacuacauggaacccgcgc

SEQ ID NO: 354567 - RNA, 19 nt, Artificial Sequence
  Description of Artificial Sequence: Synthetic oligonucleotide
  Sense Strand Starting at position 456 of SEQ ID NO: 315627
gcggguuccauguaguugu

SEQ ID NO: 354568 - RNA, 19 nt, Artificial Sequence
  Description of Artificial Sequence: Synthetic oligonucleotide
  Antisense Strand to SEQ ID NO: 354567
acaacuacauggaacccgc

SEQ ID NO: 354569 - RNA, 19 nt, Artificial Sequence
  Description of Artificial Sequence: Synthetic oligonucleotide
  Sense Strand Starting at position 456 of SEQ ID NO: 316439
ggacucggccucugagagu

SEQ ID NO: 354570 - RNA, 19 nt, Artificial Sequence
  Description of Artificial Sequence: Synthetic oligonucleotide
  Antisense Strand to SEQ ID NO: 354569
acucucagaggccgagucc

SEQ ID NO: 354571 - RNA, 19 nt, Artificial Sequence
  Description of Artificial Sequence: Synthetic oligonucleotide
  Sense Strand Starting at position 456 of SEQ ID NO: 317107
ugggaugguucggacgaca

SEQ ID NO: 354572 - RNA, 19 nt, Artificial Sequence
  Description of Artificial Sequence: Synthetic oligonucleotide
  Antisense Strand to SEQ ID NO: 354571
ugucguccgaaccauccca

SEQ ID NO: 354573 - RNA, 19 nt, Artificial Sequence
  Description of Artificial Sequence: Synthetic oligonucleotide
  Sense Strand Starting at position 456 of SEQ ID NO: 317458
aggucuccgucuucuaagu

SEQ ID NO: 354574 - RNA, 19 nt, Artificial Sequence
  Description of Artificial Sequence: Synthetic oligonucleotide
  Antisense Strand to SEQ ID NO: 354573
acuuagaagacggagaccu

SEQ ID NO: 354575 - RNA, 19 nt, Artificial Sequence
  Description of Artificial Sequence: Synthetic oligonucleotide
  Sense Strand Starting at position 456 of SEQ ID NO: 317467
ucuucuaagucaccuggaa

SEQ ID NO: 354576 - RNA, 19 nt, Artificial Sequence
  Description of Artificial Sequence: Synthetic oligonucleotide
  Antisense Strand to SEQ ID NO: 354575
uuccaggugacuuagaaga

SEQ ID NO: 354577 - RNA, 19 nt, Artificial Sequence
  Description of Artificial Sequence: Synthetic oligonucleotide
  Sense Strand Starting at position 456 of SEQ ID NO: 317497
ucacuucuagcccggagau

SEQ ID NO: 354578 - RNA, 19 nt, Artificial Sequence
  Description of Artificial Sequence: Synthetic oligonucleotide
  Antisense Strand to SEQ ID NO: 354577
aucuccgggcuagaaguga

SEQ ID NO: 354579 - RNA, 19 nt, Artificial Sequence
  Description of Artificial Sequence: Synthetic oligonucleotide
  Sense Strand Starting at position 456 of SEQ ID NO: 317510
ggagaucggcucuaugguu

SEQ ID NO: 354580 - RNA, 19 nt, Artificial Sequence
  Description of Artificial Sequence: Synthetic oligonucleotide
  Antisense Strand to SEQ ID NO: 354579
aaccauagagccgaucucc

SEQ ID NO: 354581 - RNA, 19 nt, Artificial Sequence
  Description of Artificial Sequence: Synthetic oligonucleotide
  Sense Strand Starting at position 456 of SEQ ID NO: 317811
gggauugacagucgguaau

SEQ ID NO: 354582 - RNA, 19 nt, Artificial Sequence
  Description of Artificial Sequence: Synthetic oligonucleotide
  Antisense Strand to SEQ ID NO: 354581
auuaccgacugucaauccc

SEQ ID NO: 354583 - RNA, 19 nt, Artificial Sequence
  Description of Artificial Sequence: Synthetic oligonucleotide
  Sense Strand Starting at position 456 of SEQ ID NO: 317813
gauugacagucgguaauug

SEQ ID NO: 354584 - RNA, 19 nt, Artificial Sequence
  Description of Artificial Sequence: Synthetic oligonucleotide
  Antisense Strand to SEQ ID NO: 354583
caauuaccgacugucaauc

SEQ ID NO: 354585 - RNA, 19 nt, Artificial Sequence
  Description of Artificial Sequence: Synthetic oligonucleotide
  Sense Strand Starting at position 456 of SEQ ID NO: 317897
cccgauucgccaggaaaug

SEQ ID NO: 354586 - RNA, 19 nt, Artificial Sequence
  Description of Artificial Sequence: Synthetic oligonucleotide
  Antisense Strand to SEQ ID NO: 354585
cauuuccuggcgaaucggg

SEQ ID NO: 354587 - RNA, 19 nt, Artificial Sequence
  Description of Artificial Sequence: Synthetic oligonucleotide
  Sense Strand Starting at position 456 of SEQ ID NO: 317898
ccgauucgccaggaaauga

SEQ ID NO: 354588 - RNA, 19 nt, Artificial Sequence
  Description of Artificial Sequence: Synthetic oligonucleotide
  Antisense Strand to SEQ ID NO: 354587
ucauuuccuggcgaaucgg

SEQ ID NO: 354589 - RNA, 19 nt, Artificial Sequence
  Description of Artificial Sequence: Synthetic oligonucleotide
  Sense Strand Starting at position 456 of SEQ ID NO: 318452
ccgucugucucucaacuuu

SEQ ID NO: 354590 - RNA, 19 nt, Artificial Sequence
  Description of Artificial Sequence: Synthetic oligonucleotide
  Antisense Strand to SEQ ID NO: 354589
aaaguugagagacagacgg

SEQ ID NO: 354591 - RNA, 19 nt, Artificial Sequence
  Description of Artificial Sequence: Synthetic oligonucleotide
  Sense Strand Starting at position 456 of SEQ ID NO: 318831
ccguguguauucccaguuu

SEQ ID NO: 354592 - RNA, 19 nt, Artificial Sequence
  Description of Artificial Sequence: Synthetic oligonucleotide
  Antisense Strand to SEQ ID NO: 354591
aaacugggaauacacacgg

SEQ ID NO: 354593 - RNA, 19 nt, Artificial Sequence
  Description of Artificial Sequence: Synthetic oligonucleotide
  Sense Strand Starting at position 456 of SEQ ID NO: 318855
cagcgagcucggcgucuaa

SEQ ID NO: 354594 - RNA, 19 nt, Artificial Sequence
  Description of Artificial Sequence: Synthetic oligonucleotide
  Antisense Strand to SEQ ID NO: 354593
uuagacgccgagcucgcug

SEQ ID NO: 354595 - RNA, 19 nt, Artificial Sequence
  Description of Artificial Sequence: Synthetic oligonucleotide
  Sense Strand Starting at position 456 of SEQ ID NO: 319051
acgguuaaggagugcuuga

SEQ ID NO: 354596 - RNA, 19 nt, Artificial Sequence
  Description of Artificial Sequence: Synthetic oligonucleotide
  Antisense Strand to SEQ ID NO: 354595
ucaagcacuccuuaaccgu

SEQ ID NO: 354597 - RNA, 19 nt, Artificial Sequence
  Description of Artificial Sequence: Synthetic oligonucleotide
  Sense Strand Starting at position 456 of SEQ ID NO: 319139
ggaguucugccagguccuu

SEQ ID NO: 354598 - RNA, 19 nt, Artificial Sequence
  Description of Artificial Sequence: Synthetic oligonucleotide
  Antisense Strand to SEQ ID NO: 354597
aaggaccuggcagaacucc

SEQ ID NO: 354599 - RNA, 19 nt, Artificial Sequence
  Description of Artificial Sequence: Synthetic oligonucleotide
  Sense Strand Starting at position 457 of SEQ ID NO: 315533
gcaguggcgucuuggagaa

SEQ ID NO: 354600 - RNA, 19 nt, Artificial Sequence
  Description of Artificial Sequence: Synthetic oligonucleotide
  Antisense Strand to SEQ ID NO: 354599
uucuccaagacgccacugc

SEQ ID NO: 354601 - RNA, 19 nt, Artificial Sequence
  Description of Artificial Sequence: Synthetic oligonucleotide
  Sense Strand Starting at position 457 of SEQ ID NO: 315829
cgguaauaaucaggaaugu

SEQ ID NO: 354602 - RNA, 19 nt, Artificial Sequence
  Description of Artificial Sequence: Synthetic oligonucleotide
  Antisense Strand to SEQ ID NO: 354601
acauuccugauuauuaccg

SEQ ID NO: 354603 - RNA, 19 nt, Artificial Sequence
  Description of Artificial Sequence: Synthetic oligonucleotide
  Sense Strand Starting at position 457 of SEQ ID NO: 315838
ucaggaaugucaguccaag

SEQ ID NO: 354604 - RNA, 19 nt, Artificial Sequence
  Description of Artificial Sequence: Synthetic oligonucleotide
  Antisense Strand to SEQ ID NO: 354603
cuuggacugacauuccuga

SEQ ID NO: 354605 - RNA, 19 nt, Artificial Sequence
  Description of Artificial Sequence: Synthetic oligonucleotide
  Sense Strand Starting at position 457 of SEQ ID NO: 316009
ucgauuccugcggauccua

SEQ ID NO: 354606 - RNA, 19 nt, Artificial Sequence
  Description of Artificial Sequence: Synthetic oligonucleotide
  Antisense Strand to SEQ ID NO: 354605
uaggauccgcaggaaucga

SEQ ID NO: 354607 - RNA, 19 nt, Artificial Sequence
  Description of Artificial Sequence: Synthetic oligonucleotide
  Sense Strand Starting at position 457 of SEQ ID NO: 316183
gcgagucgaggugauugaa

SEQ ID NO: 354608 - RNA, 19 nt, Artificial Sequence
  Description of Artificial Sequence: Synthetic oligonucleotide
  Antisense Strand to SEQ ID NO: 354607
uucaaucaccucgacucgc

SEQ ID NO: 354609 - RNA, 19 nt, Artificial Sequence
  Description of Artificial Sequence: Synthetic oligonucleotide
  Sense Strand Starting at position 457 of SEQ ID NO: 316186
agucgaggugauugaagaa

SEQ ID NO: 354610 - RNA, 19 nt, Artificial Sequence
  Description of Artificial Sequence: Synthetic oligonucleotide
  Antisense Strand to SEQ ID NO: 354609
uucuucaaucaccucgacu

SEQ ID NO: 354611 - RNA, 19 nt, Artificial Sequence
  Description of Artificial Sequence: Synthetic oligonucleotide
  Sense Strand Starting at position 457 of SEQ ID NO: 316234
gcgcggguuccauguaguu

SEQ ID NO: 354612 - RNA, 19 nt, Artificial Sequence
  Description of Artificial Sequence: Synthetic oligonucleotide
  Antisense Strand to SEQ ID NO: 354611
aacuacauggaacccgcgc

SEQ ID NO: 354613 - RNA, 19 nt, Artificial Sequence
  Description of Artificial Sequence: Synthetic oligonucleotide
  Sense Strand Starting at position 457 of SEQ ID NO: 316236
gcggguuccauguaguugu

SEQ ID NO: 354614 - RNA, 19 nt, Artificial Sequence
  Description of Artificial Sequence: Synthetic oligonucleotide
  Antisense Strand to SEQ ID NO: 354613
acaacuacauggaacccgc

SEQ ID NO: 354615 - RNA, 19 nt, Artificial Sequence
  Description of Artificial Sequence: Synthetic oligonucleotide
  Sense Strand Starting at position 457 of SEQ ID NO: 317048
ggacucggccucugagagu

SEQ ID NO: 354616 - RNA, 19 nt, Artificial Sequence
  Description of Artificial Sequence: Synthetic oligonucleotide
  Antisense Strand to SEQ ID NO: 354615
acucucagaggccgagucc

SEQ ID NO: 354617 - RNA, 19 nt, Artificial Sequence
  Description of Artificial Sequence: Synthetic oligonucleotide
  Sense Strand Starting at position 457 of SEQ ID NO: 317716
ugggaugguucggacgaca

SEQ ID NO: 354618 - RNA, 19 nt, Artificial Sequence
  Description of Artificial Sequence: Synthetic oligonucleotide
  Antisense Strand to SEQ ID NO: 354617
ugucguccgaaccauccca

SEQ ID NO: 354619 - RNA, 19 nt, Artificial Sequence
  Description of Artificial Sequence: Synthetic oligonucleotide
  Sense Strand Starting at position 457 of SEQ ID NO: 318067
aggucuccgucuucuaagu

SEQ ID NO: 354620 - RNA, 19 nt, Artificial Sequence
  Description of Artificial Sequence: Synthetic oligonucleotide
  Antisense Strand to SEQ ID NO: 354619
acuuagaagacggagaccu

SEQ ID NO: 354621 - RNA, 19 nt, Artificial Sequence
  Description of Artificial Sequence: Synthetic oligonucleotide
  Sense Strand Starting at position 457 of SEQ ID NO: 318076
ucuucuaagucaccuggaa

SEQ ID NO: 354622 - RNA, 19 nt, Artificial Sequence
  Description of Artificial Sequence: Synthetic oligonucleotide
  Antisense Strand to SEQ ID NO: 354621
uuccaggugacuuagaaga

SEQ ID NO: 354623 - RNA, 19 nt, Artificial Sequence
  Description of Artificial Sequence: Synthetic oligonucleotide
  Sense Strand Starting at position 457 of SEQ ID NO: 318106
ucacuucuagcccggagau

SEQ ID NO: 354624 - RNA, 19 nt, Artificial Sequence
  Description of Artificial Sequence: Synthetic oligonucleotide
  Antisense Strand to SEQ ID NO: 354623
aucuccgggcuagaaguga

SEQ ID NO: 354625 - RNA, 19 nt, Artificial Sequence
  Description of Artificial Sequence: Synthetic oligonucleotide
  Sense Strand Starting at position 457 of SEQ ID NO: 318119
ggagaucggcucuaugguu

SEQ ID NO: 354626 - RNA, 19 nt, Artificial Sequence
  Description of Artificial Sequence: Synthetic oligonucleotide
  Antisense Strand to SEQ ID NO: 354625
aaccauagagccgaucucc

SEQ ID NO: 354627 - RNA, 19 nt, Artificial Sequence
  Description of Artificial Sequence: Synthetic oligonucleotide
  Sense Strand Starting at position 457 of SEQ ID NO: 318420
gggauugacagucgguaau

SEQ ID NO: 354628 - RNA, 19 nt, Artificial Sequence
  Description of Artificial Sequence: Synthetic oligonucleotide
  Antisense Strand to SEQ ID NO: 354627
auuaccgacugucaauccc

SEQ ID NO: 354629 - RNA, 19 nt, Artificial Sequence
  Description of Artificial Sequence: Synthetic oligonucleotide
  Sense Strand Starting at position 457 of SEQ ID NO: 318422
gauugacagucgguaauug

SEQ ID NO: 354630 - RNA, 19 nt, Artificial Sequence
  Description of Artificial Sequence: Synthetic oligonucleotide
  Antisense Strand to SEQ ID NO: 354629
caauuaccgacugucaauc

SEQ ID NO: 354631 - RNA, 19 nt, Artificial Sequence
  Description of Artificial Sequence: Synthetic oligonucleotide
  Sense Strand Starting at position 457 of SEQ ID NO: 318506
cccgauucgccaggaaaug

SEQ ID NO: 354632 - RNA, 19 nt, Artificial Sequence
  Description of Artificial Sequence: Synthetic oligonucleotide
  Antisense Strand to SEQ ID NO: 354631
cauuuccuggcgaaucggg

SEQ ID NO: 354633 - RNA, 19 nt, Artificial Sequence
  Description of Artificial Sequence: Synthetic oligonucleotide
  Sense Strand Starting at position 457 of SEQ ID NO: 318507
ccgauucgccaggaaauga

SEQ ID NO: 354634 - RNA, 19 nt, Artificial Sequence
  Description of Artificial Sequence: Synthetic oligonucleotide
  Antisense Strand to SEQ ID NO: 354633
ucauuuccuggcgaaucgg

SEQ ID NO: 354635 - RNA, 19 nt, Artificial Sequence
  Description of Artificial Sequence: Synthetic oligonucleotide
  Sense Strand Starting at position 457 of SEQ ID NO: 319061
ccgucugucucucaacuuu

SEQ ID NO: 354636 - RNA, 19 nt, Artificial Sequence
  Description of Artificial Sequence: Synthetic oligonucleotide
  Antisense Strand to SEQ ID NO: 354635
aaaguugagagacagacgg

SEQ ID NO: 354637 - RNA, 19 nt, Artificial Sequence
  Description of Artificial Sequence: Synthetic oligonucleotide
  Sense Strand Starting at position 458 of SEQ ID NO: 315268
cucugagcccuuuguuuaa

SEQ ID NO: 354638 - RNA, 19 nt, Artificial Sequence
  Description of Artificial Sequence: Synthetic oligonucleotide
  Antisense Strand to SEQ ID NO: 354637
uuaaacaaagggcucagag

SEQ ID NO: 354639 - RNA, 19 nt, Artificial Sequence
  Description of Artificial Sequence: Synthetic oligonucleotide
  Sense Strand Starting at position 458 of SEQ ID NO: 315271
ugagcccuuuguuuaaagu

SEQ ID NO: 354640 - RNA, 19 nt, Artificial Sequence
  Description of Artificial Sequence: Synthetic oligonucleotide
  Antisense Strand to SEQ ID NO: 354639
acuuuaaacaaagggcuca

SEQ ID NO: 354641 - RNA, 19 nt, Artificial Sequence
  Description of Artificial Sequence: Synthetic oligonucleotide
  Sense Strand Starting at position 458 of SEQ ID NO: 315272
gagcccuuuguuuaaaguu

SEQ ID NO: 354642 - RNA, 19 nt, Artificial Sequence
  Description of Artificial Sequence: Synthetic oligonucleotide
  Antisense Strand to SEQ ID NO: 354641
aacuuuaaacaaagggcuc

SEQ ID NO: 354643 - RNA, 19 nt, Artificial Sequence
  Description of Artificial Sequence: Synthetic oligonucleotide
  Sense Strand Starting at position 458 of SEQ ID NO: 315420
cccauuugcuaagggacua

SEQ ID NO: 354644 - RNA, 19 nt, Artificial Sequence
  Description of Artificial Sequence: Synthetic oligonucleotide
  Antisense Strand to SEQ ID NO: 354643
uagucccuuagcaaauggg

SEQ ID NO: 354645 - RNA, 19 nt, Artificial Sequence
  Description of Artificial Sequence: Synthetic oligonucleotide
  Sense Strand Starting at position 458 of SEQ ID NO: 315726
uguucugugucuuugggaa

SEQ ID NO: 354646 - RNA, 19 nt, Artificial Sequence
  Description of Artificial Sequence: Synthetic oligonucleotide
  Antisense Strand to SEQ ID NO: 354645
uucccaaagacacagaaca

SEQ ID NO: 354647 - RNA, 19 nt, Artificial Sequence
  Description of Artificial Sequence: Synthetic oligonucleotide
  Sense Strand Starting at position 458 of SEQ ID NO: 315807
gauucuauaucgcuucuga

SEQ ID NO: 354648 - RNA, 19 nt, Artificial Sequence
  Description of Artificial Sequence: Synthetic oligonucleotide
  Antisense Strand to SEQ ID NO: 354647
ucagaagcgauauagaauc

SEQ ID NO: 354649 - RNA, 19 nt, Artificial Sequence
  Description of Artificial Sequence: Synthetic oligonucleotide
  Sense Strand Starting at position 458 of SEQ ID NO: 315945
cggccugacaacugguaaa

SEQ ID NO: 354650 - RNA, 19 nt, Artificial Sequence
  Description of Artificial Sequence: Synthetic oligonucleotide
  Antisense Strand to SEQ ID NO: 354649
uuuaccaguugucaggccg

SEQ ID NO: 354651 - RNA, 19 nt, Artificial Sequence
  Description of Artificial Sequence: Synthetic oligonucleotide
  Sense Strand Starting at position 458 of SEQ ID NO: 315956
cugguaaauccguuucguu

SEQ ID NO: 354652 - RNA, 19 nt, Artificial Sequence
  Description of Artificial Sequence: Synthetic oligonucleotide
  Antisense Strand to SEQ ID NO: 354651
aacgaaacggauuuaccag

SEQ ID NO: 354653 - RNA, 19 nt, Artificial Sequence
  Description of Artificial Sequence: Synthetic oligonucleotide
  Sense Strand Starting at position 458 of SEQ ID NO: 315975
aggcacaauuugucugcaa

SEQ ID NO: 354654 - RNA, 19 nt, Artificial Sequence
  Description of Artificial Sequence: Synthetic oligonucleotide
  Antisense Strand to SEQ ID NO: 354653
uugcagacaaauugugccu

SEQ ID NO: 354655 - RNA, 19 nt, Artificial Sequence
  Description of Artificial Sequence: Synthetic oligonucleotide
  Sense Strand Starting at position 458 of SEQ ID NO: 315976
ggcacaauuugucugcaau

SEQ ID NO: 354656 - RNA, 19 nt, Artificial Sequence
  Description of Artificial Sequence: Synthetic oligonucleotide
  Antisense Strand to SEQ ID NO: 354655
auugcagacaaauugugcc

SEQ ID NO: 354657 - RNA, 19 nt, Artificial Sequence
  Description of Artificial Sequence: Synthetic oligonucleotide
  Sense Strand Starting at position 458 of SEQ ID NO: 315977
gcacaauuugucugcaauu

SEQ ID NO: 354658 - RNA, 19 nt, Artificial Sequence
  Description of Artificial Sequence: Synthetic oligonucleotide
  Antisense Strand to SEQ ID NO: 354657
aauugcagacaaauugugc

SEQ ID NO: 354659 - RNA, 19 nt, Artificial Sequence
  Description of Artificial Sequence: Synthetic oligonucleotide
  Sense Strand Starting at position 458 of SEQ ID NO: 316781
ugguuaaagucccuauaac

SEQ ID NO: 354660 - RNA, 19 nt, Artificial Sequence
  Description of Artificial Sequence: Synthetic oligonucleotide
  Antisense Strand to SEQ ID NO: 354659
guuauagggacuuuaacca

SEQ ID NO: 354661 - RNA, 19 nt, Artificial Sequence
  Description of Artificial Sequence: Synthetic oligonucleotide
  Sense Strand Starting at position 458 of SEQ ID NO: 316782
gguuaaagucccuauaacc

SEQ ID NO: 354662 - RNA, 19 nt, Artificial Sequence
  Description of Artificial Sequence: Synthetic oligonucleotide
  Antisense Strand to SEQ ID NO: 354661
gguuauagggacuuuaacc

SEQ ID NO: 354663 - RNA, 19 nt, Artificial Sequence
  Description of Artificial Sequence: Synthetic oligonucleotide
  Sense Strand Starting at position 458 of SEQ ID NO: 317491
agggaugcuugcucagaaa

SEQ ID NO: 354664 - RNA, 19 nt, Artificial Sequence
  Description of Artificial Sequence: Synthetic oligonucleotide
  Antisense Strand to SEQ ID NO: 354663
uuucugagcaagcaucccu

SEQ ID NO: 354665 - RNA, 19 nt, Artificial Sequence
  Description of Artificial Sequence: Synthetic oligonucleotide
  Sense Strand Starting at position 458 of SEQ ID NO: 317513
ugggacacgucuuuacuga

SEQ ID NO: 354666 - RNA, 19 nt, Artificial Sequence
  Description of Artificial Sequence: Synthetic oligonucleotide
  Antisense Strand to SEQ ID NO: 354665
ucaguaaagacguguccca

SEQ ID NO: 354667 - RNA, 19 nt, Artificial Sequence
  Description of Artificial Sequence: Synthetic oligonucleotide
  Sense Strand Starting at position 458 of SEQ ID NO: 317565
acacgcacucacugauaau

SEQ ID NO: 354668 - RNA, 19 nt, Artificial Sequence
  Description of Artificial Sequence: Synthetic oligonucleotide
  Antisense Strand to SEQ ID NO: 354667
auuaucagugagugcgugu

SEQ ID NO: 354669 - RNA, 19 nt, Artificial Sequence
  Description of Artificial Sequence: Synthetic oligonucleotide
  Sense Strand Starting at position 458 of SEQ ID NO: 317861
cccugagcacuuuagaagu

SEQ ID NO: 354670 - RNA, 19 nt, Artificial Sequence
  Description of Artificial Sequence: Synthetic oligonucleotide
  Antisense Strand to SEQ ID NO: 354669
acuucuaaagugcucaggg

SEQ ID NO: 354671 - RNA, 19 nt, Artificial Sequence
  Description of Artificial Sequence: Synthetic oligonucleotide
  Sense Strand Starting at position 458 of SEQ ID NO: 318029
cuggguuugugggcaaaga

SEQ ID NO: 354672 - RNA, 19 nt, Artificial Sequence
  Description of Artificial Sequence: Synthetic oligonucleotide
  Antisense Strand to SEQ ID NO: 354671
ucuuugcccacaaacccag

SEQ ID NO: 354673 - RNA, 19 nt, Artificial Sequence
  Description of Artificial Sequence: Synthetic oligonucleotide
  Sense Strand Starting at position 458 of SEQ ID NO: 318055
guccuugugcugccaaagu

SEQ ID NO: 354674 - RNA, 19 nt, Artificial Sequence
  Description of Artificial Sequence: Synthetic oligonucleotide
  Antisense Strand to SEQ ID NO: 354673
acuuuggcagcacaaggac

SEQ ID NO: 354675 - RNA, 19 nt, Artificial Sequence
  Description of Artificial Sequence: Synthetic oligonucleotide
  Sense Strand Starting at position 458 of SEQ ID NO: 318178
agggaaagugcuugggcuu

SEQ ID NO: 354676 - RNA, 19 nt, Artificial Sequence
  Description of Artificial Sequence: Synthetic oligonucleotide
  Antisense Strand to SEQ ID NO: 354675
aagcccaagcacuuucccu

SEQ ID NO: 354677 - RNA, 19 nt, Artificial Sequence
  Description of Artificial Sequence: Synthetic oligonucleotide
  Sense Strand Starting at position 458 of SEQ ID NO: 318280
guccauaggucuuucucca

SEQ ID NO: 354678 - RNA, 19 nt, Artificial Sequence
  Description of Artificial Sequence: Synthetic oligonucleotide
  Antisense Strand to SEQ ID NO: 354677
uggagaaagaccuauggac

SEQ ID NO: 354679 - RNA, 19 nt, Artificial Sequence
  Description of Artificial Sequence: Synthetic oligonucleotide
  Sense Strand Starting at position 458 of SEQ ID NO: 318295
uccaaaucugguggugacu

SEQ ID NO: 354680 - RNA, 19 nt, Artificial Sequence
  Description of Artificial Sequence: Synthetic oligonucleotide
  Antisense Strand to SEQ ID NO: 354679
agucaccaccagauuugga

SEQ ID NO: 354681 - RNA, 19 nt, Artificial Sequence
  Description of Artificial Sequence: Synthetic oligonucleotide
  Sense Strand Starting at position 458 of SEQ ID NO: 318419
gguguaugaguauguucau

SEQ ID NO: 354682 - RNA, 19 nt, Artificial Sequence
  Description of Artificial Sequence: Synthetic oligonucleotide
  Antisense Strand to SEQ ID NO: 354681
augaacauacucauacacc

SEQ ID NO: 354683 - RNA, 19 nt, Artificial Sequence
  Description of Artificial Sequence: Synthetic oligonucleotide
  Sense Strand Starting at position 458 of SEQ ID NO: 318420
guguaugaguauguucauu

SEQ ID NO: 354684 - RNA, 19 nt, Artificial Sequence
  Description of Artificial Sequence: Synthetic oligonucleotide
  Antisense Strand to SEQ ID NO: 354683
aaugaacauacucauacac

SEQ ID NO: 354685 - RNA, 19 nt, Artificial Sequence
  Description of Artificial Sequence: Synthetic oligonucleotide
  Sense Strand Starting at position 458 of SEQ ID NO: 318452
uccugagaguuuguguauu

SEQ ID NO: 354686 - RNA, 19 nt, Artificial Sequence
  Description of Artificial Sequence: Synthetic oligonucleotide
  Antisense Strand to SEQ ID NO: 354685
aauacacaaacucucagga

SEQ ID NO: 354687 - RNA, 19 nt, Artificial Sequence
  Description of Artificial Sequence: Synthetic oligonucleotide
  Sense Strand Starting at position 458 of SEQ ID NO: 318504
ccuggaauuuggcacaaga

SEQ ID NO: 354688 - RNA, 19 nt, Artificial Sequence
  Description of Artificial Sequence: Synthetic oligonucleotide
  Antisense Strand to SEQ ID NO: 354687
ucuugugccaaauuccagg

SEQ ID NO: 354689 - RNA, 19 nt, Artificial Sequence
  Description of Artificial Sequence: Synthetic oligonucleotide
  Sense Strand Starting at position 458 of SEQ ID NO: 318521
gagagugugucuguggaaa

SEQ ID NO: 354690 - RNA, 19 nt, Artificial Sequence
  Description of Artificial Sequence: Synthetic oligonucleotide
  Antisense Strand to SEQ ID NO: 354689
uuuccacagacacacucuc

SEQ ID NO: 354691 - RNA, 19 nt, Artificial Sequence
  Description of Artificial Sequence: Synthetic oligonucleotide
  Sense Strand Starting at position 458 of SEQ ID NO: 318697
ugugcauguaucuaggcau

SEQ ID NO: 354692 - RNA, 19 nt, Artificial Sequence
  Description of Artificial Sequence: Synthetic oligonucleotide
  Antisense Strand to SEQ ID NO: 354691
augccuagauacaugcaca

SEQ ID NO: 354693 - RNA, 19 nt, Artificial Sequence
  Description of Artificial Sequence: Synthetic oligonucleotide
  Sense Strand Starting at position 458 of SEQ ID NO: 318712
gcauguguuacugugugua

SEQ ID NO: 354694 - RNA, 19 nt, Artificial Sequence
  Description of Artificial Sequence: Synthetic oligonucleotide
  Antisense Strand to SEQ ID NO: 354693
uacacacaguaacacaugc

SEQ ID NO: 354695 - RNA, 19 nt, Artificial Sequence
  Description of Artificial Sequence: Synthetic oligonucleotide
  Sense Strand Starting at position 458 of SEQ ID NO: 318715
uguguuacuguguguauuu

SEQ ID NO: 354696 - RNA, 19 nt, Artificial Sequence
  Description of Artificial Sequence: Synthetic oligonucleotide
  Antisense Strand to SEQ ID NO: 354695
aaauacacacaguaacaca

SEQ ID NO: 354697 - RNA, 19 nt, Artificial Sequence
  Description of Artificial Sequence: Synthetic oligonucleotide
  Sense Strand Starting at position 458 of SEQ ID NO: 319071
aauaguuuguaccugggua

SEQ ID NO: 354698 - RNA, 19 nt, Artificial Sequence
  Description of Artificial Sequence: Synthetic oligonucleotide
  Antisense Strand to SEQ ID NO: 354697
uacccagguacaaacuauu

SEQ ID NO: 354699 - RNA, 19 nt, Artificial Sequence
  Description of Artificial Sequence: Synthetic oligonucleotide
  Sense Strand Starting at position 458 of SEQ ID NO: 319072
auaguuuguaccuggguau

SEQ ID NO: 354700 - RNA, 19 nt, Artificial Sequence
  Description of Artificial Sequence: Synthetic oligonucleotide
  Antisense Strand to SEQ ID NO: 354699
auacccagguacaaacuau

SEQ ID NO: 354701 - RNA, 19 nt, Artificial Sequence
  Description of Artificial Sequence: Synthetic oligonucleotide
  Sense Strand Starting at position 458 of SEQ ID NO: 319089
aucugcauguguccuugaa

SEQ ID NO: 354702 - RNA, 19 nt, Artificial Sequence
  Description of Artificial Sequence: Synthetic oligonucleotide
  Antisense Strand to SEQ ID NO: 354701
uucaaggacacaugcagau

SEQ ID NO: 354703 - RNA, 19 nt, Artificial Sequence
  Description of Artificial Sequence: Synthetic oligonucleotide
  Sense Strand Starting at position 458 of SEQ ID NO: 319091
cugcauguguccuugaacu

SEQ ID NO: 354704 - RNA, 19 nt, Artificial Sequence
  Description of Artificial Sequence: Synthetic oligonucleotide
  Antisense Strand to SEQ ID NO: 354703
aguucaaggacacaugcag

SEQ ID NO: 354705 - RNA, 19 nt, Artificial Sequence
  Description of Artificial Sequence: Synthetic oligonucleotide
  Sense Strand Starting at position 458 of SEQ ID NO: 319097
guguccuugaacuggugua

SEQ ID NO: 354706 - RNA, 19 nt, Artificial Sequence
  Description of Artificial Sequence: Synthetic oligonucleotide
  Antisense Strand to SEQ ID NO: 354705
uacaccaguucaaggacac

SEQ ID NO: 354707 - RNA, 19 nt, Artificial Sequence
  Description of Artificial Sequence: Synthetic oligonucleotide
  Sense Strand Starting at position 458 of SEQ ID NO: 319098
uguccuugaacugguguau

SEQ ID NO: 354708 - RNA, 19 nt, Artificial Sequence
  Description of Artificial Sequence: Synthetic oligonucleotide
  Antisense Strand to SEQ ID NO: 354707
auacaccaguucaaggaca

SEQ ID NO: 354709 - RNA, 19 nt, Artificial Sequence
  Description of Artificial Sequence: Synthetic oligonucleotide
  Sense Strand Starting at position 458 of SEQ ID NO: 319147
gugucuggauauccaugua

SEQ ID NO: 354710 - RNA, 19 nt, Artificial Sequence
  Description of Artificial Sequence: Synthetic oligonucleotide
  Antisense Strand to SEQ ID NO: 354709
uacauggauauccagacac

SEQ ID NO: 354711 - RNA, 19 nt, Artificial Sequence
  Description of Artificial Sequence: Synthetic oligonucleotide
  Sense Strand Starting at position 458 of SEQ ID NO: 319150
ucuggauauccauguauaa

SEQ ID NO: 354712 - RNA, 19 nt, Artificial Sequence
  Description of Artificial Sequence: Synthetic oligonucleotide
  Antisense Strand to SEQ ID NO: 354711
uuauacauggauauccaga

SEQ ID NO: 354713 - RNA, 19 nt, Artificial Sequence
  Description of Artificial Sequence: Synthetic oligonucleotide
  Sense Strand Starting at position 458 of SEQ ID NO: 319207
guguuuguguauuugaaca

SEQ ID NO: 354714 - RNA, 19 nt, Artificial Sequence
  Description of Artificial Sequence: Synthetic oligonucleotide
  Antisense Strand to SEQ ID NO: 354713
uguucaaauacacaaacac

SEQ ID NO: 354715 - RNA, 19 nt, Artificial Sequence
  Description of Artificial Sequence: Synthetic oligonucleotide
  Sense Strand Starting at position 458 of SEQ ID NO: 319209
guuuguguauuugaacaug

SEQ ID NO: 354716 - RNA, 19 nt, Artificial Sequence
  Description of Artificial Sequence: Synthetic oligonucleotide
  Antisense Strand to SEQ ID NO: 354715
cauguucaaauacacaaac

SEQ ID NO: 354717 - RNA, 19 nt, Artificial Sequence
  Description of Artificial Sequence: Synthetic oligonucleotide
  Sense Strand Starting at position 459 of SEQ ID NO: 315478
accuuaaaccuaugacgau

SEQ ID NO: 354718 - RNA, 19 nt, Artificial Sequence
  Description of Artificial Sequence: Synthetic oligonucleotide
  Antisense Strand to SEQ ID NO: 354717
aucgucauagguuuaaggu

SEQ ID NO: 354719 - RNA, 19 nt, Artificial Sequence
  Description of Artificial Sequence: Synthetic oligonucleotide
  Sense Strand Starting at position 459 of SEQ ID NO: 315492
acgauuaugcacuaaguuu

SEQ ID NO: 354720 - RNA, 19 nt, Artificial Sequence
  Description of Artificial Sequence: Synthetic oligonucleotide
  Antisense Strand to SEQ ID NO: 354719
aaacuuagugcauaaucgu

SEQ ID NO: 354721 - RNA, 19 nt, Artificial Sequence
  Description of Artificial Sequence: Synthetic oligonucleotide
  Sense Strand Starting at position 459 of SEQ ID NO: 315500
gcacuaaguuucucugaaa

SEQ ID NO: 354722 - RNA, 19 nt, Artificial Sequence
  Description of Artificial Sequence: Synthetic oligonucleotide
  Antisense Strand to SEQ ID NO: 354721
uuucagagaaacuuagugc

SEQ ID NO: 354723 - RNA, 19 nt, Artificial Sequence
  Description of Artificial Sequence: Synthetic oligonucleotide
  Sense Strand Starting at position 459 of SEQ ID NO: 315558
cuccucauaugguuuauau

SEQ ID NO: 354724 - RNA, 19 nt, Artificial Sequence
  Description of Artificial Sequence: Synthetic oligonucleotide
  Antisense Strand to SEQ ID NO: 354723
auauaaaccauaugaggag

SEQ ID NO: 354725 - RNA, 19 nt, Artificial Sequence
  Description of Artificial Sequence: Synthetic oligonucleotide
  Sense Strand Starting at position 459 of SEQ ID NO: 315578
agagcauaaucaucugauu

SEQ ID NO: 354726 - RNA, 19 nt, Artificial Sequence
  Description of Artificial Sequence: Synthetic oligonucleotide
  Antisense Strand to SEQ ID NO: 354725
aaucagaugauuaugcucu

SEQ ID NO: 354727 - RNA, 19 nt, Artificial Sequence
  Description of Artificial Sequence: Synthetic oligonucleotide
  Sense Strand Starting at position 459 of SEQ ID NO: 315583
auaaucaucugauuaagug

SEQ ID NO: 354728 - RNA, 19 nt, Artificial Sequence
  Description of Artificial Sequence: Synthetic oligonucleotide
  Antisense Strand to SEQ ID NO: 354727
cacuuaaucagaugauuau

SEQ ID NO: 354729 - RNA, 19 nt, Artificial Sequence
  Description of Artificial Sequence: Synthetic oligonucleotide
  Sense Strand Starting at position 459 of SEQ ID NO: 315603
gggacagcucaaggugauu

SEQ ID NO: 354730 - RNA, 19 nt, Artificial Sequence
  Description of Artificial Sequence: Synthetic oligonucleotide
  Antisense Strand to SEQ ID NO: 354729
aaucaccuugagcuguccc

SEQ ID NO: 354731 - RNA, 19 nt, Artificial Sequence
  Description of Artificial Sequence: Synthetic oligonucleotide
  Sense Strand Starting at position 459 of SEQ ID NO: 315606
acagcucaaggugauuauu

SEQ ID NO: 354732 - RNA, 19 nt, Artificial Sequence
  Description of Artificial Sequence: Synthetic oligonucleotide
  Antisense Strand to SEQ ID NO: 354731
aauaaucaccuugagcugu

SEQ ID NO: 354733 - RNA, 19 nt, Artificial Sequence
  Description of Artificial Sequence: Synthetic oligonucleotide
  Sense Strand Starting at position 459 of SEQ ID NO: 315681
uuacaaucccuagagcagu

SEQ ID NO: 354734 - RNA, 19 nt, Artificial Sequence
  Description of Artificial Sequence: Synthetic oligonucleotide
  Antisense Strand to SEQ ID NO: 354733
acugcucuagggauuguaa

SEQ ID NO: 354735 - RNA, 19 nt, Artificial Sequence
  Description of Artificial Sequence: Synthetic oligonucleotide
  Sense Strand Starting at position 459 of SEQ ID NO: 315843
ccaguuaacuaguuggaug

SEQ ID NO: 354736 - RNA, 19 nt, Artificial Sequence
  Description of Artificial Sequence: Synthetic oligonucleotide
  Antisense Strand to SEQ ID NO: 354735
cauccaacuaguuaacugg

SEQ ID NO: 354737 - RNA, 19 nt, Artificial Sequence
  Description of Artificial Sequence: Synthetic oligonucleotide
  Sense Strand Starting at position 459 of SEQ ID NO: 315902
ccaggauaguuuccauucu

SEQ ID NO: 354738 - RNA, 19 nt, Artificial Sequence
  Description of Artificial Sequence: Synthetic oligonucleotide
  Antisense Strand to SEQ ID NO: 354737
agaauggaaacuauccugg

SEQ ID NO: 354739 - RNA, 19 nt, Artificial Sequence
  Description of Artificial Sequence: Synthetic oligonucleotide
  Sense Strand Starting at position 459 of SEQ ID NO: 316069
auagaauuauuagcccagu

SEQ ID NO: 354740 - RNA, 19 nt, Artificial Sequence
  Description of Artificial Sequence: Synthetic oligonucleotide
  Antisense Strand to SEQ ID NO: 354739
acugggcuaauaauucuau

SEQ ID NO: 354741 - RNA, 19 nt, Artificial Sequence
  Description of Artificial Sequence: Synthetic oligonucleotide
  Sense Strand Starting at position 459 of SEQ ID NO: 316089
acuaaaguuguaugguaca

SEQ ID NO: 354742 - RNA, 19 nt, Artificial Sequence
  Description of Artificial Sequence: Synthetic oligonucleotide
  Antisense Strand to SEQ ID NO: 354741
uguaccauacaacuuuagu

SEQ ID NO: 354743 - RNA, 19 nt, Artificial Sequence
  Description of Artificial Sequence: Synthetic oligonucleotide
  Sense Strand Starting at position 459 of SEQ ID NO: 316253
uugaucaauguagguguaa

SEQ ID NO: 354744 - RNA, 19 nt, Artificial Sequence
  Description of Artificial Sequence: Synthetic oligonucleotide
  Antisense Strand to SEQ ID NO: 354743
uuacaccuacauugaucaa

SEQ ID NO: 354745 - RNA, 19 nt, Artificial Sequence
  Description of Artificial Sequence: Synthetic oligonucleotide
  Sense Strand Starting at position 459 of SEQ ID NO: 316254
ugaucaauguagguguaau

SEQ ID NO: 354746 - RNA, 19 nt, Artificial Sequence
  Description of Artificial Sequence: Synthetic oligonucleotide
  Antisense Strand to SEQ ID NO: 354745
auuacaccuacauugauca

SEQ ID NO: 354747 - RNA, 19 nt, Artificial Sequence
  Description of Artificial Sequence: Synthetic oligonucleotide
  Sense Strand Starting at position 459 of SEQ ID NO: 316318
uagugucugccugaaggaa

SEQ ID NO: 354748 - RNA, 19 nt, Artificial Sequence
  Description of Artificial Sequence: Synthetic oligonucleotide
  Antisense Strand to SEQ ID NO: 354747
uuccuucaggcagacacua

SEQ ID NO: 354749 - RNA, 19 nt, Artificial Sequence
  Description of Artificial Sequence: Synthetic oligonucleotide
  Sense Strand Starting at position 459 of SEQ ID NO: 316508
ggaauaaguguuggagcca

SEQ ID NO: 354750 - RNA, 19 nt, Artificial Sequence
  Description of Artificial Sequence: Synthetic oligonucleotide
  Antisense Strand to SEQ ID NO: 354749
uggcuccaacacuuauucc

SEQ ID NO: 354751 - RNA, 19 nt, Artificial Sequence
  Description of Artificial Sequence: Synthetic oligonucleotide
  Sense Strand Starting at position 459 of SEQ ID NO: 316767
gcgggcugccugucuaagu

SEQ ID NO: 354752 - RNA, 19 nt, Artificial Sequence
  Description of Artificial Sequence: Synthetic oligonucleotide
  Antisense Strand to SEQ ID NO: 354751
acuuagacaggcagcccgc

SEQ ID NO: 354753 - RNA, 19 nt, Artificial Sequence
  Description of Artificial Sequence: Synthetic oligonucleotide
  Sense Strand Starting at position 459 of SEQ ID NO: 316827
cggcguagggcuucaagua

SEQ ID NO: 354754 - RNA, 19 nt, Artificial Sequence
  Description of Artificial Sequence: Synthetic oligonucleotide
  Antisense Strand to SEQ ID NO: 354753
uacuugaagcccuacgccg

SEQ ID NO: 354755 - RNA, 19 nt, Artificial Sequence
  Description of Artificial Sequence: Synthetic oligonucleotide
  Sense Strand Starting at position 459 of SEQ ID NO: 317639
cuggaauaccguuggaauu

SEQ ID NO: 354756 - RNA, 19 nt, Artificial Sequence
  Description of Artificial Sequence: Synthetic oligonucleotide
  Antisense Strand to SEQ ID NO: 354755
aauuccaacgguauuccag

SEQ ID NO: 354757 - RNA, 19 nt, Artificial Sequence
  Description of Artificial Sequence: Synthetic oligonucleotide
  Sense Strand Starting at position 459 of SEQ ID NO: 317751
aaggcauuugccuguguuu

SEQ ID NO: 354758 - RNA, 19 nt, Artificial Sequence
  Description of Artificial Sequence: Synthetic oligonucleotide
  Antisense Strand to SEQ ID NO: 354757
aaacacaggcaaaugccuu

SEQ ID NO: 354759 - RNA, 19 nt, Artificial Sequence
  Description of Artificial Sequence: Synthetic oligonucleotide
  Sense Strand Starting at position 459 of SEQ ID NO: 317754
gcauuugccuguguuuaua

SEQ ID NO: 354760 - RNA, 19 nt, Artificial Sequence
  Description of Artificial Sequence: Synthetic oligonucleotide
  Antisense Strand to SEQ ID NO: 354759
uauaaacacaggcaaaugc

SEQ ID NO: 354761 - RNA, 19 nt, Artificial Sequence
  Description of Artificial Sequence: Synthetic oligonucleotide
  Sense Strand Starting at position 459 of SEQ ID NO: 317756
auuugccuguguuuauaau

SEQ ID NO: 354762 - RNA, 19 nt, Artificial Sequence
  Description of Artificial Sequence: Synthetic oligonucleotide
  Antisense Strand to SEQ ID NO: 354761
auuauaaacacaggcaaau

SEQ ID NO: 354763 - RNA, 19 nt, Artificial Sequence
  Description of Artificial Sequence: Synthetic oligonucleotide
  Sense Strand Starting at position 459 of SEQ ID NO: 317793
cgauuaaacuaccuuugau

SEQ ID NO: 354764 - RNA, 19 nt, Artificial Sequence
  Description of Artificial Sequence: Synthetic oligonucleotide
  Antisense Strand to SEQ ID NO: 354763
aucaaagguaguuuaaucg

SEQ ID NO: 354765 - RNA, 19 nt, Artificial Sequence
  Description of Artificial Sequence: Synthetic oligonucleotide
  Sense Strand Starting at position 459 of SEQ ID NO: 317847
ugccacuuacagugauaag

SEQ ID NO: 354766 - RNA, 19 nt, Artificial Sequence
  Description of Artificial Sequence: Synthetic oligonucleotide
  Antisense Strand to SEQ ID NO: 354765
cuuaucacuguaaguggca

SEQ ID NO: 354767 - RNA, 19 nt, Artificial Sequence
  Description of Artificial Sequence: Synthetic oligonucleotide
  Sense Strand Starting at position 459 of SEQ ID NO: 318126
agccgugggccuugaauuu

SEQ ID NO: 354768 - RNA, 19 nt, Artificial Sequence
  Description of Artificial Sequence: Synthetic oligonucleotide
  Antisense Strand to SEQ ID NO: 354767
aaauucaaggcccacggcu

SEQ ID NO: 354769 - RNA, 19 nt, Artificial Sequence
  Description of Artificial Sequence: Synthetic oligonucleotide
  Sense Strand Starting at position 459 of SEQ ID NO: 318210
gacagaccucagugugaaa

SEQ ID NO: 354770 - RNA, 19 nt, Artificial Sequence
  Description of Artificial Sequence: Synthetic oligonucleotide
  Antisense Strand to SEQ ID NO: 354769
uuucacacugaggucuguc

SEQ ID NO: 354771 - RNA, 19 nt, Artificial Sequence
  Description of Artificial Sequence: Synthetic oligonucleotide
  Sense Strand Starting at position 459 of SEQ ID NO: 318233
gaaggacuugaacgacuuu

SEQ ID NO: 354772 - RNA, 19 nt, Artificial Sequence
  Description of Artificial Sequence: Synthetic oligonucleotide
  Antisense Strand to SEQ ID NO: 354771
aaagucguucaaguccuuc

SEQ ID NO: 354773 - RNA, 19 nt, Artificial Sequence
  Description of Artificial Sequence: Synthetic oligonucleotide
  Sense Strand Starting at position 459 of SEQ ID NO: 318571
accagaauguagcucucua

SEQ ID NO: 354774 - RNA, 19 nt, Artificial Sequence
  Description of Artificial Sequence: Synthetic oligonucleotide
  Antisense Strand to SEQ ID NO: 354773
uagagagcuacauucuggu

SEQ ID NO: 354775 - RNA, 19 nt, Artificial Sequence
  Description of Artificial Sequence: Synthetic oligonucleotide
  Sense Strand Starting at position 459 of SEQ ID NO: 318575
gaauguagcucucuaacug

SEQ ID NO: 354776 - RNA, 19 nt, Artificial Sequence
  Description of Artificial Sequence: Synthetic oligonucleotide
  Antisense Strand to SEQ ID NO: 354775
caguuagagagcuacauuc

SEQ ID NO: 354777 - RNA, 19 nt, Artificial Sequence
  Description of Artificial Sequence: Synthetic oligonucleotide
  Sense Strand Starting at position 459 of SEQ ID NO: 318677
uagggaucuuaauugaguu

SEQ ID NO: 354778 - RNA, 19 nt, Artificial Sequence
  Description of Artificial Sequence: Synthetic oligonucleotide
  Antisense Strand to SEQ ID NO: 354777
aacucaauuaagaucccua

SEQ ID NO: 354779 - RNA, 19 nt, Artificial Sequence
  Description of Artificial Sequence: Synthetic oligonucleotide
  Sense Strand Starting at position 459 of SEQ ID NO: 318681
gaucuuaauugaguuccga

SEQ ID NO: 354780 - RNA, 19 nt, Artificial Sequence
  Description of Artificial Sequence: Synthetic oligonucleotide
  Antisense Strand to SEQ ID NO: 354779
ucggaacucaauuaagauc

SEQ ID NO: 354781 - RNA, 19 nt, Artificial Sequence
  Description of Artificial Sequence: Synthetic oligonucleotide
  Sense Strand Starting at position 459 of SEQ ID NO: 318774
gagacucuacacugaguaa

SEQ ID NO: 354782 - RNA, 19 nt, Artificial Sequence
  Description of Artificial Sequence: Synthetic oligonucleotide
  Antisense Strand to SEQ ID NO: 354781
uuacucaguguagagucuc

SEQ ID NO: 354783 - RNA, 19 nt, Artificial Sequence
  Description of Artificial Sequence: Synthetic oligonucleotide
  Sense Strand Starting at position 459 of SEQ ID NO: 318787
gaguaaaucagacgauguc

SEQ ID NO: 354784 - RNA, 19 nt, Artificial Sequence
  Description of Artificial Sequence: Synthetic oligonucleotide
  Antisense Strand to SEQ ID NO: 354783
gacaucgucugauuuacuc

SEQ ID NO: 354785 - RNA, 19 nt, Artificial Sequence
  Description of Artificial Sequence: Synthetic oligonucleotide
  Sense Strand Starting at position 459 of SEQ ID NO: 318790
uaaaucagacgaugucauu

SEQ ID NO: 354786 - RNA, 19 nt, Artificial Sequence
  Description of Artificial Sequence: Synthetic oligonucleotide
  Antisense Strand to SEQ ID NO: 354785
aaugacaucgucugauuua

SEQ ID NO: 354787 - RNA, 19 nt, Artificial Sequence
  Description of Artificial Sequence: Synthetic oligonucleotide
  Sense Strand Starting at position 459 of SEQ ID NO: 318799
cgaugucauuuagcaacuu

SEQ ID NO: 354788 - RNA, 19 nt, Artificial Sequence
  Description of Artificial Sequence: Synthetic oligonucleotide
  Antisense Strand to SEQ ID NO: 354787
aaguugcuaaaugacaucg

SEQ ID NO: 354789 - RNA, 19 nt, Artificial Sequence
  Description of Artificial Sequence: Synthetic oligonucleotide
  Sense Strand Starting at position 459 of SEQ ID NO: 318867
ucuaacaaggcuuguauaa

SEQ ID NO: 354790 - RNA, 19 nt, Artificial Sequence
  Description of Artificial Sequence: Synthetic oligonucleotide
  Antisense Strand to SEQ ID NO: 354789
uuauacaagccuuguuaga

SEQ ID NO: 354791 - RNA, 19 nt, Artificial Sequence
  Description of Artificial Sequence: Synthetic oligonucleotide
  Sense Strand Starting at position 459 of SEQ ID NO: 318969
cucagugaauuuguuguau

SEQ ID NO: 354792 - RNA, 19 nt, Artificial Sequence
  Description of Artificial Sequence: Synthetic oligonucleotide
  Antisense Strand to SEQ ID NO: 354791
auacaacaaauucacugag

SEQ ID NO: 354793 - RNA, 19 nt, Artificial Sequence
  Description of Artificial Sequence: Synthetic oligonucleotide
  Sense Strand Starting at position 459 of SEQ ID NO: 318999
agauuauuugcuugcuguu

SEQ ID NO: 354794 - RNA, 19 nt, Artificial Sequence
  Description of Artificial Sequence: Synthetic oligonucleotide
  Antisense Strand to SEQ ID NO: 354793
aacagcaagcaaauaaucu

SEQ ID NO: 354795 - RNA, 19 nt, Artificial Sequence
  Description of Artificial Sequence: Synthetic oligonucleotide
  Sense Strand Starting at position 459 of SEQ ID NO: 319124
auuauagacuccucagugu

SEQ ID NO: 354796 - RNA, 19 nt, Artificial Sequence
  Description of Artificial Sequence: Synthetic oligonucleotide
  Antisense Strand to SEQ ID NO: 354795
acacugaggagucuauaau

SEQ ID NO: 354797 - RNA, 19 nt, Artificial Sequence
  Description of Artificial Sequence: Synthetic oligonucleotide
  Sense Strand Starting at position 460 of SEQ ID NO: 315286
cuuauuugaucuggagaga

SEQ ID NO: 354798 - RNA, 19 nt, Artificial Sequence
  Description of Artificial Sequence: Synthetic oligonucleotide
  Antisense Strand to SEQ ID NO: 354797
ucucuccagaucaaauaag

SEQ ID NO: 354799 - RNA, 19 nt, Artificial Sequence
  Description of Artificial Sequence: Synthetic oligonucleotide
  Sense Strand Starting at position 460 of SEQ ID NO: 315316
ggguaugcugacuagauga

SEQ ID NO: 354800 - RNA, 19 nt, Artificial Sequence
  Description of Artificial Sequence: Synthetic oligonucleotide
  Antisense Strand to SEQ ID NO: 354799
ucaucuagucagcauaccc

SEQ ID NO: 354801 - RNA, 19 nt, Artificial Sequence
  Description of Artificial Sequence: Synthetic oligonucleotide
  Sense Strand Starting at position 460 of SEQ ID NO: 315318
guaugcugacuagaugaua

SEQ ID NO: 354802 - RNA, 19 nt, Artificial Sequence
  Description of Artificial Sequence: Synthetic oligonucleotide
  Antisense Strand to SEQ ID NO: 354801
uaucaucuagucagcauac

SEQ ID NO: 354803 - RNA, 19 nt, Artificial Sequence
  Description of Artificial Sequence: Synthetic oligonucleotide
  Sense Strand Starting at position 460 of SEQ ID NO: 315585
aauaaagauguugggcaaa

SEQ ID NO: 354804 - RNA, 19 nt, Artificial Sequence
  Description of Artificial Sequence: Synthetic oligonucleotide
  Antisense Strand to SEQ ID NO: 354803
uuugcccaacaucuuuauu

SEQ ID NO: 354805 - RNA, 19 nt, Artificial Sequence
  Description of Artificial Sequence: Synthetic oligonucleotide
  Sense Strand Starting at position 460 of SEQ ID NO: 315587
uaaagauguugggcaaacu

SEQ ID NO: 354806 - RNA, 19 nt, Artificial Sequence
  Description of Artificial Sequence: Synthetic oligonucleotide
  Antisense Strand to SEQ ID NO: 354805
aguuugcccaacaucuuua

SEQ ID NO: 354807 - RNA, 19 nt, Artificial Sequence
  Description of Artificial Sequence: Synthetic oligonucleotide
  Sense Strand Starting at position 460 of SEQ ID NO: 315596
ugggcaaacugaucaacua

SEQ ID NO: 354808 - RNA, 19 nt, Artificial Sequence
  Description of Artificial Sequence: Synthetic oligonucleotide
  Antisense Strand to SEQ ID NO: 354807
uaguugaucaguuugccca

SEQ ID NO: 354809 - RNA, 19 nt, Artificial Sequence
  Description of Artificial Sequence: Synthetic oligonucleotide
  Sense Strand Starting at position 460 of SEQ ID NO: 315649
gaauauauguugccaaaug

SEQ ID NO: 354810 - RNA, 19 nt, Artificial Sequence
  Description of Artificial Sequence: Synthetic oligonucleotide
  Antisense Strand to SEQ ID NO: 354809
cauuuggcaacauauauuc

SEQ ID NO: 354811 - RNA, 19 nt, Artificial Sequence
  Description of Artificial Sequence: Synthetic oligonucleotide
  Sense Strand Starting at position 460 of SEQ ID NO: 315692
gugaguugauuugucuuau

SEQ ID NO: 354812 - RNA, 19 nt, Artificial Sequence
  Description of Artificial Sequence: Synthetic oligonucleotide
  Antisense Strand to SEQ ID NO: 354811
auaagacaaaucaacucac

SEQ ID NO: 354813 - RNA, 19 nt, Artificial Sequence
  Description of Artificial Sequence: Synthetic oligonucleotide
  Sense Strand Starting at position 460 of SEQ ID NO: 315929
cgugauaugccagaaacaa

SEQ ID NO: 354814 - RNA, 19 nt, Artificial Sequence
  Description of Artificial Sequence: Synthetic oligonucleotide
  Antisense Strand to SEQ ID NO: 354813
uuguuucuggcauaucacg

SEQ ID NO: 354815 - RNA, 19 nt, Artificial Sequence
  Description of Artificial Sequence: Synthetic oligonucleotide
  Sense Strand Starting at position 460 of SEQ ID NO: 316038
uuguuagaacaaugcuaga

SEQ ID NO: 354816 - RNA, 19 nt, Artificial Sequence
  Description of Artificial Sequence: Synthetic oligonucleotide
  Antisense Strand to SEQ ID NO: 354815
ucuagcauuguucuaacaa

SEQ ID NO: 354817 - RNA, 19 nt, Artificial Sequence
  Description of Artificial Sequence: Synthetic oligonucleotide
  Sense Strand Starting at position 460 of SEQ ID NO: 316306
ccuagagauuaccuugucu

SEQ ID NO: 354818 - RNA, 19 nt, Artificial Sequence
  Description of Artificial Sequence: Synthetic oligonucleotide
  Antisense Strand to SEQ ID NO: 354817
agacaagguaaucucuagg

SEQ ID NO: 354819 - RNA, 19 nt, Artificial Sequence
  Description of Artificial Sequence: Synthetic oligonucleotide
  Sense Strand Starting at position 460 of SEQ ID NO: 316504
ggcugagguccagaaagua

SEQ ID NO: 354820 - RNA, 19 nt, Artificial Sequence
  Description of Artificial Sequence: Synthetic oligonucleotide
  Antisense Strand to SEQ ID NO: 354819
uacuuucuggaccucagcc

SEQ ID NO: 354821 - RNA, 19 nt, Artificial Sequence
  Description of Artificial Sequence: Synthetic oligonucleotide
  Sense Strand Starting at position 460 of SEQ ID NO: 316527
ugaguucugugccuauuua

SEQ ID NO: 354822 - RNA, 19 nt, Artificial Sequence
  Description of Artificial Sequence: Synthetic oligonucleotide
  Antisense Strand to SEQ ID NO: 354821
uaaauaggcacagaacuca

SEQ ID NO: 354823 - RNA, 19 nt, Artificial Sequence
  Description of Artificial Sequence: Synthetic oligonucleotide
  Sense Strand Starting at position 460 of SEQ ID NO: 316646
cugaaagaggguggugauu

SEQ ID NO: 354824 - RNA, 19 nt, Artificial Sequence
  Description of Artificial Sequence: Synthetic oligonucleotide
  Antisense Strand to SEQ ID NO: 354823
aaucaccacccucuuucag

SEQ ID NO: 354825 - RNA, 19 nt, Artificial Sequence
  Description of Artificial Sequence: Synthetic oligonucleotide
  Sense Strand Starting at position 460 of SEQ ID NO: 316758
auagaccuuccuugguaaa

SEQ ID NO: 354826 - RNA, 19 nt, Artificial Sequence
  Description of Artificial Sequence: Synthetic oligonucleotide
  Antisense Strand to SEQ ID NO: 354825
uuuaccaaggaaggucuau

SEQ ID NO: 354827 - RNA, 19 nt, Artificial Sequence
  Description of Artificial Sequence: Synthetic oligonucleotide
  Sense Strand Starting at position 460 of SEQ ID NO: 316760
agaccuuccuugguaaagu

SEQ ID NO: 354828 - RNA, 19 nt, Artificial Sequence
  Description of Artificial Sequence: Synthetic oligonucleotide
  Antisense Strand to SEQ ID NO: 354827
acuuuaccaaggaaggucu

SEQ ID NO: 354829 - RNA, 19 nt, Artificial Sequence
  Description of Artificial Sequence: Synthetic oligonucleotide
  Sense Strand Starting at position 460 of SEQ ID NO: 316858
ugguaucuggcacagagua

SEQ ID NO: 354830 - RNA, 19 nt, Artificial Sequence
  Description of Artificial Sequence: Synthetic oligonucleotide
  Antisense Strand to SEQ ID NO: 354829
uacucugugccagauacca

SEQ ID NO: 354831 - RNA, 19 nt, Artificial Sequence
  Description of Artificial Sequence: Synthetic oligonucleotide
  Sense Strand Starting at position 460 of SEQ ID NO: 317026
uuucucucagcagagaauu

SEQ ID NO: 354832 - RNA, 19 nt, Artificial Sequence
  Description of Artificial Sequence: Synthetic oligonucleotide
  Antisense Strand to SEQ ID NO: 354831
aauucucugcugagagaaa

SEQ ID NO: 354833 - RNA, 19 nt, Artificial Sequence
  Description of Artificial Sequence: Synthetic oligonucleotide
  Sense Strand Starting at position 460 of SEQ ID NO: 317119
ggcaacuccugacuuaaag

SEQ ID NO: 354834 - RNA, 19 nt, Artificial Sequence
  Description of Artificial Sequence: Synthetic oligonucleotide
  Antisense Strand to SEQ ID NO: 354833
cuuuaagucaggaguugcc

SEQ ID NO: 354835 - RNA, 19 nt, Artificial Sequence
  Description of Artificial Sequence: Synthetic oligonucleotide
  Sense Strand Starting at position 460 of SEQ ID NO: 317313
caaugagagcuucgaaccu

SEQ ID NO: 354836 - RNA, 19 nt, Artificial Sequence
  Description of Artificial Sequence: Synthetic oligonucleotide
  Antisense Strand to SEQ ID NO: 354835
agguucgaagcucucauug

SEQ ID NO: 354837 - RNA, 19 nt, Artificial Sequence
  Description of Artificial Sequence: Synthetic oligonucleotide
  Sense Strand Starting at position 460 of SEQ ID NO: 317337
gaaucccaggucugaaauu

SEQ ID NO: 354838 - RNA, 19 nt, Artificial Sequence
  Description of Artificial Sequence: Synthetic oligonucleotide
  Antisense Strand to SEQ ID NO: 354837
aauuucagaccugggauuc

SEQ ID NO: 354839 - RNA, 19 nt, Artificial Sequence
  Description of Artificial Sequence: Synthetic oligonucleotide
  Sense Strand Starting at position 460 of SEQ ID NO: 317590
guaguuauuagggaagugu

SEQ ID NO: 354840 - RNA, 19 nt, Artificial Sequence
  Description of Artificial Sequence: Synthetic oligonucleotide
  Antisense Strand to SEQ ID NO: 354839
acacuucccuaauaacuac

SEQ ID NO: 354841 - RNA, 19 nt, Artificial Sequence
  Description of Artificial Sequence: Synthetic oligonucleotide
  Sense Strand Starting at position 460 of SEQ ID NO: 317774
cagggcuuuacuggguaga

SEQ ID NO: 354842 - RNA, 19 nt, Artificial Sequence
  Description of Artificial Sequence: Synthetic oligonucleotide
  Antisense Strand to SEQ ID NO: 354841
ucuacccaguaaagcccug

SEQ ID NO: 354843 - RNA, 19 nt, Artificial Sequence
  Description of Artificial Sequence: Synthetic oligonucleotide
  Sense Strand Starting at position 460 of SEQ ID NO: 317775
agggcuuuacuggguagaa

SEQ ID NO: 354844 - RNA, 19 nt, Artificial Sequence
  Description of Artificial Sequence: Synthetic oligonucleotide
  Antisense Strand to SEQ ID NO: 354843
uucuacccaguaaagcccu

SEQ ID NO: 354845 - RNA, 19 nt, Artificial Sequence
  Description of Artificial Sequence: Synthetic oligonucleotide
  Sense Strand Starting at position 460 of SEQ ID NO: 317776
gggcuuuacuggguagaag

SEQ ID NO: 354846 - RNA, 19 nt, Artificial Sequence
  Description of Artificial Sequence: Synthetic oligonucleotide
  Antisense Strand to SEQ ID NO: 354845
cuucuacccaguaaagccc

SEQ ID NO: 354847 - RNA, 19 nt, Artificial Sequence
  Description of Artificial Sequence: Synthetic oligonucleotide
  Sense Strand Starting at position 460 of SEQ ID NO: 317777
ggcuuuacuggguagaaga

SEQ ID NO: 354848 - RNA, 19 nt, Artificial Sequence
  Description of Artificial Sequence: Synthetic oligonucleotide
  Antisense Strand to SEQ ID NO: 354847
ucuucuacccaguaaagcc

SEQ ID NO: 354849 - RNA, 19 nt, Artificial Sequence
  Description of Artificial Sequence: Synthetic oligonucleotide
  Sense Strand Starting at position 460 of SEQ ID NO: 317996
agagauguggcuuaacuuc

SEQ ID NO: 354850 - RNA, 19 nt, Artificial Sequence
  Description of Artificial Sequence: Synthetic oligonucleotide
  Antisense Strand to SEQ ID NO: 354849
gaaguuaagccacaucucu

SEQ ID NO: 354851 - RNA, 19 nt, Artificial Sequence
  Description of Artificial Sequence: Synthetic oligonucleotide
  Sense Strand Starting at position 460 of SEQ ID NO: 318062
agggaaaggucacuuucuu

SEQ ID NO: 354852 - RNA, 19 nt, Artificial Sequence
  Description of Artificial Sequence: Synthetic oligonucleotide
  Antisense Strand to SEQ ID NO: 354851
aagaaagugaccuuucccu

SEQ ID NO: 354853 - RNA, 19 nt, Artificial Sequence
  Description of Artificial Sequence: Synthetic oligonucleotide
  Sense Strand Starting at position 460 of SEQ ID NO: 318252
ucuccauugaguggguuaa

SEQ ID NO: 354854 - RNA, 19 nt, Artificial Sequence
  Description of Artificial Sequence: Synthetic oligonucleotide
  Antisense Strand to SEQ ID NO: 354853
uuaacccacucaauggaga

SEQ ID NO: 354855 - RNA, 19 nt, Artificial Sequence
  Description of Artificial Sequence: Synthetic oligonucleotide
  Sense Strand Starting at position 460 of SEQ ID NO: 318254
uccauugaguggguuaaca

SEQ ID NO: 354856 - RNA, 19 nt, Artificial Sequence
  Description of Artificial Sequence: Synthetic oligonucleotide
  Antisense Strand to SEQ ID NO: 354855
uguuaacccacucaaugga

SEQ ID NO: 354857 - RNA, 19 nt, Artificial Sequence
  Description of Artificial Sequence: Synthetic oligonucleotide
  Sense Strand Starting at position 460 of SEQ ID NO: 318256
cauugaguggguuaacacu

SEQ ID NO: 354858 - RNA, 19 nt, Artificial Sequence
  Description of Artificial Sequence: Synthetic oligonucleotide
  Antisense Strand to SEQ ID NO: 354857
aguguuaacccacucaaug

SEQ ID NO: 354859 - RNA, 19 nt, Artificial Sequence
  Description of Artificial Sequence: Synthetic oligonucleotide
  Sense Strand Starting at position 460 of SEQ ID NO: 318263
uggguuaacacuuagcugu

SEQ ID NO: 354860 - RNA, 19 nt, Artificial Sequence
  Description of Artificial Sequence: Synthetic oligonucleotide
  Antisense Strand to SEQ ID NO: 354859
acagcuaaguguuaaccca

SEQ ID NO: 354861 - RNA, 19 nt, Artificial Sequence
  Description of Artificial Sequence: Synthetic oligonucleotide
  Sense Strand Starting at position 460 of SEQ ID NO: 318490
aucucagaaguauggcaau

SEQ ID NO: 354862 - RNA, 19 nt, Artificial Sequence
  Description of Artificial Sequence: Synthetic oligonucleotide
  Antisense Strand to SEQ ID NO: 354861
auugccauacuucugagau

SEQ ID NO: 354863 - RNA, 19 nt, Artificial Sequence
  Description of Artificial Sequence: Synthetic oligonucleotide
  Sense Strand Starting at position 460 of SEQ ID NO: 318591
cuaagacuguguguacaaa

SEQ ID NO: 354864 - RNA, 19 nt, Artificial Sequence
  Description of Artificial Sequence: Synthetic oligonucleotide
  Antisense Strand to SEQ ID NO: 354863
uuuguacacacagucuuag

SEQ ID NO: 354865 - RNA, 19 nt, Artificial Sequence
  Description of Artificial Sequence: Synthetic oligonucleotide
  Sense Strand Starting at position 460 of SEQ ID NO: 318636
gccgaaauacccuggaaau

SEQ ID NO: 354866 - RNA, 19 nt, Artificial Sequence
  Description of Artificial Sequence: Synthetic oligonucleotide
  Antisense Strand to SEQ ID NO: 354865
auuuccaggguauuucggc

SEQ ID NO: 354867 - RNA, 19 nt, Artificial Sequence
  Description of Artificial Sequence: Synthetic oligonucleotide
  Sense Strand Starting at position 460 of SEQ ID NO: 318672
uugagugaauugcuaaaua

SEQ ID NO: 354868 - RNA, 19 nt, Artificial Sequence
  Description of Artificial Sequence: Synthetic oligonucleotide
  Antisense Strand to SEQ ID NO: 354867
uauuuagcaauucacucaa

SEQ ID NO: 354869 - RNA, 19 nt, Artificial Sequence
  Description of Artificial Sequence: Synthetic oligonucleotide
  Sense Strand Starting at position 460 of SEQ ID NO: 318761
augcaauaacuuggaucaa

SEQ ID NO: 354870 - RNA, 19 nt, Artificial Sequence
  Description of Artificial Sequence: Synthetic oligonucleotide
  Antisense Strand to SEQ ID NO: 354869
uugauccaaguuauugcau

SEQ ID NO: 354871 - RNA, 19 nt, Artificial Sequence
  Description of Artificial Sequence: Synthetic oligonucleotide
  Sense Strand Starting at position 460 of SEQ ID NO: 318876
uaguguugccaggagcaaa

SEQ ID NO: 354872 - RNA, 19 nt, Artificial Sequence
  Description of Artificial Sequence: Synthetic oligonucleotide
  Antisense Strand to SEQ ID NO: 354871
uuugcuccuggcaacacua

SEQ ID NO: 354873 - RNA, 19 nt, Artificial Sequence
  Description of Artificial Sequence: Synthetic oligonucleotide
  Sense Strand Starting at position 460 of SEQ ID NO: 318971
cccacaugacuguaugcau

SEQ ID NO: 354874 - RNA, 19 nt, Artificial Sequence
  Description of Artificial Sequence: Synthetic oligonucleotide
  Antisense Strand to SEQ ID NO: 354873
augcauacagucauguggg

SEQ ID NO: 354875 - RNA, 19 nt, Artificial Sequence
  Description of Artificial Sequence: Synthetic oligonucleotide
  Sense Strand Starting at position 460 of SEQ ID NO: 319116
cuuguauuugaugguuguu

SEQ ID NO: 354876 - RNA, 19 nt, Artificial Sequence
  Description of Artificial Sequence: Synthetic oligonucleotide
  Antisense Strand to SEQ ID NO: 354875
aacaaccaucaaauacaag

SEQ ID NO: 354877 - RNA, 19 nt, Artificial Sequence
  Description of Artificial Sequence: Synthetic oligonucleotide
  Sense Strand Starting at position 461 of SEQ ID NO: 315251
gcaagaaucugccuacuca

SEQ ID NO: 354878 - RNA, 19 nt, Artificial Sequence
  Description of Artificial Sequence: Synthetic oligonucleotide
  Antisense Strand to SEQ ID NO: 354877
ugaguaggcagauucuugc

SEQ ID NO: 354879 - RNA, 19 nt, Artificial Sequence
  Description of Artificial Sequence: Synthetic oligonucleotide
  Sense Strand Starting at position 461 of SEQ ID NO: 315326
cuaaguuagucuucuuuaa

SEQ ID NO: 354880 - RNA, 19 nt, Artificial Sequence
  Description of Artificial Sequence: Synthetic oligonucleotide
  Antisense Strand to SEQ ID NO: 354879
uuaaagaagacuaacuuag

SEQ ID NO: 354881 - RNA, 19 nt, Artificial Sequence
  Description of Artificial Sequence: Synthetic oligonucleotide
  Sense Strand Starting at position 461 of SEQ ID NO: 315330
guuagucuucuuuaauagg

SEQ ID NO: 354882 - RNA, 19 nt, Artificial Sequence
  Description of Artificial Sequence: Synthetic oligonucleotide
  Antisense Strand to SEQ ID NO: 354881
ccuauuaaagaagacuaac

SEQ ID NO: 354883 - RNA, 19 nt, Artificial Sequence
  Description of Artificial Sequence: Synthetic oligonucleotide
  Sense Strand Starting at position 461 of SEQ ID NO: 315366
uugaguauuugacaaucaa

SEQ ID NO: 354884 - RNA, 19 nt, Artificial Sequence
  Description of Artificial Sequence: Synthetic oligonucleotide
  Antisense Strand to SEQ ID NO: 354883
uugauugucaaauacucaa

SEQ ID NO: 354885 - RNA, 19 nt, Artificial Sequence
  Description of Artificial Sequence: Synthetic oligonucleotide
  Sense Strand Starting at position 461 of SEQ ID NO: 315457
uccaacucaccaggaguau

SEQ ID NO: 354886 - RNA, 19 nt, Artificial Sequence
  Description of Artificial Sequence: Synthetic oligonucleotide
  Antisense Strand to SEQ ID NO: 354885
auacuccuggugaguugga

SEQ ID NO: 354887 - RNA, 19 nt, Artificial Sequence
  Description of Artificial Sequence: Synthetic oligonucleotide
  Sense Strand Starting at position 461 of SEQ ID NO: 315849
agauaagccuaacugucaa

SEQ ID NO: 354888 - RNA, 19 nt, Artificial Sequence
  Description of Artificial Sequence: Synthetic oligonucleotide
  Antisense Strand to SEQ ID NO: 354887
uugacaguuaggcuuaucu

SEQ ID NO: 354889 - RNA, 19 nt, Artificial Sequence
  Description of Artificial Sequence: Synthetic oligonucleotide
  Sense Strand Starting at position 461 of SEQ ID NO: 315897
ucagguuuauaagcuuuau

SEQ ID NO: 354890 - RNA, 19 nt, Artificial Sequence
  Description of Artificial Sequence: Synthetic oligonucleotide
  Antisense Strand to SEQ ID NO: 354889
auaaagcuuauaaaccuga

SEQ ID NO: 354891 - RNA, 19 nt, Artificial Sequence
  Description of Artificial Sequence: Synthetic oligonucleotide
  Sense Strand Starting at position 461 of SEQ ID NO: 315946
gguucuaauuaauccggaa

SEQ ID NO: 354892 - RNA, 19 nt, Artificial Sequence
  Description of Artificial Sequence: Synthetic oligonucleotide
  Antisense Strand to SEQ ID NO: 354891
uuccggauuaauuagaacc

SEQ ID NO: 354893 - RNA, 19 nt, Artificial Sequence
  Description of Artificial Sequence: Synthetic oligonucleotide
  Sense Strand Starting at position 461 of SEQ ID NO: 315958
uccggaaucaaccgugaau

SEQ ID NO: 354894 - RNA, 19 nt, Artificial Sequence
  Description of Artificial Sequence: Synthetic oligonucleotide
  Antisense Strand to SEQ ID NO: 354893
auucacgguugauuccgga

SEQ ID NO: 354895 - RNA, 19 nt, Artificial Sequence
  Description of Artificial Sequence: Synthetic oligonucleotide
  Sense Strand Starting at position 461 of SEQ ID NO: 315960
cggaaucaaccgugaauau

SEQ ID NO: 354896 - RNA, 19 nt, Artificial Sequence
  Description of Artificial Sequence: Synthetic oligonucleotide
  Antisense Strand to SEQ ID NO: 354895
auauucacgguugauuccg

SEQ ID NO: 354897 - RNA, 19 nt, Artificial Sequence
  Description of Artificial Sequence: Synthetic oligonucleotide
  Sense Strand Starting at position 461 of SEQ ID NO: 316202
gaguaugguggacauuauu

SEQ ID NO: 354898 - RNA, 19 nt, Artificial Sequence
  Description of Artificial Sequence: Synthetic oligonucleotide
  Antisense Strand to SEQ ID NO: 354897
aauaauguccaccauacuc

SEQ ID NO: 354899 - RNA, 19 nt, Artificial Sequence
  Description of Artificial Sequence: Synthetic oligonucleotide
  Sense Strand Starting at position 461 of SEQ ID NO: 316808
caaaguaucugagugacag

SEQ ID NO: 354900 - RNA, 19 nt, Artificial Sequence
  Description of Artificial Sequence: Synthetic oligonucleotide
  Antisense Strand to SEQ ID NO: 354899
cugucacucagauacuuug

SEQ ID NO: 354901 - RNA, 19 nt, Artificial Sequence
  Description of Artificial Sequence: Synthetic oligonucleotide
  Sense Strand Starting at position 461 of SEQ ID NO: 316809
aaaguaucugagugacaga

SEQ ID NO: 354902 - RNA, 19 nt, Artificial Sequence
  Description of Artificial Sequence: Synthetic oligonucleotide
  Antisense Strand to SEQ ID NO: 354901
ucugucacucagauacuuu

SEQ ID NO: 354903 - RNA, 19 nt, Artificial Sequence
  Description of Artificial Sequence: Synthetic oligonucleotide
  Sense Strand Starting at position 461 of SEQ ID NO: 317356
agugcaaucgcuuugcgga

SEQ ID NO: 354904 - RNA, 19 nt, Artificial Sequence
  Description of Artificial Sequence: Synthetic oligonucleotide
  Antisense Strand to SEQ ID NO: 354903
uccgcaaagcgauugcacu

SEQ ID NO: 354905 - RNA, 19 nt, Artificial Sequence
  Description of Artificial Sequence: Synthetic oligonucleotide
  Sense Strand Starting at position 461 of SEQ ID NO: 317408
uagguauaugggugaggga

SEQ ID NO: 354906 - RNA, 19 nt, Artificial Sequence
  Description of Artificial Sequence: Synthetic oligonucleotide
  Antisense Strand to SEQ ID NO: 354905
ucccucacccauauaccua

SEQ ID NO: 354907 - RNA, 19 nt, Artificial Sequence
  Description of Artificial Sequence: Synthetic oligonucleotide
  Sense Strand Starting at position 461 of SEQ ID NO: 317462
auuaccucuguaugaagau

SEQ ID NO: 354908 - RNA, 19 nt, Artificial Sequence
  Description of Artificial Sequence: Synthetic oligonucleotide
  Antisense Strand to SEQ ID NO: 354907
aucuucauacagagguaau

SEQ ID NO: 354909 - RNA, 19 nt, Artificial Sequence
  Description of Artificial Sequence: Synthetic oligonucleotide
  Sense Strand Starting at position 461 of SEQ ID NO: 317493
caugguuguuaggccuaua

SEQ ID NO: 354910 - RNA, 19 nt, Artificial Sequence
  Description of Artificial Sequence: Synthetic oligonucleotide
  Antisense Strand to SEQ ID NO: 354909
uauaggccuaacaaccaug

SEQ ID NO: 354911 - RNA, 19 nt, Artificial Sequence
  Description of Artificial Sequence: Synthetic oligonucleotide
  Sense Strand Starting at position 461 of SEQ ID NO: 317496
gguuguuaggccuauaaag

SEQ ID NO: 354912 - RNA, 19 nt, Artificial Sequence
  Description of Artificial Sequence: Synthetic oligonucleotide
  Antisense Strand to SEQ ID NO: 354911
cuuuauaggccuaacaacc

SEQ ID NO: 354913 - RNA, 19 nt, Artificial Sequence
  Description of Artificial Sequence: Synthetic oligonucleotide
  Sense Strand Starting at position 461 of SEQ ID NO: 317681
auuuguuauuguucgaugu

SEQ ID NO: 354914 - RNA, 19 nt, Artificial Sequence
  Description of Artificial Sequence: Synthetic oligonucleotide
  Antisense Strand to SEQ ID NO: 354913
acaucgaacaauaacaaau

SEQ ID NO: 354915 - RNA, 19 nt, Artificial Sequence
  Description of Artificial Sequence: Synthetic oligonucleotide
  Sense Strand Starting at position 461 of SEQ ID NO: 317710
auguccuguccauguggaa

SEQ ID NO: 354916 - RNA, 19 nt, Artificial Sequence
  Description of Artificial Sequence: Synthetic oligonucleotide
  Antisense Strand to SEQ ID NO: 354915
uuccacauggacaggacau

SEQ ID NO: 354917 - RNA, 19 nt, Artificial Sequence
  Description of Artificial Sequence: Synthetic oligonucleotide
  Sense Strand Starting at position 461 of SEQ ID NO: 317740
ugaccauucugcuuggaug

SEQ ID NO: 354918 - RNA, 19 nt, Artificial Sequence
  Description of Artificial Sequence: Synthetic oligonucleotide
  Antisense Strand to SEQ ID NO: 354917
cauccaagcagaaugguca

SEQ ID NO: 354919 - RNA, 19 nt, Artificial Sequence
  Description of Artificial Sequence: Synthetic oligonucleotide
  Sense Strand Starting at position 461 of SEQ ID NO: 317741
gaccauucugcuuggaugu

SEQ ID NO: 354920 - RNA, 19 nt, Artificial Sequence
  Description of Artificial Sequence: Synthetic oligonucleotide
  Antisense Strand to SEQ ID NO: 354919
acauccaagcagaaugguc

SEQ ID NO: 354921 - RNA, 19 nt, Artificial Sequence
  Description of Artificial Sequence: Synthetic oligonucleotide
  Sense Strand Starting at position 461 of SEQ ID NO: 317748
cugcuuggauguguuaaga

SEQ ID NO: 354922 - RNA, 19 nt, Artificial Sequence
  Description of Artificial Sequence: Synthetic oligonucleotide
  Antisense Strand to SEQ ID NO: 354921
ucuuaacacauccaagcag

SEQ ID NO: 354923 - RNA, 19 nt, Artificial Sequence
  Description of Artificial Sequence: Synthetic oligonucleotide
  Sense Strand Starting at position 461 of SEQ ID NO: 317759
uguuaagaggcauguugaa

SEQ ID NO: 354924 - RNA, 19 nt, Artificial Sequence
  Description of Artificial Sequence: Synthetic oligonucleotide
  Antisense Strand to SEQ ID NO: 354923
uucaacaugccucuuaaca

SEQ ID NO: 354925 - RNA, 19 nt, Artificial Sequence
  Description of Artificial Sequence: Synthetic oligonucleotide
  Sense Strand Starting at position 461 of SEQ ID NO: 317847
auguaaacuuuagugauuc

SEQ ID NO: 354926 - RNA, 19 nt, Artificial Sequence
  Description of Artificial Sequence: Synthetic oligonucleotide
  Antisense Strand to SEQ ID NO: 354925
gaaucacuaaaguuuacau

SEQ ID NO: 354927 - RNA, 19 nt, Artificial Sequence
  Description of Artificial Sequence: Synthetic oligonucleotide
  Sense Strand Starting at position 461 of SEQ ID NO: 317873
aaauauuagucgcuuugac

SEQ ID NO: 354928 - RNA, 19 nt, Artificial Sequence
  Description of Artificial Sequence: Synthetic oligonucleotide
  Antisense Strand to SEQ ID NO: 354927
gucaaagcgacuaauauuu

SEQ ID NO: 354929 - RNA, 19 nt, Artificial Sequence
  Description of Artificial Sequence: Synthetic oligonucleotide
  Sense Strand Starting at position 461 of SEQ ID NO: 318298
gccguuucuggagggaacu

SEQ ID NO: 354930 - RNA, 19 nt, Artificial Sequence
  Description of Artificial Sequence: Synthetic oligonucleotide
  Antisense Strand to SEQ ID NO: 354929
aguucccuccagaaacggc

SEQ ID NO: 354931 - RNA, 19 nt, Artificial Sequence
  Description of Artificial Sequence: Synthetic oligonucleotide
  Sense Strand Starting at position 461 of SEQ ID NO: 318299
ccguuucuggagggaacua

SEQ ID NO: 354932 - RNA, 19 nt, Artificial Sequence
  Description of Artificial Sequence: Synthetic oligonucleotide
  Antisense Strand to SEQ ID NO: 354931
uaguucccuccagaaacgg

SEQ ID NO: 354933 - RNA, 19 nt, Artificial Sequence
  Description of Artificial Sequence: Synthetic oligonucleotide
  Sense Strand Starting at position 461 of SEQ ID NO: 318300
cguuucuggagggaacuau

SEQ ID NO: 354934 - RNA, 19 nt, Artificial Sequence
  Description of Artificial Sequence: Synthetic oligonucleotide
  Antisense Strand to SEQ ID NO: 354933
auaguucccuccagaaacg

SEQ ID NO: 354935 - RNA, 19 nt, Artificial Sequence
  Description of Artificial Sequence: Synthetic oligonucleotide
  Sense Strand Starting at position 461 of SEQ ID NO: 318415
gcaaguacaaaguaagagu

SEQ ID NO: 354936 - RNA, 19 nt, Artificial Sequence
  Description of Artificial Sequence: Synthetic oligonucleotide
  Antisense Strand to SEQ ID NO: 354935
acucuuacuuuguacuugc

SEQ ID NO: 354937 - RNA, 19 nt, Artificial Sequence
  Description of Artificial Sequence: Synthetic oligonucleotide
  Sense Strand Starting at position 461 of SEQ ID NO: 318509
ccuuuaguaucucuaggga

SEQ ID NO: 354938 - RNA, 19 nt, Artificial Sequence
  Description of Artificial Sequence: Synthetic oligonucleotide
  Antisense Strand to SEQ ID NO: 354937
ucccuagagauacuaaagg

SEQ ID NO: 354939 - RNA, 19 nt, Artificial Sequence
  Description of Artificial Sequence: Synthetic oligonucleotide
  Sense Strand Starting at position 461 of SEQ ID NO: 318512
uuaguaucucuagggaauu

SEQ ID NO: 354940 - RNA, 19 nt, Artificial Sequence
  Description of Artificial Sequence: Synthetic oligonucleotide
  Antisense Strand to SEQ ID NO: 354939
aauucccuagagauacuaa

SEQ ID NO: 354941 - RNA, 19 nt, Artificial Sequence
  Description of Artificial Sequence: Synthetic oligonucleotide
  Sense Strand Starting at position 461 of SEQ ID NO: 318524
gggaauucccuuuaugggu

SEQ ID NO: 354942 - RNA, 19 nt, Artificial Sequence
  Description of Artificial Sequence: Synthetic oligonucleotide
  Antisense Strand to SEQ ID NO: 354941
acccauaaagggaauuccc

SEQ ID NO: 354943 - RNA, 19 nt, Artificial Sequence
  Description of Artificial Sequence: Synthetic oligonucleotide
  Sense Strand Starting at position 461 of SEQ ID NO: 318530
ucccuuuaugggugaggca

SEQ ID NO: 354944 - RNA, 19 nt, Artificial Sequence
  Description of Artificial Sequence: Synthetic oligonucleotide
  Antisense Strand to SEQ ID NO: 354943
ugccucacccauaaaggga

SEQ ID NO: 354945 - RNA, 19 nt, Artificial Sequence
  Description of Artificial Sequence: Synthetic oligonucleotide
  Sense Strand Starting at position 461 of SEQ ID NO: 318586
gcugacuuccuagagcuga

SEQ ID NO: 354946 - RNA, 19 nt, Artificial Sequence
  Description of Artificial Sequence: Synthetic oligonucleotide
  Antisense Strand to SEQ ID NO: 354945
ucagcucuaggaagucagc

SEQ ID NO: 354947 - RNA, 19 nt, Artificial Sequence
  Description of Artificial Sequence: Synthetic oligonucleotide
  Sense Strand Starting at position 461 of SEQ ID NO: 318747
aguccucauguguaacuuu

SEQ ID NO: 354948 - RNA, 19 nt, Artificial Sequence
  Description of Artificial Sequence: Synthetic oligonucleotide
  Antisense Strand to SEQ ID NO: 354947
aaaguuacacaugaggacu

SEQ ID NO: 354949 - RNA, 19 nt, Artificial Sequence
  Description of Artificial Sequence: Synthetic oligonucleotide
  Sense Strand Starting at position 461 of SEQ ID NO: 318844
ggguguaaccaaugggaac

SEQ ID NO: 354950 - RNA, 19 nt, Artificial Sequence
  Description of Artificial Sequence: Synthetic oligonucleotide
  Antisense Strand to SEQ ID NO: 354949
guucccauugguuacaccc

SEQ ID NO: 354951 - RNA, 19 nt, Artificial Sequence
  Description of Artificial Sequence: Synthetic oligonucleotide
  Sense Strand Starting at position 461 of SEQ ID NO: 318859
gaacgcucuagaggguauu

SEQ ID NO: 354952 - RNA, 19 nt, Artificial Sequence
  Description of Artificial Sequence: Synthetic oligonucleotide
  Antisense Strand to SEQ ID NO: 354951
aauacccucuagagcguuc

SEQ ID NO: 354953 - RNA, 19 nt, Artificial Sequence
  Description of Artificial Sequence: Synthetic oligonucleotide
  Sense Strand Starting at position 461 of SEQ ID NO: 319055
augggagcuguacauauau

SEQ ID NO: 354954 - RNA, 19 nt, Artificial Sequence
  Description of Artificial Sequence: Synthetic oligonucleotide
  Antisense Strand to SEQ ID NO: 354953
auauauguacagcucccau

SEQ ID NO: 354955 - RNA, 19 nt, Artificial Sequence
  Description of Artificial Sequence: Synthetic oligonucleotide
  Sense Strand Starting at position 461 of SEQ ID NO: 319176
gccagagaccaguaucagu

SEQ ID NO: 354956 - RNA, 19 nt, Artificial Sequence
  Description of Artificial Sequence: Synthetic oligonucleotide
  Antisense Strand to SEQ ID NO: 354955
acugauacuggucucuggc

SEQ ID NO: 354957 - RNA, 19 nt, Artificial Sequence
  Description of Artificial Sequence: Synthetic oligonucleotide
  Sense Strand Starting at position 462 of SEQ ID NO: 315332
ugcugugugaccuuagcuu

SEQ ID NO: 354958 - RNA, 19 nt, Artificial Sequence
  Description of Artificial Sequence: Synthetic oligonucleotide
  Antisense Strand to SEQ ID NO: 354957
aagcuaaggucacacagca

SEQ ID NO: 354959 - RNA, 19 nt, Artificial Sequence
  Description of Artificial Sequence: Synthetic oligonucleotide
  Sense Strand Starting at position 462 of SEQ ID NO: 315356
cccuuucucccuggguaaa

SEQ ID NO: 354960 - RNA, 19 nt, Artificial Sequence
  Description of Artificial Sequence: Synthetic oligonucleotide
  Antisense Strand to SEQ ID NO: 354959
uuuacccagggagaaaggg

SEQ ID NO: 354961 - RNA, 19 nt, Artificial Sequence
  Description of Artificial Sequence: Synthetic oligonucleotide
  Sense Strand Starting at position 462 of SEQ ID NO: 315379
ggcugucaucacuaggaga

SEQ ID NO: 354962 - RNA, 19 nt, Artificial Sequence
  Description of Artificial Sequence: Synthetic oligonucleotide
  Antisense Strand to SEQ ID NO: 354961
ucuccuagugaugacagcc

SEQ ID NO: 354963 - RNA, 19 nt, Artificial Sequence
  Description of Artificial Sequence: Synthetic oligonucleotide
  Sense Strand Starting at position 462 of SEQ ID NO: 315536
ugagcagacugcuccugau

SEQ ID NO: 354964 - RNA, 19 nt, Artificial Sequence
  Description of Artificial Sequence: Synthetic oligonucleotide
  Antisense Strand to SEQ ID NO: 354963
aucaggagcagucugcuca

SEQ ID NO: 354965 - RNA, 19 nt, Artificial Sequence
  Description of Artificial Sequence: Synthetic oligonucleotide
  Sense Strand Starting at position 462 of SEQ ID NO: 315551
ugaucauccucuccagaga

SEQ ID NO: 354966 - RNA, 19 nt, Artificial Sequence
  Description of Artificial Sequence: Synthetic oligonucleotide
  Antisense Strand to SEQ ID NO: 354965
ucucuggagaggaugauca

SEQ ID NO: 354967 - RNA, 19 nt, Artificial Sequence
  Description of Artificial Sequence: Synthetic oligonucleotide
  Sense Strand Starting at position 462 of SEQ ID NO: 315579
gggauaacuucagccagug

SEQ ID NO: 354968 - RNA, 19 nt, Artificial Sequence
  Description of Artificial Sequence: Synthetic oligonucleotide
  Antisense Strand to SEQ ID NO: 354967
cacuggcugaaguuauccc

SEQ ID NO: 354969 - RNA, 19 nt, Artificial Sequence
  Description of Artificial Sequence: Synthetic oligonucleotide
  Sense Strand Starting at position 462 of SEQ ID NO: 315610
ucauuucugccagguguga

SEQ ID NO: 354970 - RNA, 19 nt, Artificial Sequence
  Description of Artificial Sequence: Synthetic oligonucleotide
  Antisense Strand to SEQ ID NO: 354969
ucacaccuggcagaaauga

SEQ ID NO: 354971 - RNA, 19 nt, Artificial Sequence
  Description of Artificial Sequence: Synthetic oligonucleotide
  Sense Strand Starting at position 462 of SEQ ID NO: 315612
auuucugccaggugugaca

SEQ ID NO: 354972 - RNA, 19 nt, Artificial Sequence
  Description of Artificial Sequence: Synthetic oligonucleotide
  Antisense Strand to SEQ ID NO: 354971
ugucacaccuggcagaaau

SEQ ID NO: 354973 - RNA, 19 nt, Artificial Sequence
  Description of Artificial Sequence: Synthetic oligonucleotide
  Sense Strand Starting at position 462 of SEQ ID NO: 315828
agagucuuugagggugaaa

SEQ ID NO: 354974 - RNA, 19 nt, Artificial Sequence
  Description of Artificial Sequence: Synthetic oligonucleotide
  Antisense Strand to SEQ ID NO: 354973
uuucacccucaaagacucu

SEQ ID NO: 354975 - RNA, 19 nt, Artificial Sequence
  Description of Artificial Sequence: Synthetic oligonucleotide
  Sense Strand Starting at position 462 of SEQ ID NO: 315868
gcuucuaaccugugaaaca

SEQ ID NO: 354976 - RNA, 19 nt, Artificial Sequence
  Description of Artificial Sequence: Synthetic oligonucleotide
  Antisense Strand to SEQ ID NO: 354975
uguuucacagguuagaagc

SEQ ID NO: 354977 - RNA, 19 nt, Artificial Sequence
  Description of Artificial Sequence: Synthetic oligonucleotide
  Sense Strand Starting at position 462 of SEQ ID NO: 315878
ugugaaacacccugcagau

SEQ ID NO: 354978 - RNA, 19 nt, Artificial Sequence
  Description of Artificial Sequence: Synthetic oligonucleotide
  Antisense Strand to SEQ ID NO: 354977
aucugcaggguguuucaca

SEQ ID NO: 354979 - RNA, 19 nt, Artificial Sequence
  Description of Artificial Sequence: Synthetic oligonucleotide
  Sense Strand Starting at position 462 of SEQ ID NO: 316035
caaugaguugucugcagag

SEQ ID NO: 354980 - RNA, 19 nt, Artificial Sequence
  Description of Artificial Sequence: Synthetic oligonucleotide
  Antisense Strand to SEQ ID NO: 354979
cucugcagacaacucauug

SEQ ID NO: 354981 - RNA, 19 nt, Artificial Sequence
  Description of Artificial Sequence: Synthetic oligonucleotide
  Sense Strand Starting at position 462 of SEQ ID NO: 316037
augaguugucugcagagaa

SEQ ID NO: 354982 - RNA, 19 nt, Artificial Sequence
  Description of Artificial Sequence: Synthetic oligonucleotide
  Antisense Strand to SEQ ID NO: 354981
uucucugcagacaacucau

SEQ ID NO: 354983 - RNA, 19 nt, Artificial Sequence
  Description of Artificial Sequence: Synthetic oligonucleotide
  Sense Strand Starting at position 462 of SEQ ID NO: 316127
gaaagaggccuguggugaa

SEQ ID NO: 354984 - RNA, 19 nt, Artificial Sequence
  Description of Artificial Sequence: Synthetic oligonucleotide
  Antisense Strand to SEQ ID NO: 354983
uucaccacaggccucuuuc

SEQ ID NO: 354985 - RNA, 19 nt, Artificial Sequence
  Description of Artificial Sequence: Synthetic oligonucleotide
  Sense Strand Starting at position 462 of SEQ ID NO: 316169
gggcuuugcggcaagcaga

SEQ ID NO: 354986 - RNA, 19 nt, Artificial Sequence
  Description of Artificial Sequence: Synthetic oligonucleotide
  Antisense Strand to SEQ ID NO: 354985
ucugcuugccgcaaagccc

SEQ ID NO: 354987 - RNA, 19 nt, Artificial Sequence
  Description of Artificial Sequence: Synthetic oligonucleotide
  Sense Strand Starting at position 462 of SEQ ID NO: 316305
gauggaugccuugggaacu

SEQ ID NO: 354988 - RNA, 19 nt, Artificial Sequence
  Description of Artificial Sequence: Synthetic oligonucleotide
  Antisense Strand to SEQ ID NO: 354987
aguucccaaggcauccauc

SEQ ID NO: 354989 - RNA, 19 nt, Artificial Sequence
  Description of Artificial Sequence: Synthetic oligonucleotide
  Sense Strand Starting at position 462 of SEQ ID NO: 316322
cugcuagcccaagaaguuu

SEQ ID NO: 354990 - RNA, 19 nt, Artificial Sequence
  Description of Artificial Sequence: Synthetic oligonucleotide
  Antisense Strand to SEQ ID NO: 354989
aaacuucuugggcuagcag

SEQ ID NO: 354991 - RNA, 19 nt, Artificial Sequence
  Description of Artificial Sequence: Synthetic oligonucleotide
  Sense Strand Starting at position 462 of SEQ ID NO: 317733
acugauaauuaguugguuu

SEQ ID NO: 354992 - RNA, 19 nt, Artificial Sequence
  Description of Artificial Sequence: Synthetic oligonucleotide
  Antisense Strand to SEQ ID NO: 354991
aaaccaacuaauuaucagu

SEQ ID NO: 354993 - RNA, 19 nt, Artificial Sequence
  Description of Artificial Sequence: Synthetic oligonucleotide
  Sense Strand Starting at position 462 of SEQ ID NO: 317735
ugauaauuaguugguuuag

SEQ ID NO: 354994 - RNA, 19 nt, Artificial Sequence
  Description of Artificial Sequence: Synthetic oligonucleotide
  Antisense Strand to SEQ ID NO: 354993
cuaaaccaacuaauuauca

SEQ ID NO: 354995 - RNA, 19 nt, Artificial Sequence
  Description of Artificial Sequence: Synthetic oligonucleotide
  Sense Strand Starting at position 462 of SEQ ID NO: 317737
auaauuaguugguuuagca

SEQ ID NO: 354996 - RNA, 19 nt, Artificial Sequence
  Description of Artificial Sequence: Synthetic oligonucleotide
  Antisense Strand to SEQ ID NO: 354995
ugcuaaaccaacuaauuau

SEQ ID NO: 354997 - RNA, 19 nt, Artificial Sequence
  Description of Artificial Sequence: Synthetic oligonucleotide
  Sense Strand Starting at position 462 of SEQ ID NO: 318035
cuaagugugcaacagcaua

SEQ ID NO: 354998 - RNA, 19 nt, Artificial Sequence
  Description of Artificial Sequence: Synthetic oligonucleotide
  Antisense Strand to SEQ ID NO: 354997
uaugcuguugcacacuuag

SEQ ID NO: 354999 - RNA, 19 nt, Artificial Sequence
  Description of Artificial Sequence: Synthetic oligonucleotide
  Sense Strand Starting at position 462 of SEQ ID NO: 318043
gcaacagcauaugucuaaa

SEQ ID NO: 355000 - RNA, 19 nt, Artificial Sequence
  Description of Artificial Sequence: Synthetic oligonucleotide
  Antisense Strand to SEQ ID NO: 354999
uuuagacauaugcuguugc

SEQ ID NO: 355001 - RNA, 19 nt, Artificial Sequence
  Description of Artificial Sequence: Synthetic oligonucleotide
  Sense Strand Starting at position 462 of SEQ ID NO: 318046
acagcauaugucuaaauga

SEQ ID NO: 355002 - RNA, 19 nt, Artificial Sequence
  Description of Artificial Sequence: Synthetic oligonucleotide
  Antisense Strand to SEQ ID NO: 355001
ucauuuagacauaugcugu

SEQ ID NO: 355003 - RNA, 19 nt, Artificial Sequence
  Description of Artificial Sequence: Synthetic oligonucleotide
  Sense Strand Starting at position 462 of SEQ ID NO: 318300
aagugaucugccugacuuu

SEQ ID NO: 355004 - RNA, 19 nt, Artificial Sequence
  Description of Artificial Sequence: Synthetic oligonucleotide
  Antisense Strand to SEQ ID NO: 355003
aaagucaggcagaucacuu

SEQ ID NO: 355005 - RNA, 19 nt, Artificial Sequence
  Description of Artificial Sequence: Synthetic oligonucleotide
  Sense Strand Starting at position 462 of SEQ ID NO: 318335
ggauuacagauguguaguc

SEQ ID NO: 355006 - RNA, 19 nt, Artificial Sequence
  Description of Artificial Sequence: Synthetic oligonucleotide
  Antisense Strand to SEQ ID NO: 355005
gacuacacaucuguaaucc

SEQ ID NO: 355007 - RNA, 19 nt, Artificial Sequence
  Description of Artificial Sequence: Synthetic oligonucleotide
  Sense Strand Starting at position 462 of SEQ ID NO: 318337
auuacagauguguagucuu

SEQ ID NO: 355008 - RNA, 19 nt, Artificial Sequence
  Description of Artificial Sequence: Synthetic oligonucleotide
  Antisense Strand to SEQ ID NO: 355007
aagacuacacaucuguaau

SEQ ID NO: 355009 - RNA, 19 nt, Artificial Sequence
  Description of Artificial Sequence: Synthetic oligonucleotide
  Sense Strand Starting at position 462 of SEQ ID NO: 318340
acagauguguagucuuuga

SEQ ID NO: 355010 - RNA, 19 nt, Artificial Sequence
  Description of Artificial Sequence: Synthetic oligonucleotide
  Antisense Strand to SEQ ID NO: 355009
ucaaagacuacacaucugu

SEQ ID NO: 355011 - RNA, 19 nt, Artificial Sequence
  Description of Artificial Sequence: Synthetic oligonucleotide
  Sense Strand Starting at position 462 of SEQ ID NO: 318344
auguguagucuuugaaauc

SEQ ID NO: 355012 - RNA, 19 nt, Artificial Sequence
  Description of Artificial Sequence: Synthetic oligonucleotide
  Antisense Strand to SEQ ID NO: 355011
gauuucaaagacuacacau

SEQ ID NO: 355013 - RNA, 19 nt, Artificial Sequence
  Description of Artificial Sequence: Synthetic oligonucleotide
  Sense Strand Starting at position 462 of SEQ ID NO: 318369
guguucuuacagugcauuu

SEQ ID NO: 355014 - RNA, 19 nt, Artificial Sequence
  Description of Artificial Sequence: Synthetic oligonucleotide
  Antisense Strand to SEQ ID NO: 355013
aaaugcacuguaagaacac

SEQ ID NO: 355015 - RNA, 19 nt, Artificial Sequence
  Description of Artificial Sequence: Synthetic oligonucleotide
  Sense Strand Starting at position 462 of SEQ ID NO: 318446
ggcggccaucgcucuuaaa

SEQ ID NO: 355016 - RNA, 19 nt, Artificial Sequence
  Description of Artificial Sequence: Synthetic oligonucleotide
  Antisense Strand to SEQ ID NO: 355015
uuuaagagcgauggccgcc

SEQ ID NO: 355017 - RNA, 19 nt, Artificial Sequence
  Description of Artificial Sequence: Synthetic oligonucleotide
  Sense Strand Starting at position 462 of SEQ ID NO: 318447
gcggccaucgcucuuaaau

SEQ ID NO: 355018 - RNA, 19 nt, Artificial Sequence
  Description of Artificial Sequence: Synthetic oligonucleotide
  Antisense Strand to SEQ ID NO: 355017
auuuaagagcgauggccgc

SEQ ID NO: 355019 - RNA, 19 nt, Artificial Sequence
  Description of Artificial Sequence: Synthetic oligonucleotide
  Sense Strand Starting at position 462 of SEQ ID NO: 318556
gggccaaagcucuaacacu

SEQ ID NO: 355020 - RNA, 19 nt, Artificial Sequence
  Description of Artificial Sequence: Synthetic oligonucleotide
  Antisense Strand to SEQ ID NO: 355019
aguguuagagcuuuggccc

SEQ ID NO: 355021 - RNA, 19 nt, Artificial Sequence
  Description of Artificial Sequence: Synthetic oligonucleotide
  Sense Strand Starting at position 462 of SEQ ID NO: 318636
ccagguuccuaauccugaa

SEQ ID NO: 355022 - RNA, 19 nt, Artificial Sequence
  Description of Artificial Sequence: Synthetic oligonucleotide
  Antisense Strand to SEQ ID NO: 355021
uucaggauuaggaaccugg

SEQ ID NO: 355023 - RNA, 19 nt, Artificial Sequence
  Description of Artificial Sequence: Synthetic oligonucleotide
  Sense Strand Starting at position 462 of SEQ ID NO: 318986
cuuggauucugauccagua

SEQ ID NO: 355024 - RNA, 19 nt, Artificial Sequence
  Description of Artificial Sequence: Synthetic oligonucleotide
  Antisense Strand to SEQ ID NO: 355023
uacuggaucagaauccaag

SEQ ID NO: 355025 - RNA, 19 nt, Artificial Sequence
  Description of Artificial Sequence: Synthetic oligonucleotide
  Sense Strand Starting at position 462 of SEQ ID NO: 319067
ccaaguaucccagguaaau

SEQ ID NO: 355026 - RNA, 19 nt, Artificial Sequence
  Description of Artificial Sequence: Synthetic oligonucleotide
  Antisense Strand to SEQ ID NO: 355025
auuuaccugggauacuugg

SEQ ID NO: 355027 - RNA, 19 nt, Artificial Sequence
  Description of Artificial Sequence: Synthetic oligonucleotide
  Sense Strand Starting at position 462 of SEQ ID NO: 319166
guuuccacucgugaauauc

SEQ ID NO: 355028 - RNA, 19 nt, Artificial Sequence
  Description of Artificial Sequence: Synthetic oligonucleotide
  Antisense Strand to SEQ ID NO: 355027
gauauucacgaguggaaac

SEQ ID NO: 355029 - RNA, 19 nt, Artificial Sequence
  Description of Artificial Sequence: Synthetic oligonucleotide
  Sense Strand Starting at position 462 of SEQ ID NO: 319169
uccacucgugaauaucuua

SEQ ID NO: 355030 - RNA, 19 nt, Artificial Sequence
  Description of Artificial Sequence: Synthetic oligonucleotide
  Antisense Strand to SEQ ID NO: 355029
uaagauauucacgagugga

SEQ ID NO: 355031 - RNA, 19 nt, Artificial Sequence
  Description of Artificial Sequence: Synthetic oligonucleotide
  Sense Strand Starting at position 462 of SEQ ID NO: 319172
acucgugaauaucuuauau

SEQ ID NO: 355032 - RNA, 19 nt, Artificial Sequence
  Description of Artificial Sequence: Synthetic oligonucleotide
  Antisense Strand to SEQ ID NO: 355031
auauaagauauucacgagu

SEQ ID NO: 355033 - RNA, 19 nt, Artificial Sequence
  Description of Artificial Sequence: Synthetic oligonucleotide
  Sense Strand Starting at position 462 of SEQ ID NO: 319184
cuuauauaaccguaguaca

SEQ ID NO: 355034 - RNA, 19 nt, Artificial Sequence
  Description of Artificial Sequence: Synthetic oligonucleotide
  Antisense Strand to SEQ ID NO: 355033
uguacuacgguuauauaag

SEQ ID NO: 355035 - RNA, 19 nt, Artificial Sequence
  Description of Artificial Sequence: Synthetic oligonucleotide
  Sense Strand Starting at position 462 of SEQ ID NO: 319218
acaccaguguuagcacauu

SEQ ID NO: 355036 - RNA, 19 nt, Artificial Sequence
  Description of Artificial Sequence: Synthetic oligonucleotide
  Antisense Strand to SEQ ID NO: 355035
aaugugcuaacacuggugu

SEQ ID NO: 355037 - RNA, 19 nt, Artificial Sequence
  Description of Artificial Sequence: Synthetic oligonucleotide
  Sense Strand Starting at position 463 of SEQ ID NO: 315353
guaugaagucuugacuaua

SEQ ID NO: 355038 - RNA, 19 nt, Artificial Sequence
  Description of Artificial Sequence: Synthetic oligonucleotide
  Antisense Strand to SEQ ID NO: 355037
uauagucaagacuucauac

SEQ ID NO: 355039 - RNA, 19 nt, Artificial Sequence
  Description of Artificial Sequence: Synthetic oligonucleotide
  Sense Strand Starting at position 463 of SEQ ID NO: 315530
augacauugugcccagaug

SEQ ID NO: 355040 - RNA, 19 nt, Artificial Sequence
  Description of Artificial Sequence: Synthetic oligonucleotide
  Antisense Strand to SEQ ID NO: 355039
caucugggcacaaugucau

SEQ ID NO: 355041 - RNA, 19 nt, Artificial Sequence
  Description of Artificial Sequence: Synthetic oligonucleotide
  Sense Strand Starting at position 463 of SEQ ID NO: 315531
ugacauugugcccagaugu

SEQ ID NO: 355042 - RNA, 19 nt, Artificial Sequence
  Description of Artificial Sequence: Synthetic oligonucleotide
  Antisense Strand to SEQ ID NO: 355041
acaucugggcacaauguca

SEQ ID NO: 355043 - RNA, 19 nt, Artificial Sequence
  Description of Artificial Sequence: Synthetic oligonucleotide
  Sense Strand Starting at position 463 of SEQ ID NO: 315542
ccagauguuccugaagggu

SEQ ID NO: 355044 - RNA, 19 nt, Artificial Sequence
  Description of Artificial Sequence: Synthetic oligonucleotide
  Antisense Strand to SEQ ID NO: 355043
acccuucaggaacaucugg

SEQ ID NO: 355045 - RNA, 19 nt, Artificial Sequence
  Description of Artificial Sequence: Synthetic oligonucleotide
  Sense Strand Starting at position 463 of SEQ ID NO: 315616
uggagcuuuguuuaaucua

SEQ ID NO: 355046 - RNA, 19 nt, Artificial Sequence
  Description of Artificial Sequence: Synthetic oligonucleotide
  Antisense Strand to SEQ ID NO: 355045
uagauuaaacaaagcucca

SEQ ID NO: 355047 - RNA, 19 nt, Artificial Sequence
  Description of Artificial Sequence: Synthetic oligonucleotide
  Sense Strand Starting at position 463 of SEQ ID NO: 315655
agucuauccuaccugaaga

SEQ ID NO: 355048 - RNA, 19 nt, Artificial Sequence
  Description of Artificial Sequence: Synthetic oligonucleotide
  Antisense Strand to SEQ ID NO: 355047
ucuucagguaggauagacu

SEQ ID NO: 355049 - RNA, 19 nt, Artificial Sequence
  Description of Artificial Sequence: Synthetic oligonucleotide
  Sense Strand Starting at position 463 of SEQ ID NO: 315671
agaggcagguaaucauaaa

SEQ ID NO: 355050 - RNA, 19 nt, Artificial Sequence
  Description of Artificial Sequence: Synthetic oligonucleotide
  Antisense Strand to SEQ ID NO: 355049
uuuaugauuaccugccucu

SEQ ID NO: 355051 - RNA, 19 nt, Artificial Sequence
  Description of Artificial Sequence: Synthetic oligonucleotide
  Sense Strand Starting at position 463 of SEQ ID NO: 315725
cuuacaaagcuguaugaac

SEQ ID NO: 355052 - RNA, 19 nt, Artificial Sequence
  Description of Artificial Sequence: Synthetic oligonucleotide
  Antisense Strand to SEQ ID NO: 355051
guucauacagcuuuguaag

SEQ ID NO: 355053 - RNA, 19 nt, Artificial Sequence
  Description of Artificial Sequence: Synthetic oligonucleotide
  Sense Strand Starting at position 463 of SEQ ID NO: 315951
ggaagucaguccucacuuu

SEQ ID NO: 355054 - RNA, 19 nt, Artificial Sequence
  Description of Artificial Sequence: Synthetic oligonucleotide
  Antisense Strand to SEQ ID NO: 355053
aaagugaggacugacuucc

SEQ ID NO: 355055 - RNA, 19 nt, Artificial Sequence
  Description of Artificial Sequence: Synthetic oligonucleotide
  Sense Strand Starting at position 463 of SEQ ID NO: 316021
uggaguuucugggcugaua

SEQ ID NO: 355056 - RNA, 19 nt, Artificial Sequence
  Description of Artificial Sequence: Synthetic oligonucleotide
  Antisense Strand to SEQ ID NO: 355055
uaucagcccagaaacucca

SEQ ID NO: 355057 - RNA, 19 nt, Artificial Sequence
  Description of Artificial Sequence: Synthetic oligonucleotide
  Sense Strand Starting at position 463 of SEQ ID NO: 316023
gaguuucugggcugauaua

SEQ ID NO: 355058 - RNA, 19 nt, Artificial Sequence
  Description of Artificial Sequence: Synthetic oligonucleotide
  Antisense Strand to SEQ ID NO: 355057
uauaucagcccagaaacuc

SEQ ID NO: 355059 - RNA, 19 nt, Artificial Sequence
  Description of Artificial Sequence: Synthetic oligonucleotide
  Sense Strand Starting at position 463 of SEQ ID NO: 316024
aguuucugggcugauauaa

SEQ ID NO: 355060 - RNA, 19 nt, Artificial Sequence
  Description of Artificial Sequence: Synthetic oligonucleotide
  Antisense Strand to SEQ ID NO: 355059
uuauaucagcccagaaacu

SEQ ID NO: 355061 - RNA, 19 nt, Artificial Sequence
  Description of Artificial Sequence: Synthetic oligonucleotide
  Sense Strand Starting at position 463 of SEQ ID NO: 316059
auacaaauaugggacauuu

SEQ ID NO: 355062 - RNA, 19 nt, Artificial Sequence
  Description of Artificial Sequence: Synthetic oligonucleotide
  Antisense Strand to SEQ ID NO: 355061
aaaugucccauauuuguau

SEQ ID NO: 355063 - RNA, 19 nt, Artificial Sequence
  Description of Artificial Sequence: Synthetic oligonucleotide
  Sense Strand Starting at position 463 of SEQ ID NO: 316189
gagaaagauugagagauca

SEQ ID NO: 355064 - RNA, 19 nt, Artificial Sequence
  Description of Artificial Sequence: Synthetic oligonucleotide
  Antisense Strand to SEQ ID NO: 355063
ugaucucucaaucuuucuc

SEQ ID NO: 355065 - RNA, 19 nt, Artificial Sequence
  Description of Artificial Sequence: Synthetic oligonucleotide
  Sense Strand Starting at position 463 of SEQ ID NO: 316235
gagaauaauugagagaaac

SEQ ID NO: 355066 - RNA, 19 nt, Artificial Sequence
  Description of Artificial Sequence: Synthetic oligonucleotide
  Antisense Strand to SEQ ID NO: 355065
guuucucucaauuauucuc

SEQ ID NO: 355067 - RNA, 19 nt, Artificial Sequence
  Description of Artificial Sequence: Synthetic oligonucleotide
  Sense Strand Starting at position 463 of SEQ ID NO: 316476
cagcuuccugccgaugaga

SEQ ID NO: 355068 - RNA, 19 nt, Artificial Sequence
  Description of Artificial Sequence: Synthetic oligonucleotide
  Antisense Strand to SEQ ID NO: 355067
ucucaucggcaggaagcug

SEQ ID NO: 355069 - RNA, 19 nt, Artificial Sequence
  Description of Artificial Sequence: Synthetic oligonucleotide
  Sense Strand Starting at position 463 of SEQ ID NO: 316815
gcagcucucacugacgaau

SEQ ID NO: 355070 - RNA, 19 nt, Artificial Sequence
  Description of Artificial Sequence: Synthetic oligonucleotide
  Antisense Strand to SEQ ID NO: 355069
auucgucagugagagcugc

SEQ ID NO: 355071 - RNA, 19 nt, Artificial Sequence
  Description of Artificial Sequence: Synthetic oligonucleotide
  Sense Strand Starting at position 463 of SEQ ID NO: 317544
uugcguucucgauccaguu

SEQ ID NO: 355072 - RNA, 19 nt, Artificial Sequence
  Description of Artificial Sequence: Synthetic oligonucleotide
  Antisense Strand to SEQ ID NO: 355071
aacuggaucgagaacgcaa

SEQ ID NO: 355073 - RNA, 19 nt, Artificial Sequence
  Description of Artificial Sequence: Synthetic oligonucleotide
  Sense Strand Starting at position 463 of SEQ ID NO: 317855
aaagaaggaccuuguguuu

SEQ ID NO: 355074 - RNA, 19 nt, Artificial Sequence
  Description of Artificial Sequence: Synthetic oligonucleotide
  Antisense Strand to SEQ ID NO: 355073
aaacacaagguccuucuuu

SEQ ID NO: 355075 - RNA, 19 nt, Artificial Sequence
  Description of Artificial Sequence: Synthetic oligonucleotide
  Sense Strand Starting at position 463 of SEQ ID NO: 317858
gaaggaccuuguguuugua

SEQ ID NO: 355076 - RNA, 19 nt, Artificial Sequence
  Description of Artificial Sequence: Synthetic oligonucleotide
  Antisense Strand to SEQ ID NO: 355075
uacaaacacaagguccuuc

SEQ ID NO: 355077 - RNA, 19 nt, Artificial Sequence
  Description of Artificial Sequence: Synthetic oligonucleotide
  Sense Strand Starting at position 463 of SEQ ID NO: 317903
gucucacgcaguuauagga

SEQ ID NO: 355078 - RNA, 19 nt, Artificial Sequence
  Description of Artificial Sequence: Synthetic oligonucleotide
  Antisense Strand to SEQ ID NO: 355077
uccuauaacugcgugagac

SEQ ID NO: 355079 - RNA, 19 nt, Artificial Sequence
  Description of Artificial Sequence: Synthetic oligonucleotide
  Sense Strand Starting at position 463 of SEQ ID NO: 318026
gggcaagauaugugaguaa

SEQ ID NO: 355080 - RNA, 19 nt, Artificial Sequence
  Description of Artificial Sequence: Synthetic oligonucleotide
  Antisense Strand to SEQ ID NO: 355079
uuacucacauaucuugccc

SEQ ID NO: 355081 - RNA, 19 nt, Artificial Sequence
  Description of Artificial Sequence: Synthetic oligonucleotide
  Sense Strand Starting at position 463 of SEQ ID NO: 318040
aguaaacccuguccagaau

SEQ ID NO: 355082 - RNA, 19 nt, Artificial Sequence
  Description of Artificial Sequence: Synthetic oligonucleotide
  Antisense Strand to SEQ ID NO: 355081
auucuggacaggguuuacu

SEQ ID NO: 355083 - RNA, 19 nt, Artificial Sequence
  Description of Artificial Sequence: Synthetic oligonucleotide
  Sense Strand Starting at position 463 of SEQ ID NO: 318070
guaucacucgguaguggua

SEQ ID NO: 355084 - RNA, 19 nt, Artificial Sequence
  Description of Artificial Sequence: Synthetic oligonucleotide
  Antisense Strand to SEQ ID NO: 355083
uaccacuaccgagugauac

SEQ ID NO: 355085 - RNA, 19 nt, Artificial Sequence
  Description of Artificial Sequence: Synthetic oligonucleotide
  Sense Strand Starting at position 463 of SEQ ID NO: 318076
cucgguagugguagagagu

SEQ ID NO: 355086 - RNA, 19 nt, Artificial Sequence
  Description of Artificial Sequence: Synthetic oligonucleotide
  Antisense Strand to SEQ ID NO: 355085
acucucuaccacuaccgag

SEQ ID NO: 355087 - RNA, 19 nt, Artificial Sequence
  Description of Artificial Sequence: Synthetic oligonucleotide
  Sense Strand Starting at position 463 of SEQ ID NO: 318089
gagagucugcuguagggua

SEQ ID NO: 355088 - RNA, 19 nt, Artificial Sequence
  Description of Artificial Sequence: Synthetic oligonucleotide
  Antisense Strand to SEQ ID NO: 355087
uacccuacagcagacucuc

SEQ ID NO: 355089 - RNA, 19 nt, Artificial Sequence
  Description of Artificial Sequence: Synthetic oligonucleotide
  Sense Strand Starting at position 463 of SEQ ID NO: 318094
ucugcuguaggguauauua

SEQ ID NO: 355090 - RNA, 19 nt, Artificial Sequence
  Description of Artificial Sequence: Synthetic oligonucleotide
  Antisense Strand to SEQ ID NO: 355089
uaauauacccuacagcaga

SEQ ID NO: 355091 - RNA, 19 nt, Artificial Sequence
  Description of Artificial Sequence: Synthetic oligonucleotide
  Sense Strand Starting at position 463 of SEQ ID NO: 318243
gagagugugcaggaaacau

SEQ ID NO: 355092 - RNA, 19 nt, Artificial Sequence
  Description of Artificial Sequence: Synthetic oligonucleotide
  Antisense Strand to SEQ ID NO: 355091
auguuuccugcacacucuc

SEQ ID NO: 355093 - RNA, 19 nt, Artificial Sequence
  Description of Artificial Sequence: Synthetic oligonucleotide
  Sense Strand Starting at position 463 of SEQ ID NO: 318385
ggugauaucaagugucagg

SEQ ID NO: 355094 - RNA, 19 nt, Artificial Sequence
  Description of Artificial Sequence: Synthetic oligonucleotide
  Antisense Strand to SEQ ID NO: 355093
ccugacacuugauaucacc

SEQ ID NO: 355095 - RNA, 19 nt, Artificial Sequence
  Description of Artificial Sequence: Synthetic oligonucleotide
  Sense Strand Starting at position 463 of SEQ ID NO: 318534
ugcucagagccagaaauca

SEQ ID NO: 355096 - RNA, 19 nt, Artificial Sequence
  Description of Artificial Sequence: Synthetic oligonucleotide
  Antisense Strand to SEQ ID NO: 355095
ugauuucuggcucugagca

SEQ ID NO: 355097 - RNA, 19 nt, Artificial Sequence
  Description of Artificial Sequence: Synthetic oligonucleotide
  Sense Strand Starting at position 463 of SEQ ID NO: 318801
gcguuagucacugccuuga

SEQ ID NO: 355098 - RNA, 19 nt, Artificial Sequence
  Description of Artificial Sequence: Synthetic oligonucleotide
  Antisense Strand to SEQ ID NO: 355097
ucaaggcagugacuaacgc

SEQ ID NO: 355099 - RNA, 19 nt, Artificial Sequence
  Description of Artificial Sequence: Synthetic oligonucleotide
  Sense Strand Starting at position 463 of SEQ ID NO: 318806
agucacugccuugaccaua

SEQ ID NO: 355100 - RNA, 19 nt, Artificial Sequence
  Description of Artificial Sequence: Synthetic oligonucleotide
  Antisense Strand to SEQ ID NO: 355099
uauggucaaggcagugacu

SEQ ID NO: 355101 - RNA, 19 nt, Artificial Sequence
  Description of Artificial Sequence: Synthetic oligonucleotide
  Sense Strand Starting at position 463 of SEQ ID NO: 318851
ccacguacuguguaugaga

SEQ ID NO: 355102 - RNA, 19 nt, Artificial Sequence
  Description of Artificial Sequence: Synthetic oligonucleotide
  Antisense Strand to SEQ ID NO: 355101
ucucauacacaguacgugg

SEQ ID NO: 355103 - RNA, 19 nt, Artificial Sequence
  Description of Artificial Sequence: Synthetic oligonucleotide
  Sense Strand Starting at position 463 of SEQ ID NO: 318974
gacugaaugugugcacaaa

SEQ ID NO: 355104 - RNA, 19 nt, Artificial Sequence
  Description of Artificial Sequence: Synthetic oligonucleotide
  Antisense Strand to SEQ ID NO: 355103
uuugugcacacauucaguc

SEQ ID NO: 355105 - RNA, 19 nt, Artificial Sequence
  Description of Artificial Sequence: Synthetic oligonucleotide
  Sense Strand Starting at position 463 of SEQ ID NO: 318975
acugaaugugugcacaaau

SEQ ID NO: 355106 - RNA, 19 nt, Artificial Sequence
  Description of Artificial Sequence: Synthetic oligonucleotide
  Antisense Strand to SEQ ID NO: 355105
auuugugcacacauucagu

SEQ ID NO: 355107 - RNA, 19 nt, Artificial Sequence
  Description of Artificial Sequence: Synthetic oligonucleotide
  Sense Strand Starting at position 463 of SEQ ID NO: 318986
gcacaaaugcgugaaagac

SEQ ID NO: 355108 - RNA, 19 nt, Artificial Sequence
  Description of Artificial Sequence: Synthetic oligonucleotide
  Antisense Strand to SEQ ID NO: 355107
gucuuucacgcauuugugc

SEQ ID NO: 355109 - RNA, 19 nt, Artificial Sequence
  Description of Artificial Sequence: Synthetic oligonucleotide
  Sense Strand Starting at position 463 of SEQ ID NO: 319069
gccgcugguguguuagaca

SEQ ID NO: 355110 - RNA, 19 nt, Artificial Sequence
  Description of Artificial Sequence: Synthetic oligonucleotide
  Antisense Strand to SEQ ID NO: 355109
ugucuaacacaccagcggc

SEQ ID NO: 355111 - RNA, 19 nt, Artificial Sequence
  Description of Artificial Sequence: Synthetic oligonucleotide
  Sense Strand Starting at position 463 of SEQ ID NO: 319074
ugguguguuagacauugga

SEQ ID NO: 355112 - RNA, 19 nt, Artificial Sequence
  Description of Artificial Sequence: Synthetic oligonucleotide
  Antisense Strand to SEQ ID NO: 355111
uccaaugucuaacacacca

SEQ ID NO: 355113 - RNA, 19 nt, Artificial Sequence
  Description of Artificial Sequence: Synthetic oligonucleotide
  Sense Strand Starting at position 463 of SEQ ID NO: 319077
uguguuagacauuggacca

SEQ ID NO: 355114 - RNA, 19 nt, Artificial Sequence
  Description of Artificial Sequence: Synthetic oligonucleotide
  Antisense Strand to SEQ ID NO: 355113
ugguccaaugucuaacaca

SEQ ID NO: 355115 - RNA, 19 nt, Artificial Sequence
  Description of Artificial Sequence: Synthetic oligonucleotide
  Sense Strand Starting at position 463 of SEQ ID NO: 319078
guguuagacauuggaccaa

SEQ ID NO: 355116 - RNA, 19 nt, Artificial Sequence
  Description of Artificial Sequence: Synthetic oligonucleotide
  Antisense Strand to SEQ ID NO: 355115
uugguccaaugucuaacac

SEQ ID NO: 355117 - RNA, 19 nt, Artificial Sequence
  Description of Artificial Sequence: Synthetic oligonucleotide
  Sense Strand Starting at position 464 of SEQ ID NO: 315571
gggcaagugcuacaaagaa

SEQ ID NO: 355118 - RNA, 19 nt, Artificial Sequence
  Description of Artificial Sequence: Synthetic oligonucleotide
  Antisense Strand to SEQ ID NO: 355117
uucuuuguagcacuugccc

SEQ ID NO: 355119 - RNA, 19 nt, Artificial Sequence
  Description of Artificial Sequence: Synthetic oligonucleotide
  Sense Strand Starting at position 464 of SEQ ID NO: 315711
gauguugguacugggaaga

SEQ ID NO: 355120 - RNA, 19 nt, Artificial Sequence
  Description of Artificial Sequence: Synthetic oligonucleotide
  Antisense Strand to SEQ ID NO: 355119
ucuucccaguaccaacauc

SEQ ID NO: 355121 - RNA, 19 nt, Artificial Sequence
  Description of Artificial Sequence: Synthetic oligonucleotide
  Sense Strand Starting at position 464 of SEQ ID NO: 316125
ucauuaauaugagaacaga

SEQ ID NO: 355122 - RNA, 19 nt, Artificial Sequence
  Description of Artificial Sequence: Synthetic oligonucleotide
  Antisense Strand to SEQ ID NO: 355121
ucuguucucauauuaauga

SEQ ID NO: 355123 - RNA, 19 nt, Artificial Sequence
  Description of Artificial Sequence: Synthetic oligonucleotide
  Sense Strand Starting at position 464 of SEQ ID NO: 316150
ucaauuuguugguugcuga

SEQ ID NO: 355124 - RNA, 19 nt, Artificial Sequence
  Description of Artificial Sequence: Synthetic oligonucleotide
  Antisense Strand to SEQ ID NO: 355123
ucagcaaccaacaaauuga

SEQ ID NO: 355125 - RNA, 19 nt, Artificial Sequence
  Description of Artificial Sequence: Synthetic oligonucleotide
  Sense Strand Starting at position 464 of SEQ ID NO: 316157
guugguugcugaccaauau

SEQ ID NO: 355126 - RNA, 19 nt, Artificial Sequence
  Description of Artificial Sequence: Synthetic oligonucleotide
  Antisense Strand to SEQ ID NO: 355125
auauuggucagcaaccaac

SEQ ID NO: 355127 - RNA, 19 nt, Artificial Sequence
  Description of Artificial Sequence: Synthetic oligonucleotide
  Sense Strand Starting at position 464 of SEQ ID NO: 316158
uugguugcugaccaauauu

SEQ ID NO: 355128 - RNA, 19 nt, Artificial Sequence
  Description of Artificial Sequence: Synthetic oligonucleotide
  Antisense Strand to SEQ ID NO: 355127
aauauuggucagcaaccaa

SEQ ID NO: 355129 - RNA, 19 nt, Artificial Sequence
  Description of Artificial Sequence: Synthetic oligonucleotide
  Sense Strand Starting at position 464 of SEQ ID NO: 316161
guugcugaccaauauuauc

SEQ ID NO: 355130 - RNA, 19 nt, Artificial Sequence
  Description of Artificial Sequence: Synthetic oligonucleotide
  Antisense Strand to SEQ ID NO: 355129
gauaauauuggucagcaac

SEQ ID NO: 355131 - RNA, 19 nt, Artificial Sequence
  Description of Artificial Sequence: Synthetic oligonucleotide
  Sense Strand Starting at position 464 of SEQ ID NO: 316319
cucuaauauccacggcaau

SEQ ID NO: 355132 - RNA, 19 nt, Artificial Sequence
  Description of Artificial Sequence: Synthetic oligonucleotide
  Antisense Strand to SEQ ID NO: 355131
auugccguggauauuagag

SEQ ID NO: 355133 - RNA, 19 nt, Artificial Sequence
  Description of Artificial Sequence: Synthetic oligonucleotide
  Sense Strand Starting at position 464 of SEQ ID NO: 316334
caaucaguugcucacguaa

SEQ ID NO: 355134 - RNA, 19 nt, Artificial Sequence
  Description of Artificial Sequence: Synthetic oligonucleotide
  Antisense Strand to SEQ ID NO: 355133
uuacgugagcaacugauug

SEQ ID NO: 355135 - RNA, 19 nt, Artificial Sequence
  Description of Artificial Sequence: Synthetic oligonucleotide
  Sense Strand Starting at position 464 of SEQ ID NO: 316511
uaaagauguggugggagau

SEQ ID NO: 355136 - RNA, 19 nt, Artificial Sequence
  Description of Artificial Sequence: Synthetic oligonucleotide
  Antisense Strand to SEQ ID NO: 355135
aucucccaccacaucuuua

SEQ ID NO: 355137 - RNA, 19 nt, Artificial Sequence
  Description of Artificial Sequence: Synthetic oligonucleotide
  Sense Strand Starting at position 464 of SEQ ID NO: 316524
ggagaucuaucagggaagu

SEQ ID NO: 355138 - RNA, 19 nt, Artificial Sequence
  Description of Artificial Sequence: Synthetic oligonucleotide
  Antisense Strand to SEQ ID NO: 355137
acuucccugauagaucucc

SEQ ID NO: 355139 - RNA, 19 nt, Artificial Sequence
  Description of Artificial Sequence: Synthetic oligonucleotide
  Sense Strand Starting at position 464 of SEQ ID NO: 317752
cuagcuacauuugaagaau

SEQ ID NO: 355140 - RNA, 19 nt, Artificial Sequence
  Description of Artificial Sequence: Synthetic oligonucleotide
  Antisense Strand to SEQ ID NO: 355139
auucuucaaauguagcuag

SEQ ID NO: 355141 - RNA, 19 nt, Artificial Sequence
  Description of Artificial Sequence: Synthetic oligonucleotide
  Sense Strand Starting at position 464 of SEQ ID NO: 317761
uuugaagaaucucuguuaa

SEQ ID NO: 355142 - RNA, 19 nt, Artificial Sequence
  Description of Artificial Sequence: Synthetic oligonucleotide
  Antisense Strand to SEQ ID NO: 355141
uuaacagagauucuucaaa

SEQ ID NO: 355143 - RNA, 19 nt, Artificial Sequence
  Description of Artificial Sequence: Synthetic oligonucleotide
  Sense Strand Starting at position 464 of SEQ ID NO: 317763
ugaagaaucucuguuaaag

SEQ ID NO: 355144 - RNA, 19 nt, Artificial Sequence
  Description of Artificial Sequence: Synthetic oligonucleotide
  Antisense Strand to SEQ ID NO: 355143
cuuuaacagagauucuuca

SEQ ID NO: 355145 - RNA, 19 nt, Artificial Sequence
  Description of Artificial Sequence: Synthetic oligonucleotide
  Sense Strand Starting at position 464 of SEQ ID NO: 317794
cccauaugcuaaucguaag

SEQ ID NO: 355146 - RNA, 19 nt, Artificial Sequence
  Description of Artificial Sequence: Synthetic oligonucleotide
  Antisense Strand to SEQ ID NO: 355145
cuuacgauuagcauauggg

SEQ ID NO: 355147 - RNA, 19 nt, Artificial Sequence
  Description of Artificial Sequence: Synthetic oligonucleotide
  Sense Strand Starting at position 464 of SEQ ID NO: 317813
gagagaaguauaggcuagu

SEQ ID NO: 355148 - RNA, 19 nt, Artificial Sequence
  Description of Artificial Sequence: Synthetic oligonucleotide
  Antisense Strand to SEQ ID NO: 355147
acuagccuauacuucucuc

SEQ ID NO: 355149 - RNA, 19 nt, Artificial Sequence
  Description of Artificial Sequence: Synthetic oligonucleotide
  Sense Strand Starting at position 464 of SEQ ID NO: 317814
agagaaguauaggcuaguu

SEQ ID NO: 355150 - RNA, 19 nt, Artificial Sequence
  Description of Artificial Sequence: Synthetic oligonucleotide
  Antisense Strand to SEQ ID NO: 355149
aacuagccuauacuucucu

SEQ ID NO: 355151 - RNA, 19 nt, Artificial Sequence
  Description of Artificial Sequence: Synthetic oligonucleotide
  Sense Strand Starting at position 464 of SEQ ID NO: 317816
agaaguauaggcuaguuua

SEQ ID NO: 355152 - RNA, 19 nt, Artificial Sequence
  Description of Artificial Sequence: Synthetic oligonucleotide
  Antisense Strand to SEQ ID NO: 355151
uaaacuagccuauacuucu

SEQ ID NO: 355153 - RNA, 19 nt, Artificial Sequence
  Description of Artificial Sequence: Synthetic oligonucleotide
  Sense Strand Starting at position 464 of SEQ ID NO: 317819
aguauaggcuaguuuauau

SEQ ID NO: 355154 - RNA, 19 nt, Artificial Sequence
  Description of Artificial Sequence: Synthetic oligonucleotide
  Antisense Strand to SEQ ID NO: 355153
auauaaacuagccuauacu

SEQ ID NO: 355155 - RNA, 19 nt, Artificial Sequence
  Description of Artificial Sequence: Synthetic oligonucleotide
  Sense Strand Starting at position 464 of SEQ ID NO: 317849
aaaguuuggaggugccaua

SEQ ID NO: 355156 - RNA, 19 nt, Artificial Sequence
  Description of Artificial Sequence: Synthetic oligonucleotide
  Antisense Strand to SEQ ID NO: 355155
uauggcaccuccaaacuuu

SEQ ID NO: 355157 - RNA, 19 nt, Artificial Sequence
  Description of Artificial Sequence: Synthetic oligonucleotide
  Sense Strand Starting at position 464 of SEQ ID NO: 317893
augauuaugacuugagggu

SEQ ID NO: 355158 - RNA, 19 nt, Artificial Sequence
  Description of Artificial Sequence: Synthetic oligonucleotide
  Antisense Strand to SEQ ID NO: 355157
acccucaagucauaaucau

SEQ ID NO: 355159 - RNA, 19 nt, Artificial Sequence
  Description of Artificial Sequence: Synthetic oligonucleotide
  Sense Strand Starting at position 464 of SEQ ID NO: 317902
acuugaggguuggagaaau

SEQ ID NO: 355160 - RNA, 19 nt, Artificial Sequence
  Description of Artificial Sequence: Synthetic oligonucleotide
  Antisense Strand to SEQ ID NO: 355159
auuucuccaacccucaagu

SEQ ID NO: 355161 - RNA, 19 nt, Artificial Sequence
  Description of Artificial Sequence: Synthetic oligonucleotide
  Sense Strand Starting at position 464 of SEQ ID NO: 317928
ugaguaacuuuggcagacu

SEQ ID NO: 355162 - RNA, 19 nt, Artificial Sequence
  Description of Artificial Sequence: Synthetic oligonucleotide
  Antisense Strand to SEQ ID NO: 355161
agucugccaaaguuacuca

SEQ ID NO: 355163 - RNA, 19 nt, Artificial Sequence
  Description of Artificial Sequence: Synthetic oligonucleotide
  Sense Strand Starting at position 464 of SEQ ID NO: 317931
guaacuuuggcagacuaac

SEQ ID NO: 355164 - RNA, 19 nt, Artificial Sequence
  Description of Artificial Sequence: Synthetic oligonucleotide
  Antisense Strand to SEQ ID NO: 355163
guuagucugccaaaguuac

SEQ ID NO: 355165 - RNA, 19 nt, Artificial Sequence
  Description of Artificial Sequence: Synthetic oligonucleotide
  Sense Strand Starting at position 464 of SEQ ID NO: 317954
gucugcguucgugcagaau

SEQ ID NO: 355166 - RNA, 19 nt, Artificial Sequence
  Description of Artificial Sequence: Synthetic oligonucleotide
  Antisense Strand to SEQ ID NO: 355165
auucugcacgaacgcagac

SEQ ID NO: 355167 - RNA, 19 nt, Artificial Sequence
  Description of Artificial Sequence: Synthetic oligonucleotide
  Sense Strand Starting at position 464 of SEQ ID NO: 317992
uguagaggucacuaccaua

SEQ ID NO: 355168 - RNA, 19 nt, Artificial Sequence
  Description of Artificial Sequence: Synthetic oligonucleotide
  Antisense Strand to SEQ ID NO: 355167
uaugguagugaccucuaca

SEQ ID NO: 355169 - RNA, 19 nt, Artificial Sequence
  Description of Artificial Sequence: Synthetic oligonucleotide
  Sense Strand Starting at position 464 of SEQ ID NO: 317995
agaggucacuaccauauau

SEQ ID NO: 355170 - RNA, 19 nt, Artificial Sequence
  Description of Artificial Sequence: Synthetic oligonucleotide
  Antisense Strand to SEQ ID NO: 355169
auauaugguagugaccucu

SEQ ID NO: 355171 - RNA, 19 nt, Artificial Sequence
  Description of Artificial Sequence: Synthetic oligonucleotide
  Sense Strand Starting at position 464 of SEQ ID NO: 318068
augcacagccauugaauau

SEQ ID NO: 355172 - RNA, 19 nt, Artificial Sequence
  Description of Artificial Sequence: Synthetic oligonucleotide
  Antisense Strand to SEQ ID NO: 355171
auauucaauggcugugcau

SEQ ID NO: 355173 - RNA, 19 nt, Artificial Sequence
  Description of Artificial Sequence: Synthetic oligonucleotide
  Sense Strand Starting at position 464 of SEQ ID NO: 318079
uugaauaugcuagaguuaa

SEQ ID NO: 355174 - RNA, 19 nt, Artificial Sequence
  Description of Artificial Sequence: Synthetic oligonucleotide
  Antisense Strand to SEQ ID NO: 355173
uuaacucuagcauauucaa

SEQ ID NO: 355175 - RNA, 19 nt, Artificial Sequence
  Description of Artificial Sequence: Synthetic oligonucleotide
  Sense Strand Starting at position 464 of SEQ ID NO: 318204
cgacuucucuucccagaaa

SEQ ID NO: 355176 - RNA, 19 nt, Artificial Sequence
  Description of Artificial Sequence: Synthetic oligonucleotide
  Antisense Strand to SEQ ID NO: 355175
uuucugggaagagaagucg

SEQ ID NO: 355177 - RNA, 19 nt, Artificial Sequence
  Description of Artificial Sequence: Synthetic oligonucleotide
  Sense Strand Starting at position 464 of SEQ ID NO: 318250
agcgguaaauauuugccaa

SEQ ID NO: 355178 - RNA, 19 nt, Artificial Sequence
  Description of Artificial Sequence: Synthetic oligonucleotide
  Antisense Strand to SEQ ID NO: 355177
uuggcaaauauuuaccgcu

SEQ ID NO: 355179 - RNA, 19 nt, Artificial Sequence
  Description of Artificial Sequence: Synthetic oligonucleotide
  Sense Strand Starting at position 464 of SEQ ID NO: 318251
gcgguaaauauuugccaaa

SEQ ID NO: 355180 - RNA, 19 nt, Artificial Sequence
  Description of Artificial Sequence: Synthetic oligonucleotide
  Antisense Strand to SEQ ID NO: 355179
uuuggcaaauauuuaccgc

SEQ ID NO: 355181 - RNA, 19 nt, Artificial Sequence
  Description of Artificial Sequence: Synthetic oligonucleotide
  Sense Strand Starting at position 464 of SEQ ID NO: 318303
gcccucuagugggaaagaa

SEQ ID NO: 355182 - RNA, 19 nt, Artificial Sequence
  Description of Artificial Sequence: Synthetic oligonucleotide
  Antisense Strand to SEQ ID NO: 355181
uucuuucccacuagagggc

SEQ ID NO: 355183 - RNA, 19 nt, Artificial Sequence
  Description of Artificial Sequence: Synthetic oligonucleotide
  Sense Strand Starting at position 464 of SEQ ID NO: 318339
ggcugcuuugaccaucaca

SEQ ID NO: 355184 - RNA, 19 nt, Artificial Sequence
  Description of Artificial Sequence: Synthetic oligonucleotide
  Antisense Strand to SEQ ID NO: 355183
ugugauggucaaagcagcc

SEQ ID NO: 355185 - RNA, 19 nt, Artificial Sequence
  Description of Artificial Sequence: Synthetic oligonucleotide
  Sense Strand Starting at position 464 of SEQ ID NO: 318437
ugggcucauccagacacuu

SEQ ID NO: 355186 - RNA, 19 nt, Artificial Sequence
  Description of Artificial Sequence: Synthetic oligonucleotide
  Antisense Strand to SEQ ID NO: 355185
aagugucuggaugagccca

SEQ ID NO: 355187 - RNA, 19 nt, Artificial Sequence
  Description of Artificial Sequence: Synthetic oligonucleotide
  Sense Strand Starting at position 464 of SEQ ID NO: 318468
caagguguccuguggaaau

SEQ ID NO: 355188 - RNA, 19 nt, Artificial Sequence
  Description of Artificial Sequence: Synthetic oligonucleotide
  Antisense Strand to SEQ ID NO: 355187
auuuccacaggacaccuug

SEQ ID NO: 355189 - RNA, 19 nt, Artificial Sequence
  Description of Artificial Sequence: Synthetic oligonucleotide
  Sense Strand Starting at position 464 of SEQ ID NO: 318478
uguggaaauuucgagauuc

SEQ ID NO: 355190 - RNA, 19 nt, Artificial Sequence
  Description of Artificial Sequence: Synthetic oligonucleotide
  Antisense Strand to SEQ ID NO: 355189
gaaucucgaaauuuccaca

SEQ ID NO: 355191 - RNA, 19 nt, Artificial Sequence
  Description of Artificial Sequence: Synthetic oligonucleotide
  Sense Strand Starting at position 464 of SEQ ID NO: 318536
ggguccugaucugcaagua

SEQ ID NO: 355192 - RNA, 19 nt, Artificial Sequence
  Description of Artificial Sequence: Synthetic oligonucleotide
  Antisense Strand to SEQ ID NO: 355191
uacuugcagaucaggaccc

SEQ ID NO: 355193 - RNA, 19 nt, Artificial Sequence
  Description of Artificial Sequence: Synthetic oligonucleotide
  Sense Strand Starting at position 464 of SEQ ID NO: 318699
ugccaacugguaugucaau

SEQ ID NO: 355194 - RNA, 19 nt, Artificial Sequence
  Description of Artificial Sequence: Synthetic oligonucleotide
  Antisense Strand to SEQ ID NO: 355193
auugacauaccaguuggca

SEQ ID NO: 355195 - RNA, 19 nt, Artificial Sequence
  Description of Artificial Sequence: Synthetic oligonucleotide
  Sense Strand Starting at position 464 of SEQ ID NO: 318700
gccaacugguaugucaauu

SEQ ID NO: 355196 - RNA, 19 nt, Artificial Sequence
  Description of Artificial Sequence: Synthetic oligonucleotide
  Antisense Strand to SEQ ID NO: 355195
aauugacauaccaguuggc

SEQ ID NO: 355197 - RNA, 19 nt, Artificial Sequence
  Description of Artificial Sequence: Synthetic oligonucleotide
  Sense Strand Starting at position 465 of SEQ ID NO: 315472
uggcgugaacccuaaagaa

SEQ ID NO: 355198 - RNA, 19 nt, Artificial Sequence
  Description of Artificial Sequence: Synthetic oligonucleotide
  Antisense Strand to SEQ ID NO: 355197
uucuuuaggguucacgcca

SEQ ID NO: 355199 - RNA, 19 nt, Artificial Sequence
  Description of Artificial Sequence: Synthetic oligonucleotide
  Sense Strand Starting at position 465 of SEQ ID NO: 315758
cccagauacugguuaagau

SEQ ID NO: 355200 - RNA, 19 nt, Artificial Sequence
  Description of Artificial Sequence: Synthetic oligonucleotide
  Antisense Strand to SEQ ID NO: 355199
aucuuaaccaguaucuggg

SEQ ID NO: 355201 - RNA, 19 nt, Artificial Sequence
  Description of Artificial Sequence: Synthetic oligonucleotide
  Sense Strand Starting at position 465 of SEQ ID NO: 315801
cugccacuguucuccugaa

SEQ ID NO: 355202 - RNA, 19 nt, Artificial Sequence
  Description of Artificial Sequence: Synthetic oligonucleotide
  Antisense Strand to SEQ ID NO: 355201
uucaggagaacaguggcag

SEQ ID NO: 355203 - RNA, 19 nt, Artificial Sequence
  Description of Artificial Sequence: Synthetic oligonucleotide
  Sense Strand Starting at position 465 of SEQ ID NO: 315958
agcaaauaaucugugcuga

SEQ ID NO: 355204 - RNA, 19 nt, Artificial Sequence
  Description of Artificial Sequence: Synthetic oligonucleotide
  Antisense Strand to SEQ ID NO: 355203
ucagcacagauuauuugcu

SEQ ID NO: 355205 - RNA, 19 nt, Artificial Sequence
  Description of Artificial Sequence: Synthetic oligonucleotide
  Sense Strand Starting at position 465 of SEQ ID NO: 315959
gcaaauaaucugugcugac

SEQ ID NO: 355206 - RNA, 19 nt, Artificial Sequence
  Description of Artificial Sequence: Synthetic oligonucleotide
  Antisense Strand to SEQ ID NO: 355205
gucagcacagauuauuugc

SEQ ID NO: 355207 - RNA, 19 nt, Artificial Sequence
  Description of Artificial Sequence: Synthetic oligonucleotide
  Sense Strand Starting at position 465 of SEQ ID NO: 316037
cuugguuguagauaaaugu

SEQ ID NO: 355208 - RNA, 19 nt, Artificial Sequence
  Description of Artificial Sequence: Synthetic oligonucleotide
  Antisense Strand to SEQ ID NO: 355207
acauuuaucuacaaccaag

SEQ ID NO: 355209 - RNA, 19 nt, Artificial Sequence
  Description of Artificial Sequence: Synthetic oligonucleotide
  Sense Strand Starting at position 465 of SEQ ID NO: 316092
guuauuaaaggguguaacu

SEQ ID NO: 355210 - RNA, 19 nt, Artificial Sequence
  Description of Artificial Sequence: Synthetic oligonucleotide
  Antisense Strand to SEQ ID NO: 355209
aguuacacccuuuaauaac

SEQ ID NO: 355211 - RNA, 19 nt, Artificial Sequence
  Description of Artificial Sequence: Synthetic oligonucleotide
  Sense Strand Starting at position 465 of SEQ ID NO: 316112
acaagucaacggugucaaa

SEQ ID NO: 355212 - RNA, 19 nt, Artificial Sequence
  Description of Artificial Sequence: Synthetic oligonucleotide
  Antisense Strand to SEQ ID NO: 355211
uuugacaccguugacuugu

SEQ ID NO: 355213 - RNA, 19 nt, Artificial Sequence
  Description of Artificial Sequence: Synthetic oligonucleotide
  Sense Strand Starting at position 465 of SEQ ID NO: 316321
gagugaagcuguccuuccu

SEQ ID NO: 355214 - RNA, 19 nt, Artificial Sequence
  Description of Artificial Sequence: Synthetic oligonucleotide
  Antisense Strand to SEQ ID NO: 355213
aggaaggacagcuucacuc

SEQ ID NO: 355215 - RNA, 19 nt, Artificial Sequence
  Description of Artificial Sequence: Synthetic oligonucleotide
  Sense Strand Starting at position 465 of SEQ ID NO: 316755
gucucaacaccucguuaca

SEQ ID NO: 355216 - RNA, 19 nt, Artificial Sequence
  Description of Artificial Sequence: Synthetic oligonucleotide
  Antisense Strand to SEQ ID NO: 355215
uguaacgagguguugagac

SEQ ID NO: 355217 - RNA, 19 nt, Artificial Sequence
  Description of Artificial Sequence: Synthetic oligonucleotide
  Sense Strand Starting at position 465 of SEQ ID NO: 316757
cucaacaccucguuacaga

SEQ ID NO: 355218 - RNA, 19 nt, Artificial Sequence
  Description of Artificial Sequence: Synthetic oligonucleotide
  Antisense Strand to SEQ ID NO: 355217
ucuguaacgagguguugag

SEQ ID NO: 355219 - RNA, 19 nt, Artificial Sequence
  Description of Artificial Sequence: Synthetic oligonucleotide
  Sense Strand Starting at position 465 of SEQ ID NO: 316758
ucaacaccucguuacagau

SEQ ID NO: 355220 - RNA, 19 nt, Artificial Sequence
  Description of Artificial Sequence: Synthetic oligonucleotide
  Antisense Strand to SEQ ID NO: 355219
aucuguaacgagguguuga

SEQ ID NO: 355221 - RNA, 19 nt, Artificial Sequence
  Description of Artificial Sequence: Synthetic oligonucleotide
  Sense Strand Starting at position 465 of SEQ ID NO: 317308
gcgugacuccaggauagua

SEQ ID NO: 355222 - RNA, 19 nt, Artificial Sequence
  Description of Artificial Sequence: Synthetic oligonucleotide
  Antisense Strand to SEQ ID NO: 355221
uacuauccuggagucacgc

SEQ ID NO: 355223 - RNA, 19 nt, Artificial Sequence
  Description of Artificial Sequence: Synthetic oligonucleotide
  Sense Strand Starting at position 465 of SEQ ID NO: 317342
aggcgucuucccugggaag

SEQ ID NO: 355224 - RNA, 19 nt, Artificial Sequence
  Description of Artificial Sequence: Synthetic oligonucleotide
  Antisense Strand to SEQ ID NO: 355223
cuucccagggaagacgccu

SEQ ID NO: 355225 - RNA, 19 nt, Artificial Sequence
  Description of Artificial Sequence: Synthetic oligonucleotide
  Sense Strand Starting at position 465 of SEQ ID NO: 317432
gaaucauggucucccuguu

SEQ ID NO: 355226 - RNA, 19 nt, Artificial Sequence
  Description of Artificial Sequence: Synthetic oligonucleotide
  Antisense Strand to SEQ ID NO: 355225
aacagggagaccaugauuc

SEQ ID NO: 355227 - RNA, 19 nt, Artificial Sequence
  Description of Artificial Sequence: Synthetic oligonucleotide
  Sense Strand Starting at position 465 of SEQ ID NO: 317476
gagggaaauuguuaaucau

SEQ ID NO: 355228 - RNA, 19 nt, Artificial Sequence
  Description of Artificial Sequence: Synthetic oligonucleotide
  Antisense Strand to SEQ ID NO: 355227
augauuaacaauuucccuc

SEQ ID NO: 355229 - RNA, 19 nt, Artificial Sequence
  Description of Artificial Sequence: Synthetic oligonucleotide
  Sense Strand Starting at position 465 of SEQ ID NO: 317535
gggcucuuugaauaacucu

SEQ ID NO: 355230 - RNA, 19 nt, Artificial Sequence
  Description of Artificial Sequence: Synthetic oligonucleotide
  Antisense Strand to SEQ ID NO: 355229
agaguuauucaaagagccc

SEQ ID NO: 355231 - RNA, 19 nt, Artificial Sequence
  Description of Artificial Sequence: Synthetic oligonucleotide
  Sense Strand Starting at position 465 of SEQ ID NO: 317595
uguaucaacucaccuggaa

SEQ ID NO: 355232 - RNA, 19 nt, Artificial Sequence
  Description of Artificial Sequence: Synthetic oligonucleotide
  Antisense Strand to SEQ ID NO: 355231
uuccaggugaguugauaca

SEQ ID NO: 355233 - RNA, 19 nt, Artificial Sequence
  Description of Artificial Sequence: Synthetic oligonucleotide
  Sense Strand Starting at position 465 of SEQ ID NO: 318023
ccggacauguccuugagag

SEQ ID NO: 355234 - RNA, 19 nt, Artificial Sequence
  Description of Artificial Sequence: Synthetic oligonucleotide
  Antisense Strand to SEQ ID NO: 355233
cucucaaggacauguccgg

SEQ ID NO: 355235 - RNA, 19 nt, Artificial Sequence
  Description of Artificial Sequence: Synthetic oligonucleotide
  Sense Strand Starting at position 465 of SEQ ID NO: 318024
cggacauguccuugagaga

SEQ ID NO: 355236 - RNA, 19 nt, Artificial Sequence
  Description of Artificial Sequence: Synthetic oligonucleotide
  Antisense Strand to SEQ ID NO: 355235
ucucucaaggacauguccg

SEQ ID NO: 355237 - RNA, 19 nt, Artificial Sequence
  Description of Artificial Sequence: Synthetic oligonucleotide
  Sense Strand Starting at position 465 of SEQ ID NO: 318035
uugagagauugagaaagua

SEQ ID NO: 355238 - RNA, 19 nt, Artificial Sequence
  Description of Artificial Sequence: Synthetic oligonucleotide
  Antisense Strand to SEQ ID NO: 355237
uacuuucucaaucucucaa

SEQ ID NO: 355239 - RNA, 19 nt, Artificial Sequence
  Description of Artificial Sequence: Synthetic oligonucleotide
  Sense Strand Starting at position 465 of SEQ ID NO: 318043
uugagaaaguaucagaaag

SEQ ID NO: 355240 - RNA, 19 nt, Artificial Sequence
  Description of Artificial Sequence: Synthetic oligonucleotide
  Antisense Strand to SEQ ID NO: 355239
cuuucugauacuuucucaa

SEQ ID NO: 355241 - RNA, 19 nt, Artificial Sequence
  Description of Artificial Sequence: Synthetic oligonucleotide
  Sense Strand Starting at position 465 of SEQ ID NO: 318045
gagaaaguaucagaaagga

SEQ ID NO: 355242 - RNA, 19 nt, Artificial Sequence
  Description of Artificial Sequence: Synthetic oligonucleotide
  Antisense Strand to SEQ ID NO: 355241
uccuuucugauacuuucuc

SEQ ID NO: 355243 - RNA, 19 nt, Artificial Sequence
  Description of Artificial Sequence: Synthetic oligonucleotide
  Sense Strand Starting at position 465 of SEQ ID NO: 318081
gagaaaguaucaguuacug

SEQ ID NO: 355244 - RNA, 19 nt, Artificial Sequence
  Description of Artificial Sequence: Synthetic oligonucleotide
  Antisense Strand to SEQ ID NO: 355243
caguaacugauacuuucuc

SEQ ID NO: 355245 - RNA, 19 nt, Artificial Sequence
  Description of Artificial Sequence: Synthetic oligonucleotide
  Sense Strand Starting at position 465 of SEQ ID NO: 318361
cuugaaguucugggaucaa

SEQ ID NO: 355246 - RNA, 19 nt, Artificial Sequence
  Description of Artificial Sequence: Synthetic oligonucleotide
  Antisense Strand to SEQ ID NO: 355245
uugaucccagaacuucaag

SEQ ID NO: 355247 - RNA, 19 nt, Artificial Sequence
  Description of Artificial Sequence: Synthetic oligonucleotide
  Sense Strand Starting at position 465 of SEQ ID NO: 318470
cguguccuugcacugugaa

SEQ ID NO: 355248 - RNA, 19 nt, Artificial Sequence
  Description of Artificial Sequence: Synthetic oligonucleotide
  Antisense Strand to SEQ ID NO: 355247
uucacagugcaaggacacg

SEQ ID NO: 355249 - RNA, 19 nt, Artificial Sequence
  Description of Artificial Sequence: Synthetic oligonucleotide
  Sense Strand Starting at position 465 of SEQ ID NO: 318547
guacacuugaguuggaauu

SEQ ID NO: 355250 - RNA, 19 nt, Artificial Sequence
  Description of Artificial Sequence: Synthetic oligonucleotide
  Antisense Strand to SEQ ID NO: 355249
aauuccaacucaaguguac

SEQ ID NO: 355251 - RNA, 19 nt, Artificial Sequence
  Description of Artificial Sequence: Synthetic oligonucleotide
  Sense Strand Starting at position 465 of SEQ ID NO: 318575
ccacuuacugucuguguaa

SEQ ID NO: 355252 - RNA, 19 nt, Artificial Sequence
  Description of Artificial Sequence: Synthetic oligonucleotide
  Antisense Strand to SEQ ID NO: 355251
uuacacagacaguaagugg

SEQ ID NO: 355253 - RNA, 19 nt, Artificial Sequence
  Description of Artificial Sequence: Synthetic oligonucleotide
  Sense Strand Starting at position 465 of SEQ ID NO: 318577
acuuacugucuguguaacu

SEQ ID NO: 355254 - RNA, 19 nt, Artificial Sequence
  Description of Artificial Sequence: Synthetic oligonucleotide
  Antisense Strand to SEQ ID NO: 355253
aguuacacagacaguaagu

SEQ ID NO: 355255 - RNA, 19 nt, Artificial Sequence
  Description of Artificial Sequence: Synthetic oligonucleotide
  Sense Strand Starting at position 465 of SEQ ID NO: 318624
uuaguuucuuuguugguaa

SEQ ID NO: 355256 - RNA, 19 nt, Artificial Sequence
  Description of Artificial Sequence: Synthetic oligonucleotide
  Antisense Strand to SEQ ID NO: 355255
uuaccaacaaagaaacuaa

SEQ ID NO: 355257 - RNA, 19 nt, Artificial Sequence
  Description of Artificial Sequence: Synthetic oligonucleotide
  Sense Strand Starting at position 465 of SEQ ID NO: 318626
aguuucuuuguugguaaag

SEQ ID NO: 355258 - RNA, 19 nt, Artificial Sequence
  Description of Artificial Sequence: Synthetic oligonucleotide
  Antisense Strand to SEQ ID NO: 355257
cuuuaccaacaaagaaacu

SEQ ID NO: 355259 - RNA, 19 nt, Artificial Sequence
  Description of Artificial Sequence: Synthetic oligonucleotide
  Sense Strand Starting at position 465 of SEQ ID NO: 318701
cgauaagaagcuugguaua

SEQ ID NO: 355260 - RNA, 19 nt, Artificial Sequence
  Description of Artificial Sequence: Synthetic oligonucleotide
  Antisense Strand to SEQ ID NO: 355259
uauaccaagcuucuuaucg

SEQ ID NO: 355261 - RNA, 19 nt, Artificial Sequence
  Description of Artificial Sequence: Synthetic oligonucleotide
  Sense Strand Starting at position 465 of SEQ ID NO: 318703
auaagaagcuugguauaua

SEQ ID NO: 355262 - RNA, 19 nt, Artificial Sequence
  Description of Artificial Sequence: Synthetic oligonucleotide
  Antisense Strand to SEQ ID NO: 355261
uauauaccaagcuucuuau

SEQ ID NO: 355263 - RNA, 19 nt, Artificial Sequence
  Description of Artificial Sequence: Synthetic oligonucleotide
  Sense Strand Starting at position 465 of SEQ ID NO: 318712
uugguauauacaggauguu

SEQ ID NO: 355264 - RNA, 19 nt, Artificial Sequence
  Description of Artificial Sequence: Synthetic oligonucleotide
  Antisense Strand to SEQ ID NO: 355263
aacauccuguauauaccaa

SEQ ID NO: 355265 - RNA, 19 nt, Artificial Sequence
  Description of Artificial Sequence: Synthetic oligonucleotide
  Sense Strand Starting at position 465 of SEQ ID NO: 318715
guauauacaggauguuagu

SEQ ID NO: 355266 - RNA, 19 nt, Artificial Sequence
  Description of Artificial Sequence: Synthetic oligonucleotide
  Antisense Strand to SEQ ID NO: 355265
acuaacauccuguauauac

SEQ ID NO: 355267 - RNA, 19 nt, Artificial Sequence
  Description of Artificial Sequence: Synthetic oligonucleotide
  Sense Strand Starting at position 465 of SEQ ID NO: 318755
auuagacuuguagguuaga

SEQ ID NO: 355268 - RNA, 19 nt, Artificial Sequence
  Description of Artificial Sequence: Synthetic oligonucleotide
  Antisense Strand to SEQ ID NO: 355267
ucuaaccuacaagucuaau

SEQ ID NO: 355269 - RNA, 19 nt, Artificial Sequence
  Description of Artificial Sequence: Synthetic oligonucleotide
  Sense Strand Starting at position 465 of SEQ ID NO: 318756
uuagacuuguagguuagau

SEQ ID NO: 355270 - RNA, 19 nt, Artificial Sequence
  Description of Artificial Sequence: Synthetic oligonucleotide
  Antisense Strand to SEQ ID NO: 355269
aucuaaccuacaagucuaa

SEQ ID NO: 355271 - RNA, 19 nt, Artificial Sequence
  Description of Artificial Sequence: Synthetic oligonucleotide
  Sense Strand Starting at position 465 of SEQ ID NO: 318765
uagguuagauuaguaccau

SEQ ID NO: 355272 - RNA, 19 nt, Artificial Sequence
  Description of Artificial Sequence: Synthetic oligonucleotide
  Antisense Strand to SEQ ID NO: 355271
augguacuaaucuaaccua

SEQ ID NO: 355273 - RNA, 19 nt, Artificial Sequence
  Description of Artificial Sequence: Synthetic oligonucleotide
  Sense Strand Starting at position 465 of SEQ ID NO: 318771
agauuaguaccaugcauca

SEQ ID NO: 355274 - RNA, 19 nt, Artificial Sequence
  Description of Artificial Sequence: Synthetic oligonucleotide
  Antisense Strand to SEQ ID NO: 355273
ugaugcaugguacuaaucu

SEQ ID NO: 355275 - RNA, 19 nt, Artificial Sequence
  Description of Artificial Sequence: Synthetic oligonucleotide
  Sense Strand Starting at position 465 of SEQ ID NO: 319130
ugguacacggucuaaauau

SEQ ID NO: 355276 - RNA, 19 nt, Artificial Sequence
  Description of Artificial Sequence: Synthetic oligonucleotide
  Antisense Strand to SEQ ID NO: 355275
auauuuagaccguguacca

SEQ ID NO: 355277 - RNA, 19 nt, Artificial Sequence
  Description of Artificial Sequence: Synthetic oligonucleotide
  Sense Strand Starting at position 466 of SEQ ID NO: 315283
uguuuauuaacguguaaug

SEQ ID NO: 355278 - RNA, 19 nt, Artificial Sequence
  Description of Artificial Sequence: Synthetic oligonucleotide
  Antisense Strand to SEQ ID NO: 355277
cauuacacguuaauaaaca

SEQ ID NO: 355279 - RNA, 19 nt, Artificial Sequence
  Description of Artificial Sequence: Synthetic oligonucleotide
  Sense Strand Starting at position 466 of SEQ ID NO: 315293
cguguaaugauguaguauu

SEQ ID NO: 355280 - RNA, 19 nt, Artificial Sequence
  Description of Artificial Sequence: Synthetic oligonucleotide
  Antisense Strand to SEQ ID NO: 355279
aauacuacaucauuacacg

SEQ ID NO: 355281 - RNA, 19 nt, Artificial Sequence
  Description of Artificial Sequence: Synthetic oligonucleotide
  Sense Strand Starting at position 466 of SEQ ID NO: 315852
uggcgugaacccuaaagaa

SEQ ID NO: 355282 - RNA, 19 nt, Artificial Sequence
  Description of Artificial Sequence: Synthetic oligonucleotide
  Antisense Strand to SEQ ID NO: 355281
uucuuuaggguucacgcca

SEQ ID NO: 355283 - RNA, 19 nt, Artificial Sequence
  Description of Artificial Sequence: Synthetic oligonucleotide
  Sense Strand Starting at position 466 of SEQ ID NO: 316138
cccagauacugguuaagau

SEQ ID NO: 355284 - RNA, 19 nt, Artificial Sequence
  Description of Artificial Sequence: Synthetic oligonucleotide
  Antisense Strand to SEQ ID NO: 355283
aucuuaaccaguaucuggg

SEQ ID NO: 355285 - RNA, 19 nt, Artificial Sequence
  Description of Artificial Sequence: Synthetic oligonucleotide
  Sense Strand Starting at position 466 of SEQ ID NO: 316181
cugccacuguucuccugaa

SEQ ID NO: 355286 - RNA, 19 nt, Artificial Sequence
  Description of Artificial Sequence: Synthetic oligonucleotide
  Antisense Strand to SEQ ID NO: 355285
uucaggagaacaguggcag

SEQ ID NO: 355287 - RNA, 19 nt, Artificial Sequence
  Description of Artificial Sequence: Synthetic oligonucleotide
  Sense Strand Starting at position 466 of SEQ ID NO: 316338
agcaaauaaucugugcuga

SEQ ID NO: 355288 - RNA, 19 nt, Artificial Sequence
  Description of Artificial Sequence: Synthetic oligonucleotide
  Antisense Strand to SEQ ID NO: 355287
ucagcacagauuauuugcu

SEQ ID NO: 355289 - RNA, 19 nt, Artificial Sequence
  Description of Artificial Sequence: Synthetic oligonucleotide
  Sense Strand Starting at position 466 of SEQ ID NO: 316339
gcaaauaaucugugcugac

SEQ ID NO: 355290 - RNA, 19 nt, Artificial Sequence
  Description of Artificial Sequence: Synthetic oligonucleotide
  Antisense Strand to SEQ ID NO: 355289
gucagcacagauuauuugc

SEQ ID NO: 355291 - RNA, 19 nt, Artificial Sequence
  Description of Artificial Sequence: Synthetic oligonucleotide
  Sense Strand Starting at position 466 of SEQ ID NO: 316417
cuugguuguagauaaaugu

SEQ ID NO: 355292 - RNA, 19 nt, Artificial Sequence
  Description of Artificial Sequence: Synthetic oligonucleotide
  Antisense Strand to SEQ ID NO: 355291
acauuuaucuacaaccaag

SEQ ID NO: 355293 - RNA, 19 nt, Artificial Sequence
  Description of Artificial Sequence: Synthetic oligonucleotide
  Sense Strand Starting at position 466 of SEQ ID NO: 316472
guuauuaaaggguguaacu

SEQ ID NO: 355294 - RNA, 19 nt, Artificial Sequence
  Description of Artificial Sequence: Synthetic oligonucleotide
  Antisense Strand to SEQ ID NO: 355293
aguuacacccuuuaauaac

SEQ ID NO: 355295 - RNA, 19 nt, Artificial Sequence
  Description of Artificial Sequence: Synthetic oligonucleotide
  Sense Strand Starting at position 466 of SEQ ID NO: 316492
acaagucaacggugucaaa

SEQ ID NO: 355296 - RNA, 19 nt, Artificial Sequence
  Description of Artificial Sequence: Synthetic oligonucleotide
  Antisense Strand to SEQ ID NO: 355295
uuugacaccguugacuugu

SEQ ID NO: 355297 - RNA, 19 nt, Artificial Sequence
  Description of Artificial Sequence: Synthetic oligonucleotide
  Sense Strand Starting at position 466 of SEQ ID NO: 316701
gagugaagcuguccuuccu

SEQ ID NO: 355298 - RNA, 19 nt, Artificial Sequence
  Description of Artificial Sequence: Synthetic oligonucleotide
  Antisense Strand to SEQ ID NO: 355297
aggaaggacagcuucacuc

SEQ ID NO: 355299 - RNA, 19 nt, Artificial Sequence
  Description of Artificial Sequence: Synthetic oligonucleotide
  Sense Strand Starting at position 466 of SEQ ID NO: 317135
gucucaacaccucguuaca

SEQ ID NO: 355300 - RNA, 19 nt, Artificial Sequence
  Description of Artificial Sequence: Synthetic oligonucleotide
  Antisense Strand to SEQ ID NO: 355299
uguaacgagguguugagac

SEQ ID NO: 355301 - RNA, 19 nt, Artificial Sequence
  Description of Artificial Sequence: Synthetic oligonucleotide
  Sense Strand Starting at position 466 of SEQ ID NO: 317137
cucaacaccucguuacaga

SEQ ID NO: 355302 - RNA, 19 nt, Artificial Sequence
  Description of Artificial Sequence: Synthetic oligonucleotide
  Antisense Strand to SEQ ID NO: 355301
ucuguaacgagguguugag

SEQ ID NO: 355303 - RNA, 19 nt, Artificial Sequence
  Description of Artificial Sequence: Synthetic oligonucleotide
  Sense Strand Starting at position 466 of SEQ ID NO: 317138
ucaacaccucguuacagau

SEQ ID NO: 355304 - RNA, 19 nt, Artificial Sequence
  Description of Artificial Sequence: Synthetic oligonucleotide
  Antisense Strand to SEQ ID NO: 355303
aucuguaacgagguguuga

SEQ ID NO: 355305 - RNA, 19 nt, Artificial Sequence
  Description of Artificial Sequence: Synthetic oligonucleotide
  Sense Strand Starting at position 466 of SEQ ID NO: 317688
gcgugacuccaggauagua

SEQ ID NO: 355306 - RNA, 19 nt, Artificial Sequence
  Description of Artificial Sequence: Synthetic oligonucleotide
  Antisense Strand to SEQ ID NO: 355305
uacuauccuggagucacgc

SEQ ID NO: 355307 - RNA, 19 nt, Artificial Sequence
  Description of Artificial Sequence: Synthetic oligonucleotide
  Sense Strand Starting at position 466 of SEQ ID NO: 317722
aggcgucuucccugggaag

SEQ ID NO: 355308 - RNA, 19 nt, Artificial Sequence
  Description of Artificial Sequence: Synthetic oligonucleotide
  Antisense Strand to SEQ ID NO: 355307
cuucccagggaagacgccu

SEQ ID NO: 355309 - RNA, 19 nt, Artificial Sequence
  Description of Artificial Sequence: Synthetic oligonucleotide
  Sense Strand Starting at position 466 of SEQ ID NO: 317812
gaaucauggucucccuguu

SEQ ID NO: 355310 - RNA, 19 nt, Artificial Sequence
  Description of Artificial Sequence: Synthetic oligonucleotide
  Antisense Strand to SEQ ID NO: 355309
aacagggagaccaugauuc

SEQ ID NO: 355311 - RNA, 19 nt, Artificial Sequence
  Description of Artificial Sequence: Synthetic oligonucleotide
  Sense Strand Starting at position 466 of SEQ ID NO: 317915
gggcucuuugaauaacucu

SEQ ID NO: 355312 - RNA, 19 nt, Artificial Sequence
  Description of Artificial Sequence: Synthetic oligonucleotide
  Antisense Strand to SEQ ID NO: 355311
agaguuauucaaagagccc

SEQ ID NO: 355313 - RNA, 19 nt, Artificial Sequence
  Description of Artificial Sequence: Synthetic oligonucleotide
  Sense Strand Starting at position 466 of SEQ ID NO: 317975
uguaucaacucaccuggaa

SEQ ID NO: 355314 - RNA, 19 nt, Artificial Sequence
  Description of Artificial Sequence: Synthetic oligonucleotide
  Antisense Strand to SEQ ID NO: 355313
uuccaggugaguugauaca

SEQ ID NO: 355315 - RNA, 19 nt, Artificial Sequence
  Description of Artificial Sequence: Synthetic oligonucleotide
  Sense Strand Starting at position 466 of SEQ ID NO: 318403
ccggacauguccuugagag

SEQ ID NO: 355316 - RNA, 19 nt, Artificial Sequence
  Description of Artificial Sequence: Synthetic oligonucleotide
  Antisense Strand to SEQ ID NO: 355315
cucucaaggacauguccgg

SEQ ID NO: 355317 - RNA, 19 nt, Artificial Sequence
  Description of Artificial Sequence: Synthetic oligonucleotide
  Sense Strand Starting at position 466 of SEQ ID NO: 318404
cggacauguccuugagaga

SEQ ID NO: 355318 - RNA, 19 nt, Artificial Sequence
  Description of Artificial Sequence: Synthetic oligonucleotide
  Antisense Strand to SEQ ID NO: 355317
ucucucaaggacauguccg

SEQ ID NO: 355319 - RNA, 19 nt, Artificial Sequence
  Description of Artificial Sequence: Synthetic oligonucleotide
  Sense Strand Starting at position 466 of SEQ ID NO: 318415
uugagagauugagaaagua

SEQ ID NO: 355320 - RNA, 19 nt, Artificial Sequence
  Description of Artificial Sequence: Synthetic oligonucleotide
  Antisense Strand to SEQ ID NO: 355319
uacuuucucaaucucucaa

SEQ ID NO: 355321 - RNA, 19 nt, Artificial Sequence
  Description of Artificial Sequence: Synthetic oligonucleotide
  Sense Strand Starting at position 466 of SEQ ID NO: 318423
uugagaaaguaucagaaag

SEQ ID NO: 355322 - RNA, 19 nt, Artificial Sequence
  Description of Artificial Sequence: Synthetic oligonucleotide
  Antisense Strand to SEQ ID NO: 355321
cuuucugauacuuucucaa

SEQ ID NO: 355323 - RNA, 19 nt, Artificial Sequence
  Description of Artificial Sequence: Synthetic oligonucleotide
  Sense Strand Starting at position 466 of SEQ ID NO: 318425
gagaaaguaucagaaagga

SEQ ID NO: 355324 - RNA, 19 nt, Artificial Sequence
  Description of Artificial Sequence: Synthetic oligonucleotide
  Antisense Strand to SEQ ID NO: 355323
uccuuucugauacuuucuc

SEQ ID NO: 355325 - RNA, 19 nt, Artificial Sequence
  Description of Artificial Sequence: Synthetic oligonucleotide
  Sense Strand Starting at position 466 of SEQ ID NO: 318461
gagaaaguaucaguuacug

SEQ ID NO: 355326 - RNA, 19 nt, Artificial Sequence
  Description of Artificial Sequence: Synthetic oligonucleotide
  Antisense Strand to SEQ ID NO: 355325
caguaacugauacuuucuc

SEQ ID NO: 355327 - RNA, 19 nt, Artificial Sequence
  Description of Artificial Sequence: Synthetic oligonucleotide
  Sense Strand Starting at position 466 of SEQ ID NO: 318741
cuugaaguucugggaucaa

SEQ ID NO: 355328 - RNA, 19 nt, Artificial Sequence
  Description of Artificial Sequence: Synthetic oligonucleotide
  Antisense Strand to SEQ ID NO: 355327
uugaucccagaacuucaag

SEQ ID NO: 355329 - RNA, 19 nt, Artificial Sequence
  Description of Artificial Sequence: Synthetic oligonucleotide
  Sense Strand Starting at position 466 of SEQ ID NO: 318850
cguguccuugcacugugaa

SEQ ID NO: 355330 - RNA, 19 nt, Artificial Sequence
  Description of Artificial Sequence: Synthetic oligonucleotide
  Antisense Strand to SEQ ID NO: 355329
uucacagugcaaggacacg

SEQ ID NO: 355331 - RNA, 19 nt, Artificial Sequence
  Description of Artificial Sequence: Synthetic oligonucleotide
  Sense Strand Starting at position 466 of SEQ ID NO: 318927
guacacuugaguuggaauu

SEQ ID NO: 355332 - RNA, 19 nt, Artificial Sequence
  Description of Artificial Sequence: Synthetic oligonucleotide
  Antisense Strand to SEQ ID NO: 355331
aauuccaacucaaguguac

SEQ ID NO: 355333 - RNA, 19 nt, Artificial Sequence
  Description of Artificial Sequence: Synthetic oligonucleotide
  Sense Strand Starting at position 466 of SEQ ID NO: 318955
ccacuuacugucuguguaa

SEQ ID NO: 355334 - RNA, 19 nt, Artificial Sequence
  Description of Artificial Sequence: Synthetic oligonucleotide
  Antisense Strand to SEQ ID NO: 355333
uuacacagacaguaagugg

SEQ ID NO: 355335 - RNA, 19 nt, Artificial Sequence
  Description of Artificial Sequence: Synthetic oligonucleotide
  Sense Strand Starting at position 466 of SEQ ID NO: 318957
acuuacugucuguguaacu

SEQ ID NO: 355336 - RNA, 19 nt, Artificial Sequence
  Description of Artificial Sequence: Synthetic oligonucleotide
  Antisense Strand to SEQ ID NO: 355335
aguuacacagacaguaagu

SEQ ID NO: 355337 - RNA, 19 nt, Artificial Sequence
  Description of Artificial Sequence: Synthetic oligonucleotide
  Sense Strand Starting at position 466 of SEQ ID NO: 319004
uuaguuucuuuguugguaa

SEQ ID NO: 355338 - RNA, 19 nt, Artificial Sequence
  Description of Artificial Sequence: Synthetic oligonucleotide
  Antisense Strand to SEQ ID NO: 355337
uuaccaacaaagaaacuaa

SEQ ID NO: 355339 - RNA, 19 nt, Artificial Sequence
  Description of Artificial Sequence: Synthetic oligonucleotide
  Sense Strand Starting at position 466 of SEQ ID NO: 319006
aguuucuuuguugguaaag

SEQ ID NO: 355340 - RNA, 19 nt, Artificial Sequence
  Description of Artificial Sequence: Synthetic oligonucleotide
  Antisense Strand to SEQ ID NO: 355339
cuuuaccaacaaagaaacu

SEQ ID NO: 355341 - RNA, 19 nt, Artificial Sequence
  Description of Artificial Sequence: Synthetic oligonucleotide
  Sense Strand Starting at position 466 of SEQ ID NO: 319081
cgauaagaagcuugguaua

SEQ ID NO: 355342 - RNA, 19 nt, Artificial Sequence
  Description of Artificial Sequence: Synthetic oligonucleotide
  Antisense Strand to SEQ ID NO: 355341
uauaccaagcuucuuaucg

SEQ ID NO: 355343 - RNA, 19 nt, Artificial Sequence
  Description of Artificial Sequence: Synthetic oligonucleotide
  Sense Strand Starting at position 466 of SEQ ID NO: 319083
auaagaagcuugguauaua

SEQ ID NO: 355344 - RNA, 19 nt, Artificial Sequence
  Description of Artificial Sequence: Synthetic oligonucleotide
  Antisense Strand to SEQ ID NO: 355343
uauauaccaagcuucuuau

SEQ ID NO: 355345 - RNA, 19 nt, Artificial Sequence
  Description of Artificial Sequence: Synthetic oligonucleotide
  Sense Strand Starting at position 466 of SEQ ID NO: 319092
uugguauauacaggauguu

SEQ ID NO: 355346 - RNA, 19 nt, Artificial Sequence
  Description of Artificial Sequence: Synthetic oligonucleotide
  Antisense Strand to SEQ ID NO: 355345
aacauccuguauauaccaa

SEQ ID NO: 355347 - RNA, 19 nt, Artificial Sequence
  Description of Artificial Sequence: Synthetic oligonucleotide
  Sense Strand Starting at position 466 of SEQ ID NO: 319095
guauauacaggauguuagu

SEQ ID NO: 355348 - RNA, 19 nt, Artificial Sequence
  Description of Artificial Sequence: Synthetic oligonucleotide
  Antisense Strand to SEQ ID NO: 355347
acuaacauccuguauauac

SEQ ID NO: 355349 - RNA, 19 nt, Artificial Sequence
  Description of Artificial Sequence: Synthetic oligonucleotide
  Sense Strand Starting at position 466 of SEQ ID NO: 319135
auuagacuuguagguuaga

SEQ ID NO: 355350 - RNA, 19 nt, Artificial Sequence
  Description of Artificial Sequence: Synthetic oligonucleotide
  Antisense Strand to SEQ ID NO: 355349
ucuaaccuacaagucuaau

SEQ ID NO: 355351 - RNA, 19 nt, Artificial Sequence
  Description of Artificial Sequence: Synthetic oligonucleotide
  Sense Strand Starting at position 466 of SEQ ID NO: 319136
uuagacuuguagguuagau

SEQ ID NO: 355352 - RNA, 19 nt, Artificial Sequence
  Description of Artificial Sequence: Synthetic oligonucleotide
  Antisense Strand to SEQ ID NO: 355351
aucuaaccuacaagucuaa

SEQ ID NO: 355353 - RNA, 19 nt, Artificial Sequence
  Description of Artificial Sequence: Synthetic oligonucleotide
  Sense Strand Starting at position 466 of SEQ ID NO: 319145
uagguuagauuaguaccau

SEQ ID NO: 355354 - RNA, 19 nt, Artificial Sequence
  Description of Artificial Sequence: Synthetic oligonucleotide
  Antisense Strand to SEQ ID NO: 355353
augguacuaaucuaaccua

SEQ ID NO: 355355 - RNA, 19 nt, Artificial Sequence
  Description of Artificial Sequence: Synthetic oligonucleotide
  Sense Strand Starting at position 466 of SEQ ID NO: 319151
agauuaguaccaugcauca

SEQ ID NO: 355356 - RNA, 19 nt, Artificial Sequence
  Description of Artificial Sequence: Synthetic oligonucleotide
  Antisense Strand to SEQ ID NO: 355355
ugaugcaugguacuaaucu

SEQ ID NO: 355357 - RNA, 19 nt, Artificial Sequence
  Description of Artificial Sequence: Synthetic oligonucleotide
  Sense Strand Starting at position 467 of SEQ ID NO: 315245
agcccucuguaucuguaau

SEQ ID NO: 355358 - RNA, 19 nt, Artificial Sequence
  Description of Artificial Sequence: Synthetic oligonucleotide
  Antisense Strand to SEQ ID NO: 355357
auuacagauacagagggcu

SEQ ID NO: 355359 - RNA, 19 nt, Artificial Sequence
  Description of Artificial Sequence: Synthetic oligonucleotide
  Sense Strand Starting at position 467 of SEQ ID NO: 315247
cccucuguaucuguaauuu

SEQ ID NO: 355360 - RNA, 19 nt, Artificial Sequence
  Description of Artificial Sequence: Synthetic oligonucleotide
  Antisense Strand to SEQ ID NO: 355359
aaauuacagauacagaggg

SEQ ID NO: 355361 - RNA, 19 nt, Artificial Sequence
  Description of Artificial Sequence: Synthetic oligonucleotide
  Sense Strand Starting at position 467 of SEQ ID NO: 315259
guaauuucaguccgugguu

SEQ ID NO: 355362 - RNA, 19 nt, Artificial Sequence
  Description of Artificial Sequence: Synthetic oligonucleotide
  Antisense Strand to SEQ ID NO: 355361
aaccacggacugaaauuac

SEQ ID NO: 355363 - RNA, 19 nt, Artificial Sequence
  Description of Artificial Sequence: Synthetic oligonucleotide
  Sense Strand Starting at position 467 of SEQ ID NO: 315788
gugucaaacgugucugcau

SEQ ID NO: 355364 - RNA, 19 nt, Artificial Sequence
  Description of Artificial Sequence: Synthetic oligonucleotide
  Antisense Strand to SEQ ID NO: 355363
augcagacacguuugacac

SEQ ID NO: 355365 - RNA, 19 nt, Artificial Sequence
  Description of Artificial Sequence: Synthetic oligonucleotide
  Sense Strand Starting at position 467 of SEQ ID NO: 315790
gucaaacgugucugcauuu

SEQ ID NO: 355366 - RNA, 19 nt, Artificial Sequence
  Description of Artificial Sequence: Synthetic oligonucleotide
  Antisense Strand to SEQ ID NO: 355365
aaaugcagacacguuugac

SEQ ID NO: 355367 - RNA, 19 nt, Artificial Sequence
  Description of Artificial Sequence: Synthetic oligonucleotide
  Sense Strand Starting at position 467 of SEQ ID NO: 315989
ggcuaauccagcugucaug

SEQ ID NO: 355368 - RNA, 19 nt, Artificial Sequence
  Description of Artificial Sequence: Synthetic oligonucleotide
  Antisense Strand to SEQ ID NO: 355367
caugacagcuggauuagcc

SEQ ID NO: 355369 - RNA, 19 nt, Artificial Sequence
  Description of Artificial Sequence: Synthetic oligonucleotide
  Sense Strand Starting at position 467 of SEQ ID NO: 316007
guauuucuggcgugaugug

SEQ ID NO: 355370 - RNA, 19 nt, Artificial Sequence
  Description of Artificial Sequence: Synthetic oligonucleotide
  Antisense Strand to SEQ ID NO: 355369
cacaucacgccagaaauac

SEQ ID NO: 355371 - RNA, 19 nt, Artificial Sequence
  Description of Artificial Sequence: Synthetic oligonucleotide
  Sense Strand Starting at position 467 of SEQ ID NO: 316023
guggcugucucccuugaca

SEQ ID NO: 355372 - RNA, 19 nt, Artificial Sequence
  Description of Artificial Sequence: Synthetic oligonucleotide
  Antisense Strand to SEQ ID NO: 355371
ugucaagggagacagccac

SEQ ID NO: 355373 - RNA, 19 nt, Artificial Sequence
  Description of Artificial Sequence: Synthetic oligonucleotide
  Sense Strand Starting at position 467 of SEQ ID NO: 316065
cagccuggucuugguaaca

SEQ ID NO: 355374 - RNA, 19 nt, Artificial Sequence
  Description of Artificial Sequence: Synthetic oligonucleotide
  Antisense Strand to SEQ ID NO: 355373
uguuaccaagaccaggcug

SEQ ID NO: 355375 - RNA, 19 nt, Artificial Sequence
  Description of Artificial Sequence: Synthetic oligonucleotide
  Sense Strand Starting at position 467 of SEQ ID NO: 316122
ccgugaauauuugcugguu

SEQ ID NO: 355376 - RNA, 19 nt, Artificial Sequence
  Description of Artificial Sequence: Synthetic oligonucleotide
  Antisense Strand to SEQ ID NO: 355375
aaccagcaaauauucacgg

SEQ ID NO: 355377 - RNA, 19 nt, Artificial Sequence
  Description of Artificial Sequence: Synthetic oligonucleotide
  Sense Strand Starting at position 467 of SEQ ID NO: 316125
ugaauauuugcugguugca

SEQ ID NO: 355378 - RNA, 19 nt, Artificial Sequence
  Description of Artificial Sequence: Synthetic oligonucleotide
  Antisense Strand to SEQ ID NO: 355377
ugcaaccagcaaauauuca

SEQ ID NO: 355379 - RNA, 19 nt, Artificial Sequence
  Description of Artificial Sequence: Synthetic oligonucleotide
  Sense Strand Starting at position 467 of SEQ ID NO: 316182
cuagaauuccacuguuugu

SEQ ID NO: 355380 - RNA, 19 nt, Artificial Sequence
  Description of Artificial Sequence: Synthetic oligonucleotide
  Antisense Strand to SEQ ID NO: 355379
acaaacaguggaauucuag

SEQ ID NO: 355381 - RNA, 19 nt, Artificial Sequence
  Description of Artificial Sequence: Synthetic oligonucleotide
  Sense Strand Starting at position 467 of SEQ ID NO: 316324
gucuaagauuuagagauac

SEQ ID NO: 355382 - RNA, 19 nt, Artificial Sequence
  Description of Artificial Sequence: Synthetic oligonucleotide
  Antisense Strand to SEQ ID NO: 355381
guaucucuaaaucuuagac

SEQ ID NO: 355383 - RNA, 19 nt, Artificial Sequence
  Description of Artificial Sequence: Synthetic oligonucleotide
  Sense Strand Starting at position 467 of SEQ ID NO: 316407
gucugugagggucaguaaa

SEQ ID NO: 355384 - RNA, 19 nt, Artificial Sequence
  Description of Artificial Sequence: Synthetic oligonucleotide
  Antisense Strand to SEQ ID NO: 355383
uuuacugacccucacagac

SEQ ID NO: 355385 - RNA, 19 nt, Artificial Sequence
  Description of Artificial Sequence: Synthetic oligonucleotide
  Sense Strand Starting at position 467 of SEQ ID NO: 316472
ggacuuucuacgcggauga

SEQ ID NO: 355386 - RNA, 19 nt, Artificial Sequence
  Description of Artificial Sequence: Synthetic oligonucleotide
  Antisense Strand to SEQ ID NO: 355385
ucauccgcguagaaagucc

SEQ ID NO: 355387 - RNA, 19 nt, Artificial Sequence
  Description of Artificial Sequence: Synthetic oligonucleotide
  Sense Strand Starting at position 467 of SEQ ID NO: 316474
acuuucuacgcggaugaga

SEQ ID NO: 355388 - RNA, 19 nt, Artificial Sequence
  Description of Artificial Sequence: Synthetic oligonucleotide
  Antisense Strand to SEQ ID NO: 355387
ucucauccgcguagaaagu

SEQ ID NO: 355389 - RNA, 19 nt, Artificial Sequence
  Description of Artificial Sequence: Synthetic oligonucleotide
  Sense Strand Starting at position 467 of SEQ ID NO: 316524
agggaauucucucuguugu

SEQ ID NO: 355390 - RNA, 19 nt, Artificial Sequence
  Description of Artificial Sequence: Synthetic oligonucleotide
  Antisense Strand to SEQ ID NO: 355389
acaacagagagaauucccu

SEQ ID NO: 355391 - RNA, 19 nt, Artificial Sequence
  Description of Artificial Sequence: Synthetic oligonucleotide
  Sense Strand Starting at position 467 of SEQ ID NO: 316525
gggaauucucucuguugug

SEQ ID NO: 355392 - RNA, 19 nt, Artificial Sequence
  Description of Artificial Sequence: Synthetic oligonucleotide
  Antisense Strand to SEQ ID NO: 355391
cacaacagagagaauuccc

SEQ ID NO: 355393 - RNA, 19 nt, Artificial Sequence
  Description of Artificial Sequence: Synthetic oligonucleotide
  Sense Strand Starting at position 467 of SEQ ID NO: 316600
cuuugaagugaucggaaag

SEQ ID NO: 355394 - RNA, 19 nt, Artificial Sequence
  Description of Artificial Sequence: Synthetic oligonucleotide
  Antisense Strand to SEQ ID NO: 355393
cuuuccgaucacuucaaag

SEQ ID NO: 355395 - RNA, 19 nt, Artificial Sequence
  Description of Artificial Sequence: Synthetic oligonucleotide
  Sense Strand Starting at position 467 of SEQ ID NO: 316601
uuugaagugaucggaaagu

SEQ ID NO: 355396 - RNA, 19 nt, Artificial Sequence
  Description of Artificial Sequence: Synthetic oligonucleotide
  Antisense Strand to SEQ ID NO: 355395
acuuuccgaucacuucaaa

SEQ ID NO: 355397 - RNA, 19 nt, Artificial Sequence
  Description of Artificial Sequence: Synthetic oligonucleotide
  Sense Strand Starting at position 467 of SEQ ID NO: 317584
cucuucuacuccgcgagaa

SEQ ID NO: 355398 - RNA, 19 nt, Artificial Sequence
  Description of Artificial Sequence: Synthetic oligonucleotide
  Antisense Strand to SEQ ID NO: 355397
uucucgcggaguagaagag

SEQ ID NO: 355399 - RNA, 19 nt, Artificial Sequence
  Description of Artificial Sequence: Synthetic oligonucleotide
  Sense Strand Starting at position 467 of SEQ ID NO: 317585
ucuucuacuccgcgagaau

SEQ ID NO: 355400 - RNA, 19 nt, Artificial Sequence
  Description of Artificial Sequence: Synthetic oligonucleotide
  Antisense Strand to SEQ ID NO: 355399
auucucgcggaguagaaga

SEQ ID NO: 355401 - RNA, 19 nt, Artificial Sequence
  Description of Artificial Sequence: Synthetic oligonucleotide
  Sense Strand Starting at position 467 of SEQ ID NO: 317586
cuucuacuccgcgagaauc

SEQ ID NO: 355402 - RNA, 19 nt, Artificial Sequence
  Description of Artificial Sequence: Synthetic oligonucleotide
  Antisense Strand to SEQ ID NO: 355401
gauucucgcggaguagaag

SEQ ID NO: 355403 - RNA, 19 nt, Artificial Sequence
  Description of Artificial Sequence: Synthetic oligonucleotide
  Sense Strand Starting at position 467 of SEQ ID NO: 317736
gcaggaauuguauguucuc

SEQ ID NO: 355404 - RNA, 19 nt, Artificial Sequence
  Description of Artificial Sequence: Synthetic oligonucleotide
  Antisense Strand to SEQ ID NO: 355403
gagaacauacaauuccugc

SEQ ID NO: 355405 - RNA, 19 nt, Artificial Sequence
  Description of Artificial Sequence: Synthetic oligonucleotide
  Sense Strand Starting at position 467 of SEQ ID NO: 317906
ucaguuugaguguguuuaa

SEQ ID NO: 355406 - RNA, 19 nt, Artificial Sequence
  Description of Artificial Sequence: Synthetic oligonucleotide
  Antisense Strand to SEQ ID NO: 355405
uuaaacacacucaaacuga

SEQ ID NO: 355407 - RNA, 19 nt, Artificial Sequence
  Description of Artificial Sequence: Synthetic oligonucleotide
  Sense Strand Starting at position 467 of SEQ ID NO: 317907
caguuugaguguguuuaau

SEQ ID NO: 355408 - RNA, 19 nt, Artificial Sequence
  Description of Artificial Sequence: Synthetic oligonucleotide
  Antisense Strand to SEQ ID NO: 355407
auuaaacacacucaaacug

SEQ ID NO: 355409 - RNA, 19 nt, Artificial Sequence
  Description of Artificial Sequence: Synthetic oligonucleotide
  Sense Strand Starting at position 467 of SEQ ID NO: 317909
guuugaguguguuuaauau

SEQ ID NO: 355410 - RNA, 19 nt, Artificial Sequence
  Description of Artificial Sequence: Synthetic oligonucleotide
  Antisense Strand to SEQ ID NO: 355409
auauuaaacacacucaaac

SEQ ID NO: 355411 - RNA, 19 nt, Artificial Sequence
  Description of Artificial Sequence: Synthetic oligonucleotide
  Sense Strand Starting at position 467 of SEQ ID NO: 317937
gucucuagauaguuggauu

SEQ ID NO: 355412 - RNA, 19 nt, Artificial Sequence
  Description of Artificial Sequence: Synthetic oligonucleotide
  Antisense Strand to SEQ ID NO: 355411
aauccaacuaucuagagac

SEQ ID NO: 355413 - RNA, 19 nt, Artificial Sequence
  Description of Artificial Sequence: Synthetic oligonucleotide
  Sense Strand Starting at position 467 of SEQ ID NO: 317940
ucuagauaguuggauuuau

SEQ ID NO: 355414 - RNA, 19 nt, Artificial Sequence
  Description of Artificial Sequence: Synthetic oligonucleotide
  Antisense Strand to SEQ ID NO: 355413
auaaauccaacuaucuaga

SEQ ID NO: 355415 - RNA, 19 nt, Artificial Sequence
  Description of Artificial Sequence: Synthetic oligonucleotide
  Sense Strand Starting at position 467 of SEQ ID NO: 318024
cauguuugguaagaaauuu

SEQ ID NO: 355416 - RNA, 19 nt, Artificial Sequence
  Description of Artificial Sequence: Synthetic oligonucleotide
  Antisense Strand to SEQ ID NO: 355415
aaauuucuuaccaaacaug

SEQ ID NO: 355417 - RNA, 19 nt, Artificial Sequence
  Description of Artificial Sequence: Synthetic oligonucleotide
  Sense Strand Starting at position 467 of SEQ ID NO: 318032
guaagaaauuuguggguau

SEQ ID NO: 355418 - RNA, 19 nt, Artificial Sequence
  Description of Artificial Sequence: Synthetic oligonucleotide
  Antisense Strand to SEQ ID NO: 355417
auacccacaaauuucuuac

SEQ ID NO: 355419 - RNA, 19 nt, Artificial Sequence
  Description of Artificial Sequence: Synthetic oligonucleotide
  Sense Strand Starting at position 467 of SEQ ID NO: 318088
guuagaccuacucaguagu

SEQ ID NO: 355420 - RNA, 19 nt, Artificial Sequence
  Description of Artificial Sequence: Synthetic oligonucleotide
  Antisense Strand to SEQ ID NO: 355419
acuacugaguaggucuaac

SEQ ID NO: 355421 - RNA, 19 nt, Artificial Sequence
  Description of Artificial Sequence: Synthetic oligonucleotide
  Sense Strand Starting at position 467 of SEQ ID NO: 318090
uagaccuacucaguaguga

SEQ ID NO: 355422 - RNA, 19 nt, Artificial Sequence
  Description of Artificial Sequence: Synthetic oligonucleotide
  Antisense Strand to SEQ ID NO: 355421
ucacuacugaguaggucua

SEQ ID NO: 355423 - RNA, 19 nt, Artificial Sequence
  Description of Artificial Sequence: Synthetic oligonucleotide
  Sense Strand Starting at position 467 of SEQ ID NO: 318143
cagcguuucccuuugcuau

SEQ ID NO: 355424 - RNA, 19 nt, Artificial Sequence
  Description of Artificial Sequence: Synthetic oligonucleotide
  Antisense Strand to SEQ ID NO: 355423
auagcaaagggaaacgcug

SEQ ID NO: 355425 - RNA, 19 nt, Artificial Sequence
  Description of Artificial Sequence: Synthetic oligonucleotide
  Sense Strand Starting at position 467 of SEQ ID NO: 318237
cggcuacucuggcuaauaa

SEQ ID NO: 355426 - RNA, 19 nt, Artificial Sequence
  Description of Artificial Sequence: Synthetic oligonucleotide
  Antisense Strand to SEQ ID NO: 355425
uuauuagccagaguagccg

SEQ ID NO: 355427 - RNA, 19 nt, Artificial Sequence
  Description of Artificial Sequence: Synthetic oligonucleotide
  Sense Strand Starting at position 467 of SEQ ID NO: 318238
ggcuacucuggcuaauaau

SEQ ID NO: 355428 - RNA, 19 nt, Artificial Sequence
  Description of Artificial Sequence: Synthetic oligonucleotide
  Antisense Strand to SEQ ID NO: 355427
auuauuagccagaguagcc

SEQ ID NO: 355429 - RNA, 19 nt, Artificial Sequence
  Description of Artificial Sequence: Synthetic oligonucleotide
  Sense Strand Starting at position 467 of SEQ ID NO: 318652
gccuguucccaucaucaua

SEQ ID NO: 355430 - RNA, 19 nt, Artificial Sequence
  Description of Artificial Sequence: Synthetic oligonucleotide
  Antisense Strand to SEQ ID NO: 355429
uaugaugaugggaacaggc

SEQ ID NO: 355431 - RNA, 19 nt, Artificial Sequence
  Description of Artificial Sequence: Synthetic oligonucleotide
  Sense Strand Starting at position 467 of SEQ ID NO: 318750
aggagucauuugggaaccu

SEQ ID NO: 355432 - RNA, 19 nt, Artificial Sequence
  Description of Artificial Sequence: Synthetic oligonucleotide
  Antisense Strand to SEQ ID NO: 355431
agguucccaaaugacuccu

SEQ ID NO: 355433 - RNA, 19 nt, Artificial Sequence
  Description of Artificial Sequence: Synthetic oligonucleotide
  Sense Strand Starting at position 467 of SEQ ID NO: 318767
cuggcauuauacguaauga

SEQ ID NO: 355434 - RNA, 19 nt, Artificial Sequence
  Description of Artificial Sequence: Synthetic oligonucleotide
  Antisense Strand to SEQ ID NO: 355433
ucauuacguauaaugccag

SEQ ID NO: 355435 - RNA, 19 nt, Artificial Sequence
  Description of Artificial Sequence: Synthetic oligonucleotide
  Sense Strand Starting at position 467 of SEQ ID NO: 318768
uggcauuauacguaaugau

SEQ ID NO: 355436 - RNA, 19 nt, Artificial Sequence
  Description of Artificial Sequence: Synthetic oligonucleotide
  Antisense Strand to SEQ ID NO: 355435
aucauuacguauaaugcca

SEQ ID NO: 355437 - RNA, 19 nt, Artificial Sequence
  Description of Artificial Sequence: Synthetic oligonucleotide
  Sense Strand Starting at position 468 of SEQ ID NO: 315267
gaagguggugucuaauugu

SEQ ID NO: 355438 - RNA, 19 nt, Artificial Sequence
  Description of Artificial Sequence: Synthetic oligonucleotide
  Antisense Strand to SEQ ID NO: 355437
acaauuagacaccaccuuc

SEQ ID NO: 355439 - RNA, 19 nt, Artificial Sequence
  Description of Artificial Sequence: Synthetic oligonucleotide
  Sense Strand Starting at position 468 of SEQ ID NO: 315273
ggugucuaauugucacaau

SEQ ID NO: 355440 - RNA, 19 nt, Artificial Sequence
  Description of Artificial Sequence: Synthetic oligonucleotide
  Antisense Strand to SEQ ID NO: 355439
auugugacaauuagacacc

SEQ ID NO: 355441 - RNA, 19 nt, Artificial Sequence
  Description of Artificial Sequence: Synthetic oligonucleotide
  Sense Strand Starting at position 468 of SEQ ID NO: 315442
ccaagauaucgugaaccua

SEQ ID NO: 355442 - RNA, 19 nt, Artificial Sequence
  Description of Artificial Sequence: Synthetic oligonucleotide
  Antisense Strand to SEQ ID NO: 355441
uagguucacgauaucuugg

SEQ ID NO: 355443 - RNA, 19 nt, Artificial Sequence
  Description of Artificial Sequence: Synthetic oligonucleotide
  Sense Strand Starting at position 468 of SEQ ID NO: 315551
gcguauugcaaugcaaguu

SEQ ID NO: 355444 - RNA, 19 nt, Artificial Sequence
  Description of Artificial Sequence: Synthetic oligonucleotide
  Antisense Strand to SEQ ID NO: 355443
aacuugcauugcaauacgc

SEQ ID NO: 355445 - RNA, 19 nt, Artificial Sequence
  Description of Artificial Sequence: Synthetic oligonucleotide
  Sense Strand Starting at position 468 of SEQ ID NO: 315552
cguauugcaaugcaaguua

SEQ ID NO: 355446 - RNA, 19 nt, Artificial Sequence
  Description of Artificial Sequence: Synthetic oligonucleotide
  Antisense Strand to SEQ ID NO: 355445
uaacuugcauugcaauacg

SEQ ID NO: 355447 - RNA, 19 nt, Artificial Sequence
  Description of Artificial Sequence: Synthetic oligonucleotide
  Sense Strand Starting at position 468 of SEQ ID NO: 315741
ucucaaggccuuuguaaag

SEQ ID NO: 355448 - RNA, 19 nt, Artificial Sequence
  Description of Artificial Sequence: Synthetic oligonucleotide
  Antisense Strand to SEQ ID NO: 355447
cuuuacaaaggccuugaga

SEQ ID NO: 355449 - RNA, 19 nt, Artificial Sequence
  Description of Artificial Sequence: Synthetic oligonucleotide
  Sense Strand Starting at position 468 of SEQ ID NO: 316132
uguggcugauacccauaau

SEQ ID NO: 355450 - RNA, 19 nt, Artificial Sequence
  Description of Artificial Sequence: Synthetic oligonucleotide
  Antisense Strand to SEQ ID NO: 355449
auuauggguaucagccaca

SEQ ID NO: 355451 - RNA, 19 nt, Artificial Sequence
  Description of Artificial Sequence: Synthetic oligonucleotide
  Sense Strand Starting at position 468 of SEQ ID NO: 316643
ugaaguacaacgugucagu

SEQ ID NO: 355452 - RNA, 19 nt, Artificial Sequence
  Description of Artificial Sequence: Synthetic oligonucleotide
  Antisense Strand to SEQ ID NO: 355451
acugacacguuguacuuca

SEQ ID NO: 355453 - RNA, 19 nt, Artificial Sequence
  Description of Artificial Sequence: Synthetic oligonucleotide
  Sense Strand Starting at position 468 of SEQ ID NO: 317010
gucauaugccucuaucaca

SEQ ID NO: 355454 - RNA, 19 nt, Artificial Sequence
  Description of Artificial Sequence: Synthetic oligonucleotide
  Antisense Strand to SEQ ID NO: 355453
ugugauagaggcauaugac

SEQ ID NO: 355455 - RNA, 19 nt, Artificial Sequence
  Description of Artificial Sequence: Synthetic oligonucleotide
  Sense Strand Starting at position 468 of SEQ ID NO: 317026
acauuaugggcugaccuua

SEQ ID NO: 355456 - RNA, 19 nt, Artificial Sequence
  Description of Artificial Sequence: Synthetic oligonucleotide
  Antisense Strand to SEQ ID NO: 355455
uaaggucagcccauaaugu

SEQ ID NO: 355457 - RNA, 19 nt, Artificial Sequence
  Description of Artificial Sequence: Synthetic oligonucleotide
  Sense Strand Starting at position 468 of SEQ ID NO: 317034
ggcugaccuuaucuacaga

SEQ ID NO: 355458 - RNA, 19 nt, Artificial Sequence
  Description of Artificial Sequence: Synthetic oligonucleotide
  Antisense Strand to SEQ ID NO: 355457
ucuguagauaaggucagcc

SEQ ID NO: 355459 - RNA, 19 nt, Artificial Sequence
  Description of Artificial Sequence: Synthetic oligonucleotide
  Sense Strand Starting at position 468 of SEQ ID NO: 317204
uuagcaguuacgggaucaa

SEQ ID NO: 355460 - RNA, 19 nt, Artificial Sequence
  Description of Artificial Sequence: Synthetic oligonucleotide
  Antisense Strand to SEQ ID NO: 355459
uugaucccguaacugcuaa

SEQ ID NO: 355461 - RNA, 19 nt, Artificial Sequence
  Description of Artificial Sequence: Synthetic oligonucleotide
  Sense Strand Starting at position 468 of SEQ ID NO: 317226
gcacacuuggcuggaaaca

SEQ ID NO: 355462 - RNA, 19 nt, Artificial Sequence
  Description of Artificial Sequence: Synthetic oligonucleotide
  Antisense Strand to SEQ ID NO: 355461
uguuuccagccaagugugc

SEQ ID NO: 355463 - RNA, 19 nt, Artificial Sequence
  Description of Artificial Sequence: Synthetic oligonucleotide
  Sense Strand Starting at position 468 of SEQ ID NO: 317271
ugacauacuuaaguagacu

SEQ ID NO: 355464 - RNA, 19 nt, Artificial Sequence
  Description of Artificial Sequence: Synthetic oligonucleotide
  Antisense Strand to SEQ ID NO: 355463
agucuacuuaaguauguca

SEQ ID NO: 355465 - RNA, 19 nt, Artificial Sequence
  Description of Artificial Sequence: Synthetic oligonucleotide
  Sense Strand Starting at position 468 of SEQ ID NO: 317345
gccaguuaucauggaguac

SEQ ID NO: 355466 - RNA, 19 nt, Artificial Sequence
  Description of Artificial Sequence: Synthetic oligonucleotide
  Antisense Strand to SEQ ID NO: 355465
guacuccaugauaacuggc

SEQ ID NO: 355467 - RNA, 19 nt, Artificial Sequence
  Description of Artificial Sequence: Synthetic oligonucleotide
  Sense Strand Starting at position 468 of SEQ ID NO: 317358
gaguacgucuaauccauau

SEQ ID NO: 355468 - RNA, 19 nt, Artificial Sequence
  Description of Artificial Sequence: Synthetic oligonucleotide
  Antisense Strand to SEQ ID NO: 355467
auauggauuagacguacuc

SEQ ID NO: 355469 - RNA, 19 nt, Artificial Sequence
  Description of Artificial Sequence: Synthetic oligonucleotide
  Sense Strand Starting at position 468 of SEQ ID NO: 317362
acgucuaauccauauuguc

SEQ ID NO: 355470 - RNA, 19 nt, Artificial Sequence
  Description of Artificial Sequence: Synthetic oligonucleotide
  Antisense Strand to SEQ ID NO: 355469
gacaauauggauuagacgu

SEQ ID NO: 355471 - RNA, 19 nt, Artificial Sequence
  Description of Artificial Sequence: Synthetic oligonucleotide
  Sense Strand Starting at position 468 of SEQ ID NO: 317406
gagcuuuccugaucugguu

SEQ ID NO: 355472 - RNA, 19 nt, Artificial Sequence
  Description of Artificial Sequence: Synthetic oligonucleotide
  Antisense Strand to SEQ ID NO: 355471
aaccagaucaggaaagcuc

SEQ ID NO: 355473 - RNA, 19 nt, Artificial Sequence
  Description of Artificial Sequence: Synthetic oligonucleotide
  Sense Strand Starting at position 468 of SEQ ID NO: 317455
agacgcuggaucuguaaua

SEQ ID NO: 355474 - RNA, 19 nt, Artificial Sequence
  Description of Artificial Sequence: Synthetic oligonucleotide
  Antisense Strand to SEQ ID NO: 355473
uauuacagauccagcgucu

SEQ ID NO: 355475 - RNA, 19 nt, Artificial Sequence
  Description of Artificial Sequence: Synthetic oligonucleotide
  Sense Strand Starting at position 468 of SEQ ID NO: 317492
agaguauauaauuguguac

SEQ ID NO: 355476 - RNA, 19 nt, Artificial Sequence
  Description of Artificial Sequence: Synthetic oligonucleotide
  Antisense Strand to SEQ ID NO: 355475
guacacaauuauauacucu

SEQ ID NO: 355477 - RNA, 19 nt, Artificial Sequence
  Description of Artificial Sequence: Synthetic oligonucleotide
  Sense Strand Starting at position 468 of SEQ ID NO: 317525
cacaguugguccucaguau

SEQ ID NO: 355478 - RNA, 19 nt, Artificial Sequence
  Description of Artificial Sequence: Synthetic oligonucleotide
  Antisense Strand to SEQ ID NO: 355477
auacugaggaccaacugug

SEQ ID NO: 355479 - RNA, 19 nt, Artificial Sequence
  Description of Artificial Sequence: Synthetic oligonucleotide
  Sense Strand Starting at position 468 of SEQ ID NO: 317529
guugguccucaguaucagu

SEQ ID NO: 355480 - RNA, 19 nt, Artificial Sequence
  Description of Artificial Sequence: Synthetic oligonucleotide
  Antisense Strand to SEQ ID NO: 355479
acugauacugaggaccaac

SEQ ID NO: 355481 - RNA, 19 nt, Artificial Sequence
  Description of Artificial Sequence: Synthetic oligonucleotide
  Sense Strand Starting at position 468 of SEQ ID NO: 317632
cccucuguaucuguaauuu

SEQ ID NO: 355482 - RNA, 19 nt, Artificial Sequence
  Description of Artificial Sequence: Synthetic oligonucleotide
  Antisense Strand to SEQ ID NO: 355481
aaauuacagauacagaggg

SEQ ID NO: 355483 - RNA, 19 nt, Artificial Sequence
  Description of Artificial Sequence: Synthetic oligonucleotide
  Sense Strand Starting at position 468 of SEQ ID NO: 317644
guaauuucaguccgugguu

SEQ ID NO: 355484 - RNA, 19 nt, Artificial Sequence
  Description of Artificial Sequence: Synthetic oligonucleotide
  Antisense Strand to SEQ ID NO: 355483
aaccacggacugaaauuac

SEQ ID NO: 355485 - RNA, 19 nt, Artificial Sequence
  Description of Artificial Sequence: Synthetic oligonucleotide
  Sense Strand Starting at position 468 of SEQ ID NO: 318173
gugucaaacgugucugcau

SEQ ID NO: 355486 - RNA, 19 nt, Artificial Sequence
  Description of Artificial Sequence: Synthetic oligonucleotide
  Antisense Strand to SEQ ID NO: 355485
augcagacacguuugacac

SEQ ID NO: 355487 - RNA, 19 nt, Artificial Sequence
  Description of Artificial Sequence: Synthetic oligonucleotide
  Sense Strand Starting at position 468 of SEQ ID NO: 318175
gucaaacgugucugcauuu

SEQ ID NO: 355488 - RNA, 19 nt, Artificial Sequence
  Description of Artificial Sequence: Synthetic oligonucleotide
  Antisense Strand to SEQ ID NO: 355487
aaaugcagacacguuugac

SEQ ID NO: 355489 - RNA, 19 nt, Artificial Sequence
  Description of Artificial Sequence: Synthetic oligonucleotide
  Sense Strand Starting at position 468 of SEQ ID NO: 318374
ggcuaauccagcugucaug

SEQ ID NO: 355490 - RNA, 19 nt, Artificial Sequence
  Description of Artificial Sequence: Synthetic oligonucleotide
  Antisense Strand to SEQ ID NO: 355489
caugacagcuggauuagcc

SEQ ID NO: 355491 - RNA, 19 nt, Artificial Sequence
  Description of Artificial Sequence: Synthetic oligonucleotide
  Sense Strand Starting at position 468 of SEQ ID NO: 318392
guauuucuggcgugaugug

SEQ ID NO: 355492 - RNA, 19 nt, Artificial Sequence
  Description of Artificial Sequence: Synthetic oligonucleotide
  Antisense Strand to SEQ ID NO: 355491
cacaucacgccagaaauac

SEQ ID NO: 355493 - RNA, 19 nt, Artificial Sequence
  Description of Artificial Sequence: Synthetic oligonucleotide
  Sense Strand Starting at position 468 of SEQ ID NO: 318450
cagccuggucuugguaaca

SEQ ID NO: 355494 - RNA, 19 nt, Artificial Sequence
  Description of Artificial Sequence: Synthetic oligonucleotide
  Antisense Strand to SEQ ID NO: 355493
uguuaccaagaccaggcug

SEQ ID NO: 355495 - RNA, 19 nt, Artificial Sequence
  Description of Artificial Sequence: Synthetic oligonucleotide
  Sense Strand Starting at position 468 of SEQ ID NO: 318507
ccgugaauauuugcugguu

SEQ ID NO: 355496 - RNA, 19 nt, Artificial Sequence
  Description of Artificial Sequence: Synthetic oligonucleotide
  Antisense Strand to SEQ ID NO: 355495
aaccagcaaauauucacgg

SEQ ID NO: 355497 - RNA, 19 nt, Artificial Sequence
  Description of Artificial Sequence: Synthetic oligonucleotide
  Sense Strand Starting at position 468 of SEQ ID NO: 318510
ugaauauuugcugguugca

SEQ ID NO: 355498 - RNA, 19 nt, Artificial Sequence
  Description of Artificial Sequence: Synthetic oligonucleotide
  Antisense Strand to SEQ ID NO: 355497
ugcaaccagcaaauauuca

SEQ ID NO: 355499 - RNA, 19 nt, Artificial Sequence
  Description of Artificial Sequence: Synthetic oligonucleotide
  Sense Strand Starting at position 468 of SEQ ID NO: 318567
cuagaauuccacuguuugu

SEQ ID NO: 355500 - RNA, 19 nt, Artificial Sequence
  Description of Artificial Sequence: Synthetic oligonucleotide
  Antisense Strand to SEQ ID NO: 355499
acaaacaguggaauucuag

SEQ ID NO: 355501 - RNA, 19 nt, Artificial Sequence
  Description of Artificial Sequence: Synthetic oligonucleotide
  Sense Strand Starting at position 468 of SEQ ID NO: 318709
gucuaagauuuagagauac

SEQ ID NO: 355502 - RNA, 19 nt, Artificial Sequence
  Description of Artificial Sequence: Synthetic oligonucleotide
  Antisense Strand to SEQ ID NO: 355501
guaucucuaaaucuuagac

SEQ ID NO: 355503 - RNA, 19 nt, Artificial Sequence
  Description of Artificial Sequence: Synthetic oligonucleotide
  Sense Strand Starting at position 468 of SEQ ID NO: 318792
gucugugagggucaguaaa

SEQ ID NO: 355504 - RNA, 19 nt, Artificial Sequence
  Description of Artificial Sequence: Synthetic oligonucleotide
  Antisense Strand to SEQ ID NO: 355503
uuuacugacccucacagac

SEQ ID NO: 355505 - RNA, 19 nt, Artificial Sequence
  Description of Artificial Sequence: Synthetic oligonucleotide
  Sense Strand Starting at position 468 of SEQ ID NO: 318857
ggacuuucuacgcggauga

SEQ ID NO: 355506 - RNA, 19 nt, Artificial Sequence
  Description of Artificial Sequence: Synthetic oligonucleotide
  Antisense Strand to SEQ ID NO: 355505
ucauccgcguagaaagucc

SEQ ID NO: 355507 - RNA, 19 nt, Artificial Sequence
  Description of Artificial Sequence: Synthetic oligonucleotide
  Sense Strand Starting at position 468 of SEQ ID NO: 318859
acuuucuacgcggaugaga

SEQ ID NO: 355508 - RNA, 19 nt, Artificial Sequence
  Description of Artificial Sequence: Synthetic oligonucleotide
  Antisense Strand to SEQ ID NO: 355507
ucucauccgcguagaaagu

SEQ ID NO: 355509 - RNA, 19 nt, Artificial Sequence
  Description of Artificial Sequence: Synthetic oligonucleotide
  Sense Strand Starting at position 468 of SEQ ID NO: 318909
agggaauucucucuguugu

SEQ ID NO: 355510 - RNA, 19 nt, Artificial Sequence
  Description of Artificial Sequence: Synthetic oligonucleotide
  Antisense Strand to SEQ ID NO: 355509
acaacagagagaauucccu

SEQ ID NO: 355511 - RNA, 19 nt, Artificial Sequence
  Description of Artificial Sequence: Synthetic oligonucleotide
  Sense Strand Starting at position 468 of SEQ ID NO: 318910
gggaauucucucuguugug

SEQ ID NO: 355512 - RNA, 19 nt, Artificial Sequence
  Description of Artificial Sequence: Synthetic oligonucleotide
  Antisense Strand to SEQ ID NO: 355511
cacaacagagagaauuccc

SEQ ID NO: 355513 - RNA, 19 nt, Artificial Sequence
  Description of Artificial Sequence: Synthetic oligonucleotide
  Sense Strand Starting at position 468 of SEQ ID NO: 318985
cuuugaagugaucggaaag

SEQ ID NO: 355514 - RNA, 19 nt, Artificial Sequence
  Description of Artificial Sequence: Synthetic oligonucleotide
  Antisense Strand to SEQ ID NO: 355513
cuuuccgaucacuucaaag

SEQ ID NO: 355515 - RNA, 19 nt, Artificial Sequence
  Description of Artificial Sequence: Synthetic oligonucleotide
  Sense Strand Starting at position 468 of SEQ ID NO: 318986
uuugaagugaucggaaagu

SEQ ID NO: 355516 - RNA, 19 nt, Artificial Sequence
  Description of Artificial Sequence: Synthetic oligonucleotide
  Antisense Strand to SEQ ID NO: 355515
acuuuccgaucacuucaaa

SEQ ID NO: 355517 - RNA, 19 nt, Artificial Sequence
  Description of Artificial Sequence: Synthetic oligonucleotide
  Sense Strand Starting at position 469 of SEQ ID NO: 315295
cugggaagucagggucuau

SEQ ID NO: 355518 - RNA, 19 nt, Artificial Sequence
  Description of Artificial Sequence: Synthetic oligonucleotide
  Antisense Strand to SEQ ID NO: 355517
auagacccugacuucccag

SEQ ID NO: 355519 - RNA, 19 nt, Artificial Sequence
  Description of Artificial Sequence: Synthetic oligonucleotide
  Sense Strand Starting at position 469 of SEQ ID NO: 315358
gggcaagcaaucugaggaa

SEQ ID NO: 355520 - RNA, 19 nt, Artificial Sequence
  Description of Artificial Sequence: Synthetic oligonucleotide
  Antisense Strand to SEQ ID NO: 355519
uuccucagauugcuugccc

SEQ ID NO: 355521 - RNA, 19 nt, Artificial Sequence
  Description of Artificial Sequence: Synthetic oligonucleotide
  Sense Strand Starting at position 469 of SEQ ID NO: 315370
ugaggaaucucaguaugca

SEQ ID NO: 355522 - RNA, 19 nt, Artificial Sequence
  Description of Artificial Sequence: Synthetic oligonucleotide
  Antisense Strand to SEQ ID NO: 355521
ugcauacugagauuccuca

SEQ ID NO: 355523 - RNA, 19 nt, Artificial Sequence
  Description of Artificial Sequence: Synthetic oligonucleotide
  Sense Strand Starting at position 469 of SEQ ID NO: 315411
agguucaaaucaggaguga

SEQ ID NO: 355524 - RNA, 19 nt, Artificial Sequence
  Description of Artificial Sequence: Synthetic oligonucleotide
  Antisense Strand to SEQ ID NO: 355523
ucacuccugauuugaaccu

SEQ ID NO: 355525 - RNA, 19 nt, Artificial Sequence
  Description of Artificial Sequence: Synthetic oligonucleotide
  Sense Strand Starting at position 469 of SEQ ID NO: 315775
acagcucaucuguacuaca

SEQ ID NO: 355526 - RNA, 19 nt, Artificial Sequence
  Description of Artificial Sequence: Synthetic oligonucleotide
  Antisense Strand to SEQ ID NO: 355525
uguaguacagaugagcugu

SEQ ID NO: 355527 - RNA, 19 nt, Artificial Sequence
  Description of Artificial Sequence: Synthetic oligonucleotide
  Sense Strand Starting at position 469 of SEQ ID NO: 315895
agguuccagcucuacuaua

SEQ ID NO: 355528 - RNA, 19 nt, Artificial Sequence
  Description of Artificial Sequence: Synthetic oligonucleotide
  Antisense Strand to SEQ ID NO: 355527
uauaguagagcuggaaccu

SEQ ID NO: 355529 - RNA, 19 nt, Artificial Sequence
  Description of Artificial Sequence: Synthetic oligonucleotide
  Sense Strand Starting at position 469 of SEQ ID NO: 316073
cccaaauauggugguuacu

SEQ ID NO: 355530 - RNA, 19 nt, Artificial Sequence
  Description of Artificial Sequence: Synthetic oligonucleotide
  Antisense Strand to SEQ ID NO: 355529
aguaaccaccauauuuggg

SEQ ID NO: 355531 - RNA, 19 nt, Artificial Sequence
  Description of Artificial Sequence: Synthetic oligonucleotide
  Sense Strand Starting at position 469 of SEQ ID NO: 316079
uauggugguuacuucuaga

SEQ ID NO: 355532 - RNA, 19 nt, Artificial Sequence
  Description of Artificial Sequence: Synthetic oligonucleotide
  Antisense Strand to SEQ ID NO: 355531
ucuagaaguaaccaccaua

SEQ ID NO: 355533 - RNA, 19 nt, Artificial Sequence
  Description of Artificial Sequence: Synthetic oligonucleotide
  Sense Strand Starting at position 469 of SEQ ID NO: 316120
guucucagcucuccgguaa

SEQ ID NO: 355534 - RNA, 19 nt, Artificial Sequence
  Description of Artificial Sequence: Synthetic oligonucleotide
  Antisense Strand to SEQ ID NO: 355533
uuaccggagagcugagaac

SEQ ID NO: 355535 - RNA, 19 nt, Artificial Sequence
  Description of Artificial Sequence: Synthetic oligonucleotide
  Sense Strand Starting at position 469 of SEQ ID NO: 316124
ucagcucuccgguaagaaa

SEQ ID NO: 355536 - RNA, 19 nt, Artificial Sequence
  Description of Artificial Sequence: Synthetic oligonucleotide
  Antisense Strand to SEQ ID NO: 355535
uuucuuaccggagagcuga

SEQ ID NO: 355537 - RNA, 19 nt, Artificial Sequence
  Description of Artificial Sequence: Synthetic oligonucleotide
  Sense Strand Starting at position 469 of SEQ ID NO: 316240
gagcuugcccauuggacuu

SEQ ID NO: 355538 - RNA, 19 nt, Artificial Sequence
  Description of Artificial Sequence: Synthetic oligonucleotide
  Antisense Strand to SEQ ID NO: 355537
aaguccaaugggcaagcuc

SEQ ID NO: 355539 - RNA, 19 nt, Artificial Sequence
  Description of Artificial Sequence: Synthetic oligonucleotide
  Sense Strand Starting at position 469 of SEQ ID NO: 316293
gucuuuauagccuggauga

SEQ ID NO: 355540 - RNA, 19 nt, Artificial Sequence
  Description of Artificial Sequence: Synthetic oligonucleotide
  Antisense Strand to SEQ ID NO: 355539
ucauccaggcuauaaagac

SEQ ID NO: 355541 - RNA, 19 nt, Artificial Sequence
  Description of Artificial Sequence: Synthetic oligonucleotide
  Sense Strand Starting at position 469 of SEQ ID NO: 316294
ucuuuauagccuggaugaa

SEQ ID NO: 355542 - RNA, 19 nt, Artificial Sequence
  Description of Artificial Sequence: Synthetic oligonucleotide
  Antisense Strand to SEQ ID NO: 355541
uucauccaggcuauaaaga

SEQ ID NO: 355543 - RNA, 19 nt, Artificial Sequence
  Description of Artificial Sequence: Synthetic oligonucleotide
  Sense Strand Starting at position 469 of SEQ ID NO: 316306
ggaugaaauuuguaucuau

SEQ ID NO: 355544 - RNA, 19 nt, Artificial Sequence
  Description of Artificial Sequence: Synthetic oligonucleotide
  Antisense Strand to SEQ ID NO: 355543
auagauacaaauuucaucc

SEQ ID NO: 355545 - RNA, 19 nt, Artificial Sequence
  Description of Artificial Sequence: Synthetic oligonucleotide
  Sense Strand Starting at position 469 of SEQ ID NO: 316468
aaaguauaaguaugugcau

SEQ ID NO: 355546 - RNA, 19 nt, Artificial Sequence
  Description of Artificial Sequence: Synthetic oligonucleotide
  Antisense Strand to SEQ ID NO: 355545
augcacauacuuauacuuu

SEQ ID NO: 355547 - RNA, 19 nt, Artificial Sequence
  Description of Artificial Sequence: Synthetic oligonucleotide
  Sense Strand Starting at position 469 of SEQ ID NO: 316469
aaguauaaguaugugcaua

SEQ ID NO: 355548 - RNA, 19 nt, Artificial Sequence
  Description of Artificial Sequence: Synthetic oligonucleotide
  Antisense Strand to SEQ ID NO: 355547
uaugcacauacuuauacuu

SEQ ID NO: 355549 - RNA, 19 nt, Artificial Sequence
  Description of Artificial Sequence: Synthetic oligonucleotide
  Sense Strand Starting at position 469 of SEQ ID NO: 316471
guauaaguaugugcauaca

SEQ ID NO: 355550 - RNA, 19 nt, Artificial Sequence
  Description of Artificial Sequence: Synthetic oligonucleotide
  Antisense Strand to SEQ ID NO: 355549
uguaugcacauacuuauac

SEQ ID NO: 355551 - RNA, 19 nt, Artificial Sequence
  Description of Artificial Sequence: Synthetic oligonucleotide
  Sense Strand Starting at position 469 of SEQ ID NO: 316474
uaaguaugugcauacaaug

SEQ ID NO: 355552 - RNA, 19 nt, Artificial Sequence
  Description of Artificial Sequence: Synthetic oligonucleotide
  Antisense Strand to SEQ ID NO: 355551
cauuguaugcacauacuua

SEQ ID NO: 355553 - RNA, 19 nt, Artificial Sequence
  Description of Artificial Sequence: Synthetic oligonucleotide
  Sense Strand Starting at position 469 of SEQ ID NO: 316485
auacaauguuuaggacuua

SEQ ID NO: 355554 - RNA, 19 nt, Artificial Sequence
  Description of Artificial Sequence: Synthetic oligonucleotide
  Antisense Strand to SEQ ID NO: 355553
uaaguccuaaacauuguau

SEQ ID NO: 355555 - RNA, 19 nt, Artificial Sequence
  Description of Artificial Sequence: Synthetic oligonucleotide
  Sense Strand Starting at position 469 of SEQ ID NO: 316502
uaacaauuauucgucguuu

SEQ ID NO: 355556 - RNA, 19 nt, Artificial Sequence
  Description of Artificial Sequence: Synthetic oligonucleotide
  Antisense Strand to SEQ ID NO: 355555
aaacgacgaauaauuguua

SEQ ID NO: 355557 - RNA, 19 nt, Artificial Sequence
  Description of Artificial Sequence: Synthetic oligonucleotide
  Sense Strand Starting at position 469 of SEQ ID NO: 316503
aacaauuauucgucguuua

SEQ ID NO: 355558 - RNA, 19 nt, Artificial Sequence
  Description of Artificial Sequence: Synthetic oligonucleotide
  Antisense Strand to SEQ ID NO: 355557
uaaacgacgaauaauuguu

SEQ ID NO: 355559 - RNA, 19 nt, Artificial Sequence
  Description of Artificial Sequence: Synthetic oligonucleotide
  Sense Strand Starting at position 469 of SEQ ID NO: 316504
acaauuauucgucguuuau

SEQ ID NO: 355560 - RNA, 19 nt, Artificial Sequence
  Description of Artificial Sequence: Synthetic oligonucleotide
  Antisense Strand to SEQ ID NO: 355559
auaaacgacgaauaauugu

SEQ ID NO: 355561 - RNA, 19 nt, Artificial Sequence
  Description of Artificial Sequence: Synthetic oligonucleotide
  Sense Strand Starting at position 469 of SEQ ID NO: 316508
uuauucgucguuuaucuua

SEQ ID NO: 355562 - RNA, 19 nt, Artificial Sequence
  Description of Artificial Sequence: Synthetic oligonucleotide
  Antisense Strand to SEQ ID NO: 355561
uaagauaaacgacgaauaa

SEQ ID NO: 355563 - RNA, 19 nt, Artificial Sequence
  Description of Artificial Sequence: Synthetic oligonucleotide
  Sense Strand Starting at position 469 of SEQ ID NO: 316972
aaagaaggcugguaccauu

SEQ ID NO: 355564 - RNA, 19 nt, Artificial Sequence
  Description of Artificial Sequence: Synthetic oligonucleotide
  Antisense Strand to SEQ ID NO: 355563
aaugguaccagccuucuuu

SEQ ID NO: 355565 - RNA, 19 nt, Artificial Sequence
  Description of Artificial Sequence: Synthetic oligonucleotide
  Sense Strand Starting at position 469 of SEQ ID NO: 316993
cggcuuucccuagacagua

SEQ ID NO: 355566 - RNA, 19 nt, Artificial Sequence
  Description of Artificial Sequence: Synthetic oligonucleotide
  Antisense Strand to SEQ ID NO: 355565
uacugucuagggaaagccg

SEQ ID NO: 355567 - RNA, 19 nt, Artificial Sequence
  Description of Artificial Sequence: Synthetic oligonucleotide
  Sense Strand Starting at position 469 of SEQ ID NO: 317042
gggccuuagcgagggaaau

SEQ ID NO: 355568 - RNA, 19 nt, Artificial Sequence
  Description of Artificial Sequence: Synthetic oligonucleotide
  Antisense Strand to SEQ ID NO: 355567
auuucccucgcuaaggccc

SEQ ID NO: 355569 - RNA, 19 nt, Artificial Sequence
  Description of Artificial Sequence: Synthetic oligonucleotide
  Sense Strand Starting at position 469 of SEQ ID NO: 317043
ggccuuagcgagggaaaug

SEQ ID NO: 355570 - RNA, 19 nt, Artificial Sequence
  Description of Artificial Sequence: Synthetic oligonucleotide
  Antisense Strand to SEQ ID NO: 355569
cauuucccucgcuaaggcc

SEQ ID NO: 355571 - RNA, 19 nt, Artificial Sequence
  Description of Artificial Sequence: Synthetic oligonucleotide
  Sense Strand Starting at position 469 of SEQ ID NO: 317317
gggagaguuuagcauauug

SEQ ID NO: 355572 - RNA, 19 nt, Artificial Sequence
  Description of Artificial Sequence: Synthetic oligonucleotide
  Antisense Strand to SEQ ID NO: 355571
caauaugcuaaacucuccc

SEQ ID NO: 355573 - RNA, 19 nt, Artificial Sequence
  Description of Artificial Sequence: Synthetic oligonucleotide
  Sense Strand Starting at position 469 of SEQ ID NO: 317396
cucuacauugaggguaaua

SEQ ID NO: 355574 - RNA, 19 nt, Artificial Sequence
  Description of Artificial Sequence: Synthetic oligonucleotide
  Antisense Strand to SEQ ID NO: 355573
uauuacccucaauguagag

SEQ ID NO: 355575 - RNA, 19 nt, Artificial Sequence
  Description of Artificial Sequence: Synthetic oligonucleotide
  Sense Strand Starting at position 469 of SEQ ID NO: 317846
gagccagauuaaguaauuc

SEQ ID NO: 355576 - RNA, 19 nt, Artificial Sequence
  Description of Artificial Sequence: Synthetic oligonucleotide
  Antisense Strand to SEQ ID NO: 355575
gaauuacuuaaucuggcuc

SEQ ID NO: 355577 - RNA, 19 nt, Artificial Sequence
  Description of Artificial Sequence: Synthetic oligonucleotide
  Sense Strand Starting at position 469 of SEQ ID NO: 317977
gcacauaagcggcauguaa

SEQ ID NO: 355578 - RNA, 19 nt, Artificial Sequence
  Description of Artificial Sequence: Synthetic oligonucleotide
  Antisense Strand to SEQ ID NO: 355577
uuacaugccgcuuaugugc

SEQ ID NO: 355579 - RNA, 19 nt, Artificial Sequence
  Description of Artificial Sequence: Synthetic oligonucleotide
  Sense Strand Starting at position 469 of SEQ ID NO: 317985
gcggcauguaaacgcuaau

SEQ ID NO: 355580 - RNA, 19 nt, Artificial Sequence
  Description of Artificial Sequence: Synthetic oligonucleotide
  Antisense Strand to SEQ ID NO: 355579
auuagcguuuacaugccgc

SEQ ID NO: 355581 - RNA, 19 nt, Artificial Sequence
  Description of Artificial Sequence: Synthetic oligonucleotide
  Sense Strand Starting at position 469 of SEQ ID NO: 318080
uaagaugaguccugaucag

SEQ ID NO: 355582 - RNA, 19 nt, Artificial Sequence
  Description of Artificial Sequence: Synthetic oligonucleotide
  Antisense Strand to SEQ ID NO: 355581
cugaucaggacucaucuua

SEQ ID NO: 355583 - RNA, 19 nt, Artificial Sequence
  Description of Artificial Sequence: Synthetic oligonucleotide
  Sense Strand Starting at position 469 of SEQ ID NO: 318155
aggagagaguugcaucaca

SEQ ID NO: 355584 - RNA, 19 nt, Artificial Sequence
  Description of Artificial Sequence: Synthetic oligonucleotide
  Antisense Strand to SEQ ID NO: 355583
ugugaugcaacucucuccu

SEQ ID NO: 355585 - RNA, 19 nt, Artificial Sequence
  Description of Artificial Sequence: Synthetic oligonucleotide
  Sense Strand Starting at position 469 of SEQ ID NO: 318160
agaguugcaucacaaauca

SEQ ID NO: 355586 - RNA, 19 nt, Artificial Sequence
  Description of Artificial Sequence: Synthetic oligonucleotide
  Antisense Strand to SEQ ID NO: 355585
ugauuugugaugcaacucu

SEQ ID NO: 355587 - RNA, 19 nt, Artificial Sequence
  Description of Artificial Sequence: Synthetic oligonucleotide
  Sense Strand Starting at position 469 of SEQ ID NO: 318206
gaaacauguuucuuggcag

SEQ ID NO: 355588 - RNA, 19 nt, Artificial Sequence
  Description of Artificial Sequence: Synthetic oligonucleotide
  Antisense Strand to SEQ ID NO: 355587
cugccaagaaacauguuuc

SEQ ID NO: 355589 - RNA, 19 nt, Artificial Sequence
  Description of Artificial Sequence: Synthetic oligonucleotide
  Sense Strand Starting at position 469 of SEQ ID NO: 318317
uggcgaaacuuaucucuac

SEQ ID NO: 355590 - RNA, 19 nt, Artificial Sequence
  Description of Artificial Sequence: Synthetic oligonucleotide
  Antisense Strand to SEQ ID NO: 355589
guagagauaaguuucgcca

SEQ ID NO: 355591 - RNA, 19 nt, Artificial Sequence
  Description of Artificial Sequence: Synthetic oligonucleotide
  Sense Strand Starting at position 469 of SEQ ID NO: 318813
agggauuacaggcguauaa

SEQ ID NO: 355592 - RNA, 19 nt, Artificial Sequence
  Description of Artificial Sequence: Synthetic oligonucleotide
  Antisense Strand to SEQ ID NO: 355591
uuauacgccuguaaucccu

SEQ ID NO: 355593 - RNA, 19 nt, Artificial Sequence
  Description of Artificial Sequence: Synthetic oligonucleotide
  Sense Strand Starting at position 469 of SEQ ID NO: 318815
ggauuacaggcguauaaac

SEQ ID NO: 355594 - RNA, 19 nt, Artificial Sequence
  Description of Artificial Sequence: Synthetic oligonucleotide
  Antisense Strand to SEQ ID NO: 355593
guuuauacgccuguaaucc

SEQ ID NO: 355595 - RNA, 19 nt, Artificial Sequence
  Description of Artificial Sequence: Synthetic oligonucleotide
  Sense Strand Starting at position 469 of SEQ ID NO: 318910
gucuguguuucccuggaug

SEQ ID NO: 355596 - RNA, 19 nt, Artificial Sequence
  Description of Artificial Sequence: Synthetic oligonucleotide
  Antisense Strand to SEQ ID NO: 355595
cauccagggaaacacagac

SEQ ID NO: 355597 - RNA, 19 nt, Artificial Sequence
  Description of Artificial Sequence: Synthetic oligonucleotide
  Sense Strand Starting at position 470 of SEQ ID NO: 315268
cucucuguuguccaggaga

SEQ ID NO: 355598 - RNA, 19 nt, Artificial Sequence
  Description of Artificial Sequence: Synthetic oligonucleotide
  Antisense Strand to SEQ ID NO: 355597
ucuccuggacaacagagag

SEQ ID NO: 355599 - RNA, 19 nt, Artificial Sequence
  Description of Artificial Sequence: Synthetic oligonucleotide
  Sense Strand Starting at position 470 of SEQ ID NO: 315350
guggaauacgggcaauuau

SEQ ID NO: 355600 - RNA, 19 nt, Artificial Sequence
  Description of Artificial Sequence: Synthetic oligonucleotide
  Antisense Strand to SEQ ID NO: 355599
auaauugcccguauuccac

SEQ ID NO: 355601 - RNA, 19 nt, Artificial Sequence
  Description of Artificial Sequence: Synthetic oligonucleotide
  Sense Strand Starting at position 470 of SEQ ID NO: 315503
cgaaauuacaugcagugaa

SEQ ID NO: 355602 - RNA, 19 nt, Artificial Sequence
  Description of Artificial Sequence: Synthetic oligonucleotide
  Antisense Strand to SEQ ID NO: 355601
uucacugcauguaauuucg

SEQ ID NO: 355603 - RNA, 19 nt, Artificial Sequence
  Description of Artificial Sequence: Synthetic oligonucleotide
  Sense Strand Starting at position 470 of SEQ ID NO: 315547
guguuaaguauagauccau

SEQ ID NO: 355604 - RNA, 19 nt, Artificial Sequence
  Description of Artificial Sequence: Synthetic oligonucleotide
  Antisense Strand to SEQ ID NO: 355603
auggaucuauacuuaacac

SEQ ID NO: 355605 - RNA, 19 nt, Artificial Sequence
  Description of Artificial Sequence: Synthetic oligonucleotide
  Sense Strand Starting at position 470 of SEQ ID NO: 315602
gggaaugaguuucuugguu

SEQ ID NO: 355606 - RNA, 19 nt, Artificial Sequence
  Description of Artificial Sequence: Synthetic oligonucleotide
  Antisense Strand to SEQ ID NO: 355605
aaccaagaaacucauuccc

SEQ ID NO: 355607 - RNA, 19 nt, Artificial Sequence
  Description of Artificial Sequence: Synthetic oligonucleotide
  Sense Strand Starting at position 470 of SEQ ID NO: 315611
uuucuugguuuacccagaa

SEQ ID NO: 355608 - RNA, 19 nt, Artificial Sequence
  Description of Artificial Sequence: Synthetic oligonucleotide
  Antisense Strand to SEQ ID NO: 355607
uucuggguaaaccaagaaa

SEQ ID NO: 355609 - RNA, 19 nt, Artificial Sequence
  Description of Artificial Sequence: Synthetic oligonucleotide
  Sense Strand Starting at position 470 of SEQ ID NO: 315662
cuagcauugaaugggugaa

SEQ ID NO: 355610 - RNA, 19 nt, Artificial Sequence
  Description of Artificial Sequence: Synthetic oligonucleotide
  Antisense Strand to SEQ ID NO: 355609
uucacccauucaaugcuag

SEQ ID NO: 355611 - RNA, 19 nt, Artificial Sequence
  Description of Artificial Sequence: Synthetic oligonucleotide
  Sense Strand Starting at position 470 of SEQ ID NO: 315664
agcauugaaugggugaaau

SEQ ID NO: 355612 - RNA, 19 nt, Artificial Sequence
  Description of Artificial Sequence: Synthetic oligonucleotide
  Antisense Strand to SEQ ID NO: 355611
auuucacccauucaaugcu

SEQ ID NO: 355613 - RNA, 19 nt, Artificial Sequence
  Description of Artificial Sequence: Synthetic oligonucleotide
  Sense Strand Starting at position 470 of SEQ ID NO: 315684
uguacauauccaggaggau

SEQ ID NO: 355614 - RNA, 19 nt, Artificial Sequence
  Description of Artificial Sequence: Synthetic oligonucleotide
  Antisense Strand to SEQ ID NO: 355613
auccuccuggauauguaca

SEQ ID NO: 355615 - RNA, 19 nt, Artificial Sequence
  Description of Artificial Sequence: Synthetic oligonucleotide
  Sense Strand Starting at position 470 of SEQ ID NO: 315793
ugguucuuucugcaaauac

SEQ ID NO: 355616 - RNA, 19 nt, Artificial Sequence
  Description of Artificial Sequence: Synthetic oligonucleotide
  Antisense Strand to SEQ ID NO: 355615
guauuugcagaaagaacca

SEQ ID NO: 355617 - RNA, 19 nt, Artificial Sequence
  Description of Artificial Sequence: Synthetic oligonucleotide
  Sense Strand Starting at position 470 of SEQ ID NO: 315862
agcugaaauggaugugaca

SEQ ID NO: 355618 - RNA, 19 nt, Artificial Sequence
  Description of Artificial Sequence: Synthetic oligonucleotide
  Antisense Strand to SEQ ID NO: 355617
ugucacauccauuucagcu

SEQ ID NO: 355619 - RNA, 19 nt, Artificial Sequence
  Description of Artificial Sequence: Synthetic oligonucleotide
  Sense Strand Starting at position 470 of SEQ ID NO: 315967
uggcucauaguccaucaau

SEQ ID NO: 355620 - RNA, 19 nt, Artificial Sequence
  Description of Artificial Sequence: Synthetic oligonucleotide
  Antisense Strand to SEQ ID NO: 355619
auugauggacuaugagcca

SEQ ID NO: 355621 - RNA, 19 nt, Artificial Sequence
  Description of Artificial Sequence: Synthetic oligonucleotide
  Sense Strand Starting at position 470 of SEQ ID NO: 316158
aaagaaguucguuagcaaa

SEQ ID NO: 355622 - RNA, 19 nt, Artificial Sequence
  Description of Artificial Sequence: Synthetic oligonucleotide
  Antisense Strand to SEQ ID NO: 355621
uuugcuaacgaacuucuuu

SEQ ID NO: 355623 - RNA, 19 nt, Artificial Sequence
  Description of Artificial Sequence: Synthetic oligonucleotide
  Sense Strand Starting at position 470 of SEQ ID NO: 316261
uguguucugauccagugaa

SEQ ID NO: 355624 - RNA, 19 nt, Artificial Sequence
  Description of Artificial Sequence: Synthetic oligonucleotide
  Antisense Strand to SEQ ID NO: 355623
uucacuggaucagaacaca

SEQ ID NO: 355625 - RNA, 19 nt, Artificial Sequence
  Description of Artificial Sequence: Synthetic oligonucleotide
  Sense Strand Starting at position 470 of SEQ ID NO: 316473
ggcuucuuuggacauuaac

SEQ ID NO: 355626 - RNA, 19 nt, Artificial Sequence
  Description of Artificial Sequence: Synthetic oligonucleotide
  Antisense Strand to SEQ ID NO: 355625
guuaauguccaaagaagcc

SEQ ID NO: 355627 - RNA, 19 nt, Artificial Sequence
  Description of Artificial Sequence: Synthetic oligonucleotide
  Sense Strand Starting at position 470 of SEQ ID NO: 316562
uaauguucucgguaaauua

SEQ ID NO: 355628 - RNA, 19 nt, Artificial Sequence
  Description of Artificial Sequence: Synthetic oligonucleotide
  Antisense Strand to SEQ ID NO: 355627
uaauuuaccgagaacauua

SEQ ID NO: 355629 - RNA, 19 nt, Artificial Sequence
  Description of Artificial Sequence: Synthetic oligonucleotide
  Sense Strand Starting at position 470 of SEQ ID NO: 316694
agacucuuucccugagguu

SEQ ID NO: 355630 - RNA, 19 nt, Artificial Sequence
  Description of Artificial Sequence: Synthetic oligonucleotide
  Antisense Strand to SEQ ID NO: 355629
aaccucagggaaagagucu

SEQ ID NO: 355631 - RNA, 19 nt, Artificial Sequence
  Description of Artificial Sequence: Synthetic oligonucleotide
  Sense Strand Starting at position 470 of SEQ ID NO: 316695
gacucuuucccugagguuu

SEQ ID NO: 355632 - RNA, 19 nt, Artificial Sequence
  Description of Artificial Sequence: Synthetic oligonucleotide
  Antisense Strand to SEQ ID NO: 355631
aaaccucagggaaagaguc

SEQ ID NO: 355633 - RNA, 19 nt, Artificial Sequence
  Description of Artificial Sequence: Synthetic oligonucleotide
  Sense Strand Starting at position 470 of SEQ ID NO: 316757
ugcaauugauaccugagaa

SEQ ID NO: 355634 - RNA, 19 nt, Artificial Sequence
  Description of Artificial Sequence: Synthetic oligonucleotide
  Antisense Strand to SEQ ID NO: 355633
uucucagguaucaauugca

SEQ ID NO: 355635 - RNA, 19 nt, Artificial Sequence
  Description of Artificial Sequence: Synthetic oligonucleotide
  Sense Strand Starting at position 470 of SEQ ID NO: 317066
ggagaaaucuugcuccgaa

SEQ ID NO: 355636 - RNA, 19 nt, Artificial Sequence
  Description of Artificial Sequence: Synthetic oligonucleotide
  Antisense Strand to SEQ ID NO: 355635
uucggagcaagauuucucc

SEQ ID NO: 355637 - RNA, 19 nt, Artificial Sequence
  Description of Artificial Sequence: Synthetic oligonucleotide
  Sense Strand Starting at position 470 of SEQ ID NO: 317067
gagaaaucuugcuccgaag

SEQ ID NO: 355638 - RNA, 19 nt, Artificial Sequence
  Description of Artificial Sequence: Synthetic oligonucleotide
  Antisense Strand to SEQ ID NO: 355637
cuucggagcaagauuucuc

SEQ ID NO: 355639 - RNA, 19 nt, Artificial Sequence
  Description of Artificial Sequence: Synthetic oligonucleotide
  Sense Strand Starting at position 470 of SEQ ID NO: 317170
accaucuugcaguggaaga

SEQ ID NO: 355640 - RNA, 19 nt, Artificial Sequence
  Description of Artificial Sequence: Synthetic oligonucleotide
  Antisense Strand to SEQ ID NO: 355639
ucuuccacugcaagauggu

SEQ ID NO: 355641 - RNA, 19 nt, Artificial Sequence
  Description of Artificial Sequence: Synthetic oligonucleotide
  Sense Strand Starting at position 470 of SEQ ID NO: 317171
ccaucuugcaguggaagaa

SEQ ID NO: 355642 - RNA, 19 nt, Artificial Sequence
  Description of Artificial Sequence: Synthetic oligonucleotide
  Antisense Strand to SEQ ID NO: 355641
uucuuccacugcaagaugg

SEQ ID NO: 355643 - RNA, 19 nt, Artificial Sequence
  Description of Artificial Sequence: Synthetic oligonucleotide
  Sense Strand Starting at position 470 of SEQ ID NO: 317235
gggagcuuuaaaugagacu

SEQ ID NO: 355644 - RNA, 19 nt, Artificial Sequence
  Description of Artificial Sequence: Synthetic oligonucleotide
  Antisense Strand to SEQ ID NO: 355643
agucucauuuaaagcuccc

SEQ ID NO: 355645 - RNA, 19 nt, Artificial Sequence
  Description of Artificial Sequence: Synthetic oligonucleotide
  Sense Strand Starting at position 470 of SEQ ID NO: 317771
guuaguaugcuuccugugu

SEQ ID NO: 355646 - RNA, 19 nt, Artificial Sequence
  Description of Artificial Sequence: Synthetic oligonucleotide
  Antisense Strand to SEQ ID NO: 355645
acacaggaagcauacuaac

SEQ ID NO: 355647 - RNA, 19 nt, Artificial Sequence
  Description of Artificial Sequence: Synthetic oligonucleotide
  Sense Strand Starting at position 470 of SEQ ID NO: 317804
acgcgauaacaauauuaac

SEQ ID NO: 355648 - RNA, 19 nt, Artificial Sequence
  Description of Artificial Sequence: Synthetic oligonucleotide
  Antisense Strand to SEQ ID NO: 355647
guuaauauuguuaucgcgu

SEQ ID NO: 355649 - RNA, 19 nt, Artificial Sequence
  Description of Artificial Sequence: Synthetic oligonucleotide
  Sense Strand Starting at position 470 of SEQ ID NO: 317888
uucugaaaugaguguuaaa

SEQ ID NO: 355650 - RNA, 19 nt, Artificial Sequence
  Description of Artificial Sequence: Synthetic oligonucleotide
  Antisense Strand to SEQ ID NO: 355649
uuuaacacucauuucagaa

SEQ ID NO: 355651 - RNA, 19 nt, Artificial Sequence
  Description of Artificial Sequence: Synthetic oligonucleotide
  Sense Strand Starting at position 470 of SEQ ID NO: 317897
gaguguuaaauauggaggu

SEQ ID NO: 355652 - RNA, 19 nt, Artificial Sequence
  Description of Artificial Sequence: Synthetic oligonucleotide
  Antisense Strand to SEQ ID NO: 355651
accuccauauuuaacacuc

SEQ ID NO: 355653 - RNA, 19 nt, Artificial Sequence
  Description of Artificial Sequence: Synthetic oligonucleotide
  Sense Strand Starting at position 470 of SEQ ID NO: 317899
guguuaaauauggagguga

SEQ ID NO: 355654 - RNA, 19 nt, Artificial Sequence
  Description of Artificial Sequence: Synthetic oligonucleotide
  Antisense Strand to SEQ ID NO: 355653
ucaccuccauauuuaacac

SEQ ID NO: 355655 - RNA, 19 nt, Artificial Sequence
  Description of Artificial Sequence: Synthetic oligonucleotide
  Sense Strand Starting at position 470 of SEQ ID NO: 317901
guuaaauauggaggugaua

SEQ ID NO: 355656 - RNA, 19 nt, Artificial Sequence
  Description of Artificial Sequence: Synthetic oligonucleotide
  Antisense Strand to SEQ ID NO: 355655
uaucaccuccauauuuaac

SEQ ID NO: 355657 - RNA, 19 nt, Artificial Sequence
  Description of Artificial Sequence: Synthetic oligonucleotide
  Sense Strand Starting at position 470 of SEQ ID NO: 318015
guaauaagugcucaacaaa

SEQ ID NO: 355658 - RNA, 19 nt, Artificial Sequence
  Description of Artificial Sequence: Synthetic oligonucleotide
  Antisense Strand to SEQ ID NO: 355657
uuuguugagcacuuauuac

SEQ ID NO: 355659 - RNA, 19 nt, Artificial Sequence
  Description of Artificial Sequence: Synthetic oligonucleotide
  Sense Strand Starting at position 470 of SEQ ID NO: 318058
uuacaaauuucggaaucca

SEQ ID NO: 355660 - RNA, 19 nt, Artificial Sequence
  Description of Artificial Sequence: Synthetic oligonucleotide
  Antisense Strand to SEQ ID NO: 355659
uggauuccgaaauuuguaa

SEQ ID NO: 355661 - RNA, 19 nt, Artificial Sequence
  Description of Artificial Sequence: Synthetic oligonucleotide
  Sense Strand Starting at position 470 of SEQ ID NO: 318328
acauuaacccugggaggua

SEQ ID NO: 355662 - RNA, 19 nt, Artificial Sequence
  Description of Artificial Sequence: Synthetic oligonucleotide
  Antisense Strand to SEQ ID NO: 355661
uaccucccaggguuaaugu

SEQ ID NO: 355663 - RNA, 19 nt, Artificial Sequence
  Description of Artificial Sequence: Synthetic oligonucleotide
  Sense Strand Starting at position 470 of SEQ ID NO: 318340
ggagguagguacucuuauu

SEQ ID NO: 355664 - RNA, 19 nt, Artificial Sequence
  Description of Artificial Sequence: Synthetic oligonucleotide
  Antisense Strand to SEQ ID NO: 355663
aauaagaguaccuaccucc

SEQ ID NO: 355665 - RNA, 19 nt, Artificial Sequence
  Description of Artificial Sequence: Synthetic oligonucleotide
  Sense Strand Starting at position 470 of SEQ ID NO: 318363
gguauaacagguugacuga

SEQ ID NO: 355666 - RNA, 19 nt, Artificial Sequence
  Description of Artificial Sequence: Synthetic oligonucleotide
  Antisense Strand to SEQ ID NO: 355665
ucagucaaccuguuauacc

SEQ ID NO: 355667 - RNA, 19 nt, Artificial Sequence
  Description of Artificial Sequence: Synthetic oligonucleotide
  Sense Strand Starting at position 470 of SEQ ID NO: 318540
uuauguaaugguuacucuu

SEQ ID NO: 355668 - RNA, 19 nt, Artificial Sequence
  Description of Artificial Sequence: Synthetic oligonucleotide
  Antisense Strand to SEQ ID NO: 355667
aagaguaaccauuacauaa

SEQ ID NO: 355669 - RNA, 19 nt, Artificial Sequence
  Description of Artificial Sequence: Synthetic oligonucleotide
  Sense Strand Starting at position 470 of SEQ ID NO: 318881
aucuauccugucuauggua

SEQ ID NO: 355670 - RNA, 19 nt, Artificial Sequence
  Description of Artificial Sequence: Synthetic oligonucleotide
  Antisense Strand to SEQ ID NO: 355669
uaccauagacaggauagau

SEQ ID NO: 355671 - RNA, 19 nt, Artificial Sequence
  Description of Artificial Sequence: Synthetic oligonucleotide
  Sense Strand Starting at position 470 of SEQ ID NO: 319065
acagcagauacguauuaag

SEQ ID NO: 355672 - RNA, 19 nt, Artificial Sequence
  Description of Artificial Sequence: Synthetic oligonucleotide
  Antisense Strand to SEQ ID NO: 355671
cuuaauacguaucugcugu

SEQ ID NO: 355673 - RNA, 19 nt, Artificial Sequence
  Description of Artificial Sequence: Synthetic oligonucleotide
  Sense Strand Starting at position 470 of SEQ ID NO: 319076
guauuaagugcucuguguc

SEQ ID NO: 355674 - RNA, 19 nt, Artificial Sequence
  Description of Artificial Sequence: Synthetic oligonucleotide
  Antisense Strand to SEQ ID NO: 355673
gacacagagcacuuaauac

SEQ ID NO: 355675 - RNA, 19 nt, Artificial Sequence
  Description of Artificial Sequence: Synthetic oligonucleotide
  Sense Strand Starting at position 470 of SEQ ID NO: 319083
gugcucuguguccaaauuu

SEQ ID NO: 355676 - RNA, 19 nt, Artificial Sequence
  Description of Artificial Sequence: Synthetic oligonucleotide
  Antisense Strand to SEQ ID NO: 355675
aaauuuggacacagagcac

SEQ ID NO: 355677 - RNA, 19 nt, Artificial Sequence
  Description of Artificial Sequence: Synthetic oligonucleotide
  Sense Strand Starting at position 471 of SEQ ID NO: 315407
uccugagagcggugggaaa

SEQ ID NO: 355678 - RNA, 19 nt, Artificial Sequence
  Description of Artificial Sequence: Synthetic oligonucleotide
  Antisense Strand to SEQ ID NO: 355677
uuucccaccgcucucagga

SEQ ID NO: 355679 - RNA, 19 nt, Artificial Sequence
  Description of Artificial Sequence: Synthetic oligonucleotide
  Sense Strand Starting at position 471 of SEQ ID NO: 315436
ggccacuugucucccaaga

SEQ ID NO: 355680 - RNA, 19 nt, Artificial Sequence
  Description of Artificial Sequence: Synthetic oligonucleotide
  Antisense Strand to SEQ ID NO: 355679
ucuugggagacaaguggcc

SEQ ID NO: 355681 - RNA, 19 nt, Artificial Sequence
  Description of Artificial Sequence: Synthetic oligonucleotide
  Sense Strand Starting at position 471 of SEQ ID NO: 315539
gcugcuucugccucaguga

SEQ ID NO: 355682 - RNA, 19 nt, Artificial Sequence
  Description of Artificial Sequence: Synthetic oligonucleotide
  Antisense Strand to SEQ ID NO: 355681
ucacugaggcagaagcagc

SEQ ID NO: 355683 - RNA, 19 nt, Artificial Sequence
  Description of Artificial Sequence: Synthetic oligonucleotide
  Sense Strand Starting at position 471 of SEQ ID NO: 315569
ggcacaugccagugaggaa

SEQ ID NO: 355684 - RNA, 19 nt, Artificial Sequence
  Description of Artificial Sequence: Synthetic oligonucleotide
  Antisense Strand to SEQ ID NO: 355683
uuccucacuggcaugugcc

SEQ ID NO: 355685 - RNA, 19 nt, Artificial Sequence
  Description of Artificial Sequence: Synthetic oligonucleotide
  Sense Strand Starting at position 471 of SEQ ID NO: 315694
cuguaacuccauggcauau

SEQ ID NO: 355686 - RNA, 19 nt, Artificial Sequence
  Description of Artificial Sequence: Synthetic oligonucleotide
  Antisense Strand to SEQ ID NO: 355685
auaugccauggaguuacag

SEQ ID NO: 355687 - RNA, 19 nt, Artificial Sequence
  Description of Artificial Sequence: Synthetic oligonucleotide
  Sense Strand Starting at position 471 of SEQ ID NO: 315889
uguacaugccugcguugau

SEQ ID NO: 355688 - RNA, 19 nt, Artificial Sequence
  Description of Artificial Sequence: Synthetic oligonucleotide
  Antisense Strand to SEQ ID NO: 355687
aucaacgcaggcauguaca

SEQ ID NO: 355689 - RNA, 19 nt, Artificial Sequence
  Description of Artificial Sequence: Synthetic oligonucleotide
  Sense Strand Starting at position 471 of SEQ ID NO: 315903
uugaucuuauuggacacaa

SEQ ID NO: 355690 - RNA, 19 nt, Artificial Sequence
  Description of Artificial Sequence: Synthetic oligonucleotide
  Antisense Strand to SEQ ID NO: 355689
uuguguccaauaagaucaa

SEQ ID NO: 355691 - RNA, 19 nt, Artificial Sequence
  Description of Artificial Sequence: Synthetic oligonucleotide
  Sense Strand Starting at position 471 of SEQ ID NO: 316003
ccaccuuggucaccugaau

SEQ ID NO: 355692 - RNA, 19 nt, Artificial Sequence
  Description of Artificial Sequence: Synthetic oligonucleotide
  Antisense Strand to SEQ ID NO: 355691
auucaggugaccaaggugg

SEQ ID NO: 355693 - RNA, 19 nt, Artificial Sequence
  Description of Artificial Sequence: Synthetic oligonucleotide
  Sense Strand Starting at position 471 of SEQ ID NO: 316040
gaccuaguccaguguuccu

SEQ ID NO: 355694 - RNA, 19 nt, Artificial Sequence
  Description of Artificial Sequence: Synthetic oligonucleotide
  Antisense Strand to SEQ ID NO: 355693
aggaacacuggacuagguc

SEQ ID NO: 355695 - RNA, 19 nt, Artificial Sequence
  Description of Artificial Sequence: Synthetic oligonucleotide
  Sense Strand Starting at position 471 of SEQ ID NO: 316049
caguguuccuaagccuuga

SEQ ID NO: 355696 - RNA, 19 nt, Artificial Sequence
  Description of Artificial Sequence: Synthetic oligonucleotide
  Antisense Strand to SEQ ID NO: 355695
ucaaggcuuaggaacacug

SEQ ID NO: 355697 - RNA, 19 nt, Artificial Sequence
  Description of Artificial Sequence: Synthetic oligonucleotide
  Sense Strand Starting at position 471 of SEQ ID NO: 316053
guuccuaagccuugauaca

SEQ ID NO: 355698 - RNA, 19 nt, Artificial Sequence
  Description of Artificial Sequence: Synthetic oligonucleotide
  Antisense Strand to SEQ ID NO: 355697
uguaucaaggcuuaggaac

SEQ ID NO: 355699 - RNA, 19 nt, Artificial Sequence
  Description of Artificial Sequence: Synthetic oligonucleotide
  Sense Strand Starting at position 471 of SEQ ID NO: 316077
cguuccagaucucaagaga

SEQ ID NO: 355700 - RNA, 19 nt, Artificial Sequence
  Description of Artificial Sequence: Synthetic oligonucleotide
  Antisense Strand to SEQ ID NO: 355699
ucucuugagaucuggaacg

SEQ ID NO: 355701 - RNA, 19 nt, Artificial Sequence
  Description of Artificial Sequence: Synthetic oligonucleotide
  Sense Strand Starting at position 471 of SEQ ID NO: 316125
ugcacagcucuguauccau

SEQ ID NO: 355702 - RNA, 19 nt, Artificial Sequence
  Description of Artificial Sequence: Synthetic oligonucleotide
  Antisense Strand to SEQ ID NO: 355701
auggauacagagcugugca

SEQ ID NO: 355703 - RNA, 19 nt, Artificial Sequence
  Description of Artificial Sequence: Synthetic oligonucleotide
  Sense Strand Starting at position 471 of SEQ ID NO: 316194
gggugaaagugucaagaga

SEQ ID NO: 355704 - RNA, 19 nt, Artificial Sequence
  Description of Artificial Sequence: Synthetic oligonucleotide
  Antisense Strand to SEQ ID NO: 355703
ucucuugacacuuucaccc

SEQ ID NO: 355705 - RNA, 19 nt, Artificial Sequence
  Description of Artificial Sequence: Synthetic oligonucleotide
  Sense Strand Starting at position 471 of SEQ ID NO: 316295
cgcagaucacgucacuguu

SEQ ID NO: 355706 - RNA, 19 nt, Artificial Sequence
  Description of Artificial Sequence: Synthetic oligonucleotide
  Antisense Strand to SEQ ID NO: 355705
aacagugacgugaucugcg

SEQ ID NO: 355707 - RNA, 19 nt, Artificial Sequence
  Description of Artificial Sequence: Synthetic oligonucleotide
  Sense Strand Starting at position 471 of SEQ ID NO: 316307
cacuguugaggacgaagaa

SEQ ID NO: 355708 - RNA, 19 nt, Artificial Sequence
  Description of Artificial Sequence: Synthetic oligonucleotide
  Antisense Strand to SEQ ID NO: 355707
uucuucguccucaacagug

SEQ ID NO: 355709 - RNA, 19 nt, Artificial Sequence
  Description of Artificial Sequence: Synthetic oligonucleotide
  Sense Strand Starting at position 471 of SEQ ID NO: 316330
ucugcagucucagagagua

SEQ ID NO: 355710 - RNA, 19 nt, Artificial Sequence
  Description of Artificial Sequence: Synthetic oligonucleotide
  Antisense Strand to SEQ ID NO: 355709
uacucucugagacugcaga

SEQ ID NO: 355711 - RNA, 19 nt, Artificial Sequence
  Description of Artificial Sequence: Synthetic oligonucleotide
  Sense Strand Starting at position 471 of SEQ ID NO: 316757
cgggcucagucagaaggua

SEQ ID NO: 355712 - RNA, 19 nt, Artificial Sequence
  Description of Artificial Sequence: Synthetic oligonucleotide
  Antisense Strand to SEQ ID NO: 355711
uaccuucugacugagcccg

SEQ ID NO: 355713 - RNA, 19 nt, Artificial Sequence
  Description of Artificial Sequence: Synthetic oligonucleotide
  Sense Strand Starting at position 471 of SEQ ID NO: 316882
gcagcaagaugggcuuauu

SEQ ID NO: 355714 - RNA, 19 nt, Artificial Sequence
  Description of Artificial Sequence: Synthetic oligonucleotide
  Antisense Strand to SEQ ID NO: 355713
aauaagcccaucuugcugc

SEQ ID NO: 355715 - RNA, 19 nt, Artificial Sequence
  Description of Artificial Sequence: Synthetic oligonucleotide
  Sense Strand Starting at position 471 of SEQ ID NO: 316885
gcaagaugggcuuauugca

SEQ ID NO: 355716 - RNA, 19 nt, Artificial Sequence
  Description of Artificial Sequence: Synthetic oligonucleotide
  Antisense Strand to SEQ ID NO: 355715
ugcaauaagcccaucuugc

SEQ ID NO: 355717 - RNA, 19 nt, Artificial Sequence
  Description of Artificial Sequence: Synthetic oligonucleotide
  Sense Strand Starting at position 471 of SEQ ID NO: 317557
cguuucuagcggcuuuauu

SEQ ID NO: 355718 - RNA, 19 nt, Artificial Sequence
  Description of Artificial Sequence: Synthetic oligonucleotide
  Antisense Strand to SEQ ID NO: 355717
aauaaagccgcuagaaacg

SEQ ID NO: 355719 - RNA, 19 nt, Artificial Sequence
  Description of Artificial Sequence: Synthetic oligonucleotide
  Sense Strand Starting at position 471 of SEQ ID NO: 317819
uucccaggguucuccauua

SEQ ID NO: 355720 - RNA, 19 nt, Artificial Sequence
  Description of Artificial Sequence: Synthetic oligonucleotide
  Antisense Strand to SEQ ID NO: 355719
uaauggagaacccugggaa

SEQ ID NO: 355721 - RNA, 19 nt, Artificial Sequence
  Description of Artificial Sequence: Synthetic oligonucleotide
  Sense Strand Starting at position 471 of SEQ ID NO: 317885
auuguacagcuuuaaaguu

SEQ ID NO: 355722 - RNA, 19 nt, Artificial Sequence
  Description of Artificial Sequence: Synthetic oligonucleotide
  Antisense Strand to SEQ ID NO: 355721
aacuuuaaagcuguacaau

SEQ ID NO: 355723 - RNA, 19 nt, Artificial Sequence
  Description of Artificial Sequence: Synthetic oligonucleotide
  Sense Strand Starting at position 471 of SEQ ID NO: 317908
gcagucugcaucuagggaa

SEQ ID NO: 355724 - RNA, 19 nt, Artificial Sequence
  Description of Artificial Sequence: Synthetic oligonucleotide
  Antisense Strand to SEQ ID NO: 355723
uucccuagaugcagacugc

SEQ ID NO: 355725 - RNA, 19 nt, Artificial Sequence
  Description of Artificial Sequence: Synthetic oligonucleotide
  Sense Strand Starting at position 471 of SEQ ID NO: 317927
cgugcauguggucaggagu

SEQ ID NO: 355726 - RNA, 19 nt, Artificial Sequence
  Description of Artificial Sequence: Synthetic oligonucleotide
  Antisense Strand to SEQ ID NO: 355725
acuccugaccacaugcacg

SEQ ID NO: 355727 - RNA, 19 nt, Artificial Sequence
  Description of Artificial Sequence: Synthetic oligonucleotide
  Sense Strand Starting at position 471 of SEQ ID NO: 318186
ugcacuuuguucccaaguu

SEQ ID NO: 355728 - RNA, 19 nt, Artificial Sequence
  Description of Artificial Sequence: Synthetic oligonucleotide
  Antisense Strand to SEQ ID NO: 355727
aacuugggaacaaagugca

SEQ ID NO: 355729 - RNA, 19 nt, Artificial Sequence
  Description of Artificial Sequence: Synthetic oligonucleotide
  Sense Strand Starting at position 471 of SEQ ID NO: 318434
gcagcuuugcucgcuguga

SEQ ID NO: 355730 - RNA, 19 nt, Artificial Sequence
  Description of Artificial Sequence: Synthetic oligonucleotide
  Antisense Strand to SEQ ID NO: 355729
ucacagcgagcaaagcugc

SEQ ID NO: 355731 - RNA, 19 nt, Artificial Sequence
  Description of Artificial Sequence: Synthetic oligonucleotide
  Sense Strand Starting at position 471 of SEQ ID NO: 318641
gacuguaauuugugaccag

SEQ ID NO: 355732 - RNA, 19 nt, Artificial Sequence
  Description of Artificial Sequence: Synthetic oligonucleotide
  Antisense Strand to SEQ ID NO: 355731
cuggucacaaauuacaguc

SEQ ID NO: 355733 - RNA, 19 nt, Artificial Sequence
  Description of Artificial Sequence: Synthetic oligonucleotide
  Sense Strand Starting at position 471 of SEQ ID NO: 318642
acuguaauuugugaccaga

SEQ ID NO: 355734 - RNA, 19 nt, Artificial Sequence
  Description of Artificial Sequence: Synthetic oligonucleotide
  Antisense Strand to SEQ ID NO: 355733
ucuggucacaaauuacagu

SEQ ID NO: 355735 - RNA, 19 nt, Artificial Sequence
  Description of Artificial Sequence: Synthetic oligonucleotide
  Sense Strand Starting at position 471 of SEQ ID NO: 318764
gaggcugcaucuuuaagga

SEQ ID NO: 355736 - RNA, 19 nt, Artificial Sequence
  Description of Artificial Sequence: Synthetic oligonucleotide
  Antisense Strand to SEQ ID NO: 355735
uccuuaaagaugcagccuc

SEQ ID NO: 355737 - RNA, 19 nt, Artificial Sequence
  Description of Artificial Sequence: Synthetic oligonucleotide
  Sense Strand Starting at position 471 of SEQ ID NO: 318856
ugccuaaagugacaaugaa

SEQ ID NO: 355738 - RNA, 19 nt, Artificial Sequence
  Description of Artificial Sequence: Synthetic oligonucleotide
  Antisense Strand to SEQ ID NO: 355737
uucauugucacuuuaggca

SEQ ID NO: 355739 - RNA, 19 nt, Artificial Sequence
  Description of Artificial Sequence: Synthetic oligonucleotide
  Sense Strand Starting at position 471 of SEQ ID NO: 318901
gggugcuaaccuuggcaau

SEQ ID NO: 355740 - RNA, 19 nt, Artificial Sequence
  Description of Artificial Sequence: Synthetic oligonucleotide
  Antisense Strand to SEQ ID NO: 355739
auugccaagguuagcaccc

SEQ ID NO: 355741 - RNA, 19 nt, Artificial Sequence
  Description of Artificial Sequence: Synthetic oligonucleotide
  Sense Strand Starting at position 471 of SEQ ID NO: 318920
ggcugaaaucggugucacc

SEQ ID NO: 355742 - RNA, 19 nt, Artificial Sequence
  Description of Artificial Sequence: Synthetic oligonucleotide
  Antisense Strand to SEQ ID NO: 355741
ggugacaccgauuucagcc

SEQ ID NO: 355743 - RNA, 19 nt, Artificial Sequence
  Description of Artificial Sequence: Synthetic oligonucleotide
  Sense Strand Starting at position 471 of SEQ ID NO: 318958
gcagcagaucugugccauu

SEQ ID NO: 355744 - RNA, 19 nt, Artificial Sequence
  Description of Artificial Sequence: Synthetic oligonucleotide
  Antisense Strand to SEQ ID NO: 355743
aauggcacagaucugcugc

SEQ ID NO: 355745 - RNA, 19 nt, Artificial Sequence
  Description of Artificial Sequence: Synthetic oligonucleotide
  Sense Strand Starting at position 471 of SEQ ID NO: 318961
gcagaucugugccauuaag

SEQ ID NO: 355746 - RNA, 19 nt, Artificial Sequence
  Description of Artificial Sequence: Synthetic oligonucleotide
  Antisense Strand to SEQ ID NO: 355745
cuuaauggcacagaucugc

SEQ ID NO: 355747 - RNA, 19 nt, Artificial Sequence
  Description of Artificial Sequence: Synthetic oligonucleotide
  Sense Strand Starting at position 471 of SEQ ID NO: 319054
gguugagggccauauucua

SEQ ID NO: 355748 - RNA, 19 nt, Artificial Sequence
  Description of Artificial Sequence: Synthetic oligonucleotide
  Antisense Strand to SEQ ID NO: 355747
uagaauauggcccucaacc

SEQ ID NO: 355749 - RNA, 19 nt, Artificial Sequence
  Description of Artificial Sequence: Synthetic oligonucleotide
  Sense Strand Starting at position 471 of SEQ ID NO: 319062
gccauauucuaggcccaca

SEQ ID NO: 355750 - RNA, 19 nt, Artificial Sequence
  Description of Artificial Sequence: Synthetic oligonucleotide
  Antisense Strand to SEQ ID NO: 355749
ugugggccuagaauauggc

SEQ ID NO: 355751 - RNA, 19 nt, Artificial Sequence
  Description of Artificial Sequence: Synthetic oligonucleotide
  Sense Strand Starting at position 471 of SEQ ID NO: 319080
agaaauggugcugggucaa

SEQ ID NO: 355752 - RNA, 19 nt, Artificial Sequence
  Description of Artificial Sequence: Synthetic oligonucleotide
  Antisense Strand to SEQ ID NO: 355751
uugacccagcaccauuucu

SEQ ID NO: 355753 - RNA, 19 nt, Artificial Sequence
  Description of Artificial Sequence: Synthetic oligonucleotide
  Sense Strand Starting at position 471 of SEQ ID NO: 319121
gcuaucaggucuuuauaaa

SEQ ID NO: 355754 - RNA, 19 nt, Artificial Sequence
  Description of Artificial Sequence: Synthetic oligonucleotide
  Antisense Strand to SEQ ID NO: 355753
uuuauaaagaccugauagc

SEQ ID NO: 355755 - RNA, 19 nt, Artificial Sequence
  Description of Artificial Sequence: Synthetic oligonucleotide
  Sense Strand Starting at position 471 of SEQ ID NO: 319193
aaguguucugcugaggaaa

SEQ ID NO: 355756 - RNA, 19 nt, Artificial Sequence
  Description of Artificial Sequence: Synthetic oligonucleotide
  Antisense Strand to SEQ ID NO: 355755
uuuccucagcagaacacuu

SEQ ID NO: 355757 - RNA, 19 nt, Artificial Sequence
  Description of Artificial Sequence: Synthetic oligonucleotide
  Sense Strand Starting at position 472 of SEQ ID NO: 315307
gaaucuuuccaaugaguug

SEQ ID NO: 355758 - RNA, 19 nt, Artificial Sequence
  Description of Artificial Sequence: Synthetic oligonucleotide
  Antisense Strand to SEQ ID NO: 355757
caacucauuggaaagauuc

SEQ ID NO: 355759 - RNA, 19 nt, Artificial Sequence
  Description of Artificial Sequence: Synthetic oligonucleotide
  Sense Strand Starting at position 472 of SEQ ID NO: 315310
ucuuuccaaugaguuguaa

SEQ ID NO: 355760 - RNA, 19 nt, Artificial Sequence
  Description of Artificial Sequence: Synthetic oligonucleotide
  Antisense Strand to SEQ ID NO: 355759
uuacaacucauuggaaaga

SEQ ID NO: 355761 - RNA, 19 nt, Artificial Sequence
  Description of Artificial Sequence: Synthetic oligonucleotide
  Sense Strand Starting at position 472 of SEQ ID NO: 315355
uugcaagucgacuaguaau

SEQ ID NO: 355762 - RNA, 19 nt, Artificial Sequence
  Description of Artificial Sequence: Synthetic oligonucleotide
  Antisense Strand to SEQ ID NO: 355761
auuacuagucgacuugcaa

SEQ ID NO: 355763 - RNA, 19 nt, Artificial Sequence
  Description of Artificial Sequence: Synthetic oligonucleotide
  Sense Strand Starting at position 472 of SEQ ID NO: 315361
gucgacuaguaaucgggaa

SEQ ID NO: 355764 - RNA, 19 nt, Artificial Sequence
  Description of Artificial Sequence: Synthetic oligonucleotide
  Antisense Strand to SEQ ID NO: 355763
uucccgauuacuagucgac

SEQ ID NO: 355765 - RNA, 19 nt, Artificial Sequence
  Description of Artificial Sequence: Synthetic oligonucleotide
  Sense Strand Starting at position 472 of SEQ ID NO: 315362
ucgacuaguaaucgggaaa

SEQ ID NO: 355766 - RNA, 19 nt, Artificial Sequence
  Description of Artificial Sequence: Synthetic oligonucleotide
  Antisense Strand to SEQ ID NO: 355765
uuucccgauuacuagucga

SEQ ID NO: 355767 - RNA, 19 nt, Artificial Sequence
  Description of Artificial Sequence: Synthetic oligonucleotide
  Sense Strand Starting at position 472 of SEQ ID NO: 315363
cgacuaguaaucgggaaag

SEQ ID NO: 355768 - RNA, 19 nt, Artificial Sequence
  Description of Artificial Sequence: Synthetic oligonucleotide
  Antisense Strand to SEQ ID NO: 355767
cuuucccgauuacuagucg

SEQ ID NO: 355769 - RNA, 19 nt, Artificial Sequence
  Description of Artificial Sequence: Synthetic oligonucleotide
  Sense Strand Starting at position 472 of SEQ ID NO: 315374
cgggaaagagcuggacaau

SEQ ID NO: 355770 - RNA, 19 nt, Artificial Sequence
  Description of Artificial Sequence: Synthetic oligonucleotide
  Antisense Strand to SEQ ID NO: 355769
auuguccagcucuuucccg

SEQ ID NO: 355771 - RNA, 19 nt, Artificial Sequence
  Description of Artificial Sequence: Synthetic oligonucleotide
  Sense Strand Starting at position 472 of SEQ ID NO: 315395
gguuuacauuugcuccuua

SEQ ID NO: 355772 - RNA, 19 nt, Artificial Sequence
  Description of Artificial Sequence: Synthetic oligonucleotide
  Antisense Strand to SEQ ID NO: 355771
uaaggagcaaauguaaacc

SEQ ID NO: 355773 - RNA, 19 nt, Artificial Sequence
  Description of Artificial Sequence: Synthetic oligonucleotide
  Sense Strand Starting at position 472 of SEQ ID NO: 315513
uuuacucauuguucgacaa

SEQ ID NO: 355774 - RNA, 19 nt, Artificial Sequence
  Description of Artificial Sequence: Synthetic oligonucleotide
  Antisense Strand to SEQ ID NO: 355773
uugucgaacaaugaguaaa

SEQ ID NO: 355775 - RNA, 19 nt, Artificial Sequence
  Description of Artificial Sequence: Synthetic oligonucleotide
  Sense Strand Starting at position 472 of SEQ ID NO: 315514
uuacucauuguucgacaaa

SEQ ID NO: 355776 - RNA, 19 nt, Artificial Sequence
  Description of Artificial Sequence: Synthetic oligonucleotide
  Antisense Strand to SEQ ID NO: 355775
uuugucgaacaaugaguaa

SEQ ID NO: 355777 - RNA, 19 nt, Artificial Sequence
  Description of Artificial Sequence: Synthetic oligonucleotide
  Sense Strand Starting at position 472 of SEQ ID NO: 315517
cucauuguucgacaaauac

SEQ ID NO: 355778 - RNA, 19 nt, Artificial Sequence
  Description of Artificial Sequence: Synthetic oligonucleotide
  Antisense Strand to SEQ ID NO: 355777
guauuugucgaacaaugag

SEQ ID NO: 355779 - RNA, 19 nt, Artificial Sequence
  Description of Artificial Sequence: Synthetic oligonucleotide
  Sense Strand Starting at position 472 of SEQ ID NO: 315541
gaaugauuaccgggugcua

SEQ ID NO: 355780 - RNA, 19 nt, Artificial Sequence
  Description of Artificial Sequence: Synthetic oligonucleotide
  Antisense Strand to SEQ ID NO: 355779
uagcacccgguaaucauuc

SEQ ID NO: 355781 - RNA, 19 nt, Artificial Sequence
  Description of Artificial Sequence: Synthetic oligonucleotide
  Sense Strand Starting at position 472 of SEQ ID NO: 315585
agaugugacccuugagcag

SEQ ID NO: 355782 - RNA, 19 nt, Artificial Sequence
  Description of Artificial Sequence: Synthetic oligonucleotide
  Antisense Strand to SEQ ID NO: 355781
cugcucaagggucacaucu

SEQ ID NO: 355783 - RNA, 19 nt, Artificial Sequence
  Description of Artificial Sequence: Synthetic oligonucleotide
  Sense Strand Starting at position 472 of SEQ ID NO: 315666
ccaaauccaccucgaagua

SEQ ID NO: 355784 - RNA, 19 nt, Artificial Sequence
  Description of Artificial Sequence: Synthetic oligonucleotide
  Antisense Strand to SEQ ID NO: 355783
uacuucgagguggauuugg

SEQ ID NO: 355785 - RNA, 19 nt, Artificial Sequence
  Description of Artificial Sequence: Synthetic oligonucleotide
  Sense Strand Starting at position 472 of SEQ ID NO: 315817
ugacuuagugaaggucaga

SEQ ID NO: 355786 - RNA, 19 nt, Artificial Sequence
  Description of Artificial Sequence: Synthetic oligonucleotide
  Antisense Strand to SEQ ID NO: 355785
ucugaccuucacuaaguca

SEQ ID NO: 355787 - RNA, 19 nt, Artificial Sequence
  Description of Artificial Sequence: Synthetic oligonucleotide
  Sense Strand Starting at position 472 of SEQ ID NO: 316160
cccuuuccucucugagaag

SEQ ID NO: 355788 - RNA, 19 nt, Artificial Sequence
  Description of Artificial Sequence: Synthetic oligonucleotide
  Antisense Strand to SEQ ID NO: 355787
cuucucagagaggaaaggg

SEQ ID NO: 355789 - RNA, 19 nt, Artificial Sequence
  Description of Artificial Sequence: Synthetic oligonucleotide
  Sense Strand Starting at position 472 of SEQ ID NO: 317428
gccgaauccgagcuaguuu

SEQ ID NO: 355790 - RNA, 19 nt, Artificial Sequence
  Description of Artificial Sequence: Synthetic oligonucleotide
  Antisense Strand to SEQ ID NO: 355789
aaacuagcucggauucggc

SEQ ID NO: 355791 - RNA, 19 nt, Artificial Sequence
  Description of Artificial Sequence: Synthetic oligonucleotide
  Sense Strand Starting at position 472 of SEQ ID NO: 317612
gccauaucucaaggauguc

SEQ ID NO: 355792 - RNA, 19 nt, Artificial Sequence
  Description of Artificial Sequence: Synthetic oligonucleotide
  Antisense Strand to SEQ ID NO: 355791
gacauccuugagauauggc

SEQ ID NO: 355793 - RNA, 19 nt, Artificial Sequence
  Description of Artificial Sequence: Synthetic oligonucleotide
  Sense Strand Starting at position 472 of SEQ ID NO: 317615
auaucucaaggaugucauu

SEQ ID NO: 355794 - RNA, 19 nt, Artificial Sequence
  Description of Artificial Sequence: Synthetic oligonucleotide
  Antisense Strand to SEQ ID NO: 355793
aaugacauccuugagauau

SEQ ID NO: 355795 - RNA, 19 nt, Artificial Sequence
  Description of Artificial Sequence: Synthetic oligonucleotide
  Sense Strand Starting at position 472 of SEQ ID NO: 317621
caaggaugucauuguagga

SEQ ID NO: 355796 - RNA, 19 nt, Artificial Sequence
  Description of Artificial Sequence: Synthetic oligonucleotide
  Antisense Strand to SEQ ID NO: 355795
uccuacaaugacauccuug

SEQ ID NO: 355797 - RNA, 19 nt, Artificial Sequence
  Description of Artificial Sequence: Synthetic oligonucleotide
  Sense Strand Starting at position 472 of SEQ ID NO: 317714
ggaguuugggagugguaau

SEQ ID NO: 355798 - RNA, 19 nt, Artificial Sequence
  Description of Artificial Sequence: Synthetic oligonucleotide
  Antisense Strand to SEQ ID NO: 355797
auuaccacucccaaacucc

SEQ ID NO: 355799 - RNA, 19 nt, Artificial Sequence
  Description of Artificial Sequence: Synthetic oligonucleotide
  Sense Strand Starting at position 472 of SEQ ID NO: 317715
gaguuugggagugguaauc

SEQ ID NO: 355800 - RNA, 19 nt, Artificial Sequence
  Description of Artificial Sequence: Synthetic oligonucleotide
  Antisense Strand to SEQ ID NO: 355799
gauuaccacucccaaacuc

SEQ ID NO: 355801 - RNA, 19 nt, Artificial Sequence
  Description of Artificial Sequence: Synthetic oligonucleotide
  Sense Strand Starting at position 472 of SEQ ID NO: 317887
agaggccuaaaucgagauu

SEQ ID NO: 355802 - RNA, 19 nt, Artificial Sequence
  Description of Artificial Sequence: Synthetic oligonucleotide
  Antisense Strand to SEQ ID NO: 355801
aaucucgauuuaggccucu

SEQ ID NO: 355803 - RNA, 19 nt, Artificial Sequence
  Description of Artificial Sequence: Synthetic oligonucleotide
  Sense Strand Starting at position 472 of SEQ ID NO: 318068
uaaccaaucccgugaaagu

SEQ ID NO: 355804 - RNA, 19 nt, Artificial Sequence
  Description of Artificial Sequence: Synthetic oligonucleotide
  Antisense Strand to SEQ ID NO: 355803
acuuucacgggauugguua

SEQ ID NO: 355805 - RNA, 19 nt, Artificial Sequence
  Description of Artificial Sequence: Synthetic oligonucleotide
  Sense Strand Starting at position 472 of SEQ ID NO: 318069
aaccaaucccgugaaagua

SEQ ID NO: 355806 - RNA, 19 nt, Artificial Sequence
  Description of Artificial Sequence: Synthetic oligonucleotide
  Antisense Strand to SEQ ID NO: 355805
uacuuucacgggauugguu

SEQ ID NO: 355807 - RNA, 19 nt, Artificial Sequence
  Description of Artificial Sequence: Synthetic oligonucleotide
  Sense Strand Starting at position 472 of SEQ ID NO: 318084
aguaguaagguaggauuga

SEQ ID NO: 355808 - RNA, 19 nt, Artificial Sequence
  Description of Artificial Sequence: Synthetic oligonucleotide
  Antisense Strand to SEQ ID NO: 355807
ucaauccuaccuuacuacu

SEQ ID NO: 355809 - RNA, 19 nt, Artificial Sequence
  Description of Artificial Sequence: Synthetic oligonucleotide
  Sense Strand Starting at position 472 of SEQ ID NO: 318094
uaggauugauguucuuauc

SEQ ID NO: 355810 - RNA, 19 nt, Artificial Sequence
  Description of Artificial Sequence: Synthetic oligonucleotide
  Antisense Strand to SEQ ID NO: 355809
gauaagaacaucaauccua

SEQ ID NO: 355811 - RNA, 19 nt, Artificial Sequence
  Description of Artificial Sequence: Synthetic oligonucleotide
  Sense Strand Starting at position 472 of SEQ ID NO: 318136
ggcuuagugagauaaugug

SEQ ID NO: 355812 - RNA, 19 nt, Artificial Sequence
  Description of Artificial Sequence: Synthetic oligonucleotide
  Antisense Strand to SEQ ID NO: 355811
cacauuaucucacuaagcc

SEQ ID NO: 355813 - RNA, 19 nt, Artificial Sequence
  Description of Artificial Sequence: Synthetic oligonucleotide
  Sense Strand Starting at position 472 of SEQ ID NO: 318201
guagacaguuuauuaguga

SEQ ID NO: 355814 - RNA, 19 nt, Artificial Sequence
  Description of Artificial Sequence: Synthetic oligonucleotide
  Antisense Strand to SEQ ID NO: 355813
ucacuaauaaacugucuac

SEQ ID NO: 355815 - RNA, 19 nt, Artificial Sequence
  Description of Artificial Sequence: Synthetic oligonucleotide
  Sense Strand Starting at position 472 of SEQ ID NO: 318204
gacaguuuauuagugaaau

SEQ ID NO: 355816 - RNA, 19 nt, Artificial Sequence
  Description of Artificial Sequence: Synthetic oligonucleotide
  Antisense Strand to SEQ ID NO: 355815
auuucacuaauaaacuguc

SEQ ID NO: 355817 - RNA, 19 nt, Artificial Sequence
  Description of Artificial Sequence: Synthetic oligonucleotide
  Sense Strand Starting at position 472 of SEQ ID NO: 318249
ccuagugggccugagacuu

SEQ ID NO: 355818 - RNA, 19 nt, Artificial Sequence
  Description of Artificial Sequence: Synthetic oligonucleotide
  Antisense Strand to SEQ ID NO: 355817
aagucucaggcccacuagg

SEQ ID NO: 355819 - RNA, 19 nt, Artificial Sequence
  Description of Artificial Sequence: Synthetic oligonucleotide
  Sense Strand Starting at position 472 of SEQ ID NO: 318255
gggccugagacuuaaguau

SEQ ID NO: 355820 - RNA, 19 nt, Artificial Sequence
  Description of Artificial Sequence: Synthetic oligonucleotide
  Antisense Strand to SEQ ID NO: 355819
auacuuaagucucaggccc

SEQ ID NO: 355821 - RNA, 19 nt, Artificial Sequence
  Description of Artificial Sequence: Synthetic oligonucleotide
  Sense Strand Starting at position 472 of SEQ ID NO: 318262
agacuuaaguauuucgcuu

SEQ ID NO: 355822 - RNA, 19 nt, Artificial Sequence
  Description of Artificial Sequence: Synthetic oligonucleotide
  Antisense Strand to SEQ ID NO: 355821
aagcgaaauacuuaagucu

SEQ ID NO: 355823 - RNA, 19 nt, Artificial Sequence
  Description of Artificial Sequence: Synthetic oligonucleotide
  Sense Strand Starting at position 472 of SEQ ID NO: 318266
uuaaguauuucgcuuaccu

SEQ ID NO: 355824 - RNA, 19 nt, Artificial Sequence
  Description of Artificial Sequence: Synthetic oligonucleotide
  Antisense Strand to SEQ ID NO: 355823
agguaagcgaaauacuuaa

SEQ ID NO: 355825 - RNA, 19 nt, Artificial Sequence
  Description of Artificial Sequence: Synthetic oligonucleotide
  Sense Strand Starting at position 472 of SEQ ID NO: 318430
uggaaugugaugugauaua

SEQ ID NO: 355826 - RNA, 19 nt, Artificial Sequence
  Description of Artificial Sequence: Synthetic oligonucleotide
  Antisense Strand to SEQ ID NO: 355825
uauaucacaucacauucca

SEQ ID NO: 355827 - RNA, 19 nt, Artificial Sequence
  Description of Artificial Sequence: Synthetic oligonucleotide
  Sense Strand Starting at position 472 of SEQ ID NO: 318451
ggcauuaaggauuggcuaa

SEQ ID NO: 355828 - RNA, 19 nt, Artificial Sequence
  Description of Artificial Sequence: Synthetic oligonucleotide
  Antisense Strand to SEQ ID NO: 355827
uuagccaauccuuaaugcc

SEQ ID NO: 355829 - RNA, 19 nt, Artificial Sequence
  Description of Artificial Sequence: Synthetic oligonucleotide
  Sense Strand Starting at position 472 of SEQ ID NO: 318453
cauuaaggauuggcuaagu

SEQ ID NO: 355830 - RNA, 19 nt, Artificial Sequence
  Description of Artificial Sequence: Synthetic oligonucleotide
  Antisense Strand to SEQ ID NO: 355829
acuuagccaauccuuaaug

SEQ ID NO: 355831 - RNA, 19 nt, Artificial Sequence
  Description of Artificial Sequence: Synthetic oligonucleotide
  Sense Strand Starting at position 472 of SEQ ID NO: 318832
gugcuuaauggcuaagaau

SEQ ID NO: 355832 - RNA, 19 nt, Artificial Sequence
  Description of Artificial Sequence: Synthetic oligonucleotide
  Antisense Strand to SEQ ID NO: 355831
auucuuagccauuaagcac

SEQ ID NO: 355833 - RNA, 19 nt, Artificial Sequence
  Description of Artificial Sequence: Synthetic oligonucleotide
  Sense Strand Starting at position 472 of SEQ ID NO: 319029
aggagcuuuaaguguugga

SEQ ID NO: 355834 - RNA, 19 nt, Artificial Sequence
  Description of Artificial Sequence: Synthetic oligonucleotide
  Antisense Strand to SEQ ID NO: 355833
uccaacacuuaaagcuccu

SEQ ID NO: 355835 - RNA, 19 nt, Artificial Sequence
  Description of Artificial Sequence: Synthetic oligonucleotide
  Sense Strand Starting at position 472 of SEQ ID NO: 319033
gcuuuaaguguuggauuuc

SEQ ID NO: 355836 - RNA, 19 nt, Artificial Sequence
  Description of Artificial Sequence: Synthetic oligonucleotide
  Antisense Strand to SEQ ID NO: 355835
gaaauccaacacuuaaagc

SEQ ID NO: 355837 - RNA, 19 nt, Artificial Sequence
  Description of Artificial Sequence: Synthetic oligonucleotide
  Sense Strand Starting at position 473 of SEQ ID NO: 315340
ccucuuaaauguuaagaga

SEQ ID NO: 355838 - RNA, 19 nt, Artificial Sequence
  Description of Artificial Sequence: Synthetic oligonucleotide
  Antisense Strand to SEQ ID NO: 355837
ucucuuaacauuuaagagg

SEQ ID NO: 355839 - RNA, 19 nt, Artificial Sequence
  Description of Artificial Sequence: Synthetic oligonucleotide
  Sense Strand Starting at position 473 of SEQ ID NO: 315343
cuuaaauguuaagagaaca

SEQ ID NO: 355840 - RNA, 19 nt, Artificial Sequence
  Description of Artificial Sequence: Synthetic oligonucleotide
  Antisense Strand to SEQ ID NO: 355839
uguucucuuaacauuuaag

SEQ ID NO: 355841 - RNA, 19 nt, Artificial Sequence
  Description of Artificial Sequence: Synthetic oligonucleotide
  Sense Strand Starting at position 473 of SEQ ID NO: 315479
gugacucaggcgggaagua

SEQ ID NO: 355842 - RNA, 19 nt, Artificial Sequence
  Description of Artificial Sequence: Synthetic oligonucleotide
  Antisense Strand to SEQ ID NO: 355841
uacuucccgccugagucac

SEQ ID NO: 355843 - RNA, 19 nt, Artificial Sequence
  Description of Artificial Sequence: Synthetic oligonucleotide
  Sense Strand Starting at position 473 of SEQ ID NO: 315634
gauggcaucuggguggaau

SEQ ID NO: 355844 - RNA, 19 nt, Artificial Sequence
  Description of Artificial Sequence: Synthetic oligonucleotide
  Antisense Strand to SEQ ID NO: 355843
auuccacccagaugccauc

SEQ ID NO: 355845 - RNA, 19 nt, Artificial Sequence
  Description of Artificial Sequence: Synthetic oligonucleotide
  Sense Strand Starting at position 473 of SEQ ID NO: 315788
uggcaagaggcuuaucugu

SEQ ID NO: 355846 - RNA, 19 nt, Artificial Sequence
  Description of Artificial Sequence: Synthetic oligonucleotide
  Antisense Strand to SEQ ID NO: 355845
acagauaagccucuugcca

SEQ ID NO: 355847 - RNA, 19 nt, Artificial Sequence
  Description of Artificial Sequence: Synthetic oligonucleotide
  Sense Strand Starting at position 473 of SEQ ID NO: 315790
gcaagaggcuuaucuguga

SEQ ID NO: 355848 - RNA, 19 nt, Artificial Sequence
  Description of Artificial Sequence: Synthetic oligonucleotide
  Antisense Strand to SEQ ID NO: 355847
ucacagauaagccucuugc

SEQ ID NO: 355849 - RNA, 19 nt, Artificial Sequence
  Description of Artificial Sequence: Synthetic oligonucleotide
  Sense Strand Starting at position 473 of SEQ ID NO: 315793
agaggcuuaucugugaguu

SEQ ID NO: 355850 - RNA, 19 nt, Artificial Sequence
  Description of Artificial Sequence: Synthetic oligonucleotide
  Antisense Strand to SEQ ID NO: 355849
aacucacagauaagccucu

SEQ ID NO: 355851 - RNA, 19 nt, Artificial Sequence
  Description of Artificial Sequence: Synthetic oligonucleotide
  Sense Strand Starting at position 473 of SEQ ID NO: 315794
gaggcuuaucugugaguuu

SEQ ID NO: 355852 - RNA, 19 nt, Artificial Sequence
  Description of Artificial Sequence: Synthetic oligonucleotide
  Antisense Strand to SEQ ID NO: 355851
aaacucacagauaagccuc

SEQ ID NO: 355853 - RNA, 19 nt, Artificial Sequence
  Description of Artificial Sequence: Synthetic oligonucleotide
  Sense Strand Starting at position 473 of SEQ ID NO: 316180
aguccagauuucugcaaag

SEQ ID NO: 355854 - RNA, 19 nt, Artificial Sequence
  Description of Artificial Sequence: Synthetic oligonucleotide
  Antisense Strand to SEQ ID NO: 355853
cuuugcagaaaucuggacu

SEQ ID NO: 355855 - RNA, 19 nt, Artificial Sequence
  Description of Artificial Sequence: Synthetic oligonucleotide
  Sense Strand Starting at position 473 of SEQ ID NO: 316222
aauagaagguggcaugaau

SEQ ID NO: 355856 - RNA, 19 nt, Artificial Sequence
  Description of Artificial Sequence: Synthetic oligonucleotide
  Antisense Strand to SEQ ID NO: 355855
auucaugccaccuucuauu

SEQ ID NO: 355857 - RNA, 19 nt, Artificial Sequence
  Description of Artificial Sequence: Synthetic oligonucleotide
  Sense Strand Starting at position 473 of SEQ ID NO: 316416
gcagguaggcaguaaucau

SEQ ID NO: 355858 - RNA, 19 nt, Artificial Sequence
  Description of Artificial Sequence: Synthetic oligonucleotide
  Antisense Strand to SEQ ID NO: 355857
augauuacugccuaccugc

SEQ ID NO: 355859 - RNA, 19 nt, Artificial Sequence
  Description of Artificial Sequence: Synthetic oligonucleotide
  Sense Strand Starting at position 473 of SEQ ID NO: 316425
caguaaucauagugaugug

SEQ ID NO: 355860 - RNA, 19 nt, Artificial Sequence
  Description of Artificial Sequence: Synthetic oligonucleotide
  Antisense Strand to SEQ ID NO: 355859
cacaucacuaugauuacug

SEQ ID NO: 355861 - RNA, 19 nt, Artificial Sequence
  Description of Artificial Sequence: Synthetic oligonucleotide
  Sense Strand Starting at position 473 of SEQ ID NO: 316457
gcugcucugcacuagaaca

SEQ ID NO: 355862 - RNA, 19 nt, Artificial Sequence
  Description of Artificial Sequence: Synthetic oligonucleotide
  Antisense Strand to SEQ ID NO: 355861
uguucuagugcagagcagc

SEQ ID NO: 355863 - RNA, 19 nt, Artificial Sequence
  Description of Artificial Sequence: Synthetic oligonucleotide
  Sense Strand Starting at position 473 of SEQ ID NO: 316600
ggucuugucacuugaugcu

SEQ ID NO: 355864 - RNA, 19 nt, Artificial Sequence
  Description of Artificial Sequence: Synthetic oligonucleotide
  Antisense Strand to SEQ ID NO: 355863
agcaucaagugacaagacc

SEQ ID NO: 355865 - RNA, 19 nt, Artificial Sequence
  Description of Artificial Sequence: Synthetic oligonucleotide
  Sense Strand Starting at position 473 of SEQ ID NO: 316682
aggcuuugaucugcuggga

SEQ ID NO: 355866 - RNA, 19 nt, Artificial Sequence
  Description of Artificial Sequence: Synthetic oligonucleotide
  Antisense Strand to SEQ ID NO: 355865
ucccagcagaucaaagccu

SEQ ID NO: 355867 - RNA, 19 nt, Artificial Sequence
  Description of Artificial Sequence: Synthetic oligonucleotide
  Sense Strand Starting at position 473 of SEQ ID NO: 316705
gggacuugcuacuauccuu

SEQ ID NO: 355868 - RNA, 19 nt, Artificial Sequence
  Description of Artificial Sequence: Synthetic oligonucleotide
  Antisense Strand to SEQ ID NO: 355867
aaggauaguagcaaguccc

SEQ ID NO: 355869 - RNA, 19 nt, Artificial Sequence
  Description of Artificial Sequence: Synthetic oligonucleotide
  Sense Strand Starting at position 473 of SEQ ID NO: 316842
cucugauccuuccugagau

SEQ ID NO: 355870 - RNA, 19 nt, Artificial Sequence
  Description of Artificial Sequence: Synthetic oligonucleotide
  Antisense Strand to SEQ ID NO: 355869
aucucaggaaggaucagag

SEQ ID NO: 355871 - RNA, 19 nt, Artificial Sequence
  Description of Artificial Sequence: Synthetic oligonucleotide
  Sense Strand Starting at position 473 of SEQ ID NO: 316843
ucugauccuuccugagauc

SEQ ID NO: 355872 - RNA, 19 nt, Artificial Sequence
  Description of Artificial Sequence: Synthetic oligonucleotide
  Antisense Strand to SEQ ID NO: 355871
gaucucaggaaggaucaga

SEQ ID NO: 355873 - RNA, 19 nt, Artificial Sequence
  Description of Artificial Sequence: Synthetic oligonucleotide
  Sense Strand Starting at position 473 of SEQ ID NO: 316925
cugucuccuucugagagau

SEQ ID NO: 355874 - RNA, 19 nt, Artificial Sequence
  Description of Artificial Sequence: Synthetic oligonucleotide
  Antisense Strand to SEQ ID NO: 355873
aucucucagaaggagacag

SEQ ID NO: 355875 - RNA, 19 nt, Artificial Sequence
  Description of Artificial Sequence: Synthetic oligonucleotide
  Sense Strand Starting at position 473 of SEQ ID NO: 316931
ccuucugagagauggguaa

SEQ ID NO: 355876 - RNA, 19 nt, Artificial Sequence
  Description of Artificial Sequence: Synthetic oligonucleotide
  Antisense Strand to SEQ ID NO: 355875
uuacccaucucucagaagg

SEQ ID NO: 355877 - RNA, 19 nt, Artificial Sequence
  Description of Artificial Sequence: Synthetic oligonucleotide
  Sense Strand Starting at position 473 of SEQ ID NO: 316938
agagauggguaaggauuaa

SEQ ID NO: 355878 - RNA, 19 nt, Artificial Sequence
  Description of Artificial Sequence: Synthetic oligonucleotide
  Antisense Strand to SEQ ID NO: 355877
uuaauccuuacccaucucu

SEQ ID NO: 355879 - RNA, 19 nt, Artificial Sequence
  Description of Artificial Sequence: Synthetic oligonucleotide
  Sense Strand Starting at position 473 of SEQ ID NO: 317469
cagagauucucagaagcag

SEQ ID NO: 355880 - RNA, 19 nt, Artificial Sequence
  Description of Artificial Sequence: Synthetic oligonucleotide
  Antisense Strand to SEQ ID NO: 355879
cugcuucugagaaucucug

SEQ ID NO: 355881 - RNA, 19 nt, Artificial Sequence
  Description of Artificial Sequence: Synthetic oligonucleotide
  Sense Strand Starting at position 473 of SEQ ID NO: 317574
agccuaucccagugggaua

SEQ ID NO: 355882 - RNA, 19 nt, Artificial Sequence
  Description of Artificial Sequence: Synthetic oligonucleotide
  Antisense Strand to SEQ ID NO: 355881
uaucccacugggauaggcu

SEQ ID NO: 355883 - RNA, 19 nt, Artificial Sequence
  Description of Artificial Sequence: Synthetic oligonucleotide
  Sense Strand Starting at position 473 of SEQ ID NO: 317575
gccuaucccagugggauau

SEQ ID NO: 355884 - RNA, 19 nt, Artificial Sequence
  Description of Artificial Sequence: Synthetic oligonucleotide
  Antisense Strand to SEQ ID NO: 355883
auaucccacugggauaggc

SEQ ID NO: 355885 - RNA, 19 nt, Artificial Sequence
  Description of Artificial Sequence: Synthetic oligonucleotide
  Sense Strand Starting at position 473 of SEQ ID NO: 317654
ucucuuaucccaggaaggu

SEQ ID NO: 355886 - RNA, 19 nt, Artificial Sequence
  Description of Artificial Sequence: Synthetic oligonucleotide
  Antisense Strand to SEQ ID NO: 355885
accuuccugggauaagaga

SEQ ID NO: 355887 - RNA, 19 nt, Artificial Sequence
  Description of Artificial Sequence: Synthetic oligonucleotide
  Sense Strand Starting at position 473 of SEQ ID NO: 318036
ccucauucccuccgagaag

SEQ ID NO: 355888 - RNA, 19 nt, Artificial Sequence
  Description of Artificial Sequence: Synthetic oligonucleotide
  Antisense Strand to SEQ ID NO: 355887
cuucucggagggaaugagg

SEQ ID NO: 355889 - RNA, 19 nt, Artificial Sequence
  Description of Artificial Sequence: Synthetic oligonucleotide
  Sense Strand Starting at position 473 of SEQ ID NO: 318286
gucagagaucucuguguua

SEQ ID NO: 355890 - RNA, 19 nt, Artificial Sequence
  Description of Artificial Sequence: Synthetic oligonucleotide
  Antisense Strand to SEQ ID NO: 355889
uaacacagagaucucugac

SEQ ID NO: 355891 - RNA, 19 nt, Artificial Sequence
  Description of Artificial Sequence: Synthetic oligonucleotide
  Sense Strand Starting at position 473 of SEQ ID NO: 318288
cagagaucucuguguuagg

SEQ ID NO: 355892 - RNA, 19 nt, Artificial Sequence
  Description of Artificial Sequence: Synthetic oligonucleotide
  Antisense Strand to SEQ ID NO: 355891
ccuaacacagagaucucug

SEQ ID NO: 355893 - RNA, 19 nt, Artificial Sequence
  Description of Artificial Sequence: Synthetic oligonucleotide
  Sense Strand Starting at position 473 of SEQ ID NO: 318291
agaucucuguguuagggaa

SEQ ID NO: 355894 - RNA, 19 nt, Artificial Sequence
  Description of Artificial Sequence: Synthetic oligonucleotide
  Antisense Strand to SEQ ID NO: 355893
uucccuaacacagagaucu

SEQ ID NO: 355895 - RNA, 19 nt, Artificial Sequence
  Description of Artificial Sequence: Synthetic oligonucleotide
  Sense Strand Starting at position 473 of SEQ ID NO: 318418
gaggaaggcuggccugaua

SEQ ID NO: 355896 - RNA, 19 nt, Artificial Sequence
  Description of Artificial Sequence: Synthetic oligonucleotide
  Antisense Strand to SEQ ID NO: 355895
uaucaggccagccuuccuc

SEQ ID NO: 355897 - RNA, 19 nt, Artificial Sequence
  Description of Artificial Sequence: Synthetic oligonucleotide
  Sense Strand Starting at position 473 of SEQ ID NO: 318421
gaaggcuggccugauauaa

SEQ ID NO: 355898 - RNA, 19 nt, Artificial Sequence
  Description of Artificial Sequence: Synthetic oligonucleotide
  Antisense Strand to SEQ ID NO: 355897
uuauaucaggccagccuuc

SEQ ID NO: 355899 - RNA, 19 nt, Artificial Sequence
  Description of Artificial Sequence: Synthetic oligonucleotide
  Sense Strand Starting at position 473 of SEQ ID NO: 318637
ggcgguggacucugggaaa

SEQ ID NO: 355900 - RNA, 19 nt, Artificial Sequence
  Description of Artificial Sequence: Synthetic oligonucleotide
  Antisense Strand to SEQ ID NO: 355899
uuucccagaguccaccgcc

SEQ ID NO: 355901 - RNA, 19 nt, Artificial Sequence
  Description of Artificial Sequence: Synthetic oligonucleotide
  Sense Strand Starting at position 473 of SEQ ID NO: 318640
gguggacucugggaaagau

SEQ ID NO: 355902 - RNA, 19 nt, Artificial Sequence
  Description of Artificial Sequence: Synthetic oligonucleotide
  Antisense Strand to SEQ ID NO: 355901
aucuuucccagaguccacc

SEQ ID NO: 355903 - RNA, 19 nt, Artificial Sequence
  Description of Artificial Sequence: Synthetic oligonucleotide
  Sense Strand Starting at position 473 of SEQ ID NO: 318664
gagccuaggccucaucuau

SEQ ID NO: 355904 - RNA, 19 nt, Artificial Sequence
  Description of Artificial Sequence: Synthetic oligonucleotide
  Antisense Strand to SEQ ID NO: 355903
auagaugaggccuaggcuc

SEQ ID NO: 355905 - RNA, 19 nt, Artificial Sequence
  Description of Artificial Sequence: Synthetic oligonucleotide
  Sense Strand Starting at position 473 of SEQ ID NO: 318670
aggccucaucuaugaaaug

SEQ ID NO: 355906 - RNA, 19 nt, Artificial Sequence
  Description of Artificial Sequence: Synthetic oligonucleotide
  Antisense Strand to SEQ ID NO: 355905
cauuucauagaugaggccu

SEQ ID NO: 355907 - RNA, 19 nt, Artificial Sequence
  Description of Artificial Sequence: Synthetic oligonucleotide
  Sense Strand Starting at position 473 of SEQ ID NO: 318671
ggccucaucuaugaaaugu

SEQ ID NO: 355908 - RNA, 19 nt, Artificial Sequence
  Description of Artificial Sequence: Synthetic oligonucleotide
  Antisense Strand to SEQ ID NO: 355907
acauuucauagaugaggcc

SEQ ID NO: 355909 - RNA, 19 nt, Artificial Sequence
  Description of Artificial Sequence: Synthetic oligonucleotide
  Sense Strand Starting at position 473 of SEQ ID NO: 318805
aggagaccaugcuaagaau

SEQ ID NO: 355910 - RNA, 19 nt, Artificial Sequence
  Description of Artificial Sequence: Synthetic oligonucleotide
  Antisense Strand to SEQ ID NO: 355909
auucuuagcauggucuccu

SEQ ID NO: 355911 - RNA, 19 nt, Artificial Sequence
  Description of Artificial Sequence: Synthetic oligonucleotide
  Sense Strand Starting at position 473 of SEQ ID NO: 319142
cacagauucuagugcugga

SEQ ID NO: 355912 - RNA, 19 nt, Artificial Sequence
  Description of Artificial Sequence: Synthetic oligonucleotide
  Antisense Strand to SEQ ID NO: 355911
uccagcacuagaaucugug

SEQ ID NO: 355913 - RNA, 19 nt, Artificial Sequence
  Description of Artificial Sequence: Synthetic oligonucleotide
  Sense Strand Starting at position 473 of SEQ ID NO: 319146
gauucuagugcuggauaca

SEQ ID NO: 355914 - RNA, 19 nt, Artificial Sequence
  Description of Artificial Sequence: Synthetic oligonucleotide
  Antisense Strand to SEQ ID NO: 355913
uguauccagcacuagaauc

SEQ ID NO: 355915 - RNA, 19 nt, Artificial Sequence
  Description of Artificial Sequence: Synthetic oligonucleotide
  Sense Strand Starting at position 473 of SEQ ID NO: 319185
gaggucucauggugaggaa

SEQ ID NO: 355916 - RNA, 19 nt, Artificial Sequence
  Description of Artificial Sequence: Synthetic oligonucleotide
  Antisense Strand to SEQ ID NO: 355915
uuccucaccaugagaccuc

SEQ ID NO: 355917 - RNA, 19 nt, Artificial Sequence
  Description of Artificial Sequence: Synthetic oligonucleotide
  Sense Strand Starting at position 474 of SEQ ID NO: 315474
gccagcuacuuguuacuuu

SEQ ID NO: 355918 - RNA, 19 nt, Artificial Sequence
  Description of Artificial Sequence: Synthetic oligonucleotide
  Antisense Strand to SEQ ID NO: 355917
aaaguaacaaguagcuggc

SEQ ID NO: 355919 - RNA, 19 nt, Artificial Sequence
  Description of Artificial Sequence: Synthetic oligonucleotide
  Sense Strand Starting at position 474 of SEQ ID NO: 315542
gggccuaacgguuauacau

SEQ ID NO: 355920 - RNA, 19 nt, Artificial Sequence
  Description of Artificial Sequence: Synthetic oligonucleotide
  Antisense Strand to SEQ ID NO: 355919
auguauaaccguuaggccc

SEQ ID NO: 355921 - RNA, 19 nt, Artificial Sequence
  Description of Artificial Sequence: Synthetic oligonucleotide
  Sense Strand Starting at position 474 of SEQ ID NO: 315612
gcagaaugugcauggcaca

SEQ ID NO: 355922 - RNA, 19 nt, Artificial Sequence
  Description of Artificial Sequence: Synthetic oligonucleotide
  Antisense Strand to SEQ ID NO: 355921
ugugccaugcacauucugc

SEQ ID NO: 355923 - RNA, 19 nt, Artificial Sequence
  Description of Artificial Sequence: Synthetic oligonucleotide
  Sense Strand Starting at position 474 of SEQ ID NO: 316104
uagcgauuucuguaaggcu

SEQ ID NO: 355924 - RNA, 19 nt, Artificial Sequence
  Description of Artificial Sequence: Synthetic oligonucleotide
  Antisense Strand to SEQ ID NO: 355923
agccuuacagaaaucgcua

SEQ ID NO: 355925 - RNA, 19 nt, Artificial Sequence
  Description of Artificial Sequence: Synthetic oligonucleotide
  Sense Strand Starting at position 474 of SEQ ID NO: 316112
ucuguaaggcuuuaugauu

SEQ ID NO: 355926 - RNA, 19 nt, Artificial Sequence
  Description of Artificial Sequence: Synthetic oligonucleotide
  Antisense Strand to SEQ ID NO: 355925
aaucauaaagccuuacaga

SEQ ID NO: 355927 - RNA, 19 nt, Artificial Sequence
  Description of Artificial Sequence: Synthetic oligonucleotide
  Sense Strand Starting at position 474 of SEQ ID NO: 316336
gccagaucccacuauucug

SEQ ID NO: 355928 - RNA, 19 nt, Artificial Sequence
  Description of Artificial Sequence: Synthetic oligonucleotide
  Antisense Strand to SEQ ID NO: 355927
cagaauagugggaucuggc

SEQ ID NO: 355929 - RNA, 19 nt, Artificial Sequence
  Description of Artificial Sequence: Synthetic oligonucleotide
  Sense Strand Starting at position 474 of SEQ ID NO: 316399
caggguggcagguaaauau

SEQ ID NO: 355930 - RNA, 19 nt, Artificial Sequence
  Description of Artificial Sequence: Synthetic oligonucleotide
  Antisense Strand to SEQ ID NO: 355929
auauuuaccugccacccug

SEQ ID NO: 355931 - RNA, 19 nt, Artificial Sequence
  Description of Artificial Sequence: Synthetic oligonucleotide
  Sense Strand Starting at position 474 of SEQ ID NO: 316403
guggcagguaaauauguau

SEQ ID NO: 355932 - RNA, 19 nt, Artificial Sequence
  Description of Artificial Sequence: Synthetic oligonucleotide
  Antisense Strand to SEQ ID NO: 355931
auacauauuuaccugccac

SEQ ID NO: 355933 - RNA, 19 nt, Artificial Sequence
  Description of Artificial Sequence: Synthetic oligonucleotide
  Sense Strand Starting at position 474 of SEQ ID NO: 316406
gcagguaaauauguaucaa

SEQ ID NO: 355934 - RNA, 19 nt, Artificial Sequence
  Description of Artificial Sequence: Synthetic oligonucleotide
  Antisense Strand to SEQ ID NO: 355933
uugauacauauuuaccugc

SEQ ID NO: 355935 - RNA, 19 nt, Artificial Sequence
  Description of Artificial Sequence: Synthetic oligonucleotide
  Sense Strand Starting at position 474 of SEQ ID NO: 316503
aggucaagagaucgacuau

SEQ ID NO: 355936 - RNA, 19 nt, Artificial Sequence
  Description of Artificial Sequence: Synthetic oligonucleotide
  Antisense Strand to SEQ ID NO: 355935
auagucgaucucuugaccu

SEQ ID NO: 355937 - RNA, 19 nt, Artificial Sequence
  Description of Artificial Sequence: Synthetic oligonucleotide
  Sense Strand Starting at position 474 of SEQ ID NO: 316791
guaguuguauacgcagaga

SEQ ID NO: 355938 - RNA, 19 nt, Artificial Sequence
  Description of Artificial Sequence: Synthetic oligonucleotide
  Antisense Strand to SEQ ID NO: 355937
ucucugcguauacaacuac

SEQ ID NO: 355939 - RNA, 19 nt, Artificial Sequence
  Description of Artificial Sequence: Synthetic oligonucleotide
  Sense Strand Starting at position 474 of SEQ ID NO: 316817
aaccaauagugccugggaa

SEQ ID NO: 355940 - RNA, 19 nt, Artificial Sequence
  Description of Artificial Sequence: Synthetic oligonucleotide
  Antisense Strand to SEQ ID NO: 355939
uucccaggcacuauugguu

SEQ ID NO: 355941 - RNA, 19 nt, Artificial Sequence
  Description of Artificial Sequence: Synthetic oligonucleotide
  Sense Strand Starting at position 474 of SEQ ID NO: 316841
ggaagcuuucuuugaggag

SEQ ID NO: 355942 - RNA, 19 nt, Artificial Sequence
  Description of Artificial Sequence: Synthetic oligonucleotide
  Antisense Strand to SEQ ID NO: 355941
cuccucaaagaaagcuucc

SEQ ID NO: 355943 - RNA, 19 nt, Artificial Sequence
  Description of Artificial Sequence: Synthetic oligonucleotide
  Sense Strand Starting at position 474 of SEQ ID NO: 316845
gcuuucuuugaggagguga

SEQ ID NO: 355944 - RNA, 19 nt, Artificial Sequence
  Description of Artificial Sequence: Synthetic oligonucleotide
  Antisense Strand to SEQ ID NO: 355943
ucaccuccucaaagaaagc

SEQ ID NO: 355945 - RNA, 19 nt, Artificial Sequence
  Description of Artificial Sequence: Synthetic oligonucleotide
  Sense Strand Starting at position 474 of SEQ ID NO: 316888
aacagugcggaagaauauu

SEQ ID NO: 355946 - RNA, 19 nt, Artificial Sequence
  Description of Artificial Sequence: Synthetic oligonucleotide
  Antisense Strand to SEQ ID NO: 355945
aauauucuuccgcacuguu

SEQ ID NO: 355947 - RNA, 19 nt, Artificial Sequence
  Description of Artificial Sequence: Synthetic oligonucleotide
  Sense Strand Starting at position 474 of SEQ ID NO: 316896
ggaagaauauugcaagaag

SEQ ID NO: 355948 - RNA, 19 nt, Artificial Sequence
  Description of Artificial Sequence: Synthetic oligonucleotide
  Antisense Strand to SEQ ID NO: 355947
cuucuugcaauauucuucc

SEQ ID NO: 355949 - RNA, 19 nt, Artificial Sequence
  Description of Artificial Sequence: Synthetic oligonucleotide
  Sense Strand Starting at position 474 of SEQ ID NO: 316989
aaggcugagagcugaagaa

SEQ ID NO: 355950 - RNA, 19 nt, Artificial Sequence
  Description of Artificial Sequence: Synthetic oligonucleotide
  Antisense Strand to SEQ ID NO: 355949
uucuucagcucucagccuu

SEQ ID NO: 355951 - RNA, 19 nt, Artificial Sequence
  Description of Artificial Sequence: Synthetic oligonucleotide
  Sense Strand Starting at position 474 of SEQ ID NO: 317389
ugaguuccuaucgagcagu

SEQ ID NO: 355952 - RNA, 19 nt, Artificial Sequence
  Description of Artificial Sequence: Synthetic oligonucleotide
  Antisense Strand to SEQ ID NO: 355951
acugcucgauaggaacuca

SEQ ID NO: 355953 - RNA, 19 nt, Artificial Sequence
  Description of Artificial Sequence: Synthetic oligonucleotide
  Sense Strand Starting at position 474 of SEQ ID NO: 317856
ucucuucguccaggaggaa

SEQ ID NO: 355954 - RNA, 19 nt, Artificial Sequence
  Description of Artificial Sequence: Synthetic oligonucleotide
  Antisense Strand to SEQ ID NO: 355953
uuccuccuggacgaagaga

SEQ ID NO: 355955 - RNA, 19 nt, Artificial Sequence
  Description of Artificial Sequence: Synthetic oligonucleotide
  Sense Strand Starting at position 474 of SEQ ID NO: 317857
cucuucguccaggaggaaa

SEQ ID NO: 355956 - RNA, 19 nt, Artificial Sequence
  Description of Artificial Sequence: Synthetic oligonucleotide
  Antisense Strand to SEQ ID NO: 355955
uuuccuccuggacgaagag

SEQ ID NO: 355957 - RNA, 19 nt, Artificial Sequence
  Description of Artificial Sequence: Synthetic oligonucleotide
  Sense Strand Starting at position 474 of SEQ ID NO: 317935
cacagaucauuggcuuuga

SEQ ID NO: 355958 - RNA, 19 nt, Artificial Sequence
  Description of Artificial Sequence: Synthetic oligonucleotide
  Antisense Strand to SEQ ID NO: 355957
ucaaagccaaugaucugug

SEQ ID NO: 355959 - RNA, 19 nt, Artificial Sequence
  Description of Artificial Sequence: Synthetic oligonucleotide
  Sense Strand Starting at position 474 of SEQ ID NO: 317944
uuggcuuugaccuggagaa

SEQ ID NO: 355960 - RNA, 19 nt, Artificial Sequence
  Description of Artificial Sequence: Synthetic oligonucleotide
  Antisense Strand to SEQ ID NO: 355959
uucuccaggucaaagccaa

SEQ ID NO: 355961 - RNA, 19 nt, Artificial Sequence
  Description of Artificial Sequence: Synthetic oligonucleotide
  Sense Strand Starting at position 474 of SEQ ID NO: 317945
uggcuuugaccuggagaau

SEQ ID NO: 355962 - RNA, 19 nt, Artificial Sequence
  Description of Artificial Sequence: Synthetic oligonucleotide
  Antisense Strand to SEQ ID NO: 355961
auucuccaggucaaagcca

SEQ ID NO: 355963 - RNA, 19 nt, Artificial Sequence
  Description of Artificial Sequence: Synthetic oligonucleotide
  Sense Strand Starting at position 474 of SEQ ID NO: 317946
ggcuuugaccuggagaauu

SEQ ID NO: 355964 - RNA, 19 nt, Artificial Sequence
  Description of Artificial Sequence: Synthetic oligonucleotide
  Antisense Strand to SEQ ID NO: 355963
aauucuccaggucaaagcc

SEQ ID NO: 355965 - RNA, 19 nt, Artificial Sequence
  Description of Artificial Sequence: Synthetic oligonucleotide
  Sense Strand Starting at position 474 of SEQ ID NO: 318095
ugaacauauugccugccaa

SEQ ID NO: 355966 - RNA, 19 nt, Artificial Sequence
  Description of Artificial Sequence: Synthetic oligonucleotide
  Antisense Strand to SEQ ID NO: 355965
uuggcaggcaauauguuca

SEQ ID NO: 355967 - RNA, 19 nt, Artificial Sequence
  Description of Artificial Sequence: Synthetic oligonucleotide
  Sense Strand Starting at position 474 of SEQ ID NO: 318116
ugcugagaacccuauggua

SEQ ID NO: 355968 - RNA, 19 nt, Artificial Sequence
  Description of Artificial Sequence: Synthetic oligonucleotide
  Antisense Strand to SEQ ID NO: 355967
uaccauaggguucucagca

SEQ ID NO: 355969 - RNA, 19 nt, Artificial Sequence
  Description of Artificial Sequence: Synthetic oligonucleotide
  Sense Strand Starting at position 474 of SEQ ID NO: 318118
cugagaacccuaugguaaa

SEQ ID NO: 355970 - RNA, 19 nt, Artificial Sequence
  Description of Artificial Sequence: Synthetic oligonucleotide
  Antisense Strand to SEQ ID NO: 355969
uuuaccauaggguucucag

SEQ ID NO: 355971 - RNA, 19 nt, Artificial Sequence
  Description of Artificial Sequence: Synthetic oligonucleotide
  Sense Strand Starting at position 474 of SEQ ID NO: 318147
gggcccuguccuugaggaa

SEQ ID NO: 355972 - RNA, 19 nt, Artificial Sequence
  Description of Artificial Sequence: Synthetic oligonucleotide
  Antisense Strand to SEQ ID NO: 355971
uuccucaaggacagggccc

SEQ ID NO: 355973 - RNA, 19 nt, Artificial Sequence
  Description of Artificial Sequence: Synthetic oligonucleotide
  Sense Strand Starting at position 474 of SEQ ID NO: 318238
gggagguaugugcaggaga

SEQ ID NO: 355974 - RNA, 19 nt, Artificial Sequence
  Description of Artificial Sequence: Synthetic oligonucleotide
  Antisense Strand to SEQ ID NO: 355973
ucuccugcacauaccuccc

SEQ ID NO: 355975 - RNA, 19 nt, Artificial Sequence
  Description of Artificial Sequence: Synthetic oligonucleotide
  Sense Strand Starting at position 474 of SEQ ID NO: 318239
ggagguaugugcaggagaa

SEQ ID NO: 355976 - RNA, 19 nt, Artificial Sequence
  Description of Artificial Sequence: Synthetic oligonucleotide
  Antisense Strand to SEQ ID NO: 355975
uucuccugcacauaccucc

SEQ ID NO: 355977 - RNA, 19 nt, Artificial Sequence
  Description of Artificial Sequence: Synthetic oligonucleotide
  Sense Strand Starting at position 474 of SEQ ID NO: 318240
gagguaugugcaggagaag

SEQ ID NO: 355978 - RNA, 19 nt, Artificial Sequence
  Description of Artificial Sequence: Synthetic oligonucleotide
  Antisense Strand to SEQ ID NO: 355977
cuucuccugcacauaccuc

SEQ ID NO: 355979 - RNA, 19 nt, Artificial Sequence
  Description of Artificial Sequence: Synthetic oligonucleotide
  Sense Strand Starting at position 474 of SEQ ID NO: 318243
guaugugcaggagaagaua

SEQ ID NO: 355980 - RNA, 19 nt, Artificial Sequence
  Description of Artificial Sequence: Synthetic oligonucleotide
  Antisense Strand to SEQ ID NO: 355979
uaucuucuccugcacauac

SEQ ID NO: 355981 - RNA, 19 nt, Artificial Sequence
  Description of Artificial Sequence: Synthetic oligonucleotide
  Sense Strand Starting at position 474 of SEQ ID NO: 318686
uuucuuuguccuugaagag

SEQ ID NO: 355982 - RNA, 19 nt, Artificial Sequence
  Description of Artificial Sequence: Synthetic oligonucleotide
  Antisense Strand to SEQ ID NO: 355981
cucuucaaggacaaagaaa

SEQ ID NO: 355983 - RNA, 19 nt, Artificial Sequence
  Description of Artificial Sequence: Synthetic oligonucleotide
  Sense Strand Starting at position 474 of SEQ ID NO: 318687
uucuuuguccuugaagagu

SEQ ID NO: 355984 - RNA, 19 nt, Artificial Sequence
  Description of Artificial Sequence: Synthetic oligonucleotide
  Antisense Strand to SEQ ID NO: 355983
acucuucaaggacaaagaa

SEQ ID NO: 355985 - RNA, 19 nt, Artificial Sequence
  Description of Artificial Sequence: Synthetic oligonucleotide
  Sense Strand Starting at position 474 of SEQ ID NO: 318787
gggccugggaaaugauaau

SEQ ID NO: 355986 - RNA, 19 nt, Artificial Sequence
  Description of Artificial Sequence: Synthetic oligonucleotide
  Antisense Strand to SEQ ID NO: 355985
auuaucauuucccaggccc

SEQ ID NO: 355987 - RNA, 19 nt, Artificial Sequence
  Description of Artificial Sequence: Synthetic oligonucleotide
  Sense Strand Starting at position 474 of SEQ ID NO: 318808
auucuauucccaggagcua

SEQ ID NO: 355988 - RNA, 19 nt, Artificial Sequence
  Description of Artificial Sequence: Synthetic oligonucleotide
  Antisense Strand to SEQ ID NO: 355987
uagcuccugggaauagaau

SEQ ID NO: 355989 - RNA, 19 nt, Artificial Sequence
  Description of Artificial Sequence: Synthetic oligonucleotide
  Sense Strand Starting at position 474 of SEQ ID NO: 318901
acucguuagggcugucauu

SEQ ID NO: 355990 - RNA, 19 nt, Artificial Sequence
  Description of Artificial Sequence: Synthetic oligonucleotide
  Antisense Strand to SEQ ID NO: 355989
aaugacagcccuaacgagu

SEQ ID NO: 355991 - RNA, 19 nt, Artificial Sequence
  Description of Artificial Sequence: Synthetic oligonucleotide
  Sense Strand Starting at position 474 of SEQ ID NO: 319035
uguagauugugacuaggag

SEQ ID NO: 355992 - RNA, 19 nt, Artificial Sequence
  Description of Artificial Sequence: Synthetic oligonucleotide
  Antisense Strand to SEQ ID NO: 355991
cuccuagucacaaucuaca

SEQ ID NO: 355993 - RNA, 19 nt, Artificial Sequence
  Description of Artificial Sequence: Synthetic oligonucleotide
  Sense Strand Starting at position 474 of SEQ ID NO: 319092
ggaagcuggucacugaguu

SEQ ID NO: 355994 - RNA, 19 nt, Artificial Sequence
  Description of Artificial Sequence: Synthetic oligonucleotide
  Antisense Strand to SEQ ID NO: 355993
aacucagugaccagcuucc

SEQ ID NO: 355995 - RNA, 19 nt, Artificial Sequence
  Description of Artificial Sequence: Synthetic oligonucleotide
  Sense Strand Starting at position 474 of SEQ ID NO: 319147
gagcaaauacugcgaucaa

SEQ ID NO: 355996 - RNA, 19 nt, Artificial Sequence
  Description of Artificial Sequence: Synthetic oligonucleotide
  Antisense Strand to SEQ ID NO: 355995
uugaucgcaguauuugcuc

SEQ ID NO: 355997 - RNA, 19 nt, Artificial Sequence
  Description of Artificial Sequence: Synthetic oligonucleotide
  Sense Strand Starting at position 475 of SEQ ID NO: 315519
cugggagcccuaugacagu

SEQ ID NO: 355998 - RNA, 19 nt, Artificial Sequence
  Description of Artificial Sequence: Synthetic oligonucleotide
  Antisense Strand to SEQ ID NO: 355997
acugucauagggcucccag

SEQ ID NO: 355999 - RNA, 19 nt, Artificial Sequence
  Description of Artificial Sequence: Synthetic oligonucleotide
  Sense Strand Starting at position 475 of SEQ ID NO: 315528
cuaugacaguucugaaguc

SEQ ID NO: 356000 - RNA, 19 nt, Artificial Sequence
  Description of Artificial Sequence: Synthetic oligonucleotide
  Antisense Strand to SEQ ID NO: 355999
gacuucagaacugucauag

SEQ ID NO: 356001 - RNA, 19 nt, Artificial Sequence
  Description of Artificial Sequence: Synthetic oligonucleotide
  Sense Strand Starting at position 475 of SEQ ID NO: 315705
ggcccaccgucuuugcaaa

SEQ ID NO: 356002 - RNA, 19 nt, Artificial Sequence
  Description of Artificial Sequence: Synthetic oligonucleotide
  Antisense Strand to SEQ ID NO: 356001
uuugcaaagacggugggcc

SEQ ID NO: 356003 - RNA, 19 nt, Artificial Sequence
  Description of Artificial Sequence: Synthetic oligonucleotide
  Sense Strand Starting at position 475 of SEQ ID NO: 315904
agcagaucuccugggcuca

SEQ ID NO: 356004 - RNA, 19 nt, Artificial Sequence
  Description of Artificial Sequence: Synthetic oligonucleotide
  Antisense Strand to SEQ ID NO: 356003
ugagcccaggagaucugcu

SEQ ID NO: 356005 - RNA, 19 nt, Artificial Sequence
  Description of Artificial Sequence: Synthetic oligonucleotide
  Sense Strand Starting at position 475 of SEQ ID NO: 315936
caauaugucggcugucuca

SEQ ID NO: 356006 - RNA, 19 nt, Artificial Sequence
  Description of Artificial Sequence: Synthetic oligonucleotide
  Antisense Strand to SEQ ID NO: 356005
ugagacagccgacauauug

SEQ ID NO: 356007 - RNA, 19 nt, Artificial Sequence
  Description of Artificial Sequence: Synthetic oligonucleotide
  Sense Strand Starting at position 475 of SEQ ID NO: 316076
cauagagccuccuugggaa

SEQ ID NO: 356008 - RNA, 19 nt, Artificial Sequence
  Description of Artificial Sequence: Synthetic oligonucleotide
  Antisense Strand to SEQ ID NO: 356007
uucccaaggaggcucuaug

SEQ ID NO: 356009 - RNA, 19 nt, Artificial Sequence
  Description of Artificial Sequence: Synthetic oligonucleotide
  Sense Strand Starting at position 475 of SEQ ID NO: 316254
cagaguguaagaggacuua

SEQ ID NO: 356010 - RNA, 19 nt, Artificial Sequence
  Description of Artificial Sequence: Synthetic oligonucleotide
  Antisense Strand to SEQ ID NO: 356009
uaaguccucuuacacucug

SEQ ID NO: 356011 - RNA, 19 nt, Artificial Sequence
  Description of Artificial Sequence: Synthetic oligonucleotide
  Sense Strand Starting at position 475 of SEQ ID NO: 316286
agaggguuucgggagugau

SEQ ID NO: 356012 - RNA, 19 nt, Artificial Sequence
  Description of Artificial Sequence: Synthetic oligonucleotide
  Antisense Strand to SEQ ID NO: 356011
aucacucccgaaacccucu

SEQ ID NO: 356013 - RNA, 19 nt, Artificial Sequence
  Description of Artificial Sequence: Synthetic oligonucleotide
  Sense Strand Starting at position 475 of SEQ ID NO: 316296
gggagugaugccugcagag

SEQ ID NO: 356014 - RNA, 19 nt, Artificial Sequence
  Description of Artificial Sequence: Synthetic oligonucleotide
  Antisense Strand to SEQ ID NO: 356013
cucugcaggcaucacuccc

SEQ ID NO: 356015 - RNA, 19 nt, Artificial Sequence
  Description of Artificial Sequence: Synthetic oligonucleotide
  Sense Strand Starting at position 475 of SEQ ID NO: 316298
gagugaugccugcagagaa

SEQ ID NO: 356016 - RNA, 19 nt, Artificial Sequence
  Description of Artificial Sequence: Synthetic oligonucleotide
  Antisense Strand to SEQ ID NO: 356015
uucucugcaggcaucacuc

SEQ ID NO: 356017 - RNA, 19 nt, Artificial Sequence
  Description of Artificial Sequence: Synthetic oligonucleotide
  Sense Strand Starting at position 475 of SEQ ID NO: 316401
agagguuccuugggucaga

SEQ ID NO: 356018 - RNA, 19 nt, Artificial Sequence
  Description of Artificial Sequence: Synthetic oligonucleotide
  Antisense Strand to SEQ ID NO: 356017
ucugacccaaggaaccucu

SEQ ID NO: 356019 - RNA, 19 nt, Artificial Sequence
  Description of Artificial Sequence: Synthetic oligonucleotide
  Sense Strand Starting at position 475 of SEQ ID NO: 316433
ggauacagauuccagacua

SEQ ID NO: 356020 - RNA, 19 nt, Artificial Sequence
  Description of Artificial Sequence: Synthetic oligonucleotide
  Antisense Strand to SEQ ID NO: 356019
uagucuggaaucuguaucc

SEQ ID NO: 356021 - RNA, 19 nt, Artificial Sequence
  Description of Artificial Sequence: Synthetic oligonucleotide
  Sense Strand Starting at position 475 of SEQ ID NO: 316508
gcgggaugcucaugcccaa

SEQ ID NO: 356022 - RNA, 19 nt, Artificial Sequence
  Description of Artificial Sequence: Synthetic oligonucleotide
  Antisense Strand to SEQ ID NO: 356021
uugggcaugagcaucccgc

SEQ ID NO: 356023 - RNA, 19 nt, Artificial Sequence
  Description of Artificial Sequence: Synthetic oligonucleotide
  Sense Strand Starting at position 475 of SEQ ID NO: 316515
gcucaugcccaauaggaau

SEQ ID NO: 356024 - RNA, 19 nt, Artificial Sequence
  Description of Artificial Sequence: Synthetic oligonucleotide
  Antisense Strand to SEQ ID NO: 356023
auuccuauugggcaugagc

SEQ ID NO: 356025 - RNA, 19 nt, Artificial Sequence
  Description of Artificial Sequence: Synthetic oligonucleotide
  Sense Strand Starting at position 475 of SEQ ID NO: 316634
ucugaaguucugugaagcu

SEQ ID NO: 356026 - RNA, 19 nt, Artificial Sequence
  Description of Artificial Sequence: Synthetic oligonucleotide
  Antisense Strand to SEQ ID NO: 356025
agcuucacagaacuucaga

SEQ ID NO: 356027 - RNA, 19 nt, Artificial Sequence
  Description of Artificial Sequence: Synthetic oligonucleotide
  Sense Strand Starting at position 475 of SEQ ID NO: 316643
cugugaagcuaguuagcaa

SEQ ID NO: 356028 - RNA, 19 nt, Artificial Sequence
  Description of Artificial Sequence: Synthetic oligonucleotide
  Antisense Strand to SEQ ID NO: 356027
uugcuaacuagcuucacag

SEQ ID NO: 356029 - RNA, 19 nt, Artificial Sequence
  Description of Artificial Sequence: Synthetic oligonucleotide
  Sense Strand Starting at position 475 of SEQ ID NO: 316701
gggcacuguugacuggauu

SEQ ID NO: 356030 - RNA, 19 nt, Artificial Sequence
  Description of Artificial Sequence: Synthetic oligonucleotide
  Antisense Strand to SEQ ID NO: 356029
aauccagucaacagugccc

SEQ ID NO: 356031 - RNA, 19 nt, Artificial Sequence
  Description of Artificial Sequence: Synthetic oligonucleotide
  Sense Strand Starting at position 475 of SEQ ID NO: 316756
ucuagagucugggcaggau

SEQ ID NO: 356032 - RNA, 19 nt, Artificial Sequence
  Description of Artificial Sequence: Synthetic oligonucleotide
  Antisense Strand to SEQ ID NO: 356031
auccugcccagacucuaga

SEQ ID NO: 356033 - RNA, 19 nt, Artificial Sequence
  Description of Artificial Sequence: Synthetic oligonucleotide
  Sense Strand Starting at position 475 of SEQ ID NO: 316862
ccuagucugggaggucaaa

SEQ ID NO: 356034 - RNA, 19 nt, Artificial Sequence
  Description of Artificial Sequence: Synthetic oligonucleotide
  Antisense Strand to SEQ ID NO: 356033
uuugaccucccagacuagg

SEQ ID NO: 356035 - RNA, 19 nt, Artificial Sequence
  Description of Artificial Sequence: Synthetic oligonucleotide
  Sense Strand Starting at position 475 of SEQ ID NO: 317303
gagauuagaggcuguugau

SEQ ID NO: 356036 - RNA, 19 nt, Artificial Sequence
  Description of Artificial Sequence: Synthetic oligonucleotide
  Antisense Strand to SEQ ID NO: 356035
aucaacagccucuaaucuc

SEQ ID NO: 356037 - RNA, 19 nt, Artificial Sequence
  Description of Artificial Sequence: Synthetic oligonucleotide
  Sense Strand Starting at position 475 of SEQ ID NO: 317588
cugcgaguugggcgaguua

SEQ ID NO: 356038 - RNA, 19 nt, Artificial Sequence
  Description of Artificial Sequence: Synthetic oligonucleotide
  Antisense Strand to SEQ ID NO: 356037
uaacucgcccaacucgcag

SEQ ID NO: 356039 - RNA, 19 nt, Artificial Sequence
  Description of Artificial Sequence: Synthetic oligonucleotide
  Sense Strand Starting at position 475 of SEQ ID NO: 317608
guggaggaggcgugucuuu

SEQ ID NO: 356040 - RNA, 19 nt, Artificial Sequence
  Description of Artificial Sequence: Synthetic oligonucleotide
  Antisense Strand to SEQ ID NO: 356039
aaagacacgccuccuccac

SEQ ID NO: 356041 - RNA, 19 nt, Artificial Sequence
  Description of Artificial Sequence: Synthetic oligonucleotide
  Sense Strand Starting at position 475 of SEQ ID NO: 317615
aggcgugucuuugucauuu

SEQ ID NO: 356042 - RNA, 19 nt, Artificial Sequence
  Description of Artificial Sequence: Synthetic oligonucleotide
  Antisense Strand to SEQ ID NO: 356041
aaaugacaaagacacgccu

SEQ ID NO: 356043 - RNA, 19 nt, Artificial Sequence
  Description of Artificial Sequence: Synthetic oligonucleotide
  Sense Strand Starting at position 475 of SEQ ID NO: 317617
gcgugucuuugucauuugu

SEQ ID NO: 356044 - RNA, 19 nt, Artificial Sequence
  Description of Artificial Sequence: Synthetic oligonucleotide
  Antisense Strand to SEQ ID NO: 356043
acaaaugacaaagacacgc

SEQ ID NO: 356045 - RNA, 19 nt, Artificial Sequence
  Description of Artificial Sequence: Synthetic oligonucleotide
  Sense Strand Starting at position 475 of SEQ ID NO: 317619
gugucuuugucauuuguua

SEQ ID NO: 356046 - RNA, 19 nt, Artificial Sequence
  Description of Artificial Sequence: Synthetic oligonucleotide
  Antisense Strand to SEQ ID NO: 356045
uaacaaaugacaaagacac

SEQ ID NO: 356047 - RNA, 19 nt, Artificial Sequence
  Description of Artificial Sequence: Synthetic oligonucleotide
  Sense Strand Starting at position 475 of SEQ ID NO: 317636
uaaaguuaaugaguccagu

SEQ ID NO: 356048 - RNA, 19 nt, Artificial Sequence
  Description of Artificial Sequence: Synthetic oligonucleotide
  Antisense Strand to SEQ ID NO: 356047
acuggacucauuaacuuua

SEQ ID NO: 356049 - RNA, 19 nt, Artificial Sequence
  Description of Artificial Sequence: Synthetic oligonucleotide
  Sense Strand Starting at position 475 of SEQ ID NO: 317639
aguuaaugaguccaguaaa

SEQ ID NO: 356050 - RNA, 19 nt, Artificial Sequence
  Description of Artificial Sequence: Synthetic oligonucleotide
  Antisense Strand to SEQ ID NO: 356049
uuuacuggacucauuaacu

SEQ ID NO: 356051 - RNA, 19 nt, Artificial Sequence
  Description of Artificial Sequence: Synthetic oligonucleotide
  Sense Strand Starting at position 475 of SEQ ID NO: 317708
cagucuuaaggcggguuua

SEQ ID NO: 356052 - RNA, 19 nt, Artificial Sequence
  Description of Artificial Sequence: Synthetic oligonucleotide
  Antisense Strand to SEQ ID NO: 356051
uaaacccgccuuaagacug

SEQ ID NO: 356053 - RNA, 19 nt, Artificial Sequence
  Description of Artificial Sequence: Synthetic oligonucleotide
  Sense Strand Starting at position 475 of SEQ ID NO: 318003
ccgagaucgcgccauucau

SEQ ID NO: 356054 - RNA, 19 nt, Artificial Sequence
  Description of Artificial Sequence: Synthetic oligonucleotide
  Antisense Strand to SEQ ID NO: 356053
augaauggcgcgaucucgg

SEQ ID NO: 356055 - RNA, 19 nt, Artificial Sequence
  Description of Artificial Sequence: Synthetic oligonucleotide
  Sense Strand Starting at position 475 of SEQ ID NO: 318120
cuggguggcuucucauauc

SEQ ID NO: 356056 - RNA, 19 nt, Artificial Sequence
  Description of Artificial Sequence: Synthetic oligonucleotide
  Antisense Strand to SEQ ID NO: 356055
gauaugagaagccacccag

SEQ ID NO: 356057 - RNA, 19 nt, Artificial Sequence
  Description of Artificial Sequence: Synthetic oligonucleotide
  Sense Strand Starting at position 475 of SEQ ID NO: 318123
gguggcuucucauauccau

SEQ ID NO: 356058 - RNA, 19 nt, Artificial Sequence
  Description of Artificial Sequence: Synthetic oligonucleotide
  Antisense Strand to SEQ ID NO: 356057
auggauaugagaagccacc

SEQ ID NO: 356059 - RNA, 19 nt, Artificial Sequence
  Description of Artificial Sequence: Synthetic oligonucleotide
  Sense Strand Starting at position 475 of SEQ ID NO: 318315
agaaguugccacuggacuu

SEQ ID NO: 356060 - RNA, 19 nt, Artificial Sequence
  Description of Artificial Sequence: Synthetic oligonucleotide
  Antisense Strand to SEQ ID NO: 356059
aaguccaguggcaacuucu

SEQ ID NO: 356061 - RNA, 19 nt, Artificial Sequence
  Description of Artificial Sequence: Synthetic oligonucleotide
  Sense Strand Starting at position 475 of SEQ ID NO: 318490
caguguuucuagcugaaca

SEQ ID NO: 356062 - RNA, 19 nt, Artificial Sequence
  Description of Artificial Sequence: Synthetic oligonucleotide
  Antisense Strand to SEQ ID NO: 356061
uguucagcuagaaacacug

SEQ ID NO: 356063 - RNA, 19 nt, Artificial Sequence
  Description of Artificial Sequence: Synthetic oligonucleotide
  Sense Strand Starting at position 475 of SEQ ID NO: 318492
guguuucuagcugaacauu

SEQ ID NO: 356064 - RNA, 19 nt, Artificial Sequence
  Description of Artificial Sequence: Synthetic oligonucleotide
  Antisense Strand to SEQ ID NO: 356063
aauguucagcuagaaacac

SEQ ID NO: 356065 - RNA, 19 nt, Artificial Sequence
  Description of Artificial Sequence: Synthetic oligonucleotide
  Sense Strand Starting at position 475 of SEQ ID NO: 318716
uccuuagaaccuugguaca

SEQ ID NO: 356066 - RNA, 19 nt, Artificial Sequence
  Description of Artificial Sequence: Synthetic oligonucleotide
  Antisense Strand to SEQ ID NO: 356065
uguaccaagguucuaagga

SEQ ID NO: 356067 - RNA, 19 nt, Artificial Sequence
  Description of Artificial Sequence: Synthetic oligonucleotide
  Sense Strand Starting at position 475 of SEQ ID NO: 318718
cuuagaaccuugguacaca

SEQ ID NO: 356068 - RNA, 19 nt, Artificial Sequence
  Description of Artificial Sequence: Synthetic oligonucleotide
  Antisense Strand to SEQ ID NO: 356067
uguguaccaagguucuaag

SEQ ID NO: 356069 - RNA, 19 nt, Artificial Sequence
  Description of Artificial Sequence: Synthetic oligonucleotide
  Sense Strand Starting at position 475 of SEQ ID NO: 319122
uggcuaacacgguguauuu

SEQ ID NO: 356070 - RNA, 19 nt, Artificial Sequence
  Description of Artificial Sequence: Synthetic oligonucleotide
  Antisense Strand to SEQ ID NO: 356069
aaauacaccguguuagcca

SEQ ID NO: 356071 - RNA, 19 nt, Artificial Sequence
  Description of Artificial Sequence: Synthetic oligonucleotide
  Sense Strand Starting at position 476 of SEQ ID NO: 315255
gccagaucaucccggccau

SEQ ID NO: 356072 - RNA, 19 nt, Artificial Sequence
  Description of Artificial Sequence: Synthetic oligonucleotide
  Antisense Strand to SEQ ID NO: 356071
auggccgggaugaucuggc

SEQ ID NO: 356073 - RNA, 19 nt, Artificial Sequence
  Description of Artificial Sequence: Synthetic oligonucleotide
  Sense Strand Starting at position 476 of SEQ ID NO: 315657
cggccaacaugaucugauu

SEQ ID NO: 356074 - RNA, 19 nt, Artificial Sequence
  Description of Artificial Sequence: Synthetic oligonucleotide
  Antisense Strand to SEQ ID NO: 356073
aaucagaucauguuggccg

SEQ ID NO: 356075 - RNA, 19 nt, Artificial Sequence
  Description of Artificial Sequence: Synthetic oligonucleotide
  Sense Strand Starting at position 476 of SEQ ID NO: 315685
ccuucugguugcuaugagu

SEQ ID NO: 356076 - RNA, 19 nt, Artificial Sequence
  Description of Artificial Sequence: Synthetic oligonucleotide
  Antisense Strand to SEQ ID NO: 356075
acucauagcaaccagaagg

SEQ ID NO: 356077 - RNA, 19 nt, Artificial Sequence
  Description of Artificial Sequence: Synthetic oligonucleotide
  Sense Strand Starting at position 476 of SEQ ID NO: 315688
ucugguugcuaugaguagu

SEQ ID NO: 356078 - RNA, 19 nt, Artificial Sequence
  Description of Artificial Sequence: Synthetic oligonucleotide
  Antisense Strand to SEQ ID NO: 356077
acuacucauagcaaccaga

SEQ ID NO: 356079 - RNA, 19 nt, Artificial Sequence
  Description of Artificial Sequence: Synthetic oligonucleotide
  Sense Strand Starting at position 476 of SEQ ID NO: 315691
gguugcuaugaguaguaga

SEQ ID NO: 356080 - RNA, 19 nt, Artificial Sequence
  Description of Artificial Sequence: Synthetic oligonucleotide
  Antisense Strand to SEQ ID NO: 356079
ucuacuacucauagcaacc

SEQ ID NO: 356081 - RNA, 19 nt, Artificial Sequence
  Description of Artificial Sequence: Synthetic oligonucleotide
  Sense Strand Starting at position 476 of SEQ ID NO: 315701
aguaguagaaccugaggau

SEQ ID NO: 356082 - RNA, 19 nt, Artificial Sequence
  Description of Artificial Sequence: Synthetic oligonucleotide
  Antisense Strand to SEQ ID NO: 356081
auccucagguucuacuacu

SEQ ID NO: 356083 - RNA, 19 nt, Artificial Sequence
  Description of Artificial Sequence: Synthetic oligonucleotide
  Sense Strand Starting at position 476 of SEQ ID NO: 315745
ggcaccauucgagggaaau

SEQ ID NO: 356084 - RNA, 19 nt, Artificial Sequence
  Description of Artificial Sequence: Synthetic oligonucleotide
  Antisense Strand to SEQ ID NO: 356083
auuucccucgaauggugcc

SEQ ID NO: 356085 - RNA, 19 nt, Artificial Sequence
  Description of Artificial Sequence: Synthetic oligonucleotide
  Sense Strand Starting at position 476 of SEQ ID NO: 315746
gcaccauucgagggaaaug

SEQ ID NO: 356086 - RNA, 19 nt, Artificial Sequence
  Description of Artificial Sequence: Synthetic oligonucleotide
  Antisense Strand to SEQ ID NO: 356085
cauuucccucgaauggugc

SEQ ID NO: 356087 - RNA, 19 nt, Artificial Sequence
  Description of Artificial Sequence: Synthetic oligonucleotide
  Sense Strand Starting at position 476 of SEQ ID NO: 315830
gagcaauuauaacgggagu

SEQ ID NO: 356088 - RNA, 19 nt, Artificial Sequence
  Description of Artificial Sequence: Synthetic oligonucleotide
  Antisense Strand to SEQ ID NO: 356087
acucccguuauaauugcuc

SEQ ID NO: 356089 - RNA, 19 nt, Artificial Sequence
  Description of Artificial Sequence: Synthetic oligonucleotide
  Sense Strand Starting at position 476 of SEQ ID NO: 315832
gcaauuauaacgggaguga

SEQ ID NO: 356090 - RNA, 19 nt, Artificial Sequence
  Description of Artificial Sequence: Synthetic oligonucleotide
  Antisense Strand to SEQ ID NO: 356089
ucacucccguuauaauugc

SEQ ID NO: 356091 - RNA, 19 nt, Artificial Sequence
  Description of Artificial Sequence: Synthetic oligonucleotide
  Sense Strand Starting at position 476 of SEQ ID NO: 315836
uuauaacgggagugaguuu

SEQ ID NO: 356092 - RNA, 19 nt, Artificial Sequence
  Description of Artificial Sequence: Synthetic oligonucleotide
  Antisense Strand to SEQ ID NO: 356091
aaacucacucccguuauaa

SEQ ID NO: 356093 - RNA, 19 nt, Artificial Sequence
  Description of Artificial Sequence: Synthetic oligonucleotide
  Sense Strand Starting at position 476 of SEQ ID NO: 315924
acaccuaaagaucggucua

SEQ ID NO: 356094 - RNA, 19 nt, Artificial Sequence
  Description of Artificial Sequence: Synthetic oligonucleotide
  Antisense Strand to SEQ ID NO: 356093
uagaccgaucuuuaggugu

SEQ ID NO: 356095 - RNA, 19 nt, Artificial Sequence
  Description of Artificial Sequence: Synthetic oligonucleotide
  Sense Strand Starting at position 476 of SEQ ID NO: 315926
accuaaagaucggucuaaa

SEQ ID NO: 356096 - RNA, 19 nt, Artificial Sequence
  Description of Artificial Sequence: Synthetic oligonucleotide
  Antisense Strand to SEQ ID NO: 356095
uuuagaccgaucuuuaggu

SEQ ID NO: 356097 - RNA, 19 nt, Artificial Sequence
  Description of Artificial Sequence: Synthetic oligonucleotide
  Sense Strand Starting at position 476 of SEQ ID NO: 316627
acgcguccucuugcaacua

SEQ ID NO: 356098 - RNA, 19 nt, Artificial Sequence
  Description of Artificial Sequence: Synthetic oligonucleotide
  Antisense Strand to SEQ ID NO: 356097
uaguugcaagaggacgcgu

SEQ ID NO: 356099 - RNA, 19 nt, Artificial Sequence
  Description of Artificial Sequence: Synthetic oligonucleotide
  Sense Strand Starting at position 476 of SEQ ID NO: 316696
cagggucuccuccgcgaua

SEQ ID NO: 356100 - RNA, 19 nt, Artificial Sequence
  Description of Artificial Sequence: Synthetic oligonucleotide
  Antisense Strand to SEQ ID NO: 356099
uaucgcggaggagacccug

SEQ ID NO: 356101 - RNA, 19 nt, Artificial Sequence
  Description of Artificial Sequence: Synthetic oligonucleotide
  Sense Strand Starting at position 476 of SEQ ID NO: 317325
auagucaauggcggacaua

SEQ ID NO: 356102 - RNA, 19 nt, Artificial Sequence
  Description of Artificial Sequence: Synthetic oligonucleotide
  Antisense Strand to SEQ ID NO: 356101
uauguccgccauugacuau

SEQ ID NO: 356103 - RNA, 19 nt, Artificial Sequence
  Description of Artificial Sequence: Synthetic oligonucleotide
  Sense Strand Starting at position 476 of SEQ ID NO: 317518
cggcuuucuucccacggau

SEQ ID NO: 356104 - RNA, 19 nt, Artificial Sequence
  Description of Artificial Sequence: Synthetic oligonucleotide
  Antisense Strand to SEQ ID NO: 356103
auccgugggaagaaagccg

SEQ ID NO: 356105 - RNA, 19 nt, Artificial Sequence
  Description of Artificial Sequence: Synthetic oligonucleotide
  Sense Strand Starting at position 476 of SEQ ID NO: 317553
caggacuguccuggagcau

SEQ ID NO: 356106 - RNA, 19 nt, Artificial Sequence
  Description of Artificial Sequence: Synthetic oligonucleotide
  Antisense Strand to SEQ ID NO: 356105
augcuccaggacaguccug

SEQ ID NO: 356107 - RNA, 19 nt, Artificial Sequence
  Description of Artificial Sequence: Synthetic oligonucleotide
  Sense Strand Starting at position 476 of SEQ ID NO: 317708
cggauuaggucgcuggcua

SEQ ID NO: 356108 - RNA, 19 nt, Artificial Sequence
  Description of Artificial Sequence: Synthetic oligonucleotide
  Antisense Strand to SEQ ID NO: 356107
uagccagcgaccuaauccg

SEQ ID NO: 356109 - RNA, 19 nt, Artificial Sequence
  Description of Artificial Sequence: Synthetic oligonucleotide
  Sense Strand Starting at position 476 of SEQ ID NO: 317709
ggauuaggucgcuggcuaa

SEQ ID NO: 356110 - RNA, 19 nt, Artificial Sequence
  Description of Artificial Sequence: Synthetic oligonucleotide
  Antisense Strand to SEQ ID NO: 356109
uuagccagcgaccuaaucc

SEQ ID NO: 356111 - RNA, 19 nt, Artificial Sequence
  Description of Artificial Sequence: Synthetic oligonucleotide
  Sense Strand Starting at position 476 of SEQ ID NO: 317750
uuuguagacuugugugguu

SEQ ID NO: 356112 - RNA, 19 nt, Artificial Sequence
  Description of Artificial Sequence: Synthetic oligonucleotide
  Antisense Strand to SEQ ID NO: 356111
aaccacacaagucuacaaa

SEQ ID NO: 356113 - RNA, 19 nt, Artificial Sequence
  Description of Artificial Sequence: Synthetic oligonucleotide
  Sense Strand Starting at position 476 of SEQ ID NO: 317753
guagacuugugugguugga

SEQ ID NO: 356114 - RNA, 19 nt, Artificial Sequence
  Description of Artificial Sequence: Synthetic oligonucleotide
  Antisense Strand to SEQ ID NO: 356113
uccaaccacacaagucuac

SEQ ID NO: 356115 - RNA, 19 nt, Artificial Sequence
  Description of Artificial Sequence: Synthetic oligonucleotide
  Sense Strand Starting at position 476 of SEQ ID NO: 317755
agacuugugugguuggaaa

SEQ ID NO: 356116 - RNA, 19 nt, Artificial Sequence
  Description of Artificial Sequence: Synthetic oligonucleotide
  Antisense Strand to SEQ ID NO: 356115
uuuccaaccacacaagucu

SEQ ID NO: 356117 - RNA, 19 nt, Artificial Sequence
  Description of Artificial Sequence: Synthetic oligonucleotide
  Sense Strand Starting at position 476 of SEQ ID NO: 317757
acuugugugguuggaaagu

SEQ ID NO: 356118 - RNA, 19 nt, Artificial Sequence
  Description of Artificial Sequence: Synthetic oligonucleotide
  Antisense Strand to SEQ ID NO: 356117
acuuuccaaccacacaagu

SEQ ID NO: 356119 - RNA, 19 nt, Artificial Sequence
  Description of Artificial Sequence: Synthetic oligonucleotide
  Sense Strand Starting at position 476 of SEQ ID NO: 317846
ccgcguuguuggaaaguca

SEQ ID NO: 356120 - RNA, 19 nt, Artificial Sequence
  Description of Artificial Sequence: Synthetic oligonucleotide
  Antisense Strand to SEQ ID NO: 356119
ugacuuuccaacaacgcgg

SEQ ID NO: 356121 - RNA, 19 nt, Artificial Sequence
  Description of Artificial Sequence: Synthetic oligonucleotide
  Sense Strand Starting at position 476 of SEQ ID NO: 317865
guugcugggugacuuuaaa

SEQ ID NO: 356122 - RNA, 19 nt, Artificial Sequence
  Description of Artificial Sequence: Synthetic oligonucleotide
  Antisense Strand to SEQ ID NO: 356121
uuuaaagucacccagcaac

SEQ ID NO: 356123 - RNA, 19 nt, Artificial Sequence
  Description of Artificial Sequence: Synthetic oligonucleotide
  Sense Strand Starting at position 476 of SEQ ID NO: 318006
aagcgauucucuggaggug

SEQ ID NO: 356124 - RNA, 19 nt, Artificial Sequence
  Description of Artificial Sequence: Synthetic oligonucleotide
  Antisense Strand to SEQ ID NO: 356123
caccuccagagaaucgcuu

SEQ ID NO: 356125 - RNA, 19 nt, Artificial Sequence
  Description of Artificial Sequence: Synthetic oligonucleotide
  Sense Strand Starting at position 476 of SEQ ID NO: 318944
guccgaauucaguggucca

SEQ ID NO: 356126 - RNA, 19 nt, Artificial Sequence
  Description of Artificial Sequence: Synthetic oligonucleotide
  Antisense Strand to SEQ ID NO: 356125
uggaccacugaauucggac

SEQ ID NO: 356127 - RNA, 19 nt, Artificial Sequence
  Description of Artificial Sequence: Synthetic oligonucleotide
  Sense Strand Starting at position 476 of SEQ ID NO: 319070
gcugguucugccucaucuu

SEQ ID NO: 356128 - RNA, 19 nt, Artificial Sequence
  Description of Artificial Sequence: Synthetic oligonucleotide
  Antisense Strand to SEQ ID NO: 356127
aagaugaggcagaaccagc

SEQ ID NO: 356129 - RNA, 19 nt, Artificial Sequence
  Description of Artificial Sequence: Synthetic oligonucleotide
  Sense Strand Starting at position 476 of SEQ ID NO: 319164
uugcuuugcuucccagauc

SEQ ID NO: 356130 - RNA, 19 nt, Artificial Sequence
  Description of Artificial Sequence: Synthetic oligonucleotide
  Antisense Strand to SEQ ID NO: 356129
gaucugggaagcaaagcaa

SEQ ID NO: 356131 - RNA, 19 nt, Artificial Sequence
  Description of Artificial Sequence: Synthetic oligonucleotide
  Sense Strand Starting at position 477 of SEQ ID NO: 315894
agucacaagguuugcaaau

SEQ ID NO: 356132 - RNA, 19 nt, Artificial Sequence
  Description of Artificial Sequence: Synthetic oligonucleotide
  Antisense Strand to SEQ ID NO: 356131
auuugcaaaccuugugacu

SEQ ID NO: 356133 - RNA, 19 nt, Artificial Sequence
  Description of Artificial Sequence: Synthetic oligonucleotide
  Sense Strand Starting at position 477 of SEQ ID NO: 315905
uugcaaaugccaggaaagu

SEQ ID NO: 356134 - RNA, 19 nt, Artificial Sequence
  Description of Artificial Sequence: Synthetic oligonucleotide
  Antisense Strand to SEQ ID NO: 356133
acuuuccuggcauuugcaa

SEQ ID NO: 356135 - RNA, 19 nt, Artificial Sequence
  Description of Artificial Sequence: Synthetic oligonucleotide
  Sense Strand Starting at position 477 of SEQ ID NO: 316007
uuuauuaugcugugagacu

SEQ ID NO: 356136 - RNA, 19 nt, Artificial Sequence
  Description of Artificial Sequence: Synthetic oligonucleotide
  Antisense Strand to SEQ ID NO: 356135
agucucacagcauaauaaa

SEQ ID NO: 356137 - RNA, 19 nt, Artificial Sequence
  Description of Artificial Sequence: Synthetic oligonucleotide
  Sense Strand Starting at position 477 of SEQ ID NO: 316018
gugagacugcaaugaagaa

SEQ ID NO: 356138 - RNA, 19 nt, Artificial Sequence
  Description of Artificial Sequence: Synthetic oligonucleotide
  Antisense Strand to SEQ ID NO: 356137
uucuucauugcagucucac

SEQ ID NO: 356139 - RNA, 19 nt, Artificial Sequence
  Description of Artificial Sequence: Synthetic oligonucleotide
  Sense Strand Starting at position 477 of SEQ ID NO: 316030
ugaagaaaucccggagcgu

SEQ ID NO: 356140 - RNA, 19 nt, Artificial Sequence
  Description of Artificial Sequence: Synthetic oligonucleotide
  Antisense Strand to SEQ ID NO: 356139
acgcuccgggauuucuuca

SEQ ID NO: 356141 - RNA, 19 nt, Artificial Sequence
  Description of Artificial Sequence: Synthetic oligonucleotide
  Sense Strand Starting at position 477 of SEQ ID NO: 316031
gaagaaaucccggagcguc

SEQ ID NO: 356142 - RNA, 19 nt, Artificial Sequence
  Description of Artificial Sequence: Synthetic oligonucleotide
  Antisense Strand to SEQ ID NO: 356141
gacgcuccgggauuucuuc

SEQ ID NO: 356143 - RNA, 19 nt, Artificial Sequence
  Description of Artificial Sequence: Synthetic oligonucleotide
  Sense Strand Starting at position 477 of SEQ ID NO: 316077
ccgcaagcacuggguuauu

SEQ ID NO: 356144 - RNA, 19 nt, Artificial Sequence
  Description of Artificial Sequence: Synthetic oligonucleotide
  Antisense Strand to SEQ ID NO: 356143
aauaacccagugcuugcgg

SEQ ID NO: 356145 - RNA, 19 nt, Artificial Sequence
  Description of Artificial Sequence: Synthetic oligonucleotide
  Sense Strand Starting at position 477 of SEQ ID NO: 316089
gguuauuugaggcggguaa

SEQ ID NO: 356146 - RNA, 19 nt, Artificial Sequence
  Description of Artificial Sequence: Synthetic oligonucleotide
  Antisense Strand to SEQ ID NO: 356145
uuacccgccucaaauaacc

SEQ ID NO: 356147 - RNA, 19 nt, Artificial Sequence
  Description of Artificial Sequence: Synthetic oligonucleotide
  Sense Strand Starting at position 477 of SEQ ID NO: 316090
guuauuugaggcggguaaa

SEQ ID NO: 356148 - RNA, 19 nt, Artificial Sequence
  Description of Artificial Sequence: Synthetic oligonucleotide
  Antisense Strand to SEQ ID NO: 356147
uuuacccgccucaaauaac

SEQ ID NO: 356149 - RNA, 19 nt, Artificial Sequence
  Description of Artificial Sequence: Synthetic oligonucleotide
  Sense Strand Starting at position 477 of SEQ ID NO: 316224
gggcguugggcacaguuaa

SEQ ID NO: 356150 - RNA, 19 nt, Artificial Sequence
  Description of Artificial Sequence: Synthetic oligonucleotide
  Antisense Strand to SEQ ID NO: 356149
uuaacugugcccaacgccc

SEQ ID NO: 356151 - RNA, 19 nt, Artificial Sequence
  Description of Artificial Sequence: Synthetic oligonucleotide
  Sense Strand Starting at position 477 of SEQ ID NO: 316225
ggcguugggcacaguuaau

SEQ ID NO: 356152 - RNA, 19 nt, Artificial Sequence
  Description of Artificial Sequence: Synthetic oligonucleotide
  Antisense Strand to SEQ ID NO: 356151
auuaacugugcccaacgcc

SEQ ID NO: 356153 - RNA, 19 nt, Artificial Sequence
  Description of Artificial Sequence: Synthetic oligonucleotide
  Sense Strand Starting at position 477 of SEQ ID NO: 316240
uaaugagauuuccggcuua

SEQ ID NO: 356154 - RNA, 19 nt, Artificial Sequence
  Description of Artificial Sequence: Synthetic oligonucleotide
  Antisense Strand to SEQ ID NO: 356153
uaagccggaaaucucauua

SEQ ID NO: 356155 - RNA, 19 nt, Artificial Sequence
  Description of Artificial Sequence: Synthetic oligonucleotide
  Sense Strand Starting at position 477 of SEQ ID NO: 316537
agggccauucguuguggau

SEQ ID NO: 356156 - RNA, 19 nt, Artificial Sequence
  Description of Artificial Sequence: Synthetic oligonucleotide
  Antisense Strand to SEQ ID NO: 356155
auccacaacgaauggcccu

SEQ ID NO: 356157 - RNA, 19 nt, Artificial Sequence
  Description of Artificial Sequence: Synthetic oligonucleotide
  Sense Strand Starting at position 477 of SEQ ID NO: 316552
ggaucugggugguccuaga

SEQ ID NO: 356158 - RNA, 19 nt, Artificial Sequence
  Description of Artificial Sequence: Synthetic oligonucleotide
  Antisense Strand to SEQ ID NO: 356157
ucuaggaccacccagaucc

SEQ ID NO: 356159 - RNA, 19 nt, Artificial Sequence
  Description of Artificial Sequence: Synthetic oligonucleotide
  Sense Strand Starting at position 477 of SEQ ID NO: 317356
uucuaaucgggcuggcaua

SEQ ID NO: 356160 - RNA, 19 nt, Artificial Sequence
  Description of Artificial Sequence: Synthetic oligonucleotide
  Antisense Strand to SEQ ID NO: 356159
uaugccagcccgauuagaa

SEQ ID NO: 356161 - RNA, 19 nt, Artificial Sequence
  Description of Artificial Sequence: Synthetic oligonucleotide
  Sense Strand Starting at position 477 of SEQ ID NO: 317467
gagacauguucaguagggu

SEQ ID NO: 356162 - RNA, 19 nt, Artificial Sequence
  Description of Artificial Sequence: Synthetic oligonucleotide
  Antisense Strand to SEQ ID NO: 356161
acccuacugaacaugucuc

SEQ ID NO: 356163 - RNA, 19 nt, Artificial Sequence
  Description of Artificial Sequence: Synthetic oligonucleotide
  Sense Strand Starting at position 477 of SEQ ID NO: 317480
uagggucagggcugagaaa

SEQ ID NO: 356164 - RNA, 19 nt, Artificial Sequence
  Description of Artificial Sequence: Synthetic oligonucleotide
  Antisense Strand to SEQ ID NO: 356163
uuucucagcccugacccua

SEQ ID NO: 356165 - RNA, 19 nt, Artificial Sequence
  Description of Artificial Sequence: Synthetic oligonucleotide
  Sense Strand Starting at position 477 of SEQ ID NO: 317559
agggcauaauugggagaaa

SEQ ID NO: 356166 - RNA, 19 nt, Artificial Sequence
  Description of Artificial Sequence: Synthetic oligonucleotide
  Antisense Strand to SEQ ID NO: 356165
uuucucccaauuaugcccu

SEQ ID NO: 356167 - RNA, 19 nt, Artificial Sequence
  Description of Artificial Sequence: Synthetic oligonucleotide
  Sense Strand Starting at position 477 of SEQ ID NO: 317560
gggcauaauugggagaaac

SEQ ID NO: 356168 - RNA, 19 nt, Artificial Sequence
  Description of Artificial Sequence: Synthetic oligonucleotide
  Antisense Strand to SEQ ID NO: 356167
guuucucccaauuaugccc

SEQ ID NO: 356169 - RNA, 19 nt, Artificial Sequence
  Description of Artificial Sequence: Synthetic oligonucleotide
  Sense Strand Starting at position 477 of SEQ ID NO: 317615
cuccuuaucuuguuguaag

SEQ ID NO: 356170 - RNA, 19 nt, Artificial Sequence
  Description of Artificial Sequence: Synthetic oligonucleotide
  Antisense Strand to SEQ ID NO: 356169
cuuacaacaagauaaggag

SEQ ID NO: 356171 - RNA, 19 nt, Artificial Sequence
  Description of Artificial Sequence: Synthetic oligonucleotide
  Sense Strand Starting at position 477 of SEQ ID NO: 317713
cacaguaggaagugguuaa

SEQ ID NO: 356172 - RNA, 19 nt, Artificial Sequence
  Description of Artificial Sequence: Synthetic oligonucleotide
  Antisense Strand to SEQ ID NO: 356171
uuaaccacuuccuacugug

SEQ ID NO: 356173 - RNA, 19 nt, Artificial Sequence
  Description of Artificial Sequence: Synthetic oligonucleotide
  Sense Strand Starting at position 477 of SEQ ID NO: 317741
gugacucuggacugggauu

SEQ ID NO: 356174 - RNA, 19 nt, Artificial Sequence
  Description of Artificial Sequence: Synthetic oligonucleotide
  Antisense Strand to SEQ ID NO: 356173
aaucccaguccagagucac

SEQ ID NO: 356175 - RNA, 19 nt, Artificial Sequence
  Description of Artificial Sequence: Synthetic oligonucleotide
  Sense Strand Starting at position 477 of SEQ ID NO: 318554
uugacacauuugugcauga

SEQ ID NO: 356176 - RNA, 19 nt, Artificial Sequence
  Description of Artificial Sequence: Synthetic oligonucleotide
  Antisense Strand to SEQ ID NO: 356175
ucaugcacaaaugugucaa

SEQ ID NO: 356177 - RNA, 19 nt, Artificial Sequence
  Description of Artificial Sequence: Synthetic oligonucleotide
  Sense Strand Starting at position 477 of SEQ ID NO: 318568
caugaauaccuguguguac

SEQ ID NO: 356178 - RNA, 19 nt, Artificial Sequence
  Description of Artificial Sequence: Synthetic oligonucleotide
  Antisense Strand to SEQ ID NO: 356177
guacacacagguauucaug

SEQ ID NO: 356179 - RNA, 19 nt, Artificial Sequence
  Description of Artificial Sequence: Synthetic oligonucleotide
  Sense Strand Starting at position 477 of SEQ ID NO: 318569
augaauaccuguguguaca

SEQ ID NO: 356180 - RNA, 19 nt, Artificial Sequence
  Description of Artificial Sequence: Synthetic oligonucleotide
  Antisense Strand to SEQ ID NO: 356179
uguacacacagguauucau

SEQ ID NO: 356181 - RNA, 19 nt, Artificial Sequence
  Description of Artificial Sequence: Synthetic oligonucleotide
  Sense Strand Starting at position 477 of SEQ ID NO: 318570
ugaauaccuguguguacau

SEQ ID NO: 356182 - RNA, 19 nt, Artificial Sequence
  Description of Artificial Sequence: Synthetic oligonucleotide
  Antisense Strand to SEQ ID NO: 356181
auguacacacagguauuca

SEQ ID NO: 356183 - RNA, 19 nt, Artificial Sequence
  Description of Artificial Sequence: Synthetic oligonucleotide
  Sense Strand Starting at position 477 of SEQ ID NO: 318615
gagugcaugugcucuuaua

SEQ ID NO: 356184 - RNA, 19 nt, Artificial Sequence
  Description of Artificial Sequence: Synthetic oligonucleotide
  Antisense Strand to SEQ ID NO: 356183
uauaagagcacaugcacuc

SEQ ID NO: 356185 - RNA, 19 nt, Artificial Sequence
  Description of Artificial Sequence: Synthetic oligonucleotide
  Sense Strand Starting at position 477 of SEQ ID NO: 318698
gugaauaugcuuuguguau

SEQ ID NO: 356186 - RNA, 19 nt, Artificial Sequence
  Description of Artificial Sequence: Synthetic oligonucleotide
  Antisense Strand to SEQ ID NO: 356185
auacacaaagcauauucac

SEQ ID NO: 356187 - RNA, 19 nt, Artificial Sequence
  Description of Artificial Sequence: Synthetic oligonucleotide
  Sense Strand Starting at position 477 of SEQ ID NO: 318699
ugaauaugcuuuguguauu

SEQ ID NO: 356188 - RNA, 19 nt, Artificial Sequence
  Description of Artificial Sequence: Synthetic oligonucleotide
  Antisense Strand to SEQ ID NO: 356187
aauacacaaagcauauuca

SEQ ID NO: 356189 - RNA, 19 nt, Artificial Sequence
  Description of Artificial Sequence: Synthetic oligonucleotide
  Sense Strand Starting at position 477 of SEQ ID NO: 318758
guagguuugcaugugugca

SEQ ID NO: 356190 - RNA, 19 nt, Artificial Sequence
  Description of Artificial Sequence: Synthetic oligonucleotide
  Antisense Strand to SEQ ID NO: 356189
ugcacacaugcaaaccuac

SEQ ID NO: 356191 - RNA, 19 nt, Artificial Sequence
  Description of Artificial Sequence: Synthetic oligonucleotide
  Sense Strand Starting at position 477 of SEQ ID NO: 318766
gcaugugugcacuugcuua

SEQ ID NO: 356192 - RNA, 19 nt, Artificial Sequence
  Description of Artificial Sequence: Synthetic oligonucleotide
  Antisense Strand to SEQ ID NO: 356191
uaagcaagugcacacaugc

SEQ ID NO: 356193 - RNA, 19 nt, Artificial Sequence
  Description of Artificial Sequence: Synthetic oligonucleotide
  Sense Strand Starting at position 477 of SEQ ID NO: 318795
uguaaacaugccuguuugu

SEQ ID NO: 356194 - RNA, 19 nt, Artificial Sequence
  Description of Artificial Sequence: Synthetic oligonucleotide
  Antisense Strand to SEQ ID NO: 356193
acaaacaggcauguuuaca

SEQ ID NO: 356195 - RNA, 19 nt, Artificial Sequence
  Description of Artificial Sequence: Synthetic oligonucleotide
  Sense Strand Starting at position 477 of SEQ ID NO: 318806
cuguuuguaccugagcaua

SEQ ID NO: 356196 - RNA, 19 nt, Artificial Sequence
  Description of Artificial Sequence: Synthetic oligonucleotide
  Antisense Strand to SEQ ID NO: 356195
uaugcucagguacaaacag

SEQ ID NO: 356197 - RNA, 19 nt, Artificial Sequence
  Description of Artificial Sequence: Synthetic oligonucleotide
  Sense Strand Starting at position 477 of SEQ ID NO: 318843
caucucugccuguguauga

SEQ ID NO: 356198 - RNA, 19 nt, Artificial Sequence
  Description of Artificial Sequence: Synthetic oligonucleotide
  Antisense Strand to SEQ ID NO: 356197
ucauacacaggcagagaug

SEQ ID NO: 356199 - RNA, 19 nt, Artificial Sequence
  Description of Artificial Sequence: Synthetic oligonucleotide
  Sense Strand Starting at position 477 of SEQ ID NO: 318930
gucucuaaucugcagaagu

SEQ ID NO: 356200 - RNA, 19 nt, Artificial Sequence
  Description of Artificial Sequence: Synthetic oligonucleotide
  Antisense Strand to SEQ ID NO: 356199
acuucugcagauuagagac

SEQ ID NO: 356201 - RNA, 19 nt, Artificial Sequence
  Description of Artificial Sequence: Synthetic oligonucleotide
  Sense Strand Starting at position 477 of SEQ ID NO: 318954
ggcucuuccagagaauguu

SEQ ID NO: 356202 - RNA, 19 nt, Artificial Sequence
  Description of Artificial Sequence: Synthetic oligonucleotide
  Antisense Strand to SEQ ID NO: 356201
aacauucucuggaagagcc

SEQ ID NO: 356203 - RNA, 19 nt, Artificial Sequence
  Description of Artificial Sequence: Synthetic oligonucleotide
  Sense Strand Starting at position 477 of SEQ ID NO: 318980
ccuguugccagguggagaa

SEQ ID NO: 356204 - RNA, 19 nt, Artificial Sequence
  Description of Artificial Sequence: Synthetic oligonucleotide
  Antisense Strand to SEQ ID NO: 356203
uucuccaccuggcaacagg

SEQ ID NO: 356205 - RNA, 19 nt, Artificial Sequence
  Description of Artificial Sequence: Synthetic oligonucleotide
  Sense Strand Starting at position 477 of SEQ ID NO: 319165
cucacugccgggcagaaau

SEQ ID NO: 356206 - RNA, 19 nt, Artificial Sequence
  Description of Artificial Sequence: Synthetic oligonucleotide
  Antisense Strand to SEQ ID NO: 356205
auuucugcccggcagugag

SEQ ID NO: 356207 - RNA, 19 nt, Artificial Sequence
  Description of Artificial Sequence: Synthetic oligonucleotide
  Sense Strand Starting at position 477 of SEQ ID NO: 319175
ggcagaaauuguucagguu

SEQ ID NO: 356208 - RNA, 19 nt, Artificial Sequence
  Description of Artificial Sequence: Synthetic oligonucleotide
  Antisense Strand to SEQ ID NO: 356207
aaccugaacaauuucugcc

SEQ ID NO: 356209 - RNA, 19 nt, Artificial Sequence
  Description of Artificial Sequence: Synthetic oligonucleotide
  Sense Strand Starting at position 477 of SEQ ID NO: 319176
gcagaaauuguucagguug

SEQ ID NO: 356210 - RNA, 19 nt, Artificial Sequence
  Description of Artificial Sequence: Synthetic oligonucleotide
  Antisense Strand to SEQ ID NO: 356209
caaccugaacaauuucugc

SEQ ID NO: 356211 - RNA, 19 nt, Artificial Sequence
  Description of Artificial Sequence: Synthetic oligonucleotide
  Sense Strand Starting at position 478 of SEQ ID NO: 315282
gaaguagauaaugguguua

SEQ ID NO: 356212 - RNA, 19 nt, Artificial Sequence
  Description of Artificial Sequence: Synthetic oligonucleotide
  Antisense Strand to SEQ ID NO: 356211
uaacaccauuaucuacuuc

SEQ ID NO: 356213 - RNA, 19 nt, Artificial Sequence
  Description of Artificial Sequence: Synthetic oligonucleotide
  Sense Strand Starting at position 478 of SEQ ID NO: 315297
guuacugugagauauaagu

SEQ ID NO: 356214 - RNA, 19 nt, Artificial Sequence
  Description of Artificial Sequence: Synthetic oligonucleotide
  Antisense Strand to SEQ ID NO: 356213
acuuauaucucacaguaac

SEQ ID NO: 356215 - RNA, 19 nt, Artificial Sequence
  Description of Artificial Sequence: Synthetic oligonucleotide
  Sense Strand Starting at position 478 of SEQ ID NO: 315557
aaaguaugugcugacauac

SEQ ID NO: 356216 - RNA, 19 nt, Artificial Sequence
  Description of Artificial Sequence: Synthetic oligonucleotide
  Antisense Strand to SEQ ID NO: 356215
guaugucagcacauacuuu

SEQ ID NO: 356217 - RNA, 19 nt, Artificial Sequence
  Description of Artificial Sequence: Synthetic oligonucleotide
  Sense Strand Starting at position 478 of SEQ ID NO: 315620
aggccaaagacucggaaua

SEQ ID NO: 356218 - RNA, 19 nt, Artificial Sequence
  Description of Artificial Sequence: Synthetic oligonucleotide
  Antisense Strand to SEQ ID NO: 356217
uauuccgagucuuuggccu

SEQ ID NO: 356219 - RNA, 19 nt, Artificial Sequence
  Description of Artificial Sequence: Synthetic oligonucleotide
  Sense Strand Starting at position 478 of SEQ ID NO: 315621
ggccaaagacucggaauaa

SEQ ID NO: 356220 - RNA, 19 nt, Artificial Sequence
  Description of Artificial Sequence: Synthetic oligonucleotide
  Antisense Strand to SEQ ID NO: 356219
uuauuccgagucuuuggcc

SEQ ID NO: 356221 - RNA, 19 nt, Artificial Sequence
  Description of Artificial Sequence: Synthetic oligonucleotide
  Sense Strand Starting at position 478 of SEQ ID NO: 315632
cggaauaacuuccuaaaua

SEQ ID NO: 356222 - RNA, 19 nt, Artificial Sequence
  Description of Artificial Sequence: Synthetic oligonucleotide
  Antisense Strand to SEQ ID NO: 356221
uauuuaggaaguuauuccg

SEQ ID NO: 356223 - RNA, 19 nt, Artificial Sequence
  Description of Artificial Sequence: Synthetic oligonucleotide
  Sense Strand Starting at position 478 of SEQ ID NO: 315649
uaauguuuaugggcccaca

SEQ ID NO: 356224 - RNA, 19 nt, Artificial Sequence
  Description of Artificial Sequence: Synthetic oligonucleotide
  Antisense Strand to SEQ ID NO: 356223
ugugggcccauaaacauua

SEQ ID NO: 356225 - RNA, 19 nt, Artificial Sequence
  Description of Artificial Sequence: Synthetic oligonucleotide
  Sense Strand Starting at position 478 of SEQ ID NO: 315720
uguauauacagaggguuga

SEQ ID NO: 356226 - RNA, 19 nt, Artificial Sequence
  Description of Artificial Sequence: Synthetic oligonucleotide
  Antisense Strand to SEQ ID NO: 356225
ucaacccucuguauauaca

SEQ ID NO: 356227 - RNA, 19 nt, Artificial Sequence
  Description of Artificial Sequence: Synthetic oligonucleotide
  Sense Strand Starting at position 478 of SEQ ID NO: 315868
agccuaggaucaguaguaa

SEQ ID NO: 356228 - RNA, 19 nt, Artificial Sequence
  Description of Artificial Sequence: Synthetic oligonucleotide
  Antisense Strand to SEQ ID NO: 356227
uuacuacugauccuaggcu

SEQ ID NO: 356229 - RNA, 19 nt, Artificial Sequence
  Description of Artificial Sequence: Synthetic oligonucleotide
  Sense Strand Starting at position 478 of SEQ ID NO: 315973
cuccucuccgacuagaaau

SEQ ID NO: 356230 - RNA, 19 nt, Artificial Sequence
  Description of Artificial Sequence: Synthetic oligonucleotide
  Antisense Strand to SEQ ID NO: 356229
auuucuagucggagaggag

SEQ ID NO: 356231 - RNA, 19 nt, Artificial Sequence
  Description of Artificial Sequence: Synthetic oligonucleotide
  Sense Strand Starting at position 478 of SEQ ID NO: 316030
gucucuguccuagaagaug

SEQ ID NO: 356232 - RNA, 19 nt, Artificial Sequence
  Description of Artificial Sequence: Synthetic oligonucleotide
  Antisense Strand to SEQ ID NO: 356231
caucuucuaggacagagac

SEQ ID NO: 356233 - RNA, 19 nt, Artificial Sequence
  Description of Artificial Sequence: Synthetic oligonucleotide
  Sense Strand Starting at position 478 of SEQ ID NO: 316047
uguacuuaauggucauaaa

SEQ ID NO: 356234 - RNA, 19 nt, Artificial Sequence
  Description of Artificial Sequence: Synthetic oligonucleotide
  Antisense Strand to SEQ ID NO: 356233
uuuaugaccauuaaguaca

SEQ ID NO: 356235 - RNA, 19 nt, Artificial Sequence
  Description of Artificial Sequence: Synthetic oligonucleotide
  Sense Strand Starting at position 478 of SEQ ID NO: 316048
guacuuaauggucauaaac

SEQ ID NO: 356236 - RNA, 19 nt, Artificial Sequence
  Description of Artificial Sequence: Synthetic oligonucleotide
  Antisense Strand to SEQ ID NO: 356235
guuuaugaccauuaaguac

SEQ ID NO: 356237 - RNA, 19 nt, Artificial Sequence
  Description of Artificial Sequence: Synthetic oligonucleotide
  Sense Strand Starting at position 478 of SEQ ID NO: 316329
ucccuuagcgaauagcaau

SEQ ID NO: 356238 - RNA, 19 nt, Artificial Sequence
  Description of Artificial Sequence: Synthetic oligonucleotide
  Antisense Strand to SEQ ID NO: 356237
auugcuauucgcuaaggga

SEQ ID NO: 356239 - RNA, 19 nt, Artificial Sequence
  Description of Artificial Sequence: Synthetic oligonucleotide
  Sense Strand Starting at position 478 of SEQ ID NO: 316335
agcgaauagcaauacauau

SEQ ID NO: 356240 - RNA, 19 nt, Artificial Sequence
  Description of Artificial Sequence: Synthetic oligonucleotide
  Antisense Strand to SEQ ID NO: 356239
auauguauugcuauucgcu

SEQ ID NO: 356241 - RNA, 19 nt, Artificial Sequence
  Description of Artificial Sequence: Synthetic oligonucleotide
  Sense Strand Starting at position 478 of SEQ ID NO: 316367
aaucaucuguguucugaag

SEQ ID NO: 356242 - RNA, 19 nt, Artificial Sequence
  Description of Artificial Sequence: Synthetic oligonucleotide
  Antisense Strand to SEQ ID NO: 356241
cuucagaacacagaugauu

SEQ ID NO: 356243 - RNA, 19 nt, Artificial Sequence
  Description of Artificial Sequence: Synthetic oligonucleotide
  Sense Strand Starting at position 478 of SEQ ID NO: 316533
ggacucagcguagaacuuu

SEQ ID NO: 356244 - RNA, 19 nt, Artificial Sequence
  Description of Artificial Sequence: Synthetic oligonucleotide
  Antisense Strand to SEQ ID NO: 356243
aaaguucuacgcugagucc

SEQ ID NO: 356245 - RNA, 19 nt, Artificial Sequence
  Description of Artificial Sequence: Synthetic oligonucleotide
  Sense Strand Starting at position 478 of SEQ ID NO: 317304
gcagcuucugcuuccuauu

SEQ ID NO: 356246 - RNA, 19 nt, Artificial Sequence
  Description of Artificial Sequence: Synthetic oligonucleotide
  Antisense Strand to SEQ ID NO: 356245
aauaggaagcagaagcugc

SEQ ID NO: 356247 - RNA, 19 nt, Artificial Sequence
  Description of Artificial Sequence: Synthetic oligonucleotide
  Sense Strand Starting at position 478 of SEQ ID NO: 317467
gccaguuugcuuguuagca

SEQ ID NO: 356248 - RNA, 19 nt, Artificial Sequence
  Description of Artificial Sequence: Synthetic oligonucleotide
  Antisense Strand to SEQ ID NO: 356247
ugcuaacaagcaaacuggc

SEQ ID NO: 356249 - RNA, 19 nt, Artificial Sequence
  Description of Artificial Sequence: Synthetic oligonucleotide
  Sense Strand Starting at position 478 of SEQ ID NO: 317475
gcuuguuagcaggaucgaa

SEQ ID NO: 356250 - RNA, 19 nt, Artificial Sequence
  Description of Artificial Sequence: Synthetic oligonucleotide
  Antisense Strand to SEQ ID NO: 356249
uucgauccugcuaacaagc

SEQ ID NO: 356251 - RNA, 19 nt, Artificial Sequence
  Description of Artificial Sequence: Synthetic oligonucleotide
  Sense Strand Starting at position 478 of SEQ ID NO: 317695
aggugcuaagcauauuaaa

SEQ ID NO: 356252 - RNA, 19 nt, Artificial Sequence
  Description of Artificial Sequence: Synthetic oligonucleotide
  Antisense Strand to SEQ ID NO: 356251
uuuaauaugcuuagcaccu

SEQ ID NO: 356253 - RNA, 19 nt, Artificial Sequence
  Description of Artificial Sequence: Synthetic oligonucleotide
  Sense Strand Starting at position 478 of SEQ ID NO: 317751
uggccaauacuuggaaguu

SEQ ID NO: 356254 - RNA, 19 nt, Artificial Sequence
  Description of Artificial Sequence: Synthetic oligonucleotide
  Antisense Strand to SEQ ID NO: 356253
aacuuccaaguauuggcca

SEQ ID NO: 356255 - RNA, 19 nt, Artificial Sequence
  Description of Artificial Sequence: Synthetic oligonucleotide
  Sense Strand Starting at position 478 of SEQ ID NO: 317763
ggaaguuauuguuccuauu

SEQ ID NO: 356256 - RNA, 19 nt, Artificial Sequence
  Description of Artificial Sequence: Synthetic oligonucleotide
  Antisense Strand to SEQ ID NO: 356255
aauaggaacaauaacuucc

SEQ ID NO: 356257 - RNA, 19 nt, Artificial Sequence
  Description of Artificial Sequence: Synthetic oligonucleotide
  Sense Strand Starting at position 478 of SEQ ID NO: 317806
uccagauaucccugccaag

SEQ ID NO: 356258 - RNA, 19 nt, Artificial Sequence
  Description of Artificial Sequence: Synthetic oligonucleotide
  Antisense Strand to SEQ ID NO: 356257
cuuggcagggauaucugga

SEQ ID NO: 356259 - RNA, 19 nt, Artificial Sequence
  Description of Artificial Sequence: Synthetic oligonucleotide
  Sense Strand Starting at position 478 of SEQ ID NO: 317829
ucuucucugcaugaguuaa

SEQ ID NO: 356260 - RNA, 19 nt, Artificial Sequence
  Description of Artificial Sequence: Synthetic oligonucleotide
  Antisense Strand to SEQ ID NO: 356259
uuaacucaugcagagaaga

SEQ ID NO: 356261 - RNA, 19 nt, Artificial Sequence
  Description of Artificial Sequence: Synthetic oligonucleotide
  Sense Strand Starting at position 478 of SEQ ID NO: 317831
uucucugcaugaguuaaac

SEQ ID NO: 356262 - RNA, 19 nt, Artificial Sequence
  Description of Artificial Sequence: Synthetic oligonucleotide
  Antisense Strand to SEQ ID NO: 356261
guuuaacucaugcagagaa

SEQ ID NO: 356263 - RNA, 19 nt, Artificial Sequence
  Description of Artificial Sequence: Synthetic oligonucleotide
  Sense Strand Starting at position 478 of SEQ ID NO: 318010
uuaauuccaguuugacaga

SEQ ID NO: 356264 - RNA, 19 nt, Artificial Sequence
  Description of Artificial Sequence: Synthetic oligonucleotide
  Antisense Strand to SEQ ID NO: 356263
ucugucaaacuggaauuaa

SEQ ID NO: 356265 - RNA, 19 nt, Artificial Sequence
  Description of Artificial Sequence: Synthetic oligonucleotide
  Sense Strand Starting at position 478 of SEQ ID NO: 318046
cuucucugacgucaaacaa

SEQ ID NO: 356266 - RNA, 19 nt, Artificial Sequence
  Description of Artificial Sequence: Synthetic oligonucleotide
  Antisense Strand to SEQ ID NO: 356265
uuguuugacgucagagaag

SEQ ID NO: 356267 - RNA, 19 nt, Artificial Sequence
  Description of Artificial Sequence: Synthetic oligonucleotide
  Sense Strand Starting at position 478 of SEQ ID NO: 318098
agaggaguucuuuguggag

SEQ ID NO: 356268 - RNA, 19 nt, Artificial Sequence
  Description of Artificial Sequence: Synthetic oligonucleotide
  Antisense Strand to SEQ ID NO: 356267
cuccacaaagaacuccucu

SEQ ID NO: 356269 - RNA, 19 nt, Artificial Sequence
  Description of Artificial Sequence: Synthetic oligonucleotide
  Sense Strand Starting at position 478 of SEQ ID NO: 318116
guuucugugccggagaaau

SEQ ID NO: 356270 - RNA, 19 nt, Artificial Sequence
  Description of Artificial Sequence: Synthetic oligonucleotide
  Antisense Strand to SEQ ID NO: 356269
auuucuccggcacagaaac

SEQ ID NO: 356271 - RNA, 19 nt, Artificial Sequence
  Description of Artificial Sequence: Synthetic oligonucleotide
  Sense Strand Starting at position 478 of SEQ ID NO: 318118
uucugugccggagaaaugu

SEQ ID NO: 356272 - RNA, 19 nt, Artificial Sequence
  Description of Artificial Sequence: Synthetic oligonucleotide
  Antisense Strand to SEQ ID NO: 356271
acauuucuccggcacagaa

SEQ ID NO: 356273 - RNA, 19 nt, Artificial Sequence
  Description of Artificial Sequence: Synthetic oligonucleotide
  Sense Strand Starting at position 478 of SEQ ID NO: 318126
cggagaaauguucgaacaa

SEQ ID NO: 356274 - RNA, 19 nt, Artificial Sequence
  Description of Artificial Sequence: Synthetic oligonucleotide
  Antisense Strand to SEQ ID NO: 356273
uuguucgaacauuucuccg

SEQ ID NO: 356275 - RNA, 19 nt, Artificial Sequence
  Description of Artificial Sequence: Synthetic oligonucleotide
  Sense Strand Starting at position 478 of SEQ ID NO: 318225
cuauuagucccuugaaaga

SEQ ID NO: 356276 - RNA, 19 nt, Artificial Sequence
  Description of Artificial Sequence: Synthetic oligonucleotide
  Antisense Strand to SEQ ID NO: 356275
ucuuucaagggacuaauag

SEQ ID NO: 356277 - RNA, 19 nt, Artificial Sequence
  Description of Artificial Sequence: Synthetic oligonucleotide
  Sense Strand Starting at position 478 of SEQ ID NO: 318472
agaagagcucguugggaca

SEQ ID NO: 356278 - RNA, 19 nt, Artificial Sequence
  Description of Artificial Sequence: Synthetic oligonucleotide
  Antisense Strand to SEQ ID NO: 356277
ugucccaacgagcucuucu

SEQ ID NO: 356279 - RNA, 19 nt, Artificial Sequence
  Description of Artificial Sequence: Synthetic oligonucleotide
  Sense Strand Starting at position 478 of SEQ ID NO: 318578
auuguuaaagagugccuau

SEQ ID NO: 356280 - RNA, 19 nt, Artificial Sequence
  Description of Artificial Sequence: Synthetic oligonucleotide
  Antisense Strand to SEQ ID NO: 356279
auaggcacucuuuaacaau

SEQ ID NO: 356281 - RNA, 19 nt, Artificial Sequence
  Description of Artificial Sequence: Synthetic oligonucleotide
  Sense Strand Starting at position 478 of SEQ ID NO: 318638
ucauaauuaccuugaagug

SEQ ID NO: 356282 - RNA, 19 nt, Artificial Sequence
  Description of Artificial Sequence: Synthetic oligonucleotide
  Antisense Strand to SEQ ID NO: 356281
cacuucaagguaauuauga

SEQ ID NO: 356283 - RNA, 19 nt, Artificial Sequence
  Description of Artificial Sequence: Synthetic oligonucleotide
  Sense Strand Starting at position 478 of SEQ ID NO: 318687
aacugaugcccugguaaga

SEQ ID NO: 356284 - RNA, 19 nt, Artificial Sequence
  Description of Artificial Sequence: Synthetic oligonucleotide
  Antisense Strand to SEQ ID NO: 356283
ucuuaccagggcaucaguu

SEQ ID NO: 356285 - RNA, 19 nt, Artificial Sequence
  Description of Artificial Sequence: Synthetic oligonucleotide
  Sense Strand Starting at position 478 of SEQ ID NO: 318733
gguagagcccugcaugaca

SEQ ID NO: 356286 - RNA, 19 nt, Artificial Sequence
  Description of Artificial Sequence: Synthetic oligonucleotide
  Antisense Strand to SEQ ID NO: 356285
ugucaugcagggcucuacc

SEQ ID NO: 356287 - RNA, 19 nt, Artificial Sequence
  Description of Artificial Sequence: Synthetic oligonucleotide
  Sense Strand Starting at position 478 of SEQ ID NO: 318817
ggagucacugugcagugau

SEQ ID NO: 356288 - RNA, 19 nt, Artificial Sequence
  Description of Artificial Sequence: Synthetic oligonucleotide
  Antisense Strand to SEQ ID NO: 356287
aucacugcacagugacucc

SEQ ID NO: 356289 - RNA, 19 nt, Artificial Sequence
  Description of Artificial Sequence: Synthetic oligonucleotide
  Sense Strand Starting at position 478 of SEQ ID NO: 319133
guuauaaagcuuugagagc

SEQ ID NO: 356290 - RNA, 19 nt, Artificial Sequence
  Description of Artificial Sequence: Synthetic oligonucleotide
  Antisense Strand to SEQ ID NO: 356289
gcucucaaagcuuuauaac

SEQ ID NO: 356291 - RNA, 19 nt, Artificial Sequence
  Description of Artificial Sequence: Synthetic oligonucleotide
  Sense Strand Starting at position 479 of SEQ ID NO: 315677
aggugaaccagugacuagu

SEQ ID NO: 356292 - RNA, 19 nt, Artificial Sequence
  Description of Artificial Sequence: Synthetic oligonucleotide
  Antisense Strand to SEQ ID NO: 356291
acuagucacugguucaccu

SEQ ID NO: 356293 - RNA, 19 nt, Artificial Sequence
  Description of Artificial Sequence: Synthetic oligonucleotide
  Sense Strand Starting at position 479 of SEQ ID NO: 315696
guuguuaccuuacucugaa

SEQ ID NO: 356294 - RNA, 19 nt, Artificial Sequence
  Description of Artificial Sequence: Synthetic oligonucleotide
  Antisense Strand to SEQ ID NO: 356293
uucagaguaagguaacaac

SEQ ID NO: 356295 - RNA, 19 nt, Artificial Sequence
  Description of Artificial Sequence: Synthetic oligonucleotide
  Sense Strand Starting at position 479 of SEQ ID NO: 316053
aguaaugcauauguaagua

SEQ ID NO: 356296 - RNA, 19 nt, Artificial Sequence
  Description of Artificial Sequence: Synthetic oligonucleotide
  Antisense Strand to SEQ ID NO: 356295
uacuuacauaugcauuacu

SEQ ID NO: 356297 - RNA, 19 nt, Artificial Sequence
  Description of Artificial Sequence: Synthetic oligonucleotide
  Sense Strand Starting at position 479 of SEQ ID NO: 316093
cuagaaggcucucuaugca

SEQ ID NO: 356298 - RNA, 19 nt, Artificial Sequence
  Description of Artificial Sequence: Synthetic oligonucleotide
  Antisense Strand to SEQ ID NO: 356297
ugcauagagagccuucuag

SEQ ID NO: 356299 - RNA, 19 nt, Artificial Sequence
  Description of Artificial Sequence: Synthetic oligonucleotide
  Sense Strand Starting at position 479 of SEQ ID NO: 316098
aggcucucuaugcagagau

SEQ ID NO: 356300 - RNA, 19 nt, Artificial Sequence
  Description of Artificial Sequence: Synthetic oligonucleotide
  Antisense Strand to SEQ ID NO: 356299
aucucugcauagagagccu

SEQ ID NO: 356301 - RNA, 19 nt, Artificial Sequence
  Description of Artificial Sequence: Synthetic oligonucleotide
  Sense Strand Starting at position 479 of SEQ ID NO: 316100
gcucucuaugcagagauua

SEQ ID NO: 356302 - RNA, 19 nt, Artificial Sequence
  Description of Artificial Sequence: Synthetic oligonucleotide
  Antisense Strand to SEQ ID NO: 356301
uaaucucugcauagagagc

SEQ ID NO: 356303 - RNA, 19 nt, Artificial Sequence
  Description of Artificial Sequence: Synthetic oligonucleotide
  Sense Strand Starting at position 479 of SEQ ID NO: 316125
ugaacaaauuuagagacuu

SEQ ID NO: 356304 - RNA, 19 nt, Artificial Sequence
  Description of Artificial Sequence: Synthetic oligonucleotide
  Antisense Strand to SEQ ID NO: 356303
aagucucuaaauuuguuca

SEQ ID NO: 356305 - RNA, 19 nt, Artificial Sequence
  Description of Artificial Sequence: Synthetic oligonucleotide
  Sense Strand Starting at position 479 of SEQ ID NO: 316251
cagacuuucccgcaaagga

SEQ ID NO: 356306 - RNA, 19 nt, Artificial Sequence
  Description of Artificial Sequence: Synthetic oligonucleotide
  Antisense Strand to SEQ ID NO: 356305
uccuuugcgggaaagucug

SEQ ID NO: 356307 - RNA, 19 nt, Artificial Sequence
  Description of Artificial Sequence: Synthetic oligonucleotide
  Sense Strand Starting at position 479 of SEQ ID NO: 316424
ugauuaguucuggguuaac

SEQ ID NO: 356308 - RNA, 19 nt, Artificial Sequence
  Description of Artificial Sequence: Synthetic oligonucleotide
  Antisense Strand to SEQ ID NO: 356307
guuaacccagaacuaauca

SEQ ID NO: 356309 - RNA, 19 nt, Artificial Sequence
  Description of Artificial Sequence: Synthetic oligonucleotide
  Sense Strand Starting at position 479 of SEQ ID NO: 316468
uguguuauuggcuaccaaa

SEQ ID NO: 356310 - RNA, 19 nt, Artificial Sequence
  Description of Artificial Sequence: Synthetic oligonucleotide
  Antisense Strand to SEQ ID NO: 356309
uuugguagccaauaacaca

SEQ ID NO: 356311 - RNA, 19 nt, Artificial Sequence
  Description of Artificial Sequence: Synthetic oligonucleotide
  Sense Strand Starting at position 479 of SEQ ID NO: 316486
accuaacguuaagucuaau

SEQ ID NO: 356312 - RNA, 19 nt, Artificial Sequence
  Description of Artificial Sequence: Synthetic oligonucleotide
  Antisense Strand to SEQ ID NO: 356311
auuagacuuaacguuaggu

SEQ ID NO: 356313 - RNA, 19 nt, Artificial Sequence
  Description of Artificial Sequence: Synthetic oligonucleotide
  Sense Strand Starting at position 479 of SEQ ID NO: 316494
uuaagucuaaugcgaaaug

SEQ ID NO: 356314 - RNA, 19 nt, Artificial Sequence
  Description of Artificial Sequence: Synthetic oligonucleotide
  Antisense Strand to SEQ ID NO: 356313
cauuucgcauuagacuuaa

SEQ ID NO: 356315 - RNA, 19 nt, Artificial Sequence
  Description of Artificial Sequence: Synthetic oligonucleotide
  Sense Strand Starting at position 479 of SEQ ID NO: 316503
augcgaaaugccuaaugca

SEQ ID NO: 356316 - RNA, 19 nt, Artificial Sequence
  Description of Artificial Sequence: Synthetic oligonucleotide
  Antisense Strand to SEQ ID NO: 356315
ugcauuaggcauuucgcau

SEQ ID NO: 356317 - RNA, 19 nt, Artificial Sequence
  Description of Artificial Sequence: Synthetic oligonucleotide
  Sense Strand Starting at position 479 of SEQ ID NO: 316606
auauuagaaugggaucaua

SEQ ID NO: 356318 - RNA, 19 nt, Artificial Sequence
  Description of Artificial Sequence: Synthetic oligonucleotide
  Antisense Strand to SEQ ID NO: 356317
uaugaucccauucuaauau

SEQ ID NO: 356319 - RNA, 19 nt, Artificial Sequence
  Description of Artificial Sequence: Synthetic oligonucleotide
  Sense Strand Starting at position 479 of SEQ ID NO: 316899
ucgguucuaccaggaaaua

SEQ ID NO: 356320 - RNA, 19 nt, Artificial Sequence
  Description of Artificial Sequence: Synthetic oligonucleotide
  Antisense Strand to SEQ ID NO: 356319
uauuuccugguagaaccga

SEQ ID NO: 356321 - RNA, 19 nt, Artificial Sequence
  Description of Artificial Sequence: Synthetic oligonucleotide
  Sense Strand Starting at position 479 of SEQ ID NO: 317892
cacaaagaauccgggauuu

SEQ ID NO: 356322 - RNA, 19 nt, Artificial Sequence
  Description of Artificial Sequence: Synthetic oligonucleotide
  Antisense Strand to SEQ ID NO: 356321
aaaucccggauucuuugug

SEQ ID NO: 356323 - RNA, 19 nt, Artificial Sequence
  Description of Artificial Sequence: Synthetic oligonucleotide
  Sense Strand Starting at position 479 of SEQ ID NO: 317917
cuguguauauuucuugguu

SEQ ID NO: 356324 - RNA, 19 nt, Artificial Sequence
  Description of Artificial Sequence: Synthetic oligonucleotide
  Antisense Strand to SEQ ID NO: 356323
aaccaagaaauauacacag

SEQ ID NO: 356325 - RNA, 19 nt, Artificial Sequence
  Description of Artificial Sequence: Synthetic oligonucleotide
  Sense Strand Starting at position 479 of SEQ ID NO: 317918
uguguauauuucuugguuu

SEQ ID NO: 356326 - RNA, 19 nt, Artificial Sequence
  Description of Artificial Sequence: Synthetic oligonucleotide
  Antisense Strand to SEQ ID NO: 356325
aaaccaagaaauauacaca

SEQ ID NO: 356327 - RNA, 19 nt, Artificial Sequence
  Description of Artificial Sequence: Synthetic oligonucleotide
  Sense Strand Starting at position 479 of SEQ ID NO: 318030
cgguauaguggauauagaa

SEQ ID NO: 356328 - RNA, 19 nt, Artificial Sequence
  Description of Artificial Sequence: Synthetic oligonucleotide
  Antisense Strand to SEQ ID NO: 356327
uucuauauccacuauaccg

SEQ ID NO: 356329 - RNA, 19 nt, Artificial Sequence
  Description of Artificial Sequence: Synthetic oligonucleotide
  Sense Strand Starting at position 479 of SEQ ID NO: 318317
caauaaagaguuuaugugu

SEQ ID NO: 356330 - RNA, 19 nt, Artificial Sequence
  Description of Artificial Sequence: Synthetic oligonucleotide
  Antisense Strand to SEQ ID NO: 356329
acacauaaacucuuuauug

SEQ ID NO: 356331 - RNA, 19 nt, Artificial Sequence
  Description of Artificial Sequence: Synthetic oligonucleotide
  Sense Strand Starting at position 479 of SEQ ID NO: 318320
uaaagaguuuaugugugga

SEQ ID NO: 356332 - RNA, 19 nt, Artificial Sequence
  Description of Artificial Sequence: Synthetic oligonucleotide
  Antisense Strand to SEQ ID NO: 356331
uccacacauaaacucuuua

SEQ ID NO: 356333 - RNA, 19 nt, Artificial Sequence
  Description of Artificial Sequence: Synthetic oligonucleotide
  Sense Strand Starting at position 479 of SEQ ID NO: 318322
aagaguuuauguguggaug

SEQ ID NO: 356334 - RNA, 19 nt, Artificial Sequence
  Description of Artificial Sequence: Synthetic oligonucleotide
  Antisense Strand to SEQ ID NO: 356333
cauccacacauaaacucuu

SEQ ID NO: 356335 - RNA, 19 nt, Artificial Sequence
  Description of Artificial Sequence: Synthetic oligonucleotide
  Sense Strand Starting at position 479 of SEQ ID NO: 318323
agaguuuauguguggauga

SEQ ID NO: 356336 - RNA, 19 nt, Artificial Sequence
  Description of Artificial Sequence: Synthetic oligonucleotide
  Antisense Strand to SEQ ID NO: 356335
ucauccacacauaaacucu

SEQ ID NO: 356337 - RNA, 19 nt, Artificial Sequence
  Description of Artificial Sequence: Synthetic oligonucleotide
  Sense Strand Starting at position 479 of SEQ ID NO: 318325
aguuuauguguggaugaau

SEQ ID NO: 356338 - RNA, 19 nt, Artificial Sequence
  Description of Artificial Sequence: Synthetic oligonucleotide
  Antisense Strand to SEQ ID NO: 356337
auucauccacacauaaacu

SEQ ID NO: 356339 - RNA, 19 nt, Artificial Sequence
  Description of Artificial Sequence: Synthetic oligonucleotide
  Sense Strand Starting at position 479 of SEQ ID NO: 318349
ggccuugaccgcuuucuuu

SEQ ID NO: 356340 - RNA, 19 nt, Artificial Sequence
  Description of Artificial Sequence: Synthetic oligonucleotide
  Antisense Strand to SEQ ID NO: 356339
aaagaaagcggucaaggcc

SEQ ID NO: 356341 - RNA, 19 nt, Artificial Sequence
  Description of Artificial Sequence: Synthetic oligonucleotide
  Sense Strand Starting at position 479 of SEQ ID NO: 318367
uggcuuugggaauguacaa

SEQ ID NO: 356342 - RNA, 19 nt, Artificial Sequence
  Description of Artificial Sequence: Synthetic oligonucleotide
  Antisense Strand to SEQ ID NO: 356341
uuguacauucccaaagcca

SEQ ID NO: 356343 - RNA, 19 nt, Artificial Sequence
  Description of Artificial Sequence: Synthetic oligonucleotide
  Sense Strand Starting at position 479 of SEQ ID NO: 318437
gguguaucuauaugauaga

SEQ ID NO: 356344 - RNA, 19 nt, Artificial Sequence
  Description of Artificial Sequence: Synthetic oligonucleotide
  Antisense Strand to SEQ ID NO: 356343
ucuaucauauagauacacc

SEQ ID NO: 356345 - RNA, 19 nt, Artificial Sequence
  Description of Artificial Sequence: Synthetic oligonucleotide
  Sense Strand Starting at position 479 of SEQ ID NO: 318448
augauagauuacuaucaag

SEQ ID NO: 356346 - RNA, 19 nt, Artificial Sequence
  Description of Artificial Sequence: Synthetic oligonucleotide
  Antisense Strand to SEQ ID NO: 356345
cuugauaguaaucuaucau

SEQ ID NO: 356347 - RNA, 19 nt, Artificial Sequence
  Description of Artificial Sequence: Synthetic oligonucleotide
  Sense Strand Starting at position 479 of SEQ ID NO: 318534
auauaugugguuuguuaac

SEQ ID NO: 356348 - RNA, 19 nt, Artificial Sequence
  Description of Artificial Sequence: Synthetic oligonucleotide
  Antisense Strand to SEQ ID NO: 356347
guuaacaaaccacauauau

SEQ ID NO: 356349 - RNA, 19 nt, Artificial Sequence
  Description of Artificial Sequence: Synthetic oligonucleotide
  Sense Strand Starting at position 479 of SEQ ID NO: 318536
auaugugguuuguuaacau

SEQ ID NO: 356350 - RNA, 19 nt, Artificial Sequence
  Description of Artificial Sequence: Synthetic oligonucleotide
  Antisense Strand to SEQ ID NO: 356349
auguuaacaaaccacauau

SEQ ID NO: 356351 - RNA, 19 nt, Artificial Sequence
  Description of Artificial Sequence: Synthetic oligonucleotide
  Sense Strand Starting at position 479 of SEQ ID NO: 318759
uacacuguuugucuauagu

SEQ ID NO: 356352 - RNA, 19 nt, Artificial Sequence
  Description of Artificial Sequence: Synthetic oligonucleotide
  Antisense Strand to SEQ ID NO: 356351
acuauagacaaacagugua

SEQ ID NO: 356353 - RNA, 19 nt, Artificial Sequence
  Description of Artificial Sequence: Synthetic oligonucleotide
  Sense Strand Starting at position 479 of SEQ ID NO: 318762
acuguuugucuauaguaag

SEQ ID NO: 356354 - RNA, 19 nt, Artificial Sequence
  Description of Artificial Sequence: Synthetic oligonucleotide
  Antisense Strand to SEQ ID NO: 356353
cuuacuauagacaaacagu

SEQ ID NO: 356355 - RNA, 19 nt, Artificial Sequence
  Description of Artificial Sequence: Synthetic oligonucleotide
  Sense Strand Starting at position 479 of SEQ ID NO: 318768
ugucuauaguaagucgaua

SEQ ID NO: 356356 - RNA, 19 nt, Artificial Sequence
  Description of Artificial Sequence: Synthetic oligonucleotide
  Antisense Strand to SEQ ID NO: 356355
uaucgacuuacuauagaca

SEQ ID NO: 356357 - RNA, 19 nt, Artificial Sequence
  Description of Artificial Sequence: Synthetic oligonucleotide
  Sense Strand Starting at position 479 of SEQ ID NO: 318773
auaguaagucgauauucuc

SEQ ID NO: 356358 - RNA, 19 nt, Artificial Sequence
  Description of Artificial Sequence: Synthetic oligonucleotide
  Antisense Strand to SEQ ID NO: 356357
gagaauaucgacuuacuau

SEQ ID NO: 356359 - RNA, 19 nt, Artificial Sequence
  Description of Artificial Sequence: Synthetic oligonucleotide
  Sense Strand Starting at position 479 of SEQ ID NO: 318789
cucccaguugcacauuauu

SEQ ID NO: 356360 - RNA, 19 nt, Artificial Sequence
  Description of Artificial Sequence: Synthetic oligonucleotide
  Antisense Strand to SEQ ID NO: 356359
aauaaugugcaacugggag

SEQ ID NO: 356361 - RNA, 19 nt, Artificial Sequence
  Description of Artificial Sequence: Synthetic oligonucleotide
  Sense Strand Starting at position 479 of SEQ ID NO: 318794
aguugcacauuauuaagua

SEQ ID NO: 356362 - RNA, 19 nt, Artificial Sequence
  Description of Artificial Sequence: Synthetic oligonucleotide
  Antisense Strand to SEQ ID NO: 356361
uacuuaauaaugugcaacu

SEQ ID NO: 356363 - RNA, 19 nt, Artificial Sequence
  Description of Artificial Sequence: Synthetic oligonucleotide
  Sense Strand Starting at position 479 of SEQ ID NO: 318890
ggcauugaacucuggaauc

SEQ ID NO: 356364 - RNA, 19 nt, Artificial Sequence
  Description of Artificial Sequence: Synthetic oligonucleotide
  Antisense Strand to SEQ ID NO: 356363
gauuccagaguucaaugcc

SEQ ID NO: 356365 - RNA, 19 nt, Artificial Sequence
  Description of Artificial Sequence: Synthetic oligonucleotide
  Sense Strand Starting at position 479 of SEQ ID NO: 318988
ugagacaaggucugacuuu

SEQ ID NO: 356366 - RNA, 19 nt, Artificial Sequence
  Description of Artificial Sequence: Synthetic oligonucleotide
  Antisense Strand to SEQ ID NO: 356365
aaagucagaccuugucuca

SEQ ID NO: 356367 - RNA, 19 nt, Artificial Sequence
  Description of Artificial Sequence: Synthetic oligonucleotide
  Sense Strand Starting at position 479 of SEQ ID NO: 319016
gcuggaguucaguaaagug

SEQ ID NO: 356368 - RNA, 19 nt, Artificial Sequence
  Description of Artificial Sequence: Synthetic oligonucleotide
  Antisense Strand to SEQ ID NO: 356367
cacuuuacugaacuccagc

SEQ ID NO: 356369 - RNA, 19 nt, Artificial Sequence
  Description of Artificial Sequence: Synthetic oligonucleotide
  Sense Strand Starting at position 479 of SEQ ID NO: 319025
caguaaagugaucauggcu

SEQ ID NO: 356370 - RNA, 19 nt, Artificial Sequence
  Description of Artificial Sequence: Synthetic oligonucleotide
  Antisense Strand to SEQ ID NO: 356369
agccaugaucacuuuacug

SEQ ID NO: 356371 - RNA, 19 nt, Artificial Sequence
  Description of Artificial Sequence: Synthetic oligonucleotide
  Sense Strand Starting at position 480 of SEQ ID NO: 315418
auggaauccuggcucaauu

SEQ ID NO: 356372 - RNA, 19 nt, Artificial Sequence
  Description of Artificial Sequence: Synthetic oligonucleotide
  Antisense Strand to SEQ ID NO: 356371
aauugagccaggauuccau

SEQ ID NO: 356373 - RNA, 19 nt, Artificial Sequence
  Description of Artificial Sequence: Synthetic oligonucleotide
  Sense Strand Starting at position 480 of SEQ ID NO: 315456
guggaagugccuuacauuc

SEQ ID NO: 356374 - RNA, 19 nt, Artificial Sequence
  Description of Artificial Sequence: Synthetic oligonucleotide
  Antisense Strand to SEQ ID NO: 356373
gaauguaaggcacuuccac

SEQ ID NO: 356375 - RNA, 19 nt, Artificial Sequence
  Description of Artificial Sequence: Synthetic oligonucleotide
  Sense Strand Starting at position 480 of SEQ ID NO: 315654
caguguuguguucugaugu

SEQ ID NO: 356376 - RNA, 19 nt, Artificial Sequence
  Description of Artificial Sequence: Synthetic oligonucleotide
  Antisense Strand to SEQ ID NO: 356375
acaucagaacacaacacug

SEQ ID NO: 356377 - RNA, 19 nt, Artificial Sequence
  Description of Artificial Sequence: Synthetic oligonucleotide
  Sense Strand Starting at position 480 of SEQ ID NO: 315861
aucugcucagucuguugaa

SEQ ID NO: 356378 - RNA, 19 nt, Artificial Sequence
  Description of Artificial Sequence: Synthetic oligonucleotide
  Antisense Strand to SEQ ID NO: 356377
uucaacagacugagcagau

SEQ ID NO: 356379 - RNA, 19 nt, Artificial Sequence
  Description of Artificial Sequence: Synthetic oligonucleotide
  Sense Strand Starting at position 480 of SEQ ID NO: 315862
ucugcucagucuguugaaa

SEQ ID NO: 356380 - RNA, 19 nt, Artificial Sequence
  Description of Artificial Sequence: Synthetic oligonucleotide
  Antisense Strand to SEQ ID NO: 356379
uuucaacagacugagcaga

SEQ ID NO: 356381 - RNA, 19 nt, Artificial Sequence
  Description of Artificial Sequence: Synthetic oligonucleotide
  Sense Strand Starting at position 480 of SEQ ID NO: 315916
acgucuucgcuguuaagac

SEQ ID NO: 356382 - RNA, 19 nt, Artificial Sequence
  Description of Artificial Sequence: Synthetic oligonucleotide
  Antisense Strand to SEQ ID NO: 356381
gucuuaacagcgaagacgu

SEQ ID NO: 356383 - RNA, 19 nt, Artificial Sequence
  Description of Artificial Sequence: Synthetic oligonucleotide
  Sense Strand Starting at position 480 of SEQ ID NO: 315949
aucgaaacaucuccaguga

SEQ ID NO: 356384 - RNA, 19 nt, Artificial Sequence
  Description of Artificial Sequence: Synthetic oligonucleotide
  Antisense Strand to SEQ ID NO: 356383
ucacuggagauguuucgau

SEQ ID NO: 356385 - RNA, 19 nt, Artificial Sequence
  Description of Artificial Sequence: Synthetic oligonucleotide
  Sense Strand Starting at position 480 of SEQ ID NO: 315950
ucgaaacaucuccagugaa

SEQ ID NO: 356386 - RNA, 19 nt, Artificial Sequence
  Description of Artificial Sequence: Synthetic oligonucleotide
  Antisense Strand to SEQ ID NO: 356385
uucacuggagauguuucga

SEQ ID NO: 356387 - RNA, 19 nt, Artificial Sequence
  Description of Artificial Sequence: Synthetic oligonucleotide
  Sense Strand Starting at position 480 of SEQ ID NO: 316164
aguuaugcgaagugacuaa

SEQ ID NO: 356388 - RNA, 19 nt, Artificial Sequence
  Description of Artificial Sequence: Synthetic oligonucleotide
  Antisense Strand to SEQ ID NO: 356387
uuagucacuucgcauaacu

SEQ ID NO: 356389 - RNA, 19 nt, Artificial Sequence
  Description of Artificial Sequence: Synthetic oligonucleotide
  Sense Strand Starting at position 480 of SEQ ID NO: 316315
ggagacuuccgucgagggu

SEQ ID NO: 356390 - RNA, 19 nt, Artificial Sequence
  Description of Artificial Sequence: Synthetic oligonucleotide
  Antisense Strand to SEQ ID NO: 356389
acccucgacggaagucucc

SEQ ID NO: 356391 - RNA, 19 nt, Artificial Sequence
  Description of Artificial Sequence: Synthetic oligonucleotide
  Sense Strand Starting at position 480 of SEQ ID NO: 316330
gggucaauugugcgggauc

SEQ ID NO: 356392 - RNA, 19 nt, Artificial Sequence
  Description of Artificial Sequence: Synthetic oligonucleotide
  Antisense Strand to SEQ ID NO: 356391
gaucccgcacaauugaccc

SEQ ID NO: 356393 - RNA, 19 nt, Artificial Sequence
  Description of Artificial Sequence: Synthetic oligonucleotide
  Sense Strand Starting at position 480 of SEQ ID NO: 316332
gucaauugugcgggauccu

SEQ ID NO: 356394 - RNA, 19 nt, Artificial Sequence
  Description of Artificial Sequence: Synthetic oligonucleotide
  Antisense Strand to SEQ ID NO: 356393
aggaucccgcacaauugac

SEQ ID NO: 356395 - RNA, 19 nt, Artificial Sequence
  Description of Artificial Sequence: Synthetic oligonucleotide
  Sense Strand Starting at position 480 of SEQ ID NO: 316399
ucgagcagaggucagauau

SEQ ID NO: 356396 - RNA, 19 nt, Artificial Sequence
  Description of Artificial Sequence: Synthetic oligonucleotide
  Antisense Strand to SEQ ID NO: 356395
auaucugaccucugcucga

SEQ ID NO: 356397 - RNA, 19 nt, Artificial Sequence
  Description of Artificial Sequence: Synthetic oligonucleotide
  Sense Strand Starting at position 480 of SEQ ID NO: 316465
gucucagaugagugggaaa

SEQ ID NO: 356398 - RNA, 19 nt, Artificial Sequence
  Description of Artificial Sequence: Synthetic oligonucleotide
  Antisense Strand to SEQ ID NO: 356397
uuucccacucaucugagac

SEQ ID NO: 356399 - RNA, 19 nt, Artificial Sequence
  Description of Artificial Sequence: Synthetic oligonucleotide
  Sense Strand Starting at position 480 of SEQ ID NO: 316554
gaaugucacgagggaucca

SEQ ID NO: 356400 - RNA, 19 nt, Artificial Sequence
  Description of Artificial Sequence: Synthetic oligonucleotide
  Antisense Strand to SEQ ID NO: 356399
uggaucccucgugacauuc

SEQ ID NO: 356401 - RNA, 19 nt, Artificial Sequence
  Description of Artificial Sequence: Synthetic oligonucleotide
  Sense Strand Starting at position 480 of SEQ ID NO: 316584
ccacucauugacuggauga

SEQ ID NO: 356402 - RNA, 19 nt, Artificial Sequence
  Description of Artificial Sequence: Synthetic oligonucleotide
  Antisense Strand to SEQ ID NO: 356401
ucauccagucaaugagugg

SEQ ID NO: 356403 - RNA, 19 nt, Artificial Sequence
  Description of Artificial Sequence: Synthetic oligonucleotide
  Sense Strand Starting at position 480 of SEQ ID NO: 316701
guuaaaggucacggaagaa

SEQ ID NO: 356404 - RNA, 19 nt, Artificial Sequence
  Description of Artificial Sequence: Synthetic oligonucleotide
  Antisense Strand to SEQ ID NO: 356403
uucuuccgugaccuuuaac

SEQ ID NO: 356405 - RNA, 19 nt, Artificial Sequence
  Description of Artificial Sequence: Synthetic oligonucleotide
  Sense Strand Starting at position 480 of SEQ ID NO: 317478
agggaugagcgucaaggau

SEQ ID NO: 356406 - RNA, 19 nt, Artificial Sequence
  Description of Artificial Sequence: Synthetic oligonucleotide
  Antisense Strand to SEQ ID NO: 356405
auccuugacgcucaucccu

SEQ ID NO: 356407 - RNA, 19 nt, Artificial Sequence
  Description of Artificial Sequence: Synthetic oligonucleotide
  Sense Strand Starting at position 480 of SEQ ID NO: 317630
cgggaagucccugauacca

SEQ ID NO: 356408 - RNA, 19 nt, Artificial Sequence
  Description of Artificial Sequence: Synthetic oligonucleotide
  Antisense Strand to SEQ ID NO: 356407
ugguaucagggacuucccg

SEQ ID NO: 356409 - RNA, 19 nt, Artificial Sequence
  Description of Artificial Sequence: Synthetic oligonucleotide
  Sense Strand Starting at position 480 of SEQ ID NO: 317763
uuuaucaggccuuggagau

SEQ ID NO: 356410 - RNA, 19 nt, Artificial Sequence
  Description of Artificial Sequence: Synthetic oligonucleotide
  Antisense Strand to SEQ ID NO: 356409
aucuccaaggccugauaaa

SEQ ID NO: 356411 - RNA, 19 nt, Artificial Sequence
  Description of Artificial Sequence: Synthetic oligonucleotide
  Sense Strand Starting at position 480 of SEQ ID NO: 317769
aggccuuggagauguuaaa

SEQ ID NO: 356412 - RNA, 19 nt, Artificial Sequence
  Description of Artificial Sequence: Synthetic oligonucleotide
  Antisense Strand to SEQ ID NO: 356411
uuuaacaucuccaaggccu

SEQ ID NO: 356413 - RNA, 19 nt, Artificial Sequence
  Description of Artificial Sequence: Synthetic oligonucleotide
  Sense Strand Starting at position 480 of SEQ ID NO: 317874
guuuaugugccucauuuau

SEQ ID NO: 356414 - RNA, 19 nt, Artificial Sequence
  Description of Artificial Sequence: Synthetic oligonucleotide
  Antisense Strand to SEQ ID NO: 356413
auaaaugaggcacauaaac

SEQ ID NO: 356415 - RNA, 19 nt, Artificial Sequence
  Description of Artificial Sequence: Synthetic oligonucleotide
  Sense Strand Starting at position 480 of SEQ ID NO: 317876
uuaugugccucauuuaucu

SEQ ID NO: 356416 - RNA, 19 nt, Artificial Sequence
  Description of Artificial Sequence: Synthetic oligonucleotide
  Antisense Strand to SEQ ID NO: 356415
agauaaaugaggcacauaa

SEQ ID NO: 356417 - RNA, 19 nt, Artificial Sequence
  Description of Artificial Sequence: Synthetic oligonucleotide
  Sense Strand Starting at position 480 of SEQ ID NO: 317966
uugauaucaucugaaacug

SEQ ID NO: 356418 - RNA, 19 nt, Artificial Sequence
  Description of Artificial Sequence: Synthetic oligonucleotide
  Antisense Strand to SEQ ID NO: 356417
caguuucagaugauaucaa

SEQ ID NO: 356419 - RNA, 19 nt, Artificial Sequence
  Description of Artificial Sequence: Synthetic oligonucleotide
  Sense Strand Starting at position 480 of SEQ ID NO: 317985
cuuacauugucuccgguau

SEQ ID NO: 356420 - RNA, 19 nt, Artificial Sequence
  Description of Artificial Sequence: Synthetic oligonucleotide
  Antisense Strand to SEQ ID NO: 356419
auaccggagacaauguaag

SEQ ID NO: 356421 - RNA, 19 nt, Artificial Sequence
  Description of Artificial Sequence: Synthetic oligonucleotide
  Sense Strand Starting at position 480 of SEQ ID NO: 317989
cauugucuccgguaucaga

SEQ ID NO: 356422 - RNA, 19 nt, Artificial Sequence
  Description of Artificial Sequence: Synthetic oligonucleotide
  Antisense Strand to SEQ ID NO: 356421
ucugauaccggagacaaug

SEQ ID NO: 356423 - RNA, 19 nt, Artificial Sequence
  Description of Artificial Sequence: Synthetic oligonucleotide
  Sense Strand Starting at position 480 of SEQ ID NO: 318021
ugcugaucuccacguucua

SEQ ID NO: 356424 - RNA, 19 nt, Artificial Sequence
  Description of Artificial Sequence: Synthetic oligonucleotide
  Antisense Strand to SEQ ID NO: 356423
uagaacguggagaucagca

SEQ ID NO: 356425 - RNA, 19 nt, Artificial Sequence
  Description of Artificial Sequence: Synthetic oligonucleotide
  Sense Strand Starting at position 480 of SEQ ID NO: 318082
gagaguccauauucugauc

SEQ ID NO: 356426 - RNA, 19 nt, Artificial Sequence
  Description of Artificial Sequence: Synthetic oligonucleotide
  Antisense Strand to SEQ ID NO: 356425
gaucagaauauggacucuc

SEQ ID NO: 356427 - RNA, 19 nt, Artificial Sequence
  Description of Artificial Sequence: Synthetic oligonucleotide
  Sense Strand Starting at position 480 of SEQ ID NO: 318150
ugggcuaaguccucuuaua

SEQ ID NO: 356428 - RNA, 19 nt, Artificial Sequence
  Description of Artificial Sequence: Synthetic oligonucleotide
  Antisense Strand to SEQ ID NO: 356427
uauaagaggacuuagccca

SEQ ID NO: 356429 - RNA, 19 nt, Artificial Sequence
  Description of Artificial Sequence: Synthetic oligonucleotide
  Sense Strand Starting at position 480 of SEQ ID NO: 318266
agaagugaaucucuggcaa

SEQ ID NO: 356430 - RNA, 19 nt, Artificial Sequence
  Description of Artificial Sequence: Synthetic oligonucleotide
  Antisense Strand to SEQ ID NO: 356429
uugccagagauucacuucu

SEQ ID NO: 356431 - RNA, 19 nt, Artificial Sequence
  Description of Artificial Sequence: Synthetic oligonucleotide
  Sense Strand Starting at position 480 of SEQ ID NO: 318361
ucagcuguggcaugagauu

SEQ ID NO: 356432 - RNA, 19 nt, Artificial Sequence
  Description of Artificial Sequence: Synthetic oligonucleotide
  Antisense Strand to SEQ ID NO: 356431
aaucucaugccacagcuga

SEQ ID NO: 356433 - RNA, 19 nt, Artificial Sequence
  Description of Artificial Sequence: Synthetic oligonucleotide
  Sense Strand Starting at position 480 of SEQ ID NO: 318390
cuggaacuacugugaacua

SEQ ID NO: 356434 - RNA, 19 nt, Artificial Sequence
  Description of Artificial Sequence: Synthetic oligonucleotide
  Antisense Strand to SEQ ID NO: 356433
uaguucacaguaguuccag

SEQ ID NO: 356435 - RNA, 19 nt, Artificial Sequence
  Description of Artificial Sequence: Synthetic oligonucleotide
  Sense Strand Starting at position 480 of SEQ ID NO: 318425
agguuaugcuccuuaugag

SEQ ID NO: 356436 - RNA, 19 nt, Artificial Sequence
  Description of Artificial Sequence: Synthetic oligonucleotide
  Antisense Strand to SEQ ID NO: 356435
cucauaaggagcauaaccu

SEQ ID NO: 356437 - RNA, 19 nt, Artificial Sequence
  Description of Artificial Sequence: Synthetic oligonucleotide
  Sense Strand Starting at position 480 of SEQ ID NO: 318426
gguuaugcuccuuaugaga

SEQ ID NO: 356438 - RNA, 19 nt, Artificial Sequence
  Description of Artificial Sequence: Synthetic oligonucleotide
  Antisense Strand to SEQ ID NO: 356437
ucucauaaggagcauaacc

SEQ ID NO: 356439 - RNA, 19 nt, Artificial Sequence
  Description of Artificial Sequence: Synthetic oligonucleotide
  Sense Strand Starting at position 480 of SEQ ID NO: 318544
uggugaguuguguaauugu

SEQ ID NO: 356440 - RNA, 19 nt, Artificial Sequence
  Description of Artificial Sequence: Synthetic oligonucleotide
  Antisense Strand to SEQ ID NO: 356439
acaauuacacaacucacca

SEQ ID NO: 356441 - RNA, 19 nt, Artificial Sequence
  Description of Artificial Sequence: Synthetic oligonucleotide
  Sense Strand Starting at position 480 of SEQ ID NO: 318721
ggaccacugccuuauauag

SEQ ID NO: 356442 - RNA, 19 nt, Artificial Sequence
  Description of Artificial Sequence: Synthetic oligonucleotide
  Antisense Strand to SEQ ID NO: 356441
cuauauaaggcaguggucc

SEQ ID NO: 356443 - RNA, 19 nt, Artificial Sequence
  Description of Artificial Sequence: Synthetic oligonucleotide
  Sense Strand Starting at position 480 of SEQ ID NO: 318728
ugccuuauauaguuacuga

SEQ ID NO: 356444 - RNA, 19 nt, Artificial Sequence
  Description of Artificial Sequence: Synthetic oligonucleotide
  Antisense Strand to SEQ ID NO: 356443
ucaguaacuauauaaggca

SEQ ID NO: 356445 - RNA, 19 nt, Artificial Sequence
  Description of Artificial Sequence: Synthetic oligonucleotide
  Sense Strand Starting at position 480 of SEQ ID NO: 319157
gcuccagaugcccaauaua

SEQ ID NO: 356446 - RNA, 19 nt, Artificial Sequence
  Description of Artificial Sequence: Synthetic oligonucleotide
  Antisense Strand to SEQ ID NO: 356445
uauauugggcaucuggagc

SEQ ID NO: 356447 - RNA, 19 nt, Artificial Sequence
  Description of Artificial Sequence: Synthetic oligonucleotide
  Sense Strand Starting at position 480 of SEQ ID NO: 319202
ugcaucaaaguuugucaau

SEQ ID NO: 356448 - RNA, 19 nt, Artificial Sequence
  Description of Artificial Sequence: Synthetic oligonucleotide
  Antisense Strand to SEQ ID NO: 356447
auugacaaacuuugaugca

SEQ ID NO: 356449 - RNA, 19 nt, Artificial Sequence
  Description of Artificial Sequence: Synthetic oligonucleotide
  Sense Strand Starting at position 480 of SEQ ID NO: 319203
gcaucaaaguuugucaauu

SEQ ID NO: 356450 - RNA, 19 nt, Artificial Sequence
  Description of Artificial Sequence: Synthetic oligonucleotide
  Antisense Strand to SEQ ID NO: 356449
aauugacaaacuuugaugc

SEQ ID NO: 356451 - RNA, 19 nt, Artificial Sequence
  Description of Artificial Sequence: Synthetic oligonucleotide
  Sense Strand Starting at position 481 of SEQ ID NO: 315241
auggguagaucaguagaua

SEQ ID NO: 356452 - RNA, 19 nt, Artificial Sequence
  Description of Artificial Sequence: Synthetic oligonucleotide
  Antisense Strand to SEQ ID NO: 356451
uaucuacugaucuacccau

SEQ ID NO: 356453 - RNA, 19 nt, Artificial Sequence
  Description of Artificial Sequence: Synthetic oligonucleotide
  Sense Strand Starting at position 481 of SEQ ID NO: 315285
uguauccuucuguauuaaa

SEQ ID NO: 356454 - RNA, 19 nt, Artificial Sequence
  Description of Artificial Sequence: Synthetic oligonucleotide
  Antisense Strand to SEQ ID NO: 356453
uuuaauacagaaggauaca

SEQ ID NO: 356455 - RNA, 19 nt, Artificial Sequence
  Description of Artificial Sequence: Synthetic oligonucleotide
  Sense Strand Starting at position 481 of SEQ ID NO: 315401
cacagacugguauguaaug

SEQ ID NO: 356456 - RNA, 19 nt, Artificial Sequence
  Description of Artificial Sequence: Synthetic oligonucleotide
  Antisense Strand to SEQ ID NO: 356455
cauuacauaccagucugug

SEQ ID NO: 356457 - RNA, 19 nt, Artificial Sequence
  Description of Artificial Sequence: Synthetic oligonucleotide
  Sense Strand Starting at position 481 of SEQ ID NO: 315407
cugguauguaaugaucagu

SEQ ID NO: 356458 - RNA, 19 nt, Artificial Sequence
  Description of Artificial Sequence: Synthetic oligonucleotide
  Antisense Strand to SEQ ID NO: 356457
acugaucauuacauaccag

SEQ ID NO: 356459 - RNA, 19 nt, Artificial Sequence
  Description of Artificial Sequence: Synthetic oligonucleotide
  Sense Strand Starting at position 481 of SEQ ID NO: 315410
guauguaaugaucaguggu

SEQ ID NO: 356460 - RNA, 19 nt, Artificial Sequence
  Description of Artificial Sequence: Synthetic oligonucleotide
  Antisense Strand to SEQ ID NO: 356459
accacugaucauuacauac

SEQ ID NO: 356461 - RNA, 19 nt, Artificial Sequence
  Description of Artificial Sequence: Synthetic oligonucleotide
  Sense Strand Starting at position 481 of SEQ ID NO: 315412
auguaaugaucagugguau

SEQ ID NO: 356462 - RNA, 19 nt, Artificial Sequence
  Description of Artificial Sequence: Synthetic oligonucleotide
  Antisense Strand to SEQ ID NO: 356461
auaccacugaucauuacau

SEQ ID NO: 356463 - RNA, 19 nt, Artificial Sequence
  Description of Artificial Sequence: Synthetic oligonucleotide
  Sense Strand Starting at position 481 of SEQ ID NO: 315782
gugguagucauacacuaua

SEQ ID NO: 356464 - RNA, 19 nt, Artificial Sequence
  Description of Artificial Sequence: Synthetic oligonucleotide
  Antisense Strand to SEQ ID NO: 356463
uauaguguaugacuaccac

SEQ ID NO: 356465 - RNA, 19 nt, Artificial Sequence
  Description of Artificial Sequence: Synthetic oligonucleotide
  Sense Strand Starting at position 481 of SEQ ID NO: 315850
acugauagggagugcaauu

SEQ ID NO: 356466 - RNA, 19 nt, Artificial Sequence
  Description of Artificial Sequence: Synthetic oligonucleotide
  Antisense Strand to SEQ ID NO: 356465
aauugcacucccuaucagu

SEQ ID NO: 356467 - RNA, 19 nt, Artificial Sequence
  Description of Artificial Sequence: Synthetic oligonucleotide
  Sense Strand Starting at position 481 of SEQ ID NO: 315938
uucuguggucaagggauga

SEQ ID NO: 356468 - RNA, 19 nt, Artificial Sequence
  Description of Artificial Sequence: Synthetic oligonucleotide
  Antisense Strand to SEQ ID NO: 356467
ucaucccuugaccacagaa

SEQ ID NO: 356469 - RNA, 19 nt, Artificial Sequence
  Description of Artificial Sequence: Synthetic oligonucleotide
  Sense Strand Starting at position 481 of SEQ ID NO: 316201
ccuuuaaaugcucagacag

SEQ ID NO: 356470 - RNA, 19 nt, Artificial Sequence
  Description of Artificial Sequence: Synthetic oligonucleotide
  Antisense Strand to SEQ ID NO: 356469
cugucugagcauuuaaagg

SEQ ID NO: 356471 - RNA, 19 nt, Artificial Sequence
  Description of Artificial Sequence: Synthetic oligonucleotide
  Sense Strand Starting at position 481 of SEQ ID NO: 316244
aguacuuacccaugauugu

SEQ ID NO: 356472 - RNA, 19 nt, Artificial Sequence
  Description of Artificial Sequence: Synthetic oligonucleotide
  Antisense Strand to SEQ ID NO: 356471
acaaucauggguaaguacu

SEQ ID NO: 356473 - RNA, 19 nt, Artificial Sequence
  Description of Artificial Sequence: Synthetic oligonucleotide
  Sense Strand Starting at position 481 of SEQ ID NO: 316245
guacuuacccaugauugua

SEQ ID NO: 356474 - RNA, 19 nt, Artificial Sequence
  Description of Artificial Sequence: Synthetic oligonucleotide
  Antisense Strand to SEQ ID NO: 356473
uacaaucauggguaaguac

SEQ ID NO: 356475 - RNA, 19 nt, Artificial Sequence
  Description of Artificial Sequence: Synthetic oligonucleotide
  Sense Strand Starting at position 481 of SEQ ID NO: 316382
gguugugcagauuaaacau

SEQ ID NO: 356476 - RNA, 19 nt, Artificial Sequence
  Description of Artificial Sequence: Synthetic oligonucleotide
  Antisense Strand to SEQ ID NO: 356475
auguuuaaucugcacaacc

SEQ ID NO: 356477 - RNA, 19 nt, Artificial Sequence
  Description of Artificial Sequence: Synthetic oligonucleotide
  Sense Strand Starting at position 481 of SEQ ID NO: 316552
uuagcauuagcaggauuau

SEQ ID NO: 356478 - RNA, 19 nt, Artificial Sequence
  Description of Artificial Sequence: Synthetic oligonucleotide
  Antisense Strand to SEQ ID NO: 356477
auaauccugcuaaugcuaa

SEQ ID NO: 356479 - RNA, 19 nt, Artificial Sequence
  Description of Artificial Sequence: Synthetic oligonucleotide
  Sense Strand Starting at position 481 of SEQ ID NO: 316553
uagcauuagcaggauuauu

SEQ ID NO: 356480 - RNA, 19 nt, Artificial Sequence
  Description of Artificial Sequence: Synthetic oligonucleotide
  Antisense Strand to SEQ ID NO: 356479
aauaauccugcuaaugcua

SEQ ID NO: 356481 - RNA, 19 nt, Artificial Sequence
  Description of Artificial Sequence: Synthetic oligonucleotide
  Sense Strand Starting at position 481 of SEQ ID NO: 316903
aggcuugugggcuacuaga

SEQ ID NO: 356482 - RNA, 19 nt, Artificial Sequence
  Description of Artificial Sequence: Synthetic oligonucleotide
  Antisense Strand to SEQ ID NO: 356481
ucuaguagcccacaagccu

SEQ ID NO: 356483 - RNA, 19 nt, Artificial Sequence
  Description of Artificial Sequence: Synthetic oligonucleotide
  Sense Strand Starting at position 481 of SEQ ID NO: 317294
acaccuuguuuguuaccaa

SEQ ID NO: 356484 - RNA, 19 nt, Artificial Sequence
  Description of Artificial Sequence: Synthetic oligonucleotide
  Antisense Strand to SEQ ID NO: 356483
uugguaacaaacaaggugu

SEQ ID NO: 356485 - RNA, 19 nt, Artificial Sequence
  Description of Artificial Sequence: Synthetic oligonucleotide
  Sense Strand Starting at position 481 of SEQ ID NO: 317406
ugauuagacgcgaguaggu

SEQ ID NO: 356486 - RNA, 19 nt, Artificial Sequence
  Description of Artificial Sequence: Synthetic oligonucleotide
  Antisense Strand to SEQ ID NO: 356485
accuacucgcgucuaauca

SEQ ID NO: 356487 - RNA, 19 nt, Artificial Sequence
  Description of Artificial Sequence: Synthetic oligonucleotide
  Sense Strand Starting at position 481 of SEQ ID NO: 317489
agauguucucagugugaag

SEQ ID NO: 356488 - RNA, 19 nt, Artificial Sequence
  Description of Artificial Sequence: Synthetic oligonucleotide
  Antisense Strand to SEQ ID NO: 356487
cuucacacugagaacaucu

SEQ ID NO: 356489 - RNA, 19 nt, Artificial Sequence
  Description of Artificial Sequence: Synthetic oligonucleotide
  Sense Strand Starting at position 481 of SEQ ID NO: 317610
ccauuaggauuguugaaug

SEQ ID NO: 356490 - RNA, 19 nt, Artificial Sequence
  Description of Artificial Sequence: Synthetic oligonucleotide
  Antisense Strand to SEQ ID NO: 356489
cauucaacaauccuaaugg

SEQ ID NO: 356491 - RNA, 19 nt, Artificial Sequence
  Description of Artificial Sequence: Synthetic oligonucleotide
  Sense Strand Starting at position 481 of SEQ ID NO: 317620
uguugaaugagcugugaga

SEQ ID NO: 356492 - RNA, 19 nt, Artificial Sequence
  Description of Artificial Sequence: Synthetic oligonucleotide
  Antisense Strand to SEQ ID NO: 356491
ucucacagcucauucaaca

SEQ ID NO: 356493 - RNA, 19 nt, Artificial Sequence
  Description of Artificial Sequence: Synthetic oligonucleotide
  Sense Strand Starting at position 481 of SEQ ID NO: 317622
uugaaugagcugugagaag

SEQ ID NO: 356494 - RNA, 19 nt, Artificial Sequence
  Description of Artificial Sequence: Synthetic oligonucleotide
  Antisense Strand to SEQ ID NO: 356493
cuucucacagcucauucaa

SEQ ID NO: 356495 - RNA, 19 nt, Artificial Sequence
  Description of Artificial Sequence: Synthetic oligonucleotide
  Sense Strand Starting at position 481 of SEQ ID NO: 317688
uuaguuguucgucuaguuu

SEQ ID NO: 356496 - RNA, 19 nt, Artificial Sequence
  Description of Artificial Sequence: Synthetic oligonucleotide
  Antisense Strand to SEQ ID NO: 356495
aaacuagacgaacaacuaa

SEQ ID NO: 356497 - RNA, 19 nt, Artificial Sequence
  Description of Artificial Sequence: Synthetic oligonucleotide
  Sense Strand Starting at position 481 of SEQ ID NO: 317768
cagcgacuuagugauggaa

SEQ ID NO: 356498 - RNA, 19 nt, Artificial Sequence
  Description of Artificial Sequence: Synthetic oligonucleotide
  Antisense Strand to SEQ ID NO: 356497
uuccaucacuaagucgcug

SEQ ID NO: 356499 - RNA, 19 nt, Artificial Sequence
  Description of Artificial Sequence: Synthetic oligonucleotide
  Sense Strand Starting at position 481 of SEQ ID NO: 317777
agugauggaacucggacua

SEQ ID NO: 356500 - RNA, 19 nt, Artificial Sequence
  Description of Artificial Sequence: Synthetic oligonucleotide
  Antisense Strand to SEQ ID NO: 356499
uaguccgaguuccaucacu

SEQ ID NO: 356501 - RNA, 19 nt, Artificial Sequence
  Description of Artificial Sequence: Synthetic oligonucleotide
  Sense Strand Starting at position 481 of SEQ ID NO: 317822
ucagcaaugucuguaagga

SEQ ID NO: 356502 - RNA, 19 nt, Artificial Sequence
  Description of Artificial Sequence: Synthetic oligonucleotide
  Antisense Strand to SEQ ID NO: 356501
uccuuacagacauugcuga

SEQ ID NO: 356503 - RNA, 19 nt, Artificial Sequence
  Description of Artificial Sequence: Synthetic oligonucleotide
  Sense Strand Starting at position 481 of SEQ ID NO: 317823
cagcaaugucuguaaggac

SEQ ID NO: 356504 - RNA, 19 nt, Artificial Sequence
  Description of Artificial Sequence: Synthetic oligonucleotide
  Antisense Strand to SEQ ID NO: 356503
guccuuacagacauugcug

SEQ ID NO: 356505 - RNA, 19 nt, Artificial Sequence
  Description of Artificial Sequence: Synthetic oligonucleotide
  Sense Strand Starting at position 481 of SEQ ID NO: 317831
ucuguaaggacaugauugu

SEQ ID NO: 356506 - RNA, 19 nt, Artificial Sequence
  Description of Artificial Sequence: Synthetic oligonucleotide
  Antisense Strand to SEQ ID NO: 356505
acaaucauguccuuacaga

SEQ ID NO: 356507 - RNA, 19 nt, Artificial Sequence
  Description of Artificial Sequence: Synthetic oligonucleotide
  Sense Strand Starting at position 481 of SEQ ID NO: 317861
uagugaauacuaggaaggu

SEQ ID NO: 356508 - RNA, 19 nt, Artificial Sequence
  Description of Artificial Sequence: Synthetic oligonucleotide
  Antisense Strand to SEQ ID NO: 356507
accuuccuaguauucacua

SEQ ID NO: 356509 - RNA, 19 nt, Artificial Sequence
  Description of Artificial Sequence: Synthetic oligonucleotide
  Sense Strand Starting at position 481 of SEQ ID NO: 317911
cuaagcaaagauugagagu

SEQ ID NO: 356510 - RNA, 19 nt, Artificial Sequence
  Description of Artificial Sequence: Synthetic oligonucleotide
  Antisense Strand to SEQ ID NO: 356509
acucucaaucuuugcuuag

SEQ ID NO: 356511 - RNA, 19 nt, Artificial Sequence
  Description of Artificial Sequence: Synthetic oligonucleotide
  Sense Strand Starting at position 481 of SEQ ID NO: 318062
cucucuuggcaauaagagu

SEQ ID NO: 356512 - RNA, 19 nt, Artificial Sequence
  Description of Artificial Sequence: Synthetic oligonucleotide
  Antisense Strand to SEQ ID NO: 356511
acucuuauugccaagagag

SEQ ID NO: 356513 - RNA, 19 nt, Artificial Sequence
  Description of Artificial Sequence: Synthetic oligonucleotide
  Sense Strand Starting at position 481 of SEQ ID NO: 318068
uggcaauaagaguaauguu

SEQ ID NO: 356514 - RNA, 19 nt, Artificial Sequence
  Description of Artificial Sequence: Synthetic oligonucleotide
  Antisense Strand to SEQ ID NO: 356513
aacauuacucuuauugcca

SEQ ID NO: 356515 - RNA, 19 nt, Artificial Sequence
  Description of Artificial Sequence: Synthetic oligonucleotide
  Sense Strand Starting at position 481 of SEQ ID NO: 318076
agaguaauguuaguuugaa

SEQ ID NO: 356516 - RNA, 19 nt, Artificial Sequence
  Description of Artificial Sequence: Synthetic oligonucleotide
  Antisense Strand to SEQ ID NO: 356515
uucaaacuaacauuacucu

SEQ ID NO: 356517 - RNA, 19 nt, Artificial Sequence
  Description of Artificial Sequence: Synthetic oligonucleotide
  Sense Strand Starting at position 481 of SEQ ID NO: 318077
gaguaauguuaguuugaau

SEQ ID NO: 356518 - RNA, 19 nt, Artificial Sequence
  Description of Artificial Sequence: Synthetic oligonucleotide
  Antisense Strand to SEQ ID NO: 356517
auucaaacuaacauuacuc

SEQ ID NO: 356519 - RNA, 19 nt, Artificial Sequence
  Description of Artificial Sequence: Synthetic oligonucleotide
  Sense Strand Starting at position 481 of SEQ ID NO: 318517
ggugauagauauccuaaac

SEQ ID NO: 356520 - RNA, 19 nt, Artificial Sequence
  Description of Artificial Sequence: Synthetic oligonucleotide
  Antisense Strand to SEQ ID NO: 356519
guuuaggauaucuaucacc

SEQ ID NO: 356521 - RNA, 19 nt, Artificial Sequence
  Description of Artificial Sequence: Synthetic oligonucleotide
  Sense Strand Starting at position 481 of SEQ ID NO: 318749
gcuccaggaagguaguaau

SEQ ID NO: 356522 - RNA, 19 nt, Artificial Sequence
  Description of Artificial Sequence: Synthetic oligonucleotide
  Antisense Strand to SEQ ID NO: 356521
auuacuaccuuccuggagc

SEQ ID NO: 356523 - RNA, 19 nt, Artificial Sequence
  Description of Artificial Sequence: Synthetic oligonucleotide
  Sense Strand Starting at position 481 of SEQ ID NO: 318813
ggcacucaauaucuguuaa

SEQ ID NO: 356524 - RNA, 19 nt, Artificial Sequence
  Description of Artificial Sequence: Synthetic oligonucleotide
  Antisense Strand to SEQ ID NO: 356523
uuaacagauauugagugcc

SEQ ID NO: 356525 - RNA, 19 nt, Artificial Sequence
  Description of Artificial Sequence: Synthetic oligonucleotide
  Sense Strand Starting at position 481 of SEQ ID NO: 318972
ucuuauaucccugauugua

SEQ ID NO: 356526 - RNA, 19 nt, Artificial Sequence
  Description of Artificial Sequence: Synthetic oligonucleotide
  Antisense Strand to SEQ ID NO: 356525
uacaaucagggauauaaga

SEQ ID NO: 356527 - RNA, 19 nt, Artificial Sequence
  Description of Artificial Sequence: Synthetic oligonucleotide
  Sense Strand Starting at position 481 of SEQ ID NO: 318974
uuauaucccugauuguauc

SEQ ID NO: 356528 - RNA, 19 nt, Artificial Sequence
  Description of Artificial Sequence: Synthetic oligonucleotide
  Antisense Strand to SEQ ID NO: 356527
gauacaaucagggauauaa

SEQ ID NO: 356529 - RNA, 19 nt, Artificial Sequence
  Description of Artificial Sequence: Synthetic oligonucleotide
  Sense Strand Starting at position 481 of SEQ ID NO: 319004
guccuaaaccugcaucagu

SEQ ID NO: 356530 - RNA, 19 nt, Artificial Sequence
  Description of Artificial Sequence: Synthetic oligonucleotide
  Antisense Strand to SEQ ID NO: 356529
acugaugcagguuuaggac

SEQ ID NO: 356531 - RNA, 19 nt, Artificial Sequence
  Description of Artificial Sequence: Synthetic oligonucleotide
  Sense Strand Starting at position 482 of SEQ ID NO: 315376
ggcuaugcagcgucaguaa

SEQ ID NO: 356532 - RNA, 19 nt, Artificial Sequence
  Description of Artificial Sequence: Synthetic oligonucleotide
  Antisense Strand to SEQ ID NO: 356531
uuacugacgcugcauagcc

SEQ ID NO: 356533 - RNA, 19 nt, Artificial Sequence
  Description of Artificial Sequence: Synthetic oligonucleotide
  Sense Strand Starting at position 482 of SEQ ID NO: 315431
gcaaguuaaguccaaacaa

SEQ ID NO: 356534 - RNA, 19 nt, Artificial Sequence
  Description of Artificial Sequence: Synthetic oligonucleotide
  Antisense Strand to SEQ ID NO: 356533
uuguuuggacuuaacuugc

SEQ ID NO: 356535 - RNA, 19 nt, Artificial Sequence
  Description of Artificial Sequence: Synthetic oligonucleotide
  Sense Strand Starting at position 482 of SEQ ID NO: 315443
caaacaaucggauguguau

SEQ ID NO: 356536 - RNA, 19 nt, Artificial Sequence
  Description of Artificial Sequence: Synthetic oligonucleotide
  Antisense Strand to SEQ ID NO: 356535
auacacauccgauuguuug

SEQ ID NO: 356537 - RNA, 19 nt, Artificial Sequence
  Description of Artificial Sequence: Synthetic oligonucleotide
  Sense Strand Starting at position 482 of SEQ ID NO: 315676
gggagaaagcugcauaagu

SEQ ID NO: 356538 - RNA, 19 nt, Artificial Sequence
  Description of Artificial Sequence: Synthetic oligonucleotide
  Antisense Strand to SEQ ID NO: 356537
acuuaugcagcuuucuccc

SEQ ID NO: 356539 - RNA, 19 nt, Artificial Sequence
  Description of Artificial Sequence: Synthetic oligonucleotide
  Sense Strand Starting at position 482 of SEQ ID NO: 315678
gagaaagcugcauaaguau

SEQ ID NO: 356540 - RNA, 19 nt, Artificial Sequence
  Description of Artificial Sequence: Synthetic oligonucleotide
  Antisense Strand to SEQ ID NO: 356539
auacuuaugcagcuuucuc

SEQ ID NO: 356541 - RNA, 19 nt, Artificial Sequence
  Description of Artificial Sequence: Synthetic oligonucleotide
  Sense Strand Starting at position 482 of SEQ ID NO: 315739
uaggauacguccuuaacaa

SEQ ID NO: 356542 - RNA, 19 nt, Artificial Sequence
  Description of Artificial Sequence: Synthetic oligonucleotide
  Antisense Strand to SEQ ID NO: 356541
uuguuaaggacguauccua

SEQ ID NO: 356543 - RNA, 19 nt, Artificial Sequence
  Description of Artificial Sequence: Synthetic oligonucleotide
  Sense Strand Starting at position 482 of SEQ ID NO: 315968
cgaagcuaacuguaacaua

SEQ ID NO: 356544 - RNA, 19 nt, Artificial Sequence
  Description of Artificial Sequence: Synthetic oligonucleotide
  Antisense Strand to SEQ ID NO: 356543
uauguuacaguuagcuucg

SEQ ID NO: 356545 - RNA, 19 nt, Artificial Sequence
  Description of Artificial Sequence: Synthetic oligonucleotide
  Sense Strand Starting at position 482 of SEQ ID NO: 315986
acaugcaucucugugauga

SEQ ID NO: 356546 - RNA, 19 nt, Artificial Sequence
  Description of Artificial Sequence: Synthetic oligonucleotide
  Antisense Strand to SEQ ID NO: 356545
ucaucacagagaugcaugu

SEQ ID NO: 356547 - RNA, 19 nt, Artificial Sequence
  Description of Artificial Sequence: Synthetic oligonucleotide
  Sense Strand Starting at position 482 of SEQ ID NO: 315987
caugcaucucugugaugaa

SEQ ID NO: 356548 - RNA, 19 nt, Artificial Sequence
  Description of Artificial Sequence: Synthetic oligonucleotide
  Antisense Strand to SEQ ID NO: 356547
uucaucacagagaugcaug

SEQ ID NO: 356549 - RNA, 19 nt, Artificial Sequence
  Description of Artificial Sequence: Synthetic oligonucleotide
  Sense Strand Starting at position 482 of SEQ ID NO: 315991
caucucugugaugaaguaa

SEQ ID NO: 356550 - RNA, 19 nt, Artificial Sequence
  Description of Artificial Sequence: Synthetic oligonucleotide
  Antisense Strand to SEQ ID NO: 356549
uuacuucaucacagagaug

SEQ ID NO: 356551 - RNA, 19 nt, Artificial Sequence
  Description of Artificial Sequence: Synthetic oligonucleotide
  Sense Strand Starting at position 482 of SEQ ID NO: 316241
aacagcacaguuugagaaa

SEQ ID NO: 356552 - RNA, 19 nt, Artificial Sequence
  Description of Artificial Sequence: Synthetic oligonucleotide
  Antisense Strand to SEQ ID NO: 356551
uuucucaaacugugcuguu

SEQ ID NO: 356553 - RNA, 19 nt, Artificial Sequence
  Description of Artificial Sequence: Synthetic oligonucleotide
  Sense Strand Starting at position 482 of SEQ ID NO: 316252
uugagaaaucucugccaaa

SEQ ID NO: 356554 - RNA, 19 nt, Artificial Sequence
  Description of Artificial Sequence: Synthetic oligonucleotide
  Antisense Strand to SEQ ID NO: 356553
uuuggcagagauuucucaa

SEQ ID NO: 356555 - RNA, 19 nt, Artificial Sequence
  Description of Artificial Sequence: Synthetic oligonucleotide
  Sense Strand Starting at position 482 of SEQ ID NO: 316253
ugagaaaucucugccaaac

SEQ ID NO: 356556 - RNA, 19 nt, Artificial Sequence
  Description of Artificial Sequence: Synthetic oligonucleotide
  Antisense Strand to SEQ ID NO: 356555
guuuggcagagauuucuca

SEQ ID NO: 356557 - RNA, 19 nt, Artificial Sequence
  Description of Artificial Sequence: Synthetic oligonucleotide
  Sense Strand Starting at position 482 of SEQ ID NO: 316408
uugacaagagcucggguaa

SEQ ID NO: 356558 - RNA, 19 nt, Artificial Sequence
  Description of Artificial Sequence: Synthetic oligonucleotide
  Antisense Strand to SEQ ID NO: 356557
uuacccgagcucuugucaa

SEQ ID NO: 356559 - RNA, 19 nt, Artificial Sequence
  Description of Artificial Sequence: Synthetic oligonucleotide
  Sense Strand Starting at position 482 of SEQ ID NO: 316409
ugacaagagcucggguaaa

SEQ ID NO: 356560 - RNA, 19 nt, Artificial Sequence
  Description of Artificial Sequence: Synthetic oligonucleotide
  Antisense Strand to SEQ ID NO: 356559
uuuacccgagcucuuguca

SEQ ID NO: 356561 - RNA, 19 nt, Artificial Sequence
  Description of Artificial Sequence: Synthetic oligonucleotide
  Sense Strand Starting at position 482 of SEQ ID NO: 316614
gugccaauagcucaccaaa

SEQ ID NO: 356562 - RNA, 19 nt, Artificial Sequence
  Description of Artificial Sequence: Synthetic oligonucleotide
  Antisense Strand to SEQ ID NO: 356561
uuuggugagcuauuggcac

SEQ ID NO: 356563 - RNA, 19 nt, Artificial Sequence
  Description of Artificial Sequence: Synthetic oligonucleotide
  Sense Strand Starting at position 482 of SEQ ID NO: 317836
gggugagguucggugaaca

SEQ ID NO: 356564 - RNA, 19 nt, Artificial Sequence
  Description of Artificial Sequence: Synthetic oligonucleotide
  Antisense Strand to SEQ ID NO: 356563
uguucaccgaaccucaccc

SEQ ID NO: 356565 - RNA, 19 nt, Artificial Sequence
  Description of Artificial Sequence: Synthetic oligonucleotide
  Sense Strand Starting at position 482 of SEQ ID NO: 317882
guguguuccaguucucguu

SEQ ID NO: 356566 - RNA, 19 nt, Artificial Sequence
  Description of Artificial Sequence: Synthetic oligonucleotide
  Antisense Strand to SEQ ID NO: 356565
aacgagaacuggaacacac

SEQ ID NO: 356567 - RNA, 19 nt, Artificial Sequence
  Description of Artificial Sequence: Synthetic oligonucleotide
  Sense Strand Starting at position 482 of SEQ ID NO: 317886
guuccaguucucguucgga

SEQ ID NO: 356568 - RNA, 19 nt, Artificial Sequence
  Description of Artificial Sequence: Synthetic oligonucleotide
  Antisense Strand to SEQ ID NO: 356567
uccgaacgagaacuggaac

SEQ ID NO: 356569 - RNA, 19 nt, Artificial Sequence
  Description of Artificial Sequence: Synthetic oligonucleotide
  Sense Strand Starting at position 482 of SEQ ID NO: 317930
guguguaugaacgaaagaa

SEQ ID NO: 356570 - RNA, 19 nt, Artificial Sequence
  Description of Artificial Sequence: Synthetic oligonucleotide
  Antisense Strand to SEQ ID NO: 356569
uucuuucguucauacacac

SEQ ID NO: 356571 - RNA, 19 nt, Artificial Sequence
  Description of Artificial Sequence: Synthetic oligonucleotide
  Sense Strand Starting at position 482 of SEQ ID NO: 317964
gugugcacucugcugagua

SEQ ID NO: 356572 - RNA, 19 nt, Artificial Sequence
  Description of Artificial Sequence: Synthetic oligonucleotide
  Antisense Strand to SEQ ID NO: 356571
uacucagcagagugcacac

SEQ ID NO: 356573 - RNA, 19 nt, Artificial Sequence
  Description of Artificial Sequence: Synthetic oligonucleotide
  Sense Strand Starting at position 482 of SEQ ID NO: 318012
gcggcagacacaugggaua

SEQ ID NO: 356574 - RNA, 19 nt, Artificial Sequence
  Description of Artificial Sequence: Synthetic oligonucleotide
  Antisense Strand to SEQ ID NO: 356573
uaucccaugugucugccgc

SEQ ID NO: 356575 - RNA, 19 nt, Artificial Sequence
  Description of Artificial Sequence: Synthetic oligonucleotide
  Sense Strand Starting at position 482 of SEQ ID NO: 318025
gggauagcuacauagcaca

SEQ ID NO: 356576 - RNA, 19 nt, Artificial Sequence
  Description of Artificial Sequence: Synthetic oligonucleotide
  Antisense Strand to SEQ ID NO: 356575
ugugcuauguagcuauccc

SEQ ID NO: 356577 - RNA, 19 nt, Artificial Sequence
  Description of Artificial Sequence: Synthetic oligonucleotide
  Sense Strand Starting at position 482 of SEQ ID NO: 318039
gcacaaucccgguagucaa

SEQ ID NO: 356578 - RNA, 19 nt, Artificial Sequence
  Description of Artificial Sequence: Synthetic oligonucleotide
  Antisense Strand to SEQ ID NO: 356577
uugacuaccgggauugugc

SEQ ID NO: 356579 - RNA, 19 nt, Artificial Sequence
  Description of Artificial Sequence: Synthetic oligonucleotide
  Sense Strand Starting at position 482 of SEQ ID NO: 318151
ggaagcacgcuagacuuaa

SEQ ID NO: 356580 - RNA, 19 nt, Artificial Sequence
  Description of Artificial Sequence: Synthetic oligonucleotide
  Antisense Strand to SEQ ID NO: 356579
uuaagucuagcgugcuucc

SEQ ID NO: 356581 - RNA, 19 nt, Artificial Sequence
  Description of Artificial Sequence: Synthetic oligonucleotide
  Sense Strand Starting at position 482 of SEQ ID NO: 318276
aaucguacagacugaaaug

SEQ ID NO: 356582 - RNA, 19 nt, Artificial Sequence
  Description of Artificial Sequence: Synthetic oligonucleotide
  Antisense Strand to SEQ ID NO: 356581
cauuucagucuguacgauu

SEQ ID NO: 356583 - RNA, 19 nt, Artificial Sequence
  Description of Artificial Sequence: Synthetic oligonucleotide
  Sense Strand Starting at position 482 of SEQ ID NO: 318428
ccacaaaccucuucgaaga

SEQ ID NO: 356584 - RNA, 19 nt, Artificial Sequence
  Description of Artificial Sequence: Synthetic oligonucleotide
  Antisense Strand to SEQ ID NO: 356583
ucuucgaagagguuugugg

SEQ ID NO: 356585 - RNA, 19 nt, Artificial Sequence
  Description of Artificial Sequence: Synthetic oligonucleotide
  Sense Strand Starting at position 482 of SEQ ID NO: 318441
cgaagaaauguauacugca

SEQ ID NO: 356586 - RNA, 19 nt, Artificial Sequence
  Description of Artificial Sequence: Synthetic oligonucleotide
  Antisense Strand to SEQ ID NO: 356585
ugcaguauacauuucuucg

SEQ ID NO: 356587 - RNA, 19 nt, Artificial Sequence
  Description of Artificial Sequence: Synthetic oligonucleotide
  Sense Strand Starting at position 482 of SEQ ID NO: 318524
ugcuguugaccugaauucu

SEQ ID NO: 356588 - RNA, 19 nt, Artificial Sequence
  Description of Artificial Sequence: Synthetic oligonucleotide
  Antisense Strand to SEQ ID NO: 356587
agaauucaggucaacagca

SEQ ID NO: 356589 - RNA, 19 nt, Artificial Sequence
  Description of Artificial Sequence: Synthetic oligonucleotide
  Sense Strand Starting at position 482 of SEQ ID NO: 318576
gguguaauuuaugauacac

SEQ ID NO: 356590 - RNA, 19 nt, Artificial Sequence
  Description of Artificial Sequence: Synthetic oligonucleotide
  Antisense Strand to SEQ ID NO: 356589
guguaucauaaauuacacc

SEQ ID NO: 356591 - RNA, 19 nt, Artificial Sequence
  Description of Artificial Sequence: Synthetic oligonucleotide
  Sense Strand Starting at position 482 of SEQ ID NO: 318619
gacuuuagucguuaccauu

SEQ ID NO: 356592 - RNA, 19 nt, Artificial Sequence
  Description of Artificial Sequence: Synthetic oligonucleotide
  Antisense Strand to SEQ ID NO: 356591
aaugguaacgacuaaaguc

SEQ ID NO: 356593 - RNA, 19 nt, Artificial Sequence
  Description of Artificial Sequence: Synthetic oligonucleotide
  Sense Strand Starting at position 482 of SEQ ID NO: 318665
ggguaaaucucuuuagcua

SEQ ID NO: 356594 - RNA, 19 nt, Artificial Sequence
  Description of Artificial Sequence: Synthetic oligonucleotide
  Antisense Strand to SEQ ID NO: 356593
uagcuaaagagauuuaccc

SEQ ID NO: 356595 - RNA, 19 nt, Artificial Sequence
  Description of Artificial Sequence: Synthetic oligonucleotide
  Sense Strand Starting at position 482 of SEQ ID NO: 318666
gguaaaucucuuuagcuaa

SEQ ID NO: 356596 - RNA, 19 nt, Artificial Sequence
  Description of Artificial Sequence: Synthetic oligonucleotide
  Antisense Strand to SEQ ID NO: 356595
uuagcuaaagagauuuacc

SEQ ID NO: 356597 - RNA, 19 nt, Artificial Sequence
  Description of Artificial Sequence: Synthetic oligonucleotide
  Sense Strand Starting at position 482 of SEQ ID NO: 318695
aagacaguuccuggugcaa

SEQ ID NO: 356598 - RNA, 19 nt, Artificial Sequence
  Description of Artificial Sequence: Synthetic oligonucleotide
  Antisense Strand to SEQ ID NO: 356597
uugcaccaggaacugucuu

SEQ ID NO: 356599 - RNA, 19 nt, Artificial Sequence
  Description of Artificial Sequence: Synthetic oligonucleotide
  Sense Strand Starting at position 482 of SEQ ID NO: 318733
cugaaauuauagguugcua

SEQ ID NO: 356600 - RNA, 19 nt, Artificial Sequence
  Description of Artificial Sequence: Synthetic oligonucleotide
  Antisense Strand to SEQ ID NO: 356599
uagcaaccuauaauuucag

SEQ ID NO: 356601 - RNA, 19 nt, Artificial Sequence
  Description of Artificial Sequence: Synthetic oligonucleotide
  Sense Strand Starting at position 482 of SEQ ID NO: 318735
gaaauuauagguugcuaaa

SEQ ID NO: 356602 - RNA, 19 nt, Artificial Sequence
  Description of Artificial Sequence: Synthetic oligonucleotide
  Antisense Strand to SEQ ID NO: 356601
uuuagcaaccuauaauuuc

SEQ ID NO: 356603 - RNA, 19 nt, Artificial Sequence
  Description of Artificial Sequence: Synthetic oligonucleotide
  Sense Strand Starting at position 482 of SEQ ID NO: 318946
agccaaaguuuaucaaagu

SEQ ID NO: 356604 - RNA, 19 nt, Artificial Sequence
  Description of Artificial Sequence: Synthetic oligonucleotide
  Antisense Strand to SEQ ID NO: 356603
acuuugauaaacuuuggcu

SEQ ID NO: 356605 - RNA, 19 nt, Artificial Sequence
  Description of Artificial Sequence: Synthetic oligonucleotide
  Sense Strand Starting at position 482 of SEQ ID NO: 318988
uuaggucuugcauaaaguu

SEQ ID NO: 356606 - RNA, 19 nt, Artificial Sequence
  Description of Artificial Sequence: Synthetic oligonucleotide
  Antisense Strand to SEQ ID NO: 356605
aacuuuaugcaagaccuaa

SEQ ID NO: 356607 - RNA, 19 nt, Artificial Sequence
  Description of Artificial Sequence: Synthetic oligonucleotide
  Sense Strand Starting at position 482 of SEQ ID NO: 318997
gcauaaaguuaguuacuca

SEQ ID NO: 356608 - RNA, 19 nt, Artificial Sequence
  Description of Artificial Sequence: Synthetic oligonucleotide
  Antisense Strand to SEQ ID NO: 356607
ugaguaacuaacuuuaugc

SEQ ID NO: 356609 - RNA, 19 nt, Artificial Sequence
  Description of Artificial Sequence: Synthetic oligonucleotide
  Sense Strand Starting at position 482 of SEQ ID NO: 319005
uuaguuacucagcaagauu

SEQ ID NO: 356610 - RNA, 19 nt, Artificial Sequence
  Description of Artificial Sequence: Synthetic oligonucleotide
  Antisense Strand to SEQ ID NO: 356609
aaucuugcugaguaacuaa

SEQ ID NO: 356611 - RNA, 19 nt, Artificial Sequence
  Description of Artificial Sequence: Synthetic oligonucleotide
  Sense Strand Starting at position 483 of SEQ ID NO: 315245
gguccuucugccuggaaua

SEQ ID NO: 356612 - RNA, 19 nt, Artificial Sequence
  Description of Artificial Sequence: Synthetic oligonucleotide
  Antisense Strand to SEQ ID NO: 356611
uauuccaggcagaaggacc

SEQ ID NO: 356613 - RNA, 19 nt, Artificial Sequence
  Description of Artificial Sequence: Synthetic oligonucleotide
  Sense Strand Starting at position 483 of SEQ ID NO: 315246
guccuucugccuggaauac

SEQ ID NO: 356614 - RNA, 19 nt, Artificial Sequence
  Description of Artificial Sequence: Synthetic oligonucleotide
  Antisense Strand to SEQ ID NO: 356613
guauuccaggcagaaggac

SEQ ID NO: 356615 - RNA, 19 nt, Artificial Sequence
  Description of Artificial Sequence: Synthetic oligonucleotide
  Sense Strand Starting at position 483 of SEQ ID NO: 315273
cccuaaauaucuguauugu

SEQ ID NO: 356616 - RNA, 19 nt, Artificial Sequence
  Description of Artificial Sequence: Synthetic oligonucleotide
  Antisense Strand to SEQ ID NO: 356615
acaauacagauauuuaggg

SEQ ID NO: 356617 - RNA, 19 nt, Artificial Sequence
  Description of Artificial Sequence: Synthetic oligonucleotide
  Sense Strand Starting at position 483 of SEQ ID NO: 315274
ccuaaauaucuguauuguc

SEQ ID NO: 356618 - RNA, 19 nt, Artificial Sequence
  Description of Artificial Sequence: Synthetic oligonucleotide
  Antisense Strand to SEQ ID NO: 356617
gacaauacagauauuuagg

SEQ ID NO: 356619 - RNA, 19 nt, Artificial Sequence
  Description of Artificial Sequence: Synthetic oligonucleotide
  Sense Strand Starting at position 483 of SEQ ID NO: 315308
ucagaagcaucuguucgaa

SEQ ID NO: 356620 - RNA, 19 nt, Artificial Sequence
  Description of Artificial Sequence: Synthetic oligonucleotide
  Antisense Strand to SEQ ID NO: 356619
uucgaacagaugcuucuga

SEQ ID NO: 356621 - RNA, 19 nt, Artificial Sequence
  Description of Artificial Sequence: Synthetic oligonucleotide
  Sense Strand Starting at position 483 of SEQ ID NO: 315310
agaagcaucuguucgaaug

SEQ ID NO: 356622 - RNA, 19 nt, Artificial Sequence
  Description of Artificial Sequence: Synthetic oligonucleotide
  Antisense Strand to SEQ ID NO: 356621
cauucgaacagaugcuucu

SEQ ID NO: 356623 - RNA, 19 nt, Artificial Sequence
  Description of Artificial Sequence: Synthetic oligonucleotide
  Sense Strand Starting at position 483 of SEQ ID NO: 315320
guucgaaugugacuugaga

SEQ ID NO: 356624 - RNA, 19 nt, Artificial Sequence
  Description of Artificial Sequence: Synthetic oligonucleotide
  Antisense Strand to SEQ ID NO: 356623
ucucaagucacauucgaac

SEQ ID NO: 356625 - RNA, 19 nt, Artificial Sequence
  Description of Artificial Sequence: Synthetic oligonucleotide
  Sense Strand Starting at position 483 of SEQ ID NO: 315322
ucgaaugugacuugagaag

SEQ ID NO: 356626 - RNA, 19 nt, Artificial Sequence
  Description of Artificial Sequence: Synthetic oligonucleotide
  Antisense Strand to SEQ ID NO: 356625
cuucucaagucacauucga

SEQ ID NO: 356627 - RNA, 19 nt, Artificial Sequence
  Description of Artificial Sequence: Synthetic oligonucleotide
  Sense Strand Starting at position 483 of SEQ ID NO: 315520
gcuuuaucucuagagccuu

SEQ ID NO: 356628 - RNA, 19 nt, Artificial Sequence
  Description of Artificial Sequence: Synthetic oligonucleotide
  Antisense Strand to SEQ ID NO: 356627
aaggcucuagagauaaagc

SEQ ID NO: 356629 - RNA, 19 nt, Artificial Sequence
  Description of Artificial Sequence: Synthetic oligonucleotide
  Sense Strand Starting at position 483 of SEQ ID NO: 315526
ucucuagagccuuagaauu

SEQ ID NO: 356630 - RNA, 19 nt, Artificial Sequence
  Description of Artificial Sequence: Synthetic oligonucleotide
  Antisense Strand to SEQ ID NO: 356629
aauucuaaggcucuagaga

SEQ ID NO: 356631 - RNA, 19 nt, Artificial Sequence
  Description of Artificial Sequence: Synthetic oligonucleotide
  Sense Strand Starting at position 483 of SEQ ID NO: 315696
ugaguuccuuugccuuuaa

SEQ ID NO: 356632 - RNA, 19 nt, Artificial Sequence
  Description of Artificial Sequence: Synthetic oligonucleotide
  Antisense Strand to SEQ ID NO: 356631
uuaaaggcaaaggaacuca

SEQ ID NO: 356633 - RNA, 19 nt, Artificial Sequence
  Description of Artificial Sequence: Synthetic oligonucleotide
  Sense Strand Starting at position 483 of SEQ ID NO: 315771
uuuggugucucaccauaag

SEQ ID NO: 356634 - RNA, 19 nt, Artificial Sequence
  Description of Artificial Sequence: Synthetic oligonucleotide
  Antisense Strand to SEQ ID NO: 356633
cuuauggugagacaccaaa

SEQ ID NO: 356635 - RNA, 19 nt, Artificial Sequence
  Description of Artificial Sequence: Synthetic oligonucleotide
  Sense Strand Starting at position 483 of SEQ ID NO: 316219
aaacgcucuccucgaggau

SEQ ID NO: 356636 - RNA, 19 nt, Artificial Sequence
  Description of Artificial Sequence: Synthetic oligonucleotide
  Antisense Strand to SEQ ID NO: 356635
auccucgaggagagcguuu

SEQ ID NO: 356637 - RNA, 19 nt, Artificial Sequence
  Description of Artificial Sequence: Synthetic oligonucleotide
  Sense Strand Starting at position 483 of SEQ ID NO: 316220
aacgcucuccucgaggauu

SEQ ID NO: 356638 - RNA, 19 nt, Artificial Sequence
  Description of Artificial Sequence: Synthetic oligonucleotide
  Antisense Strand to SEQ ID NO: 356637
aauccucgaggagagcguu

SEQ ID NO: 356639 - RNA, 19 nt, Artificial Sequence
  Description of Artificial Sequence: Synthetic oligonucleotide
  Sense Strand Starting at position 483 of SEQ ID NO: 317840
uucuguuacccuuaggaug

SEQ ID NO: 356640 - RNA, 19 nt, Artificial Sequence
  Description of Artificial Sequence: Synthetic oligonucleotide
  Antisense Strand to SEQ ID NO: 356639
cauccuaaggguaacagaa

SEQ ID NO: 356641 - RNA, 19 nt, Artificial Sequence
  Description of Artificial Sequence: Synthetic oligonucleotide
  Sense Strand Starting at position 483 of SEQ ID NO: 317873
ucauauggcccaugaggau

SEQ ID NO: 356642 - RNA, 19 nt, Artificial Sequence
  Description of Artificial Sequence: Synthetic oligonucleotide
  Antisense Strand to SEQ ID NO: 356641
auccucaugggccauauga

SEQ ID NO: 356643 - RNA, 19 nt, Artificial Sequence
  Description of Artificial Sequence: Synthetic oligonucleotide
  Sense Strand Starting at position 483 of SEQ ID NO: 317882
ccaugaggauguuuacagu

SEQ ID NO: 356644 - RNA, 19 nt, Artificial Sequence
  Description of Artificial Sequence: Synthetic oligonucleotide
  Antisense Strand to SEQ ID NO: 356643
acuguaaacauccucaugg

SEQ ID NO: 356645 - RNA, 19 nt, Artificial Sequence
  Description of Artificial Sequence: Synthetic oligonucleotide
  Sense Strand Starting at position 483 of SEQ ID NO: 317987
guaguuuccaugggcuuaa

SEQ ID NO: 356646 - RNA, 19 nt, Artificial Sequence
  Description of Artificial Sequence: Synthetic oligonucleotide
  Antisense Strand to SEQ ID NO: 356645
uuaagcccauggaaacuac

SEQ ID NO: 356647 - RNA, 19 nt, Artificial Sequence
  Description of Artificial Sequence: Synthetic oligonucleotide
  Sense Strand Starting at position 483 of SEQ ID NO: 318004
aagcuuccuuagcugugaa

SEQ ID NO: 356648 - RNA, 19 nt, Artificial Sequence
  Description of Artificial Sequence: Synthetic oligonucleotide
  Antisense Strand to SEQ ID NO: 356647
uucacagcuaaggaagcuu

SEQ ID NO: 356649 - RNA, 19 nt, Artificial Sequence
  Description of Artificial Sequence: Synthetic oligonucleotide
  Sense Strand Starting at position 483 of SEQ ID NO: 318007
cuuccuuagcugugaaaga

SEQ ID NO: 356650 - RNA, 19 nt, Artificial Sequence
  Description of Artificial Sequence: Synthetic oligonucleotide
  Antisense Strand to SEQ ID NO: 356649
ucuuucacagcuaaggaag

SEQ ID NO: 356651 - RNA, 19 nt, Artificial Sequence
  Description of Artificial Sequence: Synthetic oligonucleotide
  Sense Strand Starting at position 483 of SEQ ID NO: 318141
aagacaaagccuugguuga

SEQ ID NO: 356652 - RNA, 19 nt, Artificial Sequence
  Description of Artificial Sequence: Synthetic oligonucleotide
  Antisense Strand to SEQ ID NO: 356651
ucaaccaaggcuuugucuu

SEQ ID NO: 356653 - RNA, 19 nt, Artificial Sequence
  Description of Artificial Sequence: Synthetic oligonucleotide
  Sense Strand Starting at position 483 of SEQ ID NO: 318176
gaaccagaaucuguuggua

SEQ ID NO: 356654 - RNA, 19 nt, Artificial Sequence
  Description of Artificial Sequence: Synthetic oligonucleotide
  Antisense Strand to SEQ ID NO: 356653
uaccaacagauucugguuc

SEQ ID NO: 356655 - RNA, 19 nt, Artificial Sequence
  Description of Artificial Sequence: Synthetic oligonucleotide
  Sense Strand Starting at position 483 of SEQ ID NO: 318179
ccagaaucuguugguaauc

SEQ ID NO: 356656 - RNA, 19 nt, Artificial Sequence
  Description of Artificial Sequence: Synthetic oligonucleotide
  Antisense Strand to SEQ ID NO: 356655
gauuaccaacagauucugg

SEQ ID NO: 356657 - RNA, 19 nt, Artificial Sequence
  Description of Artificial Sequence: Synthetic oligonucleotide
  Sense Strand Starting at position 483 of SEQ ID NO: 318214
ccaaacucuuuccugggaa

SEQ ID NO: 356658 - RNA, 19 nt, Artificial Sequence
  Description of Artificial Sequence: Synthetic oligonucleotide
  Antisense Strand to SEQ ID NO: 356657
uucccaggaaagaguuugg

SEQ ID NO: 356659 - RNA, 19 nt, Artificial Sequence
  Description of Artificial Sequence: Synthetic oligonucleotide
  Sense Strand Starting at position 483 of SEQ ID NO: 318268
caggaugaggccugaaugu

SEQ ID NO: 356660 - RNA, 19 nt, Artificial Sequence
  Description of Artificial Sequence: Synthetic oligonucleotide
  Antisense Strand to SEQ ID NO: 356659
acauucaggccucauccug

SEQ ID NO: 356661 - RNA, 19 nt, Artificial Sequence
  Description of Artificial Sequence: Synthetic oligonucleotide
  Sense Strand Starting at position 483 of SEQ ID NO: 318628
cuuguauccuaguuauggu

SEQ ID NO: 356662 - RNA, 19 nt, Artificial Sequence
  Description of Artificial Sequence: Synthetic oligonucleotide
  Antisense Strand to SEQ ID NO: 356661
accauaacuaggauacaag

SEQ ID NO: 356663 - RNA, 19 nt, Artificial Sequence
  Description of Artificial Sequence: Synthetic oligonucleotide
  Sense Strand Starting at position 483 of SEQ ID NO: 318674
gcuggauucccacgggaau

SEQ ID NO: 356664 - RNA, 19 nt, Artificial Sequence
  Description of Artificial Sequence: Synthetic oligonucleotide
  Antisense Strand to SEQ ID NO: 356663
auucccgugggaauccagc

SEQ ID NO: 356665 - RNA, 19 nt, Artificial Sequence
  Description of Artificial Sequence: Synthetic oligonucleotide
  Sense Strand Starting at position 483 of SEQ ID NO: 318675
cuggauucccacgggaauc

SEQ ID NO: 356666 - RNA, 19 nt, Artificial Sequence
  Description of Artificial Sequence: Synthetic oligonucleotide
  Antisense Strand to SEQ ID NO: 356665
gauucccgugggaauccag

SEQ ID NO: 356667 - RNA, 19 nt, Artificial Sequence
  Description of Artificial Sequence: Synthetic oligonucleotide
  Sense Strand Starting at position 483 of SEQ ID NO: 318699
aggccuacguaauccauau

SEQ ID NO: 356668 - RNA, 19 nt, Artificial Sequence
  Description of Artificial Sequence: Synthetic oligonucleotide
  Antisense Strand to SEQ ID NO: 356667
auauggauuacguaggccu

SEQ ID NO: 356669 - RNA, 19 nt, Artificial Sequence
  Description of Artificial Sequence: Synthetic oligonucleotide
  Sense Strand Starting at position 483 of SEQ ID NO: 318703
cuacguaauccauaucuag

SEQ ID NO: 356670 - RNA, 19 nt, Artificial Sequence
  Description of Artificial Sequence: Synthetic oligonucleotide
  Antisense Strand to SEQ ID NO: 356669
cuagauauggauuacguag

SEQ ID NO: 356671 - RNA, 19 nt, Artificial Sequence
  Description of Artificial Sequence: Synthetic oligonucleotide
  Sense Strand Starting at position 483 of SEQ ID NO: 318710
auccauaucuaguugacuu

SEQ ID NO: 356672 - RNA, 19 nt, Artificial Sequence
  Description of Artificial Sequence: Synthetic oligonucleotide
  Antisense Strand to SEQ ID NO: 356671
aagucaacuagauauggau

SEQ ID NO: 356673 - RNA, 19 nt, Artificial Sequence
  Description of Artificial Sequence: Synthetic oligonucleotide
  Sense Strand Starting at position 483 of SEQ ID NO: 318734
accucagagcgcugacuau

SEQ ID NO: 356674 - RNA, 19 nt, Artificial Sequence
  Description of Artificial Sequence: Synthetic oligonucleotide
  Antisense Strand to SEQ ID NO: 356673
auagucagcgcucugaggu

SEQ ID NO: 356675 - RNA, 19 nt, Artificial Sequence
  Description of Artificial Sequence: Synthetic oligonucleotide
  Sense Strand Starting at position 483 of SEQ ID NO: 318787
augagugguuggagagaua

SEQ ID NO: 356676 - RNA, 19 nt, Artificial Sequence
  Description of Artificial Sequence: Synthetic oligonucleotide
  Antisense Strand to SEQ ID NO: 356675
uaucucuccaaccacucau

SEQ ID NO: 356677 - RNA, 19 nt, Artificial Sequence
  Description of Artificial Sequence: Synthetic oligonucleotide
  Sense Strand Starting at position 483 of SEQ ID NO: 318796
uggagagauagcugcauga

SEQ ID NO: 356678 - RNA, 19 nt, Artificial Sequence
  Description of Artificial Sequence: Synthetic oligonucleotide
  Antisense Strand to SEQ ID NO: 356677
ucaugcagcuaucucucca

SEQ ID NO: 356679 - RNA, 19 nt, Artificial Sequence
  Description of Artificial Sequence: Synthetic oligonucleotide
  Sense Strand Starting at position 483 of SEQ ID NO: 318798
gagagauagcugcaugauu

SEQ ID NO: 356680 - RNA, 19 nt, Artificial Sequence
  Description of Artificial Sequence: Synthetic oligonucleotide
  Antisense Strand to SEQ ID NO: 356679
aaucaugcagcuaucucuc

SEQ ID NO: 356681 - RNA, 19 nt, Artificial Sequence
  Description of Artificial Sequence: Synthetic oligonucleotide
  Sense Strand Starting at position 483 of SEQ ID NO: 318800
gagauagcugcaugauucu

SEQ ID NO: 356682 - RNA, 19 nt, Artificial Sequence
  Description of Artificial Sequence: Synthetic oligonucleotide
  Antisense Strand to SEQ ID NO: 356681
agaaucaugcagcuaucuc

SEQ ID NO: 356683 - RNA, 19 nt, Artificial Sequence
  Description of Artificial Sequence: Synthetic oligonucleotide
  Sense Strand Starting at position 483 of SEQ ID NO: 318806
gcugcaugauucuugaagu

SEQ ID NO: 356684 - RNA, 19 nt, Artificial Sequence
  Description of Artificial Sequence: Synthetic oligonucleotide
  Antisense Strand to SEQ ID NO: 356683
acuucaagaaucaugcagc

SEQ ID NO: 356685 - RNA, 19 nt, Artificial Sequence
  Description of Artificial Sequence: Synthetic oligonucleotide
  Sense Strand Starting at position 483 of SEQ ID NO: 319027
aaauguaaucaguggcucu

SEQ ID NO: 356686 - RNA, 19 nt, Artificial Sequence
  Description of Artificial Sequence: Synthetic oligonucleotide
  Antisense Strand to SEQ ID NO: 356685
agagccacugauuacauuu

SEQ ID NO: 356687 - RNA, 19 nt, Artificial Sequence
  Description of Artificial Sequence: Synthetic oligonucleotide
  Sense Strand Starting at position 483 of SEQ ID NO: 319045
uugagcaguagcugagaau

SEQ ID NO: 356688 - RNA, 19 nt, Artificial Sequence
  Description of Artificial Sequence: Synthetic oligonucleotide
  Antisense Strand to SEQ ID NO: 356687
auucucagcuacugcucaa

SEQ ID NO: 356689 - RNA, 19 nt, Artificial Sequence
  Description of Artificial Sequence: Synthetic oligonucleotide
  Sense Strand Starting at position 483 of SEQ ID NO: 319056
cugagaaugcccugccuga

SEQ ID NO: 356690 - RNA, 19 nt, Artificial Sequence
  Description of Artificial Sequence: Synthetic oligonucleotide
  Antisense Strand to SEQ ID NO: 356689
ucaggcagggcauucucag

SEQ ID NO: 356691 - RNA, 19 nt, Artificial Sequence
  Description of Artificial Sequence: Synthetic oligonucleotide
  Sense Strand Starting at position 484 of SEQ ID NO: 315308
uuuggugucucaccauaag

SEQ ID NO: 356692 - RNA, 19 nt, Artificial Sequence
  Description of Artificial Sequence: Synthetic oligonucleotide
  Antisense Strand to SEQ ID NO: 356691
cuuauggugagacaccaaa

SEQ ID NO: 356693 - RNA, 19 nt, Artificial Sequence
  Description of Artificial Sequence: Synthetic oligonucleotide
  Sense Strand Starting at position 484 of SEQ ID NO: 315756
aaacgcucuccucgaggau

SEQ ID NO: 356694 - RNA, 19 nt, Artificial Sequence
  Description of Artificial Sequence: Synthetic oligonucleotide
  Antisense Strand to SEQ ID NO: 356693
auccucgaggagagcguuu

SEQ ID NO: 356695 - RNA, 19 nt, Artificial Sequence
  Description of Artificial Sequence: Synthetic oligonucleotide
  Sense Strand Starting at position 484 of SEQ ID NO: 315757
aacgcucuccucgaggauu

SEQ ID NO: 356696 - RNA, 19 nt, Artificial Sequence
  Description of Artificial Sequence: Synthetic oligonucleotide
  Antisense Strand to SEQ ID NO: 356695
aauccucgaggagagcguu

SEQ ID NO: 356697 - RNA, 19 nt, Artificial Sequence
  Description of Artificial Sequence: Synthetic oligonucleotide
  Sense Strand Starting at position 484 of SEQ ID NO: 316042
gugcauucuucacccggga

SEQ ID NO: 356698 - RNA, 19 nt, Artificial Sequence
  Description of Artificial Sequence: Synthetic oligonucleotide
  Antisense Strand to SEQ ID NO: 356697
ucccgggugaagaaugcac

SEQ ID NO: 356699 - RNA, 19 nt, Artificial Sequence
  Description of Artificial Sequence: Synthetic oligonucleotide
  Sense Strand Starting at position 484 of SEQ ID NO: 317377
uucuguuacccuuaggaug

SEQ ID NO: 356700 - RNA, 19 nt, Artificial Sequence
  Description of Artificial Sequence: Synthetic oligonucleotide
  Antisense Strand to SEQ ID NO: 356699
cauccuaaggguaacagaa

SEQ ID NO: 356701 - RNA, 19 nt, Artificial Sequence
  Description of Artificial Sequence: Synthetic oligonucleotide
  Sense Strand Starting at position 484 of SEQ ID NO: 317410
ucauauggcccaugaggau

SEQ ID NO: 356702 - RNA, 19 nt, Artificial Sequence
  Description of Artificial Sequence: Synthetic oligonucleotide
  Antisense Strand to SEQ ID NO: 356701
auccucaugggccauauga

SEQ ID NO: 356703 - RNA, 19 nt, Artificial Sequence
  Description of Artificial Sequence: Synthetic oligonucleotide
  Sense Strand Starting at position 484 of SEQ ID NO: 317419
ccaugaggauguuuacagu

SEQ ID NO: 356704 - RNA, 19 nt, Artificial Sequence
  Description of Artificial Sequence: Synthetic oligonucleotide
  Antisense Strand to SEQ ID NO: 356703
acuguaaacauccucaugg

SEQ ID NO: 356705 - RNA, 19 nt, Artificial Sequence
  Description of Artificial Sequence: Synthetic oligonucleotide
  Sense Strand Starting at position 484 of SEQ ID NO: 317523
uguaguuuccaugggcuua

SEQ ID NO: 356706 - RNA, 19 nt, Artificial Sequence
  Description of Artificial Sequence: Synthetic oligonucleotide
  Antisense Strand to SEQ ID NO: 356705
uaagcccauggaaacuaca

SEQ ID NO: 356707 - RNA, 19 nt, Artificial Sequence
  Description of Artificial Sequence: Synthetic oligonucleotide
  Sense Strand Starting at position 484 of SEQ ID NO: 317524
guaguuuccaugggcuuaa

SEQ ID NO: 356708 - RNA, 19 nt, Artificial Sequence
  Description of Artificial Sequence: Synthetic oligonucleotide
  Antisense Strand to SEQ ID NO: 356707
uuaagcccauggaaacuac

SEQ ID NO: 356709 - RNA, 19 nt, Artificial Sequence
  Description of Artificial Sequence: Synthetic oligonucleotide
  Sense Strand Starting at position 484 of SEQ ID NO: 317541
aagcuuccuuagcugugaa

SEQ ID NO: 356710 - RNA, 19 nt, Artificial Sequence
  Description of Artificial Sequence: Synthetic oligonucleotide
  Antisense Strand to SEQ ID NO: 356709
uucacagcuaaggaagcuu

SEQ ID NO: 356711 - RNA, 19 nt, Artificial Sequence
  Description of Artificial Sequence: Synthetic oligonucleotide
  Sense Strand Starting at position 484 of SEQ ID NO: 317544
cuuccuuagcugugaaaga

SEQ ID NO: 356712 - RNA, 19 nt, Artificial Sequence
  Description of Artificial Sequence: Synthetic oligonucleotide
  Antisense Strand to SEQ ID NO: 356711
ucuuucacagcuaaggaag

SEQ ID NO: 356713 - RNA, 19 nt, Artificial Sequence
  Description of Artificial Sequence: Synthetic oligonucleotide
  Sense Strand Starting at position 484 of SEQ ID NO: 317678
aagacaaagccuugguuga

SEQ ID NO: 356714 - RNA, 19 nt, Artificial Sequence
  Description of Artificial Sequence: Synthetic oligonucleotide
  Antisense Strand to SEQ ID NO: 356713
ucaaccaaggcuuugucuu

SEQ ID NO: 356715 - RNA, 19 nt, Artificial Sequence
  Description of Artificial Sequence: Synthetic oligonucleotide
  Sense Strand Starting at position 484 of SEQ ID NO: 317713
gaaccagaaucuguuggua

SEQ ID NO: 356716 - RNA, 19 nt, Artificial Sequence
  Description of Artificial Sequence: Synthetic oligonucleotide
  Antisense Strand to SEQ ID NO: 356715
uaccaacagauucugguuc

SEQ ID NO: 356717 - RNA, 19 nt, Artificial Sequence
  Description of Artificial Sequence: Synthetic oligonucleotide
  Sense Strand Starting at position 484 of SEQ ID NO: 317716
ccagaaucuguugguaauc

SEQ ID NO: 356718 - RNA, 19 nt, Artificial Sequence
  Description of Artificial Sequence: Synthetic oligonucleotide
  Antisense Strand to SEQ ID NO: 356717
gauuaccaacagauucugg

SEQ ID NO: 356719 - RNA, 19 nt, Artificial Sequence
  Description of Artificial Sequence: Synthetic oligonucleotide
  Sense Strand Starting at position 484 of SEQ ID NO: 317751
ccaaacucuuuccugggaa

SEQ ID NO: 356720 - RNA, 19 nt, Artificial Sequence
  Description of Artificial Sequence: Synthetic oligonucleotide
  Antisense Strand to SEQ ID NO: 356719
uucccaggaaagaguuugg

SEQ ID NO: 356721 - RNA, 19 nt, Artificial Sequence
  Description of Artificial Sequence: Synthetic oligonucleotide
  Sense Strand Starting at position 484 of SEQ ID NO: 317805
caggaugaggccugaaugu

SEQ ID NO: 356722 - RNA, 19 nt, Artificial Sequence
  Description of Artificial Sequence: Synthetic oligonucleotide
  Antisense Strand to SEQ ID NO: 356721
acauucaggccucauccug

SEQ ID NO: 356723 - RNA, 19 nt, Artificial Sequence
  Description of Artificial Sequence: Synthetic oligonucleotide
  Sense Strand Starting at position 484 of SEQ ID NO: 317926
ggcuauugcaguuaugucu

SEQ ID NO: 356724 - RNA, 19 nt, Artificial Sequence
  Description of Artificial Sequence: Synthetic oligonucleotide
  Antisense Strand to SEQ ID NO: 356723
agacauaacugcaauagcc

SEQ ID NO: 356725 - RNA, 19 nt, Artificial Sequence
  Description of Artificial Sequence: Synthetic oligonucleotide
  Sense Strand Starting at position 484 of SEQ ID NO: 318165
cuuguauccuaguuauggu

SEQ ID NO: 356726 - RNA, 19 nt, Artificial Sequence
  Description of Artificial Sequence: Synthetic oligonucleotide
  Antisense Strand to SEQ ID NO: 356725
accauaacuaggauacaag

SEQ ID NO: 356727 - RNA, 19 nt, Artificial Sequence
  Description of Artificial Sequence: Synthetic oligonucleotide
  Sense Strand Starting at position 484 of SEQ ID NO: 318211
gcuggauucccacgggaau

SEQ ID NO: 356728 - RNA, 19 nt, Artificial Sequence
  Description of Artificial Sequence: Synthetic oligonucleotide
  Antisense Strand to SEQ ID NO: 356727
auucccgugggaauccagc

SEQ ID NO: 356729 - RNA, 19 nt, Artificial Sequence
  Description of Artificial Sequence: Synthetic oligonucleotide
  Sense Strand Starting at position 484 of SEQ ID NO: 318212
cuggauucccacgggaauc

SEQ ID NO: 356730 - RNA, 19 nt, Artificial Sequence
  Description of Artificial Sequence: Synthetic oligonucleotide
  Antisense Strand to SEQ ID NO: 356729
gauucccgugggaauccag

SEQ ID NO: 356731 - RNA, 19 nt, Artificial Sequence
  Description of Artificial Sequence: Synthetic oligonucleotide
  Sense Strand Starting at position 484 of SEQ ID NO: 318236
aggccuacguaauccauau

SEQ ID NO: 356732 - RNA, 19 nt, Artificial Sequence
  Description of Artificial Sequence: Synthetic oligonucleotide
  Antisense Strand to SEQ ID NO: 356731
auauggauuacguaggccu

SEQ ID NO: 356733 - RNA, 19 nt, Artificial Sequence
  Description of Artificial Sequence: Synthetic oligonucleotide
  Sense Strand Starting at position 484 of SEQ ID NO: 318240
cuacguaauccauaucuag

SEQ ID NO: 356734 - RNA, 19 nt, Artificial Sequence
  Description of Artificial Sequence: Synthetic oligonucleotide
  Antisense Strand to SEQ ID NO: 356733
cuagauauggauuacguag

SEQ ID NO: 356735 - RNA, 19 nt, Artificial Sequence
  Description of Artificial Sequence: Synthetic oligonucleotide
  Sense Strand Starting at position 484 of SEQ ID NO: 318247
auccauaucuaguugacuu

SEQ ID NO: 356736 - RNA, 19 nt, Artificial Sequence
  Description of Artificial Sequence: Synthetic oligonucleotide
  Antisense Strand to SEQ ID NO: 356735
aagucaacuagauauggau

SEQ ID NO: 356737 - RNA, 19 nt, Artificial Sequence
  Description of Artificial Sequence: Synthetic oligonucleotide
  Sense Strand Starting at position 484 of SEQ ID NO: 318271
accucagagcgcugacuau

SEQ ID NO: 356738 - RNA, 19 nt, Artificial Sequence
  Description of Artificial Sequence: Synthetic oligonucleotide
  Antisense Strand to SEQ ID NO: 356737
auagucagcgcucugaggu

SEQ ID NO: 356739 - RNA, 19 nt, Artificial Sequence
  Description of Artificial Sequence: Synthetic oligonucleotide
  Sense Strand Starting at position 484 of SEQ ID NO: 318305
cggguucccucucuguaaa

SEQ ID NO: 356740 - RNA, 19 nt, Artificial Sequence
  Description of Artificial Sequence: Synthetic oligonucleotide
  Antisense Strand to SEQ ID NO: 356739
uuuacagagagggaacccg

SEQ ID NO: 356741 - RNA, 19 nt, Artificial Sequence
  Description of Artificial Sequence: Synthetic oligonucleotide
  Sense Strand Starting at position 484 of SEQ ID NO: 318324
augagugguuggagagaua

SEQ ID NO: 356742 - RNA, 19 nt, Artificial Sequence
  Description of Artificial Sequence: Synthetic oligonucleotide
  Antisense Strand to SEQ ID NO: 356741
uaucucuccaaccacucau

SEQ ID NO: 356743 - RNA, 19 nt, Artificial Sequence
  Description of Artificial Sequence: Synthetic oligonucleotide
  Sense Strand Starting at position 484 of SEQ ID NO: 318333
uggagagauagcugcauga

SEQ ID NO: 356744 - RNA, 19 nt, Artificial Sequence
  Description of Artificial Sequence: Synthetic oligonucleotide
  Antisense Strand to SEQ ID NO: 356743
ucaugcagcuaucucucca

SEQ ID NO: 356745 - RNA, 19 nt, Artificial Sequence
  Description of Artificial Sequence: Synthetic oligonucleotide
  Sense Strand Starting at position 484 of SEQ ID NO: 318335
gagagauagcugcaugauu

SEQ ID NO: 356746 - RNA, 19 nt, Artificial Sequence
  Description of Artificial Sequence: Synthetic oligonucleotide
  Antisense Strand to SEQ ID NO: 356745
aaucaugcagcuaucucuc

SEQ ID NO: 356747 - RNA, 19 nt, Artificial Sequence
  Description of Artificial Sequence: Synthetic oligonucleotide
  Sense Strand Starting at position 484 of SEQ ID NO: 318337
gagauagcugcaugauucu

SEQ ID NO: 356748 - RNA, 19 nt, Artificial Sequence
  Description of Artificial Sequence: Synthetic oligonucleotide
  Antisense Strand to SEQ ID NO: 356747
agaaucaugcagcuaucuc

SEQ ID NO: 356749 - RNA, 19 nt, Artificial Sequence
  Description of Artificial Sequence: Synthetic oligonucleotide
  Sense Strand Starting at position 484 of SEQ ID NO: 318343
gcugcaugauucuugaagu

SEQ ID NO: 356750 - RNA, 19 nt, Artificial Sequence
  Description of Artificial Sequence: Synthetic oligonucleotide
  Antisense Strand to SEQ ID NO: 356749
acuucaagaaucaugcagc

SEQ ID NO: 356751 - RNA, 19 nt, Artificial Sequence
  Description of Artificial Sequence: Synthetic oligonucleotide
  Sense Strand Starting at position 484 of SEQ ID NO: 318564
aaauguaaucaguggcucu

SEQ ID NO: 356752 - RNA, 19 nt, Artificial Sequence
  Description of Artificial Sequence: Synthetic oligonucleotide
  Antisense Strand to SEQ ID NO: 356751
agagccacugauuacauuu

SEQ ID NO: 356753 - RNA, 19 nt, Artificial Sequence
  Description of Artificial Sequence: Synthetic oligonucleotide
  Sense Strand Starting at position 484 of SEQ ID NO: 318582
uugagcaguagcugagaau

SEQ ID NO: 356754 - RNA, 19 nt, Artificial Sequence
  Description of Artificial Sequence: Synthetic oligonucleotide
  Antisense Strand to SEQ ID NO: 356753
auucucagcuacugcucaa

SEQ ID NO: 356755 - RNA, 19 nt, Artificial Sequence
  Description of Artificial Sequence: Synthetic oligonucleotide
  Sense Strand Starting at position 484 of SEQ ID NO: 318593
cugagaaugcccugccuga

SEQ ID NO: 356756 - RNA, 19 nt, Artificial Sequence
  Description of Artificial Sequence: Synthetic oligonucleotide
  Antisense Strand to SEQ ID NO: 356755
ucaggcagggcauucucag

SEQ ID NO: 356757 - RNA, 19 nt, Artificial Sequence
  Description of Artificial Sequence: Synthetic oligonucleotide
  Sense Strand Starting at position 484 of SEQ ID NO: 318810
guaguagugcugagcuguu

SEQ ID NO: 356758 - RNA, 19 nt, Artificial Sequence
  Description of Artificial Sequence: Synthetic oligonucleotide
  Antisense Strand to SEQ ID NO: 356757
aacagcucagcacuacuac

SEQ ID NO: 356759 - RNA, 19 nt, Artificial Sequence
  Description of Artificial Sequence: Synthetic oligonucleotide
  Sense Strand Starting at position 484 of SEQ ID NO: 318871
agaguauaacuauguggac

SEQ ID NO: 356760 - RNA, 19 nt, Artificial Sequence
  Description of Artificial Sequence: Synthetic oligonucleotide
  Antisense Strand to SEQ ID NO: 356759
guccacauaguuauacucu

SEQ ID NO: 356761 - RNA, 19 nt, Artificial Sequence
  Description of Artificial Sequence: Synthetic oligonucleotide
  Sense Strand Starting at position 484 of SEQ ID NO: 318872
gaguauaacuauguggacu

SEQ ID NO: 356762 - RNA, 19 nt, Artificial Sequence
  Description of Artificial Sequence: Synthetic oligonucleotide
  Antisense Strand to SEQ ID NO: 356761
aguccacauaguuauacuc

SEQ ID NO: 356763 - RNA, 19 nt, Artificial Sequence
  Description of Artificial Sequence: Synthetic oligonucleotide
  Sense Strand Starting at position 484 of SEQ ID NO: 318883
uguggacugucuuugcaga

SEQ ID NO: 356764 - RNA, 19 nt, Artificial Sequence
  Description of Artificial Sequence: Synthetic oligonucleotide
  Antisense Strand to SEQ ID NO: 356763
ucugcaaagacaguccaca

SEQ ID NO: 356765 - RNA, 19 nt, Artificial Sequence
  Description of Artificial Sequence: Synthetic oligonucleotide
  Sense Strand Starting at position 484 of SEQ ID NO: 318998
augugaaaucauuggugag

SEQ ID NO: 356766 - RNA, 19 nt, Artificial Sequence
  Description of Artificial Sequence: Synthetic oligonucleotide
  Antisense Strand to SEQ ID NO: 356765
cucaccaaugauuucacau

SEQ ID NO: 356767 - RNA, 19 nt, Artificial Sequence
  Description of Artificial Sequence: Synthetic oligonucleotide
  Sense Strand Starting at position 484 of SEQ ID NO: 319132
gcuguuaaccagugagaag

SEQ ID NO: 356768 - RNA, 19 nt, Artificial Sequence
  Description of Artificial Sequence: Synthetic oligonucleotide
  Antisense Strand to SEQ ID NO: 356767
cuucucacugguuaacagc

SEQ ID NO: 356769 - RNA, 19 nt, Artificial Sequence
  Description of Artificial Sequence: Synthetic oligonucleotide
  Sense Strand Starting at position 484 of SEQ ID NO: 319133
cuguuaaccagugagaagu

SEQ ID NO: 356770 - RNA, 19 nt, Artificial Sequence
  Description of Artificial Sequence: Synthetic oligonucleotide
  Antisense Strand to SEQ ID NO: 356769
acuucucacugguuaacag

SEQ ID NO: 356771 - RNA, 19 nt, Artificial Sequence
  Description of Artificial Sequence: Synthetic oligonucleotide
  Sense Strand Starting at position 485 of SEQ ID NO: 315444
gagucagauugugcgaaug

SEQ ID NO: 356772 - RNA, 19 nt, Artificial Sequence
  Description of Artificial Sequence: Synthetic oligonucleotide
  Antisense Strand to SEQ ID NO: 356771
cauucgcacaaucugacuc

SEQ ID NO: 356773 - RNA, 19 nt, Artificial Sequence
  Description of Artificial Sequence: Synthetic oligonucleotide
  Sense Strand Starting at position 485 of SEQ ID NO: 315489
caaggugguuucucgaaag

SEQ ID NO: 356774 - RNA, 19 nt, Artificial Sequence
  Description of Artificial Sequence: Synthetic oligonucleotide
  Antisense Strand to SEQ ID NO: 356773
cuuucgagaaaccaccuug

SEQ ID NO: 356775 - RNA, 19 nt, Artificial Sequence
  Description of Artificial Sequence: Synthetic oligonucleotide
  Sense Strand Starting at position 485 of SEQ ID NO: 315493
gugguuucucgaaagcguc

SEQ ID NO: 356776 - RNA, 19 nt, Artificial Sequence
  Description of Artificial Sequence: Synthetic oligonucleotide
  Antisense Strand to SEQ ID NO: 356775
gacgcuuucgagaaaccac

SEQ ID NO: 356777 - RNA, 19 nt, Artificial Sequence
  Description of Artificial Sequence: Synthetic oligonucleotide
  Sense Strand Starting at position 485 of SEQ ID NO: 315499
ucucgaaagcgucaaagaa

SEQ ID NO: 356778 - RNA, 19 nt, Artificial Sequence
  Description of Artificial Sequence: Synthetic oligonucleotide
  Antisense Strand to SEQ ID NO: 356777
uucuuugacgcuuucgaga

SEQ ID NO: 356779 - RNA, 19 nt, Artificial Sequence
  Description of Artificial Sequence: Synthetic oligonucleotide
  Sense Strand Starting at position 485 of SEQ ID NO: 315507
gcgucaaagaacugagguu

SEQ ID NO: 356780 - RNA, 19 nt, Artificial Sequence
  Description of Artificial Sequence: Synthetic oligonucleotide
  Antisense Strand to SEQ ID NO: 356779
aaccucaguucuuugacgc

SEQ ID NO: 356781 - RNA, 19 nt, Artificial Sequence
  Description of Artificial Sequence: Synthetic oligonucleotide
  Sense Strand Starting at position 485 of SEQ ID NO: 315508
cgucaaagaacugagguuu

SEQ ID NO: 356782 - RNA, 19 nt, Artificial Sequence
  Description of Artificial Sequence: Synthetic oligonucleotide
  Antisense Strand to SEQ ID NO: 356781
aaaccucaguucuuugacg

SEQ ID NO: 356783 - RNA, 19 nt, Artificial Sequence
  Description of Artificial Sequence: Synthetic oligonucleotide
  Sense Strand Starting at position 485 of SEQ ID NO: 315705
ucagguuguuucccgauaa

SEQ ID NO: 356784 - RNA, 19 nt, Artificial Sequence
  Description of Artificial Sequence: Synthetic oligonucleotide
  Antisense Strand to SEQ ID NO: 356783
uuaucgggaaacaaccuga

SEQ ID NO: 356785 - RNA, 19 nt, Artificial Sequence
  Description of Artificial Sequence: Synthetic oligonucleotide
  Sense Strand Starting at position 485 of SEQ ID NO: 315735
ucagguucuccagauucgu

SEQ ID NO: 356786 - RNA, 19 nt, Artificial Sequence
  Description of Artificial Sequence: Synthetic oligonucleotide
  Antisense Strand to SEQ ID NO: 356785
acgaaucuggagaaccuga

SEQ ID NO: 356787 - RNA, 19 nt, Artificial Sequence
  Description of Artificial Sequence: Synthetic oligonucleotide
  Sense Strand Starting at position 485 of SEQ ID NO: 315740
uucuccagauucgugaaga

SEQ ID NO: 356788 - RNA, 19 nt, Artificial Sequence
  Description of Artificial Sequence: Synthetic oligonucleotide
  Antisense Strand to SEQ ID NO: 356787
ucuucacgaaucuggagaa

SEQ ID NO: 356789 - RNA, 19 nt, Artificial Sequence
  Description of Artificial Sequence: Synthetic oligonucleotide
  Sense Strand Starting at position 485 of SEQ ID NO: 315770
aggaaaucgagcugauucu

SEQ ID NO: 356790 - RNA, 19 nt, Artificial Sequence
  Description of Artificial Sequence: Synthetic oligonucleotide
  Antisense Strand to SEQ ID NO: 356789
agaaucagcucgauuuccu

SEQ ID NO: 356791 - RNA, 19 nt, Artificial Sequence
  Description of Artificial Sequence: Synthetic oligonucleotide
  Sense Strand Starting at position 485 of SEQ ID NO: 315779
agcugauucugguucagag

SEQ ID NO: 356792 - RNA, 19 nt, Artificial Sequence
  Description of Artificial Sequence: Synthetic oligonucleotide
  Antisense Strand to SEQ ID NO: 356791
cucugaaccagaaucagcu

SEQ ID NO: 356793 - RNA, 19 nt, Artificial Sequence
  Description of Artificial Sequence: Synthetic oligonucleotide
  Sense Strand Starting at position 485 of SEQ ID NO: 315795
gagcgagcuccugcagguu

SEQ ID NO: 356794 - RNA, 19 nt, Artificial Sequence
  Description of Artificial Sequence: Synthetic oligonucleotide
  Antisense Strand to SEQ ID NO: 356793
aaccugcaggagcucgcuc

SEQ ID NO: 356795 - RNA, 19 nt, Artificial Sequence
  Description of Artificial Sequence: Synthetic oligonucleotide
  Sense Strand Starting at position 485 of SEQ ID NO: 315996
uguggcugucggagaucau

SEQ ID NO: 356796 - RNA, 19 nt, Artificial Sequence
  Description of Artificial Sequence: Synthetic oligonucleotide
  Antisense Strand to SEQ ID NO: 356795
augaucuccgacagccaca

SEQ ID NO: 356797 - RNA, 19 nt, Artificial Sequence
  Description of Artificial Sequence: Synthetic oligonucleotide
  Sense Strand Starting at position 485 of SEQ ID NO: 316342
acaauccuuucgccagaau

SEQ ID NO: 356798 - RNA, 19 nt, Artificial Sequence
  Description of Artificial Sequence: Synthetic oligonucleotide
  Antisense Strand to SEQ ID NO: 356797
auucuggcgaaaggauugu

SEQ ID NO: 356799 - RNA, 19 nt, Artificial Sequence
  Description of Artificial Sequence: Synthetic oligonucleotide
  Sense Strand Starting at position 485 of SEQ ID NO: 316345
auccuuucgccagaauucu

SEQ ID NO: 356800 - RNA, 19 nt, Artificial Sequence
  Description of Artificial Sequence: Synthetic oligonucleotide
  Antisense Strand to SEQ ID NO: 356799
agaauucuggcgaaaggau

SEQ ID NO: 356801 - RNA, 19 nt, Artificial Sequence
  Description of Artificial Sequence: Synthetic oligonucleotide
  Sense Strand Starting at position 485 of SEQ ID NO: 316389
gauuucccuacguggugaa

SEQ ID NO: 356802 - RNA, 19 nt, Artificial Sequence
  Description of Artificial Sequence: Synthetic oligonucleotide
  Antisense Strand to SEQ ID NO: 356801
uucaccacguagggaaauc

SEQ ID NO: 356803 - RNA, 19 nt, Artificial Sequence
  Description of Artificial Sequence: Synthetic oligonucleotide
  Sense Strand Starting at position 485 of SEQ ID NO: 316467
aguuuaaagcauugagauu

SEQ ID NO: 356804 - RNA, 19 nt, Artificial Sequence
  Description of Artificial Sequence: Synthetic oligonucleotide
  Antisense Strand to SEQ ID NO: 356803
aaucucaaugcuuuaaacu

SEQ ID NO: 356805 - RNA, 19 nt, Artificial Sequence
  Description of Artificial Sequence: Synthetic oligonucleotide
  Sense Strand Starting at position 485 of SEQ ID NO: 316503
ccgaauagccaauacuuua

SEQ ID NO: 356806 - RNA, 19 nt, Artificial Sequence
  Description of Artificial Sequence: Synthetic oligonucleotide
  Antisense Strand to SEQ ID NO: 356805
uaaaguauuggcuauucgg

SEQ ID NO: 356807 - RNA, 19 nt, Artificial Sequence
  Description of Artificial Sequence: Synthetic oligonucleotide
  Sense Strand Starting at position 485 of SEQ ID NO: 316582
agcaauguccauugugaaa

SEQ ID NO: 356808 - RNA, 19 nt, Artificial Sequence
  Description of Artificial Sequence: Synthetic oligonucleotide
  Antisense Strand to SEQ ID NO: 356807
uuucacaauggacauugcu

SEQ ID NO: 356809 - RNA, 19 nt, Artificial Sequence
  Description of Artificial Sequence: Synthetic oligonucleotide
  Sense Strand Starting at position 485 of SEQ ID NO: 316603
ggcucugcucuugacuuua

SEQ ID NO: 356810 - RNA, 19 nt, Artificial Sequence
  Description of Artificial Sequence: Synthetic oligonucleotide
  Antisense Strand to SEQ ID NO: 356809
uaaagucaagagcagagcc

SEQ ID NO: 356811 - RNA, 19 nt, Artificial Sequence
  Description of Artificial Sequence: Synthetic oligonucleotide
  Sense Strand Starting at position 485 of SEQ ID NO: 316631
cugcauuggcuauaaccaa

SEQ ID NO: 356812 - RNA, 19 nt, Artificial Sequence
  Description of Artificial Sequence: Synthetic oligonucleotide
  Antisense Strand to SEQ ID NO: 356811
uugguuauagccaaugcag

SEQ ID NO: 356813 - RNA, 19 nt, Artificial Sequence
  Description of Artificial Sequence: Synthetic oligonucleotide
  Sense Strand Starting at position 485 of SEQ ID NO: 316638
ggcuauaaccaacagucaa

SEQ ID NO: 356814 - RNA, 19 nt, Artificial Sequence
  Description of Artificial Sequence: Synthetic oligonucleotide
  Antisense Strand to SEQ ID NO: 356813
uugacuguugguuauagcc

SEQ ID NO: 356815 - RNA, 19 nt, Artificial Sequence
  Description of Artificial Sequence: Synthetic oligonucleotide
  Sense Strand Starting at position 485 of SEQ ID NO: 316725
guaccaaguuacucuauua

SEQ ID NO: 356816 - RNA, 19 nt, Artificial Sequence
  Description of Artificial Sequence: Synthetic oligonucleotide
  Antisense Strand to SEQ ID NO: 356815
uaauagaguaacuugguac

SEQ ID NO: 356817 - RNA, 19 nt, Artificial Sequence
  Description of Artificial Sequence: Synthetic oligonucleotide
  Sense Strand Starting at position 485 of SEQ ID NO: 316828
guucucagcucuuuauuua

SEQ ID NO: 356818 - RNA, 19 nt, Artificial Sequence
  Description of Artificial Sequence: Synthetic oligonucleotide
  Antisense Strand to SEQ ID NO: 356817
uaaauaaagagcugagaac

SEQ ID NO: 356819 - RNA, 19 nt, Artificial Sequence
  Description of Artificial Sequence: Synthetic oligonucleotide
  Sense Strand Starting at position 485 of SEQ ID NO: 316945
uaacuagggucacauagaa

SEQ ID NO: 356820 - RNA, 19 nt, Artificial Sequence
  Description of Artificial Sequence: Synthetic oligonucleotide
  Antisense Strand to SEQ ID NO: 356819
uucuaugugacccuaguua

SEQ ID NO: 356821 - RNA, 19 nt, Artificial Sequence
  Description of Artificial Sequence: Synthetic oligonucleotide
  Sense Strand Starting at position 485 of SEQ ID NO: 316955
cacauagaauuugagggua

SEQ ID NO: 356822 - RNA, 19 nt, Artificial Sequence
  Description of Artificial Sequence: Synthetic oligonucleotide
  Antisense Strand to SEQ ID NO: 356821
uacccucaaauucuaugug

SEQ ID NO: 356823 - RNA, 19 nt, Artificial Sequence
  Description of Artificial Sequence: Synthetic oligonucleotide
  Sense Strand Starting at position 485 of SEQ ID NO: 316957
cauagaauuugaggguagu

SEQ ID NO: 356824 - RNA, 19 nt, Artificial Sequence
  Description of Artificial Sequence: Synthetic oligonucleotide
  Antisense Strand to SEQ ID NO: 356823
acuacccucaaauucuaug

SEQ ID NO: 356825 - RNA, 19 nt, Artificial Sequence
  Description of Artificial Sequence: Synthetic oligonucleotide
  Sense Strand Starting at position 485 of SEQ ID NO: 316970
gguaguauuucugacuuag

SEQ ID NO: 356826 - RNA, 19 nt, Artificial Sequence
  Description of Artificial Sequence: Synthetic oligonucleotide
  Antisense Strand to SEQ ID NO: 356825
cuaagucagaaauacuacc

SEQ ID NO: 356827 - RNA, 19 nt, Artificial Sequence
  Description of Artificial Sequence: Synthetic oligonucleotide
  Sense Strand Starting at position 485 of SEQ ID NO: 316997
agcuacuauuucuaagaug

SEQ ID NO: 356828 - RNA, 19 nt, Artificial Sequence
  Description of Artificial Sequence: Synthetic oligonucleotide
  Antisense Strand to SEQ ID NO: 356827
caucuuagaaauaguagcu

SEQ ID NO: 356829 - RNA, 19 nt, Artificial Sequence
  Description of Artificial Sequence: Synthetic oligonucleotide
  Sense Strand Starting at position 485 of SEQ ID NO: 317214
gguucugcacuccaaagua

SEQ ID NO: 356830 - RNA, 19 nt, Artificial Sequence
  Description of Artificial Sequence: Synthetic oligonucleotide
  Antisense Strand to SEQ ID NO: 356829
uacuuuggagugcagaacc

SEQ ID NO: 356831 - RNA, 19 nt, Artificial Sequence
  Description of Artificial Sequence: Synthetic oligonucleotide
  Sense Strand Starting at position 485 of SEQ ID NO: 317242
cuuagagcucugcauguga

SEQ ID NO: 356832 - RNA, 19 nt, Artificial Sequence
  Description of Artificial Sequence: Synthetic oligonucleotide
  Antisense Strand to SEQ ID NO: 356831
ucacaugcagagcucuaag

SEQ ID NO: 356833 - RNA, 19 nt, Artificial Sequence
  Description of Artificial Sequence: Synthetic oligonucleotide
  Sense Strand Starting at position 485 of SEQ ID NO: 317249
cucugcaugugauucgaca

SEQ ID NO: 356834 - RNA, 19 nt, Artificial Sequence
  Description of Artificial Sequence: Synthetic oligonucleotide
  Antisense Strand to SEQ ID NO: 356833
ugucgaaucacaugcagag

SEQ ID NO: 356835 - RNA, 19 nt, Artificial Sequence
  Description of Artificial Sequence: Synthetic oligonucleotide
  Sense Strand Starting at position 485 of SEQ ID NO: 317473
cuaugaugccagggaaguu

SEQ ID NO: 356836 - RNA, 19 nt, Artificial Sequence
  Description of Artificial Sequence: Synthetic oligonucleotide
  Antisense Strand to SEQ ID NO: 356835
aacuucccuggcaucauag

SEQ ID NO: 356837 - RNA, 19 nt, Artificial Sequence
  Description of Artificial Sequence: Synthetic oligonucleotide
  Sense Strand Starting at position 485 of SEQ ID NO: 317483
agggaaguucagugauaca

SEQ ID NO: 356838 - RNA, 19 nt, Artificial Sequence
  Description of Artificial Sequence: Synthetic oligonucleotide
  Antisense Strand to SEQ ID NO: 356837
uguaucacugaacuucccu

SEQ ID NO: 356839 - RNA, 19 nt, Artificial Sequence
  Description of Artificial Sequence: Synthetic oligonucleotide
  Sense Strand Starting at position 485 of SEQ ID NO: 317494
gugauacagcuggaucacu

SEQ ID NO: 356840 - RNA, 19 nt, Artificial Sequence
  Description of Artificial Sequence: Synthetic oligonucleotide
  Antisense Strand to SEQ ID NO: 356839
agugauccagcuguaucac

SEQ ID NO: 356841 - RNA, 19 nt, Artificial Sequence
  Description of Artificial Sequence: Synthetic oligonucleotide
  Sense Strand Starting at position 485 of SEQ ID NO: 317645
uuucuuucuccgcuuagca

SEQ ID NO: 356842 - RNA, 19 nt, Artificial Sequence
  Description of Artificial Sequence: Synthetic oligonucleotide
  Antisense Strand to SEQ ID NO: 356841
ugcuaagcggagaaagaaa

SEQ ID NO: 356843 - RNA, 19 nt, Artificial Sequence
  Description of Artificial Sequence: Synthetic oligonucleotide
  Sense Strand Starting at position 485 of SEQ ID NO: 318208
ugccauuucuaugaaagau

SEQ ID NO: 356844 - RNA, 19 nt, Artificial Sequence
  Description of Artificial Sequence: Synthetic oligonucleotide
  Antisense Strand to SEQ ID NO: 356843
aucuuucauagaaauggca

SEQ ID NO: 356845 - RNA, 19 nt, Artificial Sequence
  Description of Artificial Sequence: Synthetic oligonucleotide
  Sense Strand Starting at position 485 of SEQ ID NO: 318316
ugagaaagcuggguuuccu

SEQ ID NO: 356846 - RNA, 19 nt, Artificial Sequence
  Description of Artificial Sequence: Synthetic oligonucleotide
  Antisense Strand to SEQ ID NO: 356845
aggaaacccagcuuucuca

SEQ ID NO: 356847 - RNA, 19 nt, Artificial Sequence
  Description of Artificial Sequence: Synthetic oligonucleotide
  Sense Strand Starting at position 485 of SEQ ID NO: 318387
gauaaugcugucugcauua

SEQ ID NO: 356848 - RNA, 19 nt, Artificial Sequence
  Description of Artificial Sequence: Synthetic oligonucleotide
  Antisense Strand to SEQ ID NO: 356847
uaaugcagacagcauuauc

SEQ ID NO: 356849 - RNA, 19 nt, Artificial Sequence
  Description of Artificial Sequence: Synthetic oligonucleotide
  Sense Strand Starting at position 485 of SEQ ID NO: 318392
ugcugucugcauuaagacu

SEQ ID NO: 356850 - RNA, 19 nt, Artificial Sequence
  Description of Artificial Sequence: Synthetic oligonucleotide
  Antisense Strand to SEQ ID NO: 356849
agucuuaaugcagacagca

SEQ ID NO: 356851 - RNA, 19 nt, Artificial Sequence
  Description of Artificial Sequence: Synthetic oligonucleotide
  Sense Strand Starting at position 486 of SEQ ID NO: 315413
gcuugagauguccagagac

SEQ ID NO: 356852 - RNA, 19 nt, Artificial Sequence
  Description of Artificial Sequence: Synthetic oligonucleotide
  Antisense Strand to SEQ ID NO: 356851
gucucuggacaucucaagc

SEQ ID NO: 356853 - RNA, 19 nt, Artificial Sequence
  Description of Artificial Sequence: Synthetic oligonucleotide
  Sense Strand Starting at position 486 of SEQ ID NO: 315503
cccaacugaugucugguua

SEQ ID NO: 356854 - RNA, 19 nt, Artificial Sequence
  Description of Artificial Sequence: Synthetic oligonucleotide
  Antisense Strand to SEQ ID NO: 356853
uaaccagacaucaguuggg

SEQ ID NO: 356855 - RNA, 19 nt, Artificial Sequence
  Description of Artificial Sequence: Synthetic oligonucleotide
  Sense Strand Starting at position 486 of SEQ ID NO: 315504
ccaacugaugucugguuau

SEQ ID NO: 356856 - RNA, 19 nt, Artificial Sequence
  Description of Artificial Sequence: Synthetic oligonucleotide
  Antisense Strand to SEQ ID NO: 356855
auaaccagacaucaguugg

SEQ ID NO: 356857 - RNA, 19 nt, Artificial Sequence
  Description of Artificial Sequence: Synthetic oligonucleotide
  Sense Strand Starting at position 486 of SEQ ID NO: 315507
acugaugucugguuauaac

SEQ ID NO: 356858 - RNA, 19 nt, Artificial Sequence
  Description of Artificial Sequence: Synthetic oligonucleotide
  Antisense Strand to SEQ ID NO: 356857
guuauaaccagacaucagu

SEQ ID NO: 356859 - RNA, 19 nt, Artificial Sequence
  Description of Artificial Sequence: Synthetic oligonucleotide
  Sense Strand Starting at position 486 of SEQ ID NO: 315510
gaugucugguuauaacaaa

SEQ ID NO: 356860 - RNA, 19 nt, Artificial Sequence
  Description of Artificial Sequence: Synthetic oligonucleotide
  Antisense Strand to SEQ ID NO: 356859
uuuguuauaaccagacauc

SEQ ID NO: 356861 - RNA, 19 nt, Artificial Sequence
  Description of Artificial Sequence: Synthetic oligonucleotide
  Sense Strand Starting at position 486 of SEQ ID NO: 316596
ggagcagauggcugcuaaa

SEQ ID NO: 356862 - RNA, 19 nt, Artificial Sequence
  Description of Artificial Sequence: Synthetic oligonucleotide
  Antisense Strand to SEQ ID NO: 356861
uuuagcagccaucugcucc

SEQ ID NO: 356863 - RNA, 19 nt, Artificial Sequence
  Description of Artificial Sequence: Synthetic oligonucleotide
  Sense Strand Starting at position 486 of SEQ ID NO: 316599
gcagauggcugcuaaauga

SEQ ID NO: 356864 - RNA, 19 nt, Artificial Sequence
  Description of Artificial Sequence: Synthetic oligonucleotide
  Antisense Strand to SEQ ID NO: 356863
ucauuuagcagccaucugc

SEQ ID NO: 356865 - RNA, 19 nt, Artificial Sequence
  Description of Artificial Sequence: Synthetic oligonucleotide
  Sense Strand Starting at position 486 of SEQ ID NO: 316800
ccacucaucugggcuaaca

SEQ ID NO: 356866 - RNA, 19 nt, Artificial Sequence
  Description of Artificial Sequence: Synthetic oligonucleotide
  Antisense Strand to SEQ ID NO: 356865
uguuagcccagaugagugg

SEQ ID NO: 356867 - RNA, 19 nt, Artificial Sequence
  Description of Artificial Sequence: Synthetic oligonucleotide
  Sense Strand Starting at position 486 of SEQ ID NO: 316981
acagcagguuuccagugaa

SEQ ID NO: 356868 - RNA, 19 nt, Artificial Sequence
  Description of Artificial Sequence: Synthetic oligonucleotide
  Antisense Strand to SEQ ID NO: 356867
uucacuggaaaccugcugu

SEQ ID NO: 356869 - RNA, 19 nt, Artificial Sequence
  Description of Artificial Sequence: Synthetic oligonucleotide
  Sense Strand Starting at position 486 of SEQ ID NO: 316984
gcagguuuccagugaauaa

SEQ ID NO: 356870 - RNA, 19 nt, Artificial Sequence
  Description of Artificial Sequence: Synthetic oligonucleotide
  Antisense Strand to SEQ ID NO: 356869
uuauucacuggaaaccugc

SEQ ID NO: 356871 - RNA, 19 nt, Artificial Sequence
  Description of Artificial Sequence: Synthetic oligonucleotide
  Sense Strand Starting at position 486 of SEQ ID NO: 316988
guuuccagugaauaagugu

SEQ ID NO: 356872 - RNA, 19 nt, Artificial Sequence
  Description of Artificial Sequence: Synthetic oligonucleotide
  Antisense Strand to SEQ ID NO: 356871
acacuuauucacuggaaac

SEQ ID NO: 356873 - RNA, 19 nt, Artificial Sequence
  Description of Artificial Sequence: Synthetic oligonucleotide
  Sense Strand Starting at position 486 of SEQ ID NO: 316995
gugaauaagugucaaauca

SEQ ID NO: 356874 - RNA, 19 nt, Artificial Sequence
  Description of Artificial Sequence: Synthetic oligonucleotide
  Antisense Strand to SEQ ID NO: 356873
ugauuugacacuuauucac

SEQ ID NO: 356875 - RNA, 19 nt, Artificial Sequence
  Description of Artificial Sequence: Synthetic oligonucleotide
  Sense Strand Starting at position 486 of SEQ ID NO: 317041
gauggugucucagagggaa

SEQ ID NO: 356876 - RNA, 19 nt, Artificial Sequence
  Description of Artificial Sequence: Synthetic oligonucleotide
  Antisense Strand to SEQ ID NO: 356875
uucccucugagacaccauc

SEQ ID NO: 356877 - RNA, 19 nt, Artificial Sequence
  Description of Artificial Sequence: Synthetic oligonucleotide
  Sense Strand Starting at position 486 of SEQ ID NO: 317053
gagggaaugucccacccaa

SEQ ID NO: 356878 - RNA, 19 nt, Artificial Sequence
  Description of Artificial Sequence: Synthetic oligonucleotide
  Antisense Strand to SEQ ID NO: 356877
uugggugggacauucccuc

SEQ ID NO: 356879 - RNA, 19 nt, Artificial Sequence
  Description of Artificial Sequence: Synthetic oligonucleotide
  Sense Strand Starting at position 486 of SEQ ID NO: 317068
ccaacccugucuuguuaaa

SEQ ID NO: 356880 - RNA, 19 nt, Artificial Sequence
  Description of Artificial Sequence: Synthetic oligonucleotide
  Antisense Strand to SEQ ID NO: 356879
uuuaacaagacaggguugg

SEQ ID NO: 356881 - RNA, 19 nt, Artificial Sequence
  Description of Artificial Sequence: Synthetic oligonucleotide
  Sense Strand Starting at position 486 of SEQ ID NO: 317119
gaggccaugcuggguaaua

SEQ ID NO: 356882 - RNA, 19 nt, Artificial Sequence
  Description of Artificial Sequence: Synthetic oligonucleotide
  Antisense Strand to SEQ ID NO: 356881
uauuacccagcauggccuc

SEQ ID NO: 356883 - RNA, 19 nt, Artificial Sequence
  Description of Artificial Sequence: Synthetic oligonucleotide
  Sense Strand Starting at position 486 of SEQ ID NO: 317142
gggccacuuaccugugaag

SEQ ID NO: 356884 - RNA, 19 nt, Artificial Sequence
  Description of Artificial Sequence: Synthetic oligonucleotide
  Antisense Strand to SEQ ID NO: 356883
cuucacagguaaguggccc

SEQ ID NO: 356885 - RNA, 19 nt, Artificial Sequence
  Description of Artificial Sequence: Synthetic oligonucleotide
  Sense Strand Starting at position 486 of SEQ ID NO: 317428
gaaucaggucuguggagga

SEQ ID NO: 356886 - RNA, 19 nt, Artificial Sequence
  Description of Artificial Sequence: Synthetic oligonucleotide
  Antisense Strand to SEQ ID NO: 356885
uccuccacagaccugauuc

SEQ ID NO: 356887 - RNA, 19 nt, Artificial Sequence
  Description of Artificial Sequence: Synthetic oligonucleotide
  Sense Strand Starting at position 486 of SEQ ID NO: 317513
gcugguuguuccuccgaau

SEQ ID NO: 356888 - RNA, 19 nt, Artificial Sequence
  Description of Artificial Sequence: Synthetic oligonucleotide
  Antisense Strand to SEQ ID NO: 356887
auucggaggaacaaccagc

SEQ ID NO: 356889 - RNA, 19 nt, Artificial Sequence
  Description of Artificial Sequence: Synthetic oligonucleotide
  Sense Strand Starting at position 486 of SEQ ID NO: 317682
gacggagucucuucuuggu

SEQ ID NO: 356890 - RNA, 19 nt, Artificial Sequence
  Description of Artificial Sequence: Synthetic oligonucleotide
  Antisense Strand to SEQ ID NO: 356889
accaagaagagacuccguc

SEQ ID NO: 356891 - RNA, 19 nt, Artificial Sequence
  Description of Artificial Sequence: Synthetic oligonucleotide
  Sense Strand Starting at position 486 of SEQ ID NO: 317787
aagugugaaucucuagcua

SEQ ID NO: 356892 - RNA, 19 nt, Artificial Sequence
  Description of Artificial Sequence: Synthetic oligonucleotide
  Antisense Strand to SEQ ID NO: 356891
uagcuagagauucacacuu

SEQ ID NO: 356893 - RNA, 19 nt, Artificial Sequence
  Description of Artificial Sequence: Synthetic oligonucleotide
  Sense Strand Starting at position 486 of SEQ ID NO: 317791
gugaaucucuagcuagaau

SEQ ID NO: 356894 - RNA, 19 nt, Artificial Sequence
  Description of Artificial Sequence: Synthetic oligonucleotide
  Antisense Strand to SEQ ID NO: 356893
auucuagcuagagauucac

SEQ ID NO: 356895 - RNA, 19 nt, Artificial Sequence
  Description of Artificial Sequence: Synthetic oligonucleotide
  Sense Strand Starting at position 486 of SEQ ID NO: 317889
uuauguuagugacauaaag

SEQ ID NO: 356896 - RNA, 19 nt, Artificial Sequence
  Description of Artificial Sequence: Synthetic oligonucleotide
  Antisense Strand to SEQ ID NO: 356895
cuuuaugucacuaacauaa

SEQ ID NO: 356897 - RNA, 19 nt, Artificial Sequence
  Description of Artificial Sequence: Synthetic oligonucleotide
  Sense Strand Starting at position 486 of SEQ ID NO: 318117
aaacgcacuucguugacau

SEQ ID NO: 356898 - RNA, 19 nt, Artificial Sequence
  Description of Artificial Sequence: Synthetic oligonucleotide
  Antisense Strand to SEQ ID NO: 356897
augucaacgaagugcguuu

SEQ ID NO: 356899 - RNA, 19 nt, Artificial Sequence
  Description of Artificial Sequence: Synthetic oligonucleotide
  Sense Strand Starting at position 486 of SEQ ID NO: 318118
aacgcacuucguugacauu

SEQ ID NO: 356900 - RNA, 19 nt, Artificial Sequence
  Description of Artificial Sequence: Synthetic oligonucleotide
  Antisense Strand to SEQ ID NO: 356899
aaugucaacgaagugcguu

SEQ ID NO: 356901 - RNA, 19 nt, Artificial Sequence
  Description of Artificial Sequence: Synthetic oligonucleotide
  Sense Strand Starting at position 486 of SEQ ID NO: 318136
ucaggacccucgggaauau

SEQ ID NO: 356902 - RNA, 19 nt, Artificial Sequence
  Description of Artificial Sequence: Synthetic oligonucleotide
  Antisense Strand to SEQ ID NO: 356901
auauucccgaggguccuga

SEQ ID NO: 356903 - RNA, 19 nt, Artificial Sequence
  Description of Artificial Sequence: Synthetic oligonucleotide
  Sense Strand Starting at position 486 of SEQ ID NO: 318147
gggaauauuccucggcccu

SEQ ID NO: 356904 - RNA, 19 nt, Artificial Sequence
  Description of Artificial Sequence: Synthetic oligonucleotide
  Antisense Strand to SEQ ID NO: 356903
agggccgaggaauauuccc

SEQ ID NO: 356905 - RNA, 19 nt, Artificial Sequence
  Description of Artificial Sequence: Synthetic oligonucleotide
  Sense Strand Starting at position 486 of SEQ ID NO: 318148
ggaauauuccucggcccua

SEQ ID NO: 356906 - RNA, 19 nt, Artificial Sequence
  Description of Artificial Sequence: Synthetic oligonucleotide
  Antisense Strand to SEQ ID NO: 356905
uagggccgaggaauauucc

SEQ ID NO: 356907 - RNA, 19 nt, Artificial Sequence
  Description of Artificial Sequence: Synthetic oligonucleotide
  Sense Strand Starting at position 486 of SEQ ID NO: 318176
gggugugcuuguucuuauu

SEQ ID NO: 356908 - RNA, 19 nt, Artificial Sequence
  Description of Artificial Sequence: Synthetic oligonucleotide
  Antisense Strand to SEQ ID NO: 356907
aauaagaacaagcacaccc

SEQ ID NO: 356909 - RNA, 19 nt, Artificial Sequence
  Description of Artificial Sequence: Synthetic oligonucleotide
  Sense Strand Starting at position 486 of SEQ ID NO: 318383
cacugaugcugggcucaga

SEQ ID NO: 356910 - RNA, 19 nt, Artificial Sequence
  Description of Artificial Sequence: Synthetic oligonucleotide
  Antisense Strand to SEQ ID NO: 356909
ucugagcccagcaucagug

SEQ ID NO: 356911 - RNA, 19 nt, Artificial Sequence
  Description of Artificial Sequence: Synthetic oligonucleotide
  Sense Strand Starting at position 486 of SEQ ID NO: 318386
ugaugcugggcucagagaa

SEQ ID NO: 356912 - RNA, 19 nt, Artificial Sequence
  Description of Artificial Sequence: Synthetic oligonucleotide
  Antisense Strand to SEQ ID NO: 356911
uucucugagcccagcauca

SEQ ID NO: 356913 - RNA, 19 nt, Artificial Sequence
  Description of Artificial Sequence: Synthetic oligonucleotide
  Sense Strand Starting at position 486 of SEQ ID NO: 318670
agguguugugaccagaucu

SEQ ID NO: 356914 - RNA, 19 nt, Artificial Sequence
  Description of Artificial Sequence: Synthetic oligonucleotide
  Antisense Strand to SEQ ID NO: 356913
agaucuggucacaacaccu

SEQ ID NO: 356915 - RNA, 19 nt, Artificial Sequence
  Description of Artificial Sequence: Synthetic oligonucleotide
  Sense Strand Starting at position 486 of SEQ ID NO: 318712
ucuugagccucugagauuu

SEQ ID NO: 356916 - RNA, 19 nt, Artificial Sequence
  Description of Artificial Sequence: Synthetic oligonucleotide
  Antisense Strand to SEQ ID NO: 356915
aaaucucagaggcucaaga

SEQ ID NO: 356917 - RNA, 19 nt, Artificial Sequence
  Description of Artificial Sequence: Synthetic oligonucleotide
  Sense Strand Starting at position 486 of SEQ ID NO: 318926
uuacccauauggguaaaua

SEQ ID NO: 356918 - RNA, 19 nt, Artificial Sequence
  Description of Artificial Sequence: Synthetic oligonucleotide
  Antisense Strand to SEQ ID NO: 356917
uauuuacccauauggguaa

SEQ ID NO: 356919 - RNA, 19 nt, Artificial Sequence
  Description of Artificial Sequence: Synthetic oligonucleotide
  Sense Strand Starting at position 486 of SEQ ID NO: 318980
ggaaguggaucuguaaaca

SEQ ID NO: 356920 - RNA, 19 nt, Artificial Sequence
  Description of Artificial Sequence: Synthetic oligonucleotide
  Antisense Strand to SEQ ID NO: 356919
uguuuacagauccacuucc

SEQ ID NO: 356921 - RNA, 19 nt, Artificial Sequence
  Description of Artificial Sequence: Synthetic oligonucleotide
  Sense Strand Starting at position 486 of SEQ ID NO: 319013
gcaaguggauucucccaga

SEQ ID NO: 356922 - RNA, 19 nt, Artificial Sequence
  Description of Artificial Sequence: Synthetic oligonucleotide
  Antisense Strand to SEQ ID NO: 356921
ucugggagaauccacuugc

SEQ ID NO: 356923 - RNA, 19 nt, Artificial Sequence
  Description of Artificial Sequence: Synthetic oligonucleotide
  Sense Strand Starting at position 486 of SEQ ID NO: 319060
gcagcuugauuuccaccua

SEQ ID NO: 356924 - RNA, 19 nt, Artificial Sequence
  Description of Artificial Sequence: Synthetic oligonucleotide
  Antisense Strand to SEQ ID NO: 356923
uagguggaaaucaagcugc

SEQ ID NO: 356925 - RNA, 19 nt, Artificial Sequence
  Description of Artificial Sequence: Synthetic oligonucleotide
  Sense Strand Starting at position 487 of SEQ ID NO: 315634
guuguuaaacaaugugaau

SEQ ID NO: 356926 - RNA, 19 nt, Artificial Sequence
  Description of Artificial Sequence: Synthetic oligonucleotide
  Antisense Strand to SEQ ID NO: 356925
auucacauuguuuaacaac

SEQ ID NO: 356927 - RNA, 19 nt, Artificial Sequence
  Description of Artificial Sequence: Synthetic oligonucleotide
  Sense Strand Starting at position 487 of SEQ ID NO: 315811
aacagagucuuaguauuga

SEQ ID NO: 356928 - RNA, 19 nt, Artificial Sequence
  Description of Artificial Sequence: Synthetic oligonucleotide
  Antisense Strand to SEQ ID NO: 356927
ucaauacuaagacucuguu

SEQ ID NO: 356929 - RNA, 19 nt, Artificial Sequence
  Description of Artificial Sequence: Synthetic oligonucleotide
  Sense Strand Starting at position 487 of SEQ ID NO: 315899
cuuauaaugcagugaugca

SEQ ID NO: 356930 - RNA, 19 nt, Artificial Sequence
  Description of Artificial Sequence: Synthetic oligonucleotide
  Antisense Strand to SEQ ID NO: 356929
ugcaucacugcauuauaag

SEQ ID NO: 356931 - RNA, 19 nt, Artificial Sequence
  Description of Artificial Sequence: Synthetic oligonucleotide
  Sense Strand Starting at position 487 of SEQ ID NO: 316000
aguacuuucugggccaagu

SEQ ID NO: 356932 - RNA, 19 nt, Artificial Sequence
  Description of Artificial Sequence: Synthetic oligonucleotide
  Antisense Strand to SEQ ID NO: 356931
acuuggcccagaaaguacu

SEQ ID NO: 356933 - RNA, 19 nt, Artificial Sequence
  Description of Artificial Sequence: Synthetic oligonucleotide
  Sense Strand Starting at position 487 of SEQ ID NO: 316166
cagaguguacagcaaugaa

SEQ ID NO: 356934 - RNA, 19 nt, Artificial Sequence
  Description of Artificial Sequence: Synthetic oligonucleotide
  Antisense Strand to SEQ ID NO: 356933
uucauugcuguacacucug

SEQ ID NO: 356935 - RNA, 19 nt, Artificial Sequence
  Description of Artificial Sequence: Synthetic oligonucleotide
  Sense Strand Starting at position 487 of SEQ ID NO: 316273
cccacaguguacguuugau

SEQ ID NO: 356936 - RNA, 19 nt, Artificial Sequence
  Description of Artificial Sequence: Synthetic oligonucleotide
  Antisense Strand to SEQ ID NO: 356935
aucaaacguacacuguggg

SEQ ID NO: 356937 - RNA, 19 nt, Artificial Sequence
  Description of Artificial Sequence: Synthetic oligonucleotide
  Sense Strand Starting at position 487 of SEQ ID NO: 316289
gauuaaggguacuagaaga

SEQ ID NO: 356938 - RNA, 19 nt, Artificial Sequence
  Description of Artificial Sequence: Synthetic oligonucleotide
  Antisense Strand to SEQ ID NO: 356937
ucuucuaguacccuuaauc

SEQ ID NO: 356939 - RNA, 19 nt, Artificial Sequence
  Description of Artificial Sequence: Synthetic oligonucleotide
  Sense Strand Starting at position 487 of SEQ ID NO: 316413
gggagagcggccuguugaa

SEQ ID NO: 356940 - RNA, 19 nt, Artificial Sequence
  Description of Artificial Sequence: Synthetic oligonucleotide
  Antisense Strand to SEQ ID NO: 356939
uucaacaggccgcucuccc

SEQ ID NO: 356941 - RNA, 19 nt, Artificial Sequence
  Description of Artificial Sequence: Synthetic oligonucleotide
  Sense Strand Starting at position 487 of SEQ ID NO: 316450
auacgacgcgccuaagaua

SEQ ID NO: 356942 - RNA, 19 nt, Artificial Sequence
  Description of Artificial Sequence: Synthetic oligonucleotide
  Antisense Strand to SEQ ID NO: 356941
uaucuuaggcgcgucguau

SEQ ID NO: 356943 - RNA, 19 nt, Artificial Sequence
  Description of Artificial Sequence: Synthetic oligonucleotide
  Sense Strand Starting at position 487 of SEQ ID NO: 316459
gccuaagauaguggaccua

SEQ ID NO: 356944 - RNA, 19 nt, Artificial Sequence
  Description of Artificial Sequence: Synthetic oligonucleotide
  Antisense Strand to SEQ ID NO: 356943
uagguccacuaucuuaggc

SEQ ID NO: 356945 - RNA, 19 nt, Artificial Sequence
  Description of Artificial Sequence: Synthetic oligonucleotide
  Sense Strand Starting at position 487 of SEQ ID NO: 316582
ccgaaacugcaguaagaau

SEQ ID NO: 356946 - RNA, 19 nt, Artificial Sequence
  Description of Artificial Sequence: Synthetic oligonucleotide
  Antisense Strand to SEQ ID NO: 356945
auucuuacugcaguuucgg

SEQ ID NO: 356947 - RNA, 19 nt, Artificial Sequence
  Description of Artificial Sequence: Synthetic oligonucleotide
  Sense Strand Starting at position 487 of SEQ ID NO: 316593
guaagaaugcucgagccuc

SEQ ID NO: 356948 - RNA, 19 nt, Artificial Sequence
  Description of Artificial Sequence: Synthetic oligonucleotide
  Antisense Strand to SEQ ID NO: 356947
gaggcucgagcauucuuac

SEQ ID NO: 356949 - RNA, 19 nt, Artificial Sequence
  Description of Artificial Sequence: Synthetic oligonucleotide
  Sense Strand Starting at position 487 of SEQ ID NO: 316630
ggagauccgccguggagaa

SEQ ID NO: 356950 - RNA, 19 nt, Artificial Sequence
  Description of Artificial Sequence: Synthetic oligonucleotide
  Antisense Strand to SEQ ID NO: 356949
uucuccacggcggaucucc

SEQ ID NO: 356951 - RNA, 19 nt, Artificial Sequence
  Description of Artificial Sequence: Synthetic oligonucleotide
  Sense Strand Starting at position 487 of SEQ ID NO: 316650
ggaauacgcccuuaggaua

SEQ ID NO: 356952 - RNA, 19 nt, Artificial Sequence
  Description of Artificial Sequence: Synthetic oligonucleotide
  Antisense Strand to SEQ ID NO: 356951
uauccuaagggcguauucc

SEQ ID NO: 356953 - RNA, 19 nt, Artificial Sequence
  Description of Artificial Sequence: Synthetic oligonucleotide
  Sense Strand Starting at position 487 of SEQ ID NO: 316701
ggcuucugugcgcucagua

SEQ ID NO: 356954 - RNA, 19 nt, Artificial Sequence
  Description of Artificial Sequence: Synthetic oligonucleotide
  Antisense Strand to SEQ ID NO: 356953
uacugagcgcacagaagcc

SEQ ID NO: 356955 - RNA, 19 nt, Artificial Sequence
  Description of Artificial Sequence: Synthetic oligonucleotide
  Sense Strand Starting at position 487 of SEQ ID NO: 316702
gcuucugugcgcucaguaa

SEQ ID NO: 356956 - RNA, 19 nt, Artificial Sequence
  Description of Artificial Sequence: Synthetic oligonucleotide
  Antisense Strand to SEQ ID NO: 356955
uuacugagcgcacagaagc

SEQ ID NO: 356957 - RNA, 19 nt, Artificial Sequence
  Description of Artificial Sequence: Synthetic oligonucleotide
  Sense Strand Starting at position 487 of SEQ ID NO: 317646
cugaacuucuuagagaacu

SEQ ID NO: 356958 - RNA, 19 nt, Artificial Sequence
  Description of Artificial Sequence: Synthetic oligonucleotide
  Antisense Strand to SEQ ID NO: 356957
aguucucuaagaaguucag

SEQ ID NO: 356959 - RNA, 19 nt, Artificial Sequence
  Description of Artificial Sequence: Synthetic oligonucleotide
  Sense Strand Starting at position 487 of SEQ ID NO: 317654
cuuagagaacuuggaucuu

SEQ ID NO: 356960 - RNA, 19 nt, Artificial Sequence
  Description of Artificial Sequence: Synthetic oligonucleotide
  Antisense Strand to SEQ ID NO: 356959
aagauccaaguucucuaag

SEQ ID NO: 356961 - RNA, 19 nt, Artificial Sequence
  Description of Artificial Sequence: Synthetic oligonucleotide
  Sense Strand Starting at position 487 of SEQ ID NO: 318132
uugcuuuaccauugucuuu

SEQ ID NO: 356962 - RNA, 19 nt, Artificial Sequence
  Description of Artificial Sequence: Synthetic oligonucleotide
  Antisense Strand to SEQ ID NO: 356961
aaagacaaugguaaagcaa

SEQ ID NO: 356963 - RNA, 19 nt, Artificial Sequence
  Description of Artificial Sequence: Synthetic oligonucleotide
  Sense Strand Starting at position 487 of SEQ ID NO: 318161
ugacuuaucccuugcuugu

SEQ ID NO: 356964 - RNA, 19 nt, Artificial Sequence
  Description of Artificial Sequence: Synthetic oligonucleotide
  Antisense Strand to SEQ ID NO: 356963
acaagcaagggauaaguca

SEQ ID NO: 356965 - RNA, 19 nt, Artificial Sequence
  Description of Artificial Sequence: Synthetic oligonucleotide
  Sense Strand Starting at position 487 of SEQ ID NO: 318182
uuuguuugcauuugugagu

SEQ ID NO: 356966 - RNA, 19 nt, Artificial Sequence
  Description of Artificial Sequence: Synthetic oligonucleotide
  Antisense Strand to SEQ ID NO: 356965
acucacaaaugcaaacaaa

SEQ ID NO: 356967 - RNA, 19 nt, Artificial Sequence
  Description of Artificial Sequence: Synthetic oligonucleotide
  Sense Strand Starting at position 487 of SEQ ID NO: 318183
uuguuugcauuugugagua

SEQ ID NO: 356968 - RNA, 19 nt, Artificial Sequence
  Description of Artificial Sequence: Synthetic oligonucleotide
  Antisense Strand to SEQ ID NO: 356967
uacucacaaaugcaaacaa

SEQ ID NO: 356969 - RNA, 19 nt, Artificial Sequence
  Description of Artificial Sequence: Synthetic oligonucleotide
  Sense Strand Starting at position 487 of SEQ ID NO: 318187
uugcauuugugaguaacac

SEQ ID NO: 356970 - RNA, 19 nt, Artificial Sequence
  Description of Artificial Sequence: Synthetic oligonucleotide
  Antisense Strand to SEQ ID NO: 356969
guguuacucacaaaugcaa

SEQ ID NO: 356971 - RNA, 19 nt, Artificial Sequence
  Description of Artificial Sequence: Synthetic oligonucleotide
  Sense Strand Starting at position 487 of SEQ ID NO: 318226
auagaaucuuaguuuguuc

SEQ ID NO: 356972 - RNA, 19 nt, Artificial Sequence
  Description of Artificial Sequence: Synthetic oligonucleotide
  Antisense Strand to SEQ ID NO: 356971
gaacaaacuaagauucuau

SEQ ID NO: 356973 - RNA, 19 nt, Artificial Sequence
  Description of Artificial Sequence: Synthetic oligonucleotide
  Sense Strand Starting at position 487 of SEQ ID NO: 318304
ccuuuaaaccagugguucu

SEQ ID NO: 356974 - RNA, 19 nt, Artificial Sequence
  Description of Artificial Sequence: Synthetic oligonucleotide
  Antisense Strand to SEQ ID NO: 356973
agaaccacugguuuaaagg

SEQ ID NO: 356975 - RNA, 19 nt, Artificial Sequence
  Description of Artificial Sequence: Synthetic oligonucleotide
  Sense Strand Starting at position 487 of SEQ ID NO: 318561
aguggauucuggcuaaaga

SEQ ID NO: 356976 - RNA, 19 nt, Artificial Sequence
  Description of Artificial Sequence: Synthetic oligonucleotide
  Antisense Strand to SEQ ID NO: 356975
ucuuuagccagaauccacu

SEQ ID NO: 356977 - RNA, 19 nt, Artificial Sequence
  Description of Artificial Sequence: Synthetic oligonucleotide
  Sense Strand Starting at position 487 of SEQ ID NO: 318694
uggagacuagucugcccaa

SEQ ID NO: 356978 - RNA, 19 nt, Artificial Sequence
  Description of Artificial Sequence: Synthetic oligonucleotide
  Antisense Strand to SEQ ID NO: 356977
uugggcagacuagucucca

SEQ ID NO: 356979 - RNA, 19 nt, Artificial Sequence
  Description of Artificial Sequence: Synthetic oligonucleotide
  Sense Strand Starting at position 487 of SEQ ID NO: 318697
agacuagucugcccaacuu

SEQ ID NO: 356980 - RNA, 19 nt, Artificial Sequence
  Description of Artificial Sequence: Synthetic oligonucleotide
  Antisense Strand to SEQ ID NO: 356979
aaguugggcagacuagucu

SEQ ID NO: 356981 - RNA, 19 nt, Artificial Sequence
  Description of Artificial Sequence: Synthetic oligonucleotide
  Sense Strand Starting at position 487 of SEQ ID NO: 318849
agaucuugccugggcgaca

SEQ ID NO: 356982 - RNA, 19 nt, Artificial Sequence
  Description of Artificial Sequence: Synthetic oligonucleotide
  Antisense Strand to SEQ ID NO: 356981
ugucgcccaggcaagaucu

SEQ ID NO: 356983 - RNA, 19 nt, Artificial Sequence
  Description of Artificial Sequence: Synthetic oligonucleotide
  Sense Strand Starting at position 487 of SEQ ID NO: 318850
gaucuugccugggcgacaa

SEQ ID NO: 356984 - RNA, 19 nt, Artificial Sequence
  Description of Artificial Sequence: Synthetic oligonucleotide
  Antisense Strand to SEQ ID NO: 356983
uugucgcccaggcaagauc

SEQ ID NO: 356985 - RNA, 19 nt, Artificial Sequence
  Description of Artificial Sequence: Synthetic oligonucleotide
  Sense Strand Starting at position 487 of SEQ ID NO: 318907
agccuauuaguuugaugcu

SEQ ID NO: 356986 - RNA, 19 nt, Artificial Sequence
  Description of Artificial Sequence: Synthetic oligonucleotide
  Antisense Strand to SEQ ID NO: 356985
agcaucaaacuaauaggcu

SEQ ID NO: 356987 - RNA, 19 nt, Artificial Sequence
  Description of Artificial Sequence: Synthetic oligonucleotide
  Sense Strand Starting at position 487 of SEQ ID NO: 318913
uuaguuugaugcucagaga

SEQ ID NO: 356988 - RNA, 19 nt, Artificial Sequence
  Description of Artificial Sequence: Synthetic oligonucleotide
  Antisense Strand to SEQ ID NO: 356987
ucucugagcaucaaacuaa

SEQ ID NO: 356989 - RNA, 19 nt, Artificial Sequence
  Description of Artificial Sequence: Synthetic oligonucleotide
  Sense Strand Starting at position 487 of SEQ ID NO: 318914
uaguuugaugcucagagaa

SEQ ID NO: 356990 - RNA, 19 nt, Artificial Sequence
  Description of Artificial Sequence: Synthetic oligonucleotide
  Antisense Strand to SEQ ID NO: 356989
uucucugagcaucaaacua

SEQ ID NO: 356991 - RNA, 19 nt, Artificial Sequence
  Description of Artificial Sequence: Synthetic oligonucleotide
  Sense Strand Starting at position 487 of SEQ ID NO: 319052
accaaugguuuguucucaa

SEQ ID NO: 356992 - RNA, 19 nt, Artificial Sequence
  Description of Artificial Sequence: Synthetic oligonucleotide
  Antisense Strand to SEQ ID NO: 356991
uugagaacaaaccauuggu

SEQ ID NO: 356993 - RNA, 19 nt, Artificial Sequence
  Description of Artificial Sequence: Synthetic oligonucleotide
  Sense Strand Starting at position 487 of SEQ ID NO: 319077
gcacuaaugcaaggauaca

SEQ ID NO: 356994 - RNA, 19 nt, Artificial Sequence
  Description of Artificial Sequence: Synthetic oligonucleotide
  Antisense Strand to SEQ ID NO: 356993
uguauccuugcauuagugc

SEQ ID NO: 356995 - RNA, 19 nt, Artificial Sequence
  Description of Artificial Sequence: Synthetic oligonucleotide
  Sense Strand Starting at position 487 of SEQ ID NO: 319098
cagggauaaugggaaagau

SEQ ID NO: 356996 - RNA, 19 nt, Artificial Sequence
  Description of Artificial Sequence: Synthetic oligonucleotide
  Antisense Strand to SEQ ID NO: 356995
aucuuucccauuaucccug

SEQ ID NO: 356997 - RNA, 19 nt, Artificial Sequence
  Description of Artificial Sequence: Synthetic oligonucleotide
  Sense Strand Starting at position 487 of SEQ ID NO: 319138
uccuuucuguauuugugua

SEQ ID NO: 356998 - RNA, 19 nt, Artificial Sequence
  Description of Artificial Sequence: Synthetic oligonucleotide
  Antisense Strand to SEQ ID NO: 356997
uacacaaauacagaaagga

SEQ ID NO: 356999 - RNA, 19 nt, Artificial Sequence
  Description of Artificial Sequence: Synthetic oligonucleotide
  Sense Strand Starting at position 487 of SEQ ID NO: 319142
uucuguauuuguguaacag

SEQ ID NO: 357000 - RNA, 19 nt, Artificial Sequence
  Description of Artificial Sequence: Synthetic oligonucleotide
  Antisense Strand to SEQ ID NO: 356999
cuguuacacaaauacagaa

SEQ ID NO: 357001 - RNA, 19 nt, Artificial Sequence
  Description of Artificial Sequence: Synthetic oligonucleotide
  Sense Strand Starting at position 487 of SEQ ID NO: 319160
gaacgcauuugucaaauug

SEQ ID NO: 357002 - RNA, 19 nt, Artificial Sequence
  Description of Artificial Sequence: Synthetic oligonucleotide
  Antisense Strand to SEQ ID NO: 357001
caauuugacaaaugcguuc

SEQ ID NO: 357003 - RNA, 19 nt, Artificial Sequence
  Description of Artificial Sequence: Synthetic oligonucleotide
  Sense Strand Starting at position 487 of SEQ ID NO: 319185
gaagucauguccuugggua

SEQ ID NO: 357004 - RNA, 19 nt, Artificial Sequence
  Description of Artificial Sequence: Synthetic oligonucleotide
  Antisense Strand to SEQ ID NO: 357003
uacccaaggacaugacuuc

SEQ ID NO: 357005 - RNA, 19 nt, Artificial Sequence
  Description of Artificial Sequence: Synthetic oligonucleotide
  Sense Strand Starting at position 488 of SEQ ID NO: 315253
ggaucuuaguacucagaaa

SEQ ID NO: 357006 - RNA, 19 nt, Artificial Sequence
  Description of Artificial Sequence: Synthetic oligonucleotide
  Antisense Strand to SEQ ID NO: 357005
uuucugaguacuaagaucc

SEQ ID NO: 357007 - RNA, 19 nt, Artificial Sequence
  Description of Artificial Sequence: Synthetic oligonucleotide
  Sense Strand Starting at position 488 of SEQ ID NO: 315405
auaacuguguccuuuauaa

SEQ ID NO: 357008 - RNA, 19 nt, Artificial Sequence
  Description of Artificial Sequence: Synthetic oligonucleotide
  Antisense Strand to SEQ ID NO: 357007
uuauaaaggacacaguuau

SEQ ID NO: 357009 - RNA, 19 nt, Artificial Sequence
  Description of Artificial Sequence: Synthetic oligonucleotide
  Sense Strand Starting at position 488 of SEQ ID NO: 315448
auagaugucgcuuacauaa

SEQ ID NO: 357010 - RNA, 19 nt, Artificial Sequence
  Description of Artificial Sequence: Synthetic oligonucleotide
  Antisense Strand to SEQ ID NO: 357009
uuauguaagcgacaucuau

SEQ ID NO: 357011 - RNA, 19 nt, Artificial Sequence
  Description of Artificial Sequence: Synthetic oligonucleotide
  Sense Strand Starting at position 488 of SEQ ID NO: 315602
ugaaguauguccuuuaaau

SEQ ID NO: 357012 - RNA, 19 nt, Artificial Sequence
  Description of Artificial Sequence: Synthetic oligonucleotide
  Antisense Strand to SEQ ID NO: 357011
auuuaaaggacauacuuca

SEQ ID NO: 357013 - RNA, 19 nt, Artificial Sequence
  Description of Artificial Sequence: Synthetic oligonucleotide
  Sense Strand Starting at position 488 of SEQ ID NO: 315792
ucgauacaguauucucuaa

SEQ ID NO: 357014 - RNA, 19 nt, Artificial Sequence
  Description of Artificial Sequence: Synthetic oligonucleotide
  Antisense Strand to SEQ ID NO: 357013
uuagagaauacuguaucga

SEQ ID NO: 357015 - RNA, 19 nt, Artificial Sequence
  Description of Artificial Sequence: Synthetic oligonucleotide
  Sense Strand Starting at position 488 of SEQ ID NO: 316017
cggcauuauuuacccuuau

SEQ ID NO: 357016 - RNA, 19 nt, Artificial Sequence
  Description of Artificial Sequence: Synthetic oligonucleotide
  Antisense Strand to SEQ ID NO: 357015
auaaggguaaauaaugccg

SEQ ID NO: 357017 - RNA, 19 nt, Artificial Sequence
  Description of Artificial Sequence: Synthetic oligonucleotide
  Sense Strand Starting at position 488 of SEQ ID NO: 316046
auuagaagcuuucucugau

SEQ ID NO: 357018 - RNA, 19 nt, Artificial Sequence
  Description of Artificial Sequence: Synthetic oligonucleotide
  Antisense Strand to SEQ ID NO: 357017
aucagagaaagcuucuaau

SEQ ID NO: 357019 - RNA, 19 nt, Artificial Sequence
  Description of Artificial Sequence: Synthetic oligonucleotide
  Sense Strand Starting at position 488 of SEQ ID NO: 316047
uuagaagcuuucucugauu

SEQ ID NO: 357020 - RNA, 19 nt, Artificial Sequence
  Description of Artificial Sequence: Synthetic oligonucleotide
  Antisense Strand to SEQ ID NO: 357019
aaucagagaaagcuucuaa

SEQ ID NO: 357021 - RNA, 19 nt, Artificial Sequence
  Description of Artificial Sequence: Synthetic oligonucleotide
  Sense Strand Starting at position 488 of SEQ ID NO: 316077
gaguauguagcccauccaa

SEQ ID NO: 357022 - RNA, 19 nt, Artificial Sequence
  Description of Artificial Sequence: Synthetic oligonucleotide
  Antisense Strand to SEQ ID NO: 357021
uuggaugggcuacauacuc

SEQ ID NO: 357023 - RNA, 19 nt, Artificial Sequence
  Description of Artificial Sequence: Synthetic oligonucleotide
  Sense Strand Starting at position 488 of SEQ ID NO: 316126
gcccaagggauccagcauu

SEQ ID NO: 357024 - RNA, 19 nt, Artificial Sequence
  Description of Artificial Sequence: Synthetic oligonucleotide
  Antisense Strand to SEQ ID NO: 357023
aaugcuggaucccuugggc

SEQ ID NO: 357025 - RNA, 19 nt, Artificial Sequence
  Description of Artificial Sequence: Synthetic oligonucleotide
  Sense Strand Starting at position 488 of SEQ ID NO: 316140
gcauuaggaucauugaaau

SEQ ID NO: 357026 - RNA, 19 nt, Artificial Sequence
  Description of Artificial Sequence: Synthetic oligonucleotide
  Antisense Strand to SEQ ID NO: 357025
auuucaaugauccuaaugc

SEQ ID NO: 357027 - RNA, 19 nt, Artificial Sequence
  Description of Artificial Sequence: Synthetic oligonucleotide
  Sense Strand Starting at position 488 of SEQ ID NO: 316150
cauugaaauuucgcguucu

SEQ ID NO: 357028 - RNA, 19 nt, Artificial Sequence
  Description of Artificial Sequence: Synthetic oligonucleotide
  Antisense Strand to SEQ ID NO: 357027
agaacgcgaaauuucaaug

SEQ ID NO: 357029 - RNA, 19 nt, Artificial Sequence
  Description of Artificial Sequence: Synthetic oligonucleotide
  Sense Strand Starting at position 488 of SEQ ID NO: 316262
gggacuaacaaauguucgu

SEQ ID NO: 357030 - RNA, 19 nt, Artificial Sequence
  Description of Artificial Sequence: Synthetic oligonucleotide
  Antisense Strand to SEQ ID NO: 357029
acgaacauuuguuaguccc

SEQ ID NO: 357031 - RNA, 19 nt, Artificial Sequence
  Description of Artificial Sequence: Synthetic oligonucleotide
  Sense Strand Starting at position 488 of SEQ ID NO: 316268
aacaaauguucguugaaua

SEQ ID NO: 357032 - RNA, 19 nt, Artificial Sequence
  Description of Artificial Sequence: Synthetic oligonucleotide
  Antisense Strand to SEQ ID NO: 357031
uauucaacgaacauuuguu

SEQ ID NO: 357033 - RNA, 19 nt, Artificial Sequence
  Description of Artificial Sequence: Synthetic oligonucleotide
  Sense Strand Starting at position 488 of SEQ ID NO: 316269
acaaauguucguugaauaa

SEQ ID NO: 357034 - RNA, 19 nt, Artificial Sequence
  Description of Artificial Sequence: Synthetic oligonucleotide
  Antisense Strand to SEQ ID NO: 357033
uuauucaacgaacauuugu

SEQ ID NO: 357035 - RNA, 19 nt, Artificial Sequence
  Description of Artificial Sequence: Synthetic oligonucleotide
  Sense Strand Starting at position 488 of SEQ ID NO: 316276
uucguugaauaaucaggaa

SEQ ID NO: 357036 - RNA, 19 nt, Artificial Sequence
  Description of Artificial Sequence: Synthetic oligonucleotide
  Antisense Strand to SEQ ID NO: 357035
uuccugauuauucaacgaa

SEQ ID NO: 357037 - RNA, 19 nt, Artificial Sequence
  Description of Artificial Sequence: Synthetic oligonucleotide
  Sense Strand Starting at position 488 of SEQ ID NO: 316321
uuugauuaguuuccuacau

SEQ ID NO: 357038 - RNA, 19 nt, Artificial Sequence
  Description of Artificial Sequence: Synthetic oligonucleotide
  Antisense Strand to SEQ ID NO: 357037
auguaggaaacuaaucaaa

SEQ ID NO: 357039 - RNA, 19 nt, Artificial Sequence
  Description of Artificial Sequence: Synthetic oligonucleotide
  Sense Strand Starting at position 488 of SEQ ID NO: 316322
uugauuaguuuccuacauc

SEQ ID NO: 357040 - RNA, 19 nt, Artificial Sequence
  Description of Artificial Sequence: Synthetic oligonucleotide
  Antisense Strand to SEQ ID NO: 357039
gauguaggaaacuaaucaa

SEQ ID NO: 357041 - RNA, 19 nt, Artificial Sequence
  Description of Artificial Sequence: Synthetic oligonucleotide
  Sense Strand Starting at position 488 of SEQ ID NO: 316339
ucuggaaagugggaaauuu

SEQ ID NO: 357042 - RNA, 19 nt, Artificial Sequence
  Description of Artificial Sequence: Synthetic oligonucleotide
  Antisense Strand to SEQ ID NO: 357041
aaauuucccacuuuccaga

SEQ ID NO: 357043 - RNA, 19 nt, Artificial Sequence
  Description of Artificial Sequence: Synthetic oligonucleotide
  Sense Strand Starting at position 488 of SEQ ID NO: 316358
guaugcaaaccaugagauc

SEQ ID NO: 357044 - RNA, 19 nt, Artificial Sequence
  Description of Artificial Sequence: Synthetic oligonucleotide
  Antisense Strand to SEQ ID NO: 357043
gaucucaugguuugcauac

SEQ ID NO: 357045 - RNA, 19 nt, Artificial Sequence
  Description of Artificial Sequence: Synthetic oligonucleotide
  Sense Strand Starting at position 488 of SEQ ID NO: 316382
acuuaaaccuuagugauga

SEQ ID NO: 357046 - RNA, 19 nt, Artificial Sequence
  Description of Artificial Sequence: Synthetic oligonucleotide
  Antisense Strand to SEQ ID NO: 357045
ucaucacuaagguuuaagu

SEQ ID NO: 357047 - RNA, 19 nt, Artificial Sequence
  Description of Artificial Sequence: Synthetic oligonucleotide
  Sense Strand Starting at position 488 of SEQ ID NO: 316393
agugaugaguuucuuuaac

SEQ ID NO: 357048 - RNA, 19 nt, Artificial Sequence
  Description of Artificial Sequence: Synthetic oligonucleotide
  Antisense Strand to SEQ ID NO: 357047
guuaaagaaacucaucacu

SEQ ID NO: 357049 - RNA, 19 nt, Artificial Sequence
  Description of Artificial Sequence: Synthetic oligonucleotide
  Sense Strand Starting at position 488 of SEQ ID NO: 316395
ugaugaguuucuuuaacuu

SEQ ID NO: 357050 - RNA, 19 nt, Artificial Sequence
  Description of Artificial Sequence: Synthetic oligonucleotide
  Antisense Strand to SEQ ID NO: 357049
aaguuaaagaaacucauca

SEQ ID NO: 357051 - RNA, 19 nt, Artificial Sequence
  Description of Artificial Sequence: Synthetic oligonucleotide
  Sense Strand Starting at position 488 of SEQ ID NO: 316740
gguggaaugccucagacug

SEQ ID NO: 357052 - RNA, 19 nt, Artificial Sequence
  Description of Artificial Sequence: Synthetic oligonucleotide
  Antisense Strand to SEQ ID NO: 357051
cagucugaggcauuccacc

SEQ ID NO: 357053 - RNA, 19 nt, Artificial Sequence
  Description of Artificial Sequence: Synthetic oligonucleotide
  Sense Strand Starting at position 488 of SEQ ID NO: 317298
aagagugaaugcccagaca

SEQ ID NO: 357054 - RNA, 19 nt, Artificial Sequence
  Description of Artificial Sequence: Synthetic oligonucleotide
  Antisense Strand to SEQ ID NO: 357053
ugucugggcauucacucuu

SEQ ID NO: 357055 - RNA, 19 nt, Artificial Sequence
  Description of Artificial Sequence: Synthetic oligonucleotide
  Sense Strand Starting at position 488 of SEQ ID NO: 317488
aaugaacuagguugucaau

SEQ ID NO: 357056 - RNA, 19 nt, Artificial Sequence
  Description of Artificial Sequence: Synthetic oligonucleotide
  Antisense Strand to SEQ ID NO: 357055
auugacaaccuaguucauu

SEQ ID NO: 357057 - RNA, 19 nt, Artificial Sequence
  Description of Artificial Sequence: Synthetic oligonucleotide
  Sense Strand Starting at position 488 of SEQ ID NO: 317490
ugaacuagguugucaauaa

SEQ ID NO: 357058 - RNA, 19 nt, Artificial Sequence
  Description of Artificial Sequence: Synthetic oligonucleotide
  Antisense Strand to SEQ ID NO: 357057
uuauugacaaccuaguuca

SEQ ID NO: 357059 - RNA, 19 nt, Artificial Sequence
  Description of Artificial Sequence: Synthetic oligonucleotide
  Sense Strand Starting at position 488 of SEQ ID NO: 317545
gcuugcauuucuuuaagga

SEQ ID NO: 357060 - RNA, 19 nt, Artificial Sequence
  Description of Artificial Sequence: Synthetic oligonucleotide
  Antisense Strand to SEQ ID NO: 357059
uccuuaaagaaaugcaagc

SEQ ID NO: 357061 - RNA, 19 nt, Artificial Sequence
  Description of Artificial Sequence: Synthetic oligonucleotide
  Sense Strand Starting at position 488 of SEQ ID NO: 317628
acuaaagcccagcaugaua

SEQ ID NO: 357062 - RNA, 19 nt, Artificial Sequence
  Description of Artificial Sequence: Synthetic oligonucleotide
  Antisense Strand to SEQ ID NO: 357061
uaucaugcugggcuuuagu

SEQ ID NO: 357063 - RNA, 19 nt, Artificial Sequence
  Description of Artificial Sequence: Synthetic oligonucleotide
  Sense Strand Starting at position 488 of SEQ ID NO: 317734
uggagaugugguuacugca

SEQ ID NO: 357064 - RNA, 19 nt, Artificial Sequence
  Description of Artificial Sequence: Synthetic oligonucleotide
  Antisense Strand to SEQ ID NO: 357063
ugcaguaaccacaucucca

SEQ ID NO: 357065 - RNA, 19 nt, Artificial Sequence
  Description of Artificial Sequence: Synthetic oligonucleotide
  Sense Strand Starting at position 488 of SEQ ID NO: 317741
gugguuacugcagagguga

SEQ ID NO: 357066 - RNA, 19 nt, Artificial Sequence
  Description of Artificial Sequence: Synthetic oligonucleotide
  Antisense Strand to SEQ ID NO: 357065
ucaccucugcaguaaccac

SEQ ID NO: 357067 - RNA, 19 nt, Artificial Sequence
  Description of Artificial Sequence: Synthetic oligonucleotide
  Sense Strand Starting at position 488 of SEQ ID NO: 317783
gguggucacuaaucaauau

SEQ ID NO: 357068 - RNA, 19 nt, Artificial Sequence
  Description of Artificial Sequence: Synthetic oligonucleotide
  Antisense Strand to SEQ ID NO: 357067
auauugauuagugaccacc

SEQ ID NO: 357069 - RNA, 19 nt, Artificial Sequence
  Description of Artificial Sequence: Synthetic oligonucleotide
  Sense Strand Starting at position 488 of SEQ ID NO: 317851
gaaagaugaucugaagaga

SEQ ID NO: 357070 - RNA, 19 nt, Artificial Sequence
  Description of Artificial Sequence: Synthetic oligonucleotide
  Antisense Strand to SEQ ID NO: 357069
ucucuucagaucaucuuuc

SEQ ID NO: 357071 - RNA, 19 nt, Artificial Sequence
  Description of Artificial Sequence: Synthetic oligonucleotide
  Sense Strand Starting at position 488 of SEQ ID NO: 318262
guguuugaauugguacaag

SEQ ID NO: 357072 - RNA, 19 nt, Artificial Sequence
  Description of Artificial Sequence: Synthetic oligonucleotide
  Antisense Strand to SEQ ID NO: 357071
cuuguaccaauucaaacac

SEQ ID NO: 357073 - RNA, 19 nt, Artificial Sequence
  Description of Artificial Sequence: Synthetic oligonucleotide
  Sense Strand Starting at position 488 of SEQ ID NO: 318598
uuauaauaaaguggcgaau

SEQ ID NO: 357074 - RNA, 19 nt, Artificial Sequence
  Description of Artificial Sequence: Synthetic oligonucleotide
  Antisense Strand to SEQ ID NO: 357073
auucgccacuuuauuauaa

SEQ ID NO: 357075 - RNA, 19 nt, Artificial Sequence
  Description of Artificial Sequence: Synthetic oligonucleotide
  Sense Strand Starting at position 488 of SEQ ID NO: 318761
auuggaaaccuauguacua

SEQ ID NO: 357076 - RNA, 19 nt, Artificial Sequence
  Description of Artificial Sequence: Synthetic oligonucleotide
  Antisense Strand to SEQ ID NO: 357075
uaguacauagguuuccaau

SEQ ID NO: 357077 - RNA, 19 nt, Artificial Sequence
  Description of Artificial Sequence: Synthetic oligonucleotide
  Sense Strand Starting at position 488 of SEQ ID NO: 318827
ucagcaaggcuuuaccaaa

SEQ ID NO: 357078 - RNA, 19 nt, Artificial Sequence
  Description of Artificial Sequence: Synthetic oligonucleotide
  Antisense Strand to SEQ ID NO: 357077
uuugguaaagccuugcuga

SEQ ID NO: 357079 - RNA, 19 nt, Artificial Sequence
  Description of Artificial Sequence: Synthetic oligonucleotide
  Sense Strand Starting at position 488 of SEQ ID NO: 319065
cucauuuacugggaauaga

SEQ ID NO: 357080 - RNA, 19 nt, Artificial Sequence
  Description of Artificial Sequence: Synthetic oligonucleotide
  Antisense Strand to SEQ ID NO: 357079
ucuauucccaguaaaugag

SEQ ID NO: 357081 - RNA, 19 nt, Artificial Sequence
  Description of Artificial Sequence: Synthetic oligonucleotide
  Sense Strand Starting at position 488 of SEQ ID NO: 319101
cugauaugucugcauacac

SEQ ID NO: 357082 - RNA, 19 nt, Artificial Sequence
  Description of Artificial Sequence: Synthetic oligonucleotide
  Antisense Strand to SEQ ID NO: 357081
guguaugcagacauaucag

SEQ ID NO: 357083 - RNA, 19 nt, Artificial Sequence
  Description of Artificial Sequence: Synthetic oligonucleotide
  Sense Strand Starting at position 488 of SEQ ID NO: 319152
aaaguuccucuugggaauc

SEQ ID NO: 357084 - RNA, 19 nt, Artificial Sequence
  Description of Artificial Sequence: Synthetic oligonucleotide
  Antisense Strand to SEQ ID NO: 357083
gauucccaagaggaacuuu

SEQ ID NO: 357085 - RNA, 19 nt, Artificial Sequence
  Description of Artificial Sequence: Synthetic oligonucleotide
  Sense Strand Starting at position 489 of SEQ ID NO: 315849
ugcugugugagacaauauc

SEQ ID NO: 357086 - RNA, 19 nt, Artificial Sequence
  Description of Artificial Sequence: Synthetic oligonucleotide
  Antisense Strand to SEQ ID NO: 357085
gauauugucucacacagca

SEQ ID NO: 357087 - RNA, 19 nt, Artificial Sequence
  Description of Artificial Sequence: Synthetic oligonucleotide
  Sense Strand Starting at position 489 of SEQ ID NO: 316425
ugaagcuccacgggaaauu

SEQ ID NO: 357088 - RNA, 19 nt, Artificial Sequence
  Description of Artificial Sequence: Synthetic oligonucleotide
  Antisense Strand to SEQ ID NO: 357087
aauuucccguggagcuuca

SEQ ID NO: 357089 - RNA, 19 nt, Artificial Sequence
  Description of Artificial Sequence: Synthetic oligonucleotide
  Sense Strand Starting at position 489 of SEQ ID NO: 316812
agagguggugcacagaaau

SEQ ID NO: 357090 - RNA, 19 nt, Artificial Sequence
  Description of Artificial Sequence: Synthetic oligonucleotide
  Antisense Strand to SEQ ID NO: 357089
auuucugugcaccaccucu

SEQ ID NO: 357091 - RNA, 19 nt, Artificial Sequence
  Description of Artificial Sequence: Synthetic oligonucleotide
  Sense Strand Starting at position 489 of SEQ ID NO: 317004
agucaugagacaugucaag

SEQ ID NO: 357092 - RNA, 19 nt, Artificial Sequence
  Description of Artificial Sequence: Synthetic oligonucleotide
  Antisense Strand to SEQ ID NO: 357091
cuugacaugucucaugacu

SEQ ID NO: 357093 - RNA, 19 nt, Artificial Sequence
  Description of Artificial Sequence: Synthetic oligonucleotide
  Sense Strand Starting at position 489 of SEQ ID NO: 317068
guagaauuaugauucucuu

SEQ ID NO: 357094 - RNA, 19 nt, Artificial Sequence
  Description of Artificial Sequence: Synthetic oligonucleotide
  Antisense Strand to SEQ ID NO: 357093
aagagaaucauaauucuac

SEQ ID NO: 357095 - RNA, 19 nt, Artificial Sequence
  Description of Artificial Sequence: Synthetic oligonucleotide
  Sense Strand Starting at position 489 of SEQ ID NO: 317094
gcuagagucauuuguugau

SEQ ID NO: 357096 - RNA, 19 nt, Artificial Sequence
  Description of Artificial Sequence: Synthetic oligonucleotide
  Antisense Strand to SEQ ID NO: 357095
aucaacaaaugacucuagc

SEQ ID NO: 357097 - RNA, 19 nt, Artificial Sequence
  Description of Artificial Sequence: Synthetic oligonucleotide
  Sense Strand Starting at position 489 of SEQ ID NO: 317107
guugauaaguuacugagaa

SEQ ID NO: 357098 - RNA, 19 nt, Artificial Sequence
  Description of Artificial Sequence: Synthetic oligonucleotide
  Antisense Strand to SEQ ID NO: 357097
uucucaguaacuuaucaac

SEQ ID NO: 357099 - RNA, 19 nt, Artificial Sequence
  Description of Artificial Sequence: Synthetic oligonucleotide
  Sense Strand Starting at position 489 of SEQ ID NO: 317129
aagacauuguccuugguca

SEQ ID NO: 357100 - RNA, 19 nt, Artificial Sequence
  Description of Artificial Sequence: Synthetic oligonucleotide
  Antisense Strand to SEQ ID NO: 357099
ugaccaaggacaaugucuu

SEQ ID NO: 357101 - RNA, 19 nt, Artificial Sequence
  Description of Artificial Sequence: Synthetic oligonucleotide
  Sense Strand Starting at position 489 of SEQ ID NO: 317130
agacauuguccuuggucaa

SEQ ID NO: 357102 - RNA, 19 nt, Artificial Sequence
  Description of Artificial Sequence: Synthetic oligonucleotide
  Antisense Strand to SEQ ID NO: 357101
uugaccaaggacaaugucu

SEQ ID NO: 357103 - RNA, 19 nt, Artificial Sequence
  Description of Artificial Sequence: Synthetic oligonucleotide
  Sense Strand Starting at position 489 of SEQ ID NO: 317131
gacauuguccuuggucaau

SEQ ID NO: 357104 - RNA, 19 nt, Artificial Sequence
  Description of Artificial Sequence: Synthetic oligonucleotide
  Antisense Strand to SEQ ID NO: 357103
auugaccaaggacaauguc

SEQ ID NO: 357105 - RNA, 19 nt, Artificial Sequence
  Description of Artificial Sequence: Synthetic oligonucleotide
  Sense Strand Starting at position 489 of SEQ ID NO: 317134
auuguccuuggucaauauu

SEQ ID NO: 357106 - RNA, 19 nt, Artificial Sequence
  Description of Artificial Sequence: Synthetic oligonucleotide
  Antisense Strand to SEQ ID NO: 357105
aauauugaccaaggacaau

SEQ ID NO: 357107 - RNA, 19 nt, Artificial Sequence
  Description of Artificial Sequence: Synthetic oligonucleotide
  Sense Strand Starting at position 489 of SEQ ID NO: 317160
ccuuaucaaugagucugau

SEQ ID NO: 357108 - RNA, 19 nt, Artificial Sequence
  Description of Artificial Sequence: Synthetic oligonucleotide
  Antisense Strand to SEQ ID NO: 357107
aucagacucauugauaagg

SEQ ID NO: 357109 - RNA, 19 nt, Artificial Sequence
  Description of Artificial Sequence: Synthetic oligonucleotide
  Sense Strand Starting at position 489 of SEQ ID NO: 317282
ccaugucuccuuuagaucu

SEQ ID NO: 357110 - RNA, 19 nt, Artificial Sequence
  Description of Artificial Sequence: Synthetic oligonucleotide
  Antisense Strand to SEQ ID NO: 357109
agaucuaaaggagacaugg

SEQ ID NO: 357111 - RNA, 19 nt, Artificial Sequence
  Description of Artificial Sequence: Synthetic oligonucleotide
  Sense Strand Starting at position 489 of SEQ ID NO: 317610
gagauugucagguagguuu

SEQ ID NO: 357112 - RNA, 19 nt, Artificial Sequence
  Description of Artificial Sequence: Synthetic oligonucleotide
  Antisense Strand to SEQ ID NO: 357111
aaaccuaccugacaaucuc

SEQ ID NO: 357113 - RNA, 19 nt, Artificial Sequence
  Description of Artificial Sequence: Synthetic oligonucleotide
  Sense Strand Starting at position 489 of SEQ ID NO: 317943
ucaggcuugaugugaacua

SEQ ID NO: 357114 - RNA, 19 nt, Artificial Sequence
  Description of Artificial Sequence: Synthetic oligonucleotide
  Antisense Strand to SEQ ID NO: 357113
uaguucacaucaagccuga

SEQ ID NO: 357115 - RNA, 19 nt, Artificial Sequence
  Description of Artificial Sequence: Synthetic oligonucleotide
  Sense Strand Starting at position 489 of SEQ ID NO: 317972
cugugagaggucuaagcua

SEQ ID NO: 357116 - RNA, 19 nt, Artificial Sequence
  Description of Artificial Sequence: Synthetic oligonucleotide
  Antisense Strand to SEQ ID NO: 357115
uagcuuagaccucucacag

SEQ ID NO: 357117 - RNA, 19 nt, Artificial Sequence
  Description of Artificial Sequence: Synthetic oligonucleotide
  Sense Strand Starting at position 489 of SEQ ID NO: 318073
augcauaagagucagaugu

SEQ ID NO: 357118 - RNA, 19 nt, Artificial Sequence
  Description of Artificial Sequence: Synthetic oligonucleotide
  Antisense Strand to SEQ ID NO: 357117
acaucugacucuuaugcau

SEQ ID NO: 357119 - RNA, 19 nt, Artificial Sequence
  Description of Artificial Sequence: Synthetic oligonucleotide
  Sense Strand Starting at position 489 of SEQ ID NO: 318084
ucagauguaucagauuucu

SEQ ID NO: 357120 - RNA, 19 nt, Artificial Sequence
  Description of Artificial Sequence: Synthetic oligonucleotide
  Antisense Strand to SEQ ID NO: 357119
agaaaucugauacaucuga

SEQ ID NO: 357121 - RNA, 19 nt, Artificial Sequence
  Description of Artificial Sequence: Synthetic oligonucleotide
  Sense Strand Starting at position 489 of SEQ ID NO: 318122
uaagauugucguuauaguc

SEQ ID NO: 357122 - RNA, 19 nt, Artificial Sequence
  Description of Artificial Sequence: Synthetic oligonucleotide
  Antisense Strand to SEQ ID NO: 357121
gacuauaacgacaaucuua

SEQ ID NO: 357123 - RNA, 19 nt, Artificial Sequence
  Description of Artificial Sequence: Synthetic oligonucleotide
  Sense Strand Starting at position 489 of SEQ ID NO: 318180
gagucacacuagcuuuaga

SEQ ID NO: 357124 - RNA, 19 nt, Artificial Sequence
  Description of Artificial Sequence: Synthetic oligonucleotide
  Antisense Strand to SEQ ID NO: 357123
ucuaaagcuagugugacuc

SEQ ID NO: 357125 - RNA, 19 nt, Artificial Sequence
  Description of Artificial Sequence: Synthetic oligonucleotide
  Sense Strand Starting at position 489 of SEQ ID NO: 318244
cugucauucgaauaaauua

SEQ ID NO: 357126 - RNA, 19 nt, Artificial Sequence
  Description of Artificial Sequence: Synthetic oligonucleotide
  Antisense Strand to SEQ ID NO: 357125
uaauuuauucgaaugacag

SEQ ID NO: 357127 - RNA, 19 nt, Artificial Sequence
  Description of Artificial Sequence: Synthetic oligonucleotide
  Sense Strand Starting at position 489 of SEQ ID NO: 318260
uuauaugucuaaguaucca

SEQ ID NO: 357128 - RNA, 19 nt, Artificial Sequence
  Description of Artificial Sequence: Synthetic oligonucleotide
  Antisense Strand to SEQ ID NO: 357127
uggauacuuagacauauaa

SEQ ID NO: 357129 - RNA, 19 nt, Artificial Sequence
  Description of Artificial Sequence: Synthetic oligonucleotide
  Sense Strand Starting at position 489 of SEQ ID NO: 318264
augucuaaguauccauaaa

SEQ ID NO: 357130 - RNA, 19 nt, Artificial Sequence
  Description of Artificial Sequence: Synthetic oligonucleotide
  Antisense Strand to SEQ ID NO: 357129
uuuauggauacuuagacau

SEQ ID NO: 357131 - RNA, 19 nt, Artificial Sequence
  Description of Artificial Sequence: Synthetic oligonucleotide
  Sense Strand Starting at position 489 of SEQ ID NO: 318274
auccauaaagucggaagau

SEQ ID NO: 357132 - RNA, 19 nt, Artificial Sequence
  Description of Artificial Sequence: Synthetic oligonucleotide
  Antisense Strand to SEQ ID NO: 357131
aucuuccgacuuuauggau

SEQ ID NO: 357133 - RNA, 19 nt, Artificial Sequence
  Description of Artificial Sequence: Synthetic oligonucleotide
  Sense Strand Starting at position 489 of SEQ ID NO: 318335
cagaguauuugggacauac

SEQ ID NO: 357134 - RNA, 19 nt, Artificial Sequence
  Description of Artificial Sequence: Synthetic oligonucleotide
  Antisense Strand to SEQ ID NO: 357133
guaugucccaaauacucug

SEQ ID NO: 357135 - RNA, 19 nt, Artificial Sequence
  Description of Artificial Sequence: Synthetic oligonucleotide
  Sense Strand Starting at position 489 of SEQ ID NO: 318355
auaguuguaucucuuaaug

SEQ ID NO: 357136 - RNA, 19 nt, Artificial Sequence
  Description of Artificial Sequence: Synthetic oligonucleotide
  Antisense Strand to SEQ ID NO: 357135
cauuaagagauacaacuau

SEQ ID NO: 357137 - RNA, 19 nt, Artificial Sequence
  Description of Artificial Sequence: Synthetic oligonucleotide
  Sense Strand Starting at position 489 of SEQ ID NO: 318380
uuugcaagaugcgugauuu

SEQ ID NO: 357138 - RNA, 19 nt, Artificial Sequence
  Description of Artificial Sequence: Synthetic oligonucleotide
  Antisense Strand to SEQ ID NO: 357137
aaaucacgcaucuugcaaa

SEQ ID NO: 357139 - RNA, 19 nt, Artificial Sequence
  Description of Artificial Sequence: Synthetic oligonucleotide
  Sense Strand Starting at position 489 of SEQ ID NO: 318381
uugcaagaugcgugauuua

SEQ ID NO: 357140 - RNA, 19 nt, Artificial Sequence
  Description of Artificial Sequence: Synthetic oligonucleotide
  Antisense Strand to SEQ ID NO: 357139
uaaaucacgcaucuugcaa

SEQ ID NO: 357141 - RNA, 19 nt, Artificial Sequence
  Description of Artificial Sequence: Synthetic oligonucleotide
  Sense Strand Starting at position 489 of SEQ ID NO: 318384
caagaugcgugauuuagca

SEQ ID NO: 357142 - RNA, 19 nt, Artificial Sequence
  Description of Artificial Sequence: Synthetic oligonucleotide
  Antisense Strand to SEQ ID NO: 357141
ugcuaaaucacgcaucuug

SEQ ID NO: 357143 - RNA, 19 nt, Artificial Sequence
  Description of Artificial Sequence: Synthetic oligonucleotide
  Sense Strand Starting at position 489 of SEQ ID NO: 318388
augcgugauuuagcaaaga

SEQ ID NO: 357144 - RNA, 19 nt, Artificial Sequence
  Description of Artificial Sequence: Synthetic oligonucleotide
  Antisense Strand to SEQ ID NO: 357143
ucuuugcuaaaucacgcau

SEQ ID NO: 357145 - RNA, 19 nt, Artificial Sequence
  Description of Artificial Sequence: Synthetic oligonucleotide
  Sense Strand Starting at position 489 of SEQ ID NO: 318433
cagcauuucccaggaugcu

SEQ ID NO: 357146 - RNA, 19 nt, Artificial Sequence
  Description of Artificial Sequence: Synthetic oligonucleotide
  Antisense Strand to SEQ ID NO: 357145
agcauccugggaaaugcug

SEQ ID NO: 357147 - RNA, 19 nt, Artificial Sequence
  Description of Artificial Sequence: Synthetic oligonucleotide
  Sense Strand Starting at position 489 of SEQ ID NO: 318505
cacauagugcuggagguuu

SEQ ID NO: 357148 - RNA, 19 nt, Artificial Sequence
  Description of Artificial Sequence: Synthetic oligonucleotide
  Antisense Strand to SEQ ID NO: 357147
aaaccuccagcacuaugug

SEQ ID NO: 357149 - RNA, 19 nt, Artificial Sequence
  Description of Artificial Sequence: Synthetic oligonucleotide
  Sense Strand Starting at position 489 of SEQ ID NO: 318588
guaauagaacugcgaucau

SEQ ID NO: 357150 - RNA, 19 nt, Artificial Sequence
  Description of Artificial Sequence: Synthetic oligonucleotide
  Antisense Strand to SEQ ID NO: 357149
augaucgcaguucuauuac

SEQ ID NO: 357151 - RNA, 19 nt, Artificial Sequence
  Description of Artificial Sequence: Synthetic oligonucleotide
  Sense Strand Starting at position 489 of SEQ ID NO: 318671
uugcauuagucauuaccag

SEQ ID NO: 357152 - RNA, 19 nt, Artificial Sequence
  Description of Artificial Sequence: Synthetic oligonucleotide
  Antisense Strand to SEQ ID NO: 357151
cugguaaugacuaaugcaa

SEQ ID NO: 357153 - RNA, 19 nt, Artificial Sequence
  Description of Artificial Sequence: Synthetic oligonucleotide
  Sense Strand Starting at position 489 of SEQ ID NO: 318727
ucuugauauguugauuguu

SEQ ID NO: 357154 - RNA, 19 nt, Artificial Sequence
  Description of Artificial Sequence: Synthetic oligonucleotide
  Antisense Strand to SEQ ID NO: 357153
aacaaucaacauaucaaga

SEQ ID NO: 357155 - RNA, 19 nt, Artificial Sequence
  Description of Artificial Sequence: Synthetic oligonucleotide
  Sense Strand Starting at position 489 of SEQ ID NO: 318730
ugauauguugauuguuuga

SEQ ID NO: 357156 - RNA, 19 nt, Artificial Sequence
  Description of Artificial Sequence: Synthetic oligonucleotide
  Antisense Strand to SEQ ID NO: 357155
ucaaacaaucaacauauca

SEQ ID NO: 357157 - RNA, 19 nt, Artificial Sequence
  Description of Artificial Sequence: Synthetic oligonucleotide
  Sense Strand Starting at position 489 of SEQ ID NO: 318841
gggcugugugaguaggaaa

SEQ ID NO: 357158 - RNA, 19 nt, Artificial Sequence
  Description of Artificial Sequence: Synthetic oligonucleotide
  Antisense Strand to SEQ ID NO: 357157
uuuccuacucacacagccc

SEQ ID NO: 357159 - RNA, 19 nt, Artificial Sequence
  Description of Artificial Sequence: Synthetic oligonucleotide
  Sense Strand Starting at position 489 of SEQ ID NO: 319057
agucucagauuguuaauau

SEQ ID NO: 357160 - RNA, 19 nt, Artificial Sequence
  Description of Artificial Sequence: Synthetic oligonucleotide
  Antisense Strand to SEQ ID NO: 357159
auauuaacaaucugagacu

SEQ ID NO: 357161 - RNA, 19 nt, Artificial Sequence
  Description of Artificial Sequence: Synthetic oligonucleotide
  Sense Strand Starting at position 489 of SEQ ID NO: 319192
acuuaaucaccauguugua

SEQ ID NO: 357162 - RNA, 19 nt, Artificial Sequence
  Description of Artificial Sequence: Synthetic oligonucleotide
  Antisense Strand to SEQ ID NO: 357161
uacaacauggugauuaagu

SEQ ID NO: 357163 - RNA, 19 nt, Artificial Sequence
  Description of Artificial Sequence: Synthetic oligonucleotide
  Sense Strand Starting at position 489 of SEQ ID NO: 319212
uguucuuugggcuauuaca

SEQ ID NO: 357164 - RNA, 19 nt, Artificial Sequence
  Description of Artificial Sequence: Synthetic oligonucleotide
  Antisense Strand to SEQ ID NO: 357163
uguaauagcccaaagaaca

SEQ ID NO: 357165 - RNA, 19 nt, Artificial Sequence
  Description of Artificial Sequence: Synthetic oligonucleotide
  Sense Strand Starting at position 490 of SEQ ID NO: 315315
ugaauccugccauaugcuu

SEQ ID NO: 357166 - RNA, 19 nt, Artificial Sequence
  Description of Artificial Sequence: Synthetic oligonucleotide
  Antisense Strand to SEQ ID NO: 357165
aagcauauggcaggauuca

SEQ ID NO: 357167 - RNA, 19 nt, Artificial Sequence
  Description of Artificial Sequence: Synthetic oligonucleotide
  Sense Strand Starting at position 490 of SEQ ID NO: 315320
ccugccauaugcuuaugua

SEQ ID NO: 357168 - RNA, 19 nt, Artificial Sequence
  Description of Artificial Sequence: Synthetic oligonucleotide
  Antisense Strand to SEQ ID NO: 357167
uacauaagcauauggcagg

SEQ ID NO: 357169 - RNA, 19 nt, Artificial Sequence
  Description of Artificial Sequence: Synthetic oligonucleotide
  Sense Strand Starting at position 490 of SEQ ID NO: 315321
cugccauaugcuuauguau

SEQ ID NO: 357170 - RNA, 19 nt, Artificial Sequence
  Description of Artificial Sequence: Synthetic oligonucleotide
  Antisense Strand to SEQ ID NO: 357169
auacauaagcauauggcag

SEQ ID NO: 357171 - RNA, 19 nt, Artificial Sequence
  Description of Artificial Sequence: Synthetic oligonucleotide
  Sense Strand Starting at position 490 of SEQ ID NO: 315421
guccaaagccauugugaau

SEQ ID NO: 357172 - RNA, 19 nt, Artificial Sequence
  Description of Artificial Sequence: Synthetic oligonucleotide
  Antisense Strand to SEQ ID NO: 357171
auucacaauggcuuuggac

SEQ ID NO: 357173 - RNA, 19 nt, Artificial Sequence
  Description of Artificial Sequence: Synthetic oligonucleotide
  Sense Strand Starting at position 490 of SEQ ID NO: 315427
agccauugugaauaggcau

SEQ ID NO: 357174 - RNA, 19 nt, Artificial Sequence
  Description of Artificial Sequence: Synthetic oligonucleotide
  Antisense Strand to SEQ ID NO: 357173
augccuauucacaauggcu

SEQ ID NO: 357175 - RNA, 19 nt, Artificial Sequence
  Description of Artificial Sequence: Synthetic oligonucleotide
  Sense Strand Starting at position 490 of SEQ ID NO: 315461
guuggaagaugaugaagaa

SEQ ID NO: 357176 - RNA, 19 nt, Artificial Sequence
  Description of Artificial Sequence: Synthetic oligonucleotide
  Antisense Strand to SEQ ID NO: 357175
uucuucaucaucuuccaac

SEQ ID NO: 357177 - RNA, 19 nt, Artificial Sequence
  Description of Artificial Sequence: Synthetic oligonucleotide
  Sense Strand Starting at position 490 of SEQ ID NO: 315492
gcuuuaaagauugagguca

SEQ ID NO: 357178 - RNA, 19 nt, Artificial Sequence
  Description of Artificial Sequence: Synthetic oligonucleotide
  Antisense Strand to SEQ ID NO: 357177
ugaccucaaucuuuaaagc

SEQ ID NO: 357179 - RNA, 19 nt, Artificial Sequence
  Description of Artificial Sequence: Synthetic oligonucleotide
  Sense Strand Starting at position 490 of SEQ ID NO: 315507
gucagaaucuagcuuagua

SEQ ID NO: 357180 - RNA, 19 nt, Artificial Sequence
  Description of Artificial Sequence: Synthetic oligonucleotide
  Antisense Strand to SEQ ID NO: 357179
uacuaagcuagauucugac

SEQ ID NO: 357181 - RNA, 19 nt, Artificial Sequence
  Description of Artificial Sequence: Synthetic oligonucleotide
  Sense Strand Starting at position 490 of SEQ ID NO: 315515
cuagcuuaguaacucagaa

SEQ ID NO: 357182 - RNA, 19 nt, Artificial Sequence
  Description of Artificial Sequence: Synthetic oligonucleotide
  Antisense Strand to SEQ ID NO: 357181
uucugaguuacuaagcuag

SEQ ID NO: 357183 - RNA, 19 nt, Artificial Sequence
  Description of Artificial Sequence: Synthetic oligonucleotide
  Sense Strand Starting at position 490 of SEQ ID NO: 315745
ggagccuuuauccaggagu

SEQ ID NO: 357184 - RNA, 19 nt, Artificial Sequence
  Description of Artificial Sequence: Synthetic oligonucleotide
  Antisense Strand to SEQ ID NO: 357183
acuccuggauaaaggcucc

SEQ ID NO: 357185 - RNA, 19 nt, Artificial Sequence
  Description of Artificial Sequence: Synthetic oligonucleotide
  Sense Strand Starting at position 490 of SEQ ID NO: 315747
agccuuuauccaggaguuc

SEQ ID NO: 357186 - RNA, 19 nt, Artificial Sequence
  Description of Artificial Sequence: Synthetic oligonucleotide
  Antisense Strand to SEQ ID NO: 357185
gaacuccuggauaaaggcu

SEQ ID NO: 357187 - RNA, 19 nt, Artificial Sequence
  Description of Artificial Sequence: Synthetic oligonucleotide
  Sense Strand Starting at position 490 of SEQ ID NO: 315951
ccuucuuuguugcugacaa

SEQ ID NO: 357188 - RNA, 19 nt, Artificial Sequence
  Description of Artificial Sequence: Synthetic oligonucleotide
  Antisense Strand to SEQ ID NO: 357187
uugucagcaacaaagaagg

SEQ ID NO: 357189 - RNA, 19 nt, Artificial Sequence
  Description of Artificial Sequence: Synthetic oligonucleotide
  Sense Strand Starting at position 490 of SEQ ID NO: 317353
uuugcauuugcucgugaaa

SEQ ID NO: 357190 - RNA, 19 nt, Artificial Sequence
  Description of Artificial Sequence: Synthetic oligonucleotide
  Antisense Strand to SEQ ID NO: 357189
uuucacgagcaaaugcaaa

SEQ ID NO: 357191 - RNA, 19 nt, Artificial Sequence
  Description of Artificial Sequence: Synthetic oligonucleotide
  Sense Strand Starting at position 490 of SEQ ID NO: 317356
gcauuugcucgugaaacug

SEQ ID NO: 357192 - RNA, 19 nt, Artificial Sequence
  Description of Artificial Sequence: Synthetic oligonucleotide
  Antisense Strand to SEQ ID NO: 357191
caguuucacgagcaaaugc

SEQ ID NO: 357193 - RNA, 19 nt, Artificial Sequence
  Description of Artificial Sequence: Synthetic oligonucleotide
  Sense Strand Starting at position 490 of SEQ ID NO: 317414
uuucuuuaaggccaguaau

SEQ ID NO: 357194 - RNA, 19 nt, Artificial Sequence
  Description of Artificial Sequence: Synthetic oligonucleotide
  Antisense Strand to SEQ ID NO: 357193
auuacuggccuuaaagaaa

SEQ ID NO: 357195 - RNA, 19 nt, Artificial Sequence
  Description of Artificial Sequence: Synthetic oligonucleotide
  Sense Strand Starting at position 490 of SEQ ID NO: 317417
cuuuaaggccaguaauuaa

SEQ ID NO: 357196 - RNA, 19 nt, Artificial Sequence
  Description of Artificial Sequence: Synthetic oligonucleotide
  Antisense Strand to SEQ ID NO: 357195
uuaauuacuggccuuaaag

SEQ ID NO: 357197 - RNA, 19 nt, Artificial Sequence
  Description of Artificial Sequence: Synthetic oligonucleotide
  Sense Strand Starting at position 490 of SEQ ID NO: 317528
agaagauauuguucugcuu

SEQ ID NO: 357198 - RNA, 19 nt, Artificial Sequence
  Description of Artificial Sequence: Synthetic oligonucleotide
  Antisense Strand to SEQ ID NO: 357197
aagcagaacaauaucuucu

SEQ ID NO: 357199 - RNA, 19 nt, Artificial Sequence
  Description of Artificial Sequence: Synthetic oligonucleotide
  Sense Strand Starting at position 490 of SEQ ID NO: 317552
auuguaaggcaaugauaau

SEQ ID NO: 357200 - RNA, 19 nt, Artificial Sequence
  Description of Artificial Sequence: Synthetic oligonucleotide
  Antisense Strand to SEQ ID NO: 357199
auuaucauugccuuacaau

SEQ ID NO: 357201 - RNA, 19 nt, Artificial Sequence
  Description of Artificial Sequence: Synthetic oligonucleotide
  Sense Strand Starting at position 490 of SEQ ID NO: 317623
uuguguaaagagugaauga

SEQ ID NO: 357202 - RNA, 19 nt, Artificial Sequence
  Description of Artificial Sequence: Synthetic oligonucleotide
  Antisense Strand to SEQ ID NO: 357201
ucauucacucuuuacacaa

SEQ ID NO: 357203 - RNA, 19 nt, Artificial Sequence
  Description of Artificial Sequence: Synthetic oligonucleotide
  Sense Strand Starting at position 490 of SEQ ID NO: 317662
aguauacaacuaggucaaa

SEQ ID NO: 357204 - RNA, 19 nt, Artificial Sequence
  Description of Artificial Sequence: Synthetic oligonucleotide
  Antisense Strand to SEQ ID NO: 357203
uuugaccuaguuguauacu

SEQ ID NO: 357205 - RNA, 19 nt, Artificial Sequence
  Description of Artificial Sequence: Synthetic oligonucleotide
  Sense Strand Starting at position 490 of SEQ ID NO: 317853
uauaguuggugcuuuggaa

SEQ ID NO: 357206 - RNA, 19 nt, Artificial Sequence
  Description of Artificial Sequence: Synthetic oligonucleotide
  Antisense Strand to SEQ ID NO: 357205
uuccaaagcaccaacuaua

SEQ ID NO: 357207 - RNA, 19 nt, Artificial Sequence
  Description of Artificial Sequence: Synthetic oligonucleotide
  Sense Strand Starting at position 490 of SEQ ID NO: 317862
ugcuuuggaaauuguaguu

SEQ ID NO: 357208 - RNA, 19 nt, Artificial Sequence
  Description of Artificial Sequence: Synthetic oligonucleotide
  Antisense Strand to SEQ ID NO: 357207
aacuacaauuuccaaagca

SEQ ID NO: 357209 - RNA, 19 nt, Artificial Sequence
  Description of Artificial Sequence: Synthetic oligonucleotide
  Sense Strand Starting at position 490 of SEQ ID NO: 317875
guaguuuauuagguuugau

SEQ ID NO: 357210 - RNA, 19 nt, Artificial Sequence
  Description of Artificial Sequence: Synthetic oligonucleotide
  Antisense Strand to SEQ ID NO: 357209
aucaaaccuaauaaacuac

SEQ ID NO: 357211 - RNA, 19 nt, Artificial Sequence
  Description of Artificial Sequence: Synthetic oligonucleotide
  Sense Strand Starting at position 490 of SEQ ID NO: 317907
uuuguuauccagcauaucu

SEQ ID NO: 357212 - RNA, 19 nt, Artificial Sequence
  Description of Artificial Sequence: Synthetic oligonucleotide
  Antisense Strand to SEQ ID NO: 357211
agauaugcuggauaacaaa

SEQ ID NO: 357213 - RNA, 19 nt, Artificial Sequence
  Description of Artificial Sequence: Synthetic oligonucleotide
  Sense Strand Starting at position 490 of SEQ ID NO: 317956
cagguauuguuguuauuua

SEQ ID NO: 357214 - RNA, 19 nt, Artificial Sequence
  Description of Artificial Sequence: Synthetic oligonucleotide
  Antisense Strand to SEQ ID NO: 357213
uaaauaacaacaauaccug

SEQ ID NO: 357215 - RNA, 19 nt, Artificial Sequence
  Description of Artificial Sequence: Synthetic oligonucleotide
  Sense Strand Starting at position 490 of SEQ ID NO: 318071
aguuaacaucauugauuag

SEQ ID NO: 357216 - RNA, 19 nt, Artificial Sequence
  Description of Artificial Sequence: Synthetic oligonucleotide
  Antisense Strand to SEQ ID NO: 357215
cuaaucaaugauguuaacu

SEQ ID NO: 357217 - RNA, 19 nt, Artificial Sequence
  Description of Artificial Sequence: Synthetic oligonucleotide
  Sense Strand Starting at position 490 of SEQ ID NO: 318078
aucauugauuaggagauuu

SEQ ID NO: 357218 - RNA, 19 nt, Artificial Sequence
  Description of Artificial Sequence: Synthetic oligonucleotide
  Antisense Strand to SEQ ID NO: 357217
aaaucuccuaaucaaugau

SEQ ID NO: 357219 - RNA, 19 nt, Artificial Sequence
  Description of Artificial Sequence: Synthetic oligonucleotide
  Sense Strand Starting at position 490 of SEQ ID NO: 318244
uggaauugcugauugcuga

SEQ ID NO: 357220 - RNA, 19 nt, Artificial Sequence
  Description of Artificial Sequence: Synthetic oligonucleotide
  Antisense Strand to SEQ ID NO: 357219
ucagcaaucagcaauucca

SEQ ID NO: 357221 - RNA, 19 nt, Artificial Sequence
  Description of Artificial Sequence: Synthetic oligonucleotide
  Sense Strand Starting at position 490 of SEQ ID NO: 318245
ggaauugcugauugcugau

SEQ ID NO: 357222 - RNA, 19 nt, Artificial Sequence
  Description of Artificial Sequence: Synthetic oligonucleotide
  Antisense Strand to SEQ ID NO: 357221
aucagcaaucagcaauucc

SEQ ID NO: 357223 - RNA, 19 nt, Artificial Sequence
  Description of Artificial Sequence: Synthetic oligonucleotide
  Sense Strand Starting at position 490 of SEQ ID NO: 318416
auauuaugaugaccauagu

SEQ ID NO: 357224 - RNA, 19 nt, Artificial Sequence
  Description of Artificial Sequence: Synthetic oligonucleotide
  Antisense Strand to SEQ ID NO: 357223
acuauggucaucauaauau

SEQ ID NO: 357225 - RNA, 19 nt, Artificial Sequence
  Description of Artificial Sequence: Synthetic oligonucleotide
  Sense Strand Starting at position 490 of SEQ ID NO: 318474
gcucuuuacuggucaaagu

SEQ ID NO: 357226 - RNA, 19 nt, Artificial Sequence
  Description of Artificial Sequence: Synthetic oligonucleotide
  Antisense Strand to SEQ ID NO: 357225
acuuugaccaguaaagagc

SEQ ID NO: 357227 - RNA, 19 nt, Artificial Sequence
  Description of Artificial Sequence: Synthetic oligonucleotide
  Sense Strand Starting at position 490 of SEQ ID NO: 318625
guccuuucuuaaguuguuu

SEQ ID NO: 357228 - RNA, 19 nt, Artificial Sequence
  Description of Artificial Sequence: Synthetic oligonucleotide
  Antisense Strand to SEQ ID NO: 357227
aaacaacuuaagaaaggac

SEQ ID NO: 357229 - RNA, 19 nt, Artificial Sequence
  Description of Artificial Sequence: Synthetic oligonucleotide
  Sense Strand Starting at position 490 of SEQ ID NO: 319040
ggucuagugucaccugagu

SEQ ID NO: 357230 - RNA, 19 nt, Artificial Sequence
  Description of Artificial Sequence: Synthetic oligonucleotide
  Antisense Strand to SEQ ID NO: 357229
acucaggugacacuagacc

SEQ ID NO: 357231 - RNA, 19 nt, Artificial Sequence
  Description of Artificial Sequence: Synthetic oligonucleotide
  Sense Strand Starting at position 490 of SEQ ID NO: 319042
ucuagugucaccugagucu

SEQ ID NO: 357232 - RNA, 19 nt, Artificial Sequence
  Description of Artificial Sequence: Synthetic oligonucleotide
  Antisense Strand to SEQ ID NO: 357231
agacucaggugacacuaga

SEQ ID NO: 357233 - RNA, 19 nt, Artificial Sequence
  Description of Artificial Sequence: Synthetic oligonucleotide
  Sense Strand Starting at position 490 of SEQ ID NO: 319053
cugagucuuaggcaaguaa

SEQ ID NO: 357234 - RNA, 19 nt, Artificial Sequence
  Description of Artificial Sequence: Synthetic oligonucleotide
  Antisense Strand to SEQ ID NO: 357233
uuacuugccuaagacucag

SEQ ID NO: 357235 - RNA, 19 nt, Artificial Sequence
  Description of Artificial Sequence: Synthetic oligonucleotide
  Sense Strand Starting at position 490 of SEQ ID NO: 319120
gaagucacucuggaguuga

SEQ ID NO: 357236 - RNA, 19 nt, Artificial Sequence
  Description of Artificial Sequence: Synthetic oligonucleotide
  Antisense Strand to SEQ ID NO: 357235
ucaacuccagagugacuuc

SEQ ID NO: 357237 - RNA, 19 nt, Artificial Sequence
  Description of Artificial Sequence: Synthetic oligonucleotide
  Sense Strand Starting at position 490 of SEQ ID NO: 319133
aguugauuugugggccuga

SEQ ID NO: 357238 - RNA, 19 nt, Artificial Sequence
  Description of Artificial Sequence: Synthetic oligonucleotide
  Antisense Strand to SEQ ID NO: 357237
ucaggcccacaaaucaacu

SEQ ID NO: 357239 - RNA, 19 nt, Artificial Sequence
  Description of Artificial Sequence: Synthetic oligonucleotide
  Sense Strand Starting at position 490 of SEQ ID NO: 319205
gagggcauauucuuuacua

SEQ ID NO: 357240 - RNA, 19 nt, Artificial Sequence
  Description of Artificial Sequence: Synthetic oligonucleotide
  Antisense Strand to SEQ ID NO: 357239
uaguaaagaauaugcccuc

SEQ ID NO: 357241 - RNA, 19 nt, Artificial Sequence
  Description of Artificial Sequence: Synthetic oligonucleotide
  Sense Strand Starting at position 490 of SEQ ID NO: 319206
agggcauauucuuuacuaa

SEQ ID NO: 357242 - RNA, 19 nt, Artificial Sequence
  Description of Artificial Sequence: Synthetic oligonucleotide
  Antisense Strand to SEQ ID NO: 357241
uuaguaaagaauaugcccu

SEQ ID NO: 357243 - RNA, 19 nt, Artificial Sequence
  Description of Artificial Sequence: Synthetic oligonucleotide
  Sense Strand Starting at position 490 of SEQ ID NO: 319207
gggcauauucuuuacuaaa

SEQ ID NO: 357244 - RNA, 19 nt, Artificial Sequence
  Description of Artificial Sequence: Synthetic oligonucleotide
  Antisense Strand to SEQ ID NO: 357243
uuuaguaaagaauaugccc

SEQ ID NO: 357245 - RNA, 19 nt, Artificial Sequence
  Description of Artificial Sequence: Synthetic oligonucleotide
  Sense Strand Starting at position 491 of SEQ ID NO: 315374
cuaugcuugcuauaaggaa

SEQ ID NO: 357246 - RNA, 19 nt, Artificial Sequence
  Description of Artificial Sequence: Synthetic oligonucleotide
  Antisense Strand to SEQ ID NO: 357245
uuccuuauagcaagcauag

SEQ ID NO: 357247 - RNA, 19 nt, Artificial Sequence
  Description of Artificial Sequence: Synthetic oligonucleotide
  Sense Strand Starting at position 491 of SEQ ID NO: 315430
gggugaucauggguaggga

SEQ ID NO: 357248 - RNA, 19 nt, Artificial Sequence
  Description of Artificial Sequence: Synthetic oligonucleotide
  Antisense Strand to SEQ ID NO: 357247
ucccuacccaugaucaccc

SEQ ID NO: 357249 - RNA, 19 nt, Artificial Sequence
  Description of Artificial Sequence: Synthetic oligonucleotide
  Sense Strand Starting at position 491 of SEQ ID NO: 315477
ggugucucugaagagguga

SEQ ID NO: 357250 - RNA, 19 nt, Artificial Sequence
  Description of Artificial Sequence: Synthetic oligonucleotide
  Antisense Strand to SEQ ID NO: 357249
ucaccucuucagagacacc

SEQ ID NO: 357251 - RNA, 19 nt, Artificial Sequence
  Description of Artificial Sequence: Synthetic oligonucleotide
  Sense Strand Starting at position 491 of SEQ ID NO: 315810
gugucaaauccacaggcaa

SEQ ID NO: 357252 - RNA, 19 nt, Artificial Sequence
  Description of Artificial Sequence: Synthetic oligonucleotide
  Antisense Strand to SEQ ID NO: 357251
uugccuguggauuugacac

SEQ ID NO: 357253 - RNA, 19 nt, Artificial Sequence
  Description of Artificial Sequence: Synthetic oligonucleotide
  Sense Strand Starting at position 491 of SEQ ID NO: 316148
cccugauaagcugaugacu

SEQ ID NO: 357254 - RNA, 19 nt, Artificial Sequence
  Description of Artificial Sequence: Synthetic oligonucleotide
  Antisense Strand to SEQ ID NO: 357253
agucaucagcuuaucaggg

SEQ ID NO: 357255 - RNA, 19 nt, Artificial Sequence
  Description of Artificial Sequence: Synthetic oligonucleotide
  Sense Strand Starting at position 491 of SEQ ID NO: 316168
ucuagucagccagaauuau

SEQ ID NO: 357256 - RNA, 19 nt, Artificial Sequence
  Description of Artificial Sequence: Synthetic oligonucleotide
  Antisense Strand to SEQ ID NO: 357255
auaauucuggcugacuaga

SEQ ID NO: 357257 - RNA, 19 nt, Artificial Sequence
  Description of Artificial Sequence: Synthetic oligonucleotide
  Sense Strand Starting at position 491 of SEQ ID NO: 316337
gaaggauuguaccuccauu

SEQ ID NO: 357258 - RNA, 19 nt, Artificial Sequence
  Description of Artificial Sequence: Synthetic oligonucleotide
  Antisense Strand to SEQ ID NO: 357257
aauggagguacaauccuuc

SEQ ID NO: 357259 - RNA, 19 nt, Artificial Sequence
  Description of Artificial Sequence: Synthetic oligonucleotide
  Sense Strand Starting at position 491 of SEQ ID NO: 316594
gugaauuguaaaggcaaga

SEQ ID NO: 357260 - RNA, 19 nt, Artificial Sequence
  Description of Artificial Sequence: Synthetic oligonucleotide
  Antisense Strand to SEQ ID NO: 357259
ucuugccuuuacaauucac

SEQ ID NO: 357261 - RNA, 19 nt, Artificial Sequence
  Description of Artificial Sequence: Synthetic oligonucleotide
  Sense Strand Starting at position 491 of SEQ ID NO: 316737
agcuguuaggaaugaagga

SEQ ID NO: 357262 - RNA, 19 nt, Artificial Sequence
  Description of Artificial Sequence: Synthetic oligonucleotide
  Antisense Strand to SEQ ID NO: 357261
uccuucauuccuaacagcu

SEQ ID NO: 357263 - RNA, 19 nt, Artificial Sequence
  Description of Artificial Sequence: Synthetic oligonucleotide
  Sense Strand Starting at position 491 of SEQ ID NO: 316790
caccaagugcugggaaaua

SEQ ID NO: 357264 - RNA, 19 nt, Artificial Sequence
  Description of Artificial Sequence: Synthetic oligonucleotide
  Antisense Strand to SEQ ID NO: 357263
uauuucccagcacuuggug

SEQ ID NO: 357265 - RNA, 19 nt, Artificial Sequence
  Description of Artificial Sequence: Synthetic oligonucleotide
  Sense Strand Starting at position 491 of SEQ ID NO: 316795
agugcugggaaauauguau

SEQ ID NO: 357266 - RNA, 19 nt, Artificial Sequence
  Description of Artificial Sequence: Synthetic oligonucleotide
  Antisense Strand to SEQ ID NO: 357265
auacauauuucccagcacu

SEQ ID NO: 357267 - RNA, 19 nt, Artificial Sequence
  Description of Artificial Sequence: Synthetic oligonucleotide
  Sense Strand Starting at position 491 of SEQ ID NO: 316948
uugucuugcagagaucaug

SEQ ID NO: 357268 - RNA, 19 nt, Artificial Sequence
  Description of Artificial Sequence: Synthetic oligonucleotide
  Antisense Strand to SEQ ID NO: 357267
caugaucucugcaagacaa

SEQ ID NO: 357269 - RNA, 19 nt, Artificial Sequence
  Description of Artificial Sequence: Synthetic oligonucleotide
  Sense Strand Starting at position 491 of SEQ ID NO: 317097
ggauguagaucuuugacua

SEQ ID NO: 357270 - RNA, 19 nt, Artificial Sequence
  Description of Artificial Sequence: Synthetic oligonucleotide
  Antisense Strand to SEQ ID NO: 357269
uagucaaagaucuacaucc

SEQ ID NO: 357271 - RNA, 19 nt, Artificial Sequence
  Description of Artificial Sequence: Synthetic oligonucleotide
  Sense Strand Starting at position 491 of SEQ ID NO: 317098
gauguagaucuuugacuaa

SEQ ID NO: 357272 - RNA, 19 nt, Artificial Sequence
  Description of Artificial Sequence: Synthetic oligonucleotide
  Antisense Strand to SEQ ID NO: 357271
uuagucaaagaucuacauc

SEQ ID NO: 357273 - RNA, 19 nt, Artificial Sequence
  Description of Artificial Sequence: Synthetic oligonucleotide
  Sense Strand Starting at position 491 of SEQ ID NO: 317101
guagaucuuugacuaagac

SEQ ID NO: 357274 - RNA, 19 nt, Artificial Sequence
  Description of Artificial Sequence: Synthetic oligonucleotide
  Antisense Strand to SEQ ID NO: 357273
gucuuagucaaagaucuac

SEQ ID NO: 357275 - RNA, 19 nt, Artificial Sequence
  Description of Artificial Sequence: Synthetic oligonucleotide
  Sense Strand Starting at position 491 of SEQ ID NO: 317204
gguagaagcaaaggguuau

SEQ ID NO: 357276 - RNA, 19 nt, Artificial Sequence
  Description of Artificial Sequence: Synthetic oligonucleotide
  Antisense Strand to SEQ ID NO: 357275
auaacccuuugcuucuacc

SEQ ID NO: 357277 - RNA, 19 nt, Artificial Sequence
  Description of Artificial Sequence: Synthetic oligonucleotide
  Sense Strand Starting at position 491 of SEQ ID NO: 317216
ggguuauuucgcuaggcuc

SEQ ID NO: 357278 - RNA, 19 nt, Artificial Sequence
  Description of Artificial Sequence: Synthetic oligonucleotide
  Antisense Strand to SEQ ID NO: 357277
gagccuagcgaaauaaccc

SEQ ID NO: 357279 - RNA, 19 nt, Artificial Sequence
  Description of Artificial Sequence: Synthetic oligonucleotide
  Sense Strand Starting at position 491 of SEQ ID NO: 317326
guggacaucuuaguaacca

SEQ ID NO: 357280 - RNA, 19 nt, Artificial Sequence
  Description of Artificial Sequence: Synthetic oligonucleotide
  Antisense Strand to SEQ ID NO: 357279
ugguuacuaagauguccac

SEQ ID NO: 357281 - RNA, 19 nt, Artificial Sequence
  Description of Artificial Sequence: Synthetic oligonucleotide
  Sense Strand Starting at position 491 of SEQ ID NO: 317334
cuuaguaaccaucaggcua

SEQ ID NO: 357282 - RNA, 19 nt, Artificial Sequence
  Description of Artificial Sequence: Synthetic oligonucleotide
  Antisense Strand to SEQ ID NO: 357281
uagccugaugguuacuaag

SEQ ID NO: 357283 - RNA, 19 nt, Artificial Sequence
  Description of Artificial Sequence: Synthetic oligonucleotide
  Sense Strand Starting at position 491 of SEQ ID NO: 317360
ugaugauucugguuaacca

SEQ ID NO: 357284 - RNA, 19 nt, Artificial Sequence
  Description of Artificial Sequence: Synthetic oligonucleotide
  Antisense Strand to SEQ ID NO: 357283
ugguuaaccagaaucauca

SEQ ID NO: 357285 - RNA, 19 nt, Artificial Sequence
  Description of Artificial Sequence: Synthetic oligonucleotide
  Sense Strand Starting at position 491 of SEQ ID NO: 317407
ucacucugguuccugaaga

SEQ ID NO: 357286 - RNA, 19 nt, Artificial Sequence
  Description of Artificial Sequence: Synthetic oligonucleotide
  Antisense Strand to SEQ ID NO: 357285
ucuucaggaaccagaguga

SEQ ID NO: 357287 - RNA, 19 nt, Artificial Sequence
  Description of Artificial Sequence: Synthetic oligonucleotide
  Sense Strand Starting at position 491 of SEQ ID NO: 317508
acguaaaugguuuauuaga

SEQ ID NO: 357288 - RNA, 19 nt, Artificial Sequence
  Description of Artificial Sequence: Synthetic oligonucleotide
  Antisense Strand to SEQ ID NO: 357287
ucuaauaaaccauuuacgu

SEQ ID NO: 357289 - RNA, 19 nt, Artificial Sequence
  Description of Artificial Sequence: Synthetic oligonucleotide
  Sense Strand Starting at position 491 of SEQ ID NO: 317510
guaaaugguuuauuagaga

SEQ ID NO: 357290 - RNA, 19 nt, Artificial Sequence
  Description of Artificial Sequence: Synthetic oligonucleotide
  Antisense Strand to SEQ ID NO: 357289
ucucuaauaaaccauuuac

SEQ ID NO: 357291 - RNA, 19 nt, Artificial Sequence
  Description of Artificial Sequence: Synthetic oligonucleotide
  Sense Strand Starting at position 491 of SEQ ID NO: 317515
ugguuuauuagagagguuu

SEQ ID NO: 357292 - RNA, 19 nt, Artificial Sequence
  Description of Artificial Sequence: Synthetic oligonucleotide
  Antisense Strand to SEQ ID NO: 357291
aaaccucucuaauaaacca

SEQ ID NO: 357293 - RNA, 19 nt, Artificial Sequence
  Description of Artificial Sequence: Synthetic oligonucleotide
  Sense Strand Starting at position 491 of SEQ ID NO: 317720
ggcccaguacuguaaagac

SEQ ID NO: 357294 - RNA, 19 nt, Artificial Sequence
  Description of Artificial Sequence: Synthetic oligonucleotide
  Antisense Strand to SEQ ID NO: 357293
gucuuuacaguacugggcc

SEQ ID NO: 357295 - RNA, 19 nt, Artificial Sequence
  Description of Artificial Sequence: Synthetic oligonucleotide
  Sense Strand Starting at position 491 of SEQ ID NO: 317729
cuguaaagaccuuagcuua

SEQ ID NO: 357296 - RNA, 19 nt, Artificial Sequence
  Description of Artificial Sequence: Synthetic oligonucleotide
  Antisense Strand to SEQ ID NO: 357295
uaagcuaaggucuuuacag

SEQ ID NO: 357297 - RNA, 19 nt, Artificial Sequence
  Description of Artificial Sequence: Synthetic oligonucleotide
  Sense Strand Starting at position 491 of SEQ ID NO: 318011
gagacuaacaggcgugaga

SEQ ID NO: 357298 - RNA, 19 nt, Artificial Sequence
  Description of Artificial Sequence: Synthetic oligonucleotide
  Antisense Strand to SEQ ID NO: 357297
ucucacgccuguuagucuc

SEQ ID NO: 357299 - RNA, 19 nt, Artificial Sequence
  Description of Artificial Sequence: Synthetic oligonucleotide
  Sense Strand Starting at position 491 of SEQ ID NO: 318026
gagauagacuacucaggca

SEQ ID NO: 357300 - RNA, 19 nt, Artificial Sequence
  Description of Artificial Sequence: Synthetic oligonucleotide
  Antisense Strand to SEQ ID NO: 357299
ugccugaguagucuaucuc

SEQ ID NO: 357301 - RNA, 19 nt, Artificial Sequence
  Description of Artificial Sequence: Synthetic oligonucleotide
  Sense Strand Starting at position 491 of SEQ ID NO: 318118
cucagaagauccuugcaau

SEQ ID NO: 357302 - RNA, 19 nt, Artificial Sequence
  Description of Artificial Sequence: Synthetic oligonucleotide
  Antisense Strand to SEQ ID NO: 357301
auugcaaggaucuucugag

SEQ ID NO: 357303 - RNA, 19 nt, Artificial Sequence
  Description of Artificial Sequence: Synthetic oligonucleotide
  Sense Strand Starting at position 491 of SEQ ID NO: 318119
ucagaagauccuugcaaua

SEQ ID NO: 357304 - RNA, 19 nt, Artificial Sequence
  Description of Artificial Sequence: Synthetic oligonucleotide
  Antisense Strand to SEQ ID NO: 357303
uauugcaaggaucuucuga

SEQ ID NO: 357305 - RNA, 19 nt, Artificial Sequence
  Description of Artificial Sequence: Synthetic oligonucleotide
  Sense Strand Starting at position 491 of SEQ ID NO: 318200
ucaaauuagcaccaguaga

SEQ ID NO: 357306 - RNA, 19 nt, Artificial Sequence
  Description of Artificial Sequence: Synthetic oligonucleotide
  Antisense Strand to SEQ ID NO: 357305
ucuacuggugcuaauuuga

SEQ ID NO: 357307 - RNA, 19 nt, Artificial Sequence
  Description of Artificial Sequence: Synthetic oligonucleotide
  Sense Strand Starting at position 491 of SEQ ID NO: 318313
ccacuucugcuuuguauuu

SEQ ID NO: 357308 - RNA, 19 nt, Artificial Sequence
  Description of Artificial Sequence: Synthetic oligonucleotide
  Antisense Strand to SEQ ID NO: 357307
aaauacaaagcagaagugg

SEQ ID NO: 357309 - RNA, 19 nt, Artificial Sequence
  Description of Artificial Sequence: Synthetic oligonucleotide
  Sense Strand Starting at position 491 of SEQ ID NO: 318432
auguuuaagccagaacaac

SEQ ID NO: 357310 - RNA, 19 nt, Artificial Sequence
  Description of Artificial Sequence: Synthetic oligonucleotide
  Antisense Strand to SEQ ID NO: 357309
guuguucuggcuuaaacau

SEQ ID NO: 357311 - RNA, 19 nt, Artificial Sequence
  Description of Artificial Sequence: Synthetic oligonucleotide
  Sense Strand Starting at position 491 of SEQ ID NO: 318485
ugugcuuaggcacaaauaa

SEQ ID NO: 357312 - RNA, 19 nt, Artificial Sequence
  Description of Artificial Sequence: Synthetic oligonucleotide
  Antisense Strand to SEQ ID NO: 357311
uuauuugugccuaagcaca

SEQ ID NO: 357313 - RNA, 19 nt, Artificial Sequence
  Description of Artificial Sequence: Synthetic oligonucleotide
  Sense Strand Starting at position 491 of SEQ ID NO: 318562
gguuuauuacaaugaaauc

SEQ ID NO: 357314 - RNA, 19 nt, Artificial Sequence
  Description of Artificial Sequence: Synthetic oligonucleotide
  Antisense Strand to SEQ ID NO: 357313
gauuucauuguaauaaacc

SEQ ID NO: 357315 - RNA, 19 nt, Artificial Sequence
  Description of Artificial Sequence: Synthetic oligonucleotide
  Sense Strand Starting at position 491 of SEQ ID NO: 318872
ggcaaauaaguacacuuau

SEQ ID NO: 357316 - RNA, 19 nt, Artificial Sequence
  Description of Artificial Sequence: Synthetic oligonucleotide
  Antisense Strand to SEQ ID NO: 357315
auaaguguacuuauuugcc

SEQ ID NO: 357317 - RNA, 19 nt, Artificial Sequence
  Description of Artificial Sequence: Synthetic oligonucleotide
  Sense Strand Starting at position 491 of SEQ ID NO: 318926
uuauaucauuuggaagaag

SEQ ID NO: 357318 - RNA, 19 nt, Artificial Sequence
  Description of Artificial Sequence: Synthetic oligonucleotide
  Antisense Strand to SEQ ID NO: 357317
cuucuuccaaaugauauaa

SEQ ID NO: 357319 - RNA, 19 nt, Artificial Sequence
  Description of Artificial Sequence: Synthetic oligonucleotide
  Sense Strand Starting at position 491 of SEQ ID NO: 318935
uuggaagaaguguauaugu

SEQ ID NO: 357320 - RNA, 19 nt, Artificial Sequence
  Description of Artificial Sequence: Synthetic oligonucleotide
  Antisense Strand to SEQ ID NO: 357319
acauauacacuucuuccaa

SEQ ID NO: 357321 - RNA, 19 nt, Artificial Sequence
  Description of Artificial Sequence: Synthetic oligonucleotide
  Sense Strand Starting at position 491 of SEQ ID NO: 318937
ggaagaaguguauauguau

SEQ ID NO: 357322 - RNA, 19 nt, Artificial Sequence
  Description of Artificial Sequence: Synthetic oligonucleotide
  Antisense Strand to SEQ ID NO: 357321
auacauauacacuucuucc

SEQ ID NO: 357323 - RNA, 19 nt, Artificial Sequence
  Description of Artificial Sequence: Synthetic oligonucleotide
  Sense Strand Starting at position 491 of SEQ ID NO: 319125
augucaucccaguauacac

SEQ ID NO: 357324 - RNA, 19 nt, Artificial Sequence
  Description of Artificial Sequence: Synthetic oligonucleotide
  Antisense Strand to SEQ ID NO: 357323
guguauacugggaugacau

SEQ ID NO: 357325 - RNA, 19 nt, Artificial Sequence
  Description of Artificial Sequence: Synthetic oligonucleotide
  Sense Strand Starting at position 492 of SEQ ID NO: 315364
ucaggauaccguuaccaaa

SEQ ID NO: 357326 - RNA, 19 nt, Artificial Sequence
  Description of Artificial Sequence: Synthetic oligonucleotide
  Antisense Strand to SEQ ID NO: 357325
uuugguaacgguauccuga

SEQ ID NO: 357327 - RNA, 19 nt, Artificial Sequence
  Description of Artificial Sequence: Synthetic oligonucleotide
  Sense Strand Starting at position 492 of SEQ ID NO: 315813
uuguauugccaccgaauuu

SEQ ID NO: 357328 - RNA, 19 nt, Artificial Sequence
  Description of Artificial Sequence: Synthetic oligonucleotide
  Antisense Strand to SEQ ID NO: 357327
aaauucgguggcaauacaa

SEQ ID NO: 357329 - RNA, 19 nt, Artificial Sequence
  Description of Artificial Sequence: Synthetic oligonucleotide
  Sense Strand Starting at position 492 of SEQ ID NO: 315824
ccgaauuucucuuaaaucg

SEQ ID NO: 357330 - RNA, 19 nt, Artificial Sequence
  Description of Artificial Sequence: Synthetic oligonucleotide
  Antisense Strand to SEQ ID NO: 357329
cgauuuaagagaaauucgg

SEQ ID NO: 357331 - RNA, 19 nt, Artificial Sequence
  Description of Artificial Sequence: Synthetic oligonucleotide
  Sense Strand Starting at position 492 of SEQ ID NO: 315860
gguccuccucccugcaauu

SEQ ID NO: 357332 - RNA, 19 nt, Artificial Sequence
  Description of Artificial Sequence: Synthetic oligonucleotide
  Antisense Strand to SEQ ID NO: 357331
aauugcagggaggaggacc

SEQ ID NO: 357333 - RNA, 19 nt, Artificial Sequence
  Description of Artificial Sequence: Synthetic oligonucleotide
  Sense Strand Starting at position 492 of SEQ ID NO: 315871
cugcaauucgcauagcaac

SEQ ID NO: 357334 - RNA, 19 nt, Artificial Sequence
  Description of Artificial Sequence: Synthetic oligonucleotide
  Antisense Strand to SEQ ID NO: 357333
guugcuaugcgaauugcag

SEQ ID NO: 357335 - RNA, 19 nt, Artificial Sequence
  Description of Artificial Sequence: Synthetic oligonucleotide
  Sense Strand Starting at position 492 of SEQ ID NO: 315892
agcugauccucacugacaa

SEQ ID NO: 357336 - RNA, 19 nt, Artificial Sequence
  Description of Artificial Sequence: Synthetic oligonucleotide
  Antisense Strand to SEQ ID NO: 357335
uugucagugaggaucagcu

SEQ ID NO: 357337 - RNA, 19 nt, Artificial Sequence
  Description of Artificial Sequence: Synthetic oligonucleotide
  Sense Strand Starting at position 492 of SEQ ID NO: 315893
gcugauccucacugacaau

SEQ ID NO: 357338 - RNA, 19 nt, Artificial Sequence
  Description of Artificial Sequence: Synthetic oligonucleotide
  Antisense Strand to SEQ ID NO: 357337
auugucagugaggaucagc

SEQ ID NO: 357339 - RNA, 19 nt, Artificial Sequence
  Description of Artificial Sequence: Synthetic oligonucleotide
  Sense Strand Starting at position 492 of SEQ ID NO: 315958
ggucuuagagcuugucaaa

SEQ ID NO: 357340 - RNA, 19 nt, Artificial Sequence
  Description of Artificial Sequence: Synthetic oligonucleotide
  Antisense Strand to SEQ ID NO: 357339
uuugacaagcucuaagacc

SEQ ID NO: 357341 - RNA, 19 nt, Artificial Sequence
  Description of Artificial Sequence: Synthetic oligonucleotide
  Sense Strand Starting at position 492 of SEQ ID NO: 316104
gguuaucucugggauuuaa

SEQ ID NO: 357342 - RNA, 19 nt, Artificial Sequence
  Description of Artificial Sequence: Synthetic oligonucleotide
  Antisense Strand to SEQ ID NO: 357341
uuaaaucccagagauaacc

SEQ ID NO: 357343 - RNA, 19 nt, Artificial Sequence
  Description of Artificial Sequence: Synthetic oligonucleotide
  Sense Strand Starting at position 492 of SEQ ID NO: 316138
accggagacauuugcgcaa

SEQ ID NO: 357344 - RNA, 19 nt, Artificial Sequence
  Description of Artificial Sequence: Synthetic oligonucleotide
  Antisense Strand to SEQ ID NO: 357343
uugcgcaaaugucuccggu

SEQ ID NO: 357345 - RNA, 19 nt, Artificial Sequence
  Description of Artificial Sequence: Synthetic oligonucleotide
  Sense Strand Starting at position 492 of SEQ ID NO: 316312
gguggucgcagguaaucua

SEQ ID NO: 357346 - RNA, 19 nt, Artificial Sequence
  Description of Artificial Sequence: Synthetic oligonucleotide
  Antisense Strand to SEQ ID NO: 357345
uagauuaccugcgaccacc

SEQ ID NO: 357347 - RNA, 19 nt, Artificial Sequence
  Description of Artificial Sequence: Synthetic oligonucleotide
  Sense Strand Starting at position 492 of SEQ ID NO: 316778
acuccuggaucucuuaagu

SEQ ID NO: 357348 - RNA, 19 nt, Artificial Sequence
  Description of Artificial Sequence: Synthetic oligonucleotide
  Antisense Strand to SEQ ID NO: 357347
acuuaagagauccaggagu

SEQ ID NO: 357349 - RNA, 19 nt, Artificial Sequence
  Description of Artificial Sequence: Synthetic oligonucleotide
  Sense Strand Starting at position 492 of SEQ ID NO: 316784
ggaucucuuaaguagcaga

SEQ ID NO: 357350 - RNA, 19 nt, Artificial Sequence
  Description of Artificial Sequence: Synthetic oligonucleotide
  Antisense Strand to SEQ ID NO: 357349
ucugcuacuuaagagaucc

SEQ ID NO: 357351 - RNA, 19 nt, Artificial Sequence
  Description of Artificial Sequence: Synthetic oligonucleotide
  Sense Strand Starting at position 492 of SEQ ID NO: 317324
cugaguugaggcuggcaga

SEQ ID NO: 357352 - RNA, 19 nt, Artificial Sequence
  Description of Artificial Sequence: Synthetic oligonucleotide
  Antisense Strand to SEQ ID NO: 357351
ucugccagccucaacucag

SEQ ID NO: 357353 - RNA, 19 nt, Artificial Sequence
  Description of Artificial Sequence: Synthetic oligonucleotide
  Sense Strand Starting at position 492 of SEQ ID NO: 317525
ggcaguugucuccagauaa

SEQ ID NO: 357354 - RNA, 19 nt, Artificial Sequence
  Description of Artificial Sequence: Synthetic oligonucleotide
  Antisense Strand to SEQ ID NO: 357353
uuaucuggagacaacugcc

SEQ ID NO: 357355 - RNA, 19 nt, Artificial Sequence
  Description of Artificial Sequence: Synthetic oligonucleotide
  Sense Strand Starting at position 492 of SEQ ID NO: 317529
guugucuccagauaagagu

SEQ ID NO: 357356 - RNA, 19 nt, Artificial Sequence
  Description of Artificial Sequence: Synthetic oligonucleotide
  Antisense Strand to SEQ ID NO: 357355
acucuuaucuggagacaac

SEQ ID NO: 357357 - RNA, 19 nt, Artificial Sequence
  Description of Artificial Sequence: Synthetic oligonucleotide
  Sense Strand Starting at position 492 of SEQ ID NO: 317909
ugaaacuuguaugcuucua

SEQ ID NO: 357358 - RNA, 19 nt, Artificial Sequence
  Description of Artificial Sequence: Synthetic oligonucleotide
  Antisense Strand to SEQ ID NO: 357357
uagaagcauacaaguuuca

SEQ ID NO: 357359 - RNA, 19 nt, Artificial Sequence
  Description of Artificial Sequence: Synthetic oligonucleotide
  Sense Strand Starting at position 492 of SEQ ID NO: 318014
uugugucaacagugcuaau

SEQ ID NO: 357360 - RNA, 19 nt, Artificial Sequence
  Description of Artificial Sequence: Synthetic oligonucleotide
  Antisense Strand to SEQ ID NO: 357359
auuagcacuguugacacaa

SEQ ID NO: 357361 - RNA, 19 nt, Artificial Sequence
  Description of Artificial Sequence: Synthetic oligonucleotide
  Sense Strand Starting at position 492 of SEQ ID NO: 318024
agugcuaauuuguugucau

SEQ ID NO: 357362 - RNA, 19 nt, Artificial Sequence
  Description of Artificial Sequence: Synthetic oligonucleotide
  Antisense Strand to SEQ ID NO: 357361
augacaacaaauuagcacu

SEQ ID NO: 357363 - RNA, 19 nt, Artificial Sequence
  Description of Artificial Sequence: Synthetic oligonucleotide
  Sense Strand Starting at position 492 of SEQ ID NO: 318068
cgacuugccggucauuuaa

SEQ ID NO: 357364 - RNA, 19 nt, Artificial Sequence
  Description of Artificial Sequence: Synthetic oligonucleotide
  Antisense Strand to SEQ ID NO: 357363
uuaaaugaccggcaagucg

SEQ ID NO: 357365 - RNA, 19 nt, Artificial Sequence
  Description of Artificial Sequence: Synthetic oligonucleotide
  Sense Strand Starting at position 492 of SEQ ID NO: 318239
aaauuaguugggcguaaug

SEQ ID NO: 357366 - RNA, 19 nt, Artificial Sequence
  Description of Artificial Sequence: Synthetic oligonucleotide
  Antisense Strand to SEQ ID NO: 357365
cauuacgcccaacuaauuu

SEQ ID NO: 357367 - RNA, 19 nt, Artificial Sequence
  Description of Artificial Sequence: Synthetic oligonucleotide
  Sense Strand Starting at position 492 of SEQ ID NO: 318441
cacgcagagccuugaacaa

SEQ ID NO: 357368 - RNA, 19 nt, Artificial Sequence
  Description of Artificial Sequence: Synthetic oligonucleotide
  Antisense Strand to SEQ ID NO: 357367
uuguucaaggcucugcgug

SEQ ID NO: 357369 - RNA, 19 nt, Artificial Sequence
  Description of Artificial Sequence: Synthetic oligonucleotide
  Sense Strand Starting at position 492 of SEQ ID NO: 318493
ugucauagcaguuagagau

SEQ ID NO: 357370 - RNA, 19 nt, Artificial Sequence
  Description of Artificial Sequence: Synthetic oligonucleotide
  Antisense Strand to SEQ ID NO: 357369
aucucuaacugcuaugaca

SEQ ID NO: 357371 - RNA, 19 nt, Artificial Sequence
  Description of Artificial Sequence: Synthetic oligonucleotide
  Sense Strand Starting at position 492 of SEQ ID NO: 318533
acguuuguaucucuccaca

SEQ ID NO: 357372 - RNA, 19 nt, Artificial Sequence
  Description of Artificial Sequence: Synthetic oligonucleotide
  Antisense Strand to SEQ ID NO: 357371
uguggagagauacaaacgu

SEQ ID NO: 357373 - RNA, 19 nt, Artificial Sequence
  Description of Artificial Sequence: Synthetic oligonucleotide
  Sense Strand Starting at position 492 of SEQ ID NO: 318535
guuuguaucucuccacaau

SEQ ID NO: 357374 - RNA, 19 nt, Artificial Sequence
  Description of Artificial Sequence: Synthetic oligonucleotide
  Antisense Strand to SEQ ID NO: 357373
auuguggagagauacaaac

SEQ ID NO: 357375 - RNA, 19 nt, Artificial Sequence
  Description of Artificial Sequence: Synthetic oligonucleotide
  Sense Strand Starting at position 492 of SEQ ID NO: 318624
ggcaauucuccuuaguccu

SEQ ID NO: 357376 - RNA, 19 nt, Artificial Sequence
  Description of Artificial Sequence: Synthetic oligonucleotide
  Antisense Strand to SEQ ID NO: 357375
aggacuaaggagaauugcc

SEQ ID NO: 357377 - RNA, 19 nt, Artificial Sequence
  Description of Artificial Sequence: Synthetic oligonucleotide
  Sense Strand Starting at position 492 of SEQ ID NO: 318683
cuccauaagucaguaaaua

SEQ ID NO: 357378 - RNA, 19 nt, Artificial Sequence
  Description of Artificial Sequence: Synthetic oligonucleotide
  Antisense Strand to SEQ ID NO: 357377
uauuuacugacuuauggag

SEQ ID NO: 357379 - RNA, 19 nt, Artificial Sequence
  Description of Artificial Sequence: Synthetic oligonucleotide
  Sense Strand Starting at position 492 of SEQ ID NO: 318731
ucacuauacgaauguugua

SEQ ID NO: 357380 - RNA, 19 nt, Artificial Sequence
  Description of Artificial Sequence: Synthetic oligonucleotide
  Antisense Strand to SEQ ID NO: 357379
uacaacauucguauaguga

SEQ ID NO: 357381 - RNA, 19 nt, Artificial Sequence
  Description of Artificial Sequence: Synthetic oligonucleotide
  Sense Strand Starting at position 492 of SEQ ID NO: 318738
acgaauguuguagauuaaa

SEQ ID NO: 357382 - RNA, 19 nt, Artificial Sequence
  Description of Artificial Sequence: Synthetic oligonucleotide
  Antisense Strand to SEQ ID NO: 357381
uuuaaucuacaacauucgu

SEQ ID NO: 357383 - RNA, 19 nt, Artificial Sequence
  Description of Artificial Sequence: Synthetic oligonucleotide
  Sense Strand Starting at position 492 of SEQ ID NO: 318897
cagagcuuucgguggcaaa

SEQ ID NO: 357384 - RNA, 19 nt, Artificial Sequence
  Description of Artificial Sequence: Synthetic oligonucleotide
  Antisense Strand to SEQ ID NO: 357383
uuugccaccgaaagcucug

SEQ ID NO: 357385 - RNA, 19 nt, Artificial Sequence
  Description of Artificial Sequence: Synthetic oligonucleotide
  Sense Strand Starting at position 492 of SEQ ID NO: 318898
agagcuuucgguggcaaau

SEQ ID NO: 357386 - RNA, 19 nt, Artificial Sequence
  Description of Artificial Sequence: Synthetic oligonucleotide
  Antisense Strand to SEQ ID NO: 357385
auuugccaccgaaagcucu

SEQ ID NO: 357387 - RNA, 19 nt, Artificial Sequence
  Description of Artificial Sequence: Synthetic oligonucleotide
  Sense Strand Starting at position 492 of SEQ ID NO: 318910
ggcaaauucugaguucuua

SEQ ID NO: 357388 - RNA, 19 nt, Artificial Sequence
  Description of Artificial Sequence: Synthetic oligonucleotide
  Antisense Strand to SEQ ID NO: 357387
uaagaacucagaauuugcc

SEQ ID NO: 357389 - RNA, 19 nt, Artificial Sequence
  Description of Artificial Sequence: Synthetic oligonucleotide
  Sense Strand Starting at position 492 of SEQ ID NO: 318945
gacgguguuagugaagaca

SEQ ID NO: 357390 - RNA, 19 nt, Artificial Sequence
  Description of Artificial Sequence: Synthetic oligonucleotide
  Antisense Strand to SEQ ID NO: 357389
ugucuucacuaacaccguc

SEQ ID NO: 357391 - RNA, 19 nt, Artificial Sequence
  Description of Artificial Sequence: Synthetic oligonucleotide
  Sense Strand Starting at position 492 of SEQ ID NO: 318998
ggguccucuggugagaacu

SEQ ID NO: 357392 - RNA, 19 nt, Artificial Sequence
  Description of Artificial Sequence: Synthetic oligonucleotide
  Antisense Strand to SEQ ID NO: 357391
aguucucaccagaggaccc

SEQ ID NO: 357393 - RNA, 19 nt, Artificial Sequence
  Description of Artificial Sequence: Synthetic oligonucleotide
  Sense Strand Starting at position 492 of SEQ ID NO: 319079
uuauccuuguuagcaaagu

SEQ ID NO: 357394 - RNA, 19 nt, Artificial Sequence
  Description of Artificial Sequence: Synthetic oligonucleotide
  Antisense Strand to SEQ ID NO: 357393
acuuugcuaacaaggauaa

SEQ ID NO: 357395 - RNA, 19 nt, Artificial Sequence
  Description of Artificial Sequence: Synthetic oligonucleotide
  Sense Strand Starting at position 492 of SEQ ID NO: 319089
uagcaaagugcccaugaaa

SEQ ID NO: 357396 - RNA, 19 nt, Artificial Sequence
  Description of Artificial Sequence: Synthetic oligonucleotide
  Antisense Strand to SEQ ID NO: 357395
uuucaugggcacuuugcua

SEQ ID NO: 357397 - RNA, 19 nt, Artificial Sequence
  Description of Artificial Sequence: Synthetic oligonucleotide
  Sense Strand Starting at position 492 of SEQ ID NO: 319133
uggaauuaguuaccucaag

SEQ ID NO: 357398 - RNA, 19 nt, Artificial Sequence
  Description of Artificial Sequence: Synthetic oligonucleotide
  Antisense Strand to SEQ ID NO: 357397
cuugagguaacuaauucca

SEQ ID NO: 357399 - RNA, 19 nt, Artificial Sequence
  Description of Artificial Sequence: Synthetic oligonucleotide
  Sense Strand Starting at position 492 of SEQ ID NO: 319154
ugguuuauacacugagagu

SEQ ID NO: 357400 - RNA, 19 nt, Artificial Sequence
  Description of Artificial Sequence: Synthetic oligonucleotide
  Antisense Strand to SEQ ID NO: 357399
acucucaguguauaaacca

SEQ ID NO: 357401 - RNA, 19 nt, Artificial Sequence
  Description of Artificial Sequence: Synthetic oligonucleotide
  Sense Strand Starting at position 492 of SEQ ID NO: 319155
gguuuauacacugagaguc

SEQ ID NO: 357402 - RNA, 19 nt, Artificial Sequence
  Description of Artificial Sequence: Synthetic oligonucleotide
  Antisense Strand to SEQ ID NO: 357401
gacucucaguguauaaacc

SEQ ID NO: 357403 - RNA, 19 nt, Artificial Sequence
  Description of Artificial Sequence: Synthetic oligonucleotide
  Sense Strand Starting at position 492 of SEQ ID NO: 319195
ucaguaauugcccaagggu

SEQ ID NO: 357404 - RNA, 19 nt, Artificial Sequence
  Description of Artificial Sequence: Synthetic oligonucleotide
  Antisense Strand to SEQ ID NO: 357403
acccuugggcaauuacuga

SEQ ID NO: 357405 - RNA, 19 nt, Artificial Sequence
  Description of Artificial Sequence: Synthetic oligonucleotide
  Sense Strand Starting at position 493 of SEQ ID NO: 315306
aggcccauccaauaaguuu

SEQ ID NO: 357406 - RNA, 19 nt, Artificial Sequence
  Description of Artificial Sequence: Synthetic oligonucleotide
  Antisense Strand to SEQ ID NO: 357405
aaacuuauuggaugggccu

SEQ ID NO: 357407 - RNA, 19 nt, Artificial Sequence
  Description of Artificial Sequence: Synthetic oligonucleotide
  Sense Strand Starting at position 493 of SEQ ID NO: 315499
auggaaacuuuaucgauag

SEQ ID NO: 357408 - RNA, 19 nt, Artificial Sequence
  Description of Artificial Sequence: Synthetic oligonucleotide
  Antisense Strand to SEQ ID NO: 357407
cuaucgauaaaguuuccau

SEQ ID NO: 357409 - RNA, 19 nt, Artificial Sequence
  Description of Artificial Sequence: Synthetic oligonucleotide
  Sense Strand Starting at position 493 of SEQ ID NO: 315602
ggacuaagaucuguucuua

SEQ ID NO: 357410 - RNA, 19 nt, Artificial Sequence
  Description of Artificial Sequence: Synthetic oligonucleotide
  Antisense Strand to SEQ ID NO: 357409
uaagaacagaucuuagucc

SEQ ID NO: 357411 - RNA, 19 nt, Artificial Sequence
  Description of Artificial Sequence: Synthetic oligonucleotide
  Sense Strand Starting at position 493 of SEQ ID NO: 315629
cuucuaagcgcucugcauu

SEQ ID NO: 357412 - RNA, 19 nt, Artificial Sequence
  Description of Artificial Sequence: Synthetic oligonucleotide
  Antisense Strand to SEQ ID NO: 357411
aaugcagagcgcuuagaag

SEQ ID NO: 357413 - RNA, 19 nt, Artificial Sequence
  Description of Artificial Sequence: Synthetic oligonucleotide
  Sense Strand Starting at position 493 of SEQ ID NO: 315811
acuaguauucgugugcauu

SEQ ID NO: 357414 - RNA, 19 nt, Artificial Sequence
  Description of Artificial Sequence: Synthetic oligonucleotide
  Antisense Strand to SEQ ID NO: 357413
aaugcacacgaauacuagu

SEQ ID NO: 357415 - RNA, 19 nt, Artificial Sequence
  Description of Artificial Sequence: Synthetic oligonucleotide
  Sense Strand Starting at position 493 of SEQ ID NO: 315861
uuucuaaggcccuaggauu

SEQ ID NO: 357416 - RNA, 19 nt, Artificial Sequence
  Description of Artificial Sequence: Synthetic oligonucleotide
  Antisense Strand to SEQ ID NO: 357415
aauccuagggccuuagaaa

SEQ ID NO: 357417 - RNA, 19 nt, Artificial Sequence
  Description of Artificial Sequence: Synthetic oligonucleotide
  Sense Strand Starting at position 493 of SEQ ID NO: 315984
caaugagacguauauggua

SEQ ID NO: 357418 - RNA, 19 nt, Artificial Sequence
  Description of Artificial Sequence: Synthetic oligonucleotide
  Antisense Strand to SEQ ID NO: 357417
uaccauauacgucucauug

SEQ ID NO: 357419 - RNA, 19 nt, Artificial Sequence
  Description of Artificial Sequence: Synthetic oligonucleotide
  Sense Strand Starting at position 493 of SEQ ID NO: 316044
guagcuagaacugacgaua

SEQ ID NO: 357420 - RNA, 19 nt, Artificial Sequence
  Description of Artificial Sequence: Synthetic oligonucleotide
  Antisense Strand to SEQ ID NO: 357419
uaucgucaguucuagcuac

SEQ ID NO: 357421 - RNA, 19 nt, Artificial Sequence
  Description of Artificial Sequence: Synthetic oligonucleotide
  Sense Strand Starting at position 493 of SEQ ID NO: 316047
gcuagaacugacgauauau

SEQ ID NO: 357422 - RNA, 19 nt, Artificial Sequence
  Description of Artificial Sequence: Synthetic oligonucleotide
  Antisense Strand to SEQ ID NO: 357421
auauaucgucaguucuagc

SEQ ID NO: 357423 - RNA, 19 nt, Artificial Sequence
  Description of Artificial Sequence: Synthetic oligonucleotide
  Sense Strand Starting at position 493 of SEQ ID NO: 316058
cgauauauaccguacauga

SEQ ID NO: 357424 - RNA, 19 nt, Artificial Sequence
  Description of Artificial Sequence: Synthetic oligonucleotide
  Antisense Strand to SEQ ID NO: 357423
ucauguacgguauauaucg

SEQ ID NO: 357425 - RNA, 19 nt, Artificial Sequence
  Description of Artificial Sequence: Synthetic oligonucleotide
  Sense Strand Starting at position 493 of SEQ ID NO: 316141
ucacauuuguguuugugaa

SEQ ID NO: 357426 - RNA, 19 nt, Artificial Sequence
  Description of Artificial Sequence: Synthetic oligonucleotide
  Antisense Strand to SEQ ID NO: 357425
uucacaaacacaaauguga

SEQ ID NO: 357427 - RNA, 19 nt, Artificial Sequence
  Description of Artificial Sequence: Synthetic oligonucleotide
  Sense Strand Starting at position 493 of SEQ ID NO: 316142
cacauuuguguuugugaac

SEQ ID NO: 357428 - RNA, 19 nt, Artificial Sequence
  Description of Artificial Sequence: Synthetic oligonucleotide
  Antisense Strand to SEQ ID NO: 357427
guucacaaacacaaaugug

SEQ ID NO: 357429 - RNA, 19 nt, Artificial Sequence
  Description of Artificial Sequence: Synthetic oligonucleotide
  Sense Strand Starting at position 493 of SEQ ID NO: 316143
acauuuguguuugugaacu

SEQ ID NO: 357430 - RNA, 19 nt, Artificial Sequence
  Description of Artificial Sequence: Synthetic oligonucleotide
  Antisense Strand to SEQ ID NO: 357429
aguucacaaacacaaaugu

SEQ ID NO: 357431 - RNA, 19 nt, Artificial Sequence
  Description of Artificial Sequence: Synthetic oligonucleotide
  Sense Strand Starting at position 493 of SEQ ID NO: 316166
ucuaaauugcagugagaaa

SEQ ID NO: 357432 - RNA, 19 nt, Artificial Sequence
  Description of Artificial Sequence: Synthetic oligonucleotide
  Antisense Strand to SEQ ID NO: 357431
uuucucacugcaauuuaga

SEQ ID NO: 357433 - RNA, 19 nt, Artificial Sequence
  Description of Artificial Sequence: Synthetic oligonucleotide
  Sense Strand Starting at position 493 of SEQ ID NO: 316273
agaacuaagugcuuaauaa

SEQ ID NO: 357434 - RNA, 19 nt, Artificial Sequence
  Description of Artificial Sequence: Synthetic oligonucleotide
  Antisense Strand to SEQ ID NO: 357433
uuauuaagcacuuaguucu

SEQ ID NO: 357435 - RNA, 19 nt, Artificial Sequence
  Description of Artificial Sequence: Synthetic oligonucleotide
  Sense Strand Starting at position 493 of SEQ ID NO: 316759
aguggaaucuucuugaaau

SEQ ID NO: 357436 - RNA, 19 nt, Artificial Sequence
  Description of Artificial Sequence: Synthetic oligonucleotide
  Antisense Strand to SEQ ID NO: 357435
auuucaagaagauuccacu

SEQ ID NO: 357437 - RNA, 19 nt, Artificial Sequence
  Description of Artificial Sequence: Synthetic oligonucleotide
  Sense Strand Starting at position 493 of SEQ ID NO: 316864
caguuauaagauugaguua

SEQ ID NO: 357438 - RNA, 19 nt, Artificial Sequence
  Description of Artificial Sequence: Synthetic oligonucleotide
  Antisense Strand to SEQ ID NO: 357437
uaacucaaucuuauaacug

SEQ ID NO: 357439 - RNA, 19 nt, Artificial Sequence
  Description of Artificial Sequence: Synthetic oligonucleotide
  Sense Strand Starting at position 493 of SEQ ID NO: 316876
ugaguuacugaauaguuau

SEQ ID NO: 357440 - RNA, 19 nt, Artificial Sequence
  Description of Artificial Sequence: Synthetic oligonucleotide
  Antisense Strand to SEQ ID NO: 357439
auaacuauucaguaacuca

SEQ ID NO: 357441 - RNA, 19 nt, Artificial Sequence
  Description of Artificial Sequence: Synthetic oligonucleotide
  Sense Strand Starting at position 493 of SEQ ID NO: 316889
aguuaugcucgcucaggua

SEQ ID NO: 357442 - RNA, 19 nt, Artificial Sequence
  Description of Artificial Sequence: Synthetic oligonucleotide
  Antisense Strand to SEQ ID NO: 357441
uaccugagcgagcauaacu

SEQ ID NO: 357443 - RNA, 19 nt, Artificial Sequence
  Description of Artificial Sequence: Synthetic oligonucleotide
  Sense Strand Starting at position 493 of SEQ ID NO: 317333
uuaugaaagucuccuaaag

SEQ ID NO: 357444 - RNA, 19 nt, Artificial Sequence
  Description of Artificial Sequence: Synthetic oligonucleotide
  Antisense Strand to SEQ ID NO: 357443
cuuuaggagacuuucauaa

SEQ ID NO: 357445 - RNA, 19 nt, Artificial Sequence
  Description of Artificial Sequence: Synthetic oligonucleotide
  Sense Strand Starting at position 493 of SEQ ID NO: 317541
auauaagguguuuaagcaa

SEQ ID NO: 357446 - RNA, 19 nt, Artificial Sequence
  Description of Artificial Sequence: Synthetic oligonucleotide
  Antisense Strand to SEQ ID NO: 357445
uugcuuaaacaccuuauau

SEQ ID NO: 357447 - RNA, 19 nt, Artificial Sequence
  Description of Artificial Sequence: Synthetic oligonucleotide
  Sense Strand Starting at position 493 of SEQ ID NO: 317831
gcuuauguauuuccacuua

SEQ ID NO: 357448 - RNA, 19 nt, Artificial Sequence
  Description of Artificial Sequence: Synthetic oligonucleotide
  Antisense Strand to SEQ ID NO: 357447
uaaguggaaauacauaagc

SEQ ID NO: 357449 - RNA, 19 nt, Artificial Sequence
  Description of Artificial Sequence: Synthetic oligonucleotide
  Sense Strand Starting at position 493 of SEQ ID NO: 317929
guaauaaguauuugucugu

SEQ ID NO: 357450 - RNA, 19 nt, Artificial Sequence
  Description of Artificial Sequence: Synthetic oligonucleotide
  Antisense Strand to SEQ ID NO: 357449
acagacaaauacuuauuac

SEQ ID NO: 357451 - RNA, 19 nt, Artificial Sequence
  Description of Artificial Sequence: Synthetic oligonucleotide
  Sense Strand Starting at position 493 of SEQ ID NO: 317933
uaaguauuugucuguuuga

SEQ ID NO: 357452 - RNA, 19 nt, Artificial Sequence
  Description of Artificial Sequence: Synthetic oligonucleotide
  Antisense Strand to SEQ ID NO: 357451
ucaaacagacaaauacuua

SEQ ID NO: 357453 - RNA, 19 nt, Artificial Sequence
  Description of Artificial Sequence: Synthetic oligonucleotide
  Sense Strand Starting at position 493 of SEQ ID NO: 317934
aaguauuugucuguuugac

SEQ ID NO: 357454 - RNA, 19 nt, Artificial Sequence
  Description of Artificial Sequence: Synthetic oligonucleotide
  Antisense Strand to SEQ ID NO: 357453
gucaaacagacaaauacuu

SEQ ID NO: 357455 - RNA, 19 nt, Artificial Sequence
  Description of Artificial Sequence: Synthetic oligonucleotide
  Sense Strand Starting at position 493 of SEQ ID NO: 317951
acucaaacagccugaugaa

SEQ ID NO: 357456 - RNA, 19 nt, Artificial Sequence
  Description of Artificial Sequence: Synthetic oligonucleotide
  Antisense Strand to SEQ ID NO: 357455
uucaucaggcuguuugagu

SEQ ID NO: 357457 - RNA, 19 nt, Artificial Sequence
  Description of Artificial Sequence: Synthetic oligonucleotide
  Sense Strand Starting at position 493 of SEQ ID NO: 317960
gccugaugaauuggaauag

SEQ ID NO: 357458 - RNA, 19 nt, Artificial Sequence
  Description of Artificial Sequence: Synthetic oligonucleotide
  Antisense Strand to SEQ ID NO: 357457
cuauuccaauucaucaggc

SEQ ID NO: 357459 - RNA, 19 nt, Artificial Sequence
  Description of Artificial Sequence: Synthetic oligonucleotide
  Sense Strand Starting at position 493 of SEQ ID NO: 317992
auagauuguguguaaagga

SEQ ID NO: 357460 - RNA, 19 nt, Artificial Sequence
  Description of Artificial Sequence: Synthetic oligonucleotide
  Antisense Strand to SEQ ID NO: 357459
uccuuuacacacaaucuau

SEQ ID NO: 357461 - RNA, 19 nt, Artificial Sequence
  Description of Artificial Sequence: Synthetic oligonucleotide
  Sense Strand Starting at position 493 of SEQ ID NO: 318011
acccuacaguguguauuua

SEQ ID NO: 357462 - RNA, 19 nt, Artificial Sequence
  Description of Artificial Sequence: Synthetic oligonucleotide
  Antisense Strand to SEQ ID NO: 357461
uaaauacacacuguagggu

SEQ ID NO: 357463 - RNA, 19 nt, Artificial Sequence
  Description of Artificial Sequence: Synthetic oligonucleotide
  Sense Strand Starting at position 493 of SEQ ID NO: 318015
uacaguguguauuuaaguu

SEQ ID NO: 357464 - RNA, 19 nt, Artificial Sequence
  Description of Artificial Sequence: Synthetic oligonucleotide
  Antisense Strand to SEQ ID NO: 357463
aacuuaaauacacacugua

SEQ ID NO: 357465 - RNA, 19 nt, Artificial Sequence
  Description of Artificial Sequence: Synthetic oligonucleotide
  Sense Strand Starting at position 493 of SEQ ID NO: 318061
ggcagaacuaacugaaugu

SEQ ID NO: 357466 - RNA, 19 nt, Artificial Sequence
  Description of Artificial Sequence: Synthetic oligonucleotide
  Antisense Strand to SEQ ID NO: 357465
acauucaguuaguucugcc

SEQ ID NO: 357467 - RNA, 19 nt, Artificial Sequence
  Description of Artificial Sequence: Synthetic oligonucleotide
  Sense Strand Starting at position 493 of SEQ ID NO: 318068
cuaacugaauguuugaaag

SEQ ID NO: 357468 - RNA, 19 nt, Artificial Sequence
  Description of Artificial Sequence: Synthetic oligonucleotide
  Antisense Strand to SEQ ID NO: 357467
cuuucaaacauucaguuag

SEQ ID NO: 357469 - RNA, 19 nt, Artificial Sequence
  Description of Artificial Sequence: Synthetic oligonucleotide
  Sense Strand Starting at position 493 of SEQ ID NO: 318356
agaaguaucuagcuaggga

SEQ ID NO: 357470 - RNA, 19 nt, Artificial Sequence
  Description of Artificial Sequence: Synthetic oligonucleotide
  Antisense Strand to SEQ ID NO: 357469
ucccuagcuagauacuucu

SEQ ID NO: 357471 - RNA, 19 nt, Artificial Sequence
  Description of Artificial Sequence: Synthetic oligonucleotide
  Sense Strand Starting at position 493 of SEQ ID NO: 318412
uguaaagaugcuuaugaug

SEQ ID NO: 357472 - RNA, 19 nt, Artificial Sequence
  Description of Artificial Sequence: Synthetic oligonucleotide
  Antisense Strand to SEQ ID NO: 357471
caucauaagcaucuuuaca

SEQ ID NO: 357473 - RNA, 19 nt, Artificial Sequence
  Description of Artificial Sequence: Synthetic oligonucleotide
  Sense Strand Starting at position 493 of SEQ ID NO: 318686
gugagaagugaucaggguu

SEQ ID NO: 357474 - RNA, 19 nt, Artificial Sequence
  Description of Artificial Sequence: Synthetic oligonucleotide
  Antisense Strand to SEQ ID NO: 357473
aacccugaucacuucucac

SEQ ID NO: 357475 - RNA, 19 nt, Artificial Sequence
  Description of Artificial Sequence: Synthetic oligonucleotide
  Sense Strand Starting at position 493 of SEQ ID NO: 318689
agaagugaucaggguuuac

SEQ ID NO: 357476 - RNA, 19 nt, Artificial Sequence
  Description of Artificial Sequence: Synthetic oligonucleotide
  Antisense Strand to SEQ ID NO: 357475
guaaacccugaucacuucu

SEQ ID NO: 357477 - RNA, 19 nt, Artificial Sequence
  Description of Artificial Sequence: Synthetic oligonucleotide
  Sense Strand Starting at position 493 of SEQ ID NO: 318744
uuuagagaugaguggaguu

SEQ ID NO: 357478 - RNA, 19 nt, Artificial Sequence
  Description of Artificial Sequence: Synthetic oligonucleotide
  Antisense Strand to SEQ ID NO: 357477
aacuccacucaucucuaaa

SEQ ID NO: 357479 - RNA, 19 nt, Artificial Sequence
  Description of Artificial Sequence: Synthetic oligonucleotide
  Sense Strand Starting at position 493 of SEQ ID NO: 318767
gcaaacaguggugaaugau

SEQ ID NO: 357480 - RNA, 19 nt, Artificial Sequence
  Description of Artificial Sequence: Synthetic oligonucleotide
  Antisense Strand to SEQ ID NO: 357479
aucauucaccacuguuugc

SEQ ID NO: 357481 - RNA, 19 nt, Artificial Sequence
  Description of Artificial Sequence: Synthetic oligonucleotide
  Sense Strand Starting at position 493 of SEQ ID NO: 318787
uuaccauggcauggagaaa

SEQ ID NO: 357482 - RNA, 19 nt, Artificial Sequence
  Description of Artificial Sequence: Synthetic oligonucleotide
  Antisense Strand to SEQ ID NO: 357481
uuucuccaugccaugguaa

SEQ ID NO: 357483 - RNA, 19 nt, Artificial Sequence
  Description of Artificial Sequence: Synthetic oligonucleotide
  Sense Strand Starting at position 493 of SEQ ID NO: 318962
uggauugccaaaugugaaa

SEQ ID NO: 357484 - RNA, 19 nt, Artificial Sequence
  Description of Artificial Sequence: Synthetic oligonucleotide
  Antisense Strand to SEQ ID NO: 357483
uuucacauuuggcaaucca

SEQ ID NO: 357485 - RNA, 19 nt, Artificial Sequence
  Description of Artificial Sequence: Synthetic oligonucleotide
  Sense Strand Starting at position 494 of SEQ ID NO: 315587
gagggcauuucggacaacu

SEQ ID NO: 357486 - RNA, 19 nt, Artificial Sequence
  Description of Artificial Sequence: Synthetic oligonucleotide
  Antisense Strand to SEQ ID NO: 357485
aguuguccgaaaugcccuc

SEQ ID NO: 357487 - RNA, 19 nt, Artificial Sequence
  Description of Artificial Sequence: Synthetic oligonucleotide
  Sense Strand Starting at position 494 of SEQ ID NO: 315704
uguaaugccacuugagguu

SEQ ID NO: 357488 - RNA, 19 nt, Artificial Sequence
  Description of Artificial Sequence: Synthetic oligonucleotide
  Antisense Strand to SEQ ID NO: 357487
aaccucaaguggcauuaca

SEQ ID NO: 357489 - RNA, 19 nt, Artificial Sequence
  Description of Artificial Sequence: Synthetic oligonucleotide
  Sense Strand Starting at position 494 of SEQ ID NO: 315710
gccacuugagguugucaaa

SEQ ID NO: 357490 - RNA, 19 nt, Artificial Sequence
  Description of Artificial Sequence: Synthetic oligonucleotide
  Antisense Strand to SEQ ID NO: 357489
uuugacaaccucaaguggc

SEQ ID NO: 357491 - RNA, 19 nt, Artificial Sequence
  Description of Artificial Sequence: Synthetic oligonucleotide
  Sense Strand Starting at position 494 of SEQ ID NO: 315748
uggccauggucuuuaggaa

SEQ ID NO: 357492 - RNA, 19 nt, Artificial Sequence
  Description of Artificial Sequence: Synthetic oligonucleotide
  Antisense Strand to SEQ ID NO: 357491
uuccuaaagaccauggcca

SEQ ID NO: 357493 - RNA, 19 nt, Artificial Sequence
  Description of Artificial Sequence: Synthetic oligonucleotide
  Sense Strand Starting at position 494 of SEQ ID NO: 315749
ggccauggucuuuaggaaa

SEQ ID NO: 357494 - RNA, 19 nt, Artificial Sequence
  Description of Artificial Sequence: Synthetic oligonucleotide
  Antisense Strand to SEQ ID NO: 357493
uuuccuaaagaccauggcc

SEQ ID NO: 357495 - RNA, 19 nt, Artificial Sequence
  Description of Artificial Sequence: Synthetic oligonucleotide
  Sense Strand Starting at position 494 of SEQ ID NO: 315763
ggaaacguugcaugaagaa

SEQ ID NO: 357496 - RNA, 19 nt, Artificial Sequence
  Description of Artificial Sequence: Synthetic oligonucleotide
  Antisense Strand to SEQ ID NO: 357495
uucuucaugcaacguuucc

SEQ ID NO: 357497 - RNA, 19 nt, Artificial Sequence
  Description of Artificial Sequence: Synthetic oligonucleotide
  Sense Strand Starting at position 494 of SEQ ID NO: 315876
caggaagaaagucgaguua

SEQ ID NO: 357498 - RNA, 19 nt, Artificial Sequence
  Description of Artificial Sequence: Synthetic oligonucleotide
  Antisense Strand to SEQ ID NO: 357497
uaacucgacuuucuuccug

SEQ ID NO: 357499 - RNA, 19 nt, Artificial Sequence
  Description of Artificial Sequence: Synthetic oligonucleotide
  Sense Strand Starting at position 494 of SEQ ID NO: 315887
ucgaguuaggaggacgaau

SEQ ID NO: 357500 - RNA, 19 nt, Artificial Sequence
  Description of Artificial Sequence: Synthetic oligonucleotide
  Antisense Strand to SEQ ID NO: 357499
auucguccuccuaacucga

SEQ ID NO: 357501 - RNA, 19 nt, Artificial Sequence
  Description of Artificial Sequence: Synthetic oligonucleotide
  Sense Strand Starting at position 494 of SEQ ID NO: 315967
guacaauccaagugucugu

SEQ ID NO: 357502 - RNA, 19 nt, Artificial Sequence
  Description of Artificial Sequence: Synthetic oligonucleotide
  Antisense Strand to SEQ ID NO: 357501
acagacacuuggauuguac

SEQ ID NO: 357503 - RNA, 19 nt, Artificial Sequence
  Description of Artificial Sequence: Synthetic oligonucleotide
  Sense Strand Starting at position 494 of SEQ ID NO: 315978
gugucuguccacuucgagu

SEQ ID NO: 357504 - RNA, 19 nt, Artificial Sequence
  Description of Artificial Sequence: Synthetic oligonucleotide
  Antisense Strand to SEQ ID NO: 357503
acucgaaguggacagacac

SEQ ID NO: 357505 - RNA, 19 nt, Artificial Sequence
  Description of Artificial Sequence: Synthetic oligonucleotide
  Sense Strand Starting at position 494 of SEQ ID NO: 317921
acaggaauaucuggaauga

SEQ ID NO: 357506 - RNA, 19 nt, Artificial Sequence
  Description of Artificial Sequence: Synthetic oligonucleotide
  Antisense Strand to SEQ ID NO: 357505
ucauuccagauauuccugu

SEQ ID NO: 357507 - RNA, 19 nt, Artificial Sequence
  Description of Artificial Sequence: Synthetic oligonucleotide
  Sense Strand Starting at position 494 of SEQ ID NO: 317947
gcccgaaagcugggaguaa

SEQ ID NO: 357508 - RNA, 19 nt, Artificial Sequence
  Description of Artificial Sequence: Synthetic oligonucleotide
  Antisense Strand to SEQ ID NO: 357507
uuacucccagcuuucgggc

SEQ ID NO: 357509 - RNA, 19 nt, Artificial Sequence
  Description of Artificial Sequence: Synthetic oligonucleotide
  Sense Strand Starting at position 494 of SEQ ID NO: 317958
gggaguaauuuacgauagu

SEQ ID NO: 357510 - RNA, 19 nt, Artificial Sequence
  Description of Artificial Sequence: Synthetic oligonucleotide
  Antisense Strand to SEQ ID NO: 357509
acuaucguaaauuacuccc

SEQ ID NO: 357511 - RNA, 19 nt, Artificial Sequence
  Description of Artificial Sequence: Synthetic oligonucleotide
  Sense Strand Starting at position 494 of SEQ ID NO: 317959
ggaguaauuuacgauagua

SEQ ID NO: 357512 - RNA, 19 nt, Artificial Sequence
  Description of Artificial Sequence: Synthetic oligonucleotide
  Antisense Strand to SEQ ID NO: 357511
uacuaucguaaauuacucc

SEQ ID NO: 357513 - RNA, 19 nt, Artificial Sequence
  Description of Artificial Sequence: Synthetic oligonucleotide
  Sense Strand Starting at position 494 of SEQ ID NO: 317973
uaguaauagucaucguaau

SEQ ID NO: 357514 - RNA, 19 nt, Artificial Sequence
  Description of Artificial Sequence: Synthetic oligonucleotide
  Antisense Strand to SEQ ID NO: 357513
auuacgaugacuauuacua

SEQ ID NO: 357515 - RNA, 19 nt, Artificial Sequence
  Description of Artificial Sequence: Synthetic oligonucleotide
  Sense Strand Starting at position 494 of SEQ ID NO: 317974
aguaauagucaucguaauc

SEQ ID NO: 357516 - RNA, 19 nt, Artificial Sequence
  Description of Artificial Sequence: Synthetic oligonucleotide
  Antisense Strand to SEQ ID NO: 357515
gauuacgaugacuauuacu

SEQ ID NO: 357517 - RNA, 19 nt, Artificial Sequence
  Description of Artificial Sequence: Synthetic oligonucleotide
  Sense Strand Starting at position 494 of SEQ ID NO: 318066
ccucaacaguaaucacgaa

SEQ ID NO: 357518 - RNA, 19 nt, Artificial Sequence
  Description of Artificial Sequence: Synthetic oligonucleotide
  Antisense Strand to SEQ ID NO: 357517
uucgugauuacuguugagg

SEQ ID NO: 357519 - RNA, 19 nt, Artificial Sequence
  Description of Artificial Sequence: Synthetic oligonucleotide
  Sense Strand Starting at position 494 of SEQ ID NO: 318145
aguugagagccgggaagua

SEQ ID NO: 357520 - RNA, 19 nt, Artificial Sequence
  Description of Artificial Sequence: Synthetic oligonucleotide
  Antisense Strand to SEQ ID NO: 357519
uacuucccggcucucaacu

SEQ ID NO: 357521 - RNA, 19 nt, Artificial Sequence
  Description of Artificial Sequence: Synthetic oligonucleotide
  Sense Strand Starting at position 494 of SEQ ID NO: 318178
caaauuucgcuuggucuga

SEQ ID NO: 357522 - RNA, 19 nt, Artificial Sequence
  Description of Artificial Sequence: Synthetic oligonucleotide
  Antisense Strand to SEQ ID NO: 357521
ucagaccaagcgaaauuug

SEQ ID NO: 357523 - RNA, 19 nt, Artificial Sequence
  Description of Artificial Sequence: Synthetic oligonucleotide
  Sense Strand Starting at position 494 of SEQ ID NO: 318179
aaauuucgcuuggucugau

SEQ ID NO: 357524 - RNA, 19 nt, Artificial Sequence
  Description of Artificial Sequence: Synthetic oligonucleotide
  Antisense Strand to SEQ ID NO: 357523
aucagaccaagcgaaauuu

SEQ ID NO: 357525 - RNA, 19 nt, Artificial Sequence
  Description of Artificial Sequence: Synthetic oligonucleotide
  Sense Strand Starting at position 494 of SEQ ID NO: 318180
aauuucgcuuggucugauu

SEQ ID NO: 357526 - RNA, 19 nt, Artificial Sequence
  Description of Artificial Sequence: Synthetic oligonucleotide
  Antisense Strand to SEQ ID NO: 357525
aaucagaccaagcgaaauu

SEQ ID NO: 357527 - RNA, 19 nt, Artificial Sequence
  Description of Artificial Sequence: Synthetic oligonucleotide
  Sense Strand Starting at position 494 of SEQ ID NO: 318249
auccgugaucccggugaag

SEQ ID NO: 357528 - RNA, 19 nt, Artificial Sequence
  Description of Artificial Sequence: Synthetic oligonucleotide
  Antisense Strand to SEQ ID NO: 357527
cuucaccgggaucacggau

SEQ ID NO: 357529 - RNA, 19 nt, Artificial Sequence
  Description of Artificial Sequence: Synthetic oligonucleotide
  Sense Strand Starting at position 494 of SEQ ID NO: 318251
ccgugaucccggugaagga

SEQ ID NO: 357530 - RNA, 19 nt, Artificial Sequence
  Description of Artificial Sequence: Synthetic oligonucleotide
  Antisense Strand to SEQ ID NO: 357529
uccuucaccgggaucacgg

SEQ ID NO: 357531 - RNA, 19 nt, Artificial Sequence
  Description of Artificial Sequence: Synthetic oligonucleotide
  Sense Strand Starting at position 494 of SEQ ID NO: 318301
aucuuuaagugacuuggaa

SEQ ID NO: 357532 - RNA, 19 nt, Artificial Sequence
  Description of Artificial Sequence: Synthetic oligonucleotide
  Antisense Strand to SEQ ID NO: 357531
uuccaagucacuuaaagau

SEQ ID NO: 357533 - RNA, 19 nt, Artificial Sequence
  Description of Artificial Sequence: Synthetic oligonucleotide
  Sense Strand Starting at position 494 of SEQ ID NO: 318385
cuguuaugauucucagaca

SEQ ID NO: 357534 - RNA, 19 nt, Artificial Sequence
  Description of Artificial Sequence: Synthetic oligonucleotide
  Antisense Strand to SEQ ID NO: 357533
ugucugagaaucauaacag

SEQ ID NO: 357535 - RNA, 19 nt, Artificial Sequence
  Description of Artificial Sequence: Synthetic oligonucleotide
  Sense Strand Starting at position 494 of SEQ ID NO: 318522
gcccucuagucauuuccuu

SEQ ID NO: 357536 - RNA, 19 nt, Artificial Sequence
  Description of Artificial Sequence: Synthetic oligonucleotide
  Antisense Strand to SEQ ID NO: 357535
aaggaaaugacuagagggc

SEQ ID NO: 357537 - RNA, 19 nt, Artificial Sequence
  Description of Artificial Sequence: Synthetic oligonucleotide
  Sense Strand Starting at position 494 of SEQ ID NO: 318627
aagggaucaugccugguuu

SEQ ID NO: 357538 - RNA, 19 nt, Artificial Sequence
  Description of Artificial Sequence: Synthetic oligonucleotide
  Antisense Strand to SEQ ID NO: 357537
aaaccaggcaugaucccuu

SEQ ID NO: 357539 - RNA, 19 nt, Artificial Sequence
  Description of Artificial Sequence: Synthetic oligonucleotide
  Sense Strand Starting at position 494 of SEQ ID NO: 318664
cagugcuuagcaugguaaa

SEQ ID NO: 357540 - RNA, 19 nt, Artificial Sequence
  Description of Artificial Sequence: Synthetic oligonucleotide
  Antisense Strand to SEQ ID NO: 357539
uuuaccaugcuaagcacug

SEQ ID NO: 357541 - RNA, 19 nt, Artificial Sequence
  Description of Artificial Sequence: Synthetic oligonucleotide
  Sense Strand Starting at position 494 of SEQ ID NO: 318665
agugcuuagcaugguaaag

SEQ ID NO: 357542 - RNA, 19 nt, Artificial Sequence
  Description of Artificial Sequence: Synthetic oligonucleotide
  Antisense Strand to SEQ ID NO: 357541
cuuuaccaugcuaagcacu

SEQ ID NO: 357543 - RNA, 19 nt, Artificial Sequence
  Description of Artificial Sequence: Synthetic oligonucleotide
  Sense Strand Starting at position 494 of SEQ ID NO: 318697
acgcauuguuucucaccca

SEQ ID NO: 357544 - RNA, 19 nt, Artificial Sequence
  Description of Artificial Sequence: Synthetic oligonucleotide
  Antisense Strand to SEQ ID NO: 357543
ugggugagaaacaaugcgu

SEQ ID NO: 357545 - RNA, 19 nt, Artificial Sequence
  Description of Artificial Sequence: Synthetic oligonucleotide
  Sense Strand Starting at position 494 of SEQ ID NO: 318746
auuauuuguugccuacuga

SEQ ID NO: 357546 - RNA, 19 nt, Artificial Sequence
  Description of Artificial Sequence: Synthetic oligonucleotide
  Antisense Strand to SEQ ID NO: 357545
ucaguaggcaacaaauaau

SEQ ID NO: 357547 - RNA, 19 nt, Artificial Sequence
  Description of Artificial Sequence: Synthetic oligonucleotide
  Sense Strand Starting at position 494 of SEQ ID NO: 318822
ggccuuaaugaucaggcua

SEQ ID NO: 357548 - RNA, 19 nt, Artificial Sequence
  Description of Artificial Sequence: Synthetic oligonucleotide
  Antisense Strand to SEQ ID NO: 357547
uagccugaucauuaaggcc

SEQ ID NO: 357549 - RNA, 19 nt, Artificial Sequence
  Description of Artificial Sequence: Synthetic oligonucleotide
  Sense Strand Starting at position 494 of SEQ ID NO: 318869
ucaggagcccuugaaaucu

SEQ ID NO: 357550 - RNA, 19 nt, Artificial Sequence
  Description of Artificial Sequence: Synthetic oligonucleotide
  Antisense Strand to SEQ ID NO: 357549
agauuucaagggcuccuga

SEQ ID NO: 357551 - RNA, 19 nt, Artificial Sequence
  Description of Artificial Sequence: Synthetic oligonucleotide
  Sense Strand Starting at position 494 of SEQ ID NO: 318910
cuaggugugcuccaggaac

SEQ ID NO: 357552 - RNA, 19 nt, Artificial Sequence
  Description of Artificial Sequence: Synthetic oligonucleotide
  Antisense Strand to SEQ ID NO: 357551
guuccuggagcacaccuag

SEQ ID NO: 357553 - RNA, 19 nt, Artificial Sequence
  Description of Artificial Sequence: Synthetic oligonucleotide
  Sense Strand Starting at position 494 of SEQ ID NO: 318912
aggugugcuccaggaacau

SEQ ID NO: 357554 - RNA, 19 nt, Artificial Sequence
  Description of Artificial Sequence: Synthetic oligonucleotide
  Antisense Strand to SEQ ID NO: 357553
auguuccuggagcacaccu

SEQ ID NO: 357555 - RNA, 19 nt, Artificial Sequence
  Description of Artificial Sequence: Synthetic oligonucleotide
  Sense Strand Starting at position 494 of SEQ ID NO: 318940
agcaguguugaggagggau

SEQ ID NO: 357556 - RNA, 19 nt, Artificial Sequence
  Description of Artificial Sequence: Synthetic oligonucleotide
  Antisense Strand to SEQ ID NO: 357555
aucccuccucaacacugcu

SEQ ID NO: 357557 - RNA, 19 nt, Artificial Sequence
  Description of Artificial Sequence: Synthetic oligonucleotide
  Sense Strand Starting at position 494 of SEQ ID NO: 318942
caguguugaggagggauga

SEQ ID NO: 357558 - RNA, 19 nt, Artificial Sequence
  Description of Artificial Sequence: Synthetic oligonucleotide
  Antisense Strand to SEQ ID NO: 357557
ucaucccuccucaacacug

SEQ ID NO: 357559 - RNA, 19 nt, Artificial Sequence
  Description of Artificial Sequence: Synthetic oligonucleotide
  Sense Strand Starting at position 494 of SEQ ID NO: 318982
aguccagagccucaaacuu

SEQ ID NO: 357560 - RNA, 19 nt, Artificial Sequence
  Description of Artificial Sequence: Synthetic oligonucleotide
  Antisense Strand to SEQ ID NO: 357559
aaguuugaggcucuggacu

SEQ ID NO: 357561 - RNA, 19 nt, Artificial Sequence
  Description of Artificial Sequence: Synthetic oligonucleotide
  Sense Strand Starting at position 494 of SEQ ID NO: 319000
ucacuaugugcagaaauca

SEQ ID NO: 357562 - RNA, 19 nt, Artificial Sequence
  Description of Artificial Sequence: Synthetic oligonucleotide
  Antisense Strand to SEQ ID NO: 357561
ugauuucugcacauaguga

SEQ ID NO: 357563 - RNA, 19 nt, Artificial Sequence
  Description of Artificial Sequence: Synthetic oligonucleotide
  Sense Strand Starting at position 494 of SEQ ID NO: 319123
ugcugaccuuacuuugaau

SEQ ID NO: 357564 - RNA, 19 nt, Artificial Sequence
  Description of Artificial Sequence: Synthetic oligonucleotide
  Antisense Strand to SEQ ID NO: 357563
auucaaaguaaggucagca

SEQ ID NO: 357565 - RNA, 19 nt, Artificial Sequence
  Description of Artificial Sequence: Synthetic oligonucleotide
  Sense Strand Starting at position 495 of SEQ ID NO: 317393
cuaccuuucucagugguga

SEQ ID NO: 357566 - RNA, 19 nt, Artificial Sequence
  Description of Artificial Sequence: Synthetic oligonucleotide
  Antisense Strand to SEQ ID NO: 357565
ucaccacugagaaagguag

SEQ ID NO: 357567 - RNA, 19 nt, Artificial Sequence
  Description of Artificial Sequence: Synthetic oligonucleotide
  Sense Strand Starting at position 495 of SEQ ID NO: 317395
accuuucucaguggugaga

SEQ ID NO: 357568 - RNA, 19 nt, Artificial Sequence
  Description of Artificial Sequence: Synthetic oligonucleotide
  Antisense Strand to SEQ ID NO: 357567
ucucaccacugagaaaggu

SEQ ID NO: 357569 - RNA, 19 nt, Artificial Sequence
  Description of Artificial Sequence: Synthetic oligonucleotide
  Sense Strand Starting at position 495 of SEQ ID NO: 317397
cuuucucaguggugagaag

SEQ ID NO: 357570 - RNA, 19 nt, Artificial Sequence
  Description of Artificial Sequence: Synthetic oligonucleotide
  Antisense Strand to SEQ ID NO: 357569
cuucucaccacugagaaag

SEQ ID NO: 357571 - RNA, 19 nt, Artificial Sequence
  Description of Artificial Sequence: Synthetic oligonucleotide
  Sense Strand Starting at position 495 of SEQ ID NO: 317447
ucaucaaugggaugagcau

SEQ ID NO: 357572 - RNA, 19 nt, Artificial Sequence
  Description of Artificial Sequence: Synthetic oligonucleotide
  Antisense Strand to SEQ ID NO: 357571
augcucaucccauugauga

SEQ ID NO: 357573 - RNA, 19 nt, Artificial Sequence
  Description of Artificial Sequence: Synthetic oligonucleotide
  Sense Strand Starting at position 495 of SEQ ID NO: 317552
gagggcuaguucucucaga

SEQ ID NO: 357574 - RNA, 19 nt, Artificial Sequence
  Description of Artificial Sequence: Synthetic oligonucleotide
  Antisense Strand to SEQ ID NO: 357573
ucugagagaacuagcccuc

SEQ ID NO: 357575 - RNA, 19 nt, Artificial Sequence
  Description of Artificial Sequence: Synthetic oligonucleotide
  Sense Strand Starting at position 495 of SEQ ID NO: 317553
agggcuaguucucucagaa

SEQ ID NO: 357576 - RNA, 19 nt, Artificial Sequence
  Description of Artificial Sequence: Synthetic oligonucleotide
  Antisense Strand to SEQ ID NO: 357575
uucugagagaacuagcccu

SEQ ID NO: 357577 - RNA, 19 nt, Artificial Sequence
  Description of Artificial Sequence: Synthetic oligonucleotide
  Sense Strand Starting at position 495 of SEQ ID NO: 317557
cuaguucucucagaaagaa

SEQ ID NO: 357578 - RNA, 19 nt, Artificial Sequence
  Description of Artificial Sequence: Synthetic oligonucleotide
  Antisense Strand to SEQ ID NO: 357577
uucuuucugagagaacuag

SEQ ID NO: 357579 - RNA, 19 nt, Artificial Sequence
  Description of Artificial Sequence: Synthetic oligonucleotide
  Sense Strand Starting at position 495 of SEQ ID NO: 317649
gagaauaggugcuccauga

SEQ ID NO: 357580 - RNA, 19 nt, Artificial Sequence
  Description of Artificial Sequence: Synthetic oligonucleotide
  Antisense Strand to SEQ ID NO: 357579
ucauggagcaccuauucuc

SEQ ID NO: 357581 - RNA, 19 nt, Artificial Sequence
  Description of Artificial Sequence: Synthetic oligonucleotide
  Sense Strand Starting at position 495 of SEQ ID NO: 317653
auaggugcuccaugauagu

SEQ ID NO: 357582 - RNA, 19 nt, Artificial Sequence
  Description of Artificial Sequence: Synthetic oligonucleotide
  Antisense Strand to SEQ ID NO: 357581
acuaucauggagcaccuau

SEQ ID NO: 357583 - RNA, 19 nt, Artificial Sequence
  Description of Artificial Sequence: Synthetic oligonucleotide
  Sense Strand Starting at position 495 of SEQ ID NO: 317662
ccaugauagugugugagau

SEQ ID NO: 357584 - RNA, 19 nt, Artificial Sequence
  Description of Artificial Sequence: Synthetic oligonucleotide
  Antisense Strand to SEQ ID NO: 357583
aucucacacacuaucaugg

SEQ ID NO: 357585 - RNA, 19 nt, Artificial Sequence
  Description of Artificial Sequence: Synthetic oligonucleotide
  Sense Strand Starting at position 495 of SEQ ID NO: 317663
caugauagugugugagaug

SEQ ID NO: 357586 - RNA, 19 nt, Artificial Sequence
  Description of Artificial Sequence: Synthetic oligonucleotide
  Antisense Strand to SEQ ID NO: 357585
caucucacacacuaucaug

SEQ ID NO: 357587 - RNA, 19 nt, Artificial Sequence
  Description of Artificial Sequence: Synthetic oligonucleotide
  Sense Strand Starting at position 495 of SEQ ID NO: 317666
gauagugugugagaugagu

SEQ ID NO: 357588 - RNA, 19 nt, Artificial Sequence
  Description of Artificial Sequence: Synthetic oligonucleotide
  Antisense Strand to SEQ ID NO: 357587
acucaucucacacacuauc

SEQ ID NO: 357589 - RNA, 19 nt, Artificial Sequence
  Description of Artificial Sequence: Synthetic oligonucleotide
  Sense Strand Starting at position 495 of SEQ ID NO: 317668
uagugugugagaugaguga

SEQ ID NO: 357590 - RNA, 19 nt, Artificial Sequence
  Description of Artificial Sequence: Synthetic oligonucleotide
  Antisense Strand to SEQ ID NO: 357589
ucacucaucucacacacua

SEQ ID NO: 357591 - RNA, 19 nt, Artificial Sequence
  Description of Artificial Sequence: Synthetic oligonucleotide
  Sense Strand Starting at position 495 of SEQ ID NO: 317702
ggcagaugcuguuugguuu

SEQ ID NO: 357592 - RNA, 19 nt, Artificial Sequence
  Description of Artificial Sequence: Synthetic oligonucleotide
  Antisense Strand to SEQ ID NO: 357591
aaaccaaacagcaucugcc

SEQ ID NO: 357593 - RNA, 19 nt, Artificial Sequence
  Description of Artificial Sequence: Synthetic oligonucleotide
  Sense Strand Starting at position 495 of SEQ ID NO: 318044
uuuccugauuaggcacaaa

SEQ ID NO: 357594 - RNA, 19 nt, Artificial Sequence
  Description of Artificial Sequence: Synthetic oligonucleotide
  Antisense Strand to SEQ ID NO: 357593
uuugugccuaaucaggaaa

SEQ ID NO: 357595 - RNA, 19 nt, Artificial Sequence
  Description of Artificial Sequence: Synthetic oligonucleotide
  Sense Strand Starting at position 495 of SEQ ID NO: 318067
agucuugacuaaucaguga

SEQ ID NO: 357596 - RNA, 19 nt, Artificial Sequence
  Description of Artificial Sequence: Synthetic oligonucleotide
  Antisense Strand to SEQ ID NO: 357595
ucacugauuagucaagacu

SEQ ID NO: 357597 - RNA, 19 nt, Artificial Sequence
  Description of Artificial Sequence: Synthetic oligonucleotide
  Sense Strand Starting at position 495 of SEQ ID NO: 318070
cuugacuaaucagugaaug

SEQ ID NO: 357598 - RNA, 19 nt, Artificial Sequence
  Description of Artificial Sequence: Synthetic oligonucleotide
  Antisense Strand to SEQ ID NO: 357597
cauucacugauuagucaag

SEQ ID NO: 357599 - RNA, 19 nt, Artificial Sequence
  Description of Artificial Sequence: Synthetic oligonucleotide
  Sense Strand Starting at position 495 of SEQ ID NO: 318071
uugacuaaucagugaaugu

SEQ ID NO: 357600 - RNA, 19 nt, Artificial Sequence
  Description of Artificial Sequence: Synthetic oligonucleotide
  Antisense Strand to SEQ ID NO: 357599
acauucacugauuagucaa

SEQ ID NO: 357601 - RNA, 19 nt, Artificial Sequence
  Description of Artificial Sequence: Synthetic oligonucleotide
  Sense Strand Starting at position 495 of SEQ ID NO: 318119
cauggaaagccauguaacu

SEQ ID NO: 357602 - RNA, 19 nt, Artificial Sequence
  Description of Artificial Sequence: Synthetic oligonucleotide
  Antisense Strand to SEQ ID NO: 357601
aguuacauggcuuuccaug

SEQ ID NO: 357603 - RNA, 19 nt, Artificial Sequence
  Description of Artificial Sequence: Synthetic oligonucleotide
  Sense Strand Starting at position 495 of SEQ ID NO: 318187
cccuaucuauagucugaua

SEQ ID NO: 357604 - RNA, 19 nt, Artificial Sequence
  Description of Artificial Sequence: Synthetic oligonucleotide
  Antisense Strand to SEQ ID NO: 357603
uaucagacuauagauaggg

SEQ ID NO: 357605 - RNA, 19 nt, Artificial Sequence
  Description of Artificial Sequence: Synthetic oligonucleotide
  Sense Strand Starting at position 495 of SEQ ID NO: 318192
ucuauagucugauagcuug

SEQ ID NO: 357606 - RNA, 19 nt, Artificial Sequence
  Description of Artificial Sequence: Synthetic oligonucleotide
  Antisense Strand to SEQ ID NO: 357605
caagcuaucagacuauaga

SEQ ID NO: 357607 - RNA, 19 nt, Artificial Sequence
  Description of Artificial Sequence: Synthetic oligonucleotide
  Sense Strand Starting at position 495 of SEQ ID NO: 318199
ucugauagcuugcauuugu

SEQ ID NO: 357608 - RNA, 19 nt, Artificial Sequence
  Description of Artificial Sequence: Synthetic oligonucleotide
  Antisense Strand to SEQ ID NO: 357607
acaaaugcaagcuaucaga

SEQ ID NO: 357609 - RNA, 19 nt, Artificial Sequence
  Description of Artificial Sequence: Synthetic oligonucleotide
  Sense Strand Starting at position 495 of SEQ ID NO: 318383
uguccaucucaggaugauu

SEQ ID NO: 357610 - RNA, 19 nt, Artificial Sequence
  Description of Artificial Sequence: Synthetic oligonucleotide
  Antisense Strand to SEQ ID NO: 357609
aaucauccugagauggaca

SEQ ID NO: 357611 - RNA, 19 nt, Artificial Sequence
  Description of Artificial Sequence: Synthetic oligonucleotide
  Sense Strand Starting at position 495 of SEQ ID NO: 318430
cgcugaggucucuggaauc

SEQ ID NO: 357612 - RNA, 19 nt, Artificial Sequence
  Description of Artificial Sequence: Synthetic oligonucleotide
  Antisense Strand to SEQ ID NO: 357611
gauuccagagaccucagcg

SEQ ID NO: 357613 - RNA, 19 nt, Artificial Sequence
  Description of Artificial Sequence: Synthetic oligonucleotide
  Sense Strand Starting at position 495 of SEQ ID NO: 318441
cuggaauccugccauuucu

SEQ ID NO: 357614 - RNA, 19 nt, Artificial Sequence
  Description of Artificial Sequence: Synthetic oligonucleotide
  Antisense Strand to SEQ ID NO: 357613
agaaauggcaggauuccag

SEQ ID NO: 357615 - RNA, 19 nt, Artificial Sequence
  Description of Artificial Sequence: Synthetic oligonucleotide
  Sense Strand Starting at position 495 of SEQ ID NO: 318569
cugccuguuugcccucaga

SEQ ID NO: 357616 - RNA, 19 nt, Artificial Sequence
  Description of Artificial Sequence: Synthetic oligonucleotide
  Antisense Strand to SEQ ID NO: 357615
ucugagggcaaacaggcag

SEQ ID NO: 357617 - RNA, 19 nt, Artificial Sequence
  Description of Artificial Sequence: Synthetic oligonucleotide
  Sense Strand Starting at position 495 of SEQ ID NO: 318654
aacugacuuuggguauguu

SEQ ID NO: 357618 - RNA, 19 nt, Artificial Sequence
  Description of Artificial Sequence: Synthetic oligonucleotide
  Antisense Strand to SEQ ID NO: 357617
aacauacccaaagucaguu

SEQ ID NO: 357619 - RNA, 19 nt, Artificial Sequence
  Description of Artificial Sequence: Synthetic oligonucleotide
  Sense Strand Starting at position 495 of SEQ ID NO: 318678
aaugaaaguuaccagcaga

SEQ ID NO: 357620 - RNA, 19 nt, Artificial Sequence
  Description of Artificial Sequence: Synthetic oligonucleotide
  Antisense Strand to SEQ ID NO: 357619
ucugcugguaacuuucauu

SEQ ID NO: 357621 - RNA, 19 nt, Artificial Sequence
  Description of Artificial Sequence: Synthetic oligonucleotide
  Sense Strand Starting at position 495 of SEQ ID NO: 318846
ucucuccagucuuaagagu

SEQ ID NO: 357622 - RNA, 19 nt, Artificial Sequence
  Description of Artificial Sequence: Synthetic oligonucleotide
  Antisense Strand to SEQ ID NO: 357621
acucuuaagacuggagaga

SEQ ID NO: 357623 - RNA, 19 nt, Artificial Sequence
  Description of Artificial Sequence: Synthetic oligonucleotide
  Sense Strand Starting at position 495 of SEQ ID NO: 318852
cagucuuaagaguaguagu

SEQ ID NO: 357624 - RNA, 19 nt, Artificial Sequence
  Description of Artificial Sequence: Synthetic oligonucleotide
  Antisense Strand to SEQ ID NO: 357623
acuacuacucuuaagacug

SEQ ID NO: 357625 - RNA, 19 nt, Artificial Sequence
  Description of Artificial Sequence: Synthetic oligonucleotide
  Sense Strand Starting at position 495 of SEQ ID NO: 318881
uguugcucaucuuuggauu

SEQ ID NO: 357626 - RNA, 19 nt, Artificial Sequence
  Description of Artificial Sequence: Synthetic oligonucleotide
  Antisense Strand to SEQ ID NO: 357625
aauccaaagaugagcaaca

SEQ ID NO: 357627 - RNA, 19 nt, Artificial Sequence
  Description of Artificial Sequence: Synthetic oligonucleotide
  Sense Strand Starting at position 495 of SEQ ID NO: 318892
uuuggauugccucaucauc

SEQ ID NO: 357628 - RNA, 19 nt, Artificial Sequence
  Description of Artificial Sequence: Synthetic oligonucleotide
  Antisense Strand to SEQ ID NO: 357627
gaugaugaggcaauccaaa

SEQ ID NO: 357629 - RNA, 19 nt, Artificial Sequence
  Description of Artificial Sequence: Synthetic oligonucleotide
  Sense Strand Starting at position 495 of SEQ ID NO: 318957
cugaaauaccuaggguaau

SEQ ID NO: 357630 - RNA, 19 nt, Artificial Sequence
  Description of Artificial Sequence: Synthetic oligonucleotide
  Antisense Strand to SEQ ID NO: 357629
auuacccuagguauuucag

SEQ ID NO: 357631 - RNA, 19 nt, Artificial Sequence
  Description of Artificial Sequence: Synthetic oligonucleotide
  Sense Strand Starting at position 495 of SEQ ID NO: 318958
ugaaauaccuaggguaauu

SEQ ID NO: 357632 - RNA, 19 nt, Artificial Sequence
  Description of Artificial Sequence: Synthetic oligonucleotide
  Antisense Strand to SEQ ID NO: 357631
aauuacccuagguauuuca

SEQ ID NO: 357633 - RNA, 19 nt, Artificial Sequence
  Description of Artificial Sequence: Synthetic oligonucleotide
  Sense Strand Starting at position 495 of SEQ ID NO: 318982
uuugcugacugguuguuaa

SEQ ID NO: 357634 - RNA, 19 nt, Artificial Sequence
  Description of Artificial Sequence: Synthetic oligonucleotide
  Antisense Strand to SEQ ID NO: 357633
uuaacaaccagucagcaaa

SEQ ID NO: 357635 - RNA, 19 nt, Artificial Sequence
  Description of Artificial Sequence: Synthetic oligonucleotide
  Sense Strand Starting at position 495 of SEQ ID NO: 318986
cugacugguuguuaacuga

SEQ ID NO: 357636 - RNA, 19 nt, Artificial Sequence
  Description of Artificial Sequence: Synthetic oligonucleotide
  Antisense Strand to SEQ ID NO: 357635
ucaguuaacaaccagucag

SEQ ID NO: 357637 - RNA, 19 nt, Artificial Sequence
  Description of Artificial Sequence: Synthetic oligonucleotide
  Sense Strand Starting at position 495 of SEQ ID NO: 318990
cugguuguuaacugacgua

SEQ ID NO: 357638 - RNA, 19 nt, Artificial Sequence
  Description of Artificial Sequence: Synthetic oligonucleotide
  Antisense Strand to SEQ ID NO: 357637
uacgucaguuaacaaccag

SEQ ID NO: 357639 - RNA, 19 nt, Artificial Sequence
  Description of Artificial Sequence: Synthetic oligonucleotide
  Sense Strand Starting at position 495 of SEQ ID NO: 319002
ugacguauacucuauaguc

SEQ ID NO: 357640 - RNA, 19 nt, Artificial Sequence
  Description of Artificial Sequence: Synthetic oligonucleotide
  Antisense Strand to SEQ ID NO: 357639
gacuauagaguauacguca

SEQ ID NO: 357641 - RNA, 19 nt, Artificial Sequence
  Description of Artificial Sequence: Synthetic oligonucleotide
  Sense Strand Starting at position 495 of SEQ ID NO: 319004
acguauacucuauagucca

SEQ ID NO: 357642 - RNA, 19 nt, Artificial Sequence
  Description of Artificial Sequence: Synthetic oligonucleotide
  Antisense Strand to SEQ ID NO: 357641
uggacuauagaguauacgu

SEQ ID NO: 357643 - RNA, 19 nt, Artificial Sequence
  Description of Artificial Sequence: Synthetic oligonucleotide
  Sense Strand Starting at position 495 of SEQ ID NO: 319114
cagaauagaugagaauaga

SEQ ID NO: 357644 - RNA, 19 nt, Artificial Sequence
  Description of Artificial Sequence: Synthetic oligonucleotide
  Antisense Strand to SEQ ID NO: 357643
ucuauucucaucuauucug

SEQ ID NO: 357645 - RNA, 19 nt, Artificial Sequence
  Description of Artificial Sequence: Synthetic oligonucleotide
  Sense Strand Starting at position 496 of SEQ ID NO: 315259
cagagacuugccuaaguca

SEQ ID NO: 357646 - RNA, 19 nt, Artificial Sequence
  Description of Artificial Sequence: Synthetic oligonucleotide
  Antisense Strand to SEQ ID NO: 357645
ugacuuaggcaagucucug

SEQ ID NO: 357647 - RNA, 19 nt, Artificial Sequence
  Description of Artificial Sequence: Synthetic oligonucleotide
  Sense Strand Starting at position 496 of SEQ ID NO: 315474
uuuauugggcuuugaggga

SEQ ID NO: 357648 - RNA, 19 nt, Artificial Sequence
  Description of Artificial Sequence: Synthetic oligonucleotide
  Antisense Strand to SEQ ID NO: 357647
ucccucaaagcccaauaaa

SEQ ID NO: 357649 - RNA, 19 nt, Artificial Sequence
  Description of Artificial Sequence: Synthetic oligonucleotide
  Sense Strand Starting at position 496 of SEQ ID NO: 315598
agagcuaagcgugaaauau

SEQ ID NO: 357650 - RNA, 19 nt, Artificial Sequence
  Description of Artificial Sequence: Synthetic oligonucleotide
  Antisense Strand to SEQ ID NO: 357649
auauuucacgcuuagcucu

SEQ ID NO: 357651 - RNA, 19 nt, Artificial Sequence
  Description of Artificial Sequence: Synthetic oligonucleotide
  Sense Strand Starting at position 496 of SEQ ID NO: 315626
gugguucuuaaagagaguu

SEQ ID NO: 357652 - RNA, 19 nt, Artificial Sequence
  Description of Artificial Sequence: Synthetic oligonucleotide
  Antisense Strand to SEQ ID NO: 357651
aacucucuuuaagaaccac

SEQ ID NO: 357653 - RNA, 19 nt, Artificial Sequence
  Description of Artificial Sequence: Synthetic oligonucleotide
  Sense Strand Starting at position 496 of SEQ ID NO: 315642
guuaaaugccaagauauua

SEQ ID NO: 357654 - RNA, 19 nt, Artificial Sequence
  Description of Artificial Sequence: Synthetic oligonucleotide
  Antisense Strand to SEQ ID NO: 357653
uaauaucuuggcauuuaac

SEQ ID NO: 357655 - RNA, 19 nt, Artificial Sequence
  Description of Artificial Sequence: Synthetic oligonucleotide
  Sense Strand Starting at position 496 of SEQ ID NO: 315974
ugagauguugcugaaggau

SEQ ID NO: 357656 - RNA, 19 nt, Artificial Sequence
  Description of Artificial Sequence: Synthetic oligonucleotide
  Antisense Strand to SEQ ID NO: 357655
auccuucagcaacaucuca

SEQ ID NO: 357657 - RNA, 19 nt, Artificial Sequence
  Description of Artificial Sequence: Synthetic oligonucleotide
  Sense Strand Starting at position 496 of SEQ ID NO: 315977
gauguugcugaaggauuaa

SEQ ID NO: 357658 - RNA, 19 nt, Artificial Sequence
  Description of Artificial Sequence: Synthetic oligonucleotide
  Antisense Strand to SEQ ID NO: 357657
uuaauccuucagcaacauc

SEQ ID NO: 357659 - RNA, 19 nt, Artificial Sequence
  Description of Artificial Sequence: Synthetic oligonucleotide
  Sense Strand Starting at position 496 of SEQ ID NO: 316027
ggagacaguuaaucucaau

SEQ ID NO: 357660 - RNA, 19 nt, Artificial Sequence
  Description of Artificial Sequence: Synthetic oligonucleotide
  Antisense Strand to SEQ ID NO: 357659
auugagauuaacugucucc

SEQ ID NO: 357661 - RNA, 19 nt, Artificial Sequence
  Description of Artificial Sequence: Synthetic oligonucleotide
  Sense Strand Starting at position 496 of SEQ ID NO: 316109
gaaccagauuuguugcugu

SEQ ID NO: 357662 - RNA, 19 nt, Artificial Sequence
  Description of Artificial Sequence: Synthetic oligonucleotide
  Antisense Strand to SEQ ID NO: 357661
acagcaacaaaucugguuc

SEQ ID NO: 357663 - RNA, 19 nt, Artificial Sequence
  Description of Artificial Sequence: Synthetic oligonucleotide
  Sense Strand Starting at position 496 of SEQ ID NO: 316133
uugcuaguaaauuggagaa

SEQ ID NO: 357664 - RNA, 19 nt, Artificial Sequence
  Description of Artificial Sequence: Synthetic oligonucleotide
  Antisense Strand to SEQ ID NO: 357663
uucuccaauuuacuagcaa

SEQ ID NO: 357665 - RNA, 19 nt, Artificial Sequence
  Description of Artificial Sequence: Synthetic oligonucleotide
  Sense Strand Starting at position 496 of SEQ ID NO: 316382
acaguuugaauguggaaca

SEQ ID NO: 357666 - RNA, 19 nt, Artificial Sequence
  Description of Artificial Sequence: Synthetic oligonucleotide
  Antisense Strand to SEQ ID NO: 357665
uguuccacauucaaacugu

SEQ ID NO: 357667 - RNA, 19 nt, Artificial Sequence
  Description of Artificial Sequence: Synthetic oligonucleotide
  Sense Strand Starting at position 496 of SEQ ID NO: 316474
augacuucuccagggauca

SEQ ID NO: 357668 - RNA, 19 nt, Artificial Sequence
  Description of Artificial Sequence: Synthetic oligonucleotide
  Antisense Strand to SEQ ID NO: 357667
ugaucccuggagaagucau

SEQ ID NO: 357669 - RNA, 19 nt, Artificial Sequence
  Description of Artificial Sequence: Synthetic oligonucleotide
  Sense Strand Starting at position 496 of SEQ ID NO: 316475
ugacuucuccagggaucag

SEQ ID NO: 357670 - RNA, 19 nt, Artificial Sequence
  Description of Artificial Sequence: Synthetic oligonucleotide
  Antisense Strand to SEQ ID NO: 357669
cugaucccuggagaaguca

SEQ ID NO: 357671 - RNA, 19 nt, Artificial Sequence
  Description of Artificial Sequence: Synthetic oligonucleotide
  Sense Strand Starting at position 496 of SEQ ID NO: 316510
uucuuugugguacaaugaa

SEQ ID NO: 357672 - RNA, 19 nt, Artificial Sequence
  Description of Artificial Sequence: Synthetic oligonucleotide
  Antisense Strand to SEQ ID NO: 357671
uucauuguaccacaaagaa

SEQ ID NO: 357673 - RNA, 19 nt, Artificial Sequence
  Description of Artificial Sequence: Synthetic oligonucleotide
  Sense Strand Starting at position 496 of SEQ ID NO: 316649
gggaaacaauuauaagaga

SEQ ID NO: 357674 - RNA, 19 nt, Artificial Sequence
  Description of Artificial Sequence: Synthetic oligonucleotide
  Antisense Strand to SEQ ID NO: 357673
ucucuuauaauuguuuccc

SEQ ID NO: 357675 - RNA, 19 nt, Artificial Sequence
  Description of Artificial Sequence: Synthetic oligonucleotide
  Sense Strand Starting at position 496 of SEQ ID NO: 316880
cucagaguuaagcagaagu

SEQ ID NO: 357676 - RNA, 19 nt, Artificial Sequence
  Description of Artificial Sequence: Synthetic oligonucleotide
  Antisense Strand to SEQ ID NO: 357675
acuucugcuuaacucugag

SEQ ID NO: 357677 - RNA, 19 nt, Artificial Sequence
  Description of Artificial Sequence: Synthetic oligonucleotide
  Sense Strand Starting at position 496 of SEQ ID NO: 316882
cagaguuaagcagaaguau

SEQ ID NO: 357678 - RNA, 19 nt, Artificial Sequence
  Description of Artificial Sequence: Synthetic oligonucleotide
  Antisense Strand to SEQ ID NO: 357677
auacuucugcuuaacucug

SEQ ID NO: 357679 - RNA, 19 nt, Artificial Sequence
  Description of Artificial Sequence: Synthetic oligonucleotide
  Sense Strand Starting at position 496 of SEQ ID NO: 316891
gcagaaguauaauuacagu

SEQ ID NO: 357680 - RNA, 19 nt, Artificial Sequence
  Description of Artificial Sequence: Synthetic oligonucleotide
  Antisense Strand to SEQ ID NO: 357679
acuguaauuauacuucugc

SEQ ID NO: 357681 - RNA, 19 nt, Artificial Sequence
  Description of Artificial Sequence: Synthetic oligonucleotide
  Sense Strand Starting at position 496 of SEQ ID NO: 317032
guuucuugucucuaauuaa

SEQ ID NO: 357682 - RNA, 19 nt, Artificial Sequence
  Description of Artificial Sequence: Synthetic oligonucleotide
  Antisense Strand to SEQ ID NO: 357681
uuaauuagagacaagaaac

SEQ ID NO: 357683 - RNA, 19 nt, Artificial Sequence
  Description of Artificial Sequence: Synthetic oligonucleotide
  Sense Strand Starting at position 496 of SEQ ID NO: 317253
guaggugagauuugucgac

SEQ ID NO: 357684 - RNA, 19 nt, Artificial Sequence
  Description of Artificial Sequence: Synthetic oligonucleotide
  Antisense Strand to SEQ ID NO: 357683
gucgacaaaucucaccuac

SEQ ID NO: 357685 - RNA, 19 nt, Artificial Sequence
  Description of Artificial Sequence: Synthetic oligonucleotide
  Sense Strand Starting at position 496 of SEQ ID NO: 317296
gcaggaaucagauggugau

SEQ ID NO: 357686 - RNA, 19 nt, Artificial Sequence
  Description of Artificial Sequence: Synthetic oligonucleotide
  Antisense Strand to SEQ ID NO: 357685
aucaccaucugauuccugc

SEQ ID NO: 357687 - RNA, 19 nt, Artificial Sequence
  Description of Artificial Sequence: Synthetic oligonucleotide
  Sense Strand Starting at position 496 of SEQ ID NO: 317353
ccagaagucugcuuaagga

SEQ ID NO: 357688 - RNA, 19 nt, Artificial Sequence
  Description of Artificial Sequence: Synthetic oligonucleotide
  Antisense Strand to SEQ ID NO: 357687
uccuuaagcagacuucugg

SEQ ID NO: 357689 - RNA, 19 nt, Artificial Sequence
  Description of Artificial Sequence: Synthetic oligonucleotide
  Sense Strand Starting at position 496 of SEQ ID NO: 317599
ggaaacuuguagucuuaug

SEQ ID NO: 357690 - RNA, 19 nt, Artificial Sequence
  Description of Artificial Sequence: Synthetic oligonucleotide
  Antisense Strand to SEQ ID NO: 357689
cauaagacuacaaguuucc

SEQ ID NO: 357691 - RNA, 19 nt, Artificial Sequence
  Description of Artificial Sequence: Synthetic oligonucleotide
  Sense Strand Starting at position 496 of SEQ ID NO: 317737
uuugaaugcugaccuuuaa

SEQ ID NO: 357692 - RNA, 19 nt, Artificial Sequence
  Description of Artificial Sequence: Synthetic oligonucleotide
  Antisense Strand to SEQ ID NO: 357691
uuaaaggucagcauucaaa

SEQ ID NO: 357693 - RNA, 19 nt, Artificial Sequence
  Description of Artificial Sequence: Synthetic oligonucleotide
  Sense Strand Starting at position 496 of SEQ ID NO: 318261
ccuguuauuguggaugaag

SEQ ID NO: 357694 - RNA, 19 nt, Artificial Sequence
  Description of Artificial Sequence: Synthetic oligonucleotide
  Antisense Strand to SEQ ID NO: 357693
cuucauccacaauaacagg

SEQ ID NO: 357695 - RNA, 19 nt, Artificial Sequence
  Description of Artificial Sequence: Synthetic oligonucleotide
  Sense Strand Starting at position 496 of SEQ ID NO: 318263
uguuauuguggaugaagau

SEQ ID NO: 357696 - RNA, 19 nt, Artificial Sequence
  Description of Artificial Sequence: Synthetic oligonucleotide
  Antisense Strand to SEQ ID NO: 357695
aucuucauccacaauaaca

SEQ ID NO: 357697 - RNA, 19 nt, Artificial Sequence
  Description of Artificial Sequence: Synthetic oligonucleotide
  Sense Strand Starting at position 496 of SEQ ID NO: 318332
auagguauuacuuaguguu

SEQ ID NO: 357698 - RNA, 19 nt, Artificial Sequence
  Description of Artificial Sequence: Synthetic oligonucleotide
  Antisense Strand to SEQ ID NO: 357697
aacacuaaguaauaccuau

SEQ ID NO: 357699 - RNA, 19 nt, Artificial Sequence
  Description of Artificial Sequence: Synthetic oligonucleotide
  Sense Strand Starting at position 496 of SEQ ID NO: 318365
ggaaauaauguguacguac

SEQ ID NO: 357700 - RNA, 19 nt, Artificial Sequence
  Description of Artificial Sequence: Synthetic oligonucleotide
  Antisense Strand to SEQ ID NO: 357699
guacguacacauuauuucc

SEQ ID NO: 357701 - RNA, 19 nt, Artificial Sequence
  Description of Artificial Sequence: Synthetic oligonucleotide
  Sense Strand Starting at position 496 of SEQ ID NO: 318415
acaaauggguguuuaacuu

SEQ ID NO: 357702 - RNA, 19 nt, Artificial Sequence
  Description of Artificial Sequence: Synthetic oligonucleotide
  Antisense Strand to SEQ ID NO: 357701
aaguuaaacacccauuugu

SEQ ID NO: 357703 - RNA, 19 nt, Artificial Sequence
  Description of Artificial Sequence: Synthetic oligonucleotide
  Sense Strand Starting at position 496 of SEQ ID NO: 318794
uuaugcuaugcagacuuua

SEQ ID NO: 357704 - RNA, 19 nt, Artificial Sequence
  Description of Artificial Sequence: Synthetic oligonucleotide
  Antisense Strand to SEQ ID NO: 357703
uaaagucugcauagcauaa

SEQ ID NO: 357705 - RNA, 19 nt, Artificial Sequence
  Description of Artificial Sequence: Synthetic oligonucleotide
  Sense Strand Starting at position 496 of SEQ ID NO: 318804
cagacuuuaguuugggaga

SEQ ID NO: 357706 - RNA, 19 nt, Artificial Sequence
  Description of Artificial Sequence: Synthetic oligonucleotide
  Antisense Strand to SEQ ID NO: 357705
ucucccaaacuaaagucug

SEQ ID NO: 357707 - RNA, 19 nt, Artificial Sequence
  Description of Artificial Sequence: Synthetic oligonucleotide
  Sense Strand Starting at position 496 of SEQ ID NO: 318818
ggagauuuguccuuguguu

SEQ ID NO: 357708 - RNA, 19 nt, Artificial Sequence
  Description of Artificial Sequence: Synthetic oligonucleotide
  Antisense Strand to SEQ ID NO: 357707
aacacaaggacaaaucucc

SEQ ID NO: 357709 - RNA, 19 nt, Artificial Sequence
  Description of Artificial Sequence: Synthetic oligonucleotide
  Sense Strand Starting at position 496 of SEQ ID NO: 318819
gagauuuguccuuguguug

SEQ ID NO: 357710 - RNA, 19 nt, Artificial Sequence
  Description of Artificial Sequence: Synthetic oligonucleotide
  Antisense Strand to SEQ ID NO: 357709
caacacaaggacaaaucuc

SEQ ID NO: 357711 - RNA, 19 nt, Artificial Sequence
  Description of Artificial Sequence: Synthetic oligonucleotide
  Sense Strand Starting at position 496 of SEQ ID NO: 318879
ugagguacugcucauaauu

SEQ ID NO: 357712 - RNA, 19 nt, Artificial Sequence
  Description of Artificial Sequence: Synthetic oligonucleotide
  Antisense Strand to SEQ ID NO: 357711
aauuaugagcaguaccuca

SEQ ID NO: 357713 - RNA, 19 nt, Artificial Sequence
  Description of Artificial Sequence: Synthetic oligonucleotide
  Sense Strand Starting at position 496 of SEQ ID NO: 318940
gcaucagucaaagggagaa

SEQ ID NO: 357714 - RNA, 19 nt, Artificial Sequence
  Description of Artificial Sequence: Synthetic oligonucleotide
  Antisense Strand to SEQ ID NO: 357713
uucucccuuugacugaugc

SEQ ID NO: 357715 - RNA, 19 nt, Artificial Sequence
  Description of Artificial Sequence: Synthetic oligonucleotide
  Sense Strand Starting at position 496 of SEQ ID NO: 318981
aaguauguugugcaaagaa

SEQ ID NO: 357716 - RNA, 19 nt, Artificial Sequence
  Description of Artificial Sequence: Synthetic oligonucleotide
  Antisense Strand to SEQ ID NO: 357715
uucuuugcacaacauacuu

SEQ ID NO: 357717 - RNA, 19 nt, Artificial Sequence
  Description of Artificial Sequence: Synthetic oligonucleotide
  Sense Strand Starting at position 496 of SEQ ID NO: 319007
gcaaguacugaggauuauc

SEQ ID NO: 357718 - RNA, 19 nt, Artificial Sequence
  Description of Artificial Sequence: Synthetic oligonucleotide
  Antisense Strand to SEQ ID NO: 357717
gauaauccucaguacuugc

SEQ ID NO: 357719 - RNA, 19 nt, Artificial Sequence
  Description of Artificial Sequence: Synthetic oligonucleotide
  Sense Strand Starting at position 496 of SEQ ID NO: 319061
uagggagcuuauucugaca

SEQ ID NO: 357720 - RNA, 19 nt, Artificial Sequence
  Description of Artificial Sequence: Synthetic oligonucleotide
  Antisense Strand to SEQ ID NO: 357719
ugucagaauaagcucccua

SEQ ID NO: 357721 - RNA, 19 nt, Artificial Sequence
  Description of Artificial Sequence: Synthetic oligonucleotide
  Sense Strand Starting at position 496 of SEQ ID NO: 319136
ccuacugugaaaggguuau

SEQ ID NO: 357722 - RNA, 19 nt, Artificial Sequence
  Description of Artificial Sequence: Synthetic oligonucleotide
  Antisense Strand to SEQ ID NO: 357721
auaacccuuucacaguagg

SEQ ID NO: 357723 - RNA, 19 nt, Artificial Sequence
  Description of Artificial Sequence: Synthetic oligonucleotide
  Sense Strand Starting at position 496 of SEQ ID NO: 319142
gugaaaggguuaucauagg

SEQ ID NO: 357724 - RNA, 19 nt, Artificial Sequence
  Description of Artificial Sequence: Synthetic oligonucleotide
  Antisense Strand to SEQ ID NO: 357723
ccuaugauaacccuuucac

SEQ ID NO: 357725 - RNA, 19 nt, Artificial Sequence
  Description of Artificial Sequence: Synthetic oligonucleotide
  Sense Strand Starting at position 497 of SEQ ID NO: 315313
uugcaugagcuuccgugua

SEQ ID NO: 357726 - RNA, 19 nt, Artificial Sequence
  Description of Artificial Sequence: Synthetic oligonucleotide
  Antisense Strand to SEQ ID NO: 357725
uacacggaagcucaugcaa

SEQ ID NO: 357727 - RNA, 19 nt, Artificial Sequence
  Description of Artificial Sequence: Synthetic oligonucleotide
  Sense Strand Starting at position 497 of SEQ ID NO: 315335
ugggauuguguggaccuaa

SEQ ID NO: 357728 - RNA, 19 nt, Artificial Sequence
  Description of Artificial Sequence: Synthetic oligonucleotide
  Antisense Strand to SEQ ID NO: 357727
uuagguccacacaauccca

SEQ ID NO: 357729 - RNA, 19 nt, Artificial Sequence
  Description of Artificial Sequence: Synthetic oligonucleotide
  Sense Strand Starting at position 497 of SEQ ID NO: 315363
aggccaugacuccaaaugu

SEQ ID NO: 357730 - RNA, 19 nt, Artificial Sequence
  Description of Artificial Sequence: Synthetic oligonucleotide
  Antisense Strand to SEQ ID NO: 357729
acauuuggagucauggccu

SEQ ID NO: 357731 - RNA, 19 nt, Artificial Sequence
  Description of Artificial Sequence: Synthetic oligonucleotide
  Sense Strand Starting at position 497 of SEQ ID NO: 315410
gucauuucagcgugcagca

SEQ ID NO: 357732 - RNA, 19 nt, Artificial Sequence
  Description of Artificial Sequence: Synthetic oligonucleotide
  Antisense Strand to SEQ ID NO: 357731
ugcugcacgcugaaaugac

SEQ ID NO: 357733 - RNA, 19 nt, Artificial Sequence
  Description of Artificial Sequence: Synthetic oligonucleotide
  Sense Strand Starting at position 497 of SEQ ID NO: 315423
gcagcaaguagucagaagu

SEQ ID NO: 357734 - RNA, 19 nt, Artificial Sequence
  Description of Artificial Sequence: Synthetic oligonucleotide
  Antisense Strand to SEQ ID NO: 357733
acuucugacuacuugcugc

SEQ ID NO: 357735 - RNA, 19 nt, Artificial Sequence
  Description of Artificial Sequence: Synthetic oligonucleotide
  Sense Strand Starting at position 497 of SEQ ID NO: 315434
ucagaagucuaucauuuga

SEQ ID NO: 357736 - RNA, 19 nt, Artificial Sequence
  Description of Artificial Sequence: Synthetic oligonucleotide
  Antisense Strand to SEQ ID NO: 357735
ucaaaugauagacuucuga

SEQ ID NO: 357737 - RNA, 19 nt, Artificial Sequence
  Description of Artificial Sequence: Synthetic oligonucleotide
  Sense Strand Starting at position 497 of SEQ ID NO: 315439
agucuaucauuugaguuag

SEQ ID NO: 357738 - RNA, 19 nt, Artificial Sequence
  Description of Artificial Sequence: Synthetic oligonucleotide
  Antisense Strand to SEQ ID NO: 357737
cuaacucaaaugauagacu

SEQ ID NO: 357739 - RNA, 19 nt, Artificial Sequence
  Description of Artificial Sequence: Synthetic oligonucleotide
  Sense Strand Starting at position 497 of SEQ ID NO: 315488
aaguaaggacuuuguugua

SEQ ID NO: 357740 - RNA, 19 nt, Artificial Sequence
  Description of Artificial Sequence: Synthetic oligonucleotide
  Antisense Strand to SEQ ID NO: 357739
uacaacaaaguccuuacuu

SEQ ID NO: 357741 - RNA, 19 nt, Artificial Sequence
  Description of Artificial Sequence: Synthetic oligonucleotide
  Sense Strand Starting at position 497 of SEQ ID NO: 315500
uguuguaacugggucuuga

SEQ ID NO: 357742 - RNA, 19 nt, Artificial Sequence
  Description of Artificial Sequence: Synthetic oligonucleotide
  Antisense Strand to SEQ ID NO: 357741
ucaagacccaguuacaaca

SEQ ID NO: 357743 - RNA, 19 nt, Artificial Sequence
  Description of Artificial Sequence: Synthetic oligonucleotide
  Sense Strand Starting at position 497 of SEQ ID NO: 315530
gcauguucuggugaaggca

SEQ ID NO: 357744 - RNA, 19 nt, Artificial Sequence
  Description of Artificial Sequence: Synthetic oligonucleotide
  Antisense Strand to SEQ ID NO: 357743
ugccuucaccagaacaugc

SEQ ID NO: 357745 - RNA, 19 nt, Artificial Sequence
  Description of Artificial Sequence: Synthetic oligonucleotide
  Sense Strand Starting at position 497 of SEQ ID NO: 315667
ccacuaugacaaugagguu

SEQ ID NO: 357746 - RNA, 19 nt, Artificial Sequence
  Description of Artificial Sequence: Synthetic oligonucleotide
  Antisense Strand to SEQ ID NO: 357745
aaccucauugucauagugg

SEQ ID NO: 357747 - RNA, 19 nt, Artificial Sequence
  Description of Artificial Sequence: Synthetic oligonucleotide
  Sense Strand Starting at position 497 of SEQ ID NO: 316128
cacccaucucgagguggua

SEQ ID NO: 357748 - RNA, 19 nt, Artificial Sequence
  Description of Artificial Sequence: Synthetic oligonucleotide
  Antisense Strand to SEQ ID NO: 357747
uaccaccucgagaugggug

SEQ ID NO: 357749 - RNA, 19 nt, Artificial Sequence
  Description of Artificial Sequence: Synthetic oligonucleotide
  Sense Strand Starting at position 497 of SEQ ID NO: 316130
cccaucucgaggugguauu

SEQ ID NO: 357750 - RNA, 19 nt, Artificial Sequence
  Description of Artificial Sequence: Synthetic oligonucleotide
  Antisense Strand to SEQ ID NO: 357749
aauaccaccucgagauggg

SEQ ID NO: 357751 - RNA, 19 nt, Artificial Sequence
  Description of Artificial Sequence: Synthetic oligonucleotide
  Sense Strand Starting at position 497 of SEQ ID NO: 316616
ggcguucuccuacaggaga

SEQ ID NO: 357752 - RNA, 19 nt, Artificial Sequence
  Description of Artificial Sequence: Synthetic oligonucleotide
  Antisense Strand to SEQ ID NO: 357751
ucuccuguaggagaacgcc

SEQ ID NO: 357753 - RNA, 19 nt, Artificial Sequence
  Description of Artificial Sequence: Synthetic oligonucleotide
  Sense Strand Starting at position 497 of SEQ ID NO: 316618
cguucuccuacaggagaga

SEQ ID NO: 357754 - RNA, 19 nt, Artificial Sequence
  Description of Artificial Sequence: Synthetic oligonucleotide
  Antisense Strand to SEQ ID NO: 357753
ucucuccuguaggagaacg

SEQ ID NO: 357755 - RNA, 19 nt, Artificial Sequence
  Description of Artificial Sequence: Synthetic oligonucleotide
  Sense Strand Starting at position 497 of SEQ ID NO: 316663
ggaggagagaaacguucua

SEQ ID NO: 357756 - RNA, 19 nt, Artificial Sequence
  Description of Artificial Sequence: Synthetic oligonucleotide
  Antisense Strand to SEQ ID NO: 357755
uagaacguuucucuccucc

SEQ ID NO: 357757 - RNA, 19 nt, Artificial Sequence
  Description of Artificial Sequence: Synthetic oligonucleotide
  Sense Strand Starting at position 497 of SEQ ID NO: 316701
uucuaugagucaccgggau

SEQ ID NO: 357758 - RNA, 19 nt, Artificial Sequence
  Description of Artificial Sequence: Synthetic oligonucleotide
  Antisense Strand to SEQ ID NO: 357757
aucccggugacucauagaa

SEQ ID NO: 357759 - RNA, 19 nt, Artificial Sequence
  Description of Artificial Sequence: Synthetic oligonucleotide
  Sense Strand Starting at position 497 of SEQ ID NO: 317489
agagguuccugaguuagga

SEQ ID NO: 357760 - RNA, 19 nt, Artificial Sequence
  Description of Artificial Sequence: Synthetic oligonucleotide
  Antisense Strand to SEQ ID NO: 357759
uccuaacucaggaaccucu

SEQ ID NO: 357761 - RNA, 19 nt, Artificial Sequence
  Description of Artificial Sequence: Synthetic oligonucleotide
  Sense Strand Starting at position 497 of SEQ ID NO: 317617
gccagagggaucuaggcuu

SEQ ID NO: 357762 - RNA, 19 nt, Artificial Sequence
  Description of Artificial Sequence: Synthetic oligonucleotide
  Antisense Strand to SEQ ID NO: 357761
aagccuagaucccucuggc

SEQ ID NO: 357763 - RNA, 19 nt, Artificial Sequence
  Description of Artificial Sequence: Synthetic oligonucleotide
  Sense Strand Starting at position 497 of SEQ ID NO: 318080
aguuuagucagcuggagag

SEQ ID NO: 357764 - RNA, 19 nt, Artificial Sequence
  Description of Artificial Sequence: Synthetic oligonucleotide
  Antisense Strand to SEQ ID NO: 357763
cucuccagcugacuaaacu

SEQ ID NO: 357765 - RNA, 19 nt, Artificial Sequence
  Description of Artificial Sequence: Synthetic oligonucleotide
  Sense Strand Starting at position 497 of SEQ ID NO: 318107
cugagugccacccaugaga

SEQ ID NO: 357766 - RNA, 19 nt, Artificial Sequence
  Description of Artificial Sequence: Synthetic oligonucleotide
  Antisense Strand to SEQ ID NO: 357765
ucucauggguggcacucag

SEQ ID NO: 357767 - RNA, 19 nt, Artificial Sequence
  Description of Artificial Sequence: Synthetic oligonucleotide
  Sense Strand Starting at position 497 of SEQ ID NO: 318181
gaauuagagccagaugcuu

SEQ ID NO: 357768 - RNA, 19 nt, Artificial Sequence
  Description of Artificial Sequence: Synthetic oligonucleotide
  Antisense Strand to SEQ ID NO: 357767
aagcaucuggcucuaauuc

SEQ ID NO: 357769 - RNA, 19 nt, Artificial Sequence
  Description of Artificial Sequence: Synthetic oligonucleotide
  Sense Strand Starting at position 497 of SEQ ID NO: 318195
ugcuuaaguccaggugaga

SEQ ID NO: 357770 - RNA, 19 nt, Artificial Sequence
  Description of Artificial Sequence: Synthetic oligonucleotide
  Antisense Strand to SEQ ID NO: 357769
ucucaccuggacuuaagca

SEQ ID NO: 357771 - RNA, 19 nt, Artificial Sequence
  Description of Artificial Sequence: Synthetic oligonucleotide
  Sense Strand Starting at position 497 of SEQ ID NO: 318227
cuuccaaagugucuaauug

SEQ ID NO: 357772 - RNA, 19 nt, Artificial Sequence
  Description of Artificial Sequence: Synthetic oligonucleotide
  Antisense Strand to SEQ ID NO: 357771
caauuagacacuuuggaag

SEQ ID NO: 357773 - RNA, 19 nt, Artificial Sequence
  Description of Artificial Sequence: Synthetic oligonucleotide
  Sense Strand Starting at position 497 of SEQ ID NO: 318237
gucuaauugccucaggcgu

SEQ ID NO: 357774 - RNA, 19 nt, Artificial Sequence
  Description of Artificial Sequence: Synthetic oligonucleotide
  Antisense Strand to SEQ ID NO: 357773
acgccugaggcaauuagac

SEQ ID NO: 357775 - RNA, 19 nt, Artificial Sequence
  Description of Artificial Sequence: Synthetic oligonucleotide
  Sense Strand Starting at position 497 of SEQ ID NO: 318319
ggguaauauggccaucuuu

SEQ ID NO: 357776 - RNA, 19 nt, Artificial Sequence
  Description of Artificial Sequence: Synthetic oligonucleotide
  Antisense Strand to SEQ ID NO: 357775
aaagauggccauauuaccc

SEQ ID NO: 357777 - RNA, 19 nt, Artificial Sequence
  Description of Artificial Sequence: Synthetic oligonucleotide
  Sense Strand Starting at position 497 of SEQ ID NO: 318426
auacacuuucuuugaggau

SEQ ID NO: 357778 - RNA, 19 nt, Artificial Sequence
  Description of Artificial Sequence: Synthetic oligonucleotide
  Antisense Strand to SEQ ID NO: 357777
auccucaaagaaaguguau

SEQ ID NO: 357779 - RNA, 19 nt, Artificial Sequence
  Description of Artificial Sequence: Synthetic oligonucleotide
  Sense Strand Starting at position 497 of SEQ ID NO: 318432
uuucuuugaggaugacagu

SEQ ID NO: 357780 - RNA, 19 nt, Artificial Sequence
  Description of Artificial Sequence: Synthetic oligonucleotide
  Antisense Strand to SEQ ID NO: 357779
acugucauccucaaagaaa

SEQ ID NO: 357781 - RNA, 19 nt, Artificial Sequence
  Description of Artificial Sequence: Synthetic oligonucleotide
  Sense Strand Starting at position 497 of SEQ ID NO: 318435
cuuugaggaugacaguauu

SEQ ID NO: 357782 - RNA, 19 nt, Artificial Sequence
  Description of Artificial Sequence: Synthetic oligonucleotide
  Antisense Strand to SEQ ID NO: 357781
aauacugucauccucaaag

SEQ ID NO: 357783 - RNA, 19 nt, Artificial Sequence
  Description of Artificial Sequence: Synthetic oligonucleotide
  Sense Strand Starting at position 497 of SEQ ID NO: 318441
ggaugacaguauuaggaaa

SEQ ID NO: 357784 - RNA, 19 nt, Artificial Sequence
  Description of Artificial Sequence: Synthetic oligonucleotide
  Antisense Strand to SEQ ID NO: 357783
uuuccuaauacugucaucc

SEQ ID NO: 357785 - RNA, 19 nt, Artificial Sequence
  Description of Artificial Sequence: Synthetic oligonucleotide
  Sense Strand Starting at position 497 of SEQ ID NO: 318677
ggaguaaagcccugaagug

SEQ ID NO: 357786 - RNA, 19 nt, Artificial Sequence
  Description of Artificial Sequence: Synthetic oligonucleotide
  Antisense Strand to SEQ ID NO: 357785
cacuucagggcuuuacucc

SEQ ID NO: 357787 - RNA, 19 nt, Artificial Sequence
  Description of Artificial Sequence: Synthetic oligonucleotide
  Sense Strand Starting at position 497 of SEQ ID NO: 318692
aguggugacucaccagagu

SEQ ID NO: 357788 - RNA, 19 nt, Artificial Sequence
  Description of Artificial Sequence: Synthetic oligonucleotide
  Antisense Strand to SEQ ID NO: 357787
acucuggugagucaccacu

SEQ ID NO: 357789 - RNA, 19 nt, Artificial Sequence
  Description of Artificial Sequence: Synthetic oligonucleotide
  Sense Strand Starting at position 497 of SEQ ID NO: 318735
caggacauguuaguuauaa

SEQ ID NO: 357790 - RNA, 19 nt, Artificial Sequence
  Description of Artificial Sequence: Synthetic oligonucleotide
  Antisense Strand to SEQ ID NO: 357789
uuauaacuaacauguccug

SEQ ID NO: 357791 - RNA, 19 nt, Artificial Sequence
  Description of Artificial Sequence: Synthetic oligonucleotide
  Sense Strand Starting at position 497 of SEQ ID NO: 318736
aggacauguuaguuauaaa

SEQ ID NO: 357792 - RNA, 19 nt, Artificial Sequence
  Description of Artificial Sequence: Synthetic oligonucleotide
  Antisense Strand to SEQ ID NO: 357791
uuuauaacuaacauguccu

SEQ ID NO: 357793 - RNA, 19 nt, Artificial Sequence
  Description of Artificial Sequence: Synthetic oligonucleotide
  Sense Strand Starting at position 497 of SEQ ID NO: 318910
cggguuggacaucguuaau

SEQ ID NO: 357794 - RNA, 19 nt, Artificial Sequence
  Description of Artificial Sequence: Synthetic oligonucleotide
  Antisense Strand to SEQ ID NO: 357793
auuaacgauguccaacccg

SEQ ID NO: 357795 - RNA, 19 nt, Artificial Sequence
  Description of Artificial Sequence: Synthetic oligonucleotide
  Sense Strand Starting at position 497 of SEQ ID NO: 318913
guuggacaucguuaauaau

SEQ ID NO: 357796 - RNA, 19 nt, Artificial Sequence
  Description of Artificial Sequence: Synthetic oligonucleotide
  Antisense Strand to SEQ ID NO: 357795
auuauuaacgauguccaac

SEQ ID NO: 357797 - RNA, 19 nt, Artificial Sequence
  Description of Artificial Sequence: Synthetic oligonucleotide
  Sense Strand Starting at position 497 of SEQ ID NO: 318954
guagcaagaugacuucuga

SEQ ID NO: 357798 - RNA, 19 nt, Artificial Sequence
  Description of Artificial Sequence: Synthetic oligonucleotide
  Antisense Strand to SEQ ID NO: 357797
ucagaagucaucuugcuac

SEQ ID NO: 357799 - RNA, 19 nt, Artificial Sequence
  Description of Artificial Sequence: Synthetic oligonucleotide
  Sense Strand Starting at position 497 of SEQ ID NO: 319210
gcgccaauccuguuugcca

SEQ ID NO: 357800 - RNA, 19 nt, Artificial Sequence
  Description of Artificial Sequence: Synthetic oligonucleotide
  Antisense Strand to SEQ ID NO: 357799
uggcaaacaggauuggcgc

SEQ ID NO: 357801 - RNA, 19 nt, Artificial Sequence
  Description of Artificial Sequence: Synthetic oligonucleotide
  Sense Strand Starting at position 497 of SEQ ID NO: 319212
gccaauccuguuugccaua

SEQ ID NO: 357802 - RNA, 19 nt, Artificial Sequence
  Description of Artificial Sequence: Synthetic oligonucleotide
  Antisense Strand to SEQ ID NO: 357801
uauggcaaacaggauuggc

SEQ ID NO: 357803 - RNA, 19 nt, Artificial Sequence
  Description of Artificial Sequence: Synthetic oligonucleotide
  Sense Strand Starting at position 497 of SEQ ID NO: 319217
uccuguuugccauaucucu

SEQ ID NO: 357804 - RNA, 19 nt, Artificial Sequence
  Description of Artificial Sequence: Synthetic oligonucleotide
  Antisense Strand to SEQ ID NO: 357803
agagauauggcaaacagga

SEQ ID NO: 357805 - RNA, 19 nt, Artificial Sequence
  Description of Artificial Sequence: Synthetic oligonucleotide
  Sense Strand Starting at position 498 of SEQ ID NO: 315256
agagacaugggauguucuu

SEQ ID NO: 357806 - RNA, 19 nt, Artificial Sequence
  Description of Artificial Sequence: Synthetic oligonucleotide
  Antisense Strand to SEQ ID NO: 357805
aagaacaucccaugucucu

SEQ ID NO: 357807 - RNA, 19 nt, Artificial Sequence
  Description of Artificial Sequence: Synthetic oligonucleotide
  Sense Strand Starting at position 498 of SEQ ID NO: 315265
ggauguucuuaaguuauau

SEQ ID NO: 357808 - RNA, 19 nt, Artificial Sequence
  Description of Artificial Sequence: Synthetic oligonucleotide
  Antisense Strand to SEQ ID NO: 357807
auauaacuuaagaacaucc

SEQ ID NO: 357809 - RNA, 19 nt, Artificial Sequence
  Description of Artificial Sequence: Synthetic oligonucleotide
  Sense Strand Starting at position 498 of SEQ ID NO: 315297
augaucaugcacuaaagua

SEQ ID NO: 357810 - RNA, 19 nt, Artificial Sequence
  Description of Artificial Sequence: Synthetic oligonucleotide
  Antisense Strand to SEQ ID NO: 357809
uacuuuagugcaugaucau

SEQ ID NO: 357811 - RNA, 19 nt, Artificial Sequence
  Description of Artificial Sequence: Synthetic oligonucleotide
  Sense Strand Starting at position 498 of SEQ ID NO: 315366
ggauuagugugaucagaua

SEQ ID NO: 357812 - RNA, 19 nt, Artificial Sequence
  Description of Artificial Sequence: Synthetic oligonucleotide
  Antisense Strand to SEQ ID NO: 357811
uaucugaucacacuaaucc

SEQ ID NO: 357813 - RNA, 19 nt, Artificial Sequence
  Description of Artificial Sequence: Synthetic oligonucleotide
  Sense Strand Starting at position 498 of SEQ ID NO: 315530
agucuaucagccuaacuga

SEQ ID NO: 357814 - RNA, 19 nt, Artificial Sequence
  Description of Artificial Sequence: Synthetic oligonucleotide
  Antisense Strand to SEQ ID NO: 357813
ucaguuaggcugauagacu

SEQ ID NO: 357815 - RNA, 19 nt, Artificial Sequence
  Description of Artificial Sequence: Synthetic oligonucleotide
  Sense Strand Starting at position 498 of SEQ ID NO: 315802
aucuacugugcccagauua

SEQ ID NO: 357816 - RNA, 19 nt, Artificial Sequence
  Description of Artificial Sequence: Synthetic oligonucleotide
  Antisense Strand to SEQ ID NO: 357815
uaaucugggcacaguagau

SEQ ID NO: 357817 - RNA, 19 nt, Artificial Sequence
  Description of Artificial Sequence: Synthetic oligonucleotide
  Sense Strand Starting at position 498 of SEQ ID NO: 315959
cgagcugaacuauauuaac

SEQ ID NO: 357818 - RNA, 19 nt, Artificial Sequence
  Description of Artificial Sequence: Synthetic oligonucleotide
  Antisense Strand to SEQ ID NO: 357817
guuaauauaguucagcucg

SEQ ID NO: 357819 - RNA, 19 nt, Artificial Sequence
  Description of Artificial Sequence: Synthetic oligonucleotide
  Sense Strand Starting at position 498 of SEQ ID NO: 316159
accacuguccuugauauua

SEQ ID NO: 357820 - RNA, 19 nt, Artificial Sequence
  Description of Artificial Sequence: Synthetic oligonucleotide
  Antisense Strand to SEQ ID NO: 357819
uaauaucaaggacaguggu

SEQ ID NO: 357821 - RNA, 19 nt, Artificial Sequence
  Description of Artificial Sequence: Synthetic oligonucleotide
  Sense Strand Starting at position 498 of SEQ ID NO: 316310
gucuuacuaggaugguuaa

SEQ ID NO: 357822 - RNA, 19 nt, Artificial Sequence
  Description of Artificial Sequence: Synthetic oligonucleotide
  Antisense Strand to SEQ ID NO: 357821
uuaaccauccuaguaagac

SEQ ID NO: 357823 - RNA, 19 nt, Artificial Sequence
  Description of Artificial Sequence: Synthetic oligonucleotide
  Sense Strand Starting at position 498 of SEQ ID NO: 316313
uuacuaggaugguuaacuu

SEQ ID NO: 357824 - RNA, 19 nt, Artificial Sequence
  Description of Artificial Sequence: Synthetic oligonucleotide
  Antisense Strand to SEQ ID NO: 357823
aaguuaaccauccuaguaa

SEQ ID NO: 357825 - RNA, 19 nt, Artificial Sequence
  Description of Artificial Sequence: Synthetic oligonucleotide
  Sense Strand Starting at position 498 of SEQ ID NO: 316317
uaggaugguuaacuuuaua

SEQ ID NO: 357826 - RNA, 19 nt, Artificial Sequence
  Description of Artificial Sequence: Synthetic oligonucleotide
  Antisense Strand to SEQ ID NO: 357825
uauaaaguuaaccauccua

SEQ ID NO: 357827 - RNA, 19 nt, Artificial Sequence
  Description of Artificial Sequence: Synthetic oligonucleotide
  Sense Strand Starting at position 498 of SEQ ID NO: 316580
aaguuaauagcaggguaau

SEQ ID NO: 357828 - RNA, 19 nt, Artificial Sequence
  Description of Artificial Sequence: Synthetic oligonucleotide
  Antisense Strand to SEQ ID NO: 357827
auuacccugcuauuaacuu

SEQ ID NO: 357829 - RNA, 19 nt, Artificial Sequence
  Description of Artificial Sequence: Synthetic oligonucleotide
  Sense Strand Starting at position 498 of SEQ ID NO: 316581
aguuaauagcaggguaauc

SEQ ID NO: 357830 - RNA, 19 nt, Artificial Sequence
  Description of Artificial Sequence: Synthetic oligonucleotide
  Antisense Strand to SEQ ID NO: 357829
gauuacccugcuauuaacu

SEQ ID NO: 357831 - RNA, 19 nt, Artificial Sequence
  Description of Artificial Sequence: Synthetic oligonucleotide
  Sense Strand Starting at position 498 of SEQ ID NO: 316586
auagcaggguaaucacaau

SEQ ID NO: 357832 - RNA, 19 nt, Artificial Sequence
  Description of Artificial Sequence: Synthetic oligonucleotide
  Antisense Strand to SEQ ID NO: 357831
auugugauuacccugcuau

SEQ ID NO: 357833 - RNA, 19 nt, Artificial Sequence
  Description of Artificial Sequence: Synthetic oligonucleotide
  Sense Strand Starting at position 498 of SEQ ID NO: 316679
ucuuguagauuugccaauu

SEQ ID NO: 357834 - RNA, 19 nt, Artificial Sequence
  Description of Artificial Sequence: Synthetic oligonucleotide
  Antisense Strand to SEQ ID NO: 357833
aauuggcaaaucuacaaga

SEQ ID NO: 357835 - RNA, 19 nt, Artificial Sequence
  Description of Artificial Sequence: Synthetic oligonucleotide
  Sense Strand Starting at position 498 of SEQ ID NO: 317312
guucuacgcacagauuaga

SEQ ID NO: 357836 - RNA, 19 nt, Artificial Sequence
  Description of Artificial Sequence: Synthetic oligonucleotide
  Antisense Strand to SEQ ID NO: 357835
ucuaaucugugcguagaac

SEQ ID NO: 357837 - RNA, 19 nt, Artificial Sequence
  Description of Artificial Sequence: Synthetic oligonucleotide
  Sense Strand Starting at position 498 of SEQ ID NO: 317465
uaugcaauucugggaaugu

SEQ ID NO: 357838 - RNA, 19 nt, Artificial Sequence
  Description of Artificial Sequence: Synthetic oligonucleotide
  Antisense Strand to SEQ ID NO: 357837
acauucccagaauugcaua

SEQ ID NO: 357839 - RNA, 19 nt, Artificial Sequence
  Description of Artificial Sequence: Synthetic oligonucleotide
  Sense Strand Starting at position 498 of SEQ ID NO: 317589
guaaauguaacguaaggaa

SEQ ID NO: 357840 - RNA, 19 nt, Artificial Sequence
  Description of Artificial Sequence: Synthetic oligonucleotide
  Antisense Strand to SEQ ID NO: 357839
uuccuuacguuacauuuac

SEQ ID NO: 357841 - RNA, 19 nt, Artificial Sequence
  Description of Artificial Sequence: Synthetic oligonucleotide
  Sense Strand Starting at position 498 of SEQ ID NO: 317623
agcuguucagguggaauaa

SEQ ID NO: 357842 - RNA, 19 nt, Artificial Sequence
  Description of Artificial Sequence: Synthetic oligonucleotide
  Antisense Strand to SEQ ID NO: 357841
uuauuccaccugaacagcu

SEQ ID NO: 357843 - RNA, 19 nt, Artificial Sequence
  Description of Artificial Sequence: Synthetic oligonucleotide
  Sense Strand Starting at position 498 of SEQ ID NO: 317624
gcuguucagguggaauaau

SEQ ID NO: 357844 - RNA, 19 nt, Artificial Sequence
  Description of Artificial Sequence: Synthetic oligonucleotide
  Antisense Strand to SEQ ID NO: 357843
auuauuccaccugaacagc

SEQ ID NO: 357845 - RNA, 19 nt, Artificial Sequence
  Description of Artificial Sequence: Synthetic oligonucleotide
  Sense Strand Starting at position 498 of SEQ ID NO: 317746
uuagaauaauucccuggca

SEQ ID NO: 357846 - RNA, 19 nt, Artificial Sequence
  Description of Artificial Sequence: Synthetic oligonucleotide
  Antisense Strand to SEQ ID NO: 357845
ugccagggaauuauucuaa

SEQ ID NO: 357847 - RNA, 19 nt, Artificial Sequence
  Description of Artificial Sequence: Synthetic oligonucleotide
  Sense Strand Starting at position 498 of SEQ ID NO: 317749
gaauaauucccuggcagug

SEQ ID NO: 357848 - RNA, 19 nt, Artificial Sequence
  Description of Artificial Sequence: Synthetic oligonucleotide
  Antisense Strand to SEQ ID NO: 357847
cacugccagggaauuauuc

SEQ ID NO: 357849 - RNA, 19 nt, Artificial Sequence
  Description of Artificial Sequence: Synthetic oligonucleotide
  Sense Strand Starting at position 498 of SEQ ID NO: 317759
cuggcagugaucuggacua

SEQ ID NO: 357850 - RNA, 19 nt, Artificial Sequence
  Description of Artificial Sequence: Synthetic oligonucleotide
  Antisense Strand to SEQ ID NO: 357849
uaguccagaucacugccag

SEQ ID NO: 357851 - RNA, 19 nt, Artificial Sequence
  Description of Artificial Sequence: Synthetic oligonucleotide
  Sense Strand Starting at position 498 of SEQ ID NO: 317761
ggcagugaucuggacuaua

SEQ ID NO: 357852 - RNA, 19 nt, Artificial Sequence
  Description of Artificial Sequence: Synthetic oligonucleotide
  Antisense Strand to SEQ ID NO: 357851
uauaguccagaucacugcc

SEQ ID NO: 357853 - RNA, 19 nt, Artificial Sequence
  Description of Artificial Sequence: Synthetic oligonucleotide
  Sense Strand Starting at position 498 of SEQ ID NO: 317884
cauuuaauuuagugaugug

SEQ ID NO: 357854 - RNA, 19 nt, Artificial Sequence
  Description of Artificial Sequence: Synthetic oligonucleotide
  Antisense Strand to SEQ ID NO: 357853
cacaucacuaaauuaaaug

SEQ ID NO: 357855 - RNA, 19 nt, Artificial Sequence
  Description of Artificial Sequence: Synthetic oligonucleotide
  Sense Strand Starting at position 498 of SEQ ID NO: 317893
uagugauguguguaaacaa

SEQ ID NO: 357856 - RNA, 19 nt, Artificial Sequence
  Description of Artificial Sequence: Synthetic oligonucleotide
  Antisense Strand to SEQ ID NO: 357855
uuguuuacacacaucacua

SEQ ID NO: 357857 - RNA, 19 nt, Artificial Sequence
  Description of Artificial Sequence: Synthetic oligonucleotide
  Sense Strand Starting at position 498 of SEQ ID NO: 317925
ugaugaacuccacggauca

SEQ ID NO: 357858 - RNA, 19 nt, Artificial Sequence
  Description of Artificial Sequence: Synthetic oligonucleotide
  Antisense Strand to SEQ ID NO: 357857
ugauccguggaguucauca

SEQ ID NO: 357859 - RNA, 19 nt, Artificial Sequence
  Description of Artificial Sequence: Synthetic oligonucleotide
  Sense Strand Starting at position 498 of SEQ ID NO: 317926
gaugaacuccacggaucaa

SEQ ID NO: 357860 - RNA, 19 nt, Artificial Sequence
  Description of Artificial Sequence: Synthetic oligonucleotide
  Antisense Strand to SEQ ID NO: 357859
uugauccguggaguucauc

SEQ ID NO: 357861 - RNA, 19 nt, Artificial Sequence
  Description of Artificial Sequence: Synthetic oligonucleotide
  Sense Strand Starting at position 498 of SEQ ID NO: 318054
gcagcuuccgcugucuaaa

SEQ ID NO: 357862 - RNA, 19 nt, Artificial Sequence
  Description of Artificial Sequence: Synthetic oligonucleotide
  Antisense Strand to SEQ ID NO: 357861
uuuagacagcggaagcugc

SEQ ID NO: 357863 - RNA, 19 nt, Artificial Sequence
  Description of Artificial Sequence: Synthetic oligonucleotide
  Sense Strand Starting at position 498 of SEQ ID NO: 318089
auauuaugguaguucucau

SEQ ID NO: 357864 - RNA, 19 nt, Artificial Sequence
  Description of Artificial Sequence: Synthetic oligonucleotide
  Antisense Strand to SEQ ID NO: 357863
augagaacuaccauaauau

SEQ ID NO: 357865 - RNA, 19 nt, Artificial Sequence
  Description of Artificial Sequence: Synthetic oligonucleotide
  Sense Strand Starting at position 498 of SEQ ID NO: 318096
gguaguucucauugacuga

SEQ ID NO: 357866 - RNA, 19 nt, Artificial Sequence
  Description of Artificial Sequence: Synthetic oligonucleotide
  Antisense Strand to SEQ ID NO: 357865
ucagucaaugagaacuacc

SEQ ID NO: 357867 - RNA, 19 nt, Artificial Sequence
  Description of Artificial Sequence: Synthetic oligonucleotide
  Sense Strand Starting at position 498 of SEQ ID NO: 318099
aguucucauugacugaaau

SEQ ID NO: 357868 - RNA, 19 nt, Artificial Sequence
  Description of Artificial Sequence: Synthetic oligonucleotide
  Antisense Strand to SEQ ID NO: 357867
auuucagucaaugagaacu

SEQ ID NO: 357869 - RNA, 19 nt, Artificial Sequence
  Description of Artificial Sequence: Synthetic oligonucleotide
  Sense Strand Starting at position 498 of SEQ ID NO: 318100
guucucauugacugaaauu

SEQ ID NO: 357870 - RNA, 19 nt, Artificial Sequence
  Description of Artificial Sequence: Synthetic oligonucleotide
  Antisense Strand to SEQ ID NO: 357869
aauuucagucaaugagaac

SEQ ID NO: 357871 - RNA, 19 nt, Artificial Sequence
  Description of Artificial Sequence: Synthetic oligonucleotide
  Sense Strand Starting at position 498 of SEQ ID NO: 318438
gggaguauacagugguauc

SEQ ID NO: 357872 - RNA, 19 nt, Artificial Sequence
  Description of Artificial Sequence: Synthetic oligonucleotide
  Antisense Strand to SEQ ID NO: 357871
gauaccacuguauacuccc

SEQ ID NO: 357873 - RNA, 19 nt, Artificial Sequence
  Description of Artificial Sequence: Synthetic oligonucleotide
  Sense Strand Starting at position 498 of SEQ ID NO: 318667
uggacuuuacauugucgaa

SEQ ID NO: 357874 - RNA, 19 nt, Artificial Sequence
  Description of Artificial Sequence: Synthetic oligonucleotide
  Antisense Strand to SEQ ID NO: 357873
uucgacaauguaaagucca

SEQ ID NO: 357875 - RNA, 19 nt, Artificial Sequence
  Description of Artificial Sequence: Synthetic oligonucleotide
  Sense Strand Starting at position 498 of SEQ ID NO: 318669
gacuuuacauugucgaaau

SEQ ID NO: 357876 - RNA, 19 nt, Artificial Sequence
  Description of Artificial Sequence: Synthetic oligonucleotide
  Antisense Strand to SEQ ID NO: 357875
auuucgacaauguaaaguc

SEQ ID NO: 357877 - RNA, 19 nt, Artificial Sequence
  Description of Artificial Sequence: Synthetic oligonucleotide
  Sense Strand Starting at position 498 of SEQ ID NO: 318671
cuuuacauugucgaaauau

SEQ ID NO: 357878 - RNA, 19 nt, Artificial Sequence
  Description of Artificial Sequence: Synthetic oligonucleotide
  Antisense Strand to SEQ ID NO: 357877
auauuucgacaauguaaag

SEQ ID NO: 357879 - RNA, 19 nt, Artificial Sequence
  Description of Artificial Sequence: Synthetic oligonucleotide
  Sense Strand Starting at position 498 of SEQ ID NO: 318904
aggauacaucuagguuucu

SEQ ID NO: 357880 - RNA, 19 nt, Artificial Sequence
  Description of Artificial Sequence: Synthetic oligonucleotide
  Antisense Strand to SEQ ID NO: 357879
agaaaccuagauguauccu

SEQ ID NO: 357881 - RNA, 19 nt, Artificial Sequence
  Description of Artificial Sequence: Synthetic oligonucleotide
  Sense Strand Starting at position 498 of SEQ ID NO: 319055
cauagcaaacgugacaaau

SEQ ID NO: 357882 - RNA, 19 nt, Artificial Sequence
  Description of Artificial Sequence: Synthetic oligonucleotide
  Antisense Strand to SEQ ID NO: 357881
auuugucacguuugcuaug

SEQ ID NO: 357883 - RNA, 19 nt, Artificial Sequence
  Description of Artificial Sequence: Synthetic oligonucleotide
  Sense Strand Starting at position 498 of SEQ ID NO: 319064
cgugacaaauaguuaccaa

SEQ ID NO: 357884 - RNA, 19 nt, Artificial Sequence
  Description of Artificial Sequence: Synthetic oligonucleotide
  Antisense Strand to SEQ ID NO: 357883
uugguaacuauuugucacg

SEQ ID NO: 357885 - RNA, 19 nt, Artificial Sequence
  Description of Artificial Sequence: Synthetic oligonucleotide
  Sense Strand Starting at position 499 of SEQ ID NO: 315290
ggccuaccaccuugguuaa

SEQ ID NO: 357886 - RNA, 19 nt, Artificial Sequence
  Description of Artificial Sequence: Synthetic oligonucleotide
  Antisense Strand to SEQ ID NO: 357885
uuaaccaaggugguaggcc

SEQ ID NO: 357887 - RNA, 19 nt, Artificial Sequence
  Description of Artificial Sequence: Synthetic oligonucleotide
  Sense Strand Starting at position 499 of SEQ ID NO: 315291
gccuaccaccuugguuaaa

SEQ ID NO: 357888 - RNA, 19 nt, Artificial Sequence
  Description of Artificial Sequence: Synthetic oligonucleotide
  Antisense Strand to SEQ ID NO: 357887
uuuaaccaaggugguaggc

SEQ ID NO: 357889 - RNA, 19 nt, Artificial Sequence
  Description of Artificial Sequence: Synthetic oligonucleotide
  Sense Strand Starting at position 499 of SEQ ID NO: 315612
ggccacaauggcugacuua

SEQ ID NO: 357890 - RNA, 19 nt, Artificial Sequence
  Description of Artificial Sequence: Synthetic oligonucleotide
  Antisense Strand to SEQ ID NO: 357889
uaagucagccauuguggcc

SEQ ID NO: 357891 - RNA, 19 nt, Artificial Sequence
  Description of Artificial Sequence: Synthetic oligonucleotide
  Sense Strand Starting at position 499 of SEQ ID NO: 315613
gccacaauggcugacuuaa

SEQ ID NO: 357892 - RNA, 19 nt, Artificial Sequence
  Description of Artificial Sequence: Synthetic oligonucleotide
  Antisense Strand to SEQ ID NO: 357891
uuaagucagccauuguggc

SEQ ID NO: 357893 - RNA, 19 nt, Artificial Sequence
  Description of Artificial Sequence: Synthetic oligonucleotide
  Sense Strand Starting at position 499 of SEQ ID NO: 315655
gcaggucagucaucaaaca

SEQ ID NO: 357894 - RNA, 19 nt, Artificial Sequence
  Description of Artificial Sequence: Synthetic oligonucleotide
  Antisense Strand to SEQ ID NO: 357893
uguuugaugacugaccugc

SEQ ID NO: 357895 - RNA, 19 nt, Artificial Sequence
  Description of Artificial Sequence: Synthetic oligonucleotide
  Sense Strand Starting at position 499 of SEQ ID NO: 316194
cugucucucugacuuauua

SEQ ID NO: 357896 - RNA, 19 nt, Artificial Sequence
  Description of Artificial Sequence: Synthetic oligonucleotide
  Antisense Strand to SEQ ID NO: 357895
uaauaagucagagagacag

SEQ ID NO: 357897 - RNA, 19 nt, Artificial Sequence
  Description of Artificial Sequence: Synthetic oligonucleotide
  Sense Strand Starting at position 499 of SEQ ID NO: 316212
agcugugugguccuuagca

SEQ ID NO: 357898 - RNA, 19 nt, Artificial Sequence
  Description of Artificial Sequence: Synthetic oligonucleotide
  Antisense Strand to SEQ ID NO: 357897
ugcuaaggaccacacagcu

SEQ ID NO: 357899 - RNA, 19 nt, Artificial Sequence
  Description of Artificial Sequence: Synthetic oligonucleotide
  Sense Strand Starting at position 499 of SEQ ID NO: 316214
cugugugguccuuagcaaa

SEQ ID NO: 357900 - RNA, 19 nt, Artificial Sequence
  Description of Artificial Sequence: Synthetic oligonucleotide
  Antisense Strand to SEQ ID NO: 357899
uuugcuaaggaccacacag

SEQ ID NO: 357901 - RNA, 19 nt, Artificial Sequence
  Description of Artificial Sequence: Synthetic oligonucleotide
  Sense Strand Starting at position 499 of SEQ ID NO: 316232
agucaaucucuguacaucu

SEQ ID NO: 357902 - RNA, 19 nt, Artificial Sequence
  Description of Artificial Sequence: Synthetic oligonucleotide
  Antisense Strand to SEQ ID NO: 357901
agauguacagagauugacu

SEQ ID NO: 357903 - RNA, 19 nt, Artificial Sequence
  Description of Artificial Sequence: Synthetic oligonucleotide
  Sense Strand Starting at position 499 of SEQ ID NO: 316241
cuguacaucuguuccuuaa

SEQ ID NO: 357904 - RNA, 19 nt, Artificial Sequence
  Description of Artificial Sequence: Synthetic oligonucleotide
  Antisense Strand to SEQ ID NO: 357903
uuaaggaacagauguacag

SEQ ID NO: 357905 - RNA, 19 nt, Artificial Sequence
  Description of Artificial Sequence: Synthetic oligonucleotide
  Sense Strand Starting at position 499 of SEQ ID NO: 316243
guacaucuguuccuuaacu

SEQ ID NO: 357906 - RNA, 19 nt, Artificial Sequence
  Description of Artificial Sequence: Synthetic oligonucleotide
  Antisense Strand to SEQ ID NO: 357905
aguuaaggaacagauguac

SEQ ID NO: 357907 - RNA, 19 nt, Artificial Sequence
  Description of Artificial Sequence: Synthetic oligonucleotide
  Sense Strand Starting at position 499 of SEQ ID NO: 316304
gcuuauugagagcagggau

SEQ ID NO: 357908 - RNA, 19 nt, Artificial Sequence
  Description of Artificial Sequence: Synthetic oligonucleotide
  Antisense Strand to SEQ ID NO: 357907
aucccugcucucaauaagc

SEQ ID NO: 357909 - RNA, 19 nt, Artificial Sequence
  Description of Artificial Sequence: Synthetic oligonucleotide
  Sense Strand Starting at position 499 of SEQ ID NO: 316307
uauugagagcagggaucau

SEQ ID NO: 357910 - RNA, 19 nt, Artificial Sequence
  Description of Artificial Sequence: Synthetic oligonucleotide
  Antisense Strand to SEQ ID NO: 357909
augaucccugcucucaaua

SEQ ID NO: 357911 - RNA, 19 nt, Artificial Sequence
  Description of Artificial Sequence: Synthetic oligonucleotide
  Sense Strand Starting at position 499 of SEQ ID NO: 316318
gggaucaugucuguguuaa

SEQ ID NO: 357912 - RNA, 19 nt, Artificial Sequence
  Description of Artificial Sequence: Synthetic oligonucleotide
  Antisense Strand to SEQ ID NO: 357911
uuaacacagacaugauccc

SEQ ID NO: 357913 - RNA, 19 nt, Artificial Sequence
  Description of Artificial Sequence: Synthetic oligonucleotide
  Sense Strand Starting at position 499 of SEQ ID NO: 316319
ggaucaugucuguguuaau

SEQ ID NO: 357914 - RNA, 19 nt, Artificial Sequence
  Description of Artificial Sequence: Synthetic oligonucleotide
  Antisense Strand to SEQ ID NO: 357913
auuaacacagacaugaucc

SEQ ID NO: 357915 - RNA, 19 nt, Artificial Sequence
  Description of Artificial Sequence: Synthetic oligonucleotide
  Sense Strand Starting at position 499 of SEQ ID NO: 316328
cuguguuaaucaccaucua

SEQ ID NO: 357916 - RNA, 19 nt, Artificial Sequence
  Description of Artificial Sequence: Synthetic oligonucleotide
  Antisense Strand to SEQ ID NO: 357915
uagauggugauuaacacag

SEQ ID NO: 357917 - RNA, 19 nt, Artificial Sequence
  Description of Artificial Sequence: Synthetic oligonucleotide
  Sense Strand Starting at position 499 of SEQ ID NO: 316329
uguguuaaucaccaucuaa

SEQ ID NO: 357918 - RNA, 19 nt, Artificial Sequence
  Description of Artificial Sequence: Synthetic oligonucleotide
  Antisense Strand to SEQ ID NO: 357917
uuagauggugauuaacaca

SEQ ID NO: 357919 - RNA, 19 nt, Artificial Sequence
  Description of Artificial Sequence: Synthetic oligonucleotide
  Sense Strand Starting at position 499 of SEQ ID NO: 316876
caggacauuucgggaccaa

SEQ ID NO: 357920 - RNA, 19 nt, Artificial Sequence
  Description of Artificial Sequence: Synthetic oligonucleotide
  Antisense Strand to SEQ ID NO: 357919
uuggucccgaaauguccug

SEQ ID NO: 357921 - RNA, 19 nt, Artificial Sequence
  Description of Artificial Sequence: Synthetic oligonucleotide
  Sense Strand Starting at position 499 of SEQ ID NO: 316985
gguaacaacuuuccguauu

SEQ ID NO: 357922 - RNA, 19 nt, Artificial Sequence
  Description of Artificial Sequence: Synthetic oligonucleotide
  Antisense Strand to SEQ ID NO: 357921
aauacggaaaguuguuacc

SEQ ID NO: 357923 - RNA, 19 nt, Artificial Sequence
  Description of Artificial Sequence: Synthetic oligonucleotide
  Sense Strand Starting at position 499 of SEQ ID NO: 316996
uccguauuacuccaaagag

SEQ ID NO: 357924 - RNA, 19 nt, Artificial Sequence
  Description of Artificial Sequence: Synthetic oligonucleotide
  Antisense Strand to SEQ ID NO: 357923
cucuuuggaguaauacgga

SEQ ID NO: 357925 - RNA, 19 nt, Artificial Sequence
  Description of Artificial Sequence: Synthetic oligonucleotide
  Sense Strand Starting at position 499 of SEQ ID NO: 317037
gauuaacuguaaucugaga

SEQ ID NO: 357926 - RNA, 19 nt, Artificial Sequence
  Description of Artificial Sequence: Synthetic oligonucleotide
  Antisense Strand to SEQ ID NO: 357925
ucucagauuacaguuaauc

SEQ ID NO: 357927 - RNA, 19 nt, Artificial Sequence
  Description of Artificial Sequence: Synthetic oligonucleotide
  Sense Strand Starting at position 499 of SEQ ID NO: 317060
ucaagcaaucaccgugaga

SEQ ID NO: 357928 - RNA, 19 nt, Artificial Sequence
  Description of Artificial Sequence: Synthetic oligonucleotide
  Antisense Strand to SEQ ID NO: 357927
ucucacggugauugcuuga

SEQ ID NO: 357929 - RNA, 19 nt, Artificial Sequence
  Description of Artificial Sequence: Synthetic oligonucleotide
  Sense Strand Starting at position 499 of SEQ ID NO: 317062
aagcaaucaccgugagaaa

SEQ ID NO: 357930 - RNA, 19 nt, Artificial Sequence
  Description of Artificial Sequence: Synthetic oligonucleotide
  Antisense Strand to SEQ ID NO: 357929
uuucucacggugauugcuu

SEQ ID NO: 357931 - RNA, 19 nt, Artificial Sequence
  Description of Artificial Sequence: Synthetic oligonucleotide
  Sense Strand Starting at position 499 of SEQ ID NO: 317318
cgugaaggauuccugacga

SEQ ID NO: 357932 - RNA, 19 nt, Artificial Sequence
  Description of Artificial Sequence: Synthetic oligonucleotide
  Antisense Strand to SEQ ID NO: 357931
ucgucaggaauccuucacg

SEQ ID NO: 357933 - RNA, 19 nt, Artificial Sequence
  Description of Artificial Sequence: Synthetic oligonucleotide
  Sense Strand Starting at position 499 of SEQ ID NO: 317457
aaaggugaauugcucggaa

SEQ ID NO: 357934 - RNA, 19 nt, Artificial Sequence
  Description of Artificial Sequence: Synthetic oligonucleotide
  Antisense Strand to SEQ ID NO: 357933
uuccgagcaauucaccuuu

SEQ ID NO: 357935 - RNA, 19 nt, Artificial Sequence
  Description of Artificial Sequence: Synthetic oligonucleotide
  Sense Strand Starting at position 499 of SEQ ID NO: 317459
aggugaauugcucggaaac

SEQ ID NO: 357936 - RNA, 19 nt, Artificial Sequence
  Description of Artificial Sequence: Synthetic oligonucleotide
  Antisense Strand to SEQ ID NO: 357935
guuuccgagcaauucaccu

SEQ ID NO: 357937 - RNA, 19 nt, Artificial Sequence
  Description of Artificial Sequence: Synthetic oligonucleotide
  Sense Strand Starting at position 499 of SEQ ID NO: 317460
ggugaauugcucggaaacu

SEQ ID NO: 357938 - RNA, 19 nt, Artificial Sequence
  Description of Artificial Sequence: Synthetic oligonucleotide
  Antisense Strand to SEQ ID NO: 357937
aguuuccgagcaauucacc

SEQ ID NO: 357939 - RNA, 19 nt, Artificial Sequence
  Description of Artificial Sequence: Synthetic oligonucleotide
  Sense Strand Starting at position 499 of SEQ ID NO: 317499
cggaguuucgcucucauuc

SEQ ID NO: 357940 - RNA, 19 nt, Artificial Sequence
  Description of Artificial Sequence: Synthetic oligonucleotide
  Antisense Strand to SEQ ID NO: 357939
gaaugagagcgaaacuccg

SEQ ID NO: 357941 - RNA, 19 nt, Artificial Sequence
  Description of Artificial Sequence: Synthetic oligonucleotide
  Sense Strand Starting at position 499 of SEQ ID NO: 317811
ugaaguuacugauuaacug

SEQ ID NO: 357942 - RNA, 19 nt, Artificial Sequence
  Description of Artificial Sequence: Synthetic oligonucleotide
  Antisense Strand to SEQ ID NO: 357941
caguuaaucaguaacuuca

SEQ ID NO: 357943 - RNA, 19 nt, Artificial Sequence
  Description of Artificial Sequence: Synthetic oligonucleotide
  Sense Strand Starting at position 499 of SEQ ID NO: 317821
gauuaacugcuguacguau

SEQ ID NO: 357944 - RNA, 19 nt, Artificial Sequence
  Description of Artificial Sequence: Synthetic oligonucleotide
  Antisense Strand to SEQ ID NO: 357943
auacguacagcaguuaauc

SEQ ID NO: 357945 - RNA, 19 nt, Artificial Sequence
  Description of Artificial Sequence: Synthetic oligonucleotide
  Sense Strand Starting at position 499 of SEQ ID NO: 317829
gcuguacguauugcagauu

SEQ ID NO: 357946 - RNA, 19 nt, Artificial Sequence
  Description of Artificial Sequence: Synthetic oligonucleotide
  Antisense Strand to SEQ ID NO: 357945
aaucugcaauacguacagc

SEQ ID NO: 357947 - RNA, 19 nt, Artificial Sequence
  Description of Artificial Sequence: Synthetic oligonucleotide
  Sense Strand Starting at position 499 of SEQ ID NO: 317977
uuggacaugccucauuaac

SEQ ID NO: 357948 - RNA, 19 nt, Artificial Sequence
  Description of Artificial Sequence: Synthetic oligonucleotide
  Antisense Strand to SEQ ID NO: 357947
guuaaugaggcauguccaa

SEQ ID NO: 357949 - RNA, 19 nt, Artificial Sequence
  Description of Artificial Sequence: Synthetic oligonucleotide
  Sense Strand Starting at position 499 of SEQ ID NO: 317979
ggacaugccucauuaacau

SEQ ID NO: 357950 - RNA, 19 nt, Artificial Sequence
  Description of Artificial Sequence: Synthetic oligonucleotide
  Antisense Strand to SEQ ID NO: 357949
auguuaaugaggcaugucc

SEQ ID NO: 357951 - RNA, 19 nt, Artificial Sequence
  Description of Artificial Sequence: Synthetic oligonucleotide
  Sense Strand Starting at position 499 of SEQ ID NO: 318168
agguucuggcucuauuaga

SEQ ID NO: 357952 - RNA, 19 nt, Artificial Sequence
  Description of Artificial Sequence: Synthetic oligonucleotide
  Antisense Strand to SEQ ID NO: 357951
ucuaauagagccagaaccu

SEQ ID NO: 357953 - RNA, 19 nt, Artificial Sequence
  Description of Artificial Sequence: Synthetic oligonucleotide
  Sense Strand Starting at position 499 of SEQ ID NO: 318601
uguauuaggucugcccaaa

SEQ ID NO: 357954 - RNA, 19 nt, Artificial Sequence
  Description of Artificial Sequence: Synthetic oligonucleotide
  Antisense Strand to SEQ ID NO: 357953
uuugggcagaccuaauaca

SEQ ID NO: 357955 - RNA, 19 nt, Artificial Sequence
  Description of Artificial Sequence: Synthetic oligonucleotide
  Sense Strand Starting at position 499 of SEQ ID NO: 318654
gacacaugucauugggacu

SEQ ID NO: 357956 - RNA, 19 nt, Artificial Sequence
  Description of Artificial Sequence: Synthetic oligonucleotide
  Antisense Strand to SEQ ID NO: 357955
agucccaaugacauguguc

SEQ ID NO: 357957 - RNA, 19 nt, Artificial Sequence
  Description of Artificial Sequence: Synthetic oligonucleotide
  Sense Strand Starting at position 499 of SEQ ID NO: 319027
gugaauaugaaauggcuau

SEQ ID NO: 357958 - RNA, 19 nt, Artificial Sequence
  Description of Artificial Sequence: Synthetic oligonucleotide
  Antisense Strand to SEQ ID NO: 357957
auagccauuucauauucac

SEQ ID NO: 357959 - RNA, 19 nt, Artificial Sequence
  Description of Artificial Sequence: Synthetic oligonucleotide
  Sense Strand Starting at position 499 of SEQ ID NO: 319040
ggcuauuagaguugauguu

SEQ ID NO: 357960 - RNA, 19 nt, Artificial Sequence
  Description of Artificial Sequence: Synthetic oligonucleotide
  Antisense Strand to SEQ ID NO: 357959
aacaucaacucuaauagcc

SEQ ID NO: 357961 - RNA, 19 nt, Artificial Sequence
  Description of Artificial Sequence: Synthetic oligonucleotide
  Sense Strand Starting at position 499 of SEQ ID NO: 319041
gcuauuagaguugauguua

SEQ ID NO: 357962 - RNA, 19 nt, Artificial Sequence
  Description of Artificial Sequence: Synthetic oligonucleotide
  Antisense Strand to SEQ ID NO: 357961
uaacaucaacucuaauagc

SEQ ID NO: 357963 - RNA, 19 nt, Artificial Sequence
  Description of Artificial Sequence: Synthetic oligonucleotide
  Sense Strand Starting at position 499 of SEQ ID NO: 319050
guugauguuacaggauaau

SEQ ID NO: 357964 - RNA, 19 nt, Artificial Sequence
  Description of Artificial Sequence: Synthetic oligonucleotide
  Antisense Strand to SEQ ID NO: 357963
auuauccuguaacaucaac

SEQ ID NO: 357965 - RNA, 19 nt, Artificial Sequence
  Description of Artificial Sequence: Synthetic oligonucleotide
  Sense Strand Starting at position 500 of SEQ ID NO: 315276
ggcucucuuuccuuaggga

SEQ ID NO: 357966 - RNA, 19 nt, Artificial Sequence
  Description of Artificial Sequence: Synthetic oligonucleotide
  Antisense Strand to SEQ ID NO: 357965
ucccuaaggaaagagagcc

SEQ ID NO: 357967 - RNA, 19 nt, Artificial Sequence
  Description of Artificial Sequence: Synthetic oligonucleotide
  Sense Strand Starting at position 500 of SEQ ID NO: 315277
gcucucuuuccuuagggau

SEQ ID NO: 357968 - RNA, 19 nt, Artificial Sequence
  Description of Artificial Sequence: Synthetic oligonucleotide
  Antisense Strand to SEQ ID NO: 357967
aucccuaaggaaagagagc

SEQ ID NO: 357969 - RNA, 19 nt, Artificial Sequence
  Description of Artificial Sequence: Synthetic oligonucleotide
  Sense Strand Starting at position 500 of SEQ ID NO: 315283
uuuccuuagggaugacuga

SEQ ID NO: 357970 - RNA, 19 nt, Artificial Sequence
  Description of Artificial Sequence: Synthetic oligonucleotide
  Antisense Strand to SEQ ID NO: 357969
ucagucaucccuaaggaaa

SEQ ID NO: 357971 - RNA, 19 nt, Artificial Sequence
  Description of Artificial Sequence: Synthetic oligonucleotide
  Sense Strand Starting at position 500 of SEQ ID NO: 315292
ggaugacugagcugguuga

SEQ ID NO: 357972 - RNA, 19 nt, Artificial Sequence
  Description of Artificial Sequence: Synthetic oligonucleotide
  Antisense Strand to SEQ ID NO: 357971
ucaaccagcucagucaucc

SEQ ID NO: 357973 - RNA, 19 nt, Artificial Sequence
  Description of Artificial Sequence: Synthetic oligonucleotide
  Sense Strand Starting at position 500 of SEQ ID NO: 315302
gcugguugaccuuaaguuu

SEQ ID NO: 357974 - RNA, 19 nt, Artificial Sequence
  Description of Artificial Sequence: Synthetic oligonucleotide
  Antisense Strand to SEQ ID NO: 357973
aaacuuaaggucaaccagc

SEQ ID NO: 357975 - RNA, 19 nt, Artificial Sequence
  Description of Artificial Sequence: Synthetic oligonucleotide
  Sense Strand Starting at position 500 of SEQ ID NO: 315305
gguugaccuuaaguuugaa

SEQ ID NO: 357976 - RNA, 19 nt, Artificial Sequence
  Description of Artificial Sequence: Synthetic oligonucleotide
  Antisense Strand to SEQ ID NO: 357975
uucaaacuuaaggucaacc

SEQ ID NO: 357977 - RNA, 19 nt, Artificial Sequence
  Description of Artificial Sequence: Synthetic oligonucleotide
  Sense Strand Starting at position 500 of SEQ ID NO: 315348
gagagagucugccuggaaa

SEQ ID NO: 357978 - RNA, 19 nt, Artificial Sequence
  Description of Artificial Sequence: Synthetic oligonucleotide
  Antisense Strand to SEQ ID NO: 357977
uuuccaggcagacucucuc

SEQ ID NO: 357979 - RNA, 19 nt, Artificial Sequence
  Description of Artificial Sequence: Synthetic oligonucleotide
  Sense Strand Starting at position 500 of SEQ ID NO: 315350
gagagucugccuggaaaug

SEQ ID NO: 357980 - RNA, 19 nt, Artificial Sequence
  Description of Artificial Sequence: Synthetic oligonucleotide
  Antisense Strand to SEQ ID NO: 357979
cauuuccaggcagacucuc

SEQ ID NO: 357981 - RNA, 19 nt, Artificial Sequence
  Description of Artificial Sequence: Synthetic oligonucleotide
  Sense Strand Starting at position 500 of SEQ ID NO: 315417
uaaugauguuaauugagca

SEQ ID NO: 357982 - RNA, 19 nt, Artificial Sequence
  Description of Artificial Sequence: Synthetic oligonucleotide
  Antisense Strand to SEQ ID NO: 357981
ugcucaauuaacaucauua

SEQ ID NO: 357983 - RNA, 19 nt, Artificial Sequence
  Description of Artificial Sequence: Synthetic oligonucleotide
  Sense Strand Starting at position 500 of SEQ ID NO: 315509
aagcaagugugaucaugag

SEQ ID NO: 357984 - RNA, 19 nt, Artificial Sequence
  Description of Artificial Sequence: Synthetic oligonucleotide
  Antisense Strand to SEQ ID NO: 357983
cucaugaucacacuugcuu

SEQ ID NO: 357985 - RNA, 19 nt, Artificial Sequence
  Description of Artificial Sequence: Synthetic oligonucleotide
  Sense Strand Starting at position 500 of SEQ ID NO: 315582
ggucaaguaagucaucaga

SEQ ID NO: 357986 - RNA, 19 nt, Artificial Sequence
  Description of Artificial Sequence: Synthetic oligonucleotide
  Antisense Strand to SEQ ID NO: 357985
ucugaugacuuacuugacc

SEQ ID NO: 357987 - RNA, 19 nt, Artificial Sequence
  Description of Artificial Sequence: Synthetic oligonucleotide
  Sense Strand Starting at position 500 of SEQ ID NO: 315584
ucaaguaagucaucagaga

SEQ ID NO: 357988 - RNA, 19 nt, Artificial Sequence
  Description of Artificial Sequence: Synthetic oligonucleotide
  Antisense Strand to SEQ ID NO: 357987
ucucugaugacuuacuuga

SEQ ID NO: 357989 - RNA, 19 nt, Artificial Sequence
  Description of Artificial Sequence: Synthetic oligonucleotide
  Sense Strand Starting at position 500 of SEQ ID NO: 315889
ugggccuuggguugaaaga

SEQ ID NO: 357990 - RNA, 19 nt, Artificial Sequence
  Description of Artificial Sequence: Synthetic oligonucleotide
  Antisense Strand to SEQ ID NO: 357989
ucuuucaacccaaggccca

SEQ ID NO: 357991 - RNA, 19 nt, Artificial Sequence
  Description of Artificial Sequence: Synthetic oligonucleotide
  Sense Strand Starting at position 500 of SEQ ID NO: 315996
ugucacuucuggcuauaua

SEQ ID NO: 357992 - RNA, 19 nt, Artificial Sequence
  Description of Artificial Sequence: Synthetic oligonucleotide
  Antisense Strand to SEQ ID NO: 357991
uauauagccagaagugaca

SEQ ID NO: 357993 - RNA, 19 nt, Artificial Sequence
  Description of Artificial Sequence: Synthetic oligonucleotide
  Sense Strand Starting at position 500 of SEQ ID NO: 315997
gucacuucuggcuauauaa

SEQ ID NO: 357994 - RNA, 19 nt, Artificial Sequence
  Description of Artificial Sequence: Synthetic oligonucleotide
  Antisense Strand to SEQ ID NO: 357993
uuauauagccagaagugac

SEQ ID NO: 357995 - RNA, 19 nt, Artificial Sequence
  Description of Artificial Sequence: Synthetic oligonucleotide
  Sense Strand Starting at position 500 of SEQ ID NO: 316177
cagcuauuaugauuaugag

SEQ ID NO: 357996 - RNA, 19 nt, Artificial Sequence
  Description of Artificial Sequence: Synthetic oligonucleotide
  Antisense Strand to SEQ ID NO: 357995
cucauaaucauaauagcug

SEQ ID NO: 357997 - RNA, 19 nt, Artificial Sequence
  Description of Artificial Sequence: Synthetic oligonucleotide
  Sense Strand Starting at position 500 of SEQ ID NO: 316178
agcuauuaugauuaugagu

SEQ ID NO: 357998 - RNA, 19 nt, Artificial Sequence
  Description of Artificial Sequence: Synthetic oligonucleotide
  Antisense Strand to SEQ ID NO: 357997
acucauaaucauaauagcu

SEQ ID NO: 357999 - RNA, 19 nt, Artificial Sequence
  Description of Artificial Sequence: Synthetic oligonucleotide
  Sense Strand Starting at position 500 of SEQ ID NO: 316414
ggagcuguggugcaaagau

SEQ ID NO: 358000 - RNA, 19 nt, Artificial Sequence
  Description of Artificial Sequence: Synthetic oligonucleotide
  Antisense Strand to SEQ ID NO: 357999
aucuuugcaccacagcucc

SEQ ID NO: 358001 - RNA, 19 nt, Artificial Sequence
  Description of Artificial Sequence: Synthetic oligonucleotide
  Sense Strand Starting at position 500 of SEQ ID NO: 316422
ggugcaaagauaugucaag

SEQ ID NO: 358002 - RNA, 19 nt, Artificial Sequence
  Description of Artificial Sequence: Synthetic oligonucleotide
  Antisense Strand to SEQ ID NO: 358001
cuugacauaucuuugcacc

SEQ ID NO: 358003 - RNA, 19 nt, Artificial Sequence
  Description of Artificial Sequence: Synthetic oligonucleotide
  Sense Strand Starting at position 500 of SEQ ID NO: 316423
gugcaaagauaugucaaga

SEQ ID NO: 358004 - RNA, 19 nt, Artificial Sequence
  Description of Artificial Sequence: Synthetic oligonucleotide
  Antisense Strand to SEQ ID NO: 358003
ucuugacauaucuuugcac

SEQ ID NO: 358005 - RNA, 19 nt, Artificial Sequence
  Description of Artificial Sequence: Synthetic oligonucleotide
  Sense Strand Starting at position 500 of SEQ ID NO: 316475
cagugaaugcaguauguuc

SEQ ID NO: 358006 - RNA, 19 nt, Artificial Sequence
  Description of Artificial Sequence: Synthetic oligonucleotide
  Antisense Strand to SEQ ID NO: 358005
gaacauacugcauucacug

SEQ ID NO: 358007 - RNA, 19 nt, Artificial Sequence
  Description of Artificial Sequence: Synthetic oligonucleotide
  Sense Strand Starting at position 500 of SEQ ID NO: 316612
gaauguggcagcugugauc

SEQ ID NO: 358008 - RNA, 19 nt, Artificial Sequence
  Description of Artificial Sequence: Synthetic oligonucleotide
  Antisense Strand to SEQ ID NO: 358007
gaucacagcugccacauuc

SEQ ID NO: 358009 - RNA, 19 nt, Artificial Sequence
  Description of Artificial Sequence: Synthetic oligonucleotide
  Sense Strand Starting at position 500 of SEQ ID NO: 317489
gagagagccugcuucuaac

SEQ ID NO: 358010 - RNA, 19 nt, Artificial Sequence
  Description of Artificial Sequence: Synthetic oligonucleotide
  Antisense Strand to SEQ ID NO: 358009
guuagaagcaggcucucuc

SEQ ID NO: 358011 - RNA, 19 nt, Artificial Sequence
  Description of Artificial Sequence: Synthetic oligonucleotide
  Sense Strand Starting at position 500 of SEQ ID NO: 317664
agacucuuugacugcauga

SEQ ID NO: 358012 - RNA, 19 nt, Artificial Sequence
  Description of Artificial Sequence: Synthetic oligonucleotide
  Antisense Strand to SEQ ID NO: 358011
ucaugcagucaaagagucu

SEQ ID NO: 358013 - RNA, 19 nt, Artificial Sequence
  Description of Artificial Sequence: Synthetic oligonucleotide
  Sense Strand Starting at position 500 of SEQ ID NO: 317669
cuuugacugcaugaacaau

SEQ ID NO: 358014 - RNA, 19 nt, Artificial Sequence
  Description of Artificial Sequence: Synthetic oligonucleotide
  Antisense Strand to SEQ ID NO: 358013
auuguucaugcagucaaag

SEQ ID NO: 358015 - RNA, 19 nt, Artificial Sequence
  Description of Artificial Sequence: Synthetic oligonucleotide
  Sense Strand Starting at position 500 of SEQ ID NO: 317703
uaggucucagcuuagaaac

SEQ ID NO: 358016 - RNA, 19 nt, Artificial Sequence
  Description of Artificial Sequence: Synthetic oligonucleotide
  Antisense Strand to SEQ ID NO: 358015
guuucuaagcugagaccua

SEQ ID NO: 358017 - RNA, 19 nt, Artificial Sequence
  Description of Artificial Sequence: Synthetic oligonucleotide
  Sense Strand Starting at position 500 of SEQ ID NO: 317713
cuuagaaacccuugagcuu

SEQ ID NO: 358018 - RNA, 19 nt, Artificial Sequence
  Description of Artificial Sequence: Synthetic oligonucleotide
  Antisense Strand to SEQ ID NO: 358017
aagcucaaggguuucuaag

SEQ ID NO: 358019 - RNA, 19 nt, Artificial Sequence
  Description of Artificial Sequence: Synthetic oligonucleotide
  Sense Strand Starting at position 500 of SEQ ID NO: 317767
cuaccucuccuagguauca

SEQ ID NO: 358020 - RNA, 19 nt, Artificial Sequence
  Description of Artificial Sequence: Synthetic oligonucleotide
  Antisense Strand to SEQ ID NO: 358019
ugauaccuaggagagguag

SEQ ID NO: 358021 - RNA, 19 nt, Artificial Sequence
  Description of Artificial Sequence: Synthetic oligonucleotide
  Sense Strand Starting at position 500 of SEQ ID NO: 318064
ccucuaccugucugugaga

SEQ ID NO: 358022 - RNA, 19 nt, Artificial Sequence
  Description of Artificial Sequence: Synthetic oligonucleotide
  Antisense Strand to SEQ ID NO: 358021
ucucacagacagguagagg

SEQ ID NO: 358023 - RNA, 19 nt, Artificial Sequence
  Description of Artificial Sequence: Synthetic oligonucleotide
  Sense Strand Starting at position 500 of SEQ ID NO: 318065
cucuaccugucugugagaa

SEQ ID NO: 358024 - RNA, 19 nt, Artificial Sequence
  Description of Artificial Sequence: Synthetic oligonucleotide
  Antisense Strand to SEQ ID NO: 358023
uucucacagacagguagag

SEQ ID NO: 358025 - RNA, 19 nt, Artificial Sequence
  Description of Artificial Sequence: Synthetic oligonucleotide
  Sense Strand Starting at position 500 of SEQ ID NO: 318066
ucuaccugucugugagaag

SEQ ID NO: 358026 - RNA, 19 nt, Artificial Sequence
  Description of Artificial Sequence: Synthetic oligonucleotide
  Antisense Strand to SEQ ID NO: 358025
cuucucacagacagguaga

SEQ ID NO: 358027 - RNA, 19 nt, Artificial Sequence
  Description of Artificial Sequence: Synthetic oligonucleotide
  Sense Strand Starting at position 500 of SEQ ID NO: 318189
cacugaaugguggauguca

SEQ ID NO: 358028 - RNA, 19 nt, Artificial Sequence
  Description of Artificial Sequence: Synthetic oligonucleotide
  Antisense Strand to SEQ ID NO: 358027
ugacauccaccauucagug

SEQ ID NO: 358029 - RNA, 19 nt, Artificial Sequence
  Description of Artificial Sequence: Synthetic oligonucleotide
  Sense Strand Starting at position 500 of SEQ ID NO: 318377
guggguucccuccagaaca

SEQ ID NO: 358030 - RNA, 19 nt, Artificial Sequence
  Description of Artificial Sequence: Synthetic oligonucleotide
  Antisense Strand to SEQ ID NO: 358029
uguucuggagggaacccac

SEQ ID NO: 358031 - RNA, 19 nt, Artificial Sequence
  Description of Artificial Sequence: Synthetic oligonucleotide
  Sense Strand Starting at position 500 of SEQ ID NO: 318379
ggguucccuccagaacagu

SEQ ID NO: 358032 - RNA, 19 nt, Artificial Sequence
  Description of Artificial Sequence: Synthetic oligonucleotide
  Antisense Strand to SEQ ID NO: 358031
acuguucuggagggaaccc

SEQ ID NO: 358033 - RNA, 19 nt, Artificial Sequence
  Description of Artificial Sequence: Synthetic oligonucleotide
  Sense Strand Starting at position 500 of SEQ ID NO: 318625
gcaaguuucccuugaccag

SEQ ID NO: 358034 - RNA, 19 nt, Artificial Sequence
  Description of Artificial Sequence: Synthetic oligonucleotide
  Antisense Strand to SEQ ID NO: 358033
cuggucaagggaaacuugc

SEQ ID NO: 358035 - RNA, 19 nt, Artificial Sequence
  Description of Artificial Sequence: Synthetic oligonucleotide
  Sense Strand Starting at position 500 of SEQ ID NO: 318644
cagugaugccaaggucuca

SEQ ID NO: 358036 - RNA, 19 nt, Artificial Sequence
  Description of Artificial Sequence: Synthetic oligonucleotide
  Antisense Strand to SEQ ID NO: 358035
ugagaccuuggcaucacug

SEQ ID NO: 358037 - RNA, 19 nt, Artificial Sequence
  Description of Artificial Sequence: Synthetic oligonucleotide
  Sense Strand Starting at position 500 of SEQ ID NO: 318703
accugaauuuaguggacau

SEQ ID NO: 358038 - RNA, 19 nt, Artificial Sequence
  Description of Artificial Sequence: Synthetic oligonucleotide
  Antisense Strand to SEQ ID NO: 358037
auguccacuaaauucaggu

SEQ ID NO: 358039 - RNA, 19 nt, Artificial Sequence
  Description of Artificial Sequence: Synthetic oligonucleotide
  Sense Strand Starting at position 500 of SEQ ID NO: 318798
gggagaggcucgccaugaa

SEQ ID NO: 358040 - RNA, 19 nt, Artificial Sequence
  Description of Artificial Sequence: Synthetic oligonucleotide
  Antisense Strand to SEQ ID NO: 358039
uucauggcgagccucuccc

SEQ ID NO: 358041 - RNA, 19 nt, Artificial Sequence
  Description of Artificial Sequence: Synthetic oligonucleotide
  Sense Strand Starting at position 500 of SEQ ID NO: 318890
ugugaacugcucuaacaga

SEQ ID NO: 358042 - RNA, 19 nt, Artificial Sequence
  Description of Artificial Sequence: Synthetic oligonucleotide
  Antisense Strand to SEQ ID NO: 358041
ucuguuagagcaguucaca

SEQ ID NO: 358043 - RNA, 19 nt, Artificial Sequence
  Description of Artificial Sequence: Synthetic oligonucleotide
  Sense Strand Starting at position 500 of SEQ ID NO: 318982
ggcaguuggaguuagaucu

SEQ ID NO: 358044 - RNA, 19 nt, Artificial Sequence
  Description of Artificial Sequence: Synthetic oligonucleotide
  Antisense Strand to SEQ ID NO: 358043
agaucuaacuccaacugcc

SEQ ID NO: 358045 - RNA, 19 nt, Artificial Sequence
  Description of Artificial Sequence: Synthetic oligonucleotide
  Sense Strand Starting at position 501 of SEQ ID NO: 315400
uccacuccugggcauaaau

SEQ ID NO: 358046 - RNA, 19 nt, Artificial Sequence
  Description of Artificial Sequence: Synthetic oligonucleotide
  Antisense Strand to SEQ ID NO: 358045
auuuaugcccaggagugga

SEQ ID NO: 358047 - RNA, 19 nt, Artificial Sequence
  Description of Artificial Sequence: Synthetic oligonucleotide
  Sense Strand Starting at position 501 of SEQ ID NO: 315449
aauacuugugcaugaauag

SEQ ID NO: 358048 - RNA, 19 nt, Artificial Sequence
  Description of Artificial Sequence: Synthetic oligonucleotide
  Antisense Strand to SEQ ID NO: 358047
cuauucaugcacaaguauu

SEQ ID NO: 358049 - RNA, 19 nt, Artificial Sequence
  Description of Artificial Sequence: Synthetic oligonucleotide
  Sense Strand Starting at position 501 of SEQ ID NO: 315528
ggcuacaugaaauguagua

SEQ ID NO: 358050 - RNA, 19 nt, Artificial Sequence
  Description of Artificial Sequence: Synthetic oligonucleotide
  Antisense Strand to SEQ ID NO: 358049
uacuacauuucauguagcc

SEQ ID NO: 358051 - RNA, 19 nt, Artificial Sequence
  Description of Artificial Sequence: Synthetic oligonucleotide
  Sense Strand Starting at position 501 of SEQ ID NO: 315535
ugaaauguaguacauccau

SEQ ID NO: 358052 - RNA, 19 nt, Artificial Sequence
  Description of Artificial Sequence: Synthetic oligonucleotide
  Antisense Strand to SEQ ID NO: 358051
auggauguacuacauuuca

SEQ ID NO: 358053 - RNA, 19 nt, Artificial Sequence
  Description of Artificial Sequence: Synthetic oligonucleotide
  Sense Strand Starting at position 501 of SEQ ID NO: 315599
caugcuacagugugaauga

SEQ ID NO: 358054 - RNA, 19 nt, Artificial Sequence
  Description of Artificial Sequence: Synthetic oligonucleotide
  Antisense Strand to SEQ ID NO: 358053
ucauucacacuguagcaug

SEQ ID NO: 358055 - RNA, 19 nt, Artificial Sequence
  Description of Artificial Sequence: Synthetic oligonucleotide
  Sense Strand Starting at position 501 of SEQ ID NO: 315662
gucacauauugugugaaac

SEQ ID NO: 358056 - RNA, 19 nt, Artificial Sequence
  Description of Artificial Sequence: Synthetic oligonucleotide
  Antisense Strand to SEQ ID NO: 358055
guuucacacaauaugugac

SEQ ID NO: 358057 - RNA, 19 nt, Artificial Sequence
  Description of Artificial Sequence: Synthetic oligonucleotide
  Sense Strand Starting at position 501 of SEQ ID NO: 315663
ucacauauugugugaaaca

SEQ ID NO: 358058 - RNA, 19 nt, Artificial Sequence
  Description of Artificial Sequence: Synthetic oligonucleotide
  Antisense Strand to SEQ ID NO: 358057
uguuucacacaauauguga

SEQ ID NO: 358059 - RNA, 19 nt, Artificial Sequence
  Description of Artificial Sequence: Synthetic oligonucleotide
  Sense Strand Starting at position 501 of SEQ ID NO: 315777
gggugaugagagugucuug

SEQ ID NO: 358060 - RNA, 19 nt, Artificial Sequence
  Description of Artificial Sequence: Synthetic oligonucleotide
  Antisense Strand to SEQ ID NO: 358059
caagacacucucaucaccc

SEQ ID NO: 358061 - RNA, 19 nt, Artificial Sequence
  Description of Artificial Sequence: Synthetic oligonucleotide
  Sense Strand Starting at position 501 of SEQ ID NO: 315780
ugaugagagugucuuggau

SEQ ID NO: 358062 - RNA, 19 nt, Artificial Sequence
  Description of Artificial Sequence: Synthetic oligonucleotide
  Antisense Strand to SEQ ID NO: 358061
auccaagacacucucauca

SEQ ID NO: 358063 - RNA, 19 nt, Artificial Sequence
  Description of Artificial Sequence: Synthetic oligonucleotide
  Sense Strand Starting at position 501 of SEQ ID NO: 315805
ugagguguugcuuacccaa

SEQ ID NO: 358064 - RNA, 19 nt, Artificial Sequence
  Description of Artificial Sequence: Synthetic oligonucleotide
  Antisense Strand to SEQ ID NO: 358063
uuggguaagcaacaccuca

SEQ ID NO: 358065 - RNA, 19 nt, Artificial Sequence
  Description of Artificial Sequence: Synthetic oligonucleotide
  Sense Strand Starting at position 501 of SEQ ID NO: 315824
cauugcauuugugcgaagu

SEQ ID NO: 358066 - RNA, 19 nt, Artificial Sequence
  Description of Artificial Sequence: Synthetic oligonucleotide
  Antisense Strand to SEQ ID NO: 358065
acuucgcacaaaugcaaug

SEQ ID NO: 358067 - RNA, 19 nt, Artificial Sequence
  Description of Artificial Sequence: Synthetic oligonucleotide
  Sense Strand Starting at position 501 of SEQ ID NO: 315825
auugcauuugugcgaagug

SEQ ID NO: 358068 - RNA, 19 nt, Artificial Sequence
  Description of Artificial Sequence: Synthetic oligonucleotide
  Antisense Strand to SEQ ID NO: 358067
cacuucgcacaaaugcaau

SEQ ID NO: 358069 - RNA, 19 nt, Artificial Sequence
  Description of Artificial Sequence: Synthetic oligonucleotide
  Sense Strand Starting at position 501 of SEQ ID NO: 315835
ugcgaagugccacugcauu

SEQ ID NO: 358070 - RNA, 19 nt, Artificial Sequence
  Description of Artificial Sequence: Synthetic oligonucleotide
  Antisense Strand to SEQ ID NO: 358069
aaugcaguggcacuucgca

SEQ ID NO: 358071 - RNA, 19 nt, Artificial Sequence
  Description of Artificial Sequence: Synthetic oligonucleotide
  Sense Strand Starting at position 501 of SEQ ID NO: 315865
aacaguuaaugguuaguuu

SEQ ID NO: 358072 - RNA, 19 nt, Artificial Sequence
  Description of Artificial Sequence: Synthetic oligonucleotide
  Antisense Strand to SEQ ID NO: 358071
aaacuaaccauuaacuguu

SEQ ID NO: 358073 - RNA, 19 nt, Artificial Sequence
  Description of Artificial Sequence: Synthetic oligonucleotide
  Sense Strand Starting at position 501 of SEQ ID NO: 316233
cggagaucuucugucacac

SEQ ID NO: 358074 - RNA, 19 nt, Artificial Sequence
  Description of Artificial Sequence: Synthetic oligonucleotide
  Antisense Strand to SEQ ID NO: 358073
gugugacagaagaucuccg

SEQ ID NO: 358075 - RNA, 19 nt, Artificial Sequence
  Description of Artificial Sequence: Synthetic oligonucleotide
  Sense Strand Starting at position 501 of SEQ ID NO: 316253
uugcuaucauucucugaag

SEQ ID NO: 358076 - RNA, 19 nt, Artificial Sequence
  Description of Artificial Sequence: Synthetic oligonucleotide
  Antisense Strand to SEQ ID NO: 358075
cuucagagaaugauagcaa

SEQ ID NO: 358077 - RNA, 19 nt, Artificial Sequence
  Description of Artificial Sequence: Synthetic oligonucleotide
  Sense Strand Starting at position 501 of SEQ ID NO: 316312
cagagucuuggccaaguau

SEQ ID NO: 358078 - RNA, 19 nt, Artificial Sequence
  Description of Artificial Sequence: Synthetic oligonucleotide
  Antisense Strand to SEQ ID NO: 358077
auacuuggccaagacucug

SEQ ID NO: 358079 - RNA, 19 nt, Artificial Sequence
  Description of Artificial Sequence: Synthetic oligonucleotide
  Sense Strand Starting at position 501 of SEQ ID NO: 316426
acauauggugcugaaauua

SEQ ID NO: 358080 - RNA, 19 nt, Artificial Sequence
  Description of Artificial Sequence: Synthetic oligonucleotide
  Antisense Strand to SEQ ID NO: 358079
uaauuucagcaccauaugu

SEQ ID NO: 358081 - RNA, 19 nt, Artificial Sequence
  Description of Artificial Sequence: Synthetic oligonucleotide
  Sense Strand Starting at position 501 of SEQ ID NO: 316434
ugcugaaauuaguucuaag

SEQ ID NO: 358082 - RNA, 19 nt, Artificial Sequence
  Description of Artificial Sequence: Synthetic oligonucleotide
  Antisense Strand to SEQ ID NO: 358081
cuuagaacuaauuucagca

SEQ ID NO: 358083 - RNA, 19 nt, Artificial Sequence
  Description of Artificial Sequence: Synthetic oligonucleotide
  Sense Strand Starting at position 501 of SEQ ID NO: 316444
aguucuaaguaacugagau

SEQ ID NO: 358084 - RNA, 19 nt, Artificial Sequence
  Description of Artificial Sequence: Synthetic oligonucleotide
  Antisense Strand to SEQ ID NO: 358083
aucucaguuacuuagaacu

SEQ ID NO: 358085 - RNA, 19 nt, Artificial Sequence
  Description of Artificial Sequence: Synthetic oligonucleotide
  Sense Strand Starting at position 501 of SEQ ID NO: 316448
cuaaguaacugagauuuaa

SEQ ID NO: 358086 - RNA, 19 nt, Artificial Sequence
  Description of Artificial Sequence: Synthetic oligonucleotide
  Antisense Strand to SEQ ID NO: 358085
uuaaaucucaguuacuuag

SEQ ID NO: 358087 - RNA, 19 nt, Artificial Sequence
  Description of Artificial Sequence: Synthetic oligonucleotide
  Sense Strand Starting at position 501 of SEQ ID NO: 317292
gaaagagguuucucuugua

SEQ ID NO: 358088 - RNA, 19 nt, Artificial Sequence
  Description of Artificial Sequence: Synthetic oligonucleotide
  Antisense Strand to SEQ ID NO: 358087
uacaagagaaaccucuuuc

SEQ ID NO: 358089 - RNA, 19 nt, Artificial Sequence
  Description of Artificial Sequence: Synthetic oligonucleotide
  Sense Strand Starting at position 501 of SEQ ID NO: 317311
agaagcuuugacuggcuau

SEQ ID NO: 358090 - RNA, 19 nt, Artificial Sequence
  Description of Artificial Sequence: Synthetic oligonucleotide
  Antisense Strand to SEQ ID NO: 358089
auagccagucaaagcuucu

SEQ ID NO: 358091 - RNA, 19 nt, Artificial Sequence
  Description of Artificial Sequence: Synthetic oligonucleotide
  Sense Strand Starting at position 501 of SEQ ID NO: 317454
agcccuguacccugaauau

SEQ ID NO: 358092 - RNA, 19 nt, Artificial Sequence
  Description of Artificial Sequence: Synthetic oligonucleotide
  Antisense Strand to SEQ ID NO: 358091
auauucaggguacagggcu

SEQ ID NO: 358093 - RNA, 19 nt, Artificial Sequence
  Description of Artificial Sequence: Synthetic oligonucleotide
  Sense Strand Starting at position 501 of SEQ ID NO: 317465
cugaauaucuagcuagaac

SEQ ID NO: 358094 - RNA, 19 nt, Artificial Sequence
  Description of Artificial Sequence: Synthetic oligonucleotide
  Antisense Strand to SEQ ID NO: 358093
guucuagcuagauauucag

SEQ ID NO: 358095 - RNA, 19 nt, Artificial Sequence
  Description of Artificial Sequence: Synthetic oligonucleotide
  Sense Strand Starting at position 501 of SEQ ID NO: 317483
cuguguuccaaggaaguga

SEQ ID NO: 358096 - RNA, 19 nt, Artificial Sequence
  Description of Artificial Sequence: Synthetic oligonucleotide
  Antisense Strand to SEQ ID NO: 358095
ucacuuccuuggaacacag

SEQ ID NO: 358097 - RNA, 19 nt, Artificial Sequence
  Description of Artificial Sequence: Synthetic oligonucleotide
  Sense Strand Starting at position 501 of SEQ ID NO: 317487
guuccaaggaagugaucau

SEQ ID NO: 358098 - RNA, 19 nt, Artificial Sequence
  Description of Artificial Sequence: Synthetic oligonucleotide
  Antisense Strand to SEQ ID NO: 358097
augaucacuuccuuggaac

SEQ ID NO: 358099 - RNA, 19 nt, Artificial Sequence
  Description of Artificial Sequence: Synthetic oligonucleotide
  Sense Strand Starting at position 501 of SEQ ID NO: 317513
ucaucuaauuuguugcuga

SEQ ID NO: 358100 - RNA, 19 nt, Artificial Sequence
  Description of Artificial Sequence: Synthetic oligonucleotide
  Antisense Strand to SEQ ID NO: 358099
ucagcaacaaauuagauga

SEQ ID NO: 358101 - RNA, 19 nt, Artificial Sequence
  Description of Artificial Sequence: Synthetic oligonucleotide
  Sense Strand Starting at position 501 of SEQ ID NO: 317586
uguaaacuccuaggaauag

SEQ ID NO: 358102 - RNA, 19 nt, Artificial Sequence
  Description of Artificial Sequence: Synthetic oligonucleotide
  Antisense Strand to SEQ ID NO: 358101
cuauuccuaggaguuuaca

SEQ ID NO: 358103 - RNA, 19 nt, Artificial Sequence
  Description of Artificial Sequence: Synthetic oligonucleotide
  Sense Strand Starting at position 501 of SEQ ID NO: 317765
cccugaauagcuugcagaa

SEQ ID NO: 358104 - RNA, 19 nt, Artificial Sequence
  Description of Artificial Sequence: Synthetic oligonucleotide
  Antisense Strand to SEQ ID NO: 358103
uucugcaagcuauucaggg

SEQ ID NO: 358105 - RNA, 19 nt, Artificial Sequence
  Description of Artificial Sequence: Synthetic oligonucleotide
  Sense Strand Starting at position 501 of SEQ ID NO: 317793
cugucuuagcucugaggag

SEQ ID NO: 358106 - RNA, 19 nt, Artificial Sequence
  Description of Artificial Sequence: Synthetic oligonucleotide
  Antisense Strand to SEQ ID NO: 358105
cuccucagagcuaagacag

SEQ ID NO: 358107 - RNA, 19 nt, Artificial Sequence
  Description of Artificial Sequence: Synthetic oligonucleotide
  Sense Strand Starting at position 501 of SEQ ID NO: 317819
ccuggaguaccuuggguua

SEQ ID NO: 358108 - RNA, 19 nt, Artificial Sequence
  Description of Artificial Sequence: Synthetic oligonucleotide
  Antisense Strand to SEQ ID NO: 358107
uaacccaagguacuccagg

SEQ ID NO: 358109 - RNA, 19 nt, Artificial Sequence
  Description of Artificial Sequence: Synthetic oligonucleotide
  Sense Strand Starting at position 501 of SEQ ID NO: 318204
cugggcucugaaugagaca

SEQ ID NO: 358110 - RNA, 19 nt, Artificial Sequence
  Description of Artificial Sequence: Synthetic oligonucleotide
  Antisense Strand to SEQ ID NO: 358109
ugucucauucagagcccag

SEQ ID NO: 358111 - RNA, 19 nt, Artificial Sequence
  Description of Artificial Sequence: Synthetic oligonucleotide
  Sense Strand Starting at position 501 of SEQ ID NO: 318448
cggccucaucaagacagaa

SEQ ID NO: 358112 - RNA, 19 nt, Artificial Sequence
  Description of Artificial Sequence: Synthetic oligonucleotide
  Antisense Strand to SEQ ID NO: 358111
uucugucuugaugaggccg

SEQ ID NO: 358113 - RNA, 19 nt, Artificial Sequence
  Description of Artificial Sequence: Synthetic oligonucleotide
  Sense Strand Starting at position 501 of SEQ ID NO: 318601
augccaaaguguuuacaag

SEQ ID NO: 358114 - RNA, 19 nt, Artificial Sequence
  Description of Artificial Sequence: Synthetic oligonucleotide
  Antisense Strand to SEQ ID NO: 358113
cuuguaaacacuuuggcau

SEQ ID NO: 358115 - RNA, 19 nt, Artificial Sequence
  Description of Artificial Sequence: Synthetic oligonucleotide
  Sense Strand Starting at position 501 of SEQ ID NO: 318776
ucaugcuaccaggaauuau

SEQ ID NO: 358116 - RNA, 19 nt, Artificial Sequence
  Description of Artificial Sequence: Synthetic oligonucleotide
  Antisense Strand to SEQ ID NO: 358115
auaauuccugguagcauga

SEQ ID NO: 358117 - RNA, 19 nt, Artificial Sequence
  Description of Artificial Sequence: Synthetic oligonucleotide
  Sense Strand Starting at position 501 of SEQ ID NO: 318922
acgggaaauguuggauacu

SEQ ID NO: 358118 - RNA, 19 nt, Artificial Sequence
  Description of Artificial Sequence: Synthetic oligonucleotide
  Antisense Strand to SEQ ID NO: 358117
aguauccaacauuucccgu

SEQ ID NO: 358119 - RNA, 19 nt, Artificial Sequence
  Description of Artificial Sequence: Synthetic oligonucleotide
  Sense Strand Starting at position 501 of SEQ ID NO: 318981
uagugagaaauuggucuga

SEQ ID NO: 358120 - RNA, 19 nt, Artificial Sequence
  Description of Artificial Sequence: Synthetic oligonucleotide
  Antisense Strand to SEQ ID NO: 358119
ucagaccaauuucucacua

SEQ ID NO: 358121 - RNA, 19 nt, Artificial Sequence
  Description of Artificial Sequence: Synthetic oligonucleotide
  Sense Strand Starting at position 501 of SEQ ID NO: 318983
gugagaaauuggucugaua

SEQ ID NO: 358122 - RNA, 19 nt, Artificial Sequence
  Description of Artificial Sequence: Synthetic oligonucleotide
  Antisense Strand to SEQ ID NO: 358121
uaucagaccaauuucucac

SEQ ID NO: 358123 - RNA, 19 nt, Artificial Sequence
  Description of Artificial Sequence: Synthetic oligonucleotide
  Sense Strand Starting at position 501 of SEQ ID NO: 318998
gauaauuucuucggaggag

SEQ ID NO: 358124 - RNA, 19 nt, Artificial Sequence
  Description of Artificial Sequence: Synthetic oligonucleotide
  Antisense Strand to SEQ ID NO: 358123
cuccuccgaagaaauuauc

SEQ ID NO: 358125 - RNA, 19 nt, Artificial Sequence
  Description of Artificial Sequence: Synthetic oligonucleotide
  Sense Strand Starting at position 502 of SEQ ID NO: 315571
gggacaggauggugucauu

SEQ ID NO: 358126 - RNA, 19 nt, Artificial Sequence
  Description of Artificial Sequence: Synthetic oligonucleotide
  Antisense Strand to SEQ ID NO: 358125
aaugacaccauccuguccc

SEQ ID NO: 358127 - RNA, 19 nt, Artificial Sequence
  Description of Artificial Sequence: Synthetic oligonucleotide
  Sense Strand Starting at position 502 of SEQ ID NO: 315574
acaggauggugucauuaag

SEQ ID NO: 358128 - RNA, 19 nt, Artificial Sequence
  Description of Artificial Sequence: Synthetic oligonucleotide
  Antisense Strand to SEQ ID NO: 358127
cuuaaugacaccauccugu

SEQ ID NO: 358129 - RNA, 19 nt, Artificial Sequence
  Description of Artificial Sequence: Synthetic oligonucleotide
  Sense Strand Starting at position 502 of SEQ ID NO: 315580
uggugucauuaaguagguu

SEQ ID NO: 358130 - RNA, 19 nt, Artificial Sequence
  Description of Artificial Sequence: Synthetic oligonucleotide
  Antisense Strand to SEQ ID NO: 358129
aaccuacuuaaugacacca

SEQ ID NO: 358131 - RNA, 19 nt, Artificial Sequence
  Description of Artificial Sequence: Synthetic oligonucleotide
  Sense Strand Starting at position 502 of SEQ ID NO: 315584
gucauuaaguagguugaga

SEQ ID NO: 358132 - RNA, 19 nt, Artificial Sequence
  Description of Artificial Sequence: Synthetic oligonucleotide
  Antisense Strand to SEQ ID NO: 358131
ucucaaccuacuuaaugac

SEQ ID NO: 358133 - RNA, 19 nt, Artificial Sequence
  Description of Artificial Sequence: Synthetic oligonucleotide
  Sense Strand Starting at position 502 of SEQ ID NO: 315586
cauuaaguagguugagaag

SEQ ID NO: 358134 - RNA, 19 nt, Artificial Sequence
  Description of Artificial Sequence: Synthetic oligonucleotide
  Antisense Strand to SEQ ID NO: 358133
cuucucaaccuacuuaaug

SEQ ID NO: 358135 - RNA, 19 nt, Artificial Sequence
  Description of Artificial Sequence: Synthetic oligonucleotide
  Sense Strand Starting at position 502 of SEQ ID NO: 315597
uugagaagcuccugggacu

SEQ ID NO: 358136 - RNA, 19 nt, Artificial Sequence
  Description of Artificial Sequence: Synthetic oligonucleotide
  Antisense Strand to SEQ ID NO: 358135
agucccaggagcuucucaa

SEQ ID NO: 358137 - RNA, 19 nt, Artificial Sequence
  Description of Artificial Sequence: Synthetic oligonucleotide
  Sense Strand Starting at position 502 of SEQ ID NO: 315641
gccucagcuuggugagaga

SEQ ID NO: 358138 - RNA, 19 nt, Artificial Sequence
  Description of Artificial Sequence: Synthetic oligonucleotide
  Antisense Strand to SEQ ID NO: 358137
ucucucaccaagcugaggc

SEQ ID NO: 358139 - RNA, 19 nt, Artificial Sequence
  Description of Artificial Sequence: Synthetic oligonucleotide
  Sense Strand Starting at position 502 of SEQ ID NO: 315650
uggugagagaugggccaua

SEQ ID NO: 358140 - RNA, 19 nt, Artificial Sequence
  Description of Artificial Sequence: Synthetic oligonucleotide
  Antisense Strand to SEQ ID NO: 358139
uauggcccaucucucacca

SEQ ID NO: 358141 - RNA, 19 nt, Artificial Sequence
  Description of Artificial Sequence: Synthetic oligonucleotide
  Sense Strand Starting at position 502 of SEQ ID NO: 315694
gagagaugcaagcagugaa

SEQ ID NO: 358142 - RNA, 19 nt, Artificial Sequence
  Description of Artificial Sequence: Synthetic oligonucleotide
  Antisense Strand to SEQ ID NO: 358141
uucacugcuugcaucucuc

SEQ ID NO: 358143 - RNA, 19 nt, Artificial Sequence
  Description of Artificial Sequence: Synthetic oligonucleotide
  Sense Strand Starting at position 502 of SEQ ID NO: 315806
ggucaauaccuuuggaaca

SEQ ID NO: 358144 - RNA, 19 nt, Artificial Sequence
  Description of Artificial Sequence: Synthetic oligonucleotide
  Antisense Strand to SEQ ID NO: 358143
uguuccaaagguauugacc

SEQ ID NO: 358145 - RNA, 19 nt, Artificial Sequence
  Description of Artificial Sequence: Synthetic oligonucleotide
  Sense Strand Starting at position 502 of SEQ ID NO: 315808
ucaauaccuuuggaacaga

SEQ ID NO: 358146 - RNA, 19 nt, Artificial Sequence
  Description of Artificial Sequence: Synthetic oligonucleotide
  Antisense Strand to SEQ ID NO: 358145
ucuguuccaaagguauuga

SEQ ID NO: 358147 - RNA, 19 nt, Artificial Sequence
  Description of Artificial Sequence: Synthetic oligonucleotide
  Sense Strand Starting at position 502 of SEQ ID NO: 316018
cccacaguuugcugacuga

SEQ ID NO: 358148 - RNA, 19 nt, Artificial Sequence
  Description of Artificial Sequence: Synthetic oligonucleotide
  Antisense Strand to SEQ ID NO: 358147
ucagucagcaaacuguggg

SEQ ID NO: 358149 - RNA, 19 nt, Artificial Sequence
  Description of Artificial Sequence: Synthetic oligonucleotide
  Sense Strand Starting at position 502 of SEQ ID NO: 316021
acaguuugcugacugagga

SEQ ID NO: 358150 - RNA, 19 nt, Artificial Sequence
  Description of Artificial Sequence: Synthetic oligonucleotide
  Antisense Strand to SEQ ID NO: 358149
uccucagucagcaaacugu

SEQ ID NO: 358151 - RNA, 19 nt, Artificial Sequence
  Description of Artificial Sequence: Synthetic oligonucleotide
  Sense Strand Starting at position 502 of SEQ ID NO: 316049
gacacuaagcccugggaau

SEQ ID NO: 358152 - RNA, 19 nt, Artificial Sequence
  Description of Artificial Sequence: Synthetic oligonucleotide
  Antisense Strand to SEQ ID NO: 358151
auucccagggcuuaguguc

SEQ ID NO: 358153 - RNA, 19 nt, Artificial Sequence
  Description of Artificial Sequence: Synthetic oligonucleotide
  Sense Strand Starting at position 502 of SEQ ID NO: 316113
ggcucaagguccuaaguca

SEQ ID NO: 358154 - RNA, 19 nt, Artificial Sequence
  Description of Artificial Sequence: Synthetic oligonucleotide
  Antisense Strand to SEQ ID NO: 358153
ugacuuaggaccuugagcc

SEQ ID NO: 358155 - RNA, 19 nt, Artificial Sequence
  Description of Artificial Sequence: Synthetic oligonucleotide
  Sense Strand Starting at position 502 of SEQ ID NO: 316137
gcaagcagauguucacgua

SEQ ID NO: 358156 - RNA, 19 nt, Artificial Sequence
  Description of Artificial Sequence: Synthetic oligonucleotide
  Antisense Strand to SEQ ID NO: 358155
uacgugaacaucugcuugc

SEQ ID NO: 358157 - RNA, 19 nt, Artificial Sequence
  Description of Artificial Sequence: Synthetic oligonucleotide
  Sense Strand Starting at position 502 of SEQ ID NO: 316140
agcagauguucacguaugu

SEQ ID NO: 358158 - RNA, 19 nt, Artificial Sequence
  Description of Artificial Sequence: Synthetic oligonucleotide
  Antisense Strand to SEQ ID NO: 358157
acauacgugaacaucugcu

SEQ ID NO: 358159 - RNA, 19 nt, Artificial Sequence
  Description of Artificial Sequence: Synthetic oligonucleotide
  Sense Strand Starting at position 502 of SEQ ID NO: 316174
gggcuagagucuccaaaca

SEQ ID NO: 358160 - RNA, 19 nt, Artificial Sequence
  Description of Artificial Sequence: Synthetic oligonucleotide
  Antisense Strand to SEQ ID NO: 358159
uguuuggagacucuagccc

SEQ ID NO: 358161 - RNA, 19 nt, Artificial Sequence
  Description of Artificial Sequence: Synthetic oligonucleotide
  Sense Strand Starting at position 502 of SEQ ID NO: 316216
cucucuagcucuguguaga

SEQ ID NO: 358162 - RNA, 19 nt, Artificial Sequence
  Description of Artificial Sequence: Synthetic oligonucleotide
  Antisense Strand to SEQ ID NO: 358161
ucuacacagagcuagagag

SEQ ID NO: 358163 - RNA, 19 nt, Artificial Sequence
  Description of Artificial Sequence: Synthetic oligonucleotide
  Sense Strand Starting at position 502 of SEQ ID NO: 316217
ucucuagcucuguguagaa

SEQ ID NO: 358164 - RNA, 19 nt, Artificial Sequence
  Description of Artificial Sequence: Synthetic oligonucleotide
  Antisense Strand to SEQ ID NO: 358163
uucuacacagagcuagaga

SEQ ID NO: 358165 - RNA, 19 nt, Artificial Sequence
  Description of Artificial Sequence: Synthetic oligonucleotide
  Sense Strand Starting at position 502 of SEQ ID NO: 316219
ucuagcucuguguagaaca

SEQ ID NO: 358166 - RNA, 19 nt, Artificial Sequence
  Description of Artificial Sequence: Synthetic oligonucleotide
  Antisense Strand to SEQ ID NO: 358165
uguucuacacagagcuaga

SEQ ID NO: 358167 - RNA, 19 nt, Artificial Sequence
  Description of Artificial Sequence: Synthetic oligonucleotide
  Sense Strand Starting at position 502 of SEQ ID NO: 316230
guagaacacugcuugagau

SEQ ID NO: 358168 - RNA, 19 nt, Artificial Sequence
  Description of Artificial Sequence: Synthetic oligonucleotide
  Antisense Strand to SEQ ID NO: 358167
aucucaagcaguguucuac

SEQ ID NO: 358169 - RNA, 19 nt, Artificial Sequence
  Description of Artificial Sequence: Synthetic oligonucleotide
  Sense Strand Starting at position 502 of SEQ ID NO: 316504
gaaacugaguuugaagaag

SEQ ID NO: 358170 - RNA, 19 nt, Artificial Sequence
  Description of Artificial Sequence: Synthetic oligonucleotide
  Antisense Strand to SEQ ID NO: 358169
cuucuucaaacucaguuuc

SEQ ID NO: 358171 - RNA, 19 nt, Artificial Sequence
  Description of Artificial Sequence: Synthetic oligonucleotide
  Sense Strand Starting at position 502 of SEQ ID NO: 317733
gcauguguccucugccacu

SEQ ID NO: 358172 - RNA, 19 nt, Artificial Sequence
  Description of Artificial Sequence: Synthetic oligonucleotide
  Antisense Strand to SEQ ID NO: 358171
aguggcagaggacacaugc

SEQ ID NO: 358173 - RNA, 19 nt, Artificial Sequence
  Description of Artificial Sequence: Synthetic oligonucleotide
  Sense Strand Starting at position 502 of SEQ ID NO: 317767
cagagucacuaugaggaaa

SEQ ID NO: 358174 - RNA, 19 nt, Artificial Sequence
  Description of Artificial Sequence: Synthetic oligonucleotide
  Antisense Strand to SEQ ID NO: 358173
uuuccucauagugacucug

SEQ ID NO: 358175 - RNA, 19 nt, Artificial Sequence
  Description of Artificial Sequence: Synthetic oligonucleotide
  Sense Strand Starting at position 502 of SEQ ID NO: 317838
gcagaugcccuuuaaaccu

SEQ ID NO: 358176 - RNA, 19 nt, Artificial Sequence
  Description of Artificial Sequence: Synthetic oligonucleotide
  Antisense Strand to SEQ ID NO: 358175
agguuuaaagggcaucugc

SEQ ID NO: 358177 - RNA, 19 nt, Artificial Sequence
  Description of Artificial Sequence: Synthetic oligonucleotide
  Sense Strand Starting at position 502 of SEQ ID NO: 317948
gggaguguuagggauggca

SEQ ID NO: 358178 - RNA, 19 nt, Artificial Sequence
  Description of Artificial Sequence: Synthetic oligonucleotide
  Antisense Strand to SEQ ID NO: 358177
ugccaucccuaacacuccc

SEQ ID NO: 358179 - RNA, 19 nt, Artificial Sequence
  Description of Artificial Sequence: Synthetic oligonucleotide
  Sense Strand Starting at position 502 of SEQ ID NO: 317993
gggaaaggcuucuggaacu

SEQ ID NO: 358180 - RNA, 19 nt, Artificial Sequence
  Description of Artificial Sequence: Synthetic oligonucleotide
  Antisense Strand to SEQ ID NO: 358179
aguuccagaagccuuuccc

SEQ ID NO: 358181 - RNA, 19 nt, Artificial Sequence
  Description of Artificial Sequence: Synthetic oligonucleotide
  Sense Strand Starting at position 502 of SEQ ID NO: 318066
cugagaagauucucuugac

SEQ ID NO: 358182 - RNA, 19 nt, Artificial Sequence
  Description of Artificial Sequence: Synthetic oligonucleotide
  Antisense Strand to SEQ ID NO: 358181
gucaagagaaucuucucag

SEQ ID NO: 358183 - RNA, 19 nt, Artificial Sequence
  Description of Artificial Sequence: Synthetic oligonucleotide
  Sense Strand Starting at position 502 of SEQ ID NO: 318067
ugagaagauucucuugacu

SEQ ID NO: 358184 - RNA, 19 nt, Artificial Sequence
  Description of Artificial Sequence: Synthetic oligonucleotide
  Antisense Strand to SEQ ID NO: 358183
agucaagagaaucuucuca

SEQ ID NO: 358185 - RNA, 19 nt, Artificial Sequence
  Description of Artificial Sequence: Synthetic oligonucleotide
  Sense Strand Starting at position 502 of SEQ ID NO: 318069
agaagauucucuugacucu

SEQ ID NO: 358186 - RNA, 19 nt, Artificial Sequence
  Description of Artificial Sequence: Synthetic oligonucleotide
  Antisense Strand to SEQ ID NO: 358185
agagucaagagaaucuucu

SEQ ID NO: 358187 - RNA, 19 nt, Artificial Sequence
  Description of Artificial Sequence: Synthetic oligonucleotide
  Sense Strand Starting at position 502 of SEQ ID NO: 318303
ucagauacaugcuaaugaa

SEQ ID NO: 358188 - RNA, 19 nt, Artificial Sequence
  Description of Artificial Sequence: Synthetic oligonucleotide
  Antisense Strand to SEQ ID NO: 358187
uucauuagcauguaucuga

SEQ ID NO: 358189 - RNA, 19 nt, Artificial Sequence
  Description of Artificial Sequence: Synthetic oligonucleotide
  Sense Strand Starting at position 502 of SEQ ID NO: 318454
gaauacagcuuugaaacga

SEQ ID NO: 358190 - RNA, 19 nt, Artificial Sequence
  Description of Artificial Sequence: Synthetic oligonucleotide
  Antisense Strand to SEQ ID NO: 358189
ucguuucaaagcuguauuc

SEQ ID NO: 358191 - RNA, 19 nt, Artificial Sequence
  Description of Artificial Sequence: Synthetic oligonucleotide
  Sense Strand Starting at position 502 of SEQ ID NO: 318763
cacagauauggcuguguac

SEQ ID NO: 358192 - RNA, 19 nt, Artificial Sequence
  Description of Artificial Sequence: Synthetic oligonucleotide
  Antisense Strand to SEQ ID NO: 358191
guacacagccauaucugug

SEQ ID NO: 358193 - RNA, 19 nt, Artificial Sequence
  Description of Artificial Sequence: Synthetic oligonucleotide
  Sense Strand Starting at position 502 of SEQ ID NO: 318765
cagauauggcuguguacag

SEQ ID NO: 358194 - RNA, 19 nt, Artificial Sequence
  Description of Artificial Sequence: Synthetic oligonucleotide
  Antisense Strand to SEQ ID NO: 358193
cuguacacagccauaucug

SEQ ID NO: 358195 - RNA, 19 nt, Artificial Sequence
  Description of Artificial Sequence: Synthetic oligonucleotide
  Sense Strand Starting at position 502 of SEQ ID NO: 318982
cagcuauacuuguagacag

SEQ ID NO: 358196 - RNA, 19 nt, Artificial Sequence
  Description of Artificial Sequence: Synthetic oligonucleotide
  Antisense Strand to SEQ ID NO: 358195
cugucuacaaguauagcug

SEQ ID NO: 358197 - RNA, 19 nt, Artificial Sequence
  Description of Artificial Sequence: Synthetic oligonucleotide
  Sense Strand Starting at position 502 of SEQ ID NO: 318992
uguagacagccauaauaca

SEQ ID NO: 358198 - RNA, 19 nt, Artificial Sequence
  Description of Artificial Sequence: Synthetic oligonucleotide
  Antisense Strand to SEQ ID NO: 358197
uguauuauggcugucuaca

SEQ ID NO: 358199 - RNA, 19 nt, Artificial Sequence
  Description of Artificial Sequence: Synthetic oligonucleotide
  Sense Strand Starting at position 502 of SEQ ID NO: 319117
auagcuguccaccaagaca

SEQ ID NO: 358200 - RNA, 19 nt, Artificial Sequence
  Description of Artificial Sequence: Synthetic oligonucleotide
  Antisense Strand to SEQ ID NO: 358199
ugucuugguggacagcuau

SEQ ID NO: 358201 - RNA, 19 nt, Artificial Sequence
  Description of Artificial Sequence: Synthetic oligonucleotide
  Sense Strand Starting at position 502 of SEQ ID NO: 319150
uggccauaauuauggauau

SEQ ID NO: 358202 - RNA, 19 nt, Artificial Sequence
  Description of Artificial Sequence: Synthetic oligonucleotide
  Antisense Strand to SEQ ID NO: 358201
auauccauaauuauggcca

SEQ ID NO: 358203 - RNA, 19 nt, Artificial Sequence
  Description of Artificial Sequence: Synthetic oligonucleotide
  Sense Strand Starting at position 502 of SEQ ID NO: 319151
ggccauaauuauggauaua

SEQ ID NO: 358204 - RNA, 19 nt, Artificial Sequence
  Description of Artificial Sequence: Synthetic oligonucleotide
  Antisense Strand to SEQ ID NO: 358203
uauauccauaauuauggcc

SEQ ID NO: 358205 - RNA, 19 nt, Artificial Sequence
  Description of Artificial Sequence: Synthetic oligonucleotide
  Sense Strand Starting at position 503 of SEQ ID NO: 315648
gagcgauuucguuucgcgu

SEQ ID NO: 358206 - RNA, 19 nt, Artificial Sequence
  Description of Artificial Sequence: Synthetic oligonucleotide
  Antisense Strand to SEQ ID NO: 358205
acgcgaaacgaaaucgcuc

SEQ ID NO: 358207 - RNA, 19 nt, Artificial Sequence
  Description of Artificial Sequence: Synthetic oligonucleotide
  Sense Strand Starting at position 503 of SEQ ID NO: 315747
auguaauuuagacggugca

SEQ ID NO: 358208 - RNA, 19 nt, Artificial Sequence
  Description of Artificial Sequence: Synthetic oligonucleotide
  Antisense Strand to SEQ ID NO: 358207
ugcaccgucuaaauuacau

SEQ ID NO: 358209 - RNA, 19 nt, Artificial Sequence
  Description of Artificial Sequence: Synthetic oligonucleotide
  Sense Strand Starting at position 503 of SEQ ID NO: 315748
uguaauuuagacggugcaa

SEQ ID NO: 358210 - RNA, 19 nt, Artificial Sequence
  Description of Artificial Sequence: Synthetic oligonucleotide
  Antisense Strand to SEQ ID NO: 358209
uugcaccgucuaaauuaca

SEQ ID NO: 358211 - RNA, 19 nt, Artificial Sequence
  Description of Artificial Sequence: Synthetic oligonucleotide
  Sense Strand Starting at position 503 of SEQ ID NO: 315766
aaauauugcccggagcaaa

SEQ ID NO: 358212 - RNA, 19 nt, Artificial Sequence
  Description of Artificial Sequence: Synthetic oligonucleotide
  Antisense Strand to SEQ ID NO: 358211
uuugcuccgggcaauauuu

SEQ ID NO: 358213 - RNA, 19 nt, Artificial Sequence
  Description of Artificial Sequence: Synthetic oligonucleotide
  Sense Strand Starting at position 503 of SEQ ID NO: 315868
uggcuacaggucgggaaau

SEQ ID NO: 358214 - RNA, 19 nt, Artificial Sequence
  Description of Artificial Sequence: Synthetic oligonucleotide
  Antisense Strand to SEQ ID NO: 358213
auuucccgaccuguagcca

SEQ ID NO: 358215 - RNA, 19 nt, Artificial Sequence
  Description of Artificial Sequence: Synthetic oligonucleotide
  Sense Strand Starting at position 503 of SEQ ID NO: 315870
gcuacaggucgggaaauca

SEQ ID NO: 358216 - RNA, 19 nt, Artificial Sequence
  Description of Artificial Sequence: Synthetic oligonucleotide
  Antisense Strand to SEQ ID NO: 358215
ugauuucccgaccuguagc

SEQ ID NO: 358217 - RNA, 19 nt, Artificial Sequence
  Description of Artificial Sequence: Synthetic oligonucleotide
  Sense Strand Starting at position 503 of SEQ ID NO: 315880
gggaaaucagcccgaggga

SEQ ID NO: 358218 - RNA, 19 nt, Artificial Sequence
  Description of Artificial Sequence: Synthetic oligonucleotide
  Antisense Strand to SEQ ID NO: 358217
ucccucgggcugauuuccc

SEQ ID NO: 358219 - RNA, 19 nt, Artificial Sequence
  Description of Artificial Sequence: Synthetic oligonucleotide
  Sense Strand Starting at position 503 of SEQ ID NO: 315913
auccacaucuagguuaaga

SEQ ID NO: 358220 - RNA, 19 nt, Artificial Sequence
  Description of Artificial Sequence: Synthetic oligonucleotide
  Antisense Strand to SEQ ID NO: 358219
ucuuaaccuagauguggau

SEQ ID NO: 358221 - RNA, 19 nt, Artificial Sequence
  Description of Artificial Sequence: Synthetic oligonucleotide
  Sense Strand Starting at position 503 of SEQ ID NO: 315958
ccuuaaggcugucuccaaa

SEQ ID NO: 358222 - RNA, 19 nt, Artificial Sequence
  Description of Artificial Sequence: Synthetic oligonucleotide
  Antisense Strand to SEQ ID NO: 358221
uuuggagacagccuuaagg

SEQ ID NO: 358223 - RNA, 19 nt, Artificial Sequence
  Description of Artificial Sequence: Synthetic oligonucleotide
  Sense Strand Starting at position 503 of SEQ ID NO: 316202
gggccauaaauccagaugu

SEQ ID NO: 358224 - RNA, 19 nt, Artificial Sequence
  Description of Artificial Sequence: Synthetic oligonucleotide
  Antisense Strand to SEQ ID NO: 358223
acaucuggauuuauggccc

SEQ ID NO: 358225 - RNA, 19 nt, Artificial Sequence
  Description of Artificial Sequence: Synthetic oligonucleotide
  Sense Strand Starting at position 503 of SEQ ID NO: 316204
gccauaaauccagauguca

SEQ ID NO: 358226 - RNA, 19 nt, Artificial Sequence
  Description of Artificial Sequence: Synthetic oligonucleotide
  Antisense Strand to SEQ ID NO: 358225
ugacaucuggauuuauggc

SEQ ID NO: 358227 - RNA, 19 nt, Artificial Sequence
  Description of Artificial Sequence: Synthetic oligonucleotide
  Sense Strand Starting at position 503 of SEQ ID NO: 316316
gcaggaucuccagggagga

SEQ ID NO: 358228 - RNA, 19 nt, Artificial Sequence
  Description of Artificial Sequence: Synthetic oligonucleotide
  Antisense Strand to SEQ ID NO: 358227
uccucccuggagauccugc

SEQ ID NO: 358229 - RNA, 19 nt, Artificial Sequence
  Description of Artificial Sequence: Synthetic oligonucleotide
  Sense Strand Starting at position 503 of SEQ ID NO: 317441
ggagguuuccucggaaugg

SEQ ID NO: 358230 - RNA, 19 nt, Artificial Sequence
  Description of Artificial Sequence: Synthetic oligonucleotide
  Antisense Strand to SEQ ID NO: 358229
ccauuccgaggaaaccucc

SEQ ID NO: 358231 - RNA, 19 nt, Artificial Sequence
  Description of Artificial Sequence: Synthetic oligonucleotide
  Sense Strand Starting at position 503 of SEQ ID NO: 317521
acccuaacucacuguggaa

SEQ ID NO: 358232 - RNA, 19 nt, Artificial Sequence
  Description of Artificial Sequence: Synthetic oligonucleotide
  Antisense Strand to SEQ ID NO: 358231
uuccacagugaguuagggu

SEQ ID NO: 358233 - RNA, 19 nt, Artificial Sequence
  Description of Artificial Sequence: Synthetic oligonucleotide
  Sense Strand Starting at position 503 of SEQ ID NO: 317573
gugucaucagccgcgggau

SEQ ID NO: 358234 - RNA, 19 nt, Artificial Sequence
  Description of Artificial Sequence: Synthetic oligonucleotide
  Antisense Strand to SEQ ID NO: 358233
aucccgcggcugaugacac

SEQ ID NO: 358235 - RNA, 19 nt, Artificial Sequence
  Description of Artificial Sequence: Synthetic oligonucleotide
  Sense Strand Starting at position 503 of SEQ ID NO: 317642
ggcucuuagcucugggaga

SEQ ID NO: 358236 - RNA, 19 nt, Artificial Sequence
  Description of Artificial Sequence: Synthetic oligonucleotide
  Antisense Strand to SEQ ID NO: 358235
ucucccagagcuaagagcc

SEQ ID NO: 358237 - RNA, 19 nt, Artificial Sequence
  Description of Artificial Sequence: Synthetic oligonucleotide
  Sense Strand Starting at position 503 of SEQ ID NO: 317644
cucuuagcucugggagaaa

SEQ ID NO: 358238 - RNA, 19 nt, Artificial Sequence
  Description of Artificial Sequence: Synthetic oligonucleotide
  Antisense Strand to SEQ ID NO: 358237
uuucucccagagcuaagag

SEQ ID NO: 358239 - RNA, 19 nt, Artificial Sequence
  Description of Artificial Sequence: Synthetic oligonucleotide
  Sense Strand Starting at position 503 of SEQ ID NO: 317773
acaggagccugauucuuga

SEQ ID NO: 358240 - RNA, 19 nt, Artificial Sequence
  Description of Artificial Sequence: Synthetic oligonucleotide
  Antisense Strand to SEQ ID NO: 358239
ucaagaaucaggcuccugu

SEQ ID NO: 358241 - RNA, 19 nt, Artificial Sequence
  Description of Artificial Sequence: Synthetic oligonucleotide
  Sense Strand Starting at position 503 of SEQ ID NO: 317776
ggagccugauucuugacuu

SEQ ID NO: 358242 - RNA, 19 nt, Artificial Sequence
  Description of Artificial Sequence: Synthetic oligonucleotide
  Antisense Strand to SEQ ID NO: 358241
aagucaagaaucaggcucc

SEQ ID NO: 358243 - RNA, 19 nt, Artificial Sequence
  Description of Artificial Sequence: Synthetic oligonucleotide
  Sense Strand Starting at position 503 of SEQ ID NO: 317780
ccugauucuugacuuaaag

SEQ ID NO: 358244 - RNA, 19 nt, Artificial Sequence
  Description of Artificial Sequence: Synthetic oligonucleotide
  Antisense Strand to SEQ ID NO: 358243
cuuuaagucaagaaucagg

SEQ ID NO: 358245 - RNA, 19 nt, Artificial Sequence
  Description of Artificial Sequence: Synthetic oligonucleotide
  Sense Strand Starting at position 503 of SEQ ID NO: 317915
gucagagcuccuugaacug

SEQ ID NO: 358246 - RNA, 19 nt, Artificial Sequence
  Description of Artificial Sequence: Synthetic oligonucleotide
  Antisense Strand to SEQ ID NO: 358245
caguucaaggagcucugac

SEQ ID NO: 358247 - RNA, 19 nt, Artificial Sequence
  Description of Artificial Sequence: Synthetic oligonucleotide
  Sense Strand Starting at position 503 of SEQ ID NO: 318036
cuagcacugacagguguaa

SEQ ID NO: 358248 - RNA, 19 nt, Artificial Sequence
  Description of Artificial Sequence: Synthetic oligonucleotide
  Antisense Strand to SEQ ID NO: 358247
uuacaccugucagugcuag

SEQ ID NO: 358249 - RNA, 19 nt, Artificial Sequence
  Description of Artificial Sequence: Synthetic oligonucleotide
  Sense Strand Starting at position 503 of SEQ ID NO: 318038
agcacugacagguguaaga

SEQ ID NO: 358250 - RNA, 19 nt, Artificial Sequence
  Description of Artificial Sequence: Synthetic oligonucleotide
  Antisense Strand to SEQ ID NO: 358249
ucuuacaccugucagugcu

SEQ ID NO: 358251 - RNA, 19 nt, Artificial Sequence
  Description of Artificial Sequence: Synthetic oligonucleotide
  Sense Strand Starting at position 503 of SEQ ID NO: 318262
uugagaagcucuuuaugag

SEQ ID NO: 358252 - RNA, 19 nt, Artificial Sequence
  Description of Artificial Sequence: Synthetic oligonucleotide
  Antisense Strand to SEQ ID NO: 358251
cucauaaagagcuucucaa

SEQ ID NO: 358253 - RNA, 19 nt, Artificial Sequence
  Description of Artificial Sequence: Synthetic oligonucleotide
  Sense Strand Starting at position 503 of SEQ ID NO: 318263
ugagaagcucuuuaugagc

SEQ ID NO: 358254 - RNA, 19 nt, Artificial Sequence
  Description of Artificial Sequence: Synthetic oligonucleotide
  Antisense Strand to SEQ ID NO: 358253
gcucauaaagagcuucuca

SEQ ID NO: 358255 - RNA, 19 nt, Artificial Sequence
  Description of Artificial Sequence: Synthetic oligonucleotide
  Sense Strand Starting at position 503 of SEQ ID NO: 318385
cggacuuaaggagguuaaa

SEQ ID NO: 358256 - RNA, 19 nt, Artificial Sequence
  Description of Artificial Sequence: Synthetic oligonucleotide
  Antisense Strand to SEQ ID NO: 358255
uuuaaccuccuuaaguccg

SEQ ID NO: 358257 - RNA, 19 nt, Artificial Sequence
  Description of Artificial Sequence: Synthetic oligonucleotide
  Sense Strand Starting at position 503 of SEQ ID NO: 318664
uuggaugcccuccaaguua

SEQ ID NO: 358258 - RNA, 19 nt, Artificial Sequence
  Description of Artificial Sequence: Synthetic oligonucleotide
  Antisense Strand to SEQ ID NO: 358257
uaacuuggagggcauccaa

SEQ ID NO: 358259 - RNA, 19 nt, Artificial Sequence
  Description of Artificial Sequence: Synthetic oligonucleotide
  Sense Strand Starting at position 503 of SEQ ID NO: 318762
uuguauuauguguagacca

SEQ ID NO: 358260 - RNA, 19 nt, Artificial Sequence
  Description of Artificial Sequence: Synthetic oligonucleotide
  Antisense Strand to SEQ ID NO: 358259
uggucuacacauaauacaa

SEQ ID NO: 358261 - RNA, 19 nt, Artificial Sequence
  Description of Artificial Sequence: Synthetic oligonucleotide
  Sense Strand Starting at position 503 of SEQ ID NO: 318764
guauuauguguagaccagu

SEQ ID NO: 358262 - RNA, 19 nt, Artificial Sequence
  Description of Artificial Sequence: Synthetic oligonucleotide
  Antisense Strand to SEQ ID NO: 358261
acuggucuacacauaauac

SEQ ID NO: 358263 - RNA, 19 nt, Artificial Sequence
  Description of Artificial Sequence: Synthetic oligonucleotide
  Sense Strand Starting at position 503 of SEQ ID NO: 318803
cuaugaugguuuccuggua

SEQ ID NO: 358264 - RNA, 19 nt, Artificial Sequence
  Description of Artificial Sequence: Synthetic oligonucleotide
  Antisense Strand to SEQ ID NO: 358263
uaccaggaaaccaucauag

SEQ ID NO: 358265 - RNA, 19 nt, Artificial Sequence
  Description of Artificial Sequence: Synthetic oligonucleotide
  Sense Strand Starting at position 503 of SEQ ID NO: 318804
uaugaugguuuccugguau

SEQ ID NO: 358266 - RNA, 19 nt, Artificial Sequence
  Description of Artificial Sequence: Synthetic oligonucleotide
  Antisense Strand to SEQ ID NO: 358265
auaccaggaaaccaucaua

SEQ ID NO: 358267 - RNA, 19 nt, Artificial Sequence
  Description of Artificial Sequence: Synthetic oligonucleotide
  Sense Strand Starting at position 503 of SEQ ID NO: 318968
ucccacugccugugaucaa

SEQ ID NO: 358268 - RNA, 19 nt, Artificial Sequence
  Description of Artificial Sequence: Synthetic oligonucleotide
  Antisense Strand to SEQ ID NO: 358267
uugaucacaggcaguggga

SEQ ID NO: 358269 - RNA, 19 nt, Artificial Sequence
  Description of Artificial Sequence: Synthetic oligonucleotide
  Sense Strand Starting at position 503 of SEQ ID NO: 318980
ugaucaagucuuggcuaau

SEQ ID NO: 358270 - RNA, 19 nt, Artificial Sequence
  Description of Artificial Sequence: Synthetic oligonucleotide
  Antisense Strand to SEQ ID NO: 358269
auuagccaagacuugauca

SEQ ID NO: 358271 - RNA, 19 nt, Artificial Sequence
  Description of Artificial Sequence: Synthetic oligonucleotide
  Sense Strand Starting at position 503 of SEQ ID NO: 318981
gaucaagucuuggcuaauc

SEQ ID NO: 358272 - RNA, 19 nt, Artificial Sequence
  Description of Artificial Sequence: Synthetic oligonucleotide
  Antisense Strand to SEQ ID NO: 358271
gauuagccaagacuugauc

SEQ ID NO: 358273 - RNA, 19 nt, Artificial Sequence
  Description of Artificial Sequence: Synthetic oligonucleotide
  Sense Strand Starting at position 503 of SEQ ID NO: 319068
gggauaaucccuggacuuu

SEQ ID NO: 358274 - RNA, 19 nt, Artificial Sequence
  Description of Artificial Sequence: Synthetic oligonucleotide
  Antisense Strand to SEQ ID NO: 358273
aaaguccagggauuauccc

SEQ ID NO: 358275 - RNA, 19 nt, Artificial Sequence
  Description of Artificial Sequence: Synthetic oligonucleotide
  Sense Strand Starting at position 503 of SEQ ID NO: 319108
gacauaggguuaucacuac

SEQ ID NO: 358276 - RNA, 19 nt, Artificial Sequence
  Description of Artificial Sequence: Synthetic oligonucleotide
  Antisense Strand to SEQ ID NO: 358275
guagugauaacccuauguc

SEQ ID NO: 358277 - RNA, 19 nt, Artificial Sequence
  Description of Artificial Sequence: Synthetic oligonucleotide
  Sense Strand Starting at position 503 of SEQ ID NO: 319130
auaggccaucucuguauaa

SEQ ID NO: 358278 - RNA, 19 nt, Artificial Sequence
  Description of Artificial Sequence: Synthetic oligonucleotide
  Antisense Strand to SEQ ID NO: 358277
uuauacagagauggccuau

SEQ ID NO: 358279 - RNA, 19 nt, Artificial Sequence
  Description of Artificial Sequence: Synthetic oligonucleotide
  Sense Strand Starting at position 503 of SEQ ID NO: 319132
aggccaucucuguauaagu

SEQ ID NO: 358280 - RNA, 19 nt, Artificial Sequence
  Description of Artificial Sequence: Synthetic oligonucleotide
  Antisense Strand to SEQ ID NO: 358279
acuuauacagagauggccu

SEQ ID NO: 358281 - RNA, 19 nt, Artificial Sequence
  Description of Artificial Sequence: Synthetic oligonucleotide
  Sense Strand Starting at position 503 of SEQ ID NO: 319134
gccaucucuguauaaguca

SEQ ID NO: 358282 - RNA, 19 nt, Artificial Sequence
  Description of Artificial Sequence: Synthetic oligonucleotide
  Antisense Strand to SEQ ID NO: 358281
ugacuuauacagagauggc

SEQ ID NO: 358283 - RNA, 19 nt, Artificial Sequence
  Description of Artificial Sequence: Synthetic oligonucleotide
  Sense Strand Starting at position 503 of SEQ ID NO: 319137
aucucuguauaagucagau

SEQ ID NO: 358284 - RNA, 19 nt, Artificial Sequence
  Description of Artificial Sequence: Synthetic oligonucleotide
  Antisense Strand to SEQ ID NO: 358283
aucugacuuauacagagau

SEQ ID NO: 358285 - RNA, 19 nt, Artificial Sequence
  Description of Artificial Sequence: Synthetic oligonucleotide
  Sense Strand Starting at position 504 of SEQ ID NO: 315278
acagguaaugaaugcagua

SEQ ID NO: 358286 - RNA, 19 nt, Artificial Sequence
  Description of Artificial Sequence: Synthetic oligonucleotide
  Antisense Strand to SEQ ID NO: 358285
uacugcauucauuaccugu

SEQ ID NO: 358287 - RNA, 19 nt, Artificial Sequence
  Description of Artificial Sequence: Synthetic oligonucleotide
  Sense Strand Starting at position 504 of SEQ ID NO: 315528
uacugcugcuagguauuua

SEQ ID NO: 358288 - RNA, 19 nt, Artificial Sequence
  Description of Artificial Sequence: Synthetic oligonucleotide
  Antisense Strand to SEQ ID NO: 358287
uaaauaccuagcagcagua

SEQ ID NO: 358289 - RNA, 19 nt, Artificial Sequence
  Description of Artificial Sequence: Synthetic oligonucleotide
  Sense Strand Starting at position 504 of SEQ ID NO: 315595
aaaugugaaugguuacuga

SEQ ID NO: 358290 - RNA, 19 nt, Artificial Sequence
  Description of Artificial Sequence: Synthetic oligonucleotide
  Antisense Strand to SEQ ID NO: 358289
ucaguaaccauucacauuu

SEQ ID NO: 358291 - RNA, 19 nt, Artificial Sequence
  Description of Artificial Sequence: Synthetic oligonucleotide
  Sense Strand Starting at position 504 of SEQ ID NO: 315598
ugugaaugguuacugagga

SEQ ID NO: 358292 - RNA, 19 nt, Artificial Sequence
  Description of Artificial Sequence: Synthetic oligonucleotide
  Antisense Strand to SEQ ID NO: 358291
uccucaguaaccauucaca

SEQ ID NO: 358293 - RNA, 19 nt, Artificial Sequence
  Description of Artificial Sequence: Synthetic oligonucleotide
  Sense Strand Starting at position 504 of SEQ ID NO: 315781
ugcauaaugguuuaguaau

SEQ ID NO: 358294 - RNA, 19 nt, Artificial Sequence
  Description of Artificial Sequence: Synthetic oligonucleotide
  Antisense Strand to SEQ ID NO: 358293
auuacuaaaccauuaugca

SEQ ID NO: 358295 - RNA, 19 nt, Artificial Sequence
  Description of Artificial Sequence: Synthetic oligonucleotide
  Sense Strand Starting at position 504 of SEQ ID NO: 315787
augguuuaguaaucaaauc

SEQ ID NO: 358296 - RNA, 19 nt, Artificial Sequence
  Description of Artificial Sequence: Synthetic oligonucleotide
  Antisense Strand to SEQ ID NO: 358295
gauuugauuacuaaaccau

SEQ ID NO: 358297 - RNA, 19 nt, Artificial Sequence
  Description of Artificial Sequence: Synthetic oligonucleotide
  Sense Strand Starting at position 504 of SEQ ID NO: 315854
cuacuuuaacguggaaaca

SEQ ID NO: 358298 - RNA, 19 nt, Artificial Sequence
  Description of Artificial Sequence: Synthetic oligonucleotide
  Antisense Strand to SEQ ID NO: 358297
uguuuccacguuaaaguag

SEQ ID NO: 358299 - RNA, 19 nt, Artificial Sequence
  Description of Artificial Sequence: Synthetic oligonucleotide
  Sense Strand Starting at position 504 of SEQ ID NO: 315872
acucgagcacuugaugaaa

SEQ ID NO: 358300 - RNA, 19 nt, Artificial Sequence
  Description of Artificial Sequence: Synthetic oligonucleotide
  Antisense Strand to SEQ ID NO: 358299
uuucaucaagugcucgagu

SEQ ID NO: 358301 - RNA, 19 nt, Artificial Sequence
  Description of Artificial Sequence: Synthetic oligonucleotide
  Sense Strand Starting at position 504 of SEQ ID NO: 315923
gcaguuugaaaucgaauca

SEQ ID NO: 358302 - RNA, 19 nt, Artificial Sequence
  Description of Artificial Sequence: Synthetic oligonucleotide
  Antisense Strand to SEQ ID NO: 358301
ugauucgauuucaaacugc

SEQ ID NO: 358303 - RNA, 19 nt, Artificial Sequence
  Description of Artificial Sequence: Synthetic oligonucleotide
  Sense Strand Starting at position 504 of SEQ ID NO: 316063
ccuguuuaucaggaggucu

SEQ ID NO: 358304 - RNA, 19 nt, Artificial Sequence
  Description of Artificial Sequence: Synthetic oligonucleotide
  Antisense Strand to SEQ ID NO: 358303
agaccuccugauaaacagg

SEQ ID NO: 358305 - RNA, 19 nt, Artificial Sequence
  Description of Artificial Sequence: Synthetic oligonucleotide
  Sense Strand Starting at position 504 of SEQ ID NO: 316065
uguuuaucaggaggucuaa

SEQ ID NO: 358306 - RNA, 19 nt, Artificial Sequence
  Description of Artificial Sequence: Synthetic oligonucleotide
  Antisense Strand to SEQ ID NO: 358305
uuagaccuccugauaaaca

SEQ ID NO: 358307 - RNA, 19 nt, Artificial Sequence
  Description of Artificial Sequence: Synthetic oligonucleotide
  Sense Strand Starting at position 504 of SEQ ID NO: 316096
cugguauuucgagguuucu

SEQ ID NO: 358308 - RNA, 19 nt, Artificial Sequence
  Description of Artificial Sequence: Synthetic oligonucleotide
  Antisense Strand to SEQ ID NO: 358307
agaaaccucgaaauaccag

SEQ ID NO: 358309 - RNA, 19 nt, Artificial Sequence
  Description of Artificial Sequence: Synthetic oligonucleotide
  Sense Strand Starting at position 504 of SEQ ID NO: 316332
cgauaaaugcagcauuaag

SEQ ID NO: 358310 - RNA, 19 nt, Artificial Sequence
  Description of Artificial Sequence: Synthetic oligonucleotide
  Antisense Strand to SEQ ID NO: 358309
cuuaaugcugcauuuaucg

SEQ ID NO: 358311 - RNA, 19 nt, Artificial Sequence
  Description of Artificial Sequence: Synthetic oligonucleotide
  Sense Strand Starting at position 504 of SEQ ID NO: 316450
gacagaucggcacggauau

SEQ ID NO: 358312 - RNA, 19 nt, Artificial Sequence
  Description of Artificial Sequence: Synthetic oligonucleotide
  Antisense Strand to SEQ ID NO: 358311
auauccgugccgaucuguc

SEQ ID NO: 358313 - RNA, 19 nt, Artificial Sequence
  Description of Artificial Sequence: Synthetic oligonucleotide
  Sense Strand Starting at position 504 of SEQ ID NO: 316601
aaaugaguacuucgaauau

SEQ ID NO: 358314 - RNA, 19 nt, Artificial Sequence
  Description of Artificial Sequence: Synthetic oligonucleotide
  Antisense Strand to SEQ ID NO: 358313
auauucgaaguacucauuu

SEQ ID NO: 358315 - RNA, 19 nt, Artificial Sequence
  Description of Artificial Sequence: Synthetic oligonucleotide
  Sense Strand Starting at position 504 of SEQ ID NO: 316605
gaguacuucgaauauuaua

SEQ ID NO: 358316 - RNA, 19 nt, Artificial Sequence
  Description of Artificial Sequence: Synthetic oligonucleotide
  Antisense Strand to SEQ ID NO: 358315
uauaauauucgaaguacuc

SEQ ID NO: 358317 - RNA, 19 nt, Artificial Sequence
  Description of Artificial Sequence: Synthetic oligonucleotide
  Sense Strand Starting at position 504 of SEQ ID NO: 316683
agucucacgcuugaagaga

SEQ ID NO: 358318 - RNA, 19 nt, Artificial Sequence
  Description of Artificial Sequence: Synthetic oligonucleotide
  Antisense Strand to SEQ ID NO: 358317
ucucuucaagcgugagacu

SEQ ID NO: 358319 - RNA, 19 nt, Artificial Sequence
  Description of Artificial Sequence: Synthetic oligonucleotide
  Sense Strand Starting at position 504 of SEQ ID NO: 317501
agccgaucagccugagaaa

SEQ ID NO: 358320 - RNA, 19 nt, Artificial Sequence
  Description of Artificial Sequence: Synthetic oligonucleotide
  Antisense Strand to SEQ ID NO: 358319
uuucucaggcugaucggcu

SEQ ID NO: 358321 - RNA, 19 nt, Artificial Sequence
  Description of Artificial Sequence: Synthetic oligonucleotide
  Sense Strand Starting at position 504 of SEQ ID NO: 317502
gccgaucagccugagaaac

SEQ ID NO: 358322 - RNA, 19 nt, Artificial Sequence
  Description of Artificial Sequence: Synthetic oligonucleotide
  Antisense Strand to SEQ ID NO: 358321
guuucucaggcugaucggc

SEQ ID NO: 358323 - RNA, 19 nt, Artificial Sequence
  Description of Artificial Sequence: Synthetic oligonucleotide
  Sense Strand Starting at position 504 of SEQ ID NO: 317685
agaguugaggacggugaaa

SEQ ID NO: 358324 - RNA, 19 nt, Artificial Sequence
  Description of Artificial Sequence: Synthetic oligonucleotide
  Antisense Strand to SEQ ID NO: 358323
uuucaccguccucaacucu

SEQ ID NO: 358325 - RNA, 19 nt, Artificial Sequence
  Description of Artificial Sequence: Synthetic oligonucleotide
  Sense Strand Starting at position 504 of SEQ ID NO: 317704
cccagagacgcuggugaaa

SEQ ID NO: 358326 - RNA, 19 nt, Artificial Sequence
  Description of Artificial Sequence: Synthetic oligonucleotide
  Antisense Strand to SEQ ID NO: 358325
uuucaccagcgucucuggg

SEQ ID NO: 358327 - RNA, 19 nt, Artificial Sequence
  Description of Artificial Sequence: Synthetic oligonucleotide
  Sense Strand Starting at position 504 of SEQ ID NO: 317747
cuuugugauuggcuggaaa

SEQ ID NO: 358328 - RNA, 19 nt, Artificial Sequence
  Description of Artificial Sequence: Synthetic oligonucleotide
  Antisense Strand to SEQ ID NO: 358327
uuuccagccaaucacaaag

SEQ ID NO: 358329 - RNA, 19 nt, Artificial Sequence
  Description of Artificial Sequence: Synthetic oligonucleotide
  Sense Strand Starting at position 504 of SEQ ID NO: 317789
ucggugauuggugaagaga

SEQ ID NO: 358330 - RNA, 19 nt, Artificial Sequence
  Description of Artificial Sequence: Synthetic oligonucleotide
  Antisense Strand to SEQ ID NO: 358329
ucucuucaccaaucaccga

SEQ ID NO: 358331 - RNA, 19 nt, Artificial Sequence
  Description of Artificial Sequence: Synthetic oligonucleotide
  Sense Strand Starting at position 504 of SEQ ID NO: 317791
ggugauuggugaagagaag

SEQ ID NO: 358332 - RNA, 19 nt, Artificial Sequence
  Description of Artificial Sequence: Synthetic oligonucleotide
  Antisense Strand to SEQ ID NO: 358331
cuucucuucaccaaucacc

SEQ ID NO: 358333 - RNA, 19 nt, Artificial Sequence
  Description of Artificial Sequence: Synthetic oligonucleotide
  Sense Strand Starting at position 504 of SEQ ID NO: 317903
ucucauuggccugaagcuu

SEQ ID NO: 358334 - RNA, 19 nt, Artificial Sequence
  Description of Artificial Sequence: Synthetic oligonucleotide
  Antisense Strand to SEQ ID NO: 358333
aagcuucaggccaaugaga

SEQ ID NO: 358335 - RNA, 19 nt, Artificial Sequence
  Description of Artificial Sequence: Synthetic oligonucleotide
  Sense Strand Starting at position 504 of SEQ ID NO: 318457
gccauugauacagaggcuu

SEQ ID NO: 358336 - RNA, 19 nt, Artificial Sequence
  Description of Artificial Sequence: Synthetic oligonucleotide
  Antisense Strand to SEQ ID NO: 358335
aagccucuguaucaauggc

SEQ ID NO: 358337 - RNA, 19 nt, Artificial Sequence
  Description of Artificial Sequence: Synthetic oligonucleotide
  Sense Strand Starting at position 504 of SEQ ID NO: 318510
uggaaacgcccaugagaaa

SEQ ID NO: 358338 - RNA, 19 nt, Artificial Sequence
  Description of Artificial Sequence: Synthetic oligonucleotide
  Antisense Strand to SEQ ID NO: 358337
uuucucaugggcguuucca

SEQ ID NO: 358339 - RNA, 19 nt, Artificial Sequence
  Description of Artificial Sequence: Synthetic oligonucleotide
  Sense Strand Starting at position 504 of SEQ ID NO: 318661
gcccgugguagcuuuggau

SEQ ID NO: 358340 - RNA, 19 nt, Artificial Sequence
  Description of Artificial Sequence: Synthetic oligonucleotide
  Antisense Strand to SEQ ID NO: 358339
auccaaagcuaccacgggc

SEQ ID NO: 358341 - RNA, 19 nt, Artificial Sequence
  Description of Artificial Sequence: Synthetic oligonucleotide
  Sense Strand Starting at position 504 of SEQ ID NO: 318683
uuggaacuagggugaucua

SEQ ID NO: 358342 - RNA, 19 nt, Artificial Sequence
  Description of Artificial Sequence: Synthetic oligonucleotide
  Antisense Strand to SEQ ID NO: 358341
uagaucacccuaguuccaa

SEQ ID NO: 358343 - RNA, 19 nt, Artificial Sequence
  Description of Artificial Sequence: Synthetic oligonucleotide
  Sense Strand Starting at position 504 of SEQ ID NO: 318771
uuuggucugcuuuagaaca

SEQ ID NO: 358344 - RNA, 19 nt, Artificial Sequence
  Description of Artificial Sequence: Synthetic oligonucleotide
  Antisense Strand to SEQ ID NO: 358343
uguucuaaagcagaccaaa

SEQ ID NO: 358345 - RNA, 19 nt, Artificial Sequence
  Description of Artificial Sequence: Synthetic oligonucleotide
  Sense Strand Starting at position 504 of SEQ ID NO: 318779
gcuuuagaacagugaggua

SEQ ID NO: 358346 - RNA, 19 nt, Artificial Sequence
  Description of Artificial Sequence: Synthetic oligonucleotide
  Antisense Strand to SEQ ID NO: 358345
uaccucacuguucuaaagc

SEQ ID NO: 358347 - RNA, 19 nt, Artificial Sequence
  Description of Artificial Sequence: Synthetic oligonucleotide
  Sense Strand Starting at position 504 of SEQ ID NO: 318798
uggcuacgucaagauaaca

SEQ ID NO: 358348 - RNA, 19 nt, Artificial Sequence
  Description of Artificial Sequence: Synthetic oligonucleotide
  Antisense Strand to SEQ ID NO: 358347
uguuaucuugacguagcca

SEQ ID NO: 358349 - RNA, 19 nt, Artificial Sequence
  Description of Artificial Sequence: Synthetic oligonucleotide
  Sense Strand Starting at position 504 of SEQ ID NO: 318871
uuucuaccugcagagucau

SEQ ID NO: 358350 - RNA, 19 nt, Artificial Sequence
  Description of Artificial Sequence: Synthetic oligonucleotide
  Antisense Strand to SEQ ID NO: 358349
augacucugcagguagaaa

SEQ ID NO: 358351 - RNA, 19 nt, Artificial Sequence
  Description of Artificial Sequence: Synthetic oligonucleotide
  Sense Strand Starting at position 504 of SEQ ID NO: 318899
uuaagaugcugucuccaga

SEQ ID NO: 358352 - RNA, 19 nt, Artificial Sequence
  Description of Artificial Sequence: Synthetic oligonucleotide
  Antisense Strand to SEQ ID NO: 358351
ucuggagacagcaucuuaa

SEQ ID NO: 358353 - RNA, 19 nt, Artificial Sequence
  Description of Artificial Sequence: Synthetic oligonucleotide
  Sense Strand Starting at position 504 of SEQ ID NO: 318902
agaugcugucuccagaaag

SEQ ID NO: 358354 - RNA, 19 nt, Artificial Sequence
  Description of Artificial Sequence: Synthetic oligonucleotide
  Antisense Strand to SEQ ID NO: 358353
cuuucuggagacagcaucu

SEQ ID NO: 358355 - RNA, 19 nt, Artificial Sequence
  Description of Artificial Sequence: Synthetic oligonucleotide
  Sense Strand Starting at position 504 of SEQ ID NO: 318932
ggaccuauauuugaucaga

SEQ ID NO: 358356 - RNA, 19 nt, Artificial Sequence
  Description of Artificial Sequence: Synthetic oligonucleotide
  Antisense Strand to SEQ ID NO: 358355
ucugaucaaauauaggucc

SEQ ID NO: 358357 - RNA, 19 nt, Artificial Sequence
  Description of Artificial Sequence: Synthetic oligonucleotide
  Sense Strand Starting at position 504 of SEQ ID NO: 318945
aucagauuaccuggcucuu

SEQ ID NO: 358358 - RNA, 19 nt, Artificial Sequence
  Description of Artificial Sequence: Synthetic oligonucleotide
  Antisense Strand to SEQ ID NO: 358357
aagagccagguaaucugau

SEQ ID NO: 358359 - RNA, 19 nt, Artificial Sequence
  Description of Artificial Sequence: Synthetic oligonucleotide
  Sense Strand Starting at position 504 of SEQ ID NO: 318998
caaaguaagcuuugaugga

SEQ ID NO: 358360 - RNA, 19 nt, Artificial Sequence
  Description of Artificial Sequence: Synthetic oligonucleotide
  Antisense Strand to SEQ ID NO: 358359
uccaucaaagcuuacuuug

SEQ ID NO: 358361 - RNA, 19 nt, Artificial Sequence
  Description of Artificial Sequence: Synthetic oligonucleotide
  Sense Strand Starting at position 504 of SEQ ID NO: 319138
uuggaauauccaugccaua

SEQ ID NO: 358362 - RNA, 19 nt, Artificial Sequence
  Description of Artificial Sequence: Synthetic oligonucleotide
  Antisense Strand to SEQ ID NO: 358361
uauggcauggauauuccaa

SEQ ID NO: 358363 - RNA, 19 nt, Artificial Sequence
  Description of Artificial Sequence: Synthetic oligonucleotide
  Sense Strand Starting at position 504 of SEQ ID NO: 319187
gauuguugcccucaggaau

SEQ ID NO: 358364 - RNA, 19 nt, Artificial Sequence
  Description of Artificial Sequence: Synthetic oligonucleotide
  Antisense Strand to SEQ ID NO: 358363
auuccugagggcaacaauc

SEQ ID NO: 358365 - RNA, 19 nt, Artificial Sequence
  Description of Artificial Sequence: Synthetic oligonucleotide
  Sense Strand Starting at position 505 of SEQ ID NO: 315394
aaaguacugccaugagaaa

SEQ ID NO: 358366 - RNA, 19 nt, Artificial Sequence
  Description of Artificial Sequence: Synthetic oligonucleotide
  Antisense Strand to SEQ ID NO: 358365
uuucucauggcaguacuuu

SEQ ID NO: 358367 - RNA, 19 nt, Artificial Sequence
  Description of Artificial Sequence: Synthetic oligonucleotide
  Sense Strand Starting at position 505 of SEQ ID NO: 315458
uuagaagugucuuugagga

SEQ ID NO: 358368 - RNA, 19 nt, Artificial Sequence
  Description of Artificial Sequence: Synthetic oligonucleotide
  Antisense Strand to SEQ ID NO: 358367
uccucaaagacacuucuaa

SEQ ID NO: 358369 - RNA, 19 nt, Artificial Sequence
  Description of Artificial Sequence: Synthetic oligonucleotide
  Sense Strand Starting at position 505 of SEQ ID NO: 315485
aggauauuccucugaauau

SEQ ID NO: 358370 - RNA, 19 nt, Artificial Sequence
  Description of Artificial Sequence: Synthetic oligonucleotide
  Antisense Strand to SEQ ID NO: 358369
auauucagaggaauauccu

SEQ ID NO: 358371 - RNA, 19 nt, Artificial Sequence
  Description of Artificial Sequence: Synthetic oligonucleotide
  Sense Strand Starting at position 505 of SEQ ID NO: 315650
uuacucaaucucuagaggu

SEQ ID NO: 358372 - RNA, 19 nt, Artificial Sequence
  Description of Artificial Sequence: Synthetic oligonucleotide
  Antisense Strand to SEQ ID NO: 358371
accucuagagauugaguaa

SEQ ID NO: 358373 - RNA, 19 nt, Artificial Sequence
  Description of Artificial Sequence: Synthetic oligonucleotide
  Sense Strand Starting at position 505 of SEQ ID NO: 315652
acucaaucucuagaggucu

SEQ ID NO: 358374 - RNA, 19 nt, Artificial Sequence
  Description of Artificial Sequence: Synthetic oligonucleotide
  Antisense Strand to SEQ ID NO: 358373
agaccucuagagauugagu

SEQ ID NO: 358375 - RNA, 19 nt, Artificial Sequence
  Description of Artificial Sequence: Synthetic oligonucleotide
  Sense Strand Starting at position 505 of SEQ ID NO: 315663
agaggucuuagguaagagu

SEQ ID NO: 358376 - RNA, 19 nt, Artificial Sequence
  Description of Artificial Sequence: Synthetic oligonucleotide
  Antisense Strand to SEQ ID NO: 358375
acucuuaccuaagaccucu

SEQ ID NO: 358377 - RNA, 19 nt, Artificial Sequence
  Description of Artificial Sequence: Synthetic oligonucleotide
  Sense Strand Starting at position 505 of SEQ ID NO: 315672
agguaagaguucucaaacu

SEQ ID NO: 358378 - RNA, 19 nt, Artificial Sequence
  Description of Artificial Sequence: Synthetic oligonucleotide
  Antisense Strand to SEQ ID NO: 358377
aguuugagaacucuuaccu

SEQ ID NO: 358379 - RNA, 19 nt, Artificial Sequence
  Description of Artificial Sequence: Synthetic oligonucleotide
  Sense Strand Starting at position 505 of SEQ ID NO: 315739
cugaauuaguugucaacau

SEQ ID NO: 358380 - RNA, 19 nt, Artificial Sequence
  Description of Artificial Sequence: Synthetic oligonucleotide
  Antisense Strand to SEQ ID NO: 358379
auguugacaacuaauucag

SEQ ID NO: 358381 - RNA, 19 nt, Artificial Sequence
  Description of Artificial Sequence: Synthetic oligonucleotide
  Sense Strand Starting at position 505 of SEQ ID NO: 315886
guuauuagggaaggaguau

SEQ ID NO: 358382 - RNA, 19 nt, Artificial Sequence
  Description of Artificial Sequence: Synthetic oligonucleotide
  Antisense Strand to SEQ ID NO: 358381
auacuccuucccuaauaac

SEQ ID NO: 358383 - RNA, 19 nt, Artificial Sequence
  Description of Artificial Sequence: Synthetic oligonucleotide
  Sense Strand Starting at position 505 of SEQ ID NO: 315959
cuuugaucuccauagucca

SEQ ID NO: 358384 - RNA, 19 nt, Artificial Sequence
  Description of Artificial Sequence: Synthetic oligonucleotide
  Antisense Strand to SEQ ID NO: 358383
uggacuauggagaucaaag

SEQ ID NO: 358385 - RNA, 19 nt, Artificial Sequence
  Description of Artificial Sequence: Synthetic oligonucleotide
  Sense Strand Starting at position 505 of SEQ ID NO: 315969
cauaguccaugagucagau

SEQ ID NO: 358386 - RNA, 19 nt, Artificial Sequence
  Description of Artificial Sequence: Synthetic oligonucleotide
  Antisense Strand to SEQ ID NO: 358385
aucugacucauggacuaug

SEQ ID NO: 358387 - RNA, 19 nt, Artificial Sequence
  Description of Artificial Sequence: Synthetic oligonucleotide
  Sense Strand Starting at position 505 of SEQ ID NO: 316431
cuagcauagccagacaagu

SEQ ID NO: 358388 - RNA, 19 nt, Artificial Sequence
  Description of Artificial Sequence: Synthetic oligonucleotide
  Antisense Strand to SEQ ID NO: 358387
acuugucuggcuaugcuag

SEQ ID NO: 358389 - RNA, 19 nt, Artificial Sequence
  Description of Artificial Sequence: Synthetic oligonucleotide
  Sense Strand Starting at position 505 of SEQ ID NO: 316552
gguagaaucggacaggcua

SEQ ID NO: 358390 - RNA, 19 nt, Artificial Sequence
  Description of Artificial Sequence: Synthetic oligonucleotide
  Antisense Strand to SEQ ID NO: 358389
uagccuguccgauucuacc

SEQ ID NO: 358391 - RNA, 19 nt, Artificial Sequence
  Description of Artificial Sequence: Synthetic oligonucleotide
  Sense Strand Starting at position 505 of SEQ ID NO: 316609
gggaggugcguggaucaaa

SEQ ID NO: 358392 - RNA, 19 nt, Artificial Sequence
  Description of Artificial Sequence: Synthetic oligonucleotide
  Antisense Strand to SEQ ID NO: 358391
uuugauccacgcaccuccc

SEQ ID NO: 358393 - RNA, 19 nt, Artificial Sequence
  Description of Artificial Sequence: Synthetic oligonucleotide
  Sense Strand Starting at position 505 of SEQ ID NO: 317002
ggucaaugguucuuuggag

SEQ ID NO: 358394 - RNA, 19 nt, Artificial Sequence
  Description of Artificial Sequence: Synthetic oligonucleotide
  Antisense Strand to SEQ ID NO: 358393
cuccaaagaaccauugacc

SEQ ID NO: 358395 - RNA, 19 nt, Artificial Sequence
  Description of Artificial Sequence: Synthetic oligonucleotide
  Sense Strand Starting at position 505 of SEQ ID NO: 317058
ggaggauaguuaagaggga

SEQ ID NO: 358396 - RNA, 19 nt, Artificial Sequence
  Description of Artificial Sequence: Synthetic oligonucleotide
  Antisense Strand to SEQ ID NO: 358395
ucccucuuaacuauccucc

SEQ ID NO: 358397 - RNA, 19 nt, Artificial Sequence
  Description of Artificial Sequence: Synthetic oligonucleotide
  Sense Strand Starting at position 505 of SEQ ID NO: 317310
cagugaaaccuucgaucaa

SEQ ID NO: 358398 - RNA, 19 nt, Artificial Sequence
  Description of Artificial Sequence: Synthetic oligonucleotide
  Antisense Strand to SEQ ID NO: 358397
uugaucgaagguuucacug

SEQ ID NO: 358399 - RNA, 19 nt, Artificial Sequence
  Description of Artificial Sequence: Synthetic oligonucleotide
  Sense Strand Starting at position 505 of SEQ ID NO: 317384
cucugauuggcuuacaauc

SEQ ID NO: 358400 - RNA, 19 nt, Artificial Sequence
  Description of Artificial Sequence: Synthetic oligonucleotide
  Antisense Strand to SEQ ID NO: 358399
gauuguaagccaaucagag

SEQ ID NO: 358401 - RNA, 19 nt, Artificial Sequence
  Description of Artificial Sequence: Synthetic oligonucleotide
  Sense Strand Starting at position 505 of SEQ ID NO: 317525
ugaguuacccaguaacccu

SEQ ID NO: 358402 - RNA, 19 nt, Artificial Sequence
  Description of Artificial Sequence: Synthetic oligonucleotide
  Antisense Strand to SEQ ID NO: 358401
aggguuacuggguaacuca

SEQ ID NO: 358403 - RNA, 19 nt, Artificial Sequence
  Description of Artificial Sequence: Synthetic oligonucleotide
  Sense Strand Starting at position 505 of SEQ ID NO: 317895
agaaacgugcacugagaaa

SEQ ID NO: 358404 - RNA, 19 nt, Artificial Sequence
  Description of Artificial Sequence: Synthetic oligonucleotide
  Antisense Strand to SEQ ID NO: 358403
uuucucagugcacguuucu

SEQ ID NO: 358405 - RNA, 19 nt, Artificial Sequence
  Description of Artificial Sequence: Synthetic oligonucleotide
  Sense Strand Starting at position 505 of SEQ ID NO: 317926
agcgcuucgcauguauuaa

SEQ ID NO: 358406 - RNA, 19 nt, Artificial Sequence
  Description of Artificial Sequence: Synthetic oligonucleotide
  Antisense Strand to SEQ ID NO: 358405
uuaauacaugcgaagcgcu

SEQ ID NO: 358407 - RNA, 19 nt, Artificial Sequence
  Description of Artificial Sequence: Synthetic oligonucleotide
  Sense Strand Starting at position 505 of SEQ ID NO: 317946
ucauuuaauucugagacag

SEQ ID NO: 358408 - RNA, 19 nt, Artificial Sequence
  Description of Artificial Sequence: Synthetic oligonucleotide
  Antisense Strand to SEQ ID NO: 358407
cugucucagaauuaaauga

SEQ ID NO: 358409 - RNA, 19 nt, Artificial Sequence
  Description of Artificial Sequence: Synthetic oligonucleotide
  Sense Strand Starting at position 505 of SEQ ID NO: 318063
auaauuaugcagugacaua

SEQ ID NO: 358410 - RNA, 19 nt, Artificial Sequence
  Description of Artificial Sequence: Synthetic oligonucleotide
  Antisense Strand to SEQ ID NO: 358409
uaugucacugcauaauuau

SEQ ID NO: 358411 - RNA, 19 nt, Artificial Sequence
  Description of Artificial Sequence: Synthetic oligonucleotide
  Sense Strand Starting at position 505 of SEQ ID NO: 318075
ugacauauuggguaguggu

SEQ ID NO: 358412 - RNA, 19 nt, Artificial Sequence
  Description of Artificial Sequence: Synthetic oligonucleotide
  Antisense Strand to SEQ ID NO: 358411
accacuacccaauauguca

SEQ ID NO: 358413 - RNA, 19 nt, Artificial Sequence
  Description of Artificial Sequence: Synthetic oligonucleotide
  Sense Strand Starting at position 505 of SEQ ID NO: 318159
uguccuagacuguacaaua

SEQ ID NO: 358414 - RNA, 19 nt, Artificial Sequence
  Description of Artificial Sequence: Synthetic oligonucleotide
  Antisense Strand to SEQ ID NO: 358413
uauuguacagucuaggaca

SEQ ID NO: 358415 - RNA, 19 nt, Artificial Sequence
  Description of Artificial Sequence: Synthetic oligonucleotide
  Sense Strand Starting at position 505 of SEQ ID NO: 318201
uucugaagcagcuaggauu

SEQ ID NO: 358416 - RNA, 19 nt, Artificial Sequence
  Description of Artificial Sequence: Synthetic oligonucleotide
  Antisense Strand to SEQ ID NO: 358415
aauccuagcugcuucagaa

SEQ ID NO: 358417 - RNA, 19 nt, Artificial Sequence
  Description of Artificial Sequence: Synthetic oligonucleotide
  Sense Strand Starting at position 505 of SEQ ID NO: 318466
auguguugugagcaaagac

SEQ ID NO: 358418 - RNA, 19 nt, Artificial Sequence
  Description of Artificial Sequence: Synthetic oligonucleotide
  Antisense Strand to SEQ ID NO: 358417
gucuuugcucacaacacau

SEQ ID NO: 358419 - RNA, 19 nt, Artificial Sequence
  Description of Artificial Sequence: Synthetic oligonucleotide
  Sense Strand Starting at position 505 of SEQ ID NO: 318541
aauugugggcagcaaauau

SEQ ID NO: 358420 - RNA, 19 nt, Artificial Sequence
  Description of Artificial Sequence: Synthetic oligonucleotide
  Antisense Strand to SEQ ID NO: 358419
auauuugcugcccacaauu

SEQ ID NO: 358421 - RNA, 19 nt, Artificial Sequence
  Description of Artificial Sequence: Synthetic oligonucleotide
  Sense Strand Starting at position 505 of SEQ ID NO: 318550
cagcaaauauagguuaaga

SEQ ID NO: 358422 - RNA, 19 nt, Artificial Sequence
  Description of Artificial Sequence: Synthetic oligonucleotide
  Antisense Strand to SEQ ID NO: 358421
ucuuaaccuauauuugcug

SEQ ID NO: 358423 - RNA, 19 nt, Artificial Sequence
  Description of Artificial Sequence: Synthetic oligonucleotide
  Sense Strand Starting at position 505 of SEQ ID NO: 318575
ucacauugcccugaggauu

SEQ ID NO: 358424 - RNA, 19 nt, Artificial Sequence
  Description of Artificial Sequence: Synthetic oligonucleotide
  Antisense Strand to SEQ ID NO: 358423
aauccucagggcaauguga

SEQ ID NO: 358425 - RNA, 19 nt, Artificial Sequence
  Description of Artificial Sequence: Synthetic oligonucleotide
  Sense Strand Starting at position 505 of SEQ ID NO: 318578
cauugcccugaggauuauu

SEQ ID NO: 358426 - RNA, 19 nt, Artificial Sequence
  Description of Artificial Sequence: Synthetic oligonucleotide
  Antisense Strand to SEQ ID NO: 358425
aauaauccucagggcaaug

SEQ ID NO: 358427 - RNA, 19 nt, Artificial Sequence
  Description of Artificial Sequence: Synthetic oligonucleotide
  Sense Strand Starting at position 505 of SEQ ID NO: 318780
gggacuuggcaagaguauc

SEQ ID NO: 358428 - RNA, 19 nt, Artificial Sequence
  Description of Artificial Sequence: Synthetic oligonucleotide
  Antisense Strand to SEQ ID NO: 358427
gauacucuugccaaguccc

SEQ ID NO: 358429 - RNA, 19 nt, Artificial Sequence
  Description of Artificial Sequence: Synthetic oligonucleotide
  Sense Strand Starting at position 505 of SEQ ID NO: 318792
gaguaucacugaguagaau

SEQ ID NO: 358430 - RNA, 19 nt, Artificial Sequence
  Description of Artificial Sequence: Synthetic oligonucleotide
  Antisense Strand to SEQ ID NO: 358429
auucuacucagugauacuc

SEQ ID NO: 358431 - RNA, 19 nt, Artificial Sequence
  Description of Artificial Sequence: Synthetic oligonucleotide
  Sense Strand Starting at position 505 of SEQ ID NO: 318918
uguugcaacuagucaauuu

SEQ ID NO: 358432 - RNA, 19 nt, Artificial Sequence
  Description of Artificial Sequence: Synthetic oligonucleotide
  Antisense Strand to SEQ ID NO: 358431
aaauugacuaguugcaaca

SEQ ID NO: 358433 - RNA, 19 nt, Artificial Sequence
  Description of Artificial Sequence: Synthetic oligonucleotide
  Sense Strand Starting at position 505 of SEQ ID NO: 318971
ggguuauaacuguggaauu

SEQ ID NO: 358434 - RNA, 19 nt, Artificial Sequence
  Description of Artificial Sequence: Synthetic oligonucleotide
  Antisense Strand to SEQ ID NO: 358433
aauuccacaguuauaaccc

SEQ ID NO: 358435 - RNA, 19 nt, Artificial Sequence
  Description of Artificial Sequence: Synthetic oligonucleotide
  Sense Strand Starting at position 505 of SEQ ID NO: 319006
gggauagaauuagcagcua

SEQ ID NO: 358436 - RNA, 19 nt, Artificial Sequence
  Description of Artificial Sequence: Synthetic oligonucleotide
  Antisense Strand to SEQ ID NO: 358435
uagcugcuaauucuauccc

SEQ ID NO: 358437 - RNA, 19 nt, Artificial Sequence
  Description of Artificial Sequence: Synthetic oligonucleotide
  Sense Strand Starting at position 505 of SEQ ID NO: 319092
uuaguuguaaagcagaaga

SEQ ID NO: 358438 - RNA, 19 nt, Artificial Sequence
  Description of Artificial Sequence: Synthetic oligonucleotide
  Antisense Strand to SEQ ID NO: 358437
ucuucugcuuuacaacuaa

SEQ ID NO: 358439 - RNA, 19 nt, Artificial Sequence
  Description of Artificial Sequence: Synthetic oligonucleotide
  Sense Strand Starting at position 505 of SEQ ID NO: 319114
agcugugauggccaggaaa

SEQ ID NO: 358440 - RNA, 19 nt, Artificial Sequence
  Description of Artificial Sequence: Synthetic oligonucleotide
  Antisense Strand to SEQ ID NO: 358439
uuuccuggccaucacagcu

SEQ ID NO: 358441 - RNA, 19 nt, Artificial Sequence
  Description of Artificial Sequence: Synthetic oligonucleotide
  Sense Strand Starting at position 505 of SEQ ID NO: 319125
ccaggaaagugauugaugu

SEQ ID NO: 358442 - RNA, 19 nt, Artificial Sequence
  Description of Artificial Sequence: Synthetic oligonucleotide
  Antisense Strand to SEQ ID NO: 358441
acaucaaucacuuuccugg

SEQ ID NO: 358443 - RNA, 19 nt, Artificial Sequence
  Description of Artificial Sequence: Synthetic oligonucleotide
  Sense Strand Starting at position 505 of SEQ ID NO: 319126
caggaaagugauugauguu

SEQ ID NO: 358444 - RNA, 19 nt, Artificial Sequence
  Description of Artificial Sequence: Synthetic oligonucleotide
  Antisense Strand to SEQ ID NO: 358443
aacaucaaucacuuuccug

SEQ ID NO: 358445 - RNA, 19 nt, Artificial Sequence
  Description of Artificial Sequence: Synthetic oligonucleotide
  Sense Strand Starting at position 506 of SEQ ID NO: 315333
cuaggagguaggugauauu

SEQ ID NO: 358446 - RNA, 19 nt, Artificial Sequence
  Description of Artificial Sequence: Synthetic oligonucleotide
  Antisense Strand to SEQ ID NO: 358445
aauaucaccuaccuccuag

SEQ ID NO: 358447 - RNA, 19 nt, Artificial Sequence
  Description of Artificial Sequence: Synthetic oligonucleotide
  Sense Strand Starting at position 506 of SEQ ID NO: 315432
ggacauguauaucuagaau

SEQ ID NO: 358448 - RNA, 19 nt, Artificial Sequence
  Description of Artificial Sequence: Synthetic oligonucleotide
  Antisense Strand to SEQ ID NO: 358447
auucuagauauacaugucc

SEQ ID NO: 358449 - RNA, 19 nt, Artificial Sequence
  Description of Artificial Sequence: Synthetic oligonucleotide
  Sense Strand Starting at position 506 of SEQ ID NO: 315465
ucacuacgcuacucaagaa

SEQ ID NO: 358450 - RNA, 19 nt, Artificial Sequence
  Description of Artificial Sequence: Synthetic oligonucleotide
  Antisense Strand to SEQ ID NO: 358449
uucuugaguagcguaguga

SEQ ID NO: 358451 - RNA, 19 nt, Artificial Sequence
  Description of Artificial Sequence: Synthetic oligonucleotide
  Sense Strand Starting at position 506 of SEQ ID NO: 315706
acaacagaauauucucgau

SEQ ID NO: 358452 - RNA, 19 nt, Artificial Sequence
  Description of Artificial Sequence: Synthetic oligonucleotide
  Antisense Strand to SEQ ID NO: 358451
aucgagaauauucuguugu

SEQ ID NO: 358453 - RNA, 19 nt, Artificial Sequence
  Description of Artificial Sequence: Synthetic oligonucleotide
  Sense Strand Starting at position 506 of SEQ ID NO: 316109
uuugaauccugacuauagu

SEQ ID NO: 358454 - RNA, 19 nt, Artificial Sequence
  Description of Artificial Sequence: Synthetic oligonucleotide
  Antisense Strand to SEQ ID NO: 358453
acuauagucaggauucaaa

SEQ ID NO: 358455 - RNA, 19 nt, Artificial Sequence
  Description of Artificial Sequence: Synthetic oligonucleotide
  Sense Strand Starting at position 506 of SEQ ID NO: 316110
uugaauccugacuauaguu

SEQ ID NO: 358456 - RNA, 19 nt, Artificial Sequence
  Description of Artificial Sequence: Synthetic oligonucleotide
  Antisense Strand to SEQ ID NO: 358455
aacuauagucaggauucaa

SEQ ID NO: 358457 - RNA, 19 nt, Artificial Sequence
  Description of Artificial Sequence: Synthetic oligonucleotide
  Sense Strand Starting at position 506 of SEQ ID NO: 316142
gacgaaauaucucugggca

SEQ ID NO: 358458 - RNA, 19 nt, Artificial Sequence
  Description of Artificial Sequence: Synthetic oligonucleotide
  Antisense Strand to SEQ ID NO: 358457
ugcccagagauauuucguc

SEQ ID NO: 358459 - RNA, 19 nt, Artificial Sequence
  Description of Artificial Sequence: Synthetic oligonucleotide
  Sense Strand Starting at position 506 of SEQ ID NO: 316143
acgaaauaucucugggcaa

SEQ ID NO: 358460 - RNA, 19 nt, Artificial Sequence
  Description of Artificial Sequence: Synthetic oligonucleotide
  Antisense Strand to SEQ ID NO: 358459
uugcccagagauauuucgu

SEQ ID NO: 358461 - RNA, 19 nt, Artificial Sequence
  Description of Artificial Sequence: Synthetic oligonucleotide
  Sense Strand Starting at position 506 of SEQ ID NO: 316145
gaaauaucucugggcaaug

SEQ ID NO: 358462 - RNA, 19 nt, Artificial Sequence
  Description of Artificial Sequence: Synthetic oligonucleotide
  Antisense Strand to SEQ ID NO: 358461
cauugcccagagauauuuc

SEQ ID NO: 358463 - RNA, 19 nt, Artificial Sequence
  Description of Artificial Sequence: Synthetic oligonucleotide
  Sense Strand Starting at position 506 of SEQ ID NO: 316346
uuuagauuaggcgaaaguu

SEQ ID NO: 358464 - RNA, 19 nt, Artificial Sequence
  Description of Artificial Sequence: Synthetic oligonucleotide
  Antisense Strand to SEQ ID NO: 358463
aacuuucgccuaaucuaaa

SEQ ID NO: 358465 - RNA, 19 nt, Artificial Sequence
  Description of Artificial Sequence: Synthetic oligonucleotide
  Sense Strand Starting at position 506 of SEQ ID NO: 316356
gcgaaaguuacuuauugau

SEQ ID NO: 358466 - RNA, 19 nt, Artificial Sequence
  Description of Artificial Sequence: Synthetic oligonucleotide
  Antisense Strand to SEQ ID NO: 358465
aucaauaaguaacuuucgc

SEQ ID NO: 358467 - RNA, 19 nt, Artificial Sequence
  Description of Artificial Sequence: Synthetic oligonucleotide
  Sense Strand Starting at position 506 of SEQ ID NO: 316432
cugucuaauuugucuggca

SEQ ID NO: 358468 - RNA, 19 nt, Artificial Sequence
  Description of Artificial Sequence: Synthetic oligonucleotide
  Antisense Strand to SEQ ID NO: 358467
ugccagacaaauuagacag

SEQ ID NO: 358469 - RNA, 19 nt, Artificial Sequence
  Description of Artificial Sequence: Synthetic oligonucleotide
  Sense Strand Starting at position 506 of SEQ ID NO: 316433
ugucuaauuugucuggcau

SEQ ID NO: 358470 - RNA, 19 nt, Artificial Sequence
  Description of Artificial Sequence: Synthetic oligonucleotide
  Antisense Strand to SEQ ID NO: 358469
augccagacaaauuagaca

SEQ ID NO: 358471 - RNA, 19 nt, Artificial Sequence
  Description of Artificial Sequence: Synthetic oligonucleotide
  Sense Strand Starting at position 506 of SEQ ID NO: 316434
gucuaauuugucuggcaug

SEQ ID NO: 358472 - RNA, 19 nt, Artificial Sequence
  Description of Artificial Sequence: Synthetic oligonucleotide
  Antisense Strand to SEQ ID NO: 358471
caugccagacaaauuagac

SEQ ID NO: 358473 - RNA, 19 nt, Artificial Sequence
  Description of Artificial Sequence: Synthetic oligonucleotide
  Sense Strand Starting at position 506 of SEQ ID NO: 316632
auggguuuauggguauuga

SEQ ID NO: 358474 - RNA, 19 nt, Artificial Sequence
  Description of Artificial Sequence: Synthetic oligonucleotide
  Antisense Strand to SEQ ID NO: 358473
ucaauacccauaaacccau

SEQ ID NO: 358475 - RNA, 19 nt, Artificial Sequence
  Description of Artificial Sequence: Synthetic oligonucleotide
  Sense Strand Starting at position 506 of SEQ ID NO: 316705
ucgacauaugccuauugag

SEQ ID NO: 358476 - RNA, 19 nt, Artificial Sequence
  Description of Artificial Sequence: Synthetic oligonucleotide
  Antisense Strand to SEQ ID NO: 358475
cucaauaggcauaugucga

SEQ ID NO: 358477 - RNA, 19 nt, Artificial Sequence
  Description of Artificial Sequence: Synthetic oligonucleotide
  Sense Strand Starting at position 506 of SEQ ID NO: 317411
gauuaugucuuacuggaag

SEQ ID NO: 358478 - RNA, 19 nt, Artificial Sequence
  Description of Artificial Sequence: Synthetic oligonucleotide
  Antisense Strand to SEQ ID NO: 358477
cuuccaguaagacauaauc

SEQ ID NO: 358479 - RNA, 19 nt, Artificial Sequence
  Description of Artificial Sequence: Synthetic oligonucleotide
  Sense Strand Starting at position 506 of SEQ ID NO: 317413
uuaugucuuacuggaagga

SEQ ID NO: 358480 - RNA, 19 nt, Artificial Sequence
  Description of Artificial Sequence: Synthetic oligonucleotide
  Antisense Strand to SEQ ID NO: 358479
uccuuccaguaagacauaa

SEQ ID NO: 358481 - RNA, 19 nt, Artificial Sequence
  Description of Artificial Sequence: Synthetic oligonucleotide
  Sense Strand Starting at position 506 of SEQ ID NO: 317417
gucuuacuggaaggauguu

SEQ ID NO: 358482 - RNA, 19 nt, Artificial Sequence
  Description of Artificial Sequence: Synthetic oligonucleotide
  Antisense Strand to SEQ ID NO: 358481
aacauccuuccaguaagac

SEQ ID NO: 358483 - RNA, 19 nt, Artificial Sequence
  Description of Artificial Sequence: Synthetic oligonucleotide
  Sense Strand Starting at position 506 of SEQ ID NO: 317515
gaugcauuccaggaacguu

SEQ ID NO: 358484 - RNA, 19 nt, Artificial Sequence
  Description of Artificial Sequence: Synthetic oligonucleotide
  Antisense Strand to SEQ ID NO: 358483
aacguuccuggaaugcauc

SEQ ID NO: 358485 - RNA, 19 nt, Artificial Sequence
  Description of Artificial Sequence: Synthetic oligonucleotide
  Sense Strand Starting at position 506 of SEQ ID NO: 317549
uugguuaucuuauuaacug

SEQ ID NO: 358486 - RNA, 19 nt, Artificial Sequence
  Description of Artificial Sequence: Synthetic oligonucleotide
  Antisense Strand to SEQ ID NO: 358485
caguuaauaagauaaccaa

SEQ ID NO: 358487 - RNA, 19 nt, Artificial Sequence
  Description of Artificial Sequence: Synthetic oligonucleotide
  Sense Strand Starting at position 506 of SEQ ID NO: 317626
gcugaugagaaaugugauu

SEQ ID NO: 358488 - RNA, 19 nt, Artificial Sequence
  Description of Artificial Sequence: Synthetic oligonucleotide
  Antisense Strand to SEQ ID NO: 358487
aaucacauuucucaucagc

SEQ ID NO: 358489 - RNA, 19 nt, Artificial Sequence
  Description of Artificial Sequence: Synthetic oligonucleotide
  Sense Strand Starting at position 506 of SEQ ID NO: 317628
ugaugagaaaugugauugu

SEQ ID NO: 358490 - RNA, 19 nt, Artificial Sequence
  Description of Artificial Sequence: Synthetic oligonucleotide
  Antisense Strand to SEQ ID NO: 358489
acaaucacauuucucauca

SEQ ID NO: 358491 - RNA, 19 nt, Artificial Sequence
  Description of Artificial Sequence: Synthetic oligonucleotide
  Sense Strand Starting at position 506 of SEQ ID NO: 317631
ugagaaaugugauuguaau

SEQ ID NO: 358492 - RNA, 19 nt, Artificial Sequence
  Description of Artificial Sequence: Synthetic oligonucleotide
  Antisense Strand to SEQ ID NO: 358491
auuacaaucacauuucuca

SEQ ID NO: 358493 - RNA, 19 nt, Artificial Sequence
  Description of Artificial Sequence: Synthetic oligonucleotide
  Sense Strand Starting at position 506 of SEQ ID NO: 317632
gagaaaugugauuguaaua

SEQ ID NO: 358494 - RNA, 19 nt, Artificial Sequence
  Description of Artificial Sequence: Synthetic oligonucleotide
  Antisense Strand to SEQ ID NO: 358493
uauuacaaucacauuucuc

SEQ ID NO: 358495 - RNA, 19 nt, Artificial Sequence
  Description of Artificial Sequence: Synthetic oligonucleotide
  Sense Strand Starting at position 506 of SEQ ID NO: 317770
uuucguggacguuucguaa

SEQ ID NO: 358496 - RNA, 19 nt, Artificial Sequence
  Description of Artificial Sequence: Synthetic oligonucleotide
  Antisense Strand to SEQ ID NO: 358495
uuacgaaacguccacgaaa

SEQ ID NO: 358497 - RNA, 19 nt, Artificial Sequence
  Description of Artificial Sequence: Synthetic oligonucleotide
  Sense Strand Starting at position 506 of SEQ ID NO: 317814
ccuaaagucgaucaguacu

SEQ ID NO: 358498 - RNA, 19 nt, Artificial Sequence
  Description of Artificial Sequence: Synthetic oligonucleotide
  Antisense Strand to SEQ ID NO: 358497
aguacugaucgacuuuagg

SEQ ID NO: 358499 - RNA, 19 nt, Artificial Sequence
  Description of Artificial Sequence: Synthetic oligonucleotide
  Sense Strand Starting at position 506 of SEQ ID NO: 317817
aaagucgaucaguacugaa

SEQ ID NO: 358500 - RNA, 19 nt, Artificial Sequence
  Description of Artificial Sequence: Synthetic oligonucleotide
  Antisense Strand to SEQ ID NO: 358499
uucaguacugaucgacuuu

SEQ ID NO: 358501 - RNA, 19 nt, Artificial Sequence
  Description of Artificial Sequence: Synthetic oligonucleotide
  Sense Strand Starting at position 506 of SEQ ID NO: 318170
uguuguauacaucagaaau

SEQ ID NO: 358502 - RNA, 19 nt, Artificial Sequence
  Description of Artificial Sequence: Synthetic oligonucleotide
  Antisense Strand to SEQ ID NO: 358501
auuucugauguauacaaca

SEQ ID NO: 358503 - RNA, 19 nt, Artificial Sequence
  Description of Artificial Sequence: Synthetic oligonucleotide
  Sense Strand Starting at position 506 of SEQ ID NO: 318181
ucagaaauuugggauucuc

SEQ ID NO: 358504 - RNA, 19 nt, Artificial Sequence
  Description of Artificial Sequence: Synthetic oligonucleotide
  Antisense Strand to SEQ ID NO: 358503
gagaaucccaaauuucuga

SEQ ID NO: 358505 - RNA, 19 nt, Artificial Sequence
  Description of Artificial Sequence: Synthetic oligonucleotide
  Sense Strand Starting at position 506 of SEQ ID NO: 318190
ugggauucucauuagugug

SEQ ID NO: 358506 - RNA, 19 nt, Artificial Sequence
  Description of Artificial Sequence: Synthetic oligonucleotide
  Antisense Strand to SEQ ID NO: 358505
cacacuaaugagaauccca

SEQ ID NO: 358507 - RNA, 19 nt, Artificial Sequence
  Description of Artificial Sequence: Synthetic oligonucleotide
  Sense Strand Starting at position 506 of SEQ ID NO: 318747
agagguguuccgggauuaa

SEQ ID NO: 358508 - RNA, 19 nt, Artificial Sequence
  Description of Artificial Sequence: Synthetic oligonucleotide
  Antisense Strand to SEQ ID NO: 358507
uuaaucccggaacaccucu

SEQ ID NO: 358509 - RNA, 19 nt, Artificial Sequence
  Description of Artificial Sequence: Synthetic oligonucleotide
  Sense Strand Starting at position 506 of SEQ ID NO: 318751
guguuccgggauuaauaga

SEQ ID NO: 358510 - RNA, 19 nt, Artificial Sequence
  Description of Artificial Sequence: Synthetic oligonucleotide
  Antisense Strand to SEQ ID NO: 358509
ucuauuaaucccggaacac

SEQ ID NO: 358511 - RNA, 19 nt, Artificial Sequence
  Description of Artificial Sequence: Synthetic oligonucleotide
  Sense Strand Starting at position 506 of SEQ ID NO: 318850
uuagaauuauuugacagga

SEQ ID NO: 358512 - RNA, 19 nt, Artificial Sequence
  Description of Artificial Sequence: Synthetic oligonucleotide
  Antisense Strand to SEQ ID NO: 358511
uccugucaaauaauucuaa

SEQ ID NO: 358513 - RNA, 19 nt, Artificial Sequence
  Description of Artificial Sequence: Synthetic oligonucleotide
  Sense Strand Starting at position 506 of SEQ ID NO: 318894
caugcaaagcuugaaggau

SEQ ID NO: 358514 - RNA, 19 nt, Artificial Sequence
  Description of Artificial Sequence: Synthetic oligonucleotide
  Antisense Strand to SEQ ID NO: 358513
auccuucaagcuuugcaug

SEQ ID NO: 358515 - RNA, 19 nt, Artificial Sequence
  Description of Artificial Sequence: Synthetic oligonucleotide
  Sense Strand Starting at position 506 of SEQ ID NO: 319028
caggaugauuuagaguuaa

SEQ ID NO: 358516 - RNA, 19 nt, Artificial Sequence
  Description of Artificial Sequence: Synthetic oligonucleotide
  Antisense Strand to SEQ ID NO: 358515
uuaacucuaaaucauccug

SEQ ID NO: 358517 - RNA, 19 nt, Artificial Sequence
  Description of Artificial Sequence: Synthetic oligonucleotide
  Sense Strand Starting at position 506 of SEQ ID NO: 319117
agcagugagaccuacuagu

SEQ ID NO: 358518 - RNA, 19 nt, Artificial Sequence
  Description of Artificial Sequence: Synthetic oligonucleotide
  Antisense Strand to SEQ ID NO: 358517
acuaguaggucucacugcu

SEQ ID NO: 358519 - RNA, 19 nt, Artificial Sequence
  Description of Artificial Sequence: Synthetic oligonucleotide
  Sense Strand Starting at position 506 of SEQ ID NO: 319198
guggaaaucaucuggucua

SEQ ID NO: 358520 - RNA, 19 nt, Artificial Sequence
  Description of Artificial Sequence: Synthetic oligonucleotide
  Antisense Strand to SEQ ID NO: 358519
uagaccagaugauuuccac

SEQ ID NO: 358521 - RNA, 19 nt, Artificial Sequence
  Description of Artificial Sequence: Synthetic oligonucleotide
  Sense Strand Starting at position 506 of SEQ ID NO: 319201
gaaaucaucuggucuacag

SEQ ID NO: 358522 - RNA, 19 nt, Artificial Sequence
  Description of Artificial Sequence: Synthetic oligonucleotide
  Antisense Strand to SEQ ID NO: 358521
cuguagaccagaugauuuc

SEQ ID NO: 358523 - RNA, 19 nt, Artificial Sequence
  Description of Artificial Sequence: Synthetic oligonucleotide
  Sense Strand Starting at position 506 of SEQ ID NO: 319208
ucuggucuacagggaauua

SEQ ID NO: 358524 - RNA, 19 nt, Artificial Sequence
  Description of Artificial Sequence: Synthetic oligonucleotide
  Antisense Strand to SEQ ID NO: 358523
uaauucccuguagaccaga

SEQ ID NO: 358525 - RNA, 19 nt, Artificial Sequence
  Description of Artificial Sequence: Synthetic oligonucleotide
  Sense Strand Starting at position 507 of SEQ ID NO: 315664
uggcaucaugcuuauagua

SEQ ID NO: 358526 - RNA, 19 nt, Artificial Sequence
  Description of Artificial Sequence: Synthetic oligonucleotide
  Antisense Strand to SEQ ID NO: 358525
uacuauaagcaugaugcca

SEQ ID NO: 358527 - RNA, 19 nt, Artificial Sequence
  Description of Artificial Sequence: Synthetic oligonucleotide
  Sense Strand Starting at position 507 of SEQ ID NO: 315737
acugauuugucagcuccuu

SEQ ID NO: 358528 - RNA, 19 nt, Artificial Sequence
  Description of Artificial Sequence: Synthetic oligonucleotide
  Antisense Strand to SEQ ID NO: 358527
aaggagcugacaaaucagu

SEQ ID NO: 358529 - RNA, 19 nt, Artificial Sequence
  Description of Artificial Sequence: Synthetic oligonucleotide
  Sense Strand Starting at position 507 of SEQ ID NO: 315772
uugcauugacacuaaguaa

SEQ ID NO: 358530 - RNA, 19 nt, Artificial Sequence
  Description of Artificial Sequence: Synthetic oligonucleotide
  Antisense Strand to SEQ ID NO: 358529
uuacuuagugucaaugcaa

SEQ ID NO: 358531 - RNA, 19 nt, Artificial Sequence
  Description of Artificial Sequence: Synthetic oligonucleotide
  Sense Strand Starting at position 507 of SEQ ID NO: 315885
agaaaucuguuccugacau

SEQ ID NO: 358532 - RNA, 19 nt, Artificial Sequence
  Description of Artificial Sequence: Synthetic oligonucleotide
  Antisense Strand to SEQ ID NO: 358531
augucaggaacagauuucu

SEQ ID NO: 358533 - RNA, 19 nt, Artificial Sequence
  Description of Artificial Sequence: Synthetic oligonucleotide
  Sense Strand Starting at position 507 of SEQ ID NO: 316083
cuucuauuaucaguuggau

SEQ ID NO: 358534 - RNA, 19 nt, Artificial Sequence
  Description of Artificial Sequence: Synthetic oligonucleotide
  Antisense Strand to SEQ ID NO: 358533
auccaacugauaauagaag

SEQ ID NO: 358535 - RNA, 19 nt, Artificial Sequence
  Description of Artificial Sequence: Synthetic oligonucleotide
  Sense Strand Starting at position 507 of SEQ ID NO: 316228
agaaccugagccugauauu

SEQ ID NO: 358536 - RNA, 19 nt, Artificial Sequence
  Description of Artificial Sequence: Synthetic oligonucleotide
  Antisense Strand to SEQ ID NO: 358535
aauaucaggcucagguucu

SEQ ID NO: 358537 - RNA, 19 nt, Artificial Sequence
  Description of Artificial Sequence: Synthetic oligonucleotide
  Sense Strand Starting at position 507 of SEQ ID NO: 316339
acuacagcuccucaggaau

SEQ ID NO: 358538 - RNA, 19 nt, Artificial Sequence
  Description of Artificial Sequence: Synthetic oligonucleotide
  Antisense Strand to SEQ ID NO: 358537
auuccugaggagcuguagu

SEQ ID NO: 358539 - RNA, 19 nt, Artificial Sequence
  Description of Artificial Sequence: Synthetic oligonucleotide
  Sense Strand Starting at position 507 of SEQ ID NO: 316345
gcuccucaggaaugaguaa

SEQ ID NO: 358540 - RNA, 19 nt, Artificial Sequence
  Description of Artificial Sequence: Synthetic oligonucleotide
  Antisense Strand to SEQ ID NO: 358539
uuacucauuccugaggagc

SEQ ID NO: 358541 - RNA, 19 nt, Artificial Sequence
  Description of Artificial Sequence: Synthetic oligonucleotide
  Sense Strand Starting at position 507 of SEQ ID NO: 316509
agacaacauguuggcuaau

SEQ ID NO: 358542 - RNA, 19 nt, Artificial Sequence
  Description of Artificial Sequence: Synthetic oligonucleotide
  Antisense Strand to SEQ ID NO: 358541
auuagccaacauguugucu

SEQ ID NO: 358543 - RNA, 19 nt, Artificial Sequence
  Description of Artificial Sequence: Synthetic oligonucleotide
  Sense Strand Starting at position 507 of SEQ ID NO: 316510
gacaacauguuggcuaauu

SEQ ID NO: 358544 - RNA, 19 nt, Artificial Sequence
  Description of Artificial Sequence: Synthetic oligonucleotide
  Antisense Strand to SEQ ID NO: 358543
aauuagccaacauguuguc

SEQ ID NO: 358545 - RNA, 19 nt, Artificial Sequence
  Description of Artificial Sequence: Synthetic oligonucleotide
  Sense Strand Starting at position 507 of SEQ ID NO: 316515
cauguuggcuaauuuguau

SEQ ID NO: 358546 - RNA, 19 nt, Artificial Sequence
  Description of Artificial Sequence: Synthetic oligonucleotide
  Antisense Strand to SEQ ID NO: 358545
auacaaauuagccaacaug

SEQ ID NO: 358547 - RNA, 19 nt, Artificial Sequence
  Description of Artificial Sequence: Synthetic oligonucleotide
  Sense Strand Starting at position 507 of SEQ ID NO: 316615
ugcauuaaauacuucgaaa

SEQ ID NO: 358548 - RNA, 19 nt, Artificial Sequence
  Description of Artificial Sequence: Synthetic oligonucleotide
  Antisense Strand to SEQ ID NO: 358547
uuucgaaguauuuaaugca

SEQ ID NO: 358549 - RNA, 19 nt, Artificial Sequence
  Description of Artificial Sequence: Synthetic oligonucleotide
  Sense Strand Starting at position 507 of SEQ ID NO: 316643
guaaaucaaucuguacuua

SEQ ID NO: 358550 - RNA, 19 nt, Artificial Sequence
  Description of Artificial Sequence: Synthetic oligonucleotide
  Antisense Strand to SEQ ID NO: 358549
uaaguacagauugauuuac

SEQ ID NO: 358551 - RNA, 19 nt, Artificial Sequence
  Description of Artificial Sequence: Synthetic oligonucleotide
  Sense Strand Starting at position 507 of SEQ ID NO: 316684
auuagaauuccaugccgag

SEQ ID NO: 358552 - RNA, 19 nt, Artificial Sequence
  Description of Artificial Sequence: Synthetic oligonucleotide
  Antisense Strand to SEQ ID NO: 358551
cucggcauggaauucuaau

SEQ ID NO: 358553 - RNA, 19 nt, Artificial Sequence
  Description of Artificial Sequence: Synthetic oligonucleotide
  Sense Strand Starting at position 507 of SEQ ID NO: 316757
agaggcuaguucccaauua

SEQ ID NO: 358554 - RNA, 19 nt, Artificial Sequence
  Description of Artificial Sequence: Synthetic oligonucleotide
  Antisense Strand to SEQ ID NO: 358553
uaauugggaacuagccucu

SEQ ID NO: 358555 - RNA, 19 nt, Artificial Sequence
  Description of Artificial Sequence: Synthetic oligonucleotide
  Sense Strand Starting at position 507 of SEQ ID NO: 316969
ucgugucaaagguauuaua

SEQ ID NO: 358556 - RNA, 19 nt, Artificial Sequence
  Description of Artificial Sequence: Synthetic oligonucleotide
  Antisense Strand to SEQ ID NO: 358555
uauaauaccuuugacacga

SEQ ID NO: 358557 - RNA, 19 nt, Artificial Sequence
  Description of Artificial Sequence: Synthetic oligonucleotide
  Sense Strand Starting at position 507 of SEQ ID NO: 317088
auaaauguucuguaccaca

SEQ ID NO: 358558 - RNA, 19 nt, Artificial Sequence
  Description of Artificial Sequence: Synthetic oligonucleotide
  Antisense Strand to SEQ ID NO: 358557
ugugguacagaacauuuau

SEQ ID NO: 358559 - RNA, 19 nt, Artificial Sequence
  Description of Artificial Sequence: Synthetic oligonucleotide
  Sense Strand Starting at position 507 of SEQ ID NO: 317369
ggcacuugguaacuaacau

SEQ ID NO: 358560 - RNA, 19 nt, Artificial Sequence
  Description of Artificial Sequence: Synthetic oligonucleotide
  Antisense Strand to SEQ ID NO: 358559
auguuaguuaccaagugcc

SEQ ID NO: 358561 - RNA, 19 nt, Artificial Sequence
  Description of Artificial Sequence: Synthetic oligonucleotide
  Sense Strand Starting at position 507 of SEQ ID NO: 317391
uacagucaugcagagacau

SEQ ID NO: 358562 - RNA, 19 nt, Artificial Sequence
  Description of Artificial Sequence: Synthetic oligonucleotide
  Antisense Strand to SEQ ID NO: 358561
augucucugcaugacugua

SEQ ID NO: 358563 - RNA, 19 nt, Artificial Sequence
  Description of Artificial Sequence: Synthetic oligonucleotide
  Sense Strand Starting at position 507 of SEQ ID NO: 317444
gagggugauccuuguuaua

SEQ ID NO: 358564 - RNA, 19 nt, Artificial Sequence
  Description of Artificial Sequence: Synthetic oligonucleotide
  Antisense Strand to SEQ ID NO: 358563
uauaacaaggaucacccuc

SEQ ID NO: 358565 - RNA, 19 nt, Artificial Sequence
  Description of Artificial Sequence: Synthetic oligonucleotide
  Sense Strand Starting at position 507 of SEQ ID NO: 317484
uacauuauugagugguaca

SEQ ID NO: 358566 - RNA, 19 nt, Artificial Sequence
  Description of Artificial Sequence: Synthetic oligonucleotide
  Antisense Strand to SEQ ID NO: 358565
uguaccacucaauaaugua

SEQ ID NO: 358567 - RNA, 19 nt, Artificial Sequence
  Description of Artificial Sequence: Synthetic oligonucleotide
  Sense Strand Starting at position 507 of SEQ ID NO: 317485
acauuauugagugguacag

SEQ ID NO: 358568 - RNA, 19 nt, Artificial Sequence
  Description of Artificial Sequence: Synthetic oligonucleotide
  Antisense Strand to SEQ ID NO: 358567
cuguaccacucaauaaugu

SEQ ID NO: 358569 - RNA, 19 nt, Artificial Sequence
  Description of Artificial Sequence: Synthetic oligonucleotide
  Sense Strand Starting at position 507 of SEQ ID NO: 317506
ggucuaauggcaggaacuu

SEQ ID NO: 358570 - RNA, 19 nt, Artificial Sequence
  Description of Artificial Sequence: Synthetic oligonucleotide
  Antisense Strand to SEQ ID NO: 358569
aaguuccugccauuagacc

SEQ ID NO: 358571 - RNA, 19 nt, Artificial Sequence
  Description of Artificial Sequence: Synthetic oligonucleotide
  Sense Strand Starting at position 507 of SEQ ID NO: 317507
gucuaauggcaggaacuuu

SEQ ID NO: 358572 - RNA, 19 nt, Artificial Sequence
  Description of Artificial Sequence: Synthetic oligonucleotide
  Antisense Strand to SEQ ID NO: 358571
aaaguuccugccauuagac

SEQ ID NO: 358573 - RNA, 19 nt, Artificial Sequence
  Description of Artificial Sequence: Synthetic oligonucleotide
  Sense Strand Starting at position 507 of SEQ ID NO: 317516
caggaacuuugaguugcaa

SEQ ID NO: 358574 - RNA, 19 nt, Artificial Sequence
  Description of Artificial Sequence: Synthetic oligonucleotide
  Antisense Strand to SEQ ID NO: 358573
uugcaacucaaaguuccug

SEQ ID NO: 358575 - RNA, 19 nt, Artificial Sequence
  Description of Artificial Sequence: Synthetic oligonucleotide
  Sense Strand Starting at position 507 of SEQ ID NO: 317518
ggaacuuugaguugcaauc

SEQ ID NO: 358576 - RNA, 19 nt, Artificial Sequence
  Description of Artificial Sequence: Synthetic oligonucleotide
  Antisense Strand to SEQ ID NO: 358575
gauugcaacucaaaguucc

SEQ ID NO: 358577 - RNA, 19 nt, Artificial Sequence
  Description of Artificial Sequence: Synthetic oligonucleotide
  Sense Strand Starting at position 507 of SEQ ID NO: 318021
gguccaguaguggaaauga

SEQ ID NO: 358578 - RNA, 19 nt, Artificial Sequence
  Description of Artificial Sequence: Synthetic oligonucleotide
  Antisense Strand to SEQ ID NO: 358577
ucauuuccacuacuggacc

SEQ ID NO: 358579 - RNA, 19 nt, Artificial Sequence
  Description of Artificial Sequence: Synthetic oligonucleotide
  Sense Strand Starting at position 507 of SEQ ID NO: 318101
gguagaauauaauucuguu

SEQ ID NO: 358580 - RNA, 19 nt, Artificial Sequence
  Description of Artificial Sequence: Synthetic oligonucleotide
  Antisense Strand to SEQ ID NO: 358579
aacagaauuauauucuacc

SEQ ID NO: 358581 - RNA, 19 nt, Artificial Sequence
  Description of Artificial Sequence: Synthetic oligonucleotide
  Sense Strand Starting at position 507 of SEQ ID NO: 318525
uuccuuaguccugacugau

SEQ ID NO: 358582 - RNA, 19 nt, Artificial Sequence
  Description of Artificial Sequence: Synthetic oligonucleotide
  Antisense Strand to SEQ ID NO: 358581
aucagucaggacuaaggaa

SEQ ID NO: 358583 - RNA, 19 nt, Artificial Sequence
  Description of Artificial Sequence: Synthetic oligonucleotide
  Sense Strand Starting at position 507 of SEQ ID NO: 318535
cugacugauuaccuguuua

SEQ ID NO: 358584 - RNA, 19 nt, Artificial Sequence
  Description of Artificial Sequence: Synthetic oligonucleotide
  Antisense Strand to SEQ ID NO: 358583
uaaacagguaaucagucag

SEQ ID NO: 358585 - RNA, 19 nt, Artificial Sequence
  Description of Artificial Sequence: Synthetic oligonucleotide
  Sense Strand Starting at position 507 of SEQ ID NO: 318539
cugauuaccuguuuauuau

SEQ ID NO: 358586 - RNA, 19 nt, Artificial Sequence
  Description of Artificial Sequence: Synthetic oligonucleotide
  Antisense Strand to SEQ ID NO: 358585
auaauaaacagguaaucag

SEQ ID NO: 358587 - RNA, 19 nt, Artificial Sequence
  Description of Artificial Sequence: Synthetic oligonucleotide
  Sense Strand Starting at position 507 of SEQ ID NO: 318582
gccaucauggccuaaauga

SEQ ID NO: 358588 - RNA, 19 nt, Artificial Sequence
  Description of Artificial Sequence: Synthetic oligonucleotide
  Antisense Strand to SEQ ID NO: 358587
ucauuuaggccaugauggc

SEQ ID NO: 358589 - RNA, 19 nt, Artificial Sequence
  Description of Artificial Sequence: Synthetic oligonucleotide
  Sense Strand Starting at position 507 of SEQ ID NO: 318622
ggugguuacagugaauaug

SEQ ID NO: 358590 - RNA, 19 nt, Artificial Sequence
  Description of Artificial Sequence: Synthetic oligonucleotide
  Antisense Strand to SEQ ID NO: 358589
cauauucacuguaaccacc

SEQ ID NO: 358591 - RNA, 19 nt, Artificial Sequence
  Description of Artificial Sequence: Synthetic oligonucleotide
  Sense Strand Starting at position 507 of SEQ ID NO: 318625
gguuacagugaauaugguu

SEQ ID NO: 358592 - RNA, 19 nt, Artificial Sequence
  Description of Artificial Sequence: Synthetic oligonucleotide
  Antisense Strand to SEQ ID NO: 358591
aaccauauucacuguaacc

SEQ ID NO: 358593 - RNA, 19 nt, Artificial Sequence
  Description of Artificial Sequence: Synthetic oligonucleotide
  Sense Strand Starting at position 507 of SEQ ID NO: 318667
guagacucucaaugggaca

SEQ ID NO: 358594 - RNA, 19 nt, Artificial Sequence
  Description of Artificial Sequence: Synthetic oligonucleotide
  Antisense Strand to SEQ ID NO: 358593
ugucccauugagagucuac

SEQ ID NO: 358595 - RNA, 19 nt, Artificial Sequence
  Description of Artificial Sequence: Synthetic oligonucleotide
  Sense Strand Starting at position 507 of SEQ ID NO: 318689
cgaugucauaauuagaguu

SEQ ID NO: 358596 - RNA, 19 nt, Artificial Sequence
  Description of Artificial Sequence: Synthetic oligonucleotide
  Antisense Strand to SEQ ID NO: 358595
aacucuaauuaugacaucg

SEQ ID NO: 358597 - RNA, 19 nt, Artificial Sequence
  Description of Artificial Sequence: Synthetic oligonucleotide
  Sense Strand Starting at position 507 of SEQ ID NO: 318935
uugcaagugaacugagauu

SEQ ID NO: 358598 - RNA, 19 nt, Artificial Sequence
  Description of Artificial Sequence: Synthetic oligonucleotide
  Antisense Strand to SEQ ID NO: 358597
aaucucaguucacuugcaa

SEQ ID NO: 358599 - RNA, 19 nt, Artificial Sequence
  Description of Artificial Sequence: Synthetic oligonucleotide
  Sense Strand Starting at position 507 of SEQ ID NO: 319161
aggacucagccucgggauu

SEQ ID NO: 358600 - RNA, 19 nt, Artificial Sequence
  Description of Artificial Sequence: Synthetic oligonucleotide
  Antisense Strand to SEQ ID NO: 358599
aaucccgaggcugaguccu

SEQ ID NO: 358601 - RNA, 19 nt, Artificial Sequence
  Description of Artificial Sequence: Synthetic oligonucleotide
  Sense Strand Starting at position 507 of SEQ ID NO: 319162
ggacucagccucgggauua

SEQ ID NO: 358602 - RNA, 19 nt, Artificial Sequence
  Description of Artificial Sequence: Synthetic oligonucleotide
  Antisense Strand to SEQ ID NO: 358601
uaaucccgaggcugagucc

SEQ ID NO: 358603 - RNA, 19 nt, Artificial Sequence
  Description of Artificial Sequence: Synthetic oligonucleotide
  Sense Strand Starting at position 507 of SEQ ID NO: 319173
cgggauuauucagcuagga

SEQ ID NO: 358604 - RNA, 19 nt, Artificial Sequence
  Description of Artificial Sequence: Synthetic oligonucleotide
  Antisense Strand to SEQ ID NO: 358603
uccuagcugaauaaucccg

SEQ ID NO: 358605 - RNA, 19 nt, Artificial Sequence
  Description of Artificial Sequence: Synthetic oligonucleotide
  Sense Strand Starting at position 508 of SEQ ID NO: 315237
cugucaaaggguuaugguu

SEQ ID NO: 358606 - RNA, 19 nt, Artificial Sequence
  Description of Artificial Sequence: Synthetic oligonucleotide
  Antisense Strand to SEQ ID NO: 358605
aaccauaacccuuugacag

SEQ ID NO: 358607 - RNA, 19 nt, Artificial Sequence
  Description of Artificial Sequence: Synthetic oligonucleotide
  Sense Strand Starting at position 508 of SEQ ID NO: 315330
aggaguuccuggccaauau

SEQ ID NO: 358608 - RNA, 19 nt, Artificial Sequence
  Description of Artificial Sequence: Synthetic oligonucleotide
  Antisense Strand to SEQ ID NO: 358607
auauuggccaggaacuccu

SEQ ID NO: 358609 - RNA, 19 nt, Artificial Sequence
  Description of Artificial Sequence: Synthetic oligonucleotide
  Sense Strand Starting at position 508 of SEQ ID NO: 315331
ggaguuccuggccaauaug

SEQ ID NO: 358610 - RNA, 19 nt, Artificial Sequence
  Description of Artificial Sequence: Synthetic oligonucleotide
  Antisense Strand to SEQ ID NO: 358609
cauauuggccaggaacucc

SEQ ID NO: 358611 - RNA, 19 nt, Artificial Sequence
  Description of Artificial Sequence: Synthetic oligonucleotide
  Sense Strand Starting at position 508 of SEQ ID NO: 315600
aagguuaugguguggauua

SEQ ID NO: 358612 - RNA, 19 nt, Artificial Sequence
  Description of Artificial Sequence: Synthetic oligonucleotide
  Antisense Strand to SEQ ID NO: 358611
uaauccacaccauaaccuu

SEQ ID NO: 358613 - RNA, 19 nt, Artificial Sequence
  Description of Artificial Sequence: Synthetic oligonucleotide
  Sense Strand Starting at position 508 of SEQ ID NO: 315644
cugugacuauuuguaugua

SEQ ID NO: 358614 - RNA, 19 nt, Artificial Sequence
  Description of Artificial Sequence: Synthetic oligonucleotide
  Antisense Strand to SEQ ID NO: 358613
uacauacaaauagucacag

SEQ ID NO: 358615 - RNA, 19 nt, Artificial Sequence
  Description of Artificial Sequence: Synthetic oligonucleotide
  Sense Strand Starting at position 508 of SEQ ID NO: 315656
guauguacugcgguuagca

SEQ ID NO: 358616 - RNA, 19 nt, Artificial Sequence
  Description of Artificial Sequence: Synthetic oligonucleotide
  Antisense Strand to SEQ ID NO: 358615
ugcuaaccgcaguacauac

SEQ ID NO: 358617 - RNA, 19 nt, Artificial Sequence
  Description of Artificial Sequence: Synthetic oligonucleotide
  Sense Strand Starting at position 508 of SEQ ID NO: 315694
agcgauguuaaggaugaca

SEQ ID NO: 358618 - RNA, 19 nt, Artificial Sequence
  Description of Artificial Sequence: Synthetic oligonucleotide
  Antisense Strand to SEQ ID NO: 358617
ugucauccuuaacaucgcu

SEQ ID NO: 358619 - RNA, 19 nt, Artificial Sequence
  Description of Artificial Sequence: Synthetic oligonucleotide
  Sense Strand Starting at position 508 of SEQ ID NO: 315696
cgauguuaaggaugacagu

SEQ ID NO: 358620 - RNA, 19 nt, Artificial Sequence
  Description of Artificial Sequence: Synthetic oligonucleotide
  Antisense Strand to SEQ ID NO: 358619
acugucauccuuaacaucg

SEQ ID NO: 358621 - RNA, 19 nt, Artificial Sequence
  Description of Artificial Sequence: Synthetic oligonucleotide
  Sense Strand Starting at position 508 of SEQ ID NO: 315705
ggaugacaguuauuauuau

SEQ ID NO: 358622 - RNA, 19 nt, Artificial Sequence
  Description of Artificial Sequence: Synthetic oligonucleotide
  Antisense Strand to SEQ ID NO: 358621
auaauaauaacugucaucc

SEQ ID NO: 358623 - RNA, 19 nt, Artificial Sequence
  Description of Artificial Sequence: Synthetic oligonucleotide
  Sense Strand Starting at position 508 of SEQ ID NO: 315815
gggaaauccuauuaauuuc

SEQ ID NO: 358624 - RNA, 19 nt, Artificial Sequence
  Description of Artificial Sequence: Synthetic oligonucleotide
  Antisense Strand to SEQ ID NO: 358623
gaaauuaauaggauuuccc

SEQ ID NO: 358625 - RNA, 19 nt, Artificial Sequence
  Description of Artificial Sequence: Synthetic oligonucleotide
  Sense Strand Starting at position 508 of SEQ ID NO: 315891
aguacuuuaaagcgacaga

SEQ ID NO: 358626 - RNA, 19 nt, Artificial Sequence
  Description of Artificial Sequence: Synthetic oligonucleotide
  Antisense Strand to SEQ ID NO: 358625
ucugucgcuuuaaaguacu

SEQ ID NO: 358627 - RNA, 19 nt, Artificial Sequence
  Description of Artificial Sequence: Synthetic oligonucleotide
  Sense Strand Starting at position 508 of SEQ ID NO: 315892
guacuuuaaagcgacagau

SEQ ID NO: 358628 - RNA, 19 nt, Artificial Sequence
  Description of Artificial Sequence: Synthetic oligonucleotide
  Antisense Strand to SEQ ID NO: 358627
aucugucgcuuuaaaguac

SEQ ID NO: 358629 - RNA, 19 nt, Artificial Sequence
  Description of Artificial Sequence: Synthetic oligonucleotide
  Sense Strand Starting at position 508 of SEQ ID NO: 315894
acuuuaaagcgacagauug

SEQ ID NO: 358630 - RNA, 19 nt, Artificial Sequence
  Description of Artificial Sequence: Synthetic oligonucleotide
  Antisense Strand to SEQ ID NO: 358629
caaucugucgcuuuaaagu

SEQ ID NO: 358631 - RNA, 19 nt, Artificial Sequence
  Description of Artificial Sequence: Synthetic oligonucleotide
  Sense Strand Starting at position 508 of SEQ ID NO: 315896
uuuaaagcgacagauuguu

SEQ ID NO: 358632 - RNA, 19 nt, Artificial Sequence
  Description of Artificial Sequence: Synthetic oligonucleotide
  Antisense Strand to SEQ ID NO: 358631
aacaaucugucgcuuuaaa

SEQ ID NO: 358633 - RNA, 19 nt, Artificial Sequence
  Description of Artificial Sequence: Synthetic oligonucleotide
  Sense Strand Starting at position 508 of SEQ ID NO: 315984
cagcuacuucuugagguuu

SEQ ID NO: 358634 - RNA, 19 nt, Artificial Sequence
  Description of Artificial Sequence: Synthetic oligonucleotide
  Antisense Strand to SEQ ID NO: 358633
aaaccucaagaaguagcug

SEQ ID NO: 358635 - RNA, 19 nt, Artificial Sequence
  Description of Artificial Sequence: Synthetic oligonucleotide
  Sense Strand Starting at position 508 of SEQ ID NO: 316288
gcguguuaggcuuugugua

SEQ ID NO: 358636 - RNA, 19 nt, Artificial Sequence
  Description of Artificial Sequence: Synthetic oligonucleotide
  Antisense Strand to SEQ ID NO: 358635
uacacaaagccuaacacgc

SEQ ID NO: 358637 - RNA, 19 nt, Artificial Sequence
  Description of Artificial Sequence: Synthetic oligonucleotide
  Sense Strand Starting at position 508 of SEQ ID NO: 316293
uuaggcuuuguguagggaa

SEQ ID NO: 358638 - RNA, 19 nt, Artificial Sequence
  Description of Artificial Sequence: Synthetic oligonucleotide
  Antisense Strand to SEQ ID NO: 358637
uucccuacacaaagccuaa

SEQ ID NO: 358639 - RNA, 19 nt, Artificial Sequence
  Description of Artificial Sequence: Synthetic oligonucleotide
  Sense Strand Starting at position 508 of SEQ ID NO: 316295
aggcuuuguguagggaaag

SEQ ID NO: 358640 - RNA, 19 nt, Artificial Sequence
  Description of Artificial Sequence: Synthetic oligonucleotide
  Antisense Strand to SEQ ID NO: 358639
cuuucccuacacaaagccu

SEQ ID NO: 358641 - RNA, 19 nt, Artificial Sequence
  Description of Artificial Sequence: Synthetic oligonucleotide
  Sense Strand Starting at position 508 of SEQ ID NO: 316509
gguacucgagguuaaauga

SEQ ID NO: 358642 - RNA, 19 nt, Artificial Sequence
  Description of Artificial Sequence: Synthetic oligonucleotide
  Antisense Strand to SEQ ID NO: 358641
ucauuuaaccucgaguacc

SEQ ID NO: 358643 - RNA, 19 nt, Artificial Sequence
  Description of Artificial Sequence: Synthetic oligonucleotide
  Sense Strand Starting at position 508 of SEQ ID NO: 316753
aaauguacgugauuaucaa

SEQ ID NO: 358644 - RNA, 19 nt, Artificial Sequence
  Description of Artificial Sequence: Synthetic oligonucleotide
  Antisense Strand to SEQ ID NO: 358643
uugauaaucacguacauuu

SEQ ID NO: 358645 - RNA, 19 nt, Artificial Sequence
  Description of Artificial Sequence: Synthetic oligonucleotide
  Sense Strand Starting at position 508 of SEQ ID NO: 316754
aauguacgugauuaucaac

SEQ ID NO: 358646 - RNA, 19 nt, Artificial Sequence
  Description of Artificial Sequence: Synthetic oligonucleotide
  Antisense Strand to SEQ ID NO: 358645
guugauaaucacguacauu

SEQ ID NO: 358647 - RNA, 19 nt, Artificial Sequence
  Description of Artificial Sequence: Synthetic oligonucleotide
  Sense Strand Starting at position 508 of SEQ ID NO: 316812
uuucuaucggguuaagaaa

SEQ ID NO: 358648 - RNA, 19 nt, Artificial Sequence
  Description of Artificial Sequence: Synthetic oligonucleotide
  Antisense Strand to SEQ ID NO: 358647
uuucuuaacccgauagaaa

SEQ ID NO: 358649 - RNA, 19 nt, Artificial Sequence
  Description of Artificial Sequence: Synthetic oligonucleotide
  Sense Strand Starting at position 508 of SEQ ID NO: 316847
gugggugaaacuuggaaau

SEQ ID NO: 358650 - RNA, 19 nt, Artificial Sequence
  Description of Artificial Sequence: Synthetic oligonucleotide
  Antisense Strand to SEQ ID NO: 358649
auuuccaaguuucacccac

SEQ ID NO: 358651 - RNA, 19 nt, Artificial Sequence
  Description of Artificial Sequence: Synthetic oligonucleotide
  Sense Strand Starting at position 508 of SEQ ID NO: 317673
ugugcuuccuccuuauuua

SEQ ID NO: 358652 - RNA, 19 nt, Artificial Sequence
  Description of Artificial Sequence: Synthetic oligonucleotide
  Antisense Strand to SEQ ID NO: 358651
uaaauaaggaggaagcaca

SEQ ID NO: 358653 - RNA, 19 nt, Artificial Sequence
  Description of Artificial Sequence: Synthetic oligonucleotide
  Sense Strand Starting at position 508 of SEQ ID NO: 317674
gugcuuccuccuuauuuau

SEQ ID NO: 358654 - RNA, 19 nt, Artificial Sequence
  Description of Artificial Sequence: Synthetic oligonucleotide
  Antisense Strand to SEQ ID NO: 358653
auaaauaaggaggaagcac

SEQ ID NO: 358655 - RNA, 19 nt, Artificial Sequence
  Description of Artificial Sequence: Synthetic oligonucleotide
  Sense Strand Starting at position 508 of SEQ ID NO: 317785
ggugguggugcccaauaaa

SEQ ID NO: 358656 - RNA, 19 nt, Artificial Sequence
  Description of Artificial Sequence: Synthetic oligonucleotide
  Antisense Strand to SEQ ID NO: 358655
uuuauugggcaccaccacc

SEQ ID NO: 358657 - RNA, 19 nt, Artificial Sequence
  Description of Artificial Sequence: Synthetic oligonucleotide
  Sense Strand Starting at position 508 of SEQ ID NO: 317788
gguggugcccaauaaauau

SEQ ID NO: 358658 - RNA, 19 nt, Artificial Sequence
  Description of Artificial Sequence: Synthetic oligonucleotide
  Antisense Strand to SEQ ID NO: 358657
auauuuauugggcaccacc

SEQ ID NO: 358659 - RNA, 19 nt, Artificial Sequence
  Description of Artificial Sequence: Synthetic oligonucleotide
  Sense Strand Starting at position 508 of SEQ ID NO: 317910
aaaguaacacgugauuagu

SEQ ID NO: 358660 - RNA, 19 nt, Artificial Sequence
  Description of Artificial Sequence: Synthetic oligonucleotide
  Antisense Strand to SEQ ID NO: 358659
acuaaucacguguuacuuu

SEQ ID NO: 358661 - RNA, 19 nt, Artificial Sequence
  Description of Artificial Sequence: Synthetic oligonucleotide
  Sense Strand Starting at position 508 of SEQ ID NO: 317992
auccauguagucugaagaa

SEQ ID NO: 358662 - RNA, 19 nt, Artificial Sequence
  Description of Artificial Sequence: Synthetic oligonucleotide
  Antisense Strand to SEQ ID NO: 358661
uucuucagacuacauggau

SEQ ID NO: 358663 - RNA, 19 nt, Artificial Sequence
  Description of Artificial Sequence: Synthetic oligonucleotide
  Sense Strand Starting at position 508 of SEQ ID NO: 318041
gaaaucugacacugugcuu

SEQ ID NO: 358664 - RNA, 19 nt, Artificial Sequence
  Description of Artificial Sequence: Synthetic oligonucleotide
  Antisense Strand to SEQ ID NO: 358663
aagcacagugucagauuuc

SEQ ID NO: 358665 - RNA, 19 nt, Artificial Sequence
  Description of Artificial Sequence: Synthetic oligonucleotide
  Sense Strand Starting at position 508 of SEQ ID NO: 318215
acagucggugcccaauaaa

SEQ ID NO: 358666 - RNA, 19 nt, Artificial Sequence
  Description of Artificial Sequence: Synthetic oligonucleotide
  Antisense Strand to SEQ ID NO: 358665
uuuauugggcaccgacugu

SEQ ID NO: 358667 - RNA, 19 nt, Artificial Sequence
  Description of Artificial Sequence: Synthetic oligonucleotide
  Sense Strand Starting at position 508 of SEQ ID NO: 318317
gagauagaguaauaauuuc

SEQ ID NO: 358668 - RNA, 19 nt, Artificial Sequence
  Description of Artificial Sequence: Synthetic oligonucleotide
  Antisense Strand to SEQ ID NO: 358667
gaaauuauuacucuaucuc

SEQ ID NO: 358669 - RNA, 19 nt, Artificial Sequence
  Description of Artificial Sequence: Synthetic oligonucleotide
  Sense Strand Starting at position 508 of SEQ ID NO: 318344
auguaagaauggcuucuuu

SEQ ID NO: 358670 - RNA, 19 nt, Artificial Sequence
  Description of Artificial Sequence: Synthetic oligonucleotide
  Antisense Strand to SEQ ID NO: 358669
aaagaagccauucuuacau

SEQ ID NO: 358671 - RNA, 19 nt, Artificial Sequence
  Description of Artificial Sequence: Synthetic oligonucleotide
  Sense Strand Starting at position 508 of SEQ ID NO: 318354
ggcuucuuuggagacuuua

SEQ ID NO: 358672 - RNA, 19 nt, Artificial Sequence
  Description of Artificial Sequence: Synthetic oligonucleotide
  Antisense Strand to SEQ ID NO: 358671
uaaagucuccaaagaagcc

SEQ ID NO: 358673 - RNA, 19 nt, Artificial Sequence
  Description of Artificial Sequence: Synthetic oligonucleotide
  Sense Strand Starting at position 508 of SEQ ID NO: 318377
cugcaaucgccagaugaag

SEQ ID NO: 358674 - RNA, 19 nt, Artificial Sequence
  Description of Artificial Sequence: Synthetic oligonucleotide
  Antisense Strand to SEQ ID NO: 358673
cuucaucuggcgauugcag

SEQ ID NO: 358675 - RNA, 19 nt, Artificial Sequence
  Description of Artificial Sequence: Synthetic oligonucleotide
  Sense Strand Starting at position 508 of SEQ ID NO: 318386
ccagaugaaggucguaauu

SEQ ID NO: 358676 - RNA, 19 nt, Artificial Sequence
  Description of Artificial Sequence: Synthetic oligonucleotide
  Antisense Strand to SEQ ID NO: 358675
aauuacgaccuucaucugg

SEQ ID NO: 358677 - RNA, 19 nt, Artificial Sequence
  Description of Artificial Sequence: Synthetic oligonucleotide
  Sense Strand Starting at position 508 of SEQ ID NO: 318814
cgucucguucuuccaaagu

SEQ ID NO: 358678 - RNA, 19 nt, Artificial Sequence
  Description of Artificial Sequence: Synthetic oligonucleotide
  Antisense Strand to SEQ ID NO: 358677
acuuuggaagaacgagacg

SEQ ID NO: 358679 - RNA, 19 nt, Artificial Sequence
  Description of Artificial Sequence: Synthetic oligonucleotide
  Sense Strand Starting at position 508 of SEQ ID NO: 318967
uugagaacccauuguauua

SEQ ID NO: 358680 - RNA, 19 nt, Artificial Sequence
  Description of Artificial Sequence: Synthetic oligonucleotide
  Antisense Strand to SEQ ID NO: 358679
uaauacaauggguucucaa

SEQ ID NO: 358681 - RNA, 19 nt, Artificial Sequence
  Description of Artificial Sequence: Synthetic oligonucleotide
  Sense Strand Starting at position 508 of SEQ ID NO: 319095
gcgcaaagaauccauuagu

SEQ ID NO: 358682 - RNA, 19 nt, Artificial Sequence
  Description of Artificial Sequence: Synthetic oligonucleotide
  Antisense Strand to SEQ ID NO: 358681
acuaauggauucuuugcgc

SEQ ID NO: 358683 - RNA, 19 nt, Artificial Sequence
  Description of Artificial Sequence: Synthetic oligonucleotide
  Sense Strand Starting at position 508 of SEQ ID NO: 319180
guucuacuagcauaugcaa

SEQ ID NO: 358684 - RNA, 19 nt, Artificial Sequence
  Description of Artificial Sequence: Synthetic oligonucleotide
  Antisense Strand to SEQ ID NO: 358683
uugcauaugcuaguagaac

SEQ ID NO: 358685 - RNA, 19 nt, Artificial Sequence
  Description of Artificial Sequence: Synthetic oligonucleotide
  Sense Strand Starting at position 509 of SEQ ID NO: 315465
ccagucauucccugggaca

SEQ ID NO: 358686 - RNA, 19 nt, Artificial Sequence
  Description of Artificial Sequence: Synthetic oligonucleotide
  Antisense Strand to SEQ ID NO: 358685
ugucccagggaaugacugg

SEQ ID NO: 358687 - RNA, 19 nt, Artificial Sequence
  Description of Artificial Sequence: Synthetic oligonucleotide
  Sense Strand Starting at position 509 of SEQ ID NO: 315466
cagucauucccugggacaa

SEQ ID NO: 358688 - RNA, 19 nt, Artificial Sequence
  Description of Artificial Sequence: Synthetic oligonucleotide
  Antisense Strand to SEQ ID NO: 358687
uugucccagggaaugacug

SEQ ID NO: 358689 - RNA, 19 nt, Artificial Sequence
  Description of Artificial Sequence: Synthetic oligonucleotide
  Sense Strand Starting at position 509 of SEQ ID NO: 315467
agucauucccugggacaau

SEQ ID NO: 358690 - RNA, 19 nt, Artificial Sequence
  Description of Artificial Sequence: Synthetic oligonucleotide
  Antisense Strand to SEQ ID NO: 358689
auugucccagggaaugacu

SEQ ID NO: 358691 - RNA, 19 nt, Artificial Sequence
  Description of Artificial Sequence: Synthetic oligonucleotide
  Sense Strand Starting at position 509 of SEQ ID NO: 315479
ggacaauucugggccaugu

SEQ ID NO: 358692 - RNA, 19 nt, Artificial Sequence
  Description of Artificial Sequence: Synthetic oligonucleotide
  Antisense Strand to SEQ ID NO: 358691
acauggcccagaauugucc

SEQ ID NO: 358693 - RNA, 19 nt, Artificial Sequence
  Description of Artificial Sequence: Synthetic oligonucleotide
  Sense Strand Starting at position 509 of SEQ ID NO: 315558
caaguucugguaggaguca

SEQ ID NO: 358694 - RNA, 19 nt, Artificial Sequence
  Description of Artificial Sequence: Synthetic oligonucleotide
  Antisense Strand to SEQ ID NO: 358693
ugacuccuaccagaacuug

SEQ ID NO: 358695 - RNA, 19 nt, Artificial Sequence
  Description of Artificial Sequence: Synthetic oligonucleotide
  Sense Strand Starting at position 509 of SEQ ID NO: 315571
gagucaguugcuuaaccag

SEQ ID NO: 358696 - RNA, 19 nt, Artificial Sequence
  Description of Artificial Sequence: Synthetic oligonucleotide
  Antisense Strand to SEQ ID NO: 358695
cugguuaagcaacugacuc

SEQ ID NO: 358697 - RNA, 19 nt, Artificial Sequence
  Description of Artificial Sequence: Synthetic oligonucleotide
  Sense Strand Starting at position 509 of SEQ ID NO: 315577
guugcuuaaccagcgaguu

SEQ ID NO: 358698 - RNA, 19 nt, Artificial Sequence
  Description of Artificial Sequence: Synthetic oligonucleotide
  Antisense Strand to SEQ ID NO: 358697
aacucgcugguuaagcaac

SEQ ID NO: 358699 - RNA, 19 nt, Artificial Sequence
  Description of Artificial Sequence: Synthetic oligonucleotide
  Sense Strand Starting at position 509 of SEQ ID NO: 315875
cuaggaaagcucugaacag

SEQ ID NO: 358700 - RNA, 19 nt, Artificial Sequence
  Description of Artificial Sequence: Synthetic oligonucleotide
  Antisense Strand to SEQ ID NO: 358699
cuguucagagcuuuccuag

SEQ ID NO: 358701 - RNA, 19 nt, Artificial Sequence
  Description of Artificial Sequence: Synthetic oligonucleotide
  Sense Strand Starting at position 509 of SEQ ID NO: 315956
ccauuauaacauggguaac

SEQ ID NO: 358702 - RNA, 19 nt, Artificial Sequence
  Description of Artificial Sequence: Synthetic oligonucleotide
  Antisense Strand to SEQ ID NO: 358701
guuacccauguuauaaugg

SEQ ID NO: 358703 - RNA, 19 nt, Artificial Sequence
  Description of Artificial Sequence: Synthetic oligonucleotide
  Sense Strand Starting at position 509 of SEQ ID NO: 315978
gcugucaaucuguaccaaa

SEQ ID NO: 358704 - RNA, 19 nt, Artificial Sequence
  Description of Artificial Sequence: Synthetic oligonucleotide
  Antisense Strand to SEQ ID NO: 358703
uuugguacagauugacagc

SEQ ID NO: 358705 - RNA, 19 nt, Artificial Sequence
  Description of Artificial Sequence: Synthetic oligonucleotide
  Sense Strand Starting at position 509 of SEQ ID NO: 316035
aaaugaaguccagguucca

SEQ ID NO: 358706 - RNA, 19 nt, Artificial Sequence
  Description of Artificial Sequence: Synthetic oligonucleotide
  Antisense Strand to SEQ ID NO: 358705
uggaaccuggacuucauuu

SEQ ID NO: 358707 - RNA, 19 nt, Artificial Sequence
  Description of Artificial Sequence: Synthetic oligonucleotide
  Sense Strand Starting at position 509 of SEQ ID NO: 316051
ccaggcgaucauggagaaa

SEQ ID NO: 358708 - RNA, 19 nt, Artificial Sequence
  Description of Artificial Sequence: Synthetic oligonucleotide
  Antisense Strand to SEQ ID NO: 358707
uuucuccaugaucgccugg

SEQ ID NO: 358709 - RNA, 19 nt, Artificial Sequence
  Description of Artificial Sequence: Synthetic oligonucleotide
  Sense Strand Starting at position 509 of SEQ ID NO: 316116
auggaugauuuccaagauu

SEQ ID NO: 358710 - RNA, 19 nt, Artificial Sequence
  Description of Artificial Sequence: Synthetic oligonucleotide
  Antisense Strand to SEQ ID NO: 358709
aaucuuggaaaucauccau

SEQ ID NO: 358711 - RNA, 19 nt, Artificial Sequence
  Description of Artificial Sequence: Synthetic oligonucleotide
  Sense Strand Starting at position 509 of SEQ ID NO: 316210
uggguaggaguuuaaucuu

SEQ ID NO: 358712 - RNA, 19 nt, Artificial Sequence
  Description of Artificial Sequence: Synthetic oligonucleotide
  Antisense Strand to SEQ ID NO: 358711
aagauuaaacuccuaccca

SEQ ID NO: 358713 - RNA, 19 nt, Artificial Sequence
  Description of Artificial Sequence: Synthetic oligonucleotide
  Sense Strand Starting at position 509 of SEQ ID NO: 316213
guaggaguuuaaucuuccu

SEQ ID NO: 358714 - RNA, 19 nt, Artificial Sequence
  Description of Artificial Sequence: Synthetic oligonucleotide
  Antisense Strand to SEQ ID NO: 358713
aggaagauuaaacuccuac

SEQ ID NO: 358715 - RNA, 19 nt, Artificial Sequence
  Description of Artificial Sequence: Synthetic oligonucleotide
  Sense Strand Starting at position 509 of SEQ ID NO: 316216
ggaguuuaaucuuccuaaa

SEQ ID NO: 358716 - RNA, 19 nt, Artificial Sequence
  Description of Artificial Sequence: Synthetic oligonucleotide
  Antisense Strand to SEQ ID NO: 358715
uuuaggaagauuaaacucc

SEQ ID NO: 358717 - RNA, 19 nt, Artificial Sequence
  Description of Artificial Sequence: Synthetic oligonucleotide
  Sense Strand Starting at position 509 of SEQ ID NO: 316249
ggguuacaccugcaaucuu

SEQ ID NO: 358718 - RNA, 19 nt, Artificial Sequence
  Description of Artificial Sequence: Synthetic oligonucleotide
  Antisense Strand to SEQ ID NO: 358717
aagauugcagguguaaccc

SEQ ID NO: 358719 - RNA, 19 nt, Artificial Sequence
  Description of Artificial Sequence: Synthetic oligonucleotide
  Sense Strand Starting at position 509 of SEQ ID NO: 316297
ggcuauuagccucaaugac

SEQ ID NO: 358720 - RNA, 19 nt, Artificial Sequence
  Description of Artificial Sequence: Synthetic oligonucleotide
  Antisense Strand to SEQ ID NO: 358719
gucauugaggcuaauagcc

SEQ ID NO: 358721 - RNA, 19 nt, Artificial Sequence
  Description of Artificial Sequence: Synthetic oligonucleotide
  Sense Strand Starting at position 509 of SEQ ID NO: 317480
gucugaacugcuugaauga

SEQ ID NO: 358722 - RNA, 19 nt, Artificial Sequence
  Description of Artificial Sequence: Synthetic oligonucleotide
  Antisense Strand to SEQ ID NO: 358721
ucauucaagcaguucagac

SEQ ID NO: 358723 - RNA, 19 nt, Artificial Sequence
  Description of Artificial Sequence: Synthetic oligonucleotide
  Sense Strand Starting at position 509 of SEQ ID NO: 317530
ucgaucagccucuauaauc

SEQ ID NO: 358724 - RNA, 19 nt, Artificial Sequence
  Description of Artificial Sequence: Synthetic oligonucleotide
  Antisense Strand to SEQ ID NO: 358723
gauuauagaggcugaucga

SEQ ID NO: 358725 - RNA, 19 nt, Artificial Sequence
  Description of Artificial Sequence: Synthetic oligonucleotide
  Sense Strand Starting at position 509 of SEQ ID NO: 317543
auaaucauuccuuagugua

SEQ ID NO: 358726 - RNA, 19 nt, Artificial Sequence
  Description of Artificial Sequence: Synthetic oligonucleotide
  Antisense Strand to SEQ ID NO: 358725
uacacuaaggaaugauuau

SEQ ID NO: 358727 - RNA, 19 nt, Artificial Sequence
  Description of Artificial Sequence: Synthetic oligonucleotide
  Sense Strand Starting at position 509 of SEQ ID NO: 317626
uggagccaucugcaucaau

SEQ ID NO: 358728 - RNA, 19 nt, Artificial Sequence
  Description of Artificial Sequence: Synthetic oligonucleotide
  Antisense Strand to SEQ ID NO: 358727
auugaugcagauggcucca

SEQ ID NO: 358729 - RNA, 19 nt, Artificial Sequence
  Description of Artificial Sequence: Synthetic oligonucleotide
  Sense Strand Starting at position 509 of SEQ ID NO: 318176
aacugaaauugcucgguaa

SEQ ID NO: 358730 - RNA, 19 nt, Artificial Sequence
  Description of Artificial Sequence: Synthetic oligonucleotide
  Antisense Strand to SEQ ID NO: 358729
uuaccgagcaauuucaguu

SEQ ID NO: 358731 - RNA, 19 nt, Artificial Sequence
  Description of Artificial Sequence: Synthetic oligonucleotide
  Sense Strand Starting at position 509 of SEQ ID NO: 318177
acugaaauugcucgguaaa

SEQ ID NO: 358732 - RNA, 19 nt, Artificial Sequence
  Description of Artificial Sequence: Synthetic oligonucleotide
  Antisense Strand to SEQ ID NO: 358731
uuuaccgagcaauuucagu

SEQ ID NO: 358733 - RNA, 19 nt, Artificial Sequence
  Description of Artificial Sequence: Synthetic oligonucleotide
  Sense Strand Starting at position 509 of SEQ ID NO: 318180
gaaauugcucgguaaaugu

SEQ ID NO: 358734 - RNA, 19 nt, Artificial Sequence
  Description of Artificial Sequence: Synthetic oligonucleotide
  Antisense Strand to SEQ ID NO: 358733
acauuuaccgagcaauuuc

SEQ ID NO: 358735 - RNA, 19 nt, Artificial Sequence
  Description of Artificial Sequence: Synthetic oligonucleotide
  Sense Strand Starting at position 509 of SEQ ID NO: 318191
guaaauguugaaugaguac

SEQ ID NO: 358736 - RNA, 19 nt, Artificial Sequence
  Description of Artificial Sequence: Synthetic oligonucleotide
  Antisense Strand to SEQ ID NO: 358735
guacucauucaacauuuac

SEQ ID NO: 358737 - RNA, 19 nt, Artificial Sequence
  Description of Artificial Sequence: Synthetic oligonucleotide
  Sense Strand Starting at position 509 of SEQ ID NO: 318346
ggguguggaucuccuacau

SEQ ID NO: 358738 - RNA, 19 nt, Artificial Sequence
  Description of Artificial Sequence: Synthetic oligonucleotide
  Antisense Strand to SEQ ID NO: 358737
auguaggagauccacaccc

SEQ ID NO: 358739 - RNA, 19 nt, Artificial Sequence
  Description of Artificial Sequence: Synthetic oligonucleotide
  Sense Strand Starting at position 509 of SEQ ID NO: 318431
gaaucuuaaggguagguuu

SEQ ID NO: 358740 - RNA, 19 nt, Artificial Sequence
  Description of Artificial Sequence: Synthetic oligonucleotide
  Antisense Strand to SEQ ID NO: 358739
aaaccuacccuuaagauuc

SEQ ID NO: 358741 - RNA, 19 nt, Artificial Sequence
  Description of Artificial Sequence: Synthetic oligonucleotide
  Sense Strand Starting at position 509 of SEQ ID NO: 318433
aucuuaaggguagguuuau

SEQ ID NO: 358742 - RNA, 19 nt, Artificial Sequence
  Description of Artificial Sequence: Synthetic oligonucleotide
  Antisense Strand to SEQ ID NO: 358741
auaaaccuacccuuaagau

SEQ ID NO: 358743 - RNA, 19 nt, Artificial Sequence
  Description of Artificial Sequence: Synthetic oligonucleotide
  Sense Strand Starting at position 509 of SEQ ID NO: 318434
ucuuaaggguagguuuauu

SEQ ID NO: 358744 - RNA, 19 nt, Artificial Sequence
  Description of Artificial Sequence: Synthetic oligonucleotide
  Antisense Strand to SEQ ID NO: 358743
aauaaaccuacccuuaaga

SEQ ID NO: 358745 - RNA, 19 nt, Artificial Sequence
  Description of Artificial Sequence: Synthetic oligonucleotide
  Sense Strand Starting at position 509 of SEQ ID NO: 318498
auguauauucuauggacuu

SEQ ID NO: 358746 - RNA, 19 nt, Artificial Sequence
  Description of Artificial Sequence: Synthetic oligonucleotide
  Antisense Strand to SEQ ID NO: 358745
aaguccauagaauauacau

SEQ ID NO: 358747 - RNA, 19 nt, Artificial Sequence
  Description of Artificial Sequence: Synthetic oligonucleotide
  Sense Strand Starting at position 509 of SEQ ID NO: 318547
augaaauacucuguaggca

SEQ ID NO: 358748 - RNA, 19 nt, Artificial Sequence
  Description of Artificial Sequence: Synthetic oligonucleotide
  Antisense Strand to SEQ ID NO: 358747
ugccuacagaguauuucau

SEQ ID NO: 358749 - RNA, 19 nt, Artificial Sequence
  Description of Artificial Sequence: Synthetic oligonucleotide
  Sense Strand Starting at position 509 of SEQ ID NO: 318548
ugaaauacucuguaggcau

SEQ ID NO: 358750 - RNA, 19 nt, Artificial Sequence
  Description of Artificial Sequence: Synthetic oligonucleotide
  Antisense Strand to SEQ ID NO: 358749
augccuacagaguauuuca

SEQ ID NO: 358751 - RNA, 19 nt, Artificial Sequence
  Description of Artificial Sequence: Synthetic oligonucleotide
  Sense Strand Starting at position 509 of SEQ ID NO: 318772
gcauuaugugcuuccguug

SEQ ID NO: 358752 - RNA, 19 nt, Artificial Sequence
  Description of Artificial Sequence: Synthetic oligonucleotide
  Antisense Strand to SEQ ID NO: 358751
caacggaagcacauaaugc

SEQ ID NO: 358753 - RNA, 19 nt, Artificial Sequence
  Description of Artificial Sequence: Synthetic oligonucleotide
  Sense Strand Starting at position 509 of SEQ ID NO: 318813
ggcaauagauggguuucca

SEQ ID NO: 358754 - RNA, 19 nt, Artificial Sequence
  Description of Artificial Sequence: Synthetic oligonucleotide
  Antisense Strand to SEQ ID NO: 358753
uggaaacccaucuauugcc

SEQ ID NO: 358755 - RNA, 19 nt, Artificial Sequence
  Description of Artificial Sequence: Synthetic oligonucleotide
  Sense Strand Starting at position 509 of SEQ ID NO: 318817
auagauggguuuccacuua

SEQ ID NO: 358756 - RNA, 19 nt, Artificial Sequence
  Description of Artificial Sequence: Synthetic oligonucleotide
  Antisense Strand to SEQ ID NO: 358755
uaaguggaaacccaucuau

SEQ ID NO: 358757 - RNA, 19 nt, Artificial Sequence
  Description of Artificial Sequence: Synthetic oligonucleotide
  Sense Strand Starting at position 509 of SEQ ID NO: 318860
guuggagcucuuuaaggaa

SEQ ID NO: 358758 - RNA, 19 nt, Artificial Sequence
  Description of Artificial Sequence: Synthetic oligonucleotide
  Antisense Strand to SEQ ID NO: 358757
uuccuuaaagagcuccaac

SEQ ID NO: 358759 - RNA, 19 nt, Artificial Sequence
  Description of Artificial Sequence: Synthetic oligonucleotide
  Sense Strand Starting at position 509 of SEQ ID NO: 318929
agguacuucucagucugau

SEQ ID NO: 358760 - RNA, 19 nt, Artificial Sequence
  Description of Artificial Sequence: Synthetic oligonucleotide
  Antisense Strand to SEQ ID NO: 358759
aucagacugagaaguaccu

SEQ ID NO: 358761 - RNA, 19 nt, Artificial Sequence
  Description of Artificial Sequence: Synthetic oligonucleotide
  Sense Strand Starting at position 509 of SEQ ID NO: 319065
gcuggacuuagccagggau

SEQ ID NO: 358762 - RNA, 19 nt, Artificial Sequence
  Description of Artificial Sequence: Synthetic oligonucleotide
  Antisense Strand to SEQ ID NO: 358761
aucccuggcuaaguccagc

SEQ ID NO: 358763 - RNA, 19 nt, Artificial Sequence
  Description of Artificial Sequence: Synthetic oligonucleotide
  Sense Strand Starting at position 509 of SEQ ID NO: 319067
uggacuuagccagggaugu

SEQ ID NO: 358764 - RNA, 19 nt, Artificial Sequence
  Description of Artificial Sequence: Synthetic oligonucleotide
  Antisense Strand to SEQ ID NO: 358763
acaucccuggcuaagucca

SEQ ID NO: 358765 - RNA, 19 nt, Artificial Sequence
  Description of Artificial Sequence: Synthetic oligonucleotide
  Sense Strand Starting at position 510 of SEQ ID NO: 315504
agcccagugugggaauauu

SEQ ID NO: 358766 - RNA, 19 nt, Artificial Sequence
  Description of Artificial Sequence: Synthetic oligonucleotide
  Antisense Strand to SEQ ID NO: 358765
aauauucccacacugggcu

SEQ ID NO: 358767 - RNA, 19 nt, Artificial Sequence
  Description of Artificial Sequence: Synthetic oligonucleotide
  Sense Strand Starting at position 510 of SEQ ID NO: 315549
gguguaguccugggucacu

SEQ ID NO: 358768 - RNA, 19 nt, Artificial Sequence
  Description of Artificial Sequence: Synthetic oligonucleotide
  Antisense Strand to SEQ ID NO: 358767
agugacccaggacuacacc

SEQ ID NO: 358769 - RNA, 19 nt, Artificial Sequence
  Description of Artificial Sequence: Synthetic oligonucleotide
  Sense Strand Starting at position 510 of SEQ ID NO: 316090
augcauucuccucgcugua

SEQ ID NO: 358770 - RNA, 19 nt, Artificial Sequence
  Description of Artificial Sequence: Synthetic oligonucleotide
  Antisense Strand to SEQ ID NO: 358769
uacagcgaggagaaugcau

SEQ ID NO: 358771 - RNA, 19 nt, Artificial Sequence
  Description of Artificial Sequence: Synthetic oligonucleotide
  Sense Strand Starting at position 510 of SEQ ID NO: 316091
ugcauucuccucgcuguau

SEQ ID NO: 358772 - RNA, 19 nt, Artificial Sequence
  Description of Artificial Sequence: Synthetic oligonucleotide
  Antisense Strand to SEQ ID NO: 358771
auacagcgaggagaaugca

SEQ ID NO: 358773 - RNA, 19 nt, Artificial Sequence
  Description of Artificial Sequence: Synthetic oligonucleotide
  Sense Strand Starting at position 510 of SEQ ID NO: 316251
gaugcagcuuccgagacaa

SEQ ID NO: 358774 - RNA, 19 nt, Artificial Sequence
  Description of Artificial Sequence: Synthetic oligonucleotide
  Antisense Strand to SEQ ID NO: 358773
uugucucggaagcugcauc

SEQ ID NO: 358775 - RNA, 19 nt, Artificial Sequence
  Description of Artificial Sequence: Synthetic oligonucleotide
  Sense Strand Starting at position 510 of SEQ ID NO: 316398
accucugacuucccaguua

SEQ ID NO: 358776 - RNA, 19 nt, Artificial Sequence
  Description of Artificial Sequence: Synthetic oligonucleotide
  Antisense Strand to SEQ ID NO: 358775
uaacugggaagucagaggu

SEQ ID NO: 358777 - RNA, 19 nt, Artificial Sequence
  Description of Artificial Sequence: Synthetic oligonucleotide
  Sense Strand Starting at position 510 of SEQ ID NO: 316463
cuaggugucuuggcaaaua

SEQ ID NO: 358778 - RNA, 19 nt, Artificial Sequence
  Description of Artificial Sequence: Synthetic oligonucleotide
  Antisense Strand to SEQ ID NO: 358777
uauuugccaagacaccuag

SEQ ID NO: 358779 - RNA, 19 nt, Artificial Sequence
  Description of Artificial Sequence: Synthetic oligonucleotide
  Sense Strand Starting at position 510 of SEQ ID NO: 316517
agggucaccucuucuagga

SEQ ID NO: 358780 - RNA, 19 nt, Artificial Sequence
  Description of Artificial Sequence: Synthetic oligonucleotide
  Antisense Strand to SEQ ID NO: 358779
uccuagaagaggugacccu

SEQ ID NO: 358781 - RNA, 19 nt, Artificial Sequence
  Description of Artificial Sequence: Synthetic oligonucleotide
  Sense Strand Starting at position 510 of SEQ ID NO: 316591
cuggauuaccgccacugaa

SEQ ID NO: 358782 - RNA, 19 nt, Artificial Sequence
  Description of Artificial Sequence: Synthetic oligonucleotide
  Antisense Strand to SEQ ID NO: 358781
uucaguggcgguaauccag

SEQ ID NO: 358783 - RNA, 19 nt, Artificial Sequence
  Description of Artificial Sequence: Synthetic oligonucleotide
  Sense Strand Starting at position 510 of SEQ ID NO: 316710
gcacccucauguccagaua

SEQ ID NO: 358784 - RNA, 19 nt, Artificial Sequence
  Description of Artificial Sequence: Synthetic oligonucleotide
  Antisense Strand to SEQ ID NO: 358783
uaucuggacaugagggugc

SEQ ID NO: 358785 - RNA, 19 nt, Artificial Sequence
  Description of Artificial Sequence: Synthetic oligonucleotide
  Sense Strand Starting at position 510 of SEQ ID NO: 316725
gauaaacccugagguguuu

SEQ ID NO: 358786 - RNA, 19 nt, Artificial Sequence
  Description of Artificial Sequence: Synthetic oligonucleotide
  Antisense Strand to SEQ ID NO: 358785
aaacaccucaggguuuauc

SEQ ID NO: 358787 - RNA, 19 nt, Artificial Sequence
  Description of Artificial Sequence: Synthetic oligonucleotide
  Sense Strand Starting at position 510 of SEQ ID NO: 316877
guggcucuucccugagcga

SEQ ID NO: 358788 - RNA, 19 nt, Artificial Sequence
  Description of Artificial Sequence: Synthetic oligonucleotide
  Antisense Strand to SEQ ID NO: 358787
ucgcucagggaagagccac

SEQ ID NO: 358789 - RNA, 19 nt, Artificial Sequence
  Description of Artificial Sequence: Synthetic oligonucleotide
  Sense Strand Starting at position 510 of SEQ ID NO: 316924
ggccuugcuaccuguagau

SEQ ID NO: 358790 - RNA, 19 nt, Artificial Sequence
  Description of Artificial Sequence: Synthetic oligonucleotide
  Antisense Strand to SEQ ID NO: 358789
aucuacagguagcaaggcc

SEQ ID NO: 358791 - RNA, 19 nt, Artificial Sequence
  Description of Artificial Sequence: Synthetic oligonucleotide
  Sense Strand Starting at position 510 of SEQ ID NO: 316926
ccuugcuaccuguagauca

SEQ ID NO: 358792 - RNA, 19 nt, Artificial Sequence
  Description of Artificial Sequence: Synthetic oligonucleotide
  Antisense Strand to SEQ ID NO: 358791
ugaucuacagguagcaagg

SEQ ID NO: 358793 - RNA, 19 nt, Artificial Sequence
  Description of Artificial Sequence: Synthetic oligonucleotide
  Sense Strand Starting at position 510 of SEQ ID NO: 317336
cccugauugggcugggagu

SEQ ID NO: 358794 - RNA, 19 nt, Artificial Sequence
  Description of Artificial Sequence: Synthetic oligonucleotide
  Antisense Strand to SEQ ID NO: 358793
acucccagcccaaucaggg

SEQ ID NO: 358795 - RNA, 19 nt, Artificial Sequence
  Description of Artificial Sequence: Synthetic oligonucleotide
  Sense Strand Starting at position 510 of SEQ ID NO: 317463
gcuugacuucucugggucu

SEQ ID NO: 358796 - RNA, 19 nt, Artificial Sequence
  Description of Artificial Sequence: Synthetic oligonucleotide
  Antisense Strand to SEQ ID NO: 358795
agacccagagaagucaagc

SEQ ID NO: 358797 - RNA, 19 nt, Artificial Sequence
  Description of Artificial Sequence: Synthetic oligonucleotide
  Sense Strand Starting at position 510 of SEQ ID NO: 317493
gugcaauguugggagcuga

SEQ ID NO: 358798 - RNA, 19 nt, Artificial Sequence
  Description of Artificial Sequence: Synthetic oligonucleotide
  Antisense Strand to SEQ ID NO: 358797
ucagcucccaacauugcac

SEQ ID NO: 358799 - RNA, 19 nt, Artificial Sequence
  Description of Artificial Sequence: Synthetic oligonucleotide
  Sense Strand Starting at position 510 of SEQ ID NO: 317506
agcugagaugcuugaucuc

SEQ ID NO: 358800 - RNA, 19 nt, Artificial Sequence
  Description of Artificial Sequence: Synthetic oligonucleotide
  Antisense Strand to SEQ ID NO: 358799
gagaucaagcaucucagcu

SEQ ID NO: 358801 - RNA, 19 nt, Artificial Sequence
  Description of Artificial Sequence: Synthetic oligonucleotide
  Sense Strand Starting at position 510 of SEQ ID NO: 317551
uggagaugcugaugaggaa

SEQ ID NO: 358802 - RNA, 19 nt, Artificial Sequence
  Description of Artificial Sequence: Synthetic oligonucleotide
  Antisense Strand to SEQ ID NO: 358801
uuccucaucagcaucucca

SEQ ID NO: 358803 - RNA, 19 nt, Artificial Sequence
  Description of Artificial Sequence: Synthetic oligonucleotide
  Sense Strand Starting at position 510 of SEQ ID NO: 317576
ucaccuguguugucaggga

SEQ ID NO: 358804 - RNA, 19 nt, Artificial Sequence
  Description of Artificial Sequence: Synthetic oligonucleotide
  Antisense Strand to SEQ ID NO: 358803
ucccugacaacacagguga

SEQ ID NO: 358805 - RNA, 19 nt, Artificial Sequence
  Description of Artificial Sequence: Synthetic oligonucleotide
  Sense Strand Starting at position 510 of SEQ ID NO: 317968
uugaaacaauggugaaaua

SEQ ID NO: 358806 - RNA, 19 nt, Artificial Sequence
  Description of Artificial Sequence: Synthetic oligonucleotide
  Antisense Strand to SEQ ID NO: 358805
uauuucaccauuguuucaa

SEQ ID NO: 358807 - RNA, 19 nt, Artificial Sequence
  Description of Artificial Sequence: Synthetic oligonucleotide
  Sense Strand Starting at position 510 of SEQ ID NO: 318071
gcagaauauucugcagcca

SEQ ID NO: 358808 - RNA, 19 nt, Artificial Sequence
  Description of Artificial Sequence: Synthetic oligonucleotide
  Antisense Strand to SEQ ID NO: 358807
uggcugcagaauauucugc

SEQ ID NO: 358809 - RNA, 19 nt, Artificial Sequence
  Description of Artificial Sequence: Synthetic oligonucleotide
  Sense Strand Starting at position 510 of SEQ ID NO: 318826
agauguaagugucuaucaa

SEQ ID NO: 358810 - RNA, 19 nt, Artificial Sequence
  Description of Artificial Sequence: Synthetic oligonucleotide
  Antisense Strand to SEQ ID NO: 358809
uugauagacacuuacaucu

SEQ ID NO: 358811 - RNA, 19 nt, Artificial Sequence
  Description of Artificial Sequence: Synthetic oligonucleotide
  Sense Strand Starting at position 510 of SEQ ID NO: 318827
gauguaagugucuaucaau

SEQ ID NO: 358812 - RNA, 19 nt, Artificial Sequence
  Description of Artificial Sequence: Synthetic oligonucleotide
  Antisense Strand to SEQ ID NO: 358811
auugauagacacuuacauc

SEQ ID NO: 358813 - RNA, 19 nt, Artificial Sequence
  Description of Artificial Sequence: Synthetic oligonucleotide
  Sense Strand Starting at position 510 of SEQ ID NO: 318830
guaagugucuaucaauagu

SEQ ID NO: 358814 - RNA, 19 nt, Artificial Sequence
  Description of Artificial Sequence: Synthetic oligonucleotide
  Antisense Strand to SEQ ID NO: 358813
acuauugauagacacuuac

SEQ ID NO: 358815 - RNA, 19 nt, Artificial Sequence
  Description of Artificial Sequence: Synthetic oligonucleotide
  Sense Strand Starting at position 510 of SEQ ID NO: 318836
gucuaucaauagugaguga

SEQ ID NO: 358816 - RNA, 19 nt, Artificial Sequence
  Description of Artificial Sequence: Synthetic oligonucleotide
  Antisense Strand to SEQ ID NO: 358815
ucacucacuauugauagac

SEQ ID NO: 358817 - RNA, 19 nt, Artificial Sequence
  Description of Artificial Sequence: Synthetic oligonucleotide
  Sense Strand Starting at position 510 of SEQ ID NO: 318839
uaucaauagugagugacua

SEQ ID NO: 358818 - RNA, 19 nt, Artificial Sequence
  Description of Artificial Sequence: Synthetic oligonucleotide
  Antisense Strand to SEQ ID NO: 358817
uagucacucacuauugaua

SEQ ID NO: 358819 - RNA, 19 nt, Artificial Sequence
  Description of Artificial Sequence: Synthetic oligonucleotide
  Sense Strand Starting at position 510 of SEQ ID NO: 318847
gugagugacuaggauucaa

SEQ ID NO: 358820 - RNA, 19 nt, Artificial Sequence
  Description of Artificial Sequence: Synthetic oligonucleotide
  Antisense Strand to SEQ ID NO: 358819
uugaauccuagucacucac

SEQ ID NO: 358821 - RNA, 19 nt, Artificial Sequence
  Description of Artificial Sequence: Synthetic oligonucleotide
  Sense Strand Starting at position 510 of SEQ ID NO: 318898
gcugguagccgccuuagaa

SEQ ID NO: 358822 - RNA, 19 nt, Artificial Sequence
  Description of Artificial Sequence: Synthetic oligonucleotide
  Antisense Strand to SEQ ID NO: 358821
uucuaaggcggcuaccagc

SEQ ID NO: 358823 - RNA, 19 nt, Artificial Sequence
  Description of Artificial Sequence: Synthetic oligonucleotide
  Sense Strand Starting at position 510 of SEQ ID NO: 318982
aggcguagaucugagacaa

SEQ ID NO: 358824 - RNA, 19 nt, Artificial Sequence
  Description of Artificial Sequence: Synthetic oligonucleotide
  Antisense Strand to SEQ ID NO: 358823
uugucucagaucuacgccu

SEQ ID NO: 358825 - RNA, 19 nt, Artificial Sequence
  Description of Artificial Sequence: Synthetic oligonucleotide
  Sense Strand Starting at position 510 of SEQ ID NO: 319006
uacacuuacgugcaaagau

SEQ ID NO: 358826 - RNA, 19 nt, Artificial Sequence
  Description of Artificial Sequence: Synthetic oligonucleotide
  Antisense Strand to SEQ ID NO: 358825
aucuuugcacguaagugua

SEQ ID NO: 358827 - RNA, 19 nt, Artificial Sequence
  Description of Artificial Sequence: Synthetic oligonucleotide
  Sense Strand Starting at position 510 of SEQ ID NO: 319015
gugcaaagauguuuauuuc

SEQ ID NO: 358828 - RNA, 19 nt, Artificial Sequence
  Description of Artificial Sequence: Synthetic oligonucleotide
  Antisense Strand to SEQ ID NO: 358827
gaaauaaacaucuuugcac

SEQ ID NO: 358829 - RNA, 19 nt, Artificial Sequence
  Description of Artificial Sequence: Synthetic oligonucleotide
  Sense Strand Starting at position 510 of SEQ ID NO: 319086
caaguaaacuguggccuau

SEQ ID NO: 358830 - RNA, 19 nt, Artificial Sequence
  Description of Artificial Sequence: Synthetic oligonucleotide
  Antisense Strand to SEQ ID NO: 358829
auaggccacaguuuacuug

SEQ ID NO: 358831 - RNA, 19 nt, Artificial Sequence
  Description of Artificial Sequence: Synthetic oligonucleotide
  Sense Strand Starting at position 510 of SEQ ID NO: 319098
ggccuauucgcacagugga

SEQ ID NO: 358832 - RNA, 19 nt, Artificial Sequence
  Description of Artificial Sequence: Synthetic oligonucleotide
  Antisense Strand to SEQ ID NO: 358831
uccacugugcgaauaggcc

SEQ ID NO: 358833 - RNA, 19 nt, Artificial Sequence
  Description of Artificial Sequence: Synthetic oligonucleotide
  Sense Strand Starting at position 510 of SEQ ID NO: 319111
aguggaguaguaugcagua

SEQ ID NO: 358834 - RNA, 19 nt, Artificial Sequence
  Description of Artificial Sequence: Synthetic oligonucleotide
  Antisense Strand to SEQ ID NO: 358833
uacugcauacuacuccacu

SEQ ID NO: 358835 - RNA, 19 nt, Artificial Sequence
  Description of Artificial Sequence: Synthetic oligonucleotide
  Sense Strand Starting at position 510 of SEQ ID NO: 319116
aguaguaugcaguagugaa

SEQ ID NO: 358836 - RNA, 19 nt, Artificial Sequence
  Description of Artificial Sequence: Synthetic oligonucleotide
  Antisense Strand to SEQ ID NO: 358835
uucacuacugcauacuacu

SEQ ID NO: 358837 - RNA, 19 nt, Artificial Sequence
  Description of Artificial Sequence: Synthetic oligonucleotide
  Sense Strand Starting at position 510 of SEQ ID NO: 319145
ccagaauguaucggagagu

SEQ ID NO: 358838 - RNA, 19 nt, Artificial Sequence
  Description of Artificial Sequence: Synthetic oligonucleotide
  Antisense Strand to SEQ ID NO: 358837
acucuccgauacauucugg

SEQ ID NO: 358839 - RNA, 19 nt, Artificial Sequence
  Description of Artificial Sequence: Synthetic oligonucleotide
  Sense Strand Starting at position 510 of SEQ ID NO: 319146
cagaauguaucggagagua

SEQ ID NO: 358840 - RNA, 19 nt, Artificial Sequence
  Description of Artificial Sequence: Synthetic oligonucleotide
  Antisense Strand to SEQ ID NO: 358839
uacucuccgauacauucug

SEQ ID NO: 358841 - RNA, 19 nt, Artificial Sequence
  Description of Artificial Sequence: Synthetic oligonucleotide
  Sense Strand Starting at position 510 of SEQ ID NO: 319148
gaauguaucggagaguaca

SEQ ID NO: 358842 - RNA, 19 nt, Artificial Sequence
  Description of Artificial Sequence: Synthetic oligonucleotide
  Antisense Strand to SEQ ID NO: 358841
uguacucuccgauacauuc

SEQ ID NO: 358843 - RNA, 19 nt, Artificial Sequence
  Description of Artificial Sequence: Synthetic oligonucleotide
  Sense Strand Starting at position 510 of SEQ ID NO: 319168
cccaacuacugagaagaca

SEQ ID NO: 358844 - RNA, 19 nt, Artificial Sequence
  Description of Artificial Sequence: Synthetic oligonucleotide
  Antisense Strand to SEQ ID NO: 358843
ugucuucucaguaguuggg

SEQ ID NO: 358845 - RNA, 19 nt, Artificial Sequence
  Description of Artificial Sequence: Synthetic oligonucleotide
  Sense Strand Starting at position 511 of SEQ ID NO: 315260
guuggauuguggucaggaa

SEQ ID NO: 358846 - RNA, 19 nt, Artificial Sequence
  Description of Artificial Sequence: Synthetic oligonucleotide
  Antisense Strand to SEQ ID NO: 358845
uuccugaccacaauccaac

SEQ ID NO: 358847 - RNA, 19 nt, Artificial Sequence
  Description of Artificial Sequence: Synthetic oligonucleotide
  Sense Strand Starting at position 511 of SEQ ID NO: 315297
acacuucguccuggucaca

SEQ ID NO: 358848 - RNA, 19 nt, Artificial Sequence
  Description of Artificial Sequence: Synthetic oligonucleotide
  Antisense Strand to SEQ ID NO: 358847
ugugaccaggacgaagugu

SEQ ID NO: 358849 - RNA, 19 nt, Artificial Sequence
  Description of Artificial Sequence: Synthetic oligonucleotide
  Sense Strand Starting at position 511 of SEQ ID NO: 315336
gagucagaaugacuaaguu

SEQ ID NO: 358850 - RNA, 19 nt, Artificial Sequence
  Description of Artificial Sequence: Synthetic oligonucleotide
  Antisense Strand to SEQ ID NO: 358849
aacuuagucauucugacuc

SEQ ID NO: 358851 - RNA, 19 nt, Artificial Sequence
  Description of Artificial Sequence: Synthetic oligonucleotide
  Sense Strand Starting at position 511 of SEQ ID NO: 315360
gccagucuggugugacuuu

SEQ ID NO: 358852 - RNA, 19 nt, Artificial Sequence
  Description of Artificial Sequence: Synthetic oligonucleotide
  Antisense Strand to SEQ ID NO: 358851
aaagucacaccagacuggc

SEQ ID NO: 358853 - RNA, 19 nt, Artificial Sequence
  Description of Artificial Sequence: Synthetic oligonucleotide
  Sense Strand Starting at position 511 of SEQ ID NO: 315367
uggugugacuuuguaagaa

SEQ ID NO: 358854 - RNA, 19 nt, Artificial Sequence
  Description of Artificial Sequence: Synthetic oligonucleotide
  Antisense Strand to SEQ ID NO: 358853
uucuuacaaagucacacca

SEQ ID NO: 358855 - RNA, 19 nt, Artificial Sequence
  Description of Artificial Sequence: Synthetic oligonucleotide
  Sense Strand Starting at position 511 of SEQ ID NO: 315403
aaguuuaggucccugacca

SEQ ID NO: 358856 - RNA, 19 nt, Artificial Sequence
  Description of Artificial Sequence: Synthetic oligonucleotide
  Antisense Strand to SEQ ID NO: 358855
uggucagggaccuaaacuu

SEQ ID NO: 358857 - RNA, 19 nt, Artificial Sequence
  Description of Artificial Sequence: Synthetic oligonucleotide
  Sense Strand Starting at position 511 of SEQ ID NO: 315404
aguuuaggucccugaccau

SEQ ID NO: 358858 - RNA, 19 nt, Artificial Sequence
  Description of Artificial Sequence: Synthetic oligonucleotide
  Antisense Strand to SEQ ID NO: 358857
auggucagggaccuaaacu

SEQ ID NO: 358859 - RNA, 19 nt, Artificial Sequence
  Description of Artificial Sequence: Synthetic oligonucleotide
  Sense Strand Starting at position 511 of SEQ ID NO: 315407
uuaggucccugaccauuaa

SEQ ID NO: 358860 - RNA, 19 nt, Artificial Sequence
  Description of Artificial Sequence: Synthetic oligonucleotide
  Antisense Strand to SEQ ID NO: 358859
uuaauggucagggaccuaa

SEQ ID NO: 358861 - RNA, 19 nt, Artificial Sequence
  Description of Artificial Sequence: Synthetic oligonucleotide
  Sense Strand Starting at position 511 of SEQ ID NO: 315561
acuuuaaguucgucccaag

SEQ ID NO: 358862 - RNA, 19 nt, Artificial Sequence
  Description of Artificial Sequence: Synthetic oligonucleotide
  Antisense Strand to SEQ ID NO: 358861
cuugggacgaacuuaaagu

SEQ ID NO: 358863 - RNA, 19 nt, Artificial Sequence
  Description of Artificial Sequence: Synthetic oligonucleotide
  Sense Strand Starting at position 511 of SEQ ID NO: 315735
guuuaaacgcuuuauugug

SEQ ID NO: 358864 - RNA, 19 nt, Artificial Sequence
  Description of Artificial Sequence: Synthetic oligonucleotide
  Antisense Strand to SEQ ID NO: 358863
cacaauaaagcguuuaaac

SEQ ID NO: 358865 - RNA, 19 nt, Artificial Sequence
  Description of Artificial Sequence: Synthetic oligonucleotide
  Sense Strand Starting at position 511 of SEQ ID NO: 315740
aacgcuuuauugugcccaa

SEQ ID NO: 358866 - RNA, 19 nt, Artificial Sequence
  Description of Artificial Sequence: Synthetic oligonucleotide
  Antisense Strand to SEQ ID NO: 358865
uugggcacaauaaagcguu

SEQ ID NO: 358867 - RNA, 19 nt, Artificial Sequence
  Description of Artificial Sequence: Synthetic oligonucleotide
  Sense Strand Starting at position 511 of SEQ ID NO: 315741
acgcuuuauugugcccaaa

SEQ ID NO: 358868 - RNA, 19 nt, Artificial Sequence
  Description of Artificial Sequence: Synthetic oligonucleotide
  Antisense Strand to SEQ ID NO: 358867
uuugggcacaauaaagcgu

SEQ ID NO: 358869 - RNA, 19 nt, Artificial Sequence
  Description of Artificial Sequence: Synthetic oligonucleotide
  Sense Strand Starting at position 511 of SEQ ID NO: 316506
ugcgguugagcuugaagga

SEQ ID NO: 358870 - RNA, 19 nt, Artificial Sequence
  Description of Artificial Sequence: Synthetic oligonucleotide
  Antisense Strand to SEQ ID NO: 358869
uccuucaagcucaaccgca

SEQ ID NO: 358871 - RNA, 19 nt, Artificial Sequence
  Description of Artificial Sequence: Synthetic oligonucleotide
  Sense Strand Starting at position 511 of SEQ ID NO: 316507
gcgguugagcuugaaggaa

SEQ ID NO: 358872 - RNA, 19 nt, Artificial Sequence
  Description of Artificial Sequence: Synthetic oligonucleotide
  Antisense Strand to SEQ ID NO: 358871
uuccuucaagcucaaccgc

SEQ ID NO: 358873 - RNA, 19 nt, Artificial Sequence
  Description of Artificial Sequence: Synthetic oligonucleotide
  Sense Strand Starting at position 511 of SEQ ID NO: 316582
gaucgaguacuugagguag

SEQ ID NO: 358874 - RNA, 19 nt, Artificial Sequence
  Description of Artificial Sequence: Synthetic oligonucleotide
  Antisense Strand to SEQ ID NO: 358873
cuaccucaaguacucgauc

SEQ ID NO: 358875 - RNA, 19 nt, Artificial Sequence
  Description of Artificial Sequence: Synthetic oligonucleotide
  Sense Strand Starting at position 511 of SEQ ID NO: 316584
ucgaguacuugagguaggu

SEQ ID NO: 358876 - RNA, 19 nt, Artificial Sequence
  Description of Artificial Sequence: Synthetic oligonucleotide
  Antisense Strand to SEQ ID NO: 358875
accuaccucaaguacucga

SEQ ID NO: 358877 - RNA, 19 nt, Artificial Sequence
  Description of Artificial Sequence: Synthetic oligonucleotide
  Sense Strand Starting at position 511 of SEQ ID NO: 316605
gcccauucugcuggucgaa

SEQ ID NO: 358878 - RNA, 19 nt, Artificial Sequence
  Description of Artificial Sequence: Synthetic oligonucleotide
  Antisense Strand to SEQ ID NO: 358877
uucgaccagcagaaugggc

SEQ ID NO: 358879 - RNA, 19 nt, Artificial Sequence
  Description of Artificial Sequence: Synthetic oligonucleotide
  Sense Strand Starting at position 511 of SEQ ID NO: 316647
uguagaucuuggccagcga

SEQ ID NO: 358880 - RNA, 19 nt, Artificial Sequence
  Description of Artificial Sequence: Synthetic oligonucleotide
  Antisense Strand to SEQ ID NO: 358879
ucgcuggccaagaucuaca

SEQ ID NO: 358881 - RNA, 19 nt, Artificial Sequence
  Description of Artificial Sequence: Synthetic oligonucleotide
  Sense Strand Starting at position 511 of SEQ ID NO: 316731
gguucuucuucuugcuauu

SEQ ID NO: 358882 - RNA, 19 nt, Artificial Sequence
  Description of Artificial Sequence: Synthetic oligonucleotide
  Antisense Strand to SEQ ID NO: 358881
aauagcaagaagaagaacc

SEQ ID NO: 358883 - RNA, 19 nt, Artificial Sequence
  Description of Artificial Sequence: Synthetic oligonucleotide
  Sense Strand Starting at position 511 of SEQ ID NO: 318301
aggguaagaugcucgggua

SEQ ID NO: 358884 - RNA, 19 nt, Artificial Sequence
  Description of Artificial Sequence: Synthetic oligonucleotide
  Antisense Strand to SEQ ID NO: 358883
uacccgagcaucuuacccu

SEQ ID NO: 358885 - RNA, 19 nt, Artificial Sequence
  Description of Artificial Sequence: Synthetic oligonucleotide
  Sense Strand Starting at position 511 of SEQ ID NO: 318304
guaagaugcucggguagga

SEQ ID NO: 358886 - RNA, 19 nt, Artificial Sequence
  Description of Artificial Sequence: Synthetic oligonucleotide
  Antisense Strand to SEQ ID NO: 358885
uccuacccgagcaucuuac

SEQ ID NO: 358887 - RNA, 19 nt, Artificial Sequence
  Description of Artificial Sequence: Synthetic oligonucleotide
  Sense Strand Starting at position 511 of SEQ ID NO: 318652
ucacccugucaagggaaua

SEQ ID NO: 358888 - RNA, 19 nt, Artificial Sequence
  Description of Artificial Sequence: Synthetic oligonucleotide
  Antisense Strand to SEQ ID NO: 358887
uauucccuugacaggguga

SEQ ID NO: 358889 - RNA, 19 nt, Artificial Sequence
  Description of Artificial Sequence: Synthetic oligonucleotide
  Sense Strand Starting at position 511 of SEQ ID NO: 318688
aauuaugucuaggaggaaa

SEQ ID NO: 358890 - RNA, 19 nt, Artificial Sequence
  Description of Artificial Sequence: Synthetic oligonucleotide
  Antisense Strand to SEQ ID NO: 358889
uuuccuccuagacauaauu

SEQ ID NO: 358891 - RNA, 19 nt, Artificial Sequence
  Description of Artificial Sequence: Synthetic oligonucleotide
  Sense Strand Starting at position 512 of SEQ ID NO: 315239
aaauguuugcuguaugaag

SEQ ID NO: 358892 - RNA, 19 nt, Artificial Sequence
  Description of Artificial Sequence: Synthetic oligonucleotide
  Antisense Strand to SEQ ID NO: 358891
cuucauacagcaaacauuu

SEQ ID NO: 358893 - RNA, 19 nt, Artificial Sequence
  Description of Artificial Sequence: Synthetic oligonucleotide
  Sense Strand Starting at position 512 of SEQ ID NO: 315253
ugaagaaaucaguggcaga

SEQ ID NO: 358894 - RNA, 19 nt, Artificial Sequence
  Description of Artificial Sequence: Synthetic oligonucleotide
  Antisense Strand to SEQ ID NO: 358893
ucugccacugauuucuuca

SEQ ID NO: 358895 - RNA, 19 nt, Artificial Sequence
  Description of Artificial Sequence: Synthetic oligonucleotide
  Sense Strand Starting at position 512 of SEQ ID NO: 315258
aaaucaguggcagauaugu

SEQ ID NO: 358896 - RNA, 19 nt, Artificial Sequence
  Description of Artificial Sequence: Synthetic oligonucleotide
  Antisense Strand to SEQ ID NO: 358895
acauaucugccacugauuu

SEQ ID NO: 358897 - RNA, 19 nt, Artificial Sequence
  Description of Artificial Sequence: Synthetic oligonucleotide
  Sense Strand Starting at position 512 of SEQ ID NO: 315267
gcagauaugucaucucuac

SEQ ID NO: 358898 - RNA, 19 nt, Artificial Sequence
  Description of Artificial Sequence: Synthetic oligonucleotide
  Antisense Strand to SEQ ID NO: 358897
guagagaugacauaucugc

SEQ ID NO: 358899 - RNA, 19 nt, Artificial Sequence
  Description of Artificial Sequence: Synthetic oligonucleotide
  Sense Strand Starting at position 512 of SEQ ID NO: 315345
gaaagaacagaauguuguu

SEQ ID NO: 358900 - RNA, 19 nt, Artificial Sequence
  Description of Artificial Sequence: Synthetic oligonucleotide
  Antisense Strand to SEQ ID NO: 358899
aacaacauucuguucuuuc

SEQ ID NO: 358901 - RNA, 19 nt, Artificial Sequence
  Description of Artificial Sequence: Synthetic oligonucleotide
  Sense Strand Starting at position 512 of SEQ ID NO: 315351
acagaauguuguucuaaca

SEQ ID NO: 358902 - RNA, 19 nt, Artificial Sequence
  Description of Artificial Sequence: Synthetic oligonucleotide
  Antisense Strand to SEQ ID NO: 358901
uguuagaacaacauucugu

SEQ ID NO: 358903 - RNA, 19 nt, Artificial Sequence
  Description of Artificial Sequence: Synthetic oligonucleotide
  Sense Strand Starting at position 512 of SEQ ID NO: 315448
guagauaaagaaugucauu

SEQ ID NO: 358904 - RNA, 19 nt, Artificial Sequence
  Description of Artificial Sequence: Synthetic oligonucleotide
  Antisense Strand to SEQ ID NO: 358903
aaugacauucuuuaucuac

SEQ ID NO: 358905 - RNA, 19 nt, Artificial Sequence
  Description of Artificial Sequence: Synthetic oligonucleotide
  Sense Strand Starting at position 512 of SEQ ID NO: 315528
gcaucuacaccacgugaaa

SEQ ID NO: 358906 - RNA, 19 nt, Artificial Sequence
  Description of Artificial Sequence: Synthetic oligonucleotide
  Antisense Strand to SEQ ID NO: 358905
uuucacgugguguagaugc

SEQ ID NO: 358907 - RNA, 19 nt, Artificial Sequence
  Description of Artificial Sequence: Synthetic oligonucleotide
  Sense Strand Starting at position 512 of SEQ ID NO: 315561
aggcacuguggugauauaa

SEQ ID NO: 358908 - RNA, 19 nt, Artificial Sequence
  Description of Artificial Sequence: Synthetic oligonucleotide
  Antisense Strand to SEQ ID NO: 358907
uuauaucaccacagugccu

SEQ ID NO: 358909 - RNA, 19 nt, Artificial Sequence
  Description of Artificial Sequence: Synthetic oligonucleotide
  Sense Strand Starting at position 512 of SEQ ID NO: 315651
gcaguuguuugggcaagag

SEQ ID NO: 358910 - RNA, 19 nt, Artificial Sequence
  Description of Artificial Sequence: Synthetic oligonucleotide
  Antisense Strand to SEQ ID NO: 358909
cucuugcccaaacaacugc

SEQ ID NO: 358911 - RNA, 19 nt, Artificial Sequence
  Description of Artificial Sequence: Synthetic oligonucleotide
  Sense Strand Starting at position 512 of SEQ ID NO: 315703
gaguguaaagcaggaauau

SEQ ID NO: 358912 - RNA, 19 nt, Artificial Sequence
  Description of Artificial Sequence: Synthetic oligonucleotide
  Antisense Strand to SEQ ID NO: 358911
auauuccugcuuuacacuc

SEQ ID NO: 358913 - RNA, 19 nt, Artificial Sequence
  Description of Artificial Sequence: Synthetic oligonucleotide
  Sense Strand Starting at position 512 of SEQ ID NO: 315704
aguguaaagcaggaauauu

SEQ ID NO: 358914 - RNA, 19 nt, Artificial Sequence
  Description of Artificial Sequence: Synthetic oligonucleotide
  Antisense Strand to SEQ ID NO: 358913
aauauuccugcuuuacacu

SEQ ID NO: 358915 - RNA, 19 nt, Artificial Sequence
  Description of Artificial Sequence: Synthetic oligonucleotide
  Sense Strand Starting at position 512 of SEQ ID NO: 315735
gacugagaguaugugauau

SEQ ID NO: 358916 - RNA, 19 nt, Artificial Sequence
  Description of Artificial Sequence: Synthetic oligonucleotide
  Antisense Strand to SEQ ID NO: 358915
auaucacauacucucaguc

SEQ ID NO: 358917 - RNA, 19 nt, Artificial Sequence
  Description of Artificial Sequence: Synthetic oligonucleotide
  Sense Strand Starting at position 512 of SEQ ID NO: 315781
gcccgcacuacugagagaa

SEQ ID NO: 358918 - RNA, 19 nt, Artificial Sequence
  Description of Artificial Sequence: Synthetic oligonucleotide
  Antisense Strand to SEQ ID NO: 358917
uucucucaguagugcgggc

SEQ ID NO: 358919 - RNA, 19 nt, Artificial Sequence
  Description of Artificial Sequence: Synthetic oligonucleotide
  Sense Strand Starting at position 512 of SEQ ID NO: 315941
cugaguuuccaucaaggca

SEQ ID NO: 358920 - RNA, 19 nt, Artificial Sequence
  Description of Artificial Sequence: Synthetic oligonucleotide
  Antisense Strand to SEQ ID NO: 358919
ugccuugauggaaacucag

SEQ ID NO: 358921 - RNA, 19 nt, Artificial Sequence
  Description of Artificial Sequence: Synthetic oligonucleotide
  Sense Strand Starting at position 512 of SEQ ID NO: 316022
acucauuuaucccacaggu

SEQ ID NO: 358922 - RNA, 19 nt, Artificial Sequence
  Description of Artificial Sequence: Synthetic oligonucleotide
  Antisense Strand to SEQ ID NO: 358921
accugugggauaaaugagu

SEQ ID NO: 358923 - RNA, 19 nt, Artificial Sequence
  Description of Artificial Sequence: Synthetic oligonucleotide
  Sense Strand Starting at position 512 of SEQ ID NO: 316035
acagguaaucucugaacac

SEQ ID NO: 358924 - RNA, 19 nt, Artificial Sequence
  Description of Artificial Sequence: Synthetic oligonucleotide
  Antisense Strand to SEQ ID NO: 358923
guguucagagauuaccugu

SEQ ID NO: 358925 - RNA, 19 nt, Artificial Sequence
  Description of Artificial Sequence: Synthetic oligonucleotide
  Sense Strand Starting at position 512 of SEQ ID NO: 316094
augugucgugaagaaauaa

SEQ ID NO: 358926 - RNA, 19 nt, Artificial Sequence
  Description of Artificial Sequence: Synthetic oligonucleotide
  Antisense Strand to SEQ ID NO: 358925
uuauuucuucacgacacau

SEQ ID NO: 358927 - RNA, 19 nt, Artificial Sequence
  Description of Artificial Sequence: Synthetic oligonucleotide
  Sense Strand Starting at position 512 of SEQ ID NO: 316127
uggagcuuguagccuaaua

SEQ ID NO: 358928 - RNA, 19 nt, Artificial Sequence
  Description of Artificial Sequence: Synthetic oligonucleotide
  Antisense Strand to SEQ ID NO: 358927
uauuaggcuacaagcucca

SEQ ID NO: 358929 - RNA, 19 nt, Artificial Sequence
  Description of Artificial Sequence: Synthetic oligonucleotide
  Sense Strand Starting at position 512 of SEQ ID NO: 316222
cccagaauacguggguuca

SEQ ID NO: 358930 - RNA, 19 nt, Artificial Sequence
  Description of Artificial Sequence: Synthetic oligonucleotide
  Antisense Strand to SEQ ID NO: 358929
ugaacccacguauucuggg

SEQ ID NO: 358931 - RNA, 19 nt, Artificial Sequence
  Description of Artificial Sequence: Synthetic oligonucleotide
  Sense Strand Starting at position 512 of SEQ ID NO: 316223
ccagaauacguggguucaa

SEQ ID NO: 358932 - RNA, 19 nt, Artificial Sequence
  Description of Artificial Sequence: Synthetic oligonucleotide
  Antisense Strand to SEQ ID NO: 358931
uugaacccacguauucugg

SEQ ID NO: 358933 - RNA, 19 nt, Artificial Sequence
  Description of Artificial Sequence: Synthetic oligonucleotide
  Sense Strand Starting at position 512 of SEQ ID NO: 316285
uuacuuaaccugugucuuu

SEQ ID NO: 358934 - RNA, 19 nt, Artificial Sequence
  Description of Artificial Sequence: Synthetic oligonucleotide
  Antisense Strand to SEQ ID NO: 358933
aaagacacagguuaaguaa

SEQ ID NO: 358935 - RNA, 19 nt, Artificial Sequence
  Description of Artificial Sequence: Synthetic oligonucleotide
  Sense Strand Starting at position 512 of SEQ ID NO: 316308
aucugucaacuugguguaa

SEQ ID NO: 358936 - RNA, 19 nt, Artificial Sequence
  Description of Artificial Sequence: Synthetic oligonucleotide
  Antisense Strand to SEQ ID NO: 358935
uuacaccaaguugacagau

SEQ ID NO: 358937 - RNA, 19 nt, Artificial Sequence
  Description of Artificial Sequence: Synthetic oligonucleotide
  Sense Strand Starting at position 512 of SEQ ID NO: 316342
aacagugauugauaugaua

SEQ ID NO: 358938 - RNA, 19 nt, Artificial Sequence
  Description of Artificial Sequence: Synthetic oligonucleotide
  Antisense Strand to SEQ ID NO: 358937
uaucauaucaaucacuguu

SEQ ID NO: 358939 - RNA, 19 nt, Artificial Sequence
  Description of Artificial Sequence: Synthetic oligonucleotide
  Sense Strand Starting at position 512 of SEQ ID NO: 316390
cuaucuggguguuugcaau

SEQ ID NO: 358940 - RNA, 19 nt, Artificial Sequence
  Description of Artificial Sequence: Synthetic oligonucleotide
  Antisense Strand to SEQ ID NO: 358939
auugcaaacacccagauag

SEQ ID NO: 358941 - RNA, 19 nt, Artificial Sequence
  Description of Artificial Sequence: Synthetic oligonucleotide
  Sense Strand Starting at position 512 of SEQ ID NO: 316429
gaucauucccaguaacgca

SEQ ID NO: 358942 - RNA, 19 nt, Artificial Sequence
  Description of Artificial Sequence: Synthetic oligonucleotide
  Antisense Strand to SEQ ID NO: 358941
ugcguuacugggaaugauc

SEQ ID NO: 358943 - RNA, 19 nt, Artificial Sequence
  Description of Artificial Sequence: Synthetic oligonucleotide
  Sense Strand Starting at position 512 of SEQ ID NO: 316478
gcucauuccucaucccgau

SEQ ID NO: 358944 - RNA, 19 nt, Artificial Sequence
  Description of Artificial Sequence: Synthetic oligonucleotide
  Antisense Strand to SEQ ID NO: 358943
aucgggaugaggaaugagc

SEQ ID NO: 358945 - RNA, 19 nt, Artificial Sequence
  Description of Artificial Sequence: Synthetic oligonucleotide
  Sense Strand Starting at position 512 of SEQ ID NO: 316484
uccucaucccgauguacuu

SEQ ID NO: 358946 - RNA, 19 nt, Artificial Sequence
  Description of Artificial Sequence: Synthetic oligonucleotide
  Antisense Strand to SEQ ID NO: 358945
aaguacaucgggaugagga

SEQ ID NO: 358947 - RNA, 19 nt, Artificial Sequence
  Description of Artificial Sequence: Synthetic oligonucleotide
  Sense Strand Starting at position 512 of SEQ ID NO: 316529
cgauuucggucacugggau

SEQ ID NO: 358948 - RNA, 19 nt, Artificial Sequence
  Description of Artificial Sequence: Synthetic oligonucleotide
  Antisense Strand to SEQ ID NO: 358947
aucccagugaccgaaaucg

SEQ ID NO: 358949 - RNA, 19 nt, Artificial Sequence
  Description of Artificial Sequence: Synthetic oligonucleotide
  Sense Strand Starting at position 512 of SEQ ID NO: 316688
ucuacucgucuccaagaca

SEQ ID NO: 358950 - RNA, 19 nt, Artificial Sequence
  Description of Artificial Sequence: Synthetic oligonucleotide
  Antisense Strand to SEQ ID NO: 358949
ugucuuggagacgaguaga

SEQ ID NO: 358951 - RNA, 19 nt, Artificial Sequence
  Description of Artificial Sequence: Synthetic oligonucleotide
  Sense Strand Starting at position 512 of SEQ ID NO: 317683
gcaccuugaagguaguaua

SEQ ID NO: 358952 - RNA, 19 nt, Artificial Sequence
  Description of Artificial Sequence: Synthetic oligonucleotide
  Antisense Strand to SEQ ID NO: 358951
uauacuaccuucaaggugc

SEQ ID NO: 358953 - RNA, 19 nt, Artificial Sequence
  Description of Artificial Sequence: Synthetic oligonucleotide
  Sense Strand Starting at position 512 of SEQ ID NO: 317859
aucguuugcaaugugcaau

SEQ ID NO: 358954 - RNA, 19 nt, Artificial Sequence
  Description of Artificial Sequence: Synthetic oligonucleotide
  Antisense Strand to SEQ ID NO: 358953
auugcacauugcaaacgau

SEQ ID NO: 358955 - RNA, 19 nt, Artificial Sequence
  Description of Artificial Sequence: Synthetic oligonucleotide
  Sense Strand Starting at position 512 of SEQ ID NO: 317865
ugcaaugugcaauaucuga

SEQ ID NO: 358956 - RNA, 19 nt, Artificial Sequence
  Description of Artificial Sequence: Synthetic oligonucleotide
  Antisense Strand to SEQ ID NO: 358955
ucagauauugcacauugca

SEQ ID NO: 358957 - RNA, 19 nt, Artificial Sequence
  Description of Artificial Sequence: Synthetic oligonucleotide
  Sense Strand Starting at position 512 of SEQ ID NO: 317889
cugccuuggagucauuaga

SEQ ID NO: 358958 - RNA, 19 nt, Artificial Sequence
  Description of Artificial Sequence: Synthetic oligonucleotide
  Antisense Strand to SEQ ID NO: 358957
ucuaaugacuccaaggcag

SEQ ID NO: 358959 - RNA, 19 nt, Artificial Sequence
  Description of Artificial Sequence: Synthetic oligonucleotide
  Sense Strand Starting at position 512 of SEQ ID NO: 317907
acccucugcucagugacaa

SEQ ID NO: 358960 - RNA, 19 nt, Artificial Sequence
  Description of Artificial Sequence: Synthetic oligonucleotide
  Antisense Strand to SEQ ID NO: 358959
uugucacugagcagagggu

SEQ ID NO: 358961 - RNA, 19 nt, Artificial Sequence
  Description of Artificial Sequence: Synthetic oligonucleotide
  Sense Strand Starting at position 512 of SEQ ID NO: 317908
cccucugcucagugacaau

SEQ ID NO: 358962 - RNA, 19 nt, Artificial Sequence
  Description of Artificial Sequence: Synthetic oligonucleotide
  Antisense Strand to SEQ ID NO: 358961
auugucacugagcagaggg

SEQ ID NO: 358963 - RNA, 19 nt, Artificial Sequence
  Description of Artificial Sequence: Synthetic oligonucleotide
  Sense Strand Starting at position 512 of SEQ ID NO: 317945
uguaauaaacaguggaacu

SEQ ID NO: 358964 - RNA, 19 nt, Artificial Sequence
  Description of Artificial Sequence: Synthetic oligonucleotide
  Antisense Strand to SEQ ID NO: 358963
aguuccacuguuuauuaca

SEQ ID NO: 358965 - RNA, 19 nt, Artificial Sequence
  Description of Artificial Sequence: Synthetic oligonucleotide
  Sense Strand Starting at position 512 of SEQ ID NO: 318006
cagugauaaguggacagua

SEQ ID NO: 358966 - RNA, 19 nt, Artificial Sequence
  Description of Artificial Sequence: Synthetic oligonucleotide
  Antisense Strand to SEQ ID NO: 358965
uacuguccacuuaucacug

SEQ ID NO: 358967 - RNA, 19 nt, Artificial Sequence
  Description of Artificial Sequence: Synthetic oligonucleotide
  Sense Strand Starting at position 512 of SEQ ID NO: 318041
gugggucauggguagugaa

SEQ ID NO: 358968 - RNA, 19 nt, Artificial Sequence
  Description of Artificial Sequence: Synthetic oligonucleotide
  Antisense Strand to SEQ ID NO: 358967
uucacuacccaugacccac

SEQ ID NO: 358969 - RNA, 19 nt, Artificial Sequence
  Description of Artificial Sequence: Synthetic oligonucleotide
  Sense Strand Starting at position 512 of SEQ ID NO: 318049
uggguagugaaaugaguga

SEQ ID NO: 358970 - RNA, 19 nt, Artificial Sequence
  Description of Artificial Sequence: Synthetic oligonucleotide
  Antisense Strand to SEQ ID NO: 358969
ucacucauuucacuaccca

SEQ ID NO: 358971 - RNA, 19 nt, Artificial Sequence
  Description of Artificial Sequence: Synthetic oligonucleotide
  Sense Strand Starting at position 513 of SEQ ID NO: 315252
aaugcauugggagagcauu

SEQ ID NO: 358972 - RNA, 19 nt, Artificial Sequence
  Description of Artificial Sequence: Synthetic oligonucleotide
  Antisense Strand to SEQ ID NO: 358971
aaugcucucccaaugcauu

SEQ ID NO: 358973 - RNA, 19 nt, Artificial Sequence
  Description of Artificial Sequence: Synthetic oligonucleotide
  Sense Strand Starting at position 513 of SEQ ID NO: 315278
gggaauaagucaguuauua

SEQ ID NO: 358974 - RNA, 19 nt, Artificial Sequence
  Description of Artificial Sequence: Synthetic oligonucleotide
  Antisense Strand to SEQ ID NO: 358973
uaauaacugacuuauuccc

SEQ ID NO: 358975 - RNA, 19 nt, Artificial Sequence
  Description of Artificial Sequence: Synthetic oligonucleotide
  Sense Strand Starting at position 513 of SEQ ID NO: 315282
auaagucaguuauuacuca

SEQ ID NO: 358976 - RNA, 19 nt, Artificial Sequence
  Description of Artificial Sequence: Synthetic oligonucleotide
  Antisense Strand to SEQ ID NO: 358975
ugaguaauaacugacuuau

SEQ ID NO: 358977 - RNA, 19 nt, Artificial Sequence
  Description of Artificial Sequence: Synthetic oligonucleotide
  Sense Strand Starting at position 513 of SEQ ID NO: 315623
guggucaccacugagacuu

SEQ ID NO: 358978 - RNA, 19 nt, Artificial Sequence
  Description of Artificial Sequence: Synthetic oligonucleotide
  Antisense Strand to SEQ ID NO: 358977
aagucucaguggugaccac

SEQ ID NO: 358979 - RNA, 19 nt, Artificial Sequence
  Description of Artificial Sequence: Synthetic oligonucleotide
  Sense Strand Starting at position 513 of SEQ ID NO: 315869
cuggguaaaucaguuaaag

SEQ ID NO: 358980 - RNA, 19 nt, Artificial Sequence
  Description of Artificial Sequence: Synthetic oligonucleotide
  Antisense Strand to SEQ ID NO: 358979
cuuuaacugauuuacccag

SEQ ID NO: 358981 - RNA, 19 nt, Artificial Sequence
  Description of Artificial Sequence: Synthetic oligonucleotide
  Sense Strand Starting at position 513 of SEQ ID NO: 315931
ggagucauggcugaaagca

SEQ ID NO: 358982 - RNA, 19 nt, Artificial Sequence
  Description of Artificial Sequence: Synthetic oligonucleotide
  Antisense Strand to SEQ ID NO: 358981
ugcuuucagccaugacucc

SEQ ID NO: 358983 - RNA, 19 nt, Artificial Sequence
  Description of Artificial Sequence: Synthetic oligonucleotide
  Sense Strand Starting at position 513 of SEQ ID NO: 316276
agaagugcuaucuagaggu

SEQ ID NO: 358984 - RNA, 19 nt, Artificial Sequence
  Description of Artificial Sequence: Synthetic oligonucleotide
  Antisense Strand to SEQ ID NO: 358983
accucuagauagcacuucu

SEQ ID NO: 358985 - RNA, 19 nt, Artificial Sequence
  Description of Artificial Sequence: Synthetic oligonucleotide
  Sense Strand Starting at position 513 of SEQ ID NO: 316278
aagugcuaucuagagguga

SEQ ID NO: 358986 - RNA, 19 nt, Artificial Sequence
  Description of Artificial Sequence: Synthetic oligonucleotide
  Antisense Strand to SEQ ID NO: 358985
ucaccucuagauagcacuu

SEQ ID NO: 358987 - RNA, 19 nt, Artificial Sequence
  Description of Artificial Sequence: Synthetic oligonucleotide
  Sense Strand Starting at position 513 of SEQ ID NO: 316282
gcuaucuagaggugagaac

SEQ ID NO: 358988 - RNA, 19 nt, Artificial Sequence
  Description of Artificial Sequence: Synthetic oligonucleotide
  Antisense Strand to SEQ ID NO: 358987
guucucaccucuagauagc

SEQ ID NO: 358989 - RNA, 19 nt, Artificial Sequence
  Description of Artificial Sequence: Synthetic oligonucleotide
  Sense Strand Starting at position 513 of SEQ ID NO: 316305
gaguaaucuggugaggccu

SEQ ID NO: 358990 - RNA, 19 nt, Artificial Sequence
  Description of Artificial Sequence: Synthetic oligonucleotide
  Antisense Strand to SEQ ID NO: 358989
aggccucaccagauuacuc

SEQ ID NO: 358991 - RNA, 19 nt, Artificial Sequence
  Description of Artificial Sequence: Synthetic oligonucleotide
  Sense Strand Starting at position 513 of SEQ ID NO: 316398
ugacuaagccucugaggga

SEQ ID NO: 358992 - RNA, 19 nt, Artificial Sequence
  Description of Artificial Sequence: Synthetic oligonucleotide
  Antisense Strand to SEQ ID NO: 358991
ucccucagaggcuuaguca

SEQ ID NO: 358993 - RNA, 19 nt, Artificial Sequence
  Description of Artificial Sequence: Synthetic oligonucleotide
  Sense Strand Starting at position 513 of SEQ ID NO: 316442
gguacucauuugccaggua

SEQ ID NO: 358994 - RNA, 19 nt, Artificial Sequence
  Description of Artificial Sequence: Synthetic oligonucleotide
  Antisense Strand to SEQ ID NO: 358993
uaccuggcaaaugaguacc

SEQ ID NO: 358995 - RNA, 19 nt, Artificial Sequence
  Description of Artificial Sequence: Synthetic oligonucleotide
  Sense Strand Starting at position 513 of SEQ ID NO: 316592
gagauucugugaucuacga

SEQ ID NO: 358996 - RNA, 19 nt, Artificial Sequence
  Description of Artificial Sequence: Synthetic oligonucleotide
  Antisense Strand to SEQ ID NO: 358995
ucguagaucacagaaucuc

SEQ ID NO: 358997 - RNA, 19 nt, Artificial Sequence
  Description of Artificial Sequence: Synthetic oligonucleotide
  Sense Strand Starting at position 513 of SEQ ID NO: 316683
guguacaucagugacuacu

SEQ ID NO: 358998 - RNA, 19 nt, Artificial Sequence
  Description of Artificial Sequence: Synthetic oligonucleotide
  Antisense Strand to SEQ ID NO: 358997
aguagucacugauguacac

SEQ ID NO: 358999 - RNA, 19 nt, Artificial Sequence
  Description of Artificial Sequence: Synthetic oligonucleotide
  Sense Strand Starting at position 513 of SEQ ID NO: 316694
ugacuacuuccugaucugu

SEQ ID NO: 359000 - RNA, 19 nt, Artificial Sequence
  Description of Artificial Sequence: Synthetic oligonucleotide
  Antisense Strand to SEQ ID NO: 358999
acagaucaggaaguaguca

SEQ ID NO: 359001 - RNA, 19 nt, Artificial Sequence
  Description of Artificial Sequence: Synthetic oligonucleotide
  Sense Strand Starting at position 513 of SEQ ID NO: 316712
uuacauuuccugugugggu

SEQ ID NO: 359002 - RNA, 19 nt, Artificial Sequence
  Description of Artificial Sequence: Synthetic oligonucleotide
  Antisense Strand to SEQ ID NO: 359001
acccacacaggaaauguaa

SEQ ID NO: 359003 - RNA, 19 nt, Artificial Sequence
  Description of Artificial Sequence: Synthetic oligonucleotide
  Sense Strand Starting at position 513 of SEQ ID NO: 316729
guuuguuucccugagacca

SEQ ID NO: 359004 - RNA, 19 nt, Artificial Sequence
  Description of Artificial Sequence: Synthetic oligonucleotide
  Antisense Strand to SEQ ID NO: 359003
uggucucagggaaacaaac

SEQ ID NO: 359005 - RNA, 19 nt, Artificial Sequence
  Description of Artificial Sequence: Synthetic oligonucleotide
  Sense Strand Starting at position 513 of SEQ ID NO: 316836
guagauugucagcagaaac

SEQ ID NO: 359006 - RNA, 19 nt, Artificial Sequence
  Description of Artificial Sequence: Synthetic oligonucleotide
  Antisense Strand to SEQ ID NO: 359005
guuucugcugacaaucuac

SEQ ID NO: 359007 - RNA, 19 nt, Artificial Sequence
  Description of Artificial Sequence: Synthetic oligonucleotide
  Sense Strand Starting at position 513 of SEQ ID NO: 316939
uccagaugcugauuugcua

SEQ ID NO: 359008 - RNA, 19 nt, Artificial Sequence
  Description of Artificial Sequence: Synthetic oligonucleotide
  Antisense Strand to SEQ ID NO: 359007
uagcaaaucagcaucugga

SEQ ID NO: 359009 - RNA, 19 nt, Artificial Sequence
  Description of Artificial Sequence: Synthetic oligonucleotide
  Sense Strand Starting at position 513 of SEQ ID NO: 317401
gaguuuguaauccagugag

SEQ ID NO: 359010 - RNA, 19 nt, Artificial Sequence
  Description of Artificial Sequence: Synthetic oligonucleotide
  Antisense Strand to SEQ ID NO: 359009
cucacuggauuacaaacuc

SEQ ID NO: 359011 - RNA, 19 nt, Artificial Sequence
  Description of Artificial Sequence: Synthetic oligonucleotide
  Sense Strand Starting at position 513 of SEQ ID NO: 317404
uuuguaauccagugagaga

SEQ ID NO: 359012 - RNA, 19 nt, Artificial Sequence
  Description of Artificial Sequence: Synthetic oligonucleotide
  Antisense Strand to SEQ ID NO: 359011
ucucucacuggauuacaaa

SEQ ID NO: 359013 - RNA, 19 nt, Artificial Sequence
  Description of Artificial Sequence: Synthetic oligonucleotide
  Sense Strand Starting at position 513 of SEQ ID NO: 317444
cacauuagagaaugcugua

SEQ ID NO: 359014 - RNA, 19 nt, Artificial Sequence
  Description of Artificial Sequence: Synthetic oligonucleotide
  Antisense Strand to SEQ ID NO: 359013
uacagcauucucuaaugug

SEQ ID NO: 359015 - RNA, 19 nt, Artificial Sequence
  Description of Artificial Sequence: Synthetic oligonucleotide
  Sense Strand Starting at position 513 of SEQ ID NO: 317523
gcauuugguauugggugua

SEQ ID NO: 359016 - RNA, 19 nt, Artificial Sequence
  Description of Artificial Sequence: Synthetic oligonucleotide
  Antisense Strand to SEQ ID NO: 359015
uacacccaauaccaaaugc

SEQ ID NO: 359017 - RNA, 19 nt, Artificial Sequence
  Description of Artificial Sequence: Synthetic oligonucleotide
  Sense Strand Starting at position 513 of SEQ ID NO: 317569
gugauuuauauguggguuu

SEQ ID NO: 359018 - RNA, 19 nt, Artificial Sequence
  Description of Artificial Sequence: Synthetic oligonucleotide
  Antisense Strand to SEQ ID NO: 359017
aaacccacauauaaaucac

SEQ ID NO: 359019 - RNA, 19 nt, Artificial Sequence
  Description of Artificial Sequence: Synthetic oligonucleotide
  Sense Strand Starting at position 513 of SEQ ID NO: 317676
cgaccaauugaaugccaga

SEQ ID NO: 359020 - RNA, 19 nt, Artificial Sequence
  Description of Artificial Sequence: Synthetic oligonucleotide
  Antisense Strand to SEQ ID NO: 359019
ucuggcauucaauuggucg

SEQ ID NO: 359021 - RNA, 19 nt, Artificial Sequence
  Description of Artificial Sequence: Synthetic oligonucleotide
  Sense Strand Starting at position 513 of SEQ ID NO: 317729
gaaggagaguuuccuagcu

SEQ ID NO: 359022 - RNA, 19 nt, Artificial Sequence
  Description of Artificial Sequence: Synthetic oligonucleotide
  Antisense Strand to SEQ ID NO: 359021
agcuaggaaacucuccuuc

SEQ ID NO: 359023 - RNA, 19 nt, Artificial Sequence
  Description of Artificial Sequence: Synthetic oligonucleotide
  Sense Strand Starting at position 513 of SEQ ID NO: 317913
gucagacuuacucagguga

SEQ ID NO: 359024 - RNA, 19 nt, Artificial Sequence
  Description of Artificial Sequence: Synthetic oligonucleotide
  Antisense Strand to SEQ ID NO: 359023
ucaccugaguaagucugac

SEQ ID NO: 359025 - RNA, 19 nt, Artificial Sequence
  Description of Artificial Sequence: Synthetic oligonucleotide
  Sense Strand Starting at position 513 of SEQ ID NO: 318055
cugggucccugagugagaa

SEQ ID NO: 359026 - RNA, 19 nt, Artificial Sequence
  Description of Artificial Sequence: Synthetic oligonucleotide
  Antisense Strand to SEQ ID NO: 359025
uucucacucagggacccag

SEQ ID NO: 359027 - RNA, 19 nt, Artificial Sequence
  Description of Artificial Sequence: Synthetic oligonucleotide
  Sense Strand Starting at position 513 of SEQ ID NO: 318056
ugggucccugagugagaaa

SEQ ID NO: 359028 - RNA, 19 nt, Artificial Sequence
  Description of Artificial Sequence: Synthetic oligonucleotide
  Antisense Strand to SEQ ID NO: 359027
uuucucacucagggaccca

SEQ ID NO: 359029 - RNA, 19 nt, Artificial Sequence
  Description of Artificial Sequence: Synthetic oligonucleotide
  Sense Strand Starting at position 513 of SEQ ID NO: 318157
auuugagggugucuguuau

SEQ ID NO: 359030 - RNA, 19 nt, Artificial Sequence
  Description of Artificial Sequence: Synthetic oligonucleotide
  Antisense Strand to SEQ ID NO: 359029
auaacagacacccucaaau

SEQ ID NO: 359031 - RNA, 19 nt, Artificial Sequence
  Description of Artificial Sequence: Synthetic oligonucleotide
  Sense Strand Starting at position 513 of SEQ ID NO: 318194
uccuaaucuugauugugga

SEQ ID NO: 359032 - RNA, 19 nt, Artificial Sequence
  Description of Artificial Sequence: Synthetic oligonucleotide
  Antisense Strand to SEQ ID NO: 359031
uccacaaucaagauuagga

SEQ ID NO: 359033 - RNA, 19 nt, Artificial Sequence
  Description of Artificial Sequence: Synthetic oligonucleotide
  Sense Strand Starting at position 513 of SEQ ID NO: 318509
gguacauaguucucuagag

SEQ ID NO: 359034 - RNA, 19 nt, Artificial Sequence
  Description of Artificial Sequence: Synthetic oligonucleotide
  Antisense Strand to SEQ ID NO: 359033
cucuagagaacuauguacc

SEQ ID NO: 359035 - RNA, 19 nt, Artificial Sequence
  Description of Artificial Sequence: Synthetic oligonucleotide
  Sense Strand Starting at position 513 of SEQ ID NO: 318510
guacauaguucucuagaga

SEQ ID NO: 359036 - RNA, 19 nt, Artificial Sequence
  Description of Artificial Sequence: Synthetic oligonucleotide
  Antisense Strand to SEQ ID NO: 359035
ucucuagagaacuauguac

SEQ ID NO: 359037 - RNA, 19 nt, Artificial Sequence
  Description of Artificial Sequence: Synthetic oligonucleotide
  Sense Strand Starting at position 513 of SEQ ID NO: 318607
gguagugagguguaucaca

SEQ ID NO: 359038 - RNA, 19 nt, Artificial Sequence
  Description of Artificial Sequence: Synthetic oligonucleotide
  Antisense Strand to SEQ ID NO: 359037
ugugauacaccucacuacc

SEQ ID NO: 359039 - RNA, 19 nt, Artificial Sequence
  Description of Artificial Sequence: Synthetic oligonucleotide
  Sense Strand Starting at position 513 of SEQ ID NO: 318676
cuuauuguacuuugagaaa

SEQ ID NO: 359040 - RNA, 19 nt, Artificial Sequence
  Description of Artificial Sequence: Synthetic oligonucleotide
  Antisense Strand to SEQ ID NO: 359039
uuucucaaaguacaauaag

SEQ ID NO: 359041 - RNA, 19 nt, Artificial Sequence
  Description of Artificial Sequence: Synthetic oligonucleotide
  Sense Strand Starting at position 513 of SEQ ID NO: 318685
cuuugagaaagugagcuau

SEQ ID NO: 359042 - RNA, 19 nt, Artificial Sequence
  Description of Artificial Sequence: Synthetic oligonucleotide
  Antisense Strand to SEQ ID NO: 359041
auagcucacuuucucaaag

SEQ ID NO: 359043 - RNA, 19 nt, Artificial Sequence
  Description of Artificial Sequence: Synthetic oligonucleotide
  Sense Strand Starting at position 513 of SEQ ID NO: 318687
uugagaaagugagcuaucu

SEQ ID NO: 359044 - RNA, 19 nt, Artificial Sequence
  Description of Artificial Sequence: Synthetic oligonucleotide
  Antisense Strand to SEQ ID NO: 359043
agauagcucacuuucucaa

SEQ ID NO: 359045 - RNA, 19 nt, Artificial Sequence
  Description of Artificial Sequence: Synthetic oligonucleotide
  Sense Strand Starting at position 513 of SEQ ID NO: 319139
cacuaugugccagacaaga

SEQ ID NO: 359046 - RNA, 19 nt, Artificial Sequence
  Description of Artificial Sequence: Synthetic oligonucleotide
  Antisense Strand to SEQ ID NO: 359045
ucuugucuggcacauagug

SEQ ID NO: 359047 - RNA, 19 nt, Artificial Sequence
  Description of Artificial Sequence: Synthetic oligonucleotide
  Sense Strand Starting at position 513 of SEQ ID NO: 319141
cuaugugccagacaagagu

SEQ ID NO: 359048 - RNA, 19 nt, Artificial Sequence
  Description of Artificial Sequence: Synthetic oligonucleotide
  Antisense Strand to SEQ ID NO: 359047
acucuugucuggcacauag

SEQ ID NO: 359049 - RNA, 19 nt, Artificial Sequence
  Description of Artificial Sequence: Synthetic oligonucleotide
  Sense Strand Starting at position 513 of SEQ ID NO: 319155
agaguucucccaggaccau

SEQ ID NO: 359050 - RNA, 19 nt, Artificial Sequence
  Description of Artificial Sequence: Synthetic oligonucleotide
  Antisense Strand to SEQ ID NO: 359049
augguccugggagaacucu

SEQ ID NO: 359051 - RNA, 19 nt, Artificial Sequence
  Description of Artificial Sequence: Synthetic oligonucleotide
  Sense Strand Starting at position 514 of SEQ ID NO: 315256
ugaccuauuuauggcaagu

SEQ ID NO: 359052 - RNA, 19 nt, Artificial Sequence
  Description of Artificial Sequence: Synthetic oligonucleotide
  Antisense Strand to SEQ ID NO: 359051
acuugccauaaauagguca

SEQ ID NO: 359053 - RNA, 19 nt, Artificial Sequence
  Description of Artificial Sequence: Synthetic oligonucleotide
  Sense Strand Starting at position 514 of SEQ ID NO: 315258
accuauuuauggcaaguga

SEQ ID NO: 359054 - RNA, 19 nt, Artificial Sequence
  Description of Artificial Sequence: Synthetic oligonucleotide
  Antisense Strand to SEQ ID NO: 359053
ucacuugccauaaauaggu

SEQ ID NO: 359055 - RNA, 19 nt, Artificial Sequence
  Description of Artificial Sequence: Synthetic oligonucleotide
  Sense Strand Starting at position 514 of SEQ ID NO: 315379
acgauaugcucuucgaagc

SEQ ID NO: 359056 - RNA, 19 nt, Artificial Sequence
  Description of Artificial Sequence: Synthetic oligonucleotide
  Antisense Strand to SEQ ID NO: 359055
gcuucgaagagcauaucgu

SEQ ID NO: 359057 - RNA, 19 nt, Artificial Sequence
  Description of Artificial Sequence: Synthetic oligonucleotide
  Sense Strand Starting at position 514 of SEQ ID NO: 315380
cgauaugcucuucgaagca

SEQ ID NO: 359058 - RNA, 19 nt, Artificial Sequence
  Description of Artificial Sequence: Synthetic oligonucleotide
  Antisense Strand to SEQ ID NO: 359057
ugcuucgaagagcauaucg

SEQ ID NO: 359059 - RNA, 19 nt, Artificial Sequence
  Description of Artificial Sequence: Synthetic oligonucleotide
  Sense Strand Starting at position 514 of SEQ ID NO: 315470
ucuuguaacuguguuacuu

SEQ ID NO: 359060 - RNA, 19 nt, Artificial Sequence
  Description of Artificial Sequence: Synthetic oligonucleotide
  Antisense Strand to SEQ ID NO: 359059
aaguaacacaguuacaaga

SEQ ID NO: 359061 - RNA, 19 nt, Artificial Sequence
  Description of Artificial Sequence: Synthetic oligonucleotide
  Sense Strand Starting at position 514 of SEQ ID NO: 315505
cuguguccuucccuggaaa

SEQ ID NO: 359062 - RNA, 19 nt, Artificial Sequence
  Description of Artificial Sequence: Synthetic oligonucleotide
  Antisense Strand to SEQ ID NO: 359061
uuuccagggaaggacacag

SEQ ID NO: 359063 - RNA, 19 nt, Artificial Sequence
  Description of Artificial Sequence: Synthetic oligonucleotide
  Sense Strand Starting at position 514 of SEQ ID NO: 315506
uguguccuucccuggaaag

SEQ ID NO: 359064 - RNA, 19 nt, Artificial Sequence
  Description of Artificial Sequence: Synthetic oligonucleotide
  Antisense Strand to SEQ ID NO: 359063
cuuuccagggaaggacaca

SEQ ID NO: 359065 - RNA, 19 nt, Artificial Sequence
  Description of Artificial Sequence: Synthetic oligonucleotide
  Sense Strand Starting at position 514 of SEQ ID NO: 315507
guguccuucccuggaaaga

SEQ ID NO: 359066 - RNA, 19 nt, Artificial Sequence
  Description of Artificial Sequence: Synthetic oligonucleotide
  Antisense Strand to SEQ ID NO: 359065
ucuuuccagggaaggacac

SEQ ID NO: 359067 - RNA, 19 nt, Artificial Sequence
  Description of Artificial Sequence: Synthetic oligonucleotide
  Sense Strand Starting at position 514 of SEQ ID NO: 315580
aucuuauaaugagugccau

SEQ ID NO: 359068 - RNA, 19 nt, Artificial Sequence
  Description of Artificial Sequence: Synthetic oligonucleotide
  Antisense Strand to SEQ ID NO: 359067
auggcacucauuauaagau

SEQ ID NO: 359069 - RNA, 19 nt, Artificial Sequence
  Description of Artificial Sequence: Synthetic oligonucleotide
  Sense Strand Starting at position 514 of SEQ ID NO: 315581
ucuuauaaugagugccaua

SEQ ID NO: 359070 - RNA, 19 nt, Artificial Sequence
  Description of Artificial Sequence: Synthetic oligonucleotide
  Antisense Strand to SEQ ID NO: 359069
uauggcacucauuauaaga

SEQ ID NO: 359071 - RNA, 19 nt, Artificial Sequence
  Description of Artificial Sequence: Synthetic oligonucleotide
  Sense Strand Starting at position 514 of SEQ ID NO: 315586
uaaugagugccauauuaag

SEQ ID NO: 359072 - RNA, 19 nt, Artificial Sequence
  Description of Artificial Sequence: Synthetic oligonucleotide
  Antisense Strand to SEQ ID NO: 359071
cuuaauauggcacucauua

SEQ ID NO: 359073 - RNA, 19 nt, Artificial Sequence
  Description of Artificial Sequence: Synthetic oligonucleotide
  Sense Strand Starting at position 514 of SEQ ID NO: 315763
acuggaauugggugcacau

SEQ ID NO: 359074 - RNA, 19 nt, Artificial Sequence
  Description of Artificial Sequence: Synthetic oligonucleotide
  Antisense Strand to SEQ ID NO: 359073
augugcacccaauuccagu

SEQ ID NO: 359075 - RNA, 19 nt, Artificial Sequence
  Description of Artificial Sequence: Synthetic oligonucleotide
  Sense Strand Starting at position 514 of SEQ ID NO: 315772
gggugcacauguuuccuaa

SEQ ID NO: 359076 - RNA, 19 nt, Artificial Sequence
  Description of Artificial Sequence: Synthetic oligonucleotide
  Antisense Strand to SEQ ID NO: 359075
uuaggaaacaugugcaccc

SEQ ID NO: 359077 - RNA, 19 nt, Artificial Sequence
  Description of Artificial Sequence: Synthetic oligonucleotide
  Sense Strand Starting at position 514 of SEQ ID NO: 315901
cccugugcccaucaguaau

SEQ ID NO: 359078 - RNA, 19 nt, Artificial Sequence
  Description of Artificial Sequence: Synthetic oligonucleotide
  Antisense Strand to SEQ ID NO: 359077
auuacugaugggcacaggg

SEQ ID NO: 359079 - RNA, 19 nt, Artificial Sequence
  Description of Artificial Sequence: Synthetic oligonucleotide
  Sense Strand Starting at position 514 of SEQ ID NO: 315907
gcccaucaguaaucagcua

SEQ ID NO: 359080 - RNA, 19 nt, Artificial Sequence
  Description of Artificial Sequence: Synthetic oligonucleotide
  Antisense Strand to SEQ ID NO: 359079
uagcugauuacugaugggc

SEQ ID NO: 359081 - RNA, 19 nt, Artificial Sequence
  Description of Artificial Sequence: Synthetic oligonucleotide
  Sense Strand Starting at position 514 of SEQ ID NO: 316003
acaucauaucgugauuagg

SEQ ID NO: 359082 - RNA, 19 nt, Artificial Sequence
  Description of Artificial Sequence: Synthetic oligonucleotide
  Antisense Strand to SEQ ID NO: 359081
ccuaaucacgauaugaugu

SEQ ID NO: 359083 - RNA, 19 nt, Artificial Sequence
  Description of Artificial Sequence: Synthetic oligonucleotide
  Sense Strand Starting at position 514 of SEQ ID NO: 316005
aucauaucgugauuaggag

SEQ ID NO: 359084 - RNA, 19 nt, Artificial Sequence
  Description of Artificial Sequence: Synthetic oligonucleotide
  Antisense Strand to SEQ ID NO: 359083
cuccuaaucacgauaugau

SEQ ID NO: 359085 - RNA, 19 nt, Artificial Sequence
  Description of Artificial Sequence: Synthetic oligonucleotide
  Sense Strand Starting at position 514 of SEQ ID NO: 316006
ucauaucgugauuaggagu

SEQ ID NO: 359086 - RNA, 19 nt, Artificial Sequence
  Description of Artificial Sequence: Synthetic oligonucleotide
  Antisense Strand to SEQ ID NO: 359085
acuccuaaucacgauauga

SEQ ID NO: 359087 - RNA, 19 nt, Artificial Sequence
  Description of Artificial Sequence: Synthetic oligonucleotide
  Sense Strand Starting at position 514 of SEQ ID NO: 316014
ugauuaggagucuguguug

SEQ ID NO: 359088 - RNA, 19 nt, Artificial Sequence
  Description of Artificial Sequence: Synthetic oligonucleotide
  Antisense Strand to SEQ ID NO: 359087
caacacagacuccuaauca

SEQ ID NO: 359089 - RNA, 19 nt, Artificial Sequence
  Description of Artificial Sequence: Synthetic oligonucleotide
  Sense Strand Starting at position 514 of SEQ ID NO: 316017
uuaggagucuguguuggaa

SEQ ID NO: 359090 - RNA, 19 nt, Artificial Sequence
  Description of Artificial Sequence: Synthetic oligonucleotide
  Antisense Strand to SEQ ID NO: 359089
uuccaacacagacuccuaa

SEQ ID NO: 359091 - RNA, 19 nt, Artificial Sequence
  Description of Artificial Sequence: Synthetic oligonucleotide
  Sense Strand Starting at position 514 of SEQ ID NO: 316600
agugcaggucuguggagaa

SEQ ID NO: 359092 - RNA, 19 nt, Artificial Sequence
  Description of Artificial Sequence: Synthetic oligonucleotide
  Antisense Strand to SEQ ID NO: 359091
uucuccacagaccugcacu

SEQ ID NO: 359093 - RNA, 19 nt, Artificial Sequence
  Description of Artificial Sequence: Synthetic oligonucleotide
  Sense Strand Starting at position 514 of SEQ ID NO: 316663
ucaccucugcaccguaaua

SEQ ID NO: 359094 - RNA, 19 nt, Artificial Sequence
  Description of Artificial Sequence: Synthetic oligonucleotide
  Antisense Strand to SEQ ID NO: 359093
uauuacggugcagagguga

SEQ ID NO: 359095 - RNA, 19 nt, Artificial Sequence
  Description of Artificial Sequence: Synthetic oligonucleotide
  Sense Strand Starting at position 514 of SEQ ID NO: 316665
accucugcaccguaauaaa

SEQ ID NO: 359096 - RNA, 19 nt, Artificial Sequence
  Description of Artificial Sequence: Synthetic oligonucleotide
  Antisense Strand to SEQ ID NO: 359095
uuuauuacggugcagaggu

SEQ ID NO: 359097 - RNA, 19 nt, Artificial Sequence
  Description of Artificial Sequence: Synthetic oligonucleotide
  Sense Strand Starting at position 514 of SEQ ID NO: 317456
gcaaauacccgguggaauc

SEQ ID NO: 359098 - RNA, 19 nt, Artificial Sequence
  Description of Artificial Sequence: Synthetic oligonucleotide
  Antisense Strand to SEQ ID NO: 359097
gauuccaccggguauuugc

SEQ ID NO: 359099 - RNA, 19 nt, Artificial Sequence
  Description of Artificial Sequence: Synthetic oligonucleotide
  Sense Strand Starting at position 514 of SEQ ID NO: 317691
uuguuuccgcgaguuaaac

SEQ ID NO: 359100 - RNA, 19 nt, Artificial Sequence
  Description of Artificial Sequence: Synthetic oligonucleotide
  Antisense Strand to SEQ ID NO: 359099
guuuaacucgcggaaacaa

SEQ ID NO: 359101 - RNA, 19 nt, Artificial Sequence
  Description of Artificial Sequence: Synthetic oligonucleotide
  Sense Strand Starting at position 514 of SEQ ID NO: 318194
ccaugauugcaugauggca

SEQ ID NO: 359102 - RNA, 19 nt, Artificial Sequence
  Description of Artificial Sequence: Synthetic oligonucleotide
  Antisense Strand to SEQ ID NO: 359101
ugccaucaugcaaucaugg

SEQ ID NO: 359103 - RNA, 19 nt, Artificial Sequence
  Description of Artificial Sequence: Synthetic oligonucleotide
  Sense Strand Starting at position 514 of SEQ ID NO: 318226
accuaauccugagaaaggu

SEQ ID NO: 359104 - RNA, 19 nt, Artificial Sequence
  Description of Artificial Sequence: Synthetic oligonucleotide
  Antisense Strand to SEQ ID NO: 359103
accuuucucaggauuaggu

SEQ ID NO: 359105 - RNA, 19 nt, Artificial Sequence
  Description of Artificial Sequence: Synthetic oligonucleotide
  Sense Strand Starting at position 514 of SEQ ID NO: 318232
uccugagaaaggugccaua

SEQ ID NO: 359106 - RNA, 19 nt, Artificial Sequence
  Description of Artificial Sequence: Synthetic oligonucleotide
  Antisense Strand to SEQ ID NO: 359105
uauggcaccuuucucagga

SEQ ID NO: 359107 - RNA, 19 nt, Artificial Sequence
  Description of Artificial Sequence: Synthetic oligonucleotide
  Sense Strand Starting at position 514 of SEQ ID NO: 318279
gagguucgggccuggauua

SEQ ID NO: 359108 - RNA, 19 nt, Artificial Sequence
  Description of Artificial Sequence: Synthetic oligonucleotide
  Antisense Strand to SEQ ID NO: 359107
uaauccaggcccgaaccuc

SEQ ID NO: 359109 - RNA, 19 nt, Artificial Sequence
  Description of Artificial Sequence: Synthetic oligonucleotide
  Sense Strand Starting at position 514 of SEQ ID NO: 318524
auuagcugggcgugaugaa

SEQ ID NO: 359110 - RNA, 19 nt, Artificial Sequence
  Description of Artificial Sequence: Synthetic oligonucleotide
  Antisense Strand to SEQ ID NO: 359109
uucaucacgcccagcuaau

SEQ ID NO: 359111 - RNA, 19 nt, Artificial Sequence
  Description of Artificial Sequence: Synthetic oligonucleotide
  Sense Strand Starting at position 514 of SEQ ID NO: 318692
ugaaguucugguugcacuu

SEQ ID NO: 359112 - RNA, 19 nt, Artificial Sequence
  Description of Artificial Sequence: Synthetic oligonucleotide
  Antisense Strand to SEQ ID NO: 359111
aagugcaaccagaacuuca

SEQ ID NO: 359113 - RNA, 19 nt, Artificial Sequence
  Description of Artificial Sequence: Synthetic oligonucleotide
  Sense Strand Starting at position 514 of SEQ ID NO: 318924
gggaugugggcagauguaa

SEQ ID NO: 359114 - RNA, 19 nt, Artificial Sequence
  Description of Artificial Sequence: Synthetic oligonucleotide
  Antisense Strand to SEQ ID NO: 359113
uuacaucugcccacauccc

SEQ ID NO: 359115 - RNA, 19 nt, Artificial Sequence
  Description of Artificial Sequence: Synthetic oligonucleotide
  Sense Strand Starting at position 514 of SEQ ID NO: 318995
cccuguggcauuugugaga

SEQ ID NO: 359116 - RNA, 19 nt, Artificial Sequence
  Description of Artificial Sequence: Synthetic oligonucleotide
  Antisense Strand to SEQ ID NO: 359115
ucucacaaaugccacaggg

SEQ ID NO: 359117 - RNA, 19 nt, Artificial Sequence
  Description of Artificial Sequence: Synthetic oligonucleotide
  Sense Strand Starting at position 514 of SEQ ID NO: 319030
gggaacuugcucuguaguu

SEQ ID NO: 359118 - RNA, 19 nt, Artificial Sequence
  Description of Artificial Sequence: Synthetic oligonucleotide
  Antisense Strand to SEQ ID NO: 359117
aacuacagagcaaguuccc

SEQ ID NO: 359119 - RNA, 19 nt, Artificial Sequence
  Description of Artificial Sequence: Synthetic oligonucleotide
  Sense Strand Starting at position 514 of SEQ ID NO: 319059
cacagaugauccucugguu

SEQ ID NO: 359120 - RNA, 19 nt, Artificial Sequence
  Description of Artificial Sequence: Synthetic oligonucleotide
  Antisense Strand to SEQ ID NO: 359119
aaccagaggaucaucugug

SEQ ID NO: 359121 - RNA, 19 nt, Artificial Sequence
  Description of Artificial Sequence: Synthetic oligonucleotide
  Sense Strand Starting at position 514 of SEQ ID NO: 319065
ugauccucugguugggaga

SEQ ID NO: 359122 - RNA, 19 nt, Artificial Sequence
  Description of Artificial Sequence: Synthetic oligonucleotide
  Antisense Strand to SEQ ID NO: 359121
ucucccaaccagaggauca

SEQ ID NO: 359123 - RNA, 19 nt, Artificial Sequence
  Description of Artificial Sequence: Synthetic oligonucleotide
  Sense Strand Starting at position 514 of SEQ ID NO: 319066
gauccucugguugggagaa

SEQ ID NO: 359124 - RNA, 19 nt, Artificial Sequence
  Description of Artificial Sequence: Synthetic oligonucleotide
  Antisense Strand to SEQ ID NO: 359123
uucucccaaccagaggauc

SEQ ID NO: 359125 - RNA, 19 nt, Artificial Sequence
  Description of Artificial Sequence: Synthetic oligonucleotide
  Sense Strand Starting at position 514 of SEQ ID NO: 319124
gagagugggauuggucuga

SEQ ID NO: 359126 - RNA, 19 nt, Artificial Sequence
  Description of Artificial Sequence: Synthetic oligonucleotide
  Antisense Strand to SEQ ID NO: 359125
ucagaccaaucccacucuc

SEQ ID NO: 359127 - RNA, 19 nt, Artificial Sequence
  Description of Artificial Sequence: Synthetic oligonucleotide
  Sense Strand Starting at position 514 of SEQ ID NO: 319128
gugggauuggucugaauaa

SEQ ID NO: 359128 - RNA, 19 nt, Artificial Sequence
  Description of Artificial Sequence: Synthetic oligonucleotide
  Antisense Strand to SEQ ID NO: 359127
uuauucagaccaaucccac

SEQ ID NO: 359129 - RNA, 19 nt, Artificial Sequence
  Description of Artificial Sequence: Synthetic oligonucleotide
  Sense Strand Starting at position 514 of SEQ ID NO: 319129
ugggauuggucugaauaag

SEQ ID NO: 359130 - RNA, 19 nt, Artificial Sequence
  Description of Artificial Sequence: Synthetic oligonucleotide
  Antisense Strand to SEQ ID NO: 359129
cuuauucagaccaauccca

SEQ ID NO: 359131 - RNA, 19 nt, Artificial Sequence
  Description of Artificial Sequence: Synthetic oligonucleotide
  Sense Strand Starting at position 515 of SEQ ID NO: 315250
acgauaugcucuucgaagc

SEQ ID NO: 359132 - RNA, 19 nt, Artificial Sequence
  Description of Artificial Sequence: Synthetic oligonucleotide
  Antisense Strand to SEQ ID NO: 359131
gcuucgaagagcauaucgu

SEQ ID NO: 359133 - RNA, 19 nt, Artificial Sequence
  Description of Artificial Sequence: Synthetic oligonucleotide
  Sense Strand Starting at position 515 of SEQ ID NO: 315251
cgauaugcucuucgaagca

SEQ ID NO: 359134 - RNA, 19 nt, Artificial Sequence
  Description of Artificial Sequence: Synthetic oligonucleotide
  Antisense Strand to SEQ ID NO: 359133
ugcuucgaagagcauaucg

SEQ ID NO: 359135 - RNA, 19 nt, Artificial Sequence
  Description of Artificial Sequence: Synthetic oligonucleotide
  Sense Strand Starting at position 515 of SEQ ID NO: 315341
ucuuguaacuguguuacuu

SEQ ID NO: 359136 - RNA, 19 nt, Artificial Sequence
  Description of Artificial Sequence: Synthetic oligonucleotide
  Antisense Strand to SEQ ID NO: 359135
aaguaacacaguuacaaga

SEQ ID NO: 359137 - RNA, 19 nt, Artificial Sequence
  Description of Artificial Sequence: Synthetic oligonucleotide
  Sense Strand Starting at position 515 of SEQ ID NO: 315376
cuguguccuucccuggaaa

SEQ ID NO: 359138 - RNA, 19 nt, Artificial Sequence
  Description of Artificial Sequence: Synthetic oligonucleotide
  Antisense Strand to SEQ ID NO: 359137
uuuccagggaaggacacag

SEQ ID NO: 359139 - RNA, 19 nt, Artificial Sequence
  Description of Artificial Sequence: Synthetic oligonucleotide
  Sense Strand Starting at position 515 of SEQ ID NO: 315377
uguguccuucccuggaaag

SEQ ID NO: 359140 - RNA, 19 nt, Artificial Sequence
  Description of Artificial Sequence: Synthetic oligonucleotide
  Antisense Strand to SEQ ID NO: 359139
cuuuccagggaaggacaca

SEQ ID NO: 359141 - RNA, 19 nt, Artificial Sequence
  Description of Artificial Sequence: Synthetic oligonucleotide
  Sense Strand Starting at position 515 of SEQ ID NO: 315378
guguccuucccuggaaaga

SEQ ID NO: 359142 - RNA, 19 nt, Artificial Sequence
  Description of Artificial Sequence: Synthetic oligonucleotide
  Antisense Strand to SEQ ID NO: 359141
ucuuuccagggaaggacac

SEQ ID NO: 359143 - RNA, 19 nt, Artificial Sequence
  Description of Artificial Sequence: Synthetic oligonucleotide
  Sense Strand Starting at position 515 of SEQ ID NO: 315451
aucuuauaaugagugccau

SEQ ID NO: 359144 - RNA, 19 nt, Artificial Sequence
  Description of Artificial Sequence: Synthetic oligonucleotide
  Antisense Strand to SEQ ID NO: 359143
auggcacucauuauaagau

SEQ ID NO: 359145 - RNA, 19 nt, Artificial Sequence
  Description of Artificial Sequence: Synthetic oligonucleotide
  Sense Strand Starting at position 515 of SEQ ID NO: 315452
ucuuauaaugagugccaua

SEQ ID NO: 359146 - RNA, 19 nt, Artificial Sequence
  Description of Artificial Sequence: Synthetic oligonucleotide
  Antisense Strand to SEQ ID NO: 359145
uauggcacucauuauaaga

SEQ ID NO: 359147 - RNA, 19 nt, Artificial Sequence
  Description of Artificial Sequence: Synthetic oligonucleotide
  Sense Strand Starting at position 515 of SEQ ID NO: 315457
uaaugagugccauauuaag

SEQ ID NO: 359148 - RNA, 19 nt, Artificial Sequence
  Description of Artificial Sequence: Synthetic oligonucleotide
  Antisense Strand to SEQ ID NO: 359147
cuuaauauggcacucauua

SEQ ID NO: 359149 - RNA, 19 nt, Artificial Sequence
  Description of Artificial Sequence: Synthetic oligonucleotide
  Sense Strand Starting at position 515 of SEQ ID NO: 315634
acuggaauugggugcacau

SEQ ID NO: 359150 - RNA, 19 nt, Artificial Sequence
  Description of Artificial Sequence: Synthetic oligonucleotide
  Antisense Strand to SEQ ID NO: 359149
augugcacccaauuccagu

SEQ ID NO: 359151 - RNA, 19 nt, Artificial Sequence
  Description of Artificial Sequence: Synthetic oligonucleotide
  Sense Strand Starting at position 515 of SEQ ID NO: 315643
gggugcacauguuuccuaa

SEQ ID NO: 359152 - RNA, 19 nt, Artificial Sequence
  Description of Artificial Sequence: Synthetic oligonucleotide
  Antisense Strand to SEQ ID NO: 359151
uuaggaaacaugugcaccc

SEQ ID NO: 359153 - RNA, 19 nt, Artificial Sequence
  Description of Artificial Sequence: Synthetic oligonucleotide
  Sense Strand Starting at position 515 of SEQ ID NO: 315772
cccugugcccaucaguaau

SEQ ID NO: 359154 - RNA, 19 nt, Artificial Sequence
  Description of Artificial Sequence: Synthetic oligonucleotide
  Antisense Strand to SEQ ID NO: 359153
auuacugaugggcacaggg

SEQ ID NO: 359155 - RNA, 19 nt, Artificial Sequence
  Description of Artificial Sequence: Synthetic oligonucleotide
  Sense Strand Starting at position 515 of SEQ ID NO: 315778
gcccaucaguaaucagcua

SEQ ID NO: 359156 - RNA, 19 nt, Artificial Sequence
  Description of Artificial Sequence: Synthetic oligonucleotide
  Antisense Strand to SEQ ID NO: 359155
uagcugauuacugaugggc

SEQ ID NO: 359157 - RNA, 19 nt, Artificial Sequence
  Description of Artificial Sequence: Synthetic oligonucleotide
  Sense Strand Starting at position 515 of SEQ ID NO: 315874
acaucauaucgugauuagg

SEQ ID NO: 359158 - RNA, 19 nt, Artificial Sequence
  Description of Artificial Sequence: Synthetic oligonucleotide
  Antisense Strand to SEQ ID NO: 359157
ccuaaucacgauaugaugu

SEQ ID NO: 359159 - RNA, 19 nt, Artificial Sequence
  Description of Artificial Sequence: Synthetic oligonucleotide
  Sense Strand Starting at position 515 of SEQ ID NO: 315876
aucauaucgugauuaggag

SEQ ID NO: 359160 - RNA, 19 nt, Artificial Sequence
  Description of Artificial Sequence: Synthetic oligonucleotide
  Antisense Strand to SEQ ID NO: 359159
cuccuaaucacgauaugau

SEQ ID NO: 359161 - RNA, 19 nt, Artificial Sequence
  Description of Artificial Sequence: Synthetic oligonucleotide
  Sense Strand Starting at position 515 of SEQ ID NO: 315877
ucauaucgugauuaggagu

SEQ ID NO: 359162 - RNA, 19 nt, Artificial Sequence
  Description of Artificial Sequence: Synthetic oligonucleotide
  Antisense Strand to SEQ ID NO: 359161
acuccuaaucacgauauga

SEQ ID NO: 359163 - RNA, 19 nt, Artificial Sequence
  Description of Artificial Sequence: Synthetic oligonucleotide
  Sense Strand Starting at position 515 of SEQ ID NO: 315885
ugauuaggagucuguguug

SEQ ID NO: 359164 - RNA, 19 nt, Artificial Sequence
  Description of Artificial Sequence: Synthetic oligonucleotide
  Antisense Strand to SEQ ID NO: 359163
caacacagacuccuaauca

SEQ ID NO: 359165 - RNA, 19 nt, Artificial Sequence
  Description of Artificial Sequence: Synthetic oligonucleotide
  Sense Strand Starting at position 515 of SEQ ID NO: 315888
uuaggagucuguguuggaa

SEQ ID NO: 359166 - RNA, 19 nt, Artificial Sequence
  Description of Artificial Sequence: Synthetic oligonucleotide
  Antisense Strand to SEQ ID NO: 359165
uuccaacacagacuccuaa

SEQ ID NO: 359167 - RNA, 19 nt, Artificial Sequence
  Description of Artificial Sequence: Synthetic oligonucleotide
  Sense Strand Starting at position 515 of SEQ ID NO: 316471
agugcaggucuguggagaa

SEQ ID NO: 359168 - RNA, 19 nt, Artificial Sequence
  Description of Artificial Sequence: Synthetic oligonucleotide
  Antisense Strand to SEQ ID NO: 359167
uucuccacagaccugcacu

SEQ ID NO: 359169 - RNA, 19 nt, Artificial Sequence
  Description of Artificial Sequence: Synthetic oligonucleotide
  Sense Strand Starting at position 515 of SEQ ID NO: 316534
ucaccucugcaccguaaua

SEQ ID NO: 359170 - RNA, 19 nt, Artificial Sequence
  Description of Artificial Sequence: Synthetic oligonucleotide
  Antisense Strand to SEQ ID NO: 359169
uauuacggugcagagguga

SEQ ID NO: 359171 - RNA, 19 nt, Artificial Sequence
  Description of Artificial Sequence: Synthetic oligonucleotide
  Sense Strand Starting at position 515 of SEQ ID NO: 316536
accucugcaccguaauaaa

SEQ ID NO: 359172 - RNA, 19 nt, Artificial Sequence
  Description of Artificial Sequence: Synthetic oligonucleotide
  Antisense Strand to SEQ ID NO: 359171
uuuauuacggugcagaggu

SEQ ID NO: 359173 - RNA, 19 nt, Artificial Sequence
  Description of Artificial Sequence: Synthetic oligonucleotide
  Sense Strand Starting at position 515 of SEQ ID NO: 317327
gcaaauacccgguggaauc

SEQ ID NO: 359174 - RNA, 19 nt, Artificial Sequence
  Description of Artificial Sequence: Synthetic oligonucleotide
  Antisense Strand to SEQ ID NO: 359173
gauuccaccggguauuugc

SEQ ID NO: 359175 - RNA, 19 nt, Artificial Sequence
  Description of Artificial Sequence: Synthetic oligonucleotide
  Sense Strand Starting at position 515 of SEQ ID NO: 317562
uuguuuccgcgaguuaaac

SEQ ID NO: 359176 - RNA, 19 nt, Artificial Sequence
  Description of Artificial Sequence: Synthetic oligonucleotide
  Antisense Strand to SEQ ID NO: 359175
guuuaacucgcggaaacaa

SEQ ID NO: 359177 - RNA, 19 nt, Artificial Sequence
  Description of Artificial Sequence: Synthetic oligonucleotide
  Sense Strand Starting at position 515 of SEQ ID NO: 318065
ccaugauugcaugauggca

SEQ ID NO: 359178 - RNA, 19 nt, Artificial Sequence
  Description of Artificial Sequence: Synthetic oligonucleotide
  Antisense Strand to SEQ ID NO: 359177
ugccaucaugcaaucaugg

SEQ ID NO: 359179 - RNA, 19 nt, Artificial Sequence
  Description of Artificial Sequence: Synthetic oligonucleotide
  Sense Strand Starting at position 515 of SEQ ID NO: 318097
accuaauccugagaaaggu

SEQ ID NO: 359180 - RNA, 19 nt, Artificial Sequence
  Description of Artificial Sequence: Synthetic oligonucleotide
  Antisense Strand to SEQ ID NO: 359179
accuuucucaggauuaggu

SEQ ID NO: 359181 - RNA, 19 nt, Artificial Sequence
  Description of Artificial Sequence: Synthetic oligonucleotide
  Sense Strand Starting at position 515 of SEQ ID NO: 318103
uccugagaaaggugccaua

SEQ ID NO: 359182 - RNA, 19 nt, Artificial Sequence
  Description of Artificial Sequence: Synthetic oligonucleotide
  Antisense Strand to SEQ ID NO: 359181
uauggcaccuuucucagga

SEQ ID NO: 359183 - RNA, 19 nt, Artificial Sequence
  Description of Artificial Sequence: Synthetic oligonucleotide
  Sense Strand Starting at position 515 of SEQ ID NO: 318150
gagguucgggccuggauua

SEQ ID NO: 359184 - RNA, 19 nt, Artificial Sequence
  Description of Artificial Sequence: Synthetic oligonucleotide
  Antisense Strand to SEQ ID NO: 359183
uaauccaggcccgaaccuc

SEQ ID NO: 359185 - RNA, 19 nt, Artificial Sequence
  Description of Artificial Sequence: Synthetic oligonucleotide
  Sense Strand Starting at position 515 of SEQ ID NO: 318395
auuagcugggcgugaugaa

SEQ ID NO: 359186 - RNA, 19 nt, Artificial Sequence
  Description of Artificial Sequence: Synthetic oligonucleotide
  Antisense Strand to SEQ ID NO: 359185
uucaucacgcccagcuaau

SEQ ID NO: 359187 - RNA, 19 nt, Artificial Sequence
  Description of Artificial Sequence: Synthetic oligonucleotide
  Sense Strand Starting at position 515 of SEQ ID NO: 318563
ugaaguucugguugcacuu

SEQ ID NO: 359188 - RNA, 19 nt, Artificial Sequence
  Description of Artificial Sequence: Synthetic oligonucleotide
  Antisense Strand to SEQ ID NO: 359187
aagugcaaccagaacuuca

SEQ ID NO: 359189 - RNA, 19 nt, Artificial Sequence
  Description of Artificial Sequence: Synthetic oligonucleotide
  Sense Strand Starting at position 515 of SEQ ID NO: 318795
gggaugugggcagauguaa

SEQ ID NO: 359190 - RNA, 19 nt, Artificial Sequence
  Description of Artificial Sequence: Synthetic oligonucleotide
  Antisense Strand to SEQ ID NO: 359189
uuacaucugcccacauccc

SEQ ID NO: 359191 - RNA, 19 nt, Artificial Sequence
  Description of Artificial Sequence: Synthetic oligonucleotide
  Sense Strand Starting at position 515 of SEQ ID NO: 318866
cccuguggcauuugugaga

SEQ ID NO: 359192 - RNA, 19 nt, Artificial Sequence
  Description of Artificial Sequence: Synthetic oligonucleotide
  Antisense Strand to SEQ ID NO: 359191
ucucacaaaugccacaggg

SEQ ID NO: 359193 - RNA, 19 nt, Artificial Sequence
  Description of Artificial Sequence: Synthetic oligonucleotide
  Sense Strand Starting at position 515 of SEQ ID NO: 318901
gggaacuugcucuguaguu

SEQ ID NO: 359194 - RNA, 19 nt, Artificial Sequence
  Description of Artificial Sequence: Synthetic oligonucleotide
  Antisense Strand to SEQ ID NO: 359193
aacuacagagcaaguuccc

SEQ ID NO: 359195 - RNA, 19 nt, Artificial Sequence
  Description of Artificial Sequence: Synthetic oligonucleotide
  Sense Strand Starting at position 515 of SEQ ID NO: 318930
cacagaugauccucugguu

SEQ ID NO: 359196 - RNA, 19 nt, Artificial Sequence
  Description of Artificial Sequence: Synthetic oligonucleotide
  Antisense Strand to SEQ ID NO: 359195
aaccagaggaucaucugug

SEQ ID NO: 359197 - RNA, 19 nt, Artificial Sequence
  Description of Artificial Sequence: Synthetic oligonucleotide
  Sense Strand Starting at position 515 of SEQ ID NO: 318936
ugauccucugguugggaga

SEQ ID NO: 359198 - RNA, 19 nt, Artificial Sequence
  Description of Artificial Sequence: Synthetic oligonucleotide
  Antisense Strand to SEQ ID NO: 359197
ucucccaaccagaggauca

SEQ ID NO: 359199 - RNA, 19 nt, Artificial Sequence
  Description of Artificial Sequence: Synthetic oligonucleotide
  Sense Strand Starting at position 515 of SEQ ID NO: 318937
gauccucugguugggagaa

SEQ ID NO: 359200 - RNA, 19 nt, Artificial Sequence
  Description of Artificial Sequence: Synthetic oligonucleotide
  Antisense Strand to SEQ ID NO: 359199
uucucccaaccagaggauc

SEQ ID NO: 359201 - RNA, 19 nt, Artificial Sequence
  Description of Artificial Sequence: Synthetic oligonucleotide
  Sense Strand Starting at position 515 of SEQ ID NO: 318995
gagagugggauuggucuga

SEQ ID NO: 359202 - RNA, 19 nt, Artificial Sequence
  Description of Artificial Sequence: Synthetic oligonucleotide
  Antisense Strand to SEQ ID NO: 359201
ucagaccaaucccacucuc

SEQ ID NO: 359203 - RNA, 19 nt, Artificial Sequence
  Description of Artificial Sequence: Synthetic oligonucleotide
  Sense Strand Starting at position 515 of SEQ ID NO: 318999
gugggauuggucugaauaa

SEQ ID NO: 359204 - RNA, 19 nt, Artificial Sequence
  Description of Artificial Sequence: Synthetic oligonucleotide
  Antisense Strand to SEQ ID NO: 359203
uuauucagaccaaucccac

SEQ ID NO: 359205 - RNA, 19 nt, Artificial Sequence
  Description of Artificial Sequence: Synthetic oligonucleotide
  Sense Strand Starting at position 515 of SEQ ID NO: 319000
ugggauuggucugaauaag

SEQ ID NO: 359206 - RNA, 19 nt, Artificial Sequence
  Description of Artificial Sequence: Synthetic oligonucleotide
  Antisense Strand to SEQ ID NO: 359205
cuuauucagaccaauccca

SEQ ID NO: 359207 - RNA, 19 nt, Artificial Sequence
  Description of Artificial Sequence: Synthetic oligonucleotide
  Sense Strand Starting at position 515 of SEQ ID NO: 319191
guguccugguagcuaaaga

SEQ ID NO: 359208 - RNA, 19 nt, Artificial Sequence
  Description of Artificial Sequence: Synthetic oligonucleotide
  Antisense Strand to SEQ ID NO: 359207
ucuuuagcuaccaggacac

SEQ ID NO: 359209 - RNA, 19 nt, Artificial Sequence
  Description of Artificial Sequence: Synthetic oligonucleotide
  Sense Strand Starting at position 515 of SEQ ID NO: 319196
cugguagcuaaagaguuaa

SEQ ID NO: 359210 - RNA, 19 nt, Artificial Sequence
  Description of Artificial Sequence: Synthetic oligonucleotide
  Antisense Strand to SEQ ID NO: 359209
uuaacucuuuagcuaccag

SEQ ID NO: 359211 - RNA, 19 nt, Artificial Sequence
  Description of Artificial Sequence: Synthetic oligonucleotide
  Sense Strand Starting at position 516 of SEQ ID NO: 315319
uugggugucuccucugaaa

SEQ ID NO: 359212 - RNA, 19 nt, Artificial Sequence
  Description of Artificial Sequence: Synthetic oligonucleotide
  Antisense Strand to SEQ ID NO: 359211
uuucagaggagacacccaa

SEQ ID NO: 359213 - RNA, 19 nt, Artificial Sequence
  Description of Artificial Sequence: Synthetic oligonucleotide
  Sense Strand Starting at position 516 of SEQ ID NO: 315321
gggugucuccucugaaaug

SEQ ID NO: 359214 - RNA, 19 nt, Artificial Sequence
  Description of Artificial Sequence: Synthetic oligonucleotide
  Antisense Strand to SEQ ID NO: 359213
cauuucagaggagacaccc

SEQ ID NO: 359215 - RNA, 19 nt, Artificial Sequence
  Description of Artificial Sequence: Synthetic oligonucleotide
  Sense Strand Starting at position 516 of SEQ ID NO: 315407
uuacuuuccuaguuggaga

SEQ ID NO: 359216 - RNA, 19 nt, Artificial Sequence
  Description of Artificial Sequence: Synthetic oligonucleotide
  Antisense Strand to SEQ ID NO: 359215
ucuccaacuaggaaaguaa

SEQ ID NO: 359217 - RNA, 19 nt, Artificial Sequence
  Description of Artificial Sequence: Synthetic oligonucleotide
  Sense Strand Starting at position 516 of SEQ ID NO: 315409
acuuuccuaguuggagaaa

SEQ ID NO: 359218 - RNA, 19 nt, Artificial Sequence
  Description of Artificial Sequence: Synthetic oligonucleotide
  Antisense Strand to SEQ ID NO: 359217
uuucuccaacuaggaaagu

SEQ ID NO: 359219 - RNA, 19 nt, Artificial Sequence
  Description of Artificial Sequence: Synthetic oligonucleotide
  Sense Strand Starting at position 516 of SEQ ID NO: 315490
ugcuguaaguaaucuaaag

SEQ ID NO: 359220 - RNA, 19 nt, Artificial Sequence
  Description of Artificial Sequence: Synthetic oligonucleotide
  Antisense Strand to SEQ ID NO: 359219
cuuuagauuacuuacagca

SEQ ID NO: 359221 - RNA, 19 nt, Artificial Sequence
  Description of Artificial Sequence: Synthetic oligonucleotide
  Sense Strand Starting at position 516 of SEQ ID NO: 315775
gucugcaugagaugagaaa

SEQ ID NO: 359222 - RNA, 19 nt, Artificial Sequence
  Description of Artificial Sequence: Synthetic oligonucleotide
  Antisense Strand to SEQ ID NO: 359221
uuucucaucucaugcagac

SEQ ID NO: 359223 - RNA, 19 nt, Artificial Sequence
  Description of Artificial Sequence: Synthetic oligonucleotide
  Sense Strand Starting at position 516 of SEQ ID NO: 315883
uuugaauagcccggacaga

SEQ ID NO: 359224 - RNA, 19 nt, Artificial Sequence
  Description of Artificial Sequence: Synthetic oligonucleotide
  Antisense Strand to SEQ ID NO: 359223
ucuguccgggcuauucaaa

SEQ ID NO: 359225 - RNA, 19 nt, Artificial Sequence
  Description of Artificial Sequence: Synthetic oligonucleotide
  Sense Strand Starting at position 516 of SEQ ID NO: 316098
augguauuaugguuagaau

SEQ ID NO: 359226 - RNA, 19 nt, Artificial Sequence
  Description of Artificial Sequence: Synthetic oligonucleotide
  Antisense Strand to SEQ ID NO: 359225
auucuaaccauaauaccau

SEQ ID NO: 359227 - RNA, 19 nt, Artificial Sequence
  Description of Artificial Sequence: Synthetic oligonucleotide
  Sense Strand Starting at position 516 of SEQ ID NO: 316099
ugguauuaugguuagaauu

SEQ ID NO: 359228 - RNA, 19 nt, Artificial Sequence
  Description of Artificial Sequence: Synthetic oligonucleotide
  Antisense Strand to SEQ ID NO: 359227
aauucuaaccauaauacca

SEQ ID NO: 359229 - RNA, 19 nt, Artificial Sequence
  Description of Artificial Sequence: Synthetic oligonucleotide
  Sense Strand Starting at position 516 of SEQ ID NO: 316141
uccagaucauaagaaagaa

SEQ ID NO: 359230 - RNA, 19 nt, Artificial Sequence
  Description of Artificial Sequence: Synthetic oligonucleotide
  Antisense Strand to SEQ ID NO: 359229
uucuuucuuaugaucugga

SEQ ID NO: 359231 - RNA, 19 nt, Artificial Sequence
  Description of Artificial Sequence: Synthetic oligonucleotide
  Sense Strand Starting at position 516 of SEQ ID NO: 316429
aucaguuauuuagaugaga

SEQ ID NO: 359232 - RNA, 19 nt, Artificial Sequence
  Description of Artificial Sequence: Synthetic oligonucleotide
  Antisense Strand to SEQ ID NO: 359231
ucucaucuaaauaacugau

SEQ ID NO: 359233 - RNA, 19 nt, Artificial Sequence
  Description of Artificial Sequence: Synthetic oligonucleotide
  Sense Strand Starting at position 516 of SEQ ID NO: 316434
uuauuuagaugagaaaguc

SEQ ID NO: 359234 - RNA, 19 nt, Artificial Sequence
  Description of Artificial Sequence: Synthetic oligonucleotide
  Antisense Strand to SEQ ID NO: 359233
gacuuucucaucuaaauaa

SEQ ID NO: 359235 - RNA, 19 nt, Artificial Sequence
  Description of Artificial Sequence: Synthetic oligonucleotide
  Sense Strand Starting at position 516 of SEQ ID NO: 316516
ccagauaucggagguggga

SEQ ID NO: 359236 - RNA, 19 nt, Artificial Sequence
  Description of Artificial Sequence: Synthetic oligonucleotide
  Antisense Strand to SEQ ID NO: 359235
ucccaccuccgauaucugg

SEQ ID NO: 359237 - RNA, 19 nt, Artificial Sequence
  Description of Artificial Sequence: Synthetic oligonucleotide
  Sense Strand Starting at position 516 of SEQ ID NO: 317367
cgccgcuacaugcuaauua

SEQ ID NO: 359238 - RNA, 19 nt, Artificial Sequence
  Description of Artificial Sequence: Synthetic oligonucleotide
  Antisense Strand to SEQ ID NO: 359237
uaauuagcauguagcggcg

SEQ ID NO: 359239 - RNA, 19 nt, Artificial Sequence
  Description of Artificial Sequence: Synthetic oligonucleotide
  Sense Strand Starting at position 516 of SEQ ID NO: 317566
acacaugcuccagagucuu

SEQ ID NO: 359240 - RNA, 19 nt, Artificial Sequence
  Description of Artificial Sequence: Synthetic oligonucleotide
  Antisense Strand to SEQ ID NO: 359239
aagacucuggagcaugugu

SEQ ID NO: 359241 - RNA, 19 nt, Artificial Sequence
  Description of Artificial Sequence: Synthetic oligonucleotide
  Sense Strand Starting at position 516 of SEQ ID NO: 317619
gcacaagaaguaggugaaa

SEQ ID NO: 359242 - RNA, 19 nt, Artificial Sequence
  Description of Artificial Sequence: Synthetic oligonucleotide
  Antisense Strand to SEQ ID NO: 359241
uuucaccuacuucuugugc

SEQ ID NO: 359243 - RNA, 19 nt, Artificial Sequence
  Description of Artificial Sequence: Synthetic oligonucleotide
  Sense Strand Starting at position 516 of SEQ ID NO: 317636
aaagcagguccuggguaau

SEQ ID NO: 359244 - RNA, 19 nt, Artificial Sequence
  Description of Artificial Sequence: Synthetic oligonucleotide
  Antisense Strand to SEQ ID NO: 359243
auuacccaggaccugcuuu

SEQ ID NO: 359245 - RNA, 19 nt, Artificial Sequence
  Description of Artificial Sequence: Synthetic oligonucleotide
  Sense Strand Starting at position 516 of SEQ ID NO: 317647
uggguaaugugauuagcac

SEQ ID NO: 359246 - RNA, 19 nt, Artificial Sequence
  Description of Artificial Sequence: Synthetic oligonucleotide
  Antisense Strand to SEQ ID NO: 359245
gugcuaaucacauuaccca

SEQ ID NO: 359247 - RNA, 19 nt, Artificial Sequence
  Description of Artificial Sequence: Synthetic oligonucleotide
  Sense Strand Starting at position 516 of SEQ ID NO: 317654
ugugauuagcaccagacua

SEQ ID NO: 359248 - RNA, 19 nt, Artificial Sequence
  Description of Artificial Sequence: Synthetic oligonucleotide
  Antisense Strand to SEQ ID NO: 359247
uagucuggugcuaaucaca

SEQ ID NO: 359249 - RNA, 19 nt, Artificial Sequence
  Description of Artificial Sequence: Synthetic oligonucleotide
  Sense Strand Starting at position 516 of SEQ ID NO: 317667
agacuagauuaucccaagu

SEQ ID NO: 359250 - RNA, 19 nt, Artificial Sequence
  Description of Artificial Sequence: Synthetic oligonucleotide
  Antisense Strand to SEQ ID NO: 359249
acuugggauaaucuagucu

SEQ ID NO: 359251 - RNA, 19 nt, Artificial Sequence
  Description of Artificial Sequence: Synthetic oligonucleotide
  Sense Strand Starting at position 516 of SEQ ID NO: 317683
agugcuuugauaggagaga

SEQ ID NO: 359252 - RNA, 19 nt, Artificial Sequence
  Description of Artificial Sequence: Synthetic oligonucleotide
  Antisense Strand to SEQ ID NO: 359251
ucucuccuaucaaagcacu

SEQ ID NO: 359253 - RNA, 19 nt, Artificial Sequence
  Description of Artificial Sequence: Synthetic oligonucleotide
  Sense Strand Starting at position 516 of SEQ ID NO: 317742
cgccguuauugauuugaag

SEQ ID NO: 359254 - RNA, 19 nt, Artificial Sequence
  Description of Artificial Sequence: Synthetic oligonucleotide
  Antisense Strand to SEQ ID NO: 359253
cuucaaaucaauaacggcg

SEQ ID NO: 359255 - RNA, 19 nt, Artificial Sequence
  Description of Artificial Sequence: Synthetic oligonucleotide
  Sense Strand Starting at position 516 of SEQ ID NO: 317744
ccguuauugauuugaagug

SEQ ID NO: 359256 - RNA, 19 nt, Artificial Sequence
  Description of Artificial Sequence: Synthetic oligonucleotide
  Antisense Strand to SEQ ID NO: 359255
cacuucaaaucaauaacgg

SEQ ID NO: 359257 - RNA, 19 nt, Artificial Sequence
  Description of Artificial Sequence: Synthetic oligonucleotide
  Sense Strand Starting at position 516 of SEQ ID NO: 317930
accagaguucugcagagau

SEQ ID NO: 359258 - RNA, 19 nt, Artificial Sequence
  Description of Artificial Sequence: Synthetic oligonucleotide
  Antisense Strand to SEQ ID NO: 359257
aucucugcagaacucuggu

SEQ ID NO: 359259 - RNA, 19 nt, Artificial Sequence
  Description of Artificial Sequence: Synthetic oligonucleotide
  Sense Strand Starting at position 516 of SEQ ID NO: 317932
cagaguucugcagagaugu

SEQ ID NO: 359260 - RNA, 19 nt, Artificial Sequence
  Description of Artificial Sequence: Synthetic oligonucleotide
  Antisense Strand to SEQ ID NO: 359259
acaucucugcagaacucug

SEQ ID NO: 359261 - RNA, 19 nt, Artificial Sequence
  Description of Artificial Sequence: Synthetic oligonucleotide
  Sense Strand Starting at position 516 of SEQ ID NO: 317934
gaguucugcagagauguca

SEQ ID NO: 359262 - RNA, 19 nt, Artificial Sequence
  Description of Artificial Sequence: Synthetic oligonucleotide
  Antisense Strand to SEQ ID NO: 359261
ugacaucucugcagaacuc

SEQ ID NO: 359263 - RNA, 19 nt, Artificial Sequence
  Description of Artificial Sequence: Synthetic oligonucleotide
  Sense Strand Starting at position 516 of SEQ ID NO: 317945
agaugucaccgcgaggaca

SEQ ID NO: 359264 - RNA, 19 nt, Artificial Sequence
  Description of Artificial Sequence: Synthetic oligonucleotide
  Antisense Strand to SEQ ID NO: 359263
uguccucgcggugacaucu

SEQ ID NO: 359265 - RNA, 19 nt, Artificial Sequence
  Description of Artificial Sequence: Synthetic oligonucleotide
  Sense Strand Starting at position 516 of SEQ ID NO: 318133
uuucuuggucaauaaaguu

SEQ ID NO: 359266 - RNA, 19 nt, Artificial Sequence
  Description of Artificial Sequence: Synthetic oligonucleotide
  Antisense Strand to SEQ ID NO: 359265
aacuuuauugaccaagaaa

SEQ ID NO: 359267 - RNA, 19 nt, Artificial Sequence
  Description of Artificial Sequence: Synthetic oligonucleotide
  Sense Strand Starting at position 516 of SEQ ID NO: 318222
ccaccucauuaagugaaga

SEQ ID NO: 359268 - RNA, 19 nt, Artificial Sequence
  Description of Artificial Sequence: Synthetic oligonucleotide
  Antisense Strand to SEQ ID NO: 359267
ucuucacuuaaugaggugg

SEQ ID NO: 359269 - RNA, 19 nt, Artificial Sequence
  Description of Artificial Sequence: Synthetic oligonucleotide
  Sense Strand Starting at position 516 of SEQ ID NO: 318298
cgaaaugauugaucuguga

SEQ ID NO: 359270 - RNA, 19 nt, Artificial Sequence
  Description of Artificial Sequence: Synthetic oligonucleotide
  Antisense Strand to SEQ ID NO: 359269
ucacagaucaaucauuucg

SEQ ID NO: 359271 - RNA, 19 nt, Artificial Sequence
  Description of Artificial Sequence: Synthetic oligonucleotide
  Sense Strand Starting at position 516 of SEQ ID NO: 318301
aaugauugaucugugaaug

SEQ ID NO: 359272 - RNA, 19 nt, Artificial Sequence
  Description of Artificial Sequence: Synthetic oligonucleotide
  Antisense Strand to SEQ ID NO: 359271
cauucacagaucaaucauu

SEQ ID NO: 359273 - RNA, 19 nt, Artificial Sequence
  Description of Artificial Sequence: Synthetic oligonucleotide
  Sense Strand Starting at position 516 of SEQ ID NO: 318302
augauugaucugugaauga

SEQ ID NO: 359274 - RNA, 19 nt, Artificial Sequence
  Description of Artificial Sequence: Synthetic oligonucleotide
  Antisense Strand to SEQ ID NO: 359273
ucauucacagaucaaucau

SEQ ID NO: 359275 - RNA, 19 nt, Artificial Sequence
  Description of Artificial Sequence: Synthetic oligonucleotide
  Sense Strand Starting at position 516 of SEQ ID NO: 318306
uugaucugugaaugaccau

SEQ ID NO: 359276 - RNA, 19 nt, Artificial Sequence
  Description of Artificial Sequence: Synthetic oligonucleotide
  Antisense Strand to SEQ ID NO: 359275
auggucauucacagaucaa

SEQ ID NO: 359277 - RNA, 19 nt, Artificial Sequence
  Description of Artificial Sequence: Synthetic oligonucleotide
  Sense Strand Starting at position 516 of SEQ ID NO: 318423
ggguucuugcgaguucugu

SEQ ID NO: 359278 - RNA, 19 nt, Artificial Sequence
  Description of Artificial Sequence: Synthetic oligonucleotide
  Antisense Strand to SEQ ID NO: 359277
acagaacucgcaagaaccc

SEQ ID NO: 359279 - RNA, 19 nt, Artificial Sequence
  Description of Artificial Sequence: Synthetic oligonucleotide
  Sense Strand Starting at position 516 of SEQ ID NO: 318424
gguucuugcgaguucuguu

SEQ ID NO: 359280 - RNA, 19 nt, Artificial Sequence
  Description of Artificial Sequence: Synthetic oligonucleotide
  Antisense Strand to SEQ ID NO: 359279
aacagaacucgcaagaacc

SEQ ID NO: 359281 - RNA, 19 nt, Artificial Sequence
  Description of Artificial Sequence: Synthetic oligonucleotide
  Sense Strand Starting at position 516 of SEQ ID NO: 318574
ggagaaugagaucguagug

SEQ ID NO: 359282 - RNA, 19 nt, Artificial Sequence
  Description of Artificial Sequence: Synthetic oligonucleotide
  Antisense Strand to SEQ ID NO: 359281
cacuacgaucucauucucc

SEQ ID NO: 359283 - RNA, 19 nt, Artificial Sequence
  Description of Artificial Sequence: Synthetic oligonucleotide
  Sense Strand Starting at position 516 of SEQ ID NO: 318669
aaaggaggcuguguauaaa

SEQ ID NO: 359284 - RNA, 19 nt, Artificial Sequence
  Description of Artificial Sequence: Synthetic oligonucleotide
  Antisense Strand to SEQ ID NO: 359283
uuuauacacagccuccuuu

SEQ ID NO: 359285 - RNA, 19 nt, Artificial Sequence
  Description of Artificial Sequence: Synthetic oligonucleotide
  Sense Strand Starting at position 516 of SEQ ID NO: 318672
ggaggcuguguauaaacaa

SEQ ID NO: 359286 - RNA, 19 nt, Artificial Sequence
  Description of Artificial Sequence: Synthetic oligonucleotide
  Antisense Strand to SEQ ID NO: 359285
uuguuuauacacagccucc

SEQ ID NO: 359287 - RNA, 19 nt, Artificial Sequence
  Description of Artificial Sequence: Synthetic oligonucleotide
  Sense Strand Starting at position 516 of SEQ ID NO: 319028
guggaaagguuuaagggua

SEQ ID NO: 359288 - RNA, 19 nt, Artificial Sequence
  Description of Artificial Sequence: Synthetic oligonucleotide
  Antisense Strand to SEQ ID NO: 359287
uacccuuaaaccuuuccac

SEQ ID NO: 359289 - RNA, 19 nt, Artificial Sequence
  Description of Artificial Sequence: Synthetic oligonucleotide
  Sense Strand Starting at position 516 of SEQ ID NO: 319088
augagauaaucugccuucu

SEQ ID NO: 359290 - RNA, 19 nt, Artificial Sequence
  Description of Artificial Sequence: Synthetic oligonucleotide
  Antisense Strand to SEQ ID NO: 359289
agaaggcagauuaucucau

SEQ ID NO: 359291 - RNA, 19 nt, Artificial Sequence
  Description of Artificial Sequence: Synthetic oligonucleotide
  Sense Strand Starting at position 517 of SEQ ID NO: 315249
gcgcuaagacguuccuuca

SEQ ID NO: 359292 - RNA, 19 nt, Artificial Sequence
  Description of Artificial Sequence: Synthetic oligonucleotide
  Antisense Strand to SEQ ID NO: 359291
ugaaggaacgucuuagcgc

SEQ ID NO: 359293 - RNA, 19 nt, Artificial Sequence
  Description of Artificial Sequence: Synthetic oligonucleotide
  Sense Strand Starting at position 517 of SEQ ID NO: 315808
gcaggugagccuuguauga

SEQ ID NO: 359294 - RNA, 19 nt, Artificial Sequence
  Description of Artificial Sequence: Synthetic oligonucleotide
  Antisense Strand to SEQ ID NO: 359293
ucauacaaggcucaccugc

SEQ ID NO: 359295 - RNA, 19 nt, Artificial Sequence
  Description of Artificial Sequence: Synthetic oligonucleotide
  Sense Strand Starting at position 517 of SEQ ID NO: 315840
accaauacauugccugaga

SEQ ID NO: 359296 - RNA, 19 nt, Artificial Sequence
  Description of Artificial Sequence: Synthetic oligonucleotide
  Antisense Strand to SEQ ID NO: 359295
ucucaggcaauguauuggu

SEQ ID NO: 359297 - RNA, 19 nt, Artificial Sequence
  Description of Artificial Sequence: Synthetic oligonucleotide
  Sense Strand Starting at position 517 of SEQ ID NO: 315841
ccaauacauugccugagaa

SEQ ID NO: 359298 - RNA, 19 nt, Artificial Sequence
  Description of Artificial Sequence: Synthetic oligonucleotide
  Antisense Strand to SEQ ID NO: 359297
uucucaggcaauguauugg

SEQ ID NO: 359299 - RNA, 19 nt, Artificial Sequence
  Description of Artificial Sequence: Synthetic oligonucleotide
  Sense Strand Starting at position 517 of SEQ ID NO: 315863
uugugcucuugcucugaca

SEQ ID NO: 359300 - RNA, 19 nt, Artificial Sequence
  Description of Artificial Sequence: Synthetic oligonucleotide
  Antisense Strand to SEQ ID NO: 359299
ugucagagcaagagcacaa

SEQ ID NO: 359301 - RNA, 19 nt, Artificial Sequence
  Description of Artificial Sequence: Synthetic oligonucleotide
  Sense Strand Starting at position 517 of SEQ ID NO: 315983
agcucagucucugcuaaua

SEQ ID NO: 359302 - RNA, 19 nt, Artificial Sequence
  Description of Artificial Sequence: Synthetic oligonucleotide
  Antisense Strand to SEQ ID NO: 359301
uauuagcagagacugagcu

SEQ ID NO: 359303 - RNA, 19 nt, Artificial Sequence
  Description of Artificial Sequence: Synthetic oligonucleotide
  Sense Strand Starting at position 517 of SEQ ID NO: 316039
caggacagaucugugucua

SEQ ID NO: 359304 - RNA, 19 nt, Artificial Sequence
  Description of Artificial Sequence: Synthetic oligonucleotide
  Antisense Strand to SEQ ID NO: 359303
uagacacagaucuguccug

SEQ ID NO: 359305 - RNA, 19 nt, Artificial Sequence
  Description of Artificial Sequence: Synthetic oligonucleotide
  Sense Strand Starting at position 517 of SEQ ID NO: 316040
aggacagaucugugucuaa

SEQ ID NO: 359306 - RNA, 19 nt, Artificial Sequence
  Description of Artificial Sequence: Synthetic oligonucleotide
  Antisense Strand to SEQ ID NO: 359305
uuagacacagaucuguccu

SEQ ID NO: 359307 - RNA, 19 nt, Artificial Sequence
  Description of Artificial Sequence: Synthetic oligonucleotide
  Sense Strand Starting at position 517 of SEQ ID NO: 316063
gcgugugugaucuugagca

SEQ ID NO: 359308 - RNA, 19 nt, Artificial Sequence
  Description of Artificial Sequence: Synthetic oligonucleotide
  Antisense Strand to SEQ ID NO: 359307
ugcucaagaucacacacgc

SEQ ID NO: 359309 - RNA, 19 nt, Artificial Sequence
  Description of Artificial Sequence: Synthetic oligonucleotide
  Sense Strand Starting at position 517 of SEQ ID NO: 316155
ugcauuagucuaugaauau

SEQ ID NO: 359310 - RNA, 19 nt, Artificial Sequence
  Description of Artificial Sequence: Synthetic oligonucleotide
  Antisense Strand to SEQ ID NO: 359309
auauucauagacuaaugca

SEQ ID NO: 359311 - RNA, 19 nt, Artificial Sequence
  Description of Artificial Sequence: Synthetic oligonucleotide
  Sense Strand Starting at position 517 of SEQ ID NO: 316216
guuacaugaucuuaacuga

SEQ ID NO: 359312 - RNA, 19 nt, Artificial Sequence
  Description of Artificial Sequence: Synthetic oligonucleotide
  Antisense Strand to SEQ ID NO: 359311
ucaguuaagaucauguaac

SEQ ID NO: 359313 - RNA, 19 nt, Artificial Sequence
  Description of Artificial Sequence: Synthetic oligonucleotide
  Sense Strand Starting at position 517 of SEQ ID NO: 316219
acaugaucuuaacugaugu

SEQ ID NO: 359314 - RNA, 19 nt, Artificial Sequence
  Description of Artificial Sequence: Synthetic oligonucleotide
  Antisense Strand to SEQ ID NO: 359313
acaucaguuaagaucaugu

SEQ ID NO: 359315 - RNA, 19 nt, Artificial Sequence
  Description of Artificial Sequence: Synthetic oligonucleotide
  Sense Strand Starting at position 517 of SEQ ID NO: 316226
cuuaacugauguuacaaga

SEQ ID NO: 359316 - RNA, 19 nt, Artificial Sequence
  Description of Artificial Sequence: Synthetic oligonucleotide
  Antisense Strand to SEQ ID NO: 359315
ucuuguaacaucaguuaag

SEQ ID NO: 359317 - RNA, 19 nt, Artificial Sequence
  Description of Artificial Sequence: Synthetic oligonucleotide
  Sense Strand Starting at position 517 of SEQ ID NO: 316243
gaggcagaugauugccuuu

SEQ ID NO: 359318 - RNA, 19 nt, Artificial Sequence
  Description of Artificial Sequence: Synthetic oligonucleotide
  Antisense Strand to SEQ ID NO: 359317
aaaggcaaucaucugccuc

SEQ ID NO: 359319 - RNA, 19 nt, Artificial Sequence
  Description of Artificial Sequence: Synthetic oligonucleotide
  Sense Strand Starting at position 517 of SEQ ID NO: 316245
ggcagaugauugccuuuaa

SEQ ID NO: 359320 - RNA, 19 nt, Artificial Sequence
  Description of Artificial Sequence: Synthetic oligonucleotide
  Antisense Strand to SEQ ID NO: 359319
uuaaaggcaaucaucugcc

SEQ ID NO: 359321 - RNA, 19 nt, Artificial Sequence
  Description of Artificial Sequence: Synthetic oligonucleotide
  Sense Strand Starting at position 517 of SEQ ID NO: 316246
gcagaugauugccuuuaau

SEQ ID NO: 359322 - RNA, 19 nt, Artificial Sequence
  Description of Artificial Sequence: Synthetic oligonucleotide
  Antisense Strand to SEQ ID NO: 359321
auuaaaggcaaucaucugc

SEQ ID NO: 359323 - RNA, 19 nt, Artificial Sequence
  Description of Artificial Sequence: Synthetic oligonucleotide
  Sense Strand Starting at position 517 of SEQ ID NO: 316291
guguacugucauggaugua

SEQ ID NO: 359324 - RNA, 19 nt, Artificial Sequence
  Description of Artificial Sequence: Synthetic oligonucleotide
  Antisense Strand to SEQ ID NO: 359323
uacauccaugacaguacac

SEQ ID NO: 359325 - RNA, 19 nt, Artificial Sequence
  Description of Artificial Sequence: Synthetic oligonucleotide
  Sense Strand Starting at position 517 of SEQ ID NO: 316294
uacugucauggauguacau

SEQ ID NO: 359326 - RNA, 19 nt, Artificial Sequence
  Description of Artificial Sequence: Synthetic oligonucleotide
  Antisense Strand to SEQ ID NO: 359325
auguacauccaugacagua

SEQ ID NO: 359327 - RNA, 19 nt, Artificial Sequence
  Description of Artificial Sequence: Synthetic oligonucleotide
  Sense Strand Starting at position 517 of SEQ ID NO: 316336
accuauaauccgggacauc

SEQ ID NO: 359328 - RNA, 19 nt, Artificial Sequence
  Description of Artificial Sequence: Synthetic oligonucleotide
  Antisense Strand to SEQ ID NO: 359327
gaugucccggauuauaggu

SEQ ID NO: 359329 - RNA, 19 nt, Artificial Sequence
  Description of Artificial Sequence: Synthetic oligonucleotide
  Sense Strand Starting at position 517 of SEQ ID NO: 316347
gggacaucagcguaaacca

SEQ ID NO: 359330 - RNA, 19 nt, Artificial Sequence
  Description of Artificial Sequence: Synthetic oligonucleotide
  Antisense Strand to SEQ ID NO: 359329
ugguuuacgcugauguccc

SEQ ID NO: 359331 - RNA, 19 nt, Artificial Sequence
  Description of Artificial Sequence: Synthetic oligonucleotide
  Sense Strand Starting at position 517 of SEQ ID NO: 316408
gcaaguuuaacugaagguu

SEQ ID NO: 359332 - RNA, 19 nt, Artificial Sequence
  Description of Artificial Sequence: Synthetic oligonucleotide
  Antisense Strand to SEQ ID NO: 359331
aaccuucaguuaaacuugc

SEQ ID NO: 359333 - RNA, 19 nt, Artificial Sequence
  Description of Artificial Sequence: Synthetic oligonucleotide
  Sense Strand Starting at position 517 of SEQ ID NO: 316411
aguuuaacugaagguuuaa

SEQ ID NO: 359334 - RNA, 19 nt, Artificial Sequence
  Description of Artificial Sequence: Synthetic oligonucleotide
  Antisense Strand to SEQ ID NO: 359333
uuaaaccuucaguuaaacu

SEQ ID NO: 359335 - RNA, 19 nt, Artificial Sequence
  Description of Artificial Sequence: Synthetic oligonucleotide
  Sense Strand Starting at position 517 of SEQ ID NO: 316464
caaacuagcguuuauuaag

SEQ ID NO: 359336 - RNA, 19 nt, Artificial Sequence
  Description of Artificial Sequence: Synthetic oligonucleotide
  Antisense Strand to SEQ ID NO: 359335
cuuaauaaacgcuaguuug

SEQ ID NO: 359337 - RNA, 19 nt, Artificial Sequence
  Description of Artificial Sequence: Synthetic oligonucleotide
  Sense Strand Starting at position 517 of SEQ ID NO: 316545
gcgucacucagguagaaac

SEQ ID NO: 359338 - RNA, 19 nt, Artificial Sequence
  Description of Artificial Sequence: Synthetic oligonucleotide
  Antisense Strand to SEQ ID NO: 359337
guuucuaccugagugacgc

SEQ ID NO: 359339 - RNA, 19 nt, Artificial Sequence
  Description of Artificial Sequence: Synthetic oligonucleotide
  Sense Strand Starting at position 517 of SEQ ID NO: 316877
aagacugucccaggcaaga

SEQ ID NO: 359340 - RNA, 19 nt, Artificial Sequence
  Description of Artificial Sequence: Synthetic oligonucleotide
  Antisense Strand to SEQ ID NO: 359339
ucuugccugggacagucuu

SEQ ID NO: 359341 - RNA, 19 nt, Artificial Sequence
  Description of Artificial Sequence: Synthetic oligonucleotide
  Sense Strand Starting at position 517 of SEQ ID NO: 316965
cgaagucagaaguguaaac

SEQ ID NO: 359342 - RNA, 19 nt, Artificial Sequence
  Description of Artificial Sequence: Synthetic oligonucleotide
  Antisense Strand to SEQ ID NO: 359341
guuuacacuucugacuucg

SEQ ID NO: 359343 - RNA, 19 nt, Artificial Sequence
  Description of Artificial Sequence: Synthetic oligonucleotide
  Sense Strand Starting at position 517 of SEQ ID NO: 316994
cuacgcaccgcauuguuaa

SEQ ID NO: 359344 - RNA, 19 nt, Artificial Sequence
  Description of Artificial Sequence: Synthetic oligonucleotide
  Antisense Strand to SEQ ID NO: 359343
uuaacaaugcggugcguag

SEQ ID NO: 359345 - RNA, 19 nt, Artificial Sequence
  Description of Artificial Sequence: Synthetic oligonucleotide
  Sense Strand Starting at position 517 of SEQ ID NO: 317051
ccaucugcacuauggagaa

SEQ ID NO: 359346 - RNA, 19 nt, Artificial Sequence
  Description of Artificial Sequence: Synthetic oligonucleotide
  Antisense Strand to SEQ ID NO: 359345
uucuccauagugcagaugg

SEQ ID NO: 359347 - RNA, 19 nt, Artificial Sequence
  Description of Artificial Sequence: Synthetic oligonucleotide
  Sense Strand Starting at position 517 of SEQ ID NO: 317659
ggcggguuccaguguugaa

SEQ ID NO: 359348 - RNA, 19 nt, Artificial Sequence
  Description of Artificial Sequence: Synthetic oligonucleotide
  Antisense Strand to SEQ ID NO: 359347
uucaacacuggaacccgcc

SEQ ID NO: 359349 - RNA, 19 nt, Artificial Sequence
  Description of Artificial Sequence: Synthetic oligonucleotide
  Sense Strand Starting at position 517 of SEQ ID NO: 317796
uucgaaucuugacucuauu

SEQ ID NO: 359350 - RNA, 19 nt, Artificial Sequence
  Description of Artificial Sequence: Synthetic oligonucleotide
  Antisense Strand to SEQ ID NO: 359349
aauagagucaagauucgaa

SEQ ID NO: 359351 - RNA, 19 nt, Artificial Sequence
  Description of Artificial Sequence: Synthetic oligonucleotide
  Sense Strand Starting at position 517 of SEQ ID NO: 317847
cucaguugcgccuucuaua

SEQ ID NO: 359352 - RNA, 19 nt, Artificial Sequence
  Description of Artificial Sequence: Synthetic oligonucleotide
  Antisense Strand to SEQ ID NO: 359351
uauagaaggcgcaacugag

SEQ ID NO: 359353 - RNA, 19 nt, Artificial Sequence
  Description of Artificial Sequence: Synthetic oligonucleotide
  Sense Strand Starting at position 517 of SEQ ID NO: 317888
aagugugucuugucaacau

SEQ ID NO: 359354 - RNA, 19 nt, Artificial Sequence
  Description of Artificial Sequence: Synthetic oligonucleotide
  Antisense Strand to SEQ ID NO: 359353
auguugacaagacacacuu

SEQ ID NO: 359355 - RNA, 19 nt, Artificial Sequence
  Description of Artificial Sequence: Synthetic oligonucleotide
  Sense Strand Starting at position 517 of SEQ ID NO: 318327
ggcguuugcauuuguacca

SEQ ID NO: 359356 - RNA, 19 nt, Artificial Sequence
  Description of Artificial Sequence: Synthetic oligonucleotide
  Antisense Strand to SEQ ID NO: 359355
ugguacaaaugcaaacgcc

SEQ ID NO: 359357 - RNA, 19 nt, Artificial Sequence
  Description of Artificial Sequence: Synthetic oligonucleotide
  Sense Strand Starting at position 517 of SEQ ID NO: 318353
cggugacucccauaaacua

SEQ ID NO: 359358 - RNA, 19 nt, Artificial Sequence
  Description of Artificial Sequence: Synthetic oligonucleotide
  Antisense Strand to SEQ ID NO: 359357
uaguuuaugggagucaccg

SEQ ID NO: 359359 - RNA, 19 nt, Artificial Sequence
  Description of Artificial Sequence: Synthetic oligonucleotide
  Sense Strand Starting at position 517 of SEQ ID NO: 318384
gcggaucaggaguaucuga

SEQ ID NO: 359360 - RNA, 19 nt, Artificial Sequence
  Description of Artificial Sequence: Synthetic oligonucleotide
  Antisense Strand to SEQ ID NO: 359359
ucagauacuccugauccgc

SEQ ID NO: 359361 - RNA, 19 nt, Artificial Sequence
  Description of Artificial Sequence: Synthetic oligonucleotide
  Sense Strand Starting at position 517 of SEQ ID NO: 318439
agcuauugugaggguauau

SEQ ID NO: 359362 - RNA, 19 nt, Artificial Sequence
  Description of Artificial Sequence: Synthetic oligonucleotide
  Antisense Strand to SEQ ID NO: 359361
auauacccucacaauagcu

SEQ ID NO: 359363 - RNA, 19 nt, Artificial Sequence
  Description of Artificial Sequence: Synthetic oligonucleotide
  Sense Strand Starting at position 517 of SEQ ID NO: 318508
acuucuguagacgaagauu

SEQ ID NO: 359364 - RNA, 19 nt, Artificial Sequence
  Description of Artificial Sequence: Synthetic oligonucleotide
  Antisense Strand to SEQ ID NO: 359363
aaucuucgucuacagaagu

SEQ ID NO: 359365 - RNA, 19 nt, Artificial Sequence
  Description of Artificial Sequence: Synthetic oligonucleotide
  Sense Strand Starting at position 517 of SEQ ID NO: 318558
ggacccgucugaguagaaa

SEQ ID NO: 359366 - RNA, 19 nt, Artificial Sequence
  Description of Artificial Sequence: Synthetic oligonucleotide
  Antisense Strand to SEQ ID NO: 359365
uuucuacucagacgggucc

SEQ ID NO: 359367 - RNA, 19 nt, Artificial Sequence
  Description of Artificial Sequence: Synthetic oligonucleotide
  Sense Strand Starting at position 517 of SEQ ID NO: 318671
ccaagucuccucuguacau

SEQ ID NO: 359368 - RNA, 19 nt, Artificial Sequence
  Description of Artificial Sequence: Synthetic oligonucleotide
  Antisense Strand to SEQ ID NO: 359367
auguacagaggagacuugg

SEQ ID NO: 359369 - RNA, 19 nt, Artificial Sequence
  Description of Artificial Sequence: Synthetic oligonucleotide
  Sense Strand Starting at position 517 of SEQ ID NO: 318810
gggugaggguagucucuaa

SEQ ID NO: 359370 - RNA, 19 nt, Artificial Sequence
  Description of Artificial Sequence: Synthetic oligonucleotide
  Antisense Strand to SEQ ID NO: 359369
uuagagacuacccucaccc

SEQ ID NO: 359371 - RNA, 19 nt, Artificial Sequence
  Description of Artificial Sequence: Synthetic oligonucleotide
  Sense Strand Starting at position 518 of SEQ ID NO: 315788
ugaccaugcgcccgugaaa

SEQ ID NO: 359372 - RNA, 19 nt, Artificial Sequence
  Description of Artificial Sequence: Synthetic oligonucleotide
  Antisense Strand to SEQ ID NO: 359371
uuucacgggcgcaugguca

SEQ ID NO: 359373 - RNA, 19 nt, Artificial Sequence
  Description of Artificial Sequence: Synthetic oligonucleotide
  Sense Strand Starting at position 518 of SEQ ID NO: 315822
agggugagauggguuuaga

SEQ ID NO: 359374 - RNA, 19 nt, Artificial Sequence
  Description of Artificial Sequence: Synthetic oligonucleotide
  Antisense Strand to SEQ ID NO: 359373
ucuaaacccaucucacccu

SEQ ID NO: 359375 - RNA, 19 nt, Artificial Sequence
  Description of Artificial Sequence: Synthetic oligonucleotide
  Sense Strand Starting at position 518 of SEQ ID NO: 315962
cgaugugaccuuggacaau

SEQ ID NO: 359376 - RNA, 19 nt, Artificial Sequence
  Description of Artificial Sequence: Synthetic oligonucleotide
  Antisense Strand to SEQ ID NO: 359375
auuguccaaggucacaucg

SEQ ID NO: 359377 - RNA, 19 nt, Artificial Sequence
  Description of Artificial Sequence: Synthetic oligonucleotide
  Sense Strand Starting at position 518 of SEQ ID NO: 316165
uggaguuguggcuauaaau

SEQ ID NO: 359378 - RNA, 19 nt, Artificial Sequence
  Description of Artificial Sequence: Synthetic oligonucleotide
  Antisense Strand to SEQ ID NO: 359377
auuuauagccacaacucca

SEQ ID NO: 359379 - RNA, 19 nt, Artificial Sequence
  Description of Artificial Sequence: Synthetic oligonucleotide
  Sense Strand Starting at position 518 of SEQ ID NO: 316255
gggcggaagucuggaagaa

SEQ ID NO: 359380 - RNA, 19 nt, Artificial Sequence
  Description of Artificial Sequence: Synthetic oligonucleotide
  Antisense Strand to SEQ ID NO: 359379
uucuuccagacuuccgccc

SEQ ID NO: 359381 - RNA, 19 nt, Artificial Sequence
  Description of Artificial Sequence: Synthetic oligonucleotide
  Sense Strand Starting at position 518 of SEQ ID NO: 316411
gcgagcucugcauagagua

SEQ ID NO: 359382 - RNA, 19 nt, Artificial Sequence
  Description of Artificial Sequence: Synthetic oligonucleotide
  Antisense Strand to SEQ ID NO: 359381
uacucuaugcagagcucgc

SEQ ID NO: 359383 - RNA, 19 nt, Artificial Sequence
  Description of Artificial Sequence: Synthetic oligonucleotide
  Sense Strand Starting at position 518 of SEQ ID NO: 316451
ccgugucagcugcuucaga

SEQ ID NO: 359384 - RNA, 19 nt, Artificial Sequence
  Description of Artificial Sequence: Synthetic oligonucleotide
  Antisense Strand to SEQ ID NO: 359383
ucugaagcagcugacacgg

SEQ ID NO: 359385 - RNA, 19 nt, Artificial Sequence
  Description of Artificial Sequence: Synthetic oligonucleotide
  Sense Strand Starting at position 518 of SEQ ID NO: 316453
gugucagcugcuucagagu

SEQ ID NO: 359386 - RNA, 19 nt, Artificial Sequence
  Description of Artificial Sequence: Synthetic oligonucleotide
  Antisense Strand to SEQ ID NO: 359385
acucugaagcagcugacac

SEQ ID NO: 359387 - RNA, 19 nt, Artificial Sequence
  Description of Artificial Sequence: Synthetic oligonucleotide
  Sense Strand Starting at position 518 of SEQ ID NO: 316600
cacucuuaguagcugagaa

SEQ ID NO: 359388 - RNA, 19 nt, Artificial Sequence
  Description of Artificial Sequence: Synthetic oligonucleotide
  Antisense Strand to SEQ ID NO: 359387
uucucagcuacuaagagug

SEQ ID NO: 359389 - RNA, 19 nt, Artificial Sequence
  Description of Artificial Sequence: Synthetic oligonucleotide
  Sense Strand Starting at position 518 of SEQ ID NO: 316602
cucuuaguagcugagaaag

SEQ ID NO: 359390 - RNA, 19 nt, Artificial Sequence
  Description of Artificial Sequence: Synthetic oligonucleotide
  Antisense Strand to SEQ ID NO: 359389
cuuucucagcuacuaagag

SEQ ID NO: 359391 - RNA, 19 nt, Artificial Sequence
  Description of Artificial Sequence: Synthetic oligonucleotide
  Sense Strand Starting at position 518 of SEQ ID NO: 316750
aggcuuugaugacugcaaa

SEQ ID NO: 359392 - RNA, 19 nt, Artificial Sequence
  Description of Artificial Sequence: Synthetic oligonucleotide
  Antisense Strand to SEQ ID NO: 359391
uuugcagucaucaaagccu

SEQ ID NO: 359393 - RNA, 19 nt, Artificial Sequence
  Description of Artificial Sequence: Synthetic oligonucleotide
  Sense Strand Starting at position 518 of SEQ ID NO: 316751
ggcuuugaugacugcaaau

SEQ ID NO: 359394 - RNA, 19 nt, Artificial Sequence
  Description of Artificial Sequence: Synthetic oligonucleotide
  Antisense Strand to SEQ ID NO: 359393
auuugcagucaucaaagcc

SEQ ID NO: 359395 - RNA, 19 nt, Artificial Sequence
  Description of Artificial Sequence: Synthetic oligonucleotide
  Sense Strand Starting at position 518 of SEQ ID NO: 316779
aguucuguguucccaugga

SEQ ID NO: 359396 - RNA, 19 nt, Artificial Sequence
  Description of Artificial Sequence: Synthetic oligonucleotide
  Antisense Strand to SEQ ID NO: 359395
uccaugggaacacagaacu

SEQ ID NO: 359397 - RNA, 19 nt, Artificial Sequence
  Description of Artificial Sequence: Synthetic oligonucleotide
  Sense Strand Starting at position 518 of SEQ ID NO: 316783
cuguguucccauggaaucu

SEQ ID NO: 359398 - RNA, 19 nt, Artificial Sequence
  Description of Artificial Sequence: Synthetic oligonucleotide
  Antisense Strand to SEQ ID NO: 359397
agauuccaugggaacacag

SEQ ID NO: 359399 - RNA, 19 nt, Artificial Sequence
  Description of Artificial Sequence: Synthetic oligonucleotide
  Sense Strand Starting at position 518 of SEQ ID NO: 316886
uuaccuuucugugcucaga

SEQ ID NO: 359400 - RNA, 19 nt, Artificial Sequence
  Description of Artificial Sequence: Synthetic oligonucleotide
  Antisense Strand to SEQ ID NO: 359399
ucugagcacagaaagguaa

SEQ ID NO: 359401 - RNA, 19 nt, Artificial Sequence
  Description of Artificial Sequence: Synthetic oligonucleotide
  Sense Strand Starting at position 518 of SEQ ID NO: 316888
accuuucugugcucagaug

SEQ ID NO: 359402 - RNA, 19 nt, Artificial Sequence
  Description of Artificial Sequence: Synthetic oligonucleotide
  Antisense Strand to SEQ ID NO: 359401
caucugagcacagaaaggu

SEQ ID NO: 359403 - RNA, 19 nt, Artificial Sequence
  Description of Artificial Sequence: Synthetic oligonucleotide
  Sense Strand Starting at position 518 of SEQ ID NO: 317242
ccuggcggccucuauauau

SEQ ID NO: 359404 - RNA, 19 nt, Artificial Sequence
  Description of Artificial Sequence: Synthetic oligonucleotide
  Antisense Strand to SEQ ID NO: 359403
auauauagaggccgccagg

SEQ ID NO: 359405 - RNA, 19 nt, Artificial Sequence
  Description of Artificial Sequence: Synthetic oligonucleotide
  Sense Strand Starting at position 518 of SEQ ID NO: 317275
gcgaacggcucgugugaaa

SEQ ID NO: 359406 - RNA, 19 nt, Artificial Sequence
  Description of Artificial Sequence: Synthetic oligonucleotide
  Antisense Strand to SEQ ID NO: 359405
uuucacacgagccguucgc

SEQ ID NO: 359407 - RNA, 19 nt, Artificial Sequence
  Description of Artificial Sequence: Synthetic oligonucleotide
  Sense Strand Starting at position 518 of SEQ ID NO: 317278
aacggcucgugugaaacuu

SEQ ID NO: 359408 - RNA, 19 nt, Artificial Sequence
  Description of Artificial Sequence: Synthetic oligonucleotide
  Antisense Strand to SEQ ID NO: 359407
aaguuucacacgagccguu

SEQ ID NO: 359409 - RNA, 19 nt, Artificial Sequence
  Description of Artificial Sequence: Synthetic oligonucleotide
  Sense Strand Starting at position 518 of SEQ ID NO: 317286
gugugaaacuucccaaacu

SEQ ID NO: 359410 - RNA, 19 nt, Artificial Sequence
  Description of Artificial Sequence: Synthetic oligonucleotide
  Antisense Strand to SEQ ID NO: 359409
aguuugggaaguuucacac

SEQ ID NO: 359411 - RNA, 19 nt, Artificial Sequence
  Description of Artificial Sequence: Synthetic oligonucleotide
  Sense Strand Starting at position 518 of SEQ ID NO: 317486
ugggcuuugguuuagagau

SEQ ID NO: 359412 - RNA, 19 nt, Artificial Sequence
  Description of Artificial Sequence: Synthetic oligonucleotide
  Antisense Strand to SEQ ID NO: 359411
aucucuaaaccaaagccca

SEQ ID NO: 359413 - RNA, 19 nt, Artificial Sequence
  Description of Artificial Sequence: Synthetic oligonucleotide
  Sense Strand Starting at position 518 of SEQ ID NO: 317488
ggcuuugguuuagagauuu

SEQ ID NO: 359414 - RNA, 19 nt, Artificial Sequence
  Description of Artificial Sequence: Synthetic oligonucleotide
  Antisense Strand to SEQ ID NO: 359413
aaaucucuaaaccaaagcc

SEQ ID NO: 359415 - RNA, 19 nt, Artificial Sequence
  Description of Artificial Sequence: Synthetic oligonucleotide
  Sense Strand Starting at position 518 of SEQ ID NO: 317518
ccgcuuuggucuugaucuu

SEQ ID NO: 359416 - RNA, 19 nt, Artificial Sequence
  Description of Artificial Sequence: Synthetic oligonucleotide
  Antisense Strand to SEQ ID NO: 359415
aagaucaagaccaaagcgg

SEQ ID NO: 359417 - RNA, 19 nt, Artificial Sequence
  Description of Artificial Sequence: Synthetic oligonucleotide
  Sense Strand Starting at position 518 of SEQ ID NO: 317555
cagggucuuugcucuuuau

SEQ ID NO: 359418 - RNA, 19 nt, Artificial Sequence
  Description of Artificial Sequence: Synthetic oligonucleotide
  Antisense Strand to SEQ ID NO: 359417
auaaagagcaaagacccug

SEQ ID NO: 359419 - RNA, 19 nt, Artificial Sequence
  Description of Artificial Sequence: Synthetic oligonucleotide
  Sense Strand Starting at position 518 of SEQ ID NO: 317595
agcugcuuugacuguagua

SEQ ID NO: 359420 - RNA, 19 nt, Artificial Sequence
  Description of Artificial Sequence: Synthetic oligonucleotide
  Antisense Strand to SEQ ID NO: 359419
uacuacagucaaagcagcu

SEQ ID NO: 359421 - RNA, 19 nt, Artificial Sequence
  Description of Artificial Sequence: Synthetic oligonucleotide
  Sense Strand Starting at position 518 of SEQ ID NO: 317597
cugcuuugacuguaguaag

SEQ ID NO: 359422 - RNA, 19 nt, Artificial Sequence
  Description of Artificial Sequence: Synthetic oligonucleotide
  Antisense Strand to SEQ ID NO: 359421
cuuacuacagucaaagcag

SEQ ID NO: 359423 - RNA, 19 nt, Artificial Sequence
  Description of Artificial Sequence: Synthetic oligonucleotide
  Sense Strand Starting at position 518 of SEQ ID NO: 317701
cggguguaagaaugugagu

SEQ ID NO: 359424 - RNA, 19 nt, Artificial Sequence
  Description of Artificial Sequence: Synthetic oligonucleotide
  Antisense Strand to SEQ ID NO: 359423
acucacauucuuacacccg

SEQ ID NO: 359425 - RNA, 19 nt, Artificial Sequence
  Description of Artificial Sequence: Synthetic oligonucleotide
  Sense Strand Starting at position 518 of SEQ ID NO: 317703
gguguaagaaugugaguua

SEQ ID NO: 359426 - RNA, 19 nt, Artificial Sequence
  Description of Artificial Sequence: Synthetic oligonucleotide
  Antisense Strand to SEQ ID NO: 359425
uaacucacauucuuacacc

SEQ ID NO: 359427 - RNA, 19 nt, Artificial Sequence
  Description of Artificial Sequence: Synthetic oligonucleotide
  Sense Strand Starting at position 518 of SEQ ID NO: 317712
augugaguuaccgacacau

SEQ ID NO: 359428 - RNA, 19 nt, Artificial Sequence
  Description of Artificial Sequence: Synthetic oligonucleotide
  Antisense Strand to SEQ ID NO: 359427
augugucgguaacucacau

SEQ ID NO: 359429 - RNA, 19 nt, Artificial Sequence
  Description of Artificial Sequence: Synthetic oligonucleotide
  Sense Strand Starting at position 518 of SEQ ID NO: 317714
gugaguuaccgacacaucu

SEQ ID NO: 359430 - RNA, 19 nt, Artificial Sequence
  Description of Artificial Sequence: Synthetic oligonucleotide
  Antisense Strand to SEQ ID NO: 359429
agaugugucgguaacucac

SEQ ID NO: 359431 - RNA, 19 nt, Artificial Sequence
  Description of Artificial Sequence: Synthetic oligonucleotide
  Sense Strand Starting at position 518 of SEQ ID NO: 317733
aaaguucccgcucagacuu

SEQ ID NO: 359432 - RNA, 19 nt, Artificial Sequence
  Description of Artificial Sequence: Synthetic oligonucleotide
  Antisense Strand to SEQ ID NO: 359431
aagucugagcgggaacuuu

SEQ ID NO: 359433 - RNA, 19 nt, Artificial Sequence
  Description of Artificial Sequence: Synthetic oligonucleotide
  Sense Strand Starting at position 518 of SEQ ID NO: 317764
ggugaaaguagaugguaaa

SEQ ID NO: 359434 - RNA, 19 nt, Artificial Sequence
  Description of Artificial Sequence: Synthetic oligonucleotide
  Antisense Strand to SEQ ID NO: 359433
uuuaccaucuacuuucacc

SEQ ID NO: 359435 - RNA, 19 nt, Artificial Sequence
  Description of Artificial Sequence: Synthetic oligonucleotide
  Sense Strand Starting at position 518 of SEQ ID NO: 317767
gaaaguagaugguaaagga

SEQ ID NO: 359436 - RNA, 19 nt, Artificial Sequence
  Description of Artificial Sequence: Synthetic oligonucleotide
  Antisense Strand to SEQ ID NO: 359435
uccuuuaccaucuacuuuc

SEQ ID NO: 359437 - RNA, 19 nt, Artificial Sequence
  Description of Artificial Sequence: Synthetic oligonucleotide
  Sense Strand Starting at position 518 of SEQ ID NO: 317863
ggagcaagguaguucuuga

SEQ ID NO: 359438 - RNA, 19 nt, Artificial Sequence
  Description of Artificial Sequence: Synthetic oligonucleotide
  Antisense Strand to SEQ ID NO: 359437
ucaagaacuaccuugcucc

SEQ ID NO: 359439 - RNA, 19 nt, Artificial Sequence
  Description of Artificial Sequence: Synthetic oligonucleotide
  Sense Strand Starting at position 518 of SEQ ID NO: 317905
agaaauuccucguuuggau

SEQ ID NO: 359440 - RNA, 19 nt, Artificial Sequence
  Description of Artificial Sequence: Synthetic oligonucleotide
  Antisense Strand to SEQ ID NO: 359439
auccaaacgaggaauuucu

SEQ ID NO: 359441 - RNA, 19 nt, Artificial Sequence
  Description of Artificial Sequence: Synthetic oligonucleotide
  Sense Strand Starting at position 518 of SEQ ID NO: 318444
ugugcucgagccugggaaa

SEQ ID NO: 359442 - RNA, 19 nt, Artificial Sequence
  Description of Artificial Sequence: Synthetic oligonucleotide
  Antisense Strand to SEQ ID NO: 359441
uuucccaggcucgagcaca

SEQ ID NO: 359443 - RNA, 19 nt, Artificial Sequence
  Description of Artificial Sequence: Synthetic oligonucleotide
  Sense Strand Starting at position 519 of SEQ ID NO: 315380
ucugucuuccucuagauuc

SEQ ID NO: 359444 - RNA, 19 nt, Artificial Sequence
  Description of Artificial Sequence: Synthetic oligonucleotide
  Antisense Strand to SEQ ID NO: 359443
gaaucuagaggaagacaga

SEQ ID NO: 359445 - RNA, 19 nt, Artificial Sequence
  Description of Artificial Sequence: Synthetic oligonucleotide
  Sense Strand Starting at position 519 of SEQ ID NO: 315437
auagcaguuuacucuaaag

SEQ ID NO: 359446 - RNA, 19 nt, Artificial Sequence
  Description of Artificial Sequence: Synthetic oligonucleotide
  Antisense Strand to SEQ ID NO: 359445
cuuuagaguaaacugcuau

SEQ ID NO: 359447 - RNA, 19 nt, Artificial Sequence
  Description of Artificial Sequence: Synthetic oligonucleotide
  Sense Strand Starting at position 519 of SEQ ID NO: 315439
agcaguuuacucuaaagac

SEQ ID NO: 359448 - RNA, 19 nt, Artificial Sequence
  Description of Artificial Sequence: Synthetic oligonucleotide
  Antisense Strand to SEQ ID NO: 359447
gucuuuagaguaaacugcu

SEQ ID NO: 359449 - RNA, 19 nt, Artificial Sequence
  Description of Artificial Sequence: Synthetic oligonucleotide
  Sense Strand Starting at position 519 of SEQ ID NO: 315560
gcaauuaaucuggaugccu

SEQ ID NO: 359450 - RNA, 19 nt, Artificial Sequence
  Description of Artificial Sequence: Synthetic oligonucleotide
  Antisense Strand to SEQ ID NO: 359449
aggcauccagauuaauugc

SEQ ID NO: 359451 - RNA, 19 nt, Artificial Sequence
  Description of Artificial Sequence: Synthetic oligonucleotide
  Sense Strand Starting at position 519 of SEQ ID NO: 315959
gucuuagauggucaaucuu

SEQ ID NO: 359452 - RNA, 19 nt, Artificial Sequence
  Description of Artificial Sequence: Synthetic oligonucleotide
  Antisense Strand to SEQ ID NO: 359451
aagauugaccaucuaagac

SEQ ID NO: 359453 - RNA, 19 nt, Artificial Sequence
  Description of Artificial Sequence: Synthetic oligonucleotide
  Sense Strand Starting at position 519 of SEQ ID NO: 315974
ucuuauguuccacaaaguu

SEQ ID NO: 359454 - RNA, 19 nt, Artificial Sequence
  Description of Artificial Sequence: Synthetic oligonucleotide
  Antisense Strand to SEQ ID NO: 359453
aacuuuguggaacauaaga

SEQ ID NO: 359455 - RNA, 19 nt, Artificial Sequence
  Description of Artificial Sequence: Synthetic oligonucleotide
  Sense Strand Starting at position 519 of SEQ ID NO: 315990
guucuauagagguaguuuc

SEQ ID NO: 359456 - RNA, 19 nt, Artificial Sequence
  Description of Artificial Sequence: Synthetic oligonucleotide
  Antisense Strand to SEQ ID NO: 359455
gaaacuaccucuauagaac

SEQ ID NO: 359457 - RNA, 19 nt, Artificial Sequence
  Description of Artificial Sequence: Synthetic oligonucleotide
  Sense Strand Starting at position 519 of SEQ ID NO: 316090
ugaagauccugucuuggua

SEQ ID NO: 359458 - RNA, 19 nt, Artificial Sequence
  Description of Artificial Sequence: Synthetic oligonucleotide
  Antisense Strand to SEQ ID NO: 359457
uaccaagacaggaucuuca

SEQ ID NO: 359459 - RNA, 19 nt, Artificial Sequence
  Description of Artificial Sequence: Synthetic oligonucleotide
  Sense Strand Starting at position 519 of SEQ ID NO: 316125
cucugaaugucguuuauuu

SEQ ID NO: 359460 - RNA, 19 nt, Artificial Sequence
  Description of Artificial Sequence: Synthetic oligonucleotide
  Antisense Strand to SEQ ID NO: 359459
aaauaaacgacauucagag

SEQ ID NO: 359461 - RNA, 19 nt, Artificial Sequence
  Description of Artificial Sequence: Synthetic oligonucleotide
  Sense Strand Starting at position 519 of SEQ ID NO: 316286
gacucaguuggaggcauua

SEQ ID NO: 359462 - RNA, 19 nt, Artificial Sequence
  Description of Artificial Sequence: Synthetic oligonucleotide
  Antisense Strand to SEQ ID NO: 359461
uaaugccuccaacugaguc

SEQ ID NO: 359463 - RNA, 19 nt, Artificial Sequence
  Description of Artificial Sequence: Synthetic oligonucleotide
  Sense Strand Starting at position 519 of SEQ ID NO: 316288
cucaguuggaggcauuaaa

SEQ ID NO: 359464 - RNA, 19 nt, Artificial Sequence
  Description of Artificial Sequence: Synthetic oligonucleotide
  Antisense Strand to SEQ ID NO: 359463
uuuaaugccuccaacugag

SEQ ID NO: 359465 - RNA, 19 nt, Artificial Sequence
  Description of Artificial Sequence: Synthetic oligonucleotide
  Sense Strand Starting at position 519 of SEQ ID NO: 316663
cucuauguaguaugaaaua

SEQ ID NO: 359466 - RNA, 19 nt, Artificial Sequence
  Description of Artificial Sequence: Synthetic oligonucleotide
  Antisense Strand to SEQ ID NO: 359465
uauuucauacuacauagag

SEQ ID NO: 359467 - RNA, 19 nt, Artificial Sequence
  Description of Artificial Sequence: Synthetic oligonucleotide
  Sense Strand Starting at position 519 of SEQ ID NO: 317017
uuuagaacgucacuaauua

SEQ ID NO: 359468 - RNA, 19 nt, Artificial Sequence
  Description of Artificial Sequence: Synthetic oligonucleotide
  Antisense Strand to SEQ ID NO: 359467
uaauuagugacguucuaaa

SEQ ID NO: 359469 - RNA, 19 nt, Artificial Sequence
  Description of Artificial Sequence: Synthetic oligonucleotide
  Sense Strand Starting at position 519 of SEQ ID NO: 317088
agcuuaaggaguuaauugu

SEQ ID NO: 359470 - RNA, 19 nt, Artificial Sequence
  Description of Artificial Sequence: Synthetic oligonucleotide
  Antisense Strand to SEQ ID NO: 359469
acaauuaacuccuuaagcu

SEQ ID NO: 359471 - RNA, 19 nt, Artificial Sequence
  Description of Artificial Sequence: Synthetic oligonucleotide
  Sense Strand Starting at position 519 of SEQ ID NO: 317104
uguuuauuuguuugcaagu

SEQ ID NO: 359472 - RNA, 19 nt, Artificial Sequence
  Description of Artificial Sequence: Synthetic oligonucleotide
  Antisense Strand to SEQ ID NO: 359471
acuugcaaacaaauaaaca

SEQ ID NO: 359473 - RNA, 19 nt, Artificial Sequence
  Description of Artificial Sequence: Synthetic oligonucleotide
  Sense Strand Starting at position 519 of SEQ ID NO: 317105
guuuauuuguuugcaagua

SEQ ID NO: 359474 - RNA, 19 nt, Artificial Sequence
  Description of Artificial Sequence: Synthetic oligonucleotide
  Antisense Strand to SEQ ID NO: 359473
uacuugcaaacaaauaaac

SEQ ID NO: 359475 - RNA, 19 nt, Artificial Sequence
  Description of Artificial Sequence: Synthetic oligonucleotide
  Sense Strand Starting at position 519 of SEQ ID NO: 317215
agaagugaugcacaaaugu

SEQ ID NO: 359476 - RNA, 19 nt, Artificial Sequence
  Description of Artificial Sequence: Synthetic oligonucleotide
  Antisense Strand to SEQ ID NO: 359475
acauuugugcaucacuucu

SEQ ID NO: 359477 - RNA, 19 nt, Artificial Sequence
  Description of Artificial Sequence: Synthetic oligonucleotide
  Sense Strand Starting at position 519 of SEQ ID NO: 317340
agagcagucgaguaauaaa

SEQ ID NO: 359478 - RNA, 19 nt, Artificial Sequence
  Description of Artificial Sequence: Synthetic oligonucleotide
  Antisense Strand to SEQ ID NO: 359477
uuuauuacucgacugcucu

SEQ ID NO: 359479 - RNA, 19 nt, Artificial Sequence
  Description of Artificial Sequence: Synthetic oligonucleotide
  Sense Strand Starting at position 519 of SEQ ID NO: 317459
gcauauguaauagggaaug

SEQ ID NO: 359480 - RNA, 19 nt, Artificial Sequence
  Description of Artificial Sequence: Synthetic oligonucleotide
  Antisense Strand to SEQ ID NO: 359479
cauucccuauuacauaugc

SEQ ID NO: 359481 - RNA, 19 nt, Artificial Sequence
  Description of Artificial Sequence: Synthetic oligonucleotide
  Sense Strand Starting at position 519 of SEQ ID NO: 317469
uagggaauguugucaauga

SEQ ID NO: 359482 - RNA, 19 nt, Artificial Sequence
  Description of Artificial Sequence: Synthetic oligonucleotide
  Antisense Strand to SEQ ID NO: 359481
ucauugacaacauucccua

SEQ ID NO: 359483 - RNA, 19 nt, Artificial Sequence
  Description of Artificial Sequence: Synthetic oligonucleotide
  Sense Strand Starting at position 519 of SEQ ID NO: 317533
auguuauuaacauggagug

SEQ ID NO: 359484 - RNA, 19 nt, Artificial Sequence
  Description of Artificial Sequence: Synthetic oligonucleotide
  Antisense Strand to SEQ ID NO: 359483
cacuccauguuaauaacau

SEQ ID NO: 359485 - RNA, 19 nt, Artificial Sequence
  Description of Artificial Sequence: Synthetic oligonucleotide
  Sense Strand Starting at position 519 of SEQ ID NO: 317535
guuauuaacauggagugua

SEQ ID NO: 359486 - RNA, 19 nt, Artificial Sequence
  Description of Artificial Sequence: Synthetic oligonucleotide
  Antisense Strand to SEQ ID NO: 359485
uacacuccauguuaauaac

SEQ ID NO: 359487 - RNA, 19 nt, Artificial Sequence
  Description of Artificial Sequence: Synthetic oligonucleotide
  Sense Strand Starting at position 519 of SEQ ID NO: 317538
auuaacauggaguguaauu

SEQ ID NO: 359488 - RNA, 19 nt, Artificial Sequence
  Description of Artificial Sequence: Synthetic oligonucleotide
  Antisense Strand to SEQ ID NO: 359487
aauuacacuccauguuaau

SEQ ID NO: 359489 - RNA, 19 nt, Artificial Sequence
  Description of Artificial Sequence: Synthetic oligonucleotide
  Sense Strand Starting at position 519 of SEQ ID NO: 317657
agagauacauguuuauaug

SEQ ID NO: 359490 - RNA, 19 nt, Artificial Sequence
  Description of Artificial Sequence: Synthetic oligonucleotide
  Antisense Strand to SEQ ID NO: 359489
cauauaaacauguaucucu

SEQ ID NO: 359491 - RNA, 19 nt, Artificial Sequence
  Description of Artificial Sequence: Synthetic oligonucleotide
  Sense Strand Starting at position 519 of SEQ ID NO: 317706
uuagaagcaugacuacuua

SEQ ID NO: 359492 - RNA, 19 nt, Artificial Sequence
  Description of Artificial Sequence: Synthetic oligonucleotide
  Antisense Strand to SEQ ID NO: 359491
uaaguagucaugcuucuaa

SEQ ID NO: 359493 - RNA, 19 nt, Artificial Sequence
  Description of Artificial Sequence: Synthetic oligonucleotide
  Sense Strand Starting at position 519 of SEQ ID NO: 317768
auaguuugcuuucuaaaga

SEQ ID NO: 359494 - RNA, 19 nt, Artificial Sequence
  Description of Artificial Sequence: Synthetic oligonucleotide
  Antisense Strand to SEQ ID NO: 359493
ucuuuagaaagcaaacuau

SEQ ID NO: 359495 - RNA, 19 nt, Artificial Sequence
  Description of Artificial Sequence: Synthetic oligonucleotide
  Sense Strand Starting at position 519 of SEQ ID NO: 317829
ggagucuuucaagauggua

SEQ ID NO: 359496 - RNA, 19 nt, Artificial Sequence
  Description of Artificial Sequence: Synthetic oligonucleotide
  Antisense Strand to SEQ ID NO: 359495
uaccaucuugaaagacucc

SEQ ID NO: 359497 - RNA, 19 nt, Artificial Sequence
  Description of Artificial Sequence: Synthetic oligonucleotide
  Sense Strand Starting at position 519 of SEQ ID NO: 317922
uauaacugcugauugggaa

SEQ ID NO: 359498 - RNA, 19 nt, Artificial Sequence
  Description of Artificial Sequence: Synthetic oligonucleotide
  Antisense Strand to SEQ ID NO: 359497
uucccaaucagcaguuaua

SEQ ID NO: 359499 - RNA, 19 nt, Artificial Sequence
  Description of Artificial Sequence: Synthetic oligonucleotide
  Sense Strand Starting at position 519 of SEQ ID NO: 318009
uccaguaccuuccugaaga

SEQ ID NO: 359500 - RNA, 19 nt, Artificial Sequence
  Description of Artificial Sequence: Synthetic oligonucleotide
  Antisense Strand to SEQ ID NO: 359499
ucuucaggaagguacugga

SEQ ID NO: 359501 - RNA, 19 nt, Artificial Sequence
  Description of Artificial Sequence: Synthetic oligonucleotide
  Sense Strand Starting at position 519 of SEQ ID NO: 318199
augaaagcucucggguaaa

SEQ ID NO: 359502 - RNA, 19 nt, Artificial Sequence
  Description of Artificial Sequence: Synthetic oligonucleotide
  Antisense Strand to SEQ ID NO: 359501
uuuacccgagagcuuucau

SEQ ID NO: 359503 - RNA, 19 nt, Artificial Sequence
  Description of Artificial Sequence: Synthetic oligonucleotide
  Sense Strand Starting at position 519 of SEQ ID NO: 318202
aaagcucucggguaaauaa

SEQ ID NO: 359504 - RNA, 19 nt, Artificial Sequence
  Description of Artificial Sequence: Synthetic oligonucleotide
  Antisense Strand to SEQ ID NO: 359503
uuauuuacccgagagcuuu

SEQ ID NO: 359505 - RNA, 19 nt, Artificial Sequence
  Description of Artificial Sequence: Synthetic oligonucleotide
  Sense Strand Starting at position 519 of SEQ ID NO: 318276
aaccauucugcggaugaau

SEQ ID NO: 359506 - RNA, 19 nt, Artificial Sequence
  Description of Artificial Sequence: Synthetic oligonucleotide
  Antisense Strand to SEQ ID NO: 359505
auucauccgcagaaugguu

SEQ ID NO: 359507 - RNA, 19 nt, Artificial Sequence
  Description of Artificial Sequence: Synthetic oligonucleotide
  Sense Strand Starting at position 519 of SEQ ID NO: 318278
ccauucugcggaugaauaa

SEQ ID NO: 359508 - RNA, 19 nt, Artificial Sequence
  Description of Artificial Sequence: Synthetic oligonucleotide
  Antisense Strand to SEQ ID NO: 359507
uuauucauccgcagaaugg

SEQ ID NO: 359509 - RNA, 19 nt, Artificial Sequence
  Description of Artificial Sequence: Synthetic oligonucleotide
  Sense Strand Starting at position 519 of SEQ ID NO: 318279
cauucugcggaugaauaaa

SEQ ID NO: 359510 - RNA, 19 nt, Artificial Sequence
  Description of Artificial Sequence: Synthetic oligonucleotide
  Antisense Strand to SEQ ID NO: 359509
uuuauucauccgcagaaug

SEQ ID NO: 359511 - RNA, 19 nt, Artificial Sequence
  Description of Artificial Sequence: Synthetic oligonucleotide
  Sense Strand Starting at position 519 of SEQ ID NO: 318290
ugaauaaaccggugaacau

SEQ ID NO: 359512 - RNA, 19 nt, Artificial Sequence
  Description of Artificial Sequence: Synthetic oligonucleotide
  Antisense Strand to SEQ ID NO: 359511
auguucaccgguuuauuca

SEQ ID NO: 359513 - RNA, 19 nt, Artificial Sequence
  Description of Artificial Sequence: Synthetic oligonucleotide
  Sense Strand Starting at position 519 of SEQ ID NO: 318300
ggugaacauuuauaccuca

SEQ ID NO: 359514 - RNA, 19 nt, Artificial Sequence
  Description of Artificial Sequence: Synthetic oligonucleotide
  Antisense Strand to SEQ ID NO: 359513
ugagguauaaauguucacc

SEQ ID NO: 359515 - RNA, 19 nt, Artificial Sequence
  Description of Artificial Sequence: Synthetic oligonucleotide
  Sense Strand Starting at position 519 of SEQ ID NO: 318308
uuuauaccucauggagauu

SEQ ID NO: 359516 - RNA, 19 nt, Artificial Sequence
  Description of Artificial Sequence: Synthetic oligonucleotide
  Antisense Strand to SEQ ID NO: 359515
aaucuccaugagguauaaa

SEQ ID NO: 359517 - RNA, 19 nt, Artificial Sequence
  Description of Artificial Sequence: Synthetic oligonucleotide
  Sense Strand Starting at position 519 of SEQ ID NO: 318340
ugagauguagauugugcaa

SEQ ID NO: 359518 - RNA, 19 nt, Artificial Sequence
  Description of Artificial Sequence: Synthetic oligonucleotide
  Antisense Strand to SEQ ID NO: 359517
uugcacaaucuacaucuca

SEQ ID NO: 359519 - RNA, 19 nt, Artificial Sequence
  Description of Artificial Sequence: Synthetic oligonucleotide
  Sense Strand Starting at position 519 of SEQ ID NO: 318585
uauguuagccaggguaaga

SEQ ID NO: 359520 - RNA, 19 nt, Artificial Sequence
  Description of Artificial Sequence: Synthetic oligonucleotide
  Antisense Strand to SEQ ID NO: 359519
ucuuacccuggcuaacaua

SEQ ID NO: 359521 - RNA, 19 nt, Artificial Sequence
  Description of Artificial Sequence: Synthetic oligonucleotide
  Sense Strand Starting at position 519 of SEQ ID NO: 318617
acaggugagccagguaaga

SEQ ID NO: 359522 - RNA, 19 nt, Artificial Sequence
  Description of Artificial Sequence: Synthetic oligonucleotide
  Antisense Strand to SEQ ID NO: 359521
ucuuaccuggcucaccugu

SEQ ID NO: 359523 - RNA, 19 nt, Artificial Sequence
  Description of Artificial Sequence: Synthetic oligonucleotide
  Sense Strand Starting at position 520 of SEQ ID NO: 315309
ucaugacccucaguucuau

SEQ ID NO: 359524 - RNA, 19 nt, Artificial Sequence
  Description of Artificial Sequence: Synthetic oligonucleotide
  Antisense Strand to SEQ ID NO: 359523
auagaacugagggucauga

SEQ ID NO: 359525 - RNA, 19 nt, Artificial Sequence
  Description of Artificial Sequence: Synthetic oligonucleotide
  Sense Strand Starting at position 520 of SEQ ID NO: 315555
gguacaggcuccuuuagga

SEQ ID NO: 359526 - RNA, 19 nt, Artificial Sequence
  Description of Artificial Sequence: Synthetic oligonucleotide
  Antisense Strand to SEQ ID NO: 359525
uccuaaaggagccuguacc

SEQ ID NO: 359527 - RNA, 19 nt, Artificial Sequence
  Description of Artificial Sequence: Synthetic oligonucleotide
  Sense Strand Starting at position 520 of SEQ ID NO: 315617
gauauuaaucugcaguguc

SEQ ID NO: 359528 - RNA, 19 nt, Artificial Sequence
  Description of Artificial Sequence: Synthetic oligonucleotide
  Antisense Strand to SEQ ID NO: 359527
gacacugcagauuaauauc

SEQ ID NO: 359529 - RNA, 19 nt, Artificial Sequence
  Description of Artificial Sequence: Synthetic oligonucleotide
  Sense Strand Starting at position 520 of SEQ ID NO: 315683
uuuagucaggcauaaagau

SEQ ID NO: 359530 - RNA, 19 nt, Artificial Sequence
  Description of Artificial Sequence: Synthetic oligonucleotide
  Antisense Strand to SEQ ID NO: 359529
aucuuuaugccugacuaaa

SEQ ID NO: 359531 - RNA, 19 nt, Artificial Sequence
  Description of Artificial Sequence: Synthetic oligonucleotide
  Sense Strand Starting at position 520 of SEQ ID NO: 315755
uuaggaagguguuugauuc

SEQ ID NO: 359532 - RNA, 19 nt, Artificial Sequence
  Description of Artificial Sequence: Synthetic oligonucleotide
  Antisense Strand to SEQ ID NO: 359531
gaaucaaacaccuuccuaa

SEQ ID NO: 359533 - RNA, 19 nt, Artificial Sequence
  Description of Artificial Sequence: Synthetic oligonucleotide
  Sense Strand Starting at position 520 of SEQ ID NO: 315794
cccuuaacugauggauucu

SEQ ID NO: 359534 - RNA, 19 nt, Artificial Sequence
  Description of Artificial Sequence: Synthetic oligonucleotide
  Antisense Strand to SEQ ID NO: 359533
agaauccaucaguuaaggg

SEQ ID NO: 359535 - RNA, 19 nt, Artificial Sequence
  Description of Artificial Sequence: Synthetic oligonucleotide
  Sense Strand Starting at position 520 of SEQ ID NO: 316208
ugaggauuaugaguuaauu

SEQ ID NO: 359536 - RNA, 19 nt, Artificial Sequence
  Description of Artificial Sequence: Synthetic oligonucleotide
  Antisense Strand to SEQ ID NO: 359535
aauuaacucauaauccuca

SEQ ID NO: 359537 - RNA, 19 nt, Artificial Sequence
  Description of Artificial Sequence: Synthetic oligonucleotide
  Sense Strand Starting at position 520 of SEQ ID NO: 316490
cucuuaggaugucuacaga

SEQ ID NO: 359538 - RNA, 19 nt, Artificial Sequence
  Description of Artificial Sequence: Synthetic oligonucleotide
  Antisense Strand to SEQ ID NO: 359537
ucuguagacauccuaagag

SEQ ID NO: 359539 - RNA, 19 nt, Artificial Sequence
  Description of Artificial Sequence: Synthetic oligonucleotide
  Sense Strand Starting at position 520 of SEQ ID NO: 316680
cucugauacccugaaguuc

SEQ ID NO: 359540 - RNA, 19 nt, Artificial Sequence
  Description of Artificial Sequence: Synthetic oligonucleotide
  Antisense Strand to SEQ ID NO: 359539
gaacuucaggguaucagag

SEQ ID NO: 359541 - RNA, 19 nt, Artificial Sequence
  Description of Artificial Sequence: Synthetic oligonucleotide
  Sense Strand Starting at position 520 of SEQ ID NO: 316733
auagcaaacuugucagaug

SEQ ID NO: 359542 - RNA, 19 nt, Artificial Sequence
  Description of Artificial Sequence: Synthetic oligonucleotide
  Antisense Strand to SEQ ID NO: 359541
caucugacaaguuugcuau

SEQ ID NO: 359543 - RNA, 19 nt, Artificial Sequence
  Description of Artificial Sequence: Synthetic oligonucleotide
  Sense Strand Starting at position 520 of SEQ ID NO: 316927
cugaaagaauugucuaacu

SEQ ID NO: 359544 - RNA, 19 nt, Artificial Sequence
  Description of Artificial Sequence: Synthetic oligonucleotide
  Antisense Strand to SEQ ID NO: 359543
aguuagacaauucuuucag

SEQ ID NO: 359545 - RNA, 19 nt, Artificial Sequence
  Description of Artificial Sequence: Synthetic oligonucleotide
  Sense Strand Starting at position 520 of SEQ ID NO: 316956
gacaaaguccagcaagcuu

SEQ ID NO: 359546 - RNA, 19 nt, Artificial Sequence
  Description of Artificial Sequence: Synthetic oligonucleotide
  Antisense Strand to SEQ ID NO: 359545
aagcuugcuggacuuuguc

SEQ ID NO: 359547 - RNA, 19 nt, Artificial Sequence
  Description of Artificial Sequence: Synthetic oligonucleotide
  Sense Strand Starting at position 520 of SEQ ID NO: 317229
ccuggagagcagugagaaa

SEQ ID NO: 359548 - RNA, 19 nt, Artificial Sequence
  Description of Artificial Sequence: Synthetic oligonucleotide
  Antisense Strand to SEQ ID NO: 359547
uuucucacugcucuccagg

SEQ ID NO: 359549 - RNA, 19 nt, Artificial Sequence
  Description of Artificial Sequence: Synthetic oligonucleotide
  Sense Strand Starting at position 520 of SEQ ID NO: 317369
cagguucuugggugaacca

SEQ ID NO: 359550 - RNA, 19 nt, Artificial Sequence
  Description of Artificial Sequence: Synthetic oligonucleotide
  Antisense Strand to SEQ ID NO: 359549
ugguucacccaagaaccug

SEQ ID NO: 359551 - RNA, 19 nt, Artificial Sequence
  Description of Artificial Sequence: Synthetic oligonucleotide
  Sense Strand Starting at position 520 of SEQ ID NO: 317370
agguucuugggugaaccau

SEQ ID NO: 359552 - RNA, 19 nt, Artificial Sequence
  Description of Artificial Sequence: Synthetic oligonucleotide
  Antisense Strand to SEQ ID NO: 359551
augguucacccaagaaccu

SEQ ID NO: 359553 - RNA, 19 nt, Artificial Sequence
  Description of Artificial Sequence: Synthetic oligonucleotide
  Sense Strand Starting at position 520 of SEQ ID NO: 317529
agggauuauucuccagcca

SEQ ID NO: 359554 - RNA, 19 nt, Artificial Sequence
  Description of Artificial Sequence: Synthetic oligonucleotide
  Antisense Strand to SEQ ID NO: 359553
uggcuggagaauaaucccu

SEQ ID NO: 359555 - RNA, 19 nt, Artificial Sequence
  Description of Artificial Sequence: Synthetic oligonucleotide
  Sense Strand Starting at position 520 of SEQ ID NO: 317530
gggauuauucuccagccac

SEQ ID NO: 359556 - RNA, 19 nt, Artificial Sequence
  Description of Artificial Sequence: Synthetic oligonucleotide
  Antisense Strand to SEQ ID NO: 359555
guggcuggagaauaauccc

SEQ ID NO: 359557 - RNA, 19 nt, Artificial Sequence
  Description of Artificial Sequence: Synthetic oligonucleotide
  Sense Strand Starting at position 520 of SEQ ID NO: 317618
acuagugguguucagaaag

SEQ ID NO: 359558 - RNA, 19 nt, Artificial Sequence
  Description of Artificial Sequence: Synthetic oligonucleotide
  Antisense Strand to SEQ ID NO: 359557
cuuucugaacaccacuagu

SEQ ID NO: 359559 - RNA, 19 nt, Artificial Sequence
  Description of Artificial Sequence: Synthetic oligonucleotide
  Sense Strand Starting at position 520 of SEQ ID NO: 317702
cuuguaaauuaggcauuau

SEQ ID NO: 359560 - RNA, 19 nt, Artificial Sequence
  Description of Artificial Sequence: Synthetic oligonucleotide
  Antisense Strand to SEQ ID NO: 359559
auaaugccuaauuuacaag

SEQ ID NO: 359561 - RNA, 19 nt, Artificial Sequence
  Description of Artificial Sequence: Synthetic oligonucleotide
  Sense Strand Starting at position 520 of SEQ ID NO: 317747
gaggaaguguaagugaaua

SEQ ID NO: 359562 - RNA, 19 nt, Artificial Sequence
  Description of Artificial Sequence: Synthetic oligonucleotide
  Antisense Strand to SEQ ID NO: 359561
uauucacuuacacuuccuc

SEQ ID NO: 359563 - RNA, 19 nt, Artificial Sequence
  Description of Artificial Sequence: Synthetic oligonucleotide
  Sense Strand Starting at position 520 of SEQ ID NO: 317752
aguguaagugaauaaagua

SEQ ID NO: 359564 - RNA, 19 nt, Artificial Sequence
  Description of Artificial Sequence: Synthetic oligonucleotide
  Antisense Strand to SEQ ID NO: 359563
uacuuuauucacuuacacu

SEQ ID NO: 359565 - RNA, 19 nt, Artificial Sequence
  Description of Artificial Sequence: Synthetic oligonucleotide
  Sense Strand Starting at position 520 of SEQ ID NO: 317812
aaccauugguaauuagagu

SEQ ID NO: 359566 - RNA, 19 nt, Artificial Sequence
  Description of Artificial Sequence: Synthetic oligonucleotide
  Antisense Strand to SEQ ID NO: 359565
acucuaauuaccaaugguu

SEQ ID NO: 359567 - RNA, 19 nt, Artificial Sequence
  Description of Artificial Sequence: Synthetic oligonucleotide
  Sense Strand Starting at position 520 of SEQ ID NO: 317818
ugguaauuagagugagaga

SEQ ID NO: 359568 - RNA, 19 nt, Artificial Sequence
  Description of Artificial Sequence: Synthetic oligonucleotide
  Antisense Strand to SEQ ID NO: 359567
ucucucacucuaauuacca

SEQ ID NO: 359569 - RNA, 19 nt, Artificial Sequence
  Description of Artificial Sequence: Synthetic oligonucleotide
  Sense Strand Starting at position 520 of SEQ ID NO: 317841
gagaaaccacccuguggua

SEQ ID NO: 359570 - RNA, 19 nt, Artificial Sequence
  Description of Artificial Sequence: Synthetic oligonucleotide
  Antisense Strand to SEQ ID NO: 359569
uaccacagggugguuucuc

SEQ ID NO: 359571 - RNA, 19 nt, Artificial Sequence
  Description of Artificial Sequence: Synthetic oligonucleotide
  Sense Strand Starting at position 520 of SEQ ID NO: 318105
cagacaugugaaugaggca

SEQ ID NO: 359572 - RNA, 19 nt, Artificial Sequence
  Description of Artificial Sequence: Synthetic oligonucleotide
  Antisense Strand to SEQ ID NO: 359571
ugccucauucacaugucug

SEQ ID NO: 359573 - RNA, 19 nt, Artificial Sequence
  Description of Artificial Sequence: Synthetic oligonucleotide
  Sense Strand Starting at position 520 of SEQ ID NO: 318204
acugcugagccacagaauu

SEQ ID NO: 359574 - RNA, 19 nt, Artificial Sequence
  Description of Artificial Sequence: Synthetic oligonucleotide
  Antisense Strand to SEQ ID NO: 359573
aauucuguggcucagcagu

SEQ ID NO: 359575 - RNA, 19 nt, Artificial Sequence
  Description of Artificial Sequence: Synthetic oligonucleotide
  Sense Strand Starting at position 520 of SEQ ID NO: 318296
uauaaucaugcagguugaa

SEQ ID NO: 359576 - RNA, 19 nt, Artificial Sequence
  Description of Artificial Sequence: Synthetic oligonucleotide
  Antisense Strand to SEQ ID NO: 359575
uucaaccugcaugauuaua

SEQ ID NO: 359577 - RNA, 19 nt, Artificial Sequence
  Description of Artificial Sequence: Synthetic oligonucleotide
  Sense Strand Starting at position 520 of SEQ ID NO: 318355
gagacccucugcuuuagau

SEQ ID NO: 359578 - RNA, 19 nt, Artificial Sequence
  Description of Artificial Sequence: Synthetic oligonucleotide
  Antisense Strand to SEQ ID NO: 359577
aucuaaagcagagggucuc

SEQ ID NO: 359579 - RNA, 19 nt, Artificial Sequence
  Description of Artificial Sequence: Synthetic oligonucleotide
  Sense Strand Starting at position 520 of SEQ ID NO: 318552
aggaaaccucagcauaugu

SEQ ID NO: 359580 - RNA, 19 nt, Artificial Sequence
  Description of Artificial Sequence: Synthetic oligonucleotide
  Antisense Strand to SEQ ID NO: 359579
acauaugcugagguuuccu

SEQ ID NO: 359581 - RNA, 19 nt, Artificial Sequence
  Description of Artificial Sequence: Synthetic oligonucleotide
  Sense Strand Starting at position 520 of SEQ ID NO: 318562
agcauaugucagcauagac

SEQ ID NO: 359582 - RNA, 19 nt, Artificial Sequence
  Description of Artificial Sequence: Synthetic oligonucleotide
  Antisense Strand to SEQ ID NO: 359581
gucuaugcugacauaugcu

SEQ ID NO: 359583 - RNA, 19 nt, Artificial Sequence
  Description of Artificial Sequence: Synthetic oligonucleotide
  Sense Strand Starting at position 520 of SEQ ID NO: 318572
agcauagacagauggcauu

SEQ ID NO: 359584 - RNA, 19 nt, Artificial Sequence
  Description of Artificial Sequence: Synthetic oligonucleotide
  Antisense Strand to SEQ ID NO: 359583
aaugccaucugucuaugcu

SEQ ID NO: 359585 - RNA, 19 nt, Artificial Sequence
  Description of Artificial Sequence: Synthetic oligonucleotide
  Sense Strand Starting at position 520 of SEQ ID NO: 318658
cuuuauugaggcuaaguuu

SEQ ID NO: 359586 - RNA, 19 nt, Artificial Sequence
  Description of Artificial Sequence: Synthetic oligonucleotide
  Antisense Strand to SEQ ID NO: 359585
aaacuuagccucaauaaag

SEQ ID NO: 359587 - RNA, 19 nt, Artificial Sequence
  Description of Artificial Sequence: Synthetic oligonucleotide
  Sense Strand Starting at position 520 of SEQ ID NO: 318723
auaucuccuguguaucuaa

SEQ ID NO: 359588 - RNA, 19 nt, Artificial Sequence
  Description of Artificial Sequence: Synthetic oligonucleotide
  Antisense Strand to SEQ ID NO: 359587
uuagauacacaggagauau

SEQ ID NO: 359589 - RNA, 19 nt, Artificial Sequence
  Description of Artificial Sequence: Synthetic oligonucleotide
  Sense Strand Starting at position 520 of SEQ ID NO: 318733
uguaucuaaguuuaugagu

SEQ ID NO: 359590 - RNA, 19 nt, Artificial Sequence
  Description of Artificial Sequence: Synthetic oligonucleotide
  Antisense Strand to SEQ ID NO: 359589
acucauaaacuuagauaca

SEQ ID NO: 359591 - RNA, 19 nt, Artificial Sequence
  Description of Artificial Sequence: Synthetic oligonucleotide
  Sense Strand Starting at position 520 of SEQ ID NO: 318769
ucuauugaucuuggaaguu

SEQ ID NO: 359592 - RNA, 19 nt, Artificial Sequence
  Description of Artificial Sequence: Synthetic oligonucleotide
  Antisense Strand to SEQ ID NO: 359591
aacuuccaagaucaauaga

SEQ ID NO: 359593 - RNA, 19 nt, Artificial Sequence
  Description of Artificial Sequence: Synthetic oligonucleotide
  Sense Strand Starting at position 520 of SEQ ID NO: 318786
uuagcaguuggucauuaga

SEQ ID NO: 359594 - RNA, 19 nt, Artificial Sequence
  Description of Artificial Sequence: Synthetic oligonucleotide
  Antisense Strand to SEQ ID NO: 359593
ucuaaugaccaacugcuaa

SEQ ID NO: 359595 - RNA, 19 nt, Artificial Sequence
  Description of Artificial Sequence: Synthetic oligonucleotide
  Sense Strand Starting at position 520 of SEQ ID NO: 318789
gcaguuggucauuagauaa

SEQ ID NO: 359596 - RNA, 19 nt, Artificial Sequence
  Description of Artificial Sequence: Synthetic oligonucleotide
  Antisense Strand to SEQ ID NO: 359595
uuaucuaaugaccaacugc

SEQ ID NO: 359597 - RNA, 19 nt, Artificial Sequence
  Description of Artificial Sequence: Synthetic oligonucleotide
  Sense Strand Starting at position 520 of SEQ ID NO: 318834
gggaaaucuuuacugccuu

SEQ ID NO: 359598 - RNA, 19 nt, Artificial Sequence
  Description of Artificial Sequence: Synthetic oligonucleotide
  Antisense Strand to SEQ ID NO: 359597
aaggcaguaaagauuuccc

SEQ ID NO: 359599 - RNA, 19 nt, Artificial Sequence
  Description of Artificial Sequence: Synthetic oligonucleotide
  Sense Strand Starting at position 520 of SEQ ID NO: 318926
uuuccuaagguaugagaga

SEQ ID NO: 359600 - RNA, 19 nt, Artificial Sequence
  Description of Artificial Sequence: Synthetic oligonucleotide
  Antisense Strand to SEQ ID NO: 359599
ucucucauaccuuaggaaa

SEQ ID NO: 359601 - RNA, 19 nt, Artificial Sequence
  Description of Artificial Sequence: Synthetic oligonucleotide
  Sense Strand Starting at position 520 of SEQ ID NO: 318971
caguuccuugacuggauua

SEQ ID NO: 359602 - RNA, 19 nt, Artificial Sequence
  Description of Artificial Sequence: Synthetic oligonucleotide
  Antisense Strand to SEQ ID NO: 359601
uaauccagucaaggaacug

SEQ ID NO: 359603 - RNA, 19 nt, Artificial Sequence
  Description of Artificial Sequence: Synthetic oligonucleotide
  Sense Strand Starting at position 521 of SEQ ID NO: 315873
gccuguguccgugaccaca

SEQ ID NO: 359604 - RNA, 19 nt, Artificial Sequence
  Description of Artificial Sequence: Synthetic oligonucleotide
  Antisense Strand to SEQ ID NO: 359603
uguggucacggacacaggc

SEQ ID NO: 359605 - RNA, 19 nt, Artificial Sequence
  Description of Artificial Sequence: Synthetic oligonucleotide
  Sense Strand Starting at position 521 of SEQ ID NO: 315902
cucucagcgcucuguguau

SEQ ID NO: 359606 - RNA, 19 nt, Artificial Sequence
  Description of Artificial Sequence: Synthetic oligonucleotide
  Antisense Strand to SEQ ID NO: 359605
auacacagagcgcugagag

SEQ ID NO: 359607 - RNA, 19 nt, Artificial Sequence
  Description of Artificial Sequence: Synthetic oligonucleotide
  Sense Strand Starting at position 521 of SEQ ID NO: 316235
ggaacauguccaggcaacu

SEQ ID NO: 359608 - RNA, 19 nt, Artificial Sequence
  Description of Artificial Sequence: Synthetic oligonucleotide
  Antisense Strand to SEQ ID NO: 359607
aguugccuggacauguucc

SEQ ID NO: 359609 - RNA, 19 nt, Artificial Sequence
  Description of Artificial Sequence: Synthetic oligonucleotide
  Sense Strand Starting at position 521 of SEQ ID NO: 316667
uggugaagagcccgugaaa

SEQ ID NO: 359610 - RNA, 19 nt, Artificial Sequence
  Description of Artificial Sequence: Synthetic oligonucleotide
  Antisense Strand to SEQ ID NO: 359609
uuucacgggcucuucacca

SEQ ID NO: 359611 - RNA, 19 nt, Artificial Sequence
  Description of Artificial Sequence: Synthetic oligonucleotide
  Sense Strand Starting at position 521 of SEQ ID NO: 316670
ugaagagcccgugaaauag

SEQ ID NO: 359612 - RNA, 19 nt, Artificial Sequence
  Description of Artificial Sequence: Synthetic oligonucleotide
  Antisense Strand to SEQ ID NO: 359611
cuauuucacgggcucuuca

SEQ ID NO: 359613 - RNA, 19 nt, Artificial Sequence
  Description of Artificial Sequence: Synthetic oligonucleotide
  Sense Strand Starting at position 521 of SEQ ID NO: 316680
gugaaauagcuuugucagc

SEQ ID NO: 359614 - RNA, 19 nt, Artificial Sequence
  Description of Artificial Sequence: Synthetic oligonucleotide
  Antisense Strand to SEQ ID NO: 359613
gcugacaaagcuauuucac

SEQ ID NO: 359615 - RNA, 19 nt, Artificial Sequence
  Description of Artificial Sequence: Synthetic oligonucleotide
  Sense Strand Starting at position 521 of SEQ ID NO: 316681
ugaaauagcuuugucagcu

SEQ ID NO: 359616 - RNA, 19 nt, Artificial Sequence
  Description of Artificial Sequence: Synthetic oligonucleotide
  Antisense Strand to SEQ ID NO: 359615
agcugacaaagcuauuuca

SEQ ID NO: 359617 - RNA, 19 nt, Artificial Sequence
  Description of Artificial Sequence: Synthetic oligonucleotide
  Sense Strand Starting at position 521 of SEQ ID NO: 316682
gaaauagcuuugucagcug

SEQ ID NO: 359618 - RNA, 19 nt, Artificial Sequence
  Description of Artificial Sequence: Synthetic oligonucleotide
  Antisense Strand to SEQ ID NO: 359617
cagcugacaaagcuauuuc

SEQ ID NO: 359619 - RNA, 19 nt, Artificial Sequence
  Description of Artificial Sequence: Synthetic oligonucleotide
  Sense Strand Starting at position 521 of SEQ ID NO: 317125
gagguuaugagcggugagu

SEQ ID NO: 359620 - RNA, 19 nt, Artificial Sequence
  Description of Artificial Sequence: Synthetic oligonucleotide
  Antisense Strand to SEQ ID NO: 359619
acucaccgcucauaaccuc

SEQ ID NO: 359621 - RNA, 19 nt, Artificial Sequence
  Description of Artificial Sequence: Synthetic oligonucleotide
  Sense Strand Starting at position 521 of SEQ ID NO: 317291
gaggguguccaguagcaua

SEQ ID NO: 359622 - RNA, 19 nt, Artificial Sequence
  Description of Artificial Sequence: Synthetic oligonucleotide
  Antisense Strand to SEQ ID NO: 359621
uaugcuacuggacacccuc

SEQ ID NO: 359623 - RNA, 19 nt, Artificial Sequence
  Description of Artificial Sequence: Synthetic oligonucleotide
  Sense Strand Starting at position 521 of SEQ ID NO: 317599
ucauuaugccgugaguccu

SEQ ID NO: 359624 - RNA, 19 nt, Artificial Sequence
  Description of Artificial Sequence: Synthetic oligonucleotide
  Antisense Strand to SEQ ID NO: 359623
aggacucacggcauaauga

SEQ ID NO: 359625 - RNA, 19 nt, Artificial Sequence
  Description of Artificial Sequence: Synthetic oligonucleotide
  Sense Strand Starting at position 521 of SEQ ID NO: 317648
gcugacuugccugauggga

SEQ ID NO: 359626 - RNA, 19 nt, Artificial Sequence
  Description of Artificial Sequence: Synthetic oligonucleotide
  Antisense Strand to SEQ ID NO: 359625
ucccaucaggcaagucagc

SEQ ID NO: 359627 - RNA, 19 nt, Artificial Sequence
  Description of Artificial Sequence: Synthetic oligonucleotide
  Sense Strand Starting at position 521 of SEQ ID NO: 317726
agggaguguccuggaugga

SEQ ID NO: 359628 - RNA, 19 nt, Artificial Sequence
  Description of Artificial Sequence: Synthetic oligonucleotide
  Antisense Strand to SEQ ID NO: 359627
uccauccaggacacucccu

SEQ ID NO: 359629 - RNA, 19 nt, Artificial Sequence
  Description of Artificial Sequence: Synthetic oligonucleotide
  Sense Strand Starting at position 521 of SEQ ID NO: 317796
guauccucucgguggcaga

SEQ ID NO: 359630 - RNA, 19 nt, Artificial Sequence
  Description of Artificial Sequence: Synthetic oligonucleotide
  Antisense Strand to SEQ ID NO: 359629
ucugccaccgagaggauac

SEQ ID NO: 359631 - RNA, 19 nt, Artificial Sequence
  Description of Artificial Sequence: Synthetic oligonucleotide
  Sense Strand Starting at position 521 of SEQ ID NO: 317829
gaagacagguguguuccua

SEQ ID NO: 359632 - RNA, 19 nt, Artificial Sequence
  Description of Artificial Sequence: Synthetic oligonucleotide
  Antisense Strand to SEQ ID NO: 359631
uaggaacacaccugucuuc

SEQ ID NO: 359633 - RNA, 19 nt, Artificial Sequence
  Description of Artificial Sequence: Synthetic oligonucleotide
  Sense Strand Starting at position 521 of SEQ ID NO: 317833
acagguguguuccuaacca

SEQ ID NO: 359634 - RNA, 19 nt, Artificial Sequence
  Description of Artificial Sequence: Synthetic oligonucleotide
  Antisense Strand to SEQ ID NO: 359633
ugguuaggaacacaccugu

SEQ ID NO: 359635 - RNA, 19 nt, Artificial Sequence
  Description of Artificial Sequence: Synthetic oligonucleotide
  Sense Strand Starting at position 521 of SEQ ID NO: 317875
gcccucauucuggaaggga

SEQ ID NO: 359636 - RNA, 19 nt, Artificial Sequence
  Description of Artificial Sequence: Synthetic oligonucleotide
  Antisense Strand to SEQ ID NO: 359635
ucccuuccagaaugagggc

SEQ ID NO: 359637 - RNA, 19 nt, Artificial Sequence
  Description of Artificial Sequence: Synthetic oligonucleotide
  Sense Strand Starting at position 521 of SEQ ID NO: 318003
gcuguaugugucugugcua

SEQ ID NO: 359638 - RNA, 19 nt, Artificial Sequence
  Description of Artificial Sequence: Synthetic oligonucleotide
  Antisense Strand to SEQ ID NO: 359637
uagcacagacacauacagc

SEQ ID NO: 359639 - RNA, 19 nt, Artificial Sequence
  Description of Artificial Sequence: Synthetic oligonucleotide
  Sense Strand Starting at position 521 of SEQ ID NO: 318004
cuguaugugucugugcuau

SEQ ID NO: 359640 - RNA, 19 nt, Artificial Sequence
  Description of Artificial Sequence: Synthetic oligonucleotide
  Antisense Strand to SEQ ID NO: 359639
auagcacagacacauacag

SEQ ID NO: 359641 - RNA, 19 nt, Artificial Sequence
  Description of Artificial Sequence: Synthetic oligonucleotide
  Sense Strand Starting at position 521 of SEQ ID NO: 318006
guaugugucugugcuaucu

SEQ ID NO: 359642 - RNA, 19 nt, Artificial Sequence
  Description of Artificial Sequence: Synthetic oligonucleotide
  Antisense Strand to SEQ ID NO: 359641
agauagcacagacacauac

SEQ ID NO: 359643 - RNA, 19 nt, Artificial Sequence
  Description of Artificial Sequence: Synthetic oligonucleotide
  Sense Strand Starting at position 521 of SEQ ID NO: 318076
gagcuuuguggcugugauc

SEQ ID NO: 359644 - RNA, 19 nt, Artificial Sequence
  Description of Artificial Sequence: Synthetic oligonucleotide
  Antisense Strand to SEQ ID NO: 359643
gaucacagccacaaagcuc

SEQ ID NO: 359645 - RNA, 19 nt, Artificial Sequence
  Description of Artificial Sequence: Synthetic oligonucleotide
  Sense Strand Starting at position 521 of SEQ ID NO: 318088
ugugaucagucacaggaca

SEQ ID NO: 359646 - RNA, 19 nt, Artificial Sequence
  Description of Artificial Sequence: Synthetic oligonucleotide
  Antisense Strand to SEQ ID NO: 359645
uguccugugacugaucaca

SEQ ID NO: 359647 - RNA, 19 nt, Artificial Sequence
  Description of Artificial Sequence: Synthetic oligonucleotide
  Sense Strand Starting at position 521 of SEQ ID NO: 318380
uagagcugugguggguaau

SEQ ID NO: 359648 - RNA, 19 nt, Artificial Sequence
  Description of Artificial Sequence: Synthetic oligonucleotide
  Antisense Strand to SEQ ID NO: 359647
auuacccaccacagcucua

SEQ ID NO: 359649 - RNA, 19 nt, Artificial Sequence
  Description of Artificial Sequence: Synthetic oligonucleotide
  Sense Strand Starting at position 521 of SEQ ID NO: 318390
guggguaaugggcacuaga

SEQ ID NO: 359650 - RNA, 19 nt, Artificial Sequence
  Description of Artificial Sequence: Synthetic oligonucleotide
  Antisense Strand to SEQ ID NO: 359649
ucuagugcccauuacccac

SEQ ID NO: 359651 - RNA, 19 nt, Artificial Sequence
  Description of Artificial Sequence: Synthetic oligonucleotide
  Sense Strand Starting at position 521 of SEQ ID NO: 318441
gccagacuucaggguuaag

SEQ ID NO: 359652 - RNA, 19 nt, Artificial Sequence
  Description of Artificial Sequence: Synthetic oligonucleotide
  Antisense Strand to SEQ ID NO: 359651
cuuaacccugaagucuggc

SEQ ID NO: 359653 - RNA, 19 nt, Artificial Sequence
  Description of Artificial Sequence: Synthetic oligonucleotide
  Sense Strand Starting at position 521 of SEQ ID NO: 318483
gucaaagguuguuaggagu

SEQ ID NO: 359654 - RNA, 19 nt, Artificial Sequence
  Description of Artificial Sequence: Synthetic oligonucleotide
  Antisense Strand to SEQ ID NO: 359653
acuccuaacaaccuuugac

SEQ ID NO: 359655 - RNA, 19 nt, Artificial Sequence
  Description of Artificial Sequence: Synthetic oligonucleotide
  Sense Strand Starting at position 521 of SEQ ID NO: 318489
gguuguuaggaguaaguua

SEQ ID NO: 359656 - RNA, 19 nt, Artificial Sequence
  Description of Artificial Sequence: Synthetic oligonucleotide
  Antisense Strand to SEQ ID NO: 359655
uaacuuacuccuaacaacc

SEQ ID NO: 359657 - RNA, 19 nt, Artificial Sequence
  Description of Artificial Sequence: Synthetic oligonucleotide
  Sense Strand Starting at position 521 of SEQ ID NO: 318497
ggaguaaguuaaucauagu

SEQ ID NO: 359658 - RNA, 19 nt, Artificial Sequence
  Description of Artificial Sequence: Synthetic oligonucleotide
  Antisense Strand to SEQ ID NO: 359657
acuaugauuaacuuacucc

SEQ ID NO: 359659 - RNA, 19 nt, Artificial Sequence
  Description of Artificial Sequence: Synthetic oligonucleotide
  Sense Strand Starting at position 521 of SEQ ID NO: 318518
ccaggauguacauggauua

SEQ ID NO: 359660 - RNA, 19 nt, Artificial Sequence
  Description of Artificial Sequence: Synthetic oligonucleotide
  Antisense Strand to SEQ ID NO: 359659
uaauccauguacauccugg

SEQ ID NO: 359661 - RNA, 19 nt, Artificial Sequence
  Description of Artificial Sequence: Synthetic oligonucleotide
  Sense Strand Starting at position 521 of SEQ ID NO: 318564
ggaagauguugccacugua

SEQ ID NO: 359662 - RNA, 19 nt, Artificial Sequence
  Description of Artificial Sequence: Synthetic oligonucleotide
  Antisense Strand to SEQ ID NO: 359661
uacaguggcaacaucuucc

SEQ ID NO: 359663 - RNA, 19 nt, Artificial Sequence
  Description of Artificial Sequence: Synthetic oligonucleotide
  Sense Strand Starting at position 521 of SEQ ID NO: 318820
gccucagauccucaguugu

SEQ ID NO: 359664 - RNA, 19 nt, Artificial Sequence
  Description of Artificial Sequence: Synthetic oligonucleotide
  Antisense Strand to SEQ ID NO: 359663
acaacugaggaucugaggc

SEQ ID NO: 359665 - RNA, 19 nt, Artificial Sequence
  Description of Artificial Sequence: Synthetic oligonucleotide
  Sense Strand Starting at position 521 of SEQ ID NO: 318822
cucagauccucaguuguaa

SEQ ID NO: 359666 - RNA, 19 nt, Artificial Sequence
  Description of Artificial Sequence: Synthetic oligonucleotide
  Antisense Strand to SEQ ID NO: 359665
uuacaacugaggaucugag

SEQ ID NO: 359667 - RNA, 19 nt, Artificial Sequence
  Description of Artificial Sequence: Synthetic oligonucleotide
  Sense Strand Starting at position 521 of SEQ ID NO: 318905
ugacaagagccuugcucau

SEQ ID NO: 359668 - RNA, 19 nt, Artificial Sequence
  Description of Artificial Sequence: Synthetic oligonucleotide
  Antisense Strand to SEQ ID NO: 359667
augagcaaggcucuuguca

SEQ ID NO: 359669 - RNA, 19 nt, Artificial Sequence
  Description of Artificial Sequence: Synthetic oligonucleotide
  Sense Strand Starting at position 521 of SEQ ID NO: 318907
acaagagccuugcucauaa

SEQ ID NO: 359670 - RNA, 19 nt, Artificial Sequence
  Description of Artificial Sequence: Synthetic oligonucleotide
  Antisense Strand to SEQ ID NO: 359669
uuaugagcaaggcucuugu

SEQ ID NO: 359671 - RNA, 19 nt, Artificial Sequence
  Description of Artificial Sequence: Synthetic oligonucleotide
  Sense Strand Starting at position 521 of SEQ ID NO: 319040
ggaguguggugugcggaaa

SEQ ID NO: 359672 - RNA, 19 nt, Artificial Sequence
  Description of Artificial Sequence: Synthetic oligonucleotide
  Antisense Strand to SEQ ID NO: 359671
uuuccgcacaccacacucc

SEQ ID NO: 359673 - RNA, 19 nt, Artificial Sequence
  Description of Artificial Sequence: Synthetic oligonucleotide
  Sense Strand Starting at position 521 of SEQ ID NO: 319041
gaguguggugugcggaaau

SEQ ID NO: 359674 - RNA, 19 nt, Artificial Sequence
  Description of Artificial Sequence: Synthetic oligonucleotide
  Antisense Strand to SEQ ID NO: 359673
auuuccgcacaccacacuc

SEQ ID NO: 359675 - RNA, 19 nt, Artificial Sequence
  Description of Artificial Sequence: Synthetic oligonucleotide
  Sense Strand Starting at position 521 of SEQ ID NO: 319080
agggaagucccauggaucu

SEQ ID NO: 359676 - RNA, 19 nt, Artificial Sequence
  Description of Artificial Sequence: Synthetic oligonucleotide
  Antisense Strand to SEQ ID NO: 359675
agauccaugggacuucccu

SEQ ID NO: 359677 - RNA, 19 nt, Artificial Sequence
  Description of Artificial Sequence: Synthetic oligonucleotide
  Sense Strand Starting at position 521 of SEQ ID NO: 319086
gucccauggaucugugguu

SEQ ID NO: 359678 - RNA, 19 nt, Artificial Sequence
  Description of Artificial Sequence: Synthetic oligonucleotide
  Antisense Strand to SEQ ID NO: 359677
aaccacagauccaugggac

SEQ ID NO: 359679 - RNA, 19 nt, Artificial Sequence
  Description of Artificial Sequence: Synthetic oligonucleotide
  Sense Strand Starting at position 521 of SEQ ID NO: 319091
auggaucugugguuggaca

SEQ ID NO: 359680 - RNA, 19 nt, Artificial Sequence
  Description of Artificial Sequence: Synthetic oligonucleotide
  Antisense Strand to SEQ ID NO: 359679
uguccaaccacagauccau

SEQ ID NO: 359681 - RNA, 19 nt, Artificial Sequence
  Description of Artificial Sequence: Synthetic oligonucleotide
  Sense Strand Starting at position 521 of SEQ ID NO: 319188
gaagcugacugagcuaaga

SEQ ID NO: 359682 - RNA, 19 nt, Artificial Sequence
  Description of Artificial Sequence: Synthetic oligonucleotide
  Antisense Strand to SEQ ID NO: 359681
ucuuagcucagucagcuuc

SEQ ID NO: 359683 - RNA, 19 nt, Artificial Sequence
  Description of Artificial Sequence: Synthetic oligonucleotide
  Sense Strand Starting at position 522 of SEQ ID NO: 315306
caaggaaagguguguacau

SEQ ID NO: 359684 - RNA, 19 nt, Artificial Sequence
  Description of Artificial Sequence: Synthetic oligonucleotide
  Antisense Strand to SEQ ID NO: 359683
auguacacaccuuuccuug

SEQ ID NO: 359685 - RNA, 19 nt, Artificial Sequence
  Description of Artificial Sequence: Synthetic oligonucleotide
  Sense Strand Starting at position 522 of SEQ ID NO: 315308
aggaaagguguguacaugu

SEQ ID NO: 359686 - RNA, 19 nt, Artificial Sequence
  Description of Artificial Sequence: Synthetic oligonucleotide
  Antisense Strand to SEQ ID NO: 359685
acauguacacaccuuuccu

SEQ ID NO: 359687 - RNA, 19 nt, Artificial Sequence
  Description of Artificial Sequence: Synthetic oligonucleotide
  Sense Strand Starting at position 522 of SEQ ID NO: 315530
aggaauuucucuugaauag

SEQ ID NO: 359688 - RNA, 19 nt, Artificial Sequence
  Description of Artificial Sequence: Synthetic oligonucleotide
  Antisense Strand to SEQ ID NO: 359687
cuauucaagagaaauuccu

SEQ ID NO: 359689 - RNA, 19 nt, Artificial Sequence
  Description of Artificial Sequence: Synthetic oligonucleotide
  Sense Strand Starting at position 522 of SEQ ID NO: 315553
uuggucuucccagaaauua

SEQ ID NO: 359690 - RNA, 19 nt, Artificial Sequence
  Description of Artificial Sequence: Synthetic oligonucleotide
  Antisense Strand to SEQ ID NO: 359689
uaauuucugggaagaccaa

SEQ ID NO: 359691 - RNA, 19 nt, Artificial Sequence
  Description of Artificial Sequence: Synthetic oligonucleotide
  Sense Strand Starting at position 522 of SEQ ID NO: 315614
cuaugcagauacuuggaaa

SEQ ID NO: 359692 - RNA, 19 nt, Artificial Sequence
  Description of Artificial Sequence: Synthetic oligonucleotide
  Antisense Strand to SEQ ID NO: 359691
uuuccaaguaucugcauag

SEQ ID NO: 359693 - RNA, 19 nt, Artificial Sequence
  Description of Artificial Sequence: Synthetic oligonucleotide
  Sense Strand Starting at position 522 of SEQ ID NO: 315716
agagaaugcugguuaugua

SEQ ID NO: 359694 - RNA, 19 nt, Artificial Sequence
  Description of Artificial Sequence: Synthetic oligonucleotide
  Antisense Strand to SEQ ID NO: 359693
uacauaaccagcauucucu

SEQ ID NO: 359695 - RNA, 19 nt, Artificial Sequence
  Description of Artificial Sequence: Synthetic oligonucleotide
  Sense Strand Starting at position 522 of SEQ ID NO: 315717
gagaaugcugguuauguaa

SEQ ID NO: 359696 - RNA, 19 nt, Artificial Sequence
  Description of Artificial Sequence: Synthetic oligonucleotide
  Antisense Strand to SEQ ID NO: 359695
uuacauaaccagcauucuc

SEQ ID NO: 359697 - RNA, 19 nt, Artificial Sequence
  Description of Artificial Sequence: Synthetic oligonucleotide
  Sense Strand Starting at position 522 of SEQ ID NO: 315724
cugguuauguaacucagaa

SEQ ID NO: 359698 - RNA, 19 nt, Artificial Sequence
  Description of Artificial Sequence: Synthetic oligonucleotide
  Antisense Strand to SEQ ID NO: 359697
uucugaguuacauaaccag

SEQ ID NO: 359699 - RNA, 19 nt, Artificial Sequence
  Description of Artificial Sequence: Synthetic oligonucleotide
  Sense Strand Starting at position 522 of SEQ ID NO: 315758
uaggcaagucucugggaau

SEQ ID NO: 359700 - RNA, 19 nt, Artificial Sequence
  Description of Artificial Sequence: Synthetic oligonucleotide
  Antisense Strand to SEQ ID NO: 359699
auucccagagacuugccua

SEQ ID NO: 359701 - RNA, 19 nt, Artificial Sequence
  Description of Artificial Sequence: Synthetic oligonucleotide
  Sense Strand Starting at position 522 of SEQ ID NO: 315875
cagaaucacugguuaauga

SEQ ID NO: 359702 - RNA, 19 nt, Artificial Sequence
  Description of Artificial Sequence: Synthetic oligonucleotide
  Antisense Strand to SEQ ID NO: 359701
ucauuaaccagugauucug

SEQ ID NO: 359703 - RNA, 19 nt, Artificial Sequence
  Description of Artificial Sequence: Synthetic oligonucleotide
  Sense Strand Starting at position 522 of SEQ ID NO: 315947
ggaauugguuucuuuccca

SEQ ID NO: 359704 - RNA, 19 nt, Artificial Sequence
  Description of Artificial Sequence: Synthetic oligonucleotide
  Antisense Strand to SEQ ID NO: 359703
ugggaaagaaaccaauucc

SEQ ID NO: 359705 - RNA, 19 nt, Artificial Sequence
  Description of Artificial Sequence: Synthetic oligonucleotide
  Sense Strand Starting at position 522 of SEQ ID NO: 316261
aaugaugaagcagguaaau

SEQ ID NO: 359706 - RNA, 19 nt, Artificial Sequence
  Description of Artificial Sequence: Synthetic oligonucleotide
  Antisense Strand to SEQ ID NO: 359705
auuuaccugcuucaucauu

SEQ ID NO: 359707 - RNA, 19 nt, Artificial Sequence
  Description of Artificial Sequence: Synthetic oligonucleotide
  Sense Strand Starting at position 522 of SEQ ID NO: 316590
augauucuucccugagaca

SEQ ID NO: 359708 - RNA, 19 nt, Artificial Sequence
  Description of Artificial Sequence: Synthetic oligonucleotide
  Antisense Strand to SEQ ID NO: 359707
ugucucagggaagaaucau

SEQ ID NO: 359709 - RNA, 19 nt, Artificial Sequence
  Description of Artificial Sequence: Synthetic oligonucleotide
  Sense Strand Starting at position 522 of SEQ ID NO: 316622
ggagacuucuaaguuucuu

SEQ ID NO: 359710 - RNA, 19 nt, Artificial Sequence
  Description of Artificial Sequence: Synthetic oligonucleotide
  Antisense Strand to SEQ ID NO: 359709
aagaaacuuagaagucucc

SEQ ID NO: 359711 - RNA, 19 nt, Artificial Sequence
  Description of Artificial Sequence: Synthetic oligonucleotide
  Sense Strand Starting at position 522 of SEQ ID NO: 316854
acugucuuaccagaauguu

SEQ ID NO: 359712 - RNA, 19 nt, Artificial Sequence
  Description of Artificial Sequence: Synthetic oligonucleotide
  Antisense Strand to SEQ ID NO: 359711
aacauucugguaagacagu

SEQ ID NO: 359713 - RNA, 19 nt, Artificial Sequence
  Description of Artificial Sequence: Synthetic oligonucleotide
  Sense Strand Starting at position 522 of SEQ ID NO: 316908
ugaaauauaucagcauguu

SEQ ID NO: 359714 - RNA, 19 nt, Artificial Sequence
  Description of Artificial Sequence: Synthetic oligonucleotide
  Antisense Strand to SEQ ID NO: 359713
aacaugcugauauauuuca

SEQ ID NO: 359715 - RNA, 19 nt, Artificial Sequence
  Description of Artificial Sequence: Synthetic oligonucleotide
  Sense Strand Starting at position 522 of SEQ ID NO: 316947
uaaguauuuguuuggugca

SEQ ID NO: 359716 - RNA, 19 nt, Artificial Sequence
  Description of Artificial Sequence: Synthetic oligonucleotide
  Antisense Strand to SEQ ID NO: 359715
ugcaccaaacaaauacuua

SEQ ID NO: 359717 - RNA, 19 nt, Artificial Sequence
  Description of Artificial Sequence: Synthetic oligonucleotide
  Sense Strand Starting at position 522 of SEQ ID NO: 316949
aguauuuguuuggugcaua

SEQ ID NO: 359718 - RNA, 19 nt, Artificial Sequence
  Description of Artificial Sequence: Synthetic oligonucleotide
  Antisense Strand to SEQ ID NO: 359717
uaugcaccaaacaaauacu

SEQ ID NO: 359719 - RNA, 19 nt, Artificial Sequence
  Description of Artificial Sequence: Synthetic oligonucleotide
  Sense Strand Starting at position 522 of SEQ ID NO: 316960
ggugcauaugcacaauaca

SEQ ID NO: 359720 - RNA, 19 nt, Artificial Sequence
  Description of Artificial Sequence: Synthetic oligonucleotide
  Antisense Strand to SEQ ID NO: 359719
uguauugugcauaugcacc

SEQ ID NO: 359721 - RNA, 19 nt, Artificial Sequence
  Description of Artificial Sequence: Synthetic oligonucleotide
  Sense Strand Starting at position 522 of SEQ ID NO: 317222
agguacguuugauuugcua

SEQ ID NO: 359722 - RNA, 19 nt, Artificial Sequence
  Description of Artificial Sequence: Synthetic oligonucleotide
  Antisense Strand to SEQ ID NO: 359721
uagcaaaucaaacguaccu

SEQ ID NO: 359723 - RNA, 19 nt, Artificial Sequence
  Description of Artificial Sequence: Synthetic oligonucleotide
  Sense Strand Starting at position 522 of SEQ ID NO: 317226
acguuugauuugcuaccua

SEQ ID NO: 359724 - RNA, 19 nt, Artificial Sequence
  Description of Artificial Sequence: Synthetic oligonucleotide
  Antisense Strand to SEQ ID NO: 359723
uagguagcaaaucaaacgu

SEQ ID NO: 359725 - RNA, 19 nt, Artificial Sequence
  Description of Artificial Sequence: Synthetic oligonucleotide
  Sense Strand Starting at position 522 of SEQ ID NO: 317306
agaucugagucaguacaga

SEQ ID NO: 359726 - RNA, 19 nt, Artificial Sequence
  Description of Artificial Sequence: Synthetic oligonucleotide
  Antisense Strand to SEQ ID NO: 359725
ucuguacugacucagaucu

SEQ ID NO: 359727 - RNA, 19 nt, Artificial Sequence
  Description of Artificial Sequence: Synthetic oligonucleotide
  Sense Strand Starting at position 522 of SEQ ID NO: 317338
ggaauuagaagaugcaguu

SEQ ID NO: 359728 - RNA, 19 nt, Artificial Sequence
  Description of Artificial Sequence: Synthetic oligonucleotide
  Antisense Strand to SEQ ID NO: 359727
aacugcaucuucuaauucc

SEQ ID NO: 359729 - RNA, 19 nt, Artificial Sequence
  Description of Artificial Sequence: Synthetic oligonucleotide
  Sense Strand Starting at position 522 of SEQ ID NO: 317475
gccugugaccugucuagcu

SEQ ID NO: 359730 - RNA, 19 nt, Artificial Sequence
  Description of Artificial Sequence: Synthetic oligonucleotide
  Antisense Strand to SEQ ID NO: 359729
agcuagacaggucacaggc

SEQ ID NO: 359731 - RNA, 19 nt, Artificial Sequence
  Description of Artificial Sequence: Synthetic oligonucleotide
  Sense Strand Starting at position 522 of SEQ ID NO: 317491
gcuugcugcagaguuguaa

SEQ ID NO: 359732 - RNA, 19 nt, Artificial Sequence
  Description of Artificial Sequence: Synthetic oligonucleotide
  Antisense Strand to SEQ ID NO: 359731
uuacaacucugcagcaagc

SEQ ID NO: 359733 - RNA, 19 nt, Artificial Sequence
  Description of Artificial Sequence: Synthetic oligonucleotide
  Sense Strand Starting at position 522 of SEQ ID NO: 317540
ccaauaguucugugagaaa

SEQ ID NO: 359734 - RNA, 19 nt, Artificial Sequence
  Description of Artificial Sequence: Synthetic oligonucleotide
  Antisense Strand to SEQ ID NO: 359733
uuucucacagaacuauugg

SEQ ID NO: 359735 - RNA, 19 nt, Artificial Sequence
  Description of Artificial Sequence: Synthetic oligonucleotide
  Sense Strand Starting at position 522 of SEQ ID NO: 317924
gacccuucugucuggaaca

SEQ ID NO: 359736 - RNA, 19 nt, Artificial Sequence
  Description of Artificial Sequence: Synthetic oligonucleotide
  Antisense Strand to SEQ ID NO: 359735
uguuccagacagaaggguc

SEQ ID NO: 359737 - RNA, 19 nt, Artificial Sequence
  Description of Artificial Sequence: Synthetic oligonucleotide
  Sense Strand Starting at position 522 of SEQ ID NO: 317926
cccuucugucuggaacaaa

SEQ ID NO: 359738 - RNA, 19 nt, Artificial Sequence
  Description of Artificial Sequence: Synthetic oligonucleotide
  Antisense Strand to SEQ ID NO: 359737
uuuguuccagacagaaggg

SEQ ID NO: 359739 - RNA, 19 nt, Artificial Sequence
  Description of Artificial Sequence: Synthetic oligonucleotide
  Sense Strand Starting at position 522 of SEQ ID NO: 318011
gcuuuauagccuuucggca

SEQ ID NO: 359740 - RNA, 19 nt, Artificial Sequence
  Description of Artificial Sequence: Synthetic oligonucleotide
  Antisense Strand to SEQ ID NO: 359739
ugccgaaaggcuauaaagc

SEQ ID NO: 359741 - RNA, 19 nt, Artificial Sequence
  Description of Artificial Sequence: Synthetic oligonucleotide
  Sense Strand Starting at position 522 of SEQ ID NO: 318148
uagucagagucauccauag

SEQ ID NO: 359742 - RNA, 19 nt, Artificial Sequence
  Description of Artificial Sequence: Synthetic oligonucleotide
  Antisense Strand to SEQ ID NO: 359741
cuauggaugacucugacua

SEQ ID NO: 359743 - RNA, 19 nt, Artificial Sequence
  Description of Artificial Sequence: Synthetic oligonucleotide
  Sense Strand Starting at position 522 of SEQ ID NO: 318150
gucagagucauccauagug

SEQ ID NO: 359744 - RNA, 19 nt, Artificial Sequence
  Description of Artificial Sequence: Synthetic oligonucleotide
  Antisense Strand to SEQ ID NO: 359743
cacuauggaugacucugac

SEQ ID NO: 359745 - RNA, 19 nt, Artificial Sequence
  Description of Artificial Sequence: Synthetic oligonucleotide
  Sense Strand Starting at position 522 of SEQ ID NO: 318447
gaaggcucacuauggauga

SEQ ID NO: 359746 - RNA, 19 nt, Artificial Sequence
  Description of Artificial Sequence: Synthetic oligonucleotide
  Antisense Strand to SEQ ID NO: 359745
ucauccauagugagccuuc

SEQ ID NO: 359747 - RNA, 19 nt, Artificial Sequence
  Description of Artificial Sequence: Synthetic oligonucleotide
  Sense Strand Starting at position 522 of SEQ ID NO: 318575
aguugauguggucaguaau

SEQ ID NO: 359748 - RNA, 19 nt, Artificial Sequence
  Description of Artificial Sequence: Synthetic oligonucleotide
  Antisense Strand to SEQ ID NO: 359747
auuacugaccacaucaacu

SEQ ID NO: 359749 - RNA, 19 nt, Artificial Sequence
  Description of Artificial Sequence: Synthetic oligonucleotide
  Sense Strand Starting at position 522 of SEQ ID NO: 319081
gaagaaaugccguaugcau

SEQ ID NO: 359750 - RNA, 19 nt, Artificial Sequence
  Description of Artificial Sequence: Synthetic oligonucleotide
  Antisense Strand to SEQ ID NO: 359749
augcauacggcauuucuuc

SEQ ID NO: 359751 - RNA, 19 nt, Artificial Sequence
  Description of Artificial Sequence: Synthetic oligonucleotide
  Sense Strand Starting at position 522 of SEQ ID NO: 319105
cauaccuguuaugcagaga

SEQ ID NO: 359752 - RNA, 19 nt, Artificial Sequence
  Description of Artificial Sequence: Synthetic oligonucleotide
  Antisense Strand to SEQ ID NO: 359751
ucucugcauaacagguaug

SEQ ID NO: 359753 - RNA, 19 nt, Artificial Sequence
  Description of Artificial Sequence: Synthetic oligonucleotide
  Sense Strand Starting at position 522 of SEQ ID NO: 319108
accuguuaugcagagauug

SEQ ID NO: 359754 - RNA, 19 nt, Artificial Sequence
  Description of Artificial Sequence: Synthetic oligonucleotide
  Antisense Strand to SEQ ID NO: 359753
caaucucugcauaacaggu

SEQ ID NO: 359755 - RNA, 19 nt, Artificial Sequence
  Description of Artificial Sequence: Synthetic oligonucleotide
  Sense Strand Starting at position 522 of SEQ ID NO: 319110
cuguuaugcagagauuguu

SEQ ID NO: 359756 - RNA, 19 nt, Artificial Sequence
  Description of Artificial Sequence: Synthetic oligonucleotide
  Antisense Strand to SEQ ID NO: 359755
aacaaucucugcauaacag

SEQ ID NO: 359757 - RNA, 19 nt, Artificial Sequence
  Description of Artificial Sequence: Synthetic oligonucleotide
  Sense Strand Starting at position 522 of SEQ ID NO: 319201
ugagauuuaugucacagag

SEQ ID NO: 359758 - RNA, 19 nt, Artificial Sequence
  Description of Artificial Sequence: Synthetic oligonucleotide
  Antisense Strand to SEQ ID NO: 359757
cucugugacauaaaucuca

SEQ ID NO: 359759 - RNA, 19 nt, Artificial Sequence
  Description of Artificial Sequence: Synthetic oligonucleotide
  Sense Strand Starting at position 522 of SEQ ID NO: 319203
agauuuaugucacagagaa

SEQ ID NO: 359760 - RNA, 19 nt, Artificial Sequence
  Description of Artificial Sequence: Synthetic oligonucleotide
  Antisense Strand to SEQ ID NO: 359759
uucucugugacauaaaucu

SEQ ID NO: 359761 - RNA, 19 nt, Artificial Sequence
  Description of Artificial Sequence: Synthetic oligonucleotide
  Sense Strand Starting at position 522 of SEQ ID NO: 319215
cagagaaaguggcuaugau

SEQ ID NO: 359762 - RNA, 19 nt, Artificial Sequence
  Description of Artificial Sequence: Synthetic oligonucleotide
  Antisense Strand to SEQ ID NO: 359761
aucauagccacuuucucug

SEQ ID NO: 359763 - RNA, 19 nt, Artificial Sequence
  Description of Artificial Sequence: Synthetic oligonucleotide
  Sense Strand Starting at position 523 of SEQ ID NO: 315237
gucagaccuuacuccauau

SEQ ID NO: 359764 - RNA, 19 nt, Artificial Sequence
  Description of Artificial Sequence: Synthetic oligonucleotide
  Antisense Strand to SEQ ID NO: 359763
auauggaguaaggucugac

SEQ ID NO: 359765 - RNA, 19 nt, Artificial Sequence
  Description of Artificial Sequence: Synthetic oligonucleotide
  Sense Strand Starting at position 523 of SEQ ID NO: 315443
cccaaagagcucugaagca

SEQ ID NO: 359766 - RNA, 19 nt, Artificial Sequence
  Description of Artificial Sequence: Synthetic oligonucleotide
  Antisense Strand to SEQ ID NO: 359765
ugcuucagagcucuuuggg

SEQ ID NO: 359767 - RNA, 19 nt, Artificial Sequence
  Description of Artificial Sequence: Synthetic oligonucleotide
  Sense Strand Starting at position 523 of SEQ ID NO: 315780
uaaagaauugugcaugacu

SEQ ID NO: 359768 - RNA, 19 nt, Artificial Sequence
  Description of Artificial Sequence: Synthetic oligonucleotide
  Antisense Strand to SEQ ID NO: 359767
agucaugcacaauucuuua

SEQ ID NO: 359769 - RNA, 19 nt, Artificial Sequence
  Description of Artificial Sequence: Synthetic oligonucleotide
  Sense Strand Starting at position 523 of SEQ ID NO: 315782
aagaauugugcaugacuca

SEQ ID NO: 359770 - RNA, 19 nt, Artificial Sequence
  Description of Artificial Sequence: Synthetic oligonucleotide
  Antisense Strand to SEQ ID NO: 359769
ugagucaugcacaauucuu

SEQ ID NO: 359771 - RNA, 19 nt, Artificial Sequence
  Description of Artificial Sequence: Synthetic oligonucleotide
  Sense Strand Starting at position 523 of SEQ ID NO: 315783
agaauugugcaugacucaa

SEQ ID NO: 359772 - RNA, 19 nt, Artificial Sequence
  Description of Artificial Sequence: Synthetic oligonucleotide
  Antisense Strand to SEQ ID NO: 359771
uugagucaugcacaauucu

SEQ ID NO: 359773 - RNA, 19 nt, Artificial Sequence
  Description of Artificial Sequence: Synthetic oligonucleotide
  Sense Strand Starting at position 523 of SEQ ID NO: 315793
augacucaagccugagaaa

SEQ ID NO: 359774 - RNA, 19 nt, Artificial Sequence
  Description of Artificial Sequence: Synthetic oligonucleotide
  Antisense Strand to SEQ ID NO: 359773
uuucucaggcuugagucau

SEQ ID NO: 359775 - RNA, 19 nt, Artificial Sequence
  Description of Artificial Sequence: Synthetic oligonucleotide
  Sense Strand Starting at position 523 of SEQ ID NO: 315888
agguauugauacucuugaa

SEQ ID NO: 359776 - RNA, 19 nt, Artificial Sequence
  Description of Artificial Sequence: Synthetic oligonucleotide
  Antisense Strand to SEQ ID NO: 359775
uucaagaguaucaauaccu

SEQ ID NO: 359777 - RNA, 19 nt, Artificial Sequence
  Description of Artificial Sequence: Synthetic oligonucleotide
  Sense Strand Starting at position 523 of SEQ ID NO: 315911
cuuggaaugccauauuaca

SEQ ID NO: 359778 - RNA, 19 nt, Artificial Sequence
  Description of Artificial Sequence: Synthetic oligonucleotide
  Antisense Strand to SEQ ID NO: 359777
uguaauauggcauuccaag

SEQ ID NO: 359779 - RNA, 19 nt, Artificial Sequence
  Description of Artificial Sequence: Synthetic oligonucleotide
  Sense Strand Starting at position 523 of SEQ ID NO: 315922
auauuacacuggucagaag

SEQ ID NO: 359780 - RNA, 19 nt, Artificial Sequence
  Description of Artificial Sequence: Synthetic oligonucleotide
  Antisense Strand to SEQ ID NO: 359779
cuucugaccaguguaauau

SEQ ID NO: 359781 - RNA, 19 nt, Artificial Sequence
  Description of Artificial Sequence: Synthetic oligonucleotide
  Sense Strand Starting at position 523 of SEQ ID NO: 315934
ucagaaguacaguaucauc

SEQ ID NO: 359782 - RNA, 19 nt, Artificial Sequence
  Description of Artificial Sequence: Synthetic oligonucleotide
  Antisense Strand to SEQ ID NO: 359781
gaugauacuguacuucuga

SEQ ID NO: 359783 - RNA, 19 nt, Artificial Sequence
  Description of Artificial Sequence: Synthetic oligonucleotide
  Sense Strand Starting at position 523 of SEQ ID NO: 316207
gccagaaauggugauuauc

SEQ ID NO: 359784 - RNA, 19 nt, Artificial Sequence
  Description of Artificial Sequence: Synthetic oligonucleotide
  Antisense Strand to SEQ ID NO: 359783
gauaaucaccauuucuggc

SEQ ID NO: 359785 - RNA, 19 nt, Artificial Sequence
  Description of Artificial Sequence: Synthetic oligonucleotide
  Sense Strand Starting at position 523 of SEQ ID NO: 316209
cagaaauggugauuaucau

SEQ ID NO: 359786 - RNA, 19 nt, Artificial Sequence
  Description of Artificial Sequence: Synthetic oligonucleotide
  Antisense Strand to SEQ ID NO: 359785
augauaaucaccauuucug

SEQ ID NO: 359787 - RNA, 19 nt, Artificial Sequence
  Description of Artificial Sequence: Synthetic oligonucleotide
  Sense Strand Starting at position 523 of SEQ ID NO: 316217
gugauuaucaugcagugga

SEQ ID NO: 359788 - RNA, 19 nt, Artificial Sequence
  Description of Artificial Sequence: Synthetic oligonucleotide
  Antisense Strand to SEQ ID NO: 359787
uccacugcaugauaaucac

SEQ ID NO: 359789 - RNA, 19 nt, Artificial Sequence
  Description of Artificial Sequence: Synthetic oligonucleotide
  Sense Strand Starting at position 523 of SEQ ID NO: 316220
auuaucaugcaguggaauu

SEQ ID NO: 359790 - RNA, 19 nt, Artificial Sequence
  Description of Artificial Sequence: Synthetic oligonucleotide
  Antisense Strand to SEQ ID NO: 359789
aauuccacugcaugauaau

SEQ ID NO: 359791 - RNA, 19 nt, Artificial Sequence
  Description of Artificial Sequence: Synthetic oligonucleotide
  Sense Strand Starting at position 523 of SEQ ID NO: 316330
aggucuggucucuaucuca

SEQ ID NO: 359792 - RNA, 19 nt, Artificial Sequence
  Description of Artificial Sequence: Synthetic oligonucleotide
  Antisense Strand to SEQ ID NO: 359791
ugagauagagaccagaccu

SEQ ID NO: 359793 - RNA, 19 nt, Artificial Sequence
  Description of Artificial Sequence: Synthetic oligonucleotide
  Sense Strand Starting at position 523 of SEQ ID NO: 316798
ugcuauaacccauaaggcu

SEQ ID NO: 359794 - RNA, 19 nt, Artificial Sequence
  Description of Artificial Sequence: Synthetic oligonucleotide
  Antisense Strand to SEQ ID NO: 359793
agccuuauggguuauagca

SEQ ID NO: 359795 - RNA, 19 nt, Artificial Sequence
  Description of Artificial Sequence: Synthetic oligonucleotide
  Sense Strand Starting at position 523 of SEQ ID NO: 317328
auguaugauuucucuagcu

SEQ ID NO: 359796 - RNA, 19 nt, Artificial Sequence
  Description of Artificial Sequence: Synthetic oligonucleotide
  Antisense Strand to SEQ ID NO: 359795
agcuagagaaaucauacau

SEQ ID NO: 359797 - RNA, 19 nt, Artificial Sequence
  Description of Artificial Sequence: Synthetic oligonucleotide
  Sense Strand Starting at position 523 of SEQ ID NO: 317333
ugauuucucuagcucaguu

SEQ ID NO: 359798 - RNA, 19 nt, Artificial Sequence
  Description of Artificial Sequence: Synthetic oligonucleotide
  Antisense Strand to SEQ ID NO: 359797
aacugagcuagagaaauca

SEQ ID NO: 359799 - RNA, 19 nt, Artificial Sequence
  Description of Artificial Sequence: Synthetic oligonucleotide
  Sense Strand Starting at position 523 of SEQ ID NO: 317581
uucuuauaucuggguaaau

SEQ ID NO: 359800 - RNA, 19 nt, Artificial Sequence
  Description of Artificial Sequence: Synthetic oligonucleotide
  Antisense Strand to SEQ ID NO: 359799
auuuacccagauauaagaa

SEQ ID NO: 359801 - RNA, 19 nt, Artificial Sequence
  Description of Artificial Sequence: Synthetic oligonucleotide
  Sense Strand Starting at position 523 of SEQ ID NO: 317582
ucuuauaucuggguaaaua

SEQ ID NO: 359802 - RNA, 19 nt, Artificial Sequence
  Description of Artificial Sequence: Synthetic oligonucleotide
  Antisense Strand to SEQ ID NO: 359801
uauuuacccagauauaaga

SEQ ID NO: 359803 - RNA, 19 nt, Artificial Sequence
  Description of Artificial Sequence: Synthetic oligonucleotide
  Sense Strand Starting at position 523 of SEQ ID NO: 317700
guccaaauuuaguuggcau

SEQ ID NO: 359804 - RNA, 19 nt, Artificial Sequence
  Description of Artificial Sequence: Synthetic oligonucleotide
  Antisense Strand to SEQ ID NO: 359803
augccaacuaaauuuggac

SEQ ID NO: 359805 - RNA, 19 nt, Artificial Sequence
  Description of Artificial Sequence: Synthetic oligonucleotide
  Sense Strand Starting at position 523 of SEQ ID NO: 317822
auuacaggcuuauuagaaa

SEQ ID NO: 359806 - RNA, 19 nt, Artificial Sequence
  Description of Artificial Sequence: Synthetic oligonucleotide
  Antisense Strand to SEQ ID NO: 359805
uuucuaauaagccuguaau

SEQ ID NO: 359807 - RNA, 19 nt, Artificial Sequence
  Description of Artificial Sequence: Synthetic oligonucleotide
  Sense Strand Starting at position 523 of SEQ ID NO: 317904
agaccauagguuuguuaug

SEQ ID NO: 359808 - RNA, 19 nt, Artificial Sequence
  Description of Artificial Sequence: Synthetic oligonucleotide
  Antisense Strand to SEQ ID NO: 359807
cauaacaaaccuauggucu

SEQ ID NO: 359809 - RNA, 19 nt, Artificial Sequence
  Description of Artificial Sequence: Synthetic oligonucleotide
  Sense Strand Starting at position 523 of SEQ ID NO: 317905
gaccauagguuuguuauga

SEQ ID NO: 359810 - RNA, 19 nt, Artificial Sequence
  Description of Artificial Sequence: Synthetic oligonucleotide
  Antisense Strand to SEQ ID NO: 359809
ucauaacaaaccuaugguc

SEQ ID NO: 359811 - RNA, 19 nt, Artificial Sequence
  Description of Artificial Sequence: Synthetic oligonucleotide
  Sense Strand Starting at position 523 of SEQ ID NO: 317913
guuuguuaugaguagaaca

SEQ ID NO: 359812 - RNA, 19 nt, Artificial Sequence
  Description of Artificial Sequence: Synthetic oligonucleotide
  Antisense Strand to SEQ ID NO: 359811
uguucuacucauaacaaac

SEQ ID NO: 359813 - RNA, 19 nt, Artificial Sequence
  Description of Artificial Sequence: Synthetic oligonucleotide
  Sense Strand Starting at position 523 of SEQ ID NO: 317937
cuaaguacauaugcuagau

SEQ ID NO: 359814 - RNA, 19 nt, Artificial Sequence
  Description of Artificial Sequence: Synthetic oligonucleotide
  Antisense Strand to SEQ ID NO: 359813
aucuagcauauguacuuag

SEQ ID NO: 359815 - RNA, 19 nt, Artificial Sequence
  Description of Artificial Sequence: Synthetic oligonucleotide
  Sense Strand Starting at position 523 of SEQ ID NO: 317941
guacauaugcuagauacag

SEQ ID NO: 359816 - RNA, 19 nt, Artificial Sequence
  Description of Artificial Sequence: Synthetic oligonucleotide
  Antisense Strand to SEQ ID NO: 359815
cuguaucuagcauauguac

SEQ ID NO: 359817 - RNA, 19 nt, Artificial Sequence
  Description of Artificial Sequence: Synthetic oligonucleotide
  Sense Strand Starting at position 523 of SEQ ID NO: 318047
gaaggucuauaaguuacaa

SEQ ID NO: 359818 - RNA, 19 nt, Artificial Sequence
  Description of Artificial Sequence: Synthetic oligonucleotide
  Antisense Strand to SEQ ID NO: 359817
uuguaacuuauagaccuuc

SEQ ID NO: 359819 - RNA, 19 nt, Artificial Sequence
  Description of Artificial Sequence: Synthetic oligonucleotide
  Sense Strand Starting at position 523 of SEQ ID NO: 318110
uuucuugugcaagaaauag

SEQ ID NO: 359820 - RNA, 19 nt, Artificial Sequence
  Description of Artificial Sequence: Synthetic oligonucleotide
  Antisense Strand to SEQ ID NO: 359819
cuauuucuugcacaagaaa

SEQ ID NO: 359821 - RNA, 19 nt, Artificial Sequence
  Description of Artificial Sequence: Synthetic oligonucleotide
  Sense Strand Starting at position 523 of SEQ ID NO: 318138
guaggaauaucugcauaca

SEQ ID NO: 359822 - RNA, 19 nt, Artificial Sequence
  Description of Artificial Sequence: Synthetic oligonucleotide
  Antisense Strand to SEQ ID NO: 359821
uguaugcagauauuccuac

SEQ ID NO: 359823 - RNA, 19 nt, Artificial Sequence
  Description of Artificial Sequence: Synthetic oligonucleotide
  Sense Strand Starting at position 523 of SEQ ID NO: 318357
ucuauaugugcugagauga

SEQ ID NO: 359824 - RNA, 19 nt, Artificial Sequence
  Description of Artificial Sequence: Synthetic oligonucleotide
  Antisense Strand to SEQ ID NO: 359823
ucaucucagcacauauaga

SEQ ID NO: 359825 - RNA, 19 nt, Artificial Sequence
  Description of Artificial Sequence: Synthetic oligonucleotide
  Sense Strand Starting at position 523 of SEQ ID NO: 318454
agugauuaaugacuuguga

SEQ ID NO: 359826 - RNA, 19 nt, Artificial Sequence
  Description of Artificial Sequence: Synthetic oligonucleotide
  Antisense Strand to SEQ ID NO: 359825
ucacaagucauuaaucacu

SEQ ID NO: 359827 - RNA, 19 nt, Artificial Sequence
  Description of Artificial Sequence: Synthetic oligonucleotide
  Sense Strand Starting at position 523 of SEQ ID NO: 318456
ugauuaaugacuugugaga

SEQ ID NO: 359828 - RNA, 19 nt, Artificial Sequence
  Description of Artificial Sequence: Synthetic oligonucleotide
  Antisense Strand to SEQ ID NO: 359827
ucucacaagucauuaauca

SEQ ID NO: 359829 - RNA, 19 nt, Artificial Sequence
  Description of Artificial Sequence: Synthetic oligonucleotide
  Sense Strand Starting at position 523 of SEQ ID NO: 318679
gaauucuuuggguauguuu

SEQ ID NO: 359830 - RNA, 19 nt, Artificial Sequence
  Description of Artificial Sequence: Synthetic oligonucleotide
  Antisense Strand to SEQ ID NO: 359829
aaacauacccaaagaauuc

SEQ ID NO: 359831 - RNA, 19 nt, Artificial Sequence
  Description of Artificial Sequence: Synthetic oligonucleotide
  Sense Strand Starting at position 523 of SEQ ID NO: 318844
agauaaauauaagcgguau

SEQ ID NO: 359832 - RNA, 19 nt, Artificial Sequence
  Description of Artificial Sequence: Synthetic oligonucleotide
  Antisense Strand to SEQ ID NO: 359831
auaccgcuuauauuuaucu

SEQ ID NO: 359833 - RNA, 19 nt, Artificial Sequence
  Description of Artificial Sequence: Synthetic oligonucleotide
  Sense Strand Starting at position 523 of SEQ ID NO: 318850
auauaagcgguauaagaau

SEQ ID NO: 359834 - RNA, 19 nt, Artificial Sequence
  Description of Artificial Sequence: Synthetic oligonucleotide
  Antisense Strand to SEQ ID NO: 359833
auucuuauaccgcuuauau

SEQ ID NO: 359835 - RNA, 19 nt, Artificial Sequence
  Description of Artificial Sequence: Synthetic oligonucleotide
  Sense Strand Starting at position 523 of SEQ ID NO: 318856
gcgguauaagaauacaaau

SEQ ID NO: 359836 - RNA, 19 nt, Artificial Sequence
  Description of Artificial Sequence: Synthetic oligonucleotide
  Antisense Strand to SEQ ID NO: 359835
auuuguauucuuauaccgc

SEQ ID NO: 359837 - RNA, 19 nt, Artificial Sequence
  Description of Artificial Sequence: Synthetic oligonucleotide
  Sense Strand Starting at position 523 of SEQ ID NO: 318961
gccuguaaugaccaaagca

SEQ ID NO: 359838 - RNA, 19 nt, Artificial Sequence
  Description of Artificial Sequence: Synthetic oligonucleotide
  Antisense Strand to SEQ ID NO: 359837
ugcuuuggucauuacaggc

SEQ ID NO: 359839 - RNA, 19 nt, Artificial Sequence
  Description of Artificial Sequence: Synthetic oligonucleotide
  Sense Strand Starting at position 523 of SEQ ID NO: 319069
gugcauaaaugguugaaua

SEQ ID NO: 359840 - RNA, 19 nt, Artificial Sequence
  Description of Artificial Sequence: Synthetic oligonucleotide
  Antisense Strand to SEQ ID NO: 359839
uauucaaccauuuaugcac

SEQ ID NO: 359841 - RNA, 19 nt, Artificial Sequence
  Description of Artificial Sequence: Synthetic oligonucleotide
  Sense Strand Starting at position 523 of SEQ ID NO: 319070
ugcauaaaugguugaauac

SEQ ID NO: 359842 - RNA, 19 nt, Artificial Sequence
  Description of Artificial Sequence: Synthetic oligonucleotide
  Antisense Strand to SEQ ID NO: 359841
guauucaaccauuuaugca

SEQ ID NO: 359843 - RNA, 19 nt, Artificial Sequence
  Description of Artificial Sequence: Synthetic oligonucleotide
  Sense Strand Starting at position 524 of SEQ ID NO: 315485
ugccuaaauuuggagagaa

SEQ ID NO: 359844 - RNA, 19 nt, Artificial Sequence
  Description of Artificial Sequence: Synthetic oligonucleotide
  Antisense Strand to SEQ ID NO: 359843
uucucuccaaauuuaggca

SEQ ID NO: 359845 - RNA, 19 nt, Artificial Sequence
  Description of Artificial Sequence: Synthetic oligonucleotide
  Sense Strand Starting at position 524 of SEQ ID NO: 315514
uuucuuucuugacugggaa

SEQ ID NO: 359846 - RNA, 19 nt, Artificial Sequence
  Description of Artificial Sequence: Synthetic oligonucleotide
  Antisense Strand to SEQ ID NO: 359845
uucccagucaagaaagaaa

SEQ ID NO: 359847 - RNA, 19 nt, Artificial Sequence
  Description of Artificial Sequence: Synthetic oligonucleotide
  Sense Strand Starting at position 524 of SEQ ID NO: 315539
ggaaacaaaugggaacaua

SEQ ID NO: 359848 - RNA, 19 nt, Artificial Sequence
  Description of Artificial Sequence: Synthetic oligonucleotide
  Antisense Strand to SEQ ID NO: 359847
uauguucccauuuguuucc

SEQ ID NO: 359849 - RNA, 19 nt, Artificial Sequence
  Description of Artificial Sequence: Synthetic oligonucleotide
  Sense Strand Starting at position 524 of SEQ ID NO: 315557
aaacaauggcguugacaug

SEQ ID NO: 359850 - RNA, 19 nt, Artificial Sequence
  Description of Artificial Sequence: Synthetic oligonucleotide
  Antisense Strand to SEQ ID NO: 359849
caugucaacgccauuguuu

SEQ ID NO: 359851 - RNA, 19 nt, Artificial Sequence
  Description of Artificial Sequence: Synthetic oligonucleotide
  Sense Strand Starting at position 524 of SEQ ID NO: 315581
gggagcauagcuuauacaa

SEQ ID NO: 359852 - RNA, 19 nt, Artificial Sequence
  Description of Artificial Sequence: Synthetic oligonucleotide
  Antisense Strand to SEQ ID NO: 359851
uuguauaagcuaugcuccc

SEQ ID NO: 359853 - RNA, 19 nt, Artificial Sequence
  Description of Artificial Sequence: Synthetic oligonucleotide
  Sense Strand Starting at position 524 of SEQ ID NO: 315856
gguugcaauaauggauuau

SEQ ID NO: 359854 - RNA, 19 nt, Artificial Sequence
  Description of Artificial Sequence: Synthetic oligonucleotide
  Antisense Strand to SEQ ID NO: 359853
auaauccauuauugcaacc

SEQ ID NO: 359855 - RNA, 19 nt, Artificial Sequence
  Description of Artificial Sequence: Synthetic oligonucleotide
  Sense Strand Starting at position 524 of SEQ ID NO: 316022
acaggaauggcaugcaagu

SEQ ID NO: 359856 - RNA, 19 nt, Artificial Sequence
  Description of Artificial Sequence: Synthetic oligonucleotide
  Antisense Strand to SEQ ID NO: 359855
acuugcaugccauuccugu

SEQ ID NO: 359857 - RNA, 19 nt, Artificial Sequence
  Description of Artificial Sequence: Synthetic oligonucleotide
  Sense Strand Starting at position 524 of SEQ ID NO: 316321
aagugauaucacugaaagc

SEQ ID NO: 359858 - RNA, 19 nt, Artificial Sequence
  Description of Artificial Sequence: Synthetic oligonucleotide
  Antisense Strand to SEQ ID NO: 359857
gcuuucagugauaucacuu

SEQ ID NO: 359859 - RNA, 19 nt, Artificial Sequence
  Description of Artificial Sequence: Synthetic oligonucleotide
  Sense Strand Starting at position 524 of SEQ ID NO: 316350
gaagauuugugauaucuuc

SEQ ID NO: 359860 - RNA, 19 nt, Artificial Sequence
  Description of Artificial Sequence: Synthetic oligonucleotide
  Antisense Strand to SEQ ID NO: 359859
gaagauaucacaaaucuuc

SEQ ID NO: 359861 - RNA, 19 nt, Artificial Sequence
  Description of Artificial Sequence: Synthetic oligonucleotide
  Sense Strand Starting at position 524 of SEQ ID NO: 316396
acuagaugagguugagcua

SEQ ID NO: 359862 - RNA, 19 nt, Artificial Sequence
  Description of Artificial Sequence: Synthetic oligonucleotide
  Antisense Strand to SEQ ID NO: 359861
uagcucaaccucaucuagu

SEQ ID NO: 359863 - RNA, 19 nt, Artificial Sequence
  Description of Artificial Sequence: Synthetic oligonucleotide
  Sense Strand Starting at position 524 of SEQ ID NO: 316572
agaauugaaucuguugauc

SEQ ID NO: 359864 - RNA, 19 nt, Artificial Sequence
  Description of Artificial Sequence: Synthetic oligonucleotide
  Antisense Strand to SEQ ID NO: 359863
gaucaacagauucaauucu

SEQ ID NO: 359865 - RNA, 19 nt, Artificial Sequence
  Description of Artificial Sequence: Synthetic oligonucleotide
  Sense Strand Starting at position 524 of SEQ ID NO: 316577
ugaaucuguugaucuaaag

SEQ ID NO: 359866 - RNA, 19 nt, Artificial Sequence
  Description of Artificial Sequence: Synthetic oligonucleotide
  Antisense Strand to SEQ ID NO: 359865
cuuuagaucaacagauuca

SEQ ID NO: 359867 - RNA, 19 nt, Artificial Sequence
  Description of Artificial Sequence: Synthetic oligonucleotide
  Sense Strand Starting at position 524 of SEQ ID NO: 316593
aaguuuccacauuguagga

SEQ ID NO: 359868 - RNA, 19 nt, Artificial Sequence
  Description of Artificial Sequence: Synthetic oligonucleotide
  Antisense Strand to SEQ ID NO: 359867
uccuacaauguggaaacuu

SEQ ID NO: 359869 - RNA, 19 nt, Artificial Sequence
  Description of Artificial Sequence: Synthetic oligonucleotide
  Sense Strand Starting at position 524 of SEQ ID NO: 317320
gagagauguuaguuaauaa

SEQ ID NO: 359870 - RNA, 19 nt, Artificial Sequence
  Description of Artificial Sequence: Synthetic oligonucleotide
  Antisense Strand to SEQ ID NO: 359869
uuauuaacuaacaucucuc

SEQ ID NO: 359871 - RNA, 19 nt, Artificial Sequence
  Description of Artificial Sequence: Synthetic oligonucleotide
  Sense Strand Starting at position 524 of SEQ ID NO: 317352
gcguacugucaggagaaua

SEQ ID NO: 359872 - RNA, 19 nt, Artificial Sequence
  Description of Artificial Sequence: Synthetic oligonucleotide
  Antisense Strand to SEQ ID NO: 359871
uauucuccugacaguacgc

SEQ ID NO: 359873 - RNA, 19 nt, Artificial Sequence
  Description of Artificial Sequence: Synthetic oligonucleotide
  Sense Strand Starting at position 524 of SEQ ID NO: 317381
gguugaacccuggauggua

SEQ ID NO: 359874 - RNA, 19 nt, Artificial Sequence
  Description of Artificial Sequence: Synthetic oligonucleotide
  Antisense Strand to SEQ ID NO: 359873
uaccauccaggguucaacc

SEQ ID NO: 359875 - RNA, 19 nt, Artificial Sequence
  Description of Artificial Sequence: Synthetic oligonucleotide
  Sense Strand Starting at position 524 of SEQ ID NO: 317411
guuuccaguaaucaugguu

SEQ ID NO: 359876 - RNA, 19 nt, Artificial Sequence
  Description of Artificial Sequence: Synthetic oligonucleotide
  Antisense Strand to SEQ ID NO: 359875
aaccaugauuacuggaaac

SEQ ID NO: 359877 - RNA, 19 nt, Artificial Sequence
  Description of Artificial Sequence: Synthetic oligonucleotide
  Sense Strand Starting at position 524 of SEQ ID NO: 317416
caguaaucaugguuuccag

SEQ ID NO: 359878 - RNA, 19 nt, Artificial Sequence
  Description of Artificial Sequence: Synthetic oligonucleotide
  Antisense Strand to SEQ ID NO: 359877
cuggaaaccaugauuacug

SEQ ID NO: 359879 - RNA, 19 nt, Artificial Sequence
  Description of Artificial Sequence: Synthetic oligonucleotide
  Sense Strand Starting at position 524 of SEQ ID NO: 317424
augguuuccagguaucaug

SEQ ID NO: 359880 - RNA, 19 nt, Artificial Sequence
  Description of Artificial Sequence: Synthetic oligonucleotide
  Antisense Strand to SEQ ID NO: 359879
caugauaccuggaaaccau

SEQ ID NO: 359881 - RNA, 19 nt, Artificial Sequence
  Description of Artificial Sequence: Synthetic oligonucleotide
  Sense Strand Starting at position 524 of SEQ ID NO: 317448
ucagaccuguuaucgaaag

SEQ ID NO: 359882 - RNA, 19 nt, Artificial Sequence
  Description of Artificial Sequence: Synthetic oligonucleotide
  Antisense Strand to SEQ ID NO: 359881
cuuucgauaacaggucuga

SEQ ID NO: 359883 - RNA, 19 nt, Artificial Sequence
  Description of Artificial Sequence: Synthetic oligonucleotide
  Sense Strand Starting at position 524 of SEQ ID NO: 317673
cuagauuacuugucuuauu

SEQ ID NO: 359884 - RNA, 19 nt, Artificial Sequence
  Description of Artificial Sequence: Synthetic oligonucleotide
  Antisense Strand to SEQ ID NO: 359883
aauaagacaaguaaucuag

SEQ ID NO: 359885 - RNA, 19 nt, Artificial Sequence
  Description of Artificial Sequence: Synthetic oligonucleotide
  Sense Strand Starting at position 524 of SEQ ID NO: 317811
uaggcaauacuugguaaau

SEQ ID NO: 359886 - RNA, 19 nt, Artificial Sequence
  Description of Artificial Sequence: Synthetic oligonucleotide
  Antisense Strand to SEQ ID NO: 359885
auuuaccaaguauugccua

SEQ ID NO: 359887 - RNA, 19 nt, Artificial Sequence
  Description of Artificial Sequence: Synthetic oligonucleotide
  Sense Strand Starting at position 524 of SEQ ID NO: 317812
aggcaauacuugguaaaug

SEQ ID NO: 359888 - RNA, 19 nt, Artificial Sequence
  Description of Artificial Sequence: Synthetic oligonucleotide
  Antisense Strand to SEQ ID NO: 359887
cauuuaccaaguauugccu

SEQ ID NO: 359889 - RNA, 19 nt, Artificial Sequence
  Description of Artificial Sequence: Synthetic oligonucleotide
  Sense Strand Starting at position 524 of SEQ ID NO: 317959
gcaagaugaccuugaggcu

SEQ ID NO: 359890 - RNA, 19 nt, Artificial Sequence
  Description of Artificial Sequence: Synthetic oligonucleotide
  Antisense Strand to SEQ ID NO: 359889
agccucaaggucaucuugc

SEQ ID NO: 359891 - RNA, 19 nt, Artificial Sequence
  Description of Artificial Sequence: Synthetic oligonucleotide
  Sense Strand Starting at position 524 of SEQ ID NO: 317978
gcuugaguugagggagaaa

SEQ ID NO: 359892 - RNA, 19 nt, Artificial Sequence
  Description of Artificial Sequence: Synthetic oligonucleotide
  Antisense Strand to SEQ ID NO: 359891
uuucucccucaacucaagc

SEQ ID NO: 359893 - RNA, 19 nt, Artificial Sequence
  Description of Artificial Sequence: Synthetic oligonucleotide
  Sense Strand Starting at position 524 of SEQ ID NO: 318102
cucaaauuagccuacggaa

SEQ ID NO: 359894 - RNA, 19 nt, Artificial Sequence
  Description of Artificial Sequence: Synthetic oligonucleotide
  Antisense Strand to SEQ ID NO: 359893
uuccguaggcuaauuugag

SEQ ID NO: 359895 - RNA, 19 nt, Artificial Sequence
  Description of Artificial Sequence: Synthetic oligonucleotide
  Sense Strand Starting at position 524 of SEQ ID NO: 318104
caaauuagccuacggaaga

SEQ ID NO: 359896 - RNA, 19 nt, Artificial Sequence
  Description of Artificial Sequence: Synthetic oligonucleotide
  Antisense Strand to SEQ ID NO: 359895
ucuuccguaggcuaauuug

SEQ ID NO: 359897 - RNA, 19 nt, Artificial Sequence
  Description of Artificial Sequence: Synthetic oligonucleotide
  Sense Strand Starting at position 524 of SEQ ID NO: 318125
auaggaauauaagagacaa

SEQ ID NO: 359898 - RNA, 19 nt, Artificial Sequence
  Description of Artificial Sequence: Synthetic oligonucleotide
  Antisense Strand to SEQ ID NO: 359897
uugucucuuauauuccuau

SEQ ID NO: 359899 - RNA, 19 nt, Artificial Sequence
  Description of Artificial Sequence: Synthetic oligonucleotide
  Sense Strand Starting at position 524 of SEQ ID NO: 318280
caacaaacguguuuggaau

SEQ ID NO: 359900 - RNA, 19 nt, Artificial Sequence
  Description of Artificial Sequence: Synthetic oligonucleotide
  Antisense Strand to SEQ ID NO: 359899
auuccaaacacguuuguug

SEQ ID NO: 359901 - RNA, 19 nt, Artificial Sequence
  Description of Artificial Sequence: Synthetic oligonucleotide
  Sense Strand Starting at position 524 of SEQ ID NO: 318351
ucagucaucuauuucugca

SEQ ID NO: 359902 - RNA, 19 nt, Artificial Sequence
  Description of Artificial Sequence: Synthetic oligonucleotide
  Antisense Strand to SEQ ID NO: 359901
ugcagaaauagaugacuga

SEQ ID NO: 359903 - RNA, 19 nt, Artificial Sequence
  Description of Artificial Sequence: Synthetic oligonucleotide
  Sense Strand Starting at position 524 of SEQ ID NO: 318355
ucaucuauuucugcaguca

SEQ ID NO: 359904 - RNA, 19 nt, Artificial Sequence
  Description of Artificial Sequence: Synthetic oligonucleotide
  Antisense Strand to SEQ ID NO: 359903
ugacugcagaaauagauga

SEQ ID NO: 359905 - RNA, 19 nt, Artificial Sequence
  Description of Artificial Sequence: Synthetic oligonucleotide
  Sense Strand Starting at position 524 of SEQ ID NO: 318443
cuugcagaacuaugucaga

SEQ ID NO: 359906 - RNA, 19 nt, Artificial Sequence
  Description of Artificial Sequence: Synthetic oligonucleotide
  Antisense Strand to SEQ ID NO: 359905
ucugacauaguucugcaag

SEQ ID NO: 359907 - RNA, 19 nt, Artificial Sequence
  Description of Artificial Sequence: Synthetic oligonucleotide
  Sense Strand Starting at position 524 of SEQ ID NO: 318639
agacauaaauuagaagaga

SEQ ID NO: 359908 - RNA, 19 nt, Artificial Sequence
  Description of Artificial Sequence: Synthetic oligonucleotide
  Antisense Strand to SEQ ID NO: 359907
ucucuucuaauuuaugucu

SEQ ID NO: 359909 - RNA, 19 nt, Artificial Sequence
  Description of Artificial Sequence: Synthetic oligonucleotide
  Sense Strand Starting at position 524 of SEQ ID NO: 318652
aagagauauugugcaugua

SEQ ID NO: 359910 - RNA, 19 nt, Artificial Sequence
  Description of Artificial Sequence: Synthetic oligonucleotide
  Antisense Strand to SEQ ID NO: 359909
uacaugcacaauaucucuu

SEQ ID NO: 359911 - RNA, 19 nt, Artificial Sequence
  Description of Artificial Sequence: Synthetic oligonucleotide
  Sense Strand Starting at position 524 of SEQ ID NO: 318653
agagauauugugcauguau

SEQ ID NO: 359912 - RNA, 19 nt, Artificial Sequence
  Description of Artificial Sequence: Synthetic oligonucleotide
  Antisense Strand to SEQ ID NO: 359911
auacaugcacaauaucucu

SEQ ID NO: 359913 - RNA, 19 nt, Artificial Sequence
  Description of Artificial Sequence: Synthetic oligonucleotide
  Sense Strand Starting at position 524 of SEQ ID NO: 318677
cuuccuuuccagugaaagg

SEQ ID NO: 359914 - RNA, 19 nt, Artificial Sequence
  Description of Artificial Sequence: Synthetic oligonucleotide
  Antisense Strand to SEQ ID NO: 359913
ccuuucacuggaaaggaag

SEQ ID NO: 359915 - RNA, 19 nt, Artificial Sequence
  Description of Artificial Sequence: Synthetic oligonucleotide
  Sense Strand Starting at position 524 of SEQ ID NO: 318743
auuguacugcuaugaaaua

SEQ ID NO: 359916 - RNA, 19 nt, Artificial Sequence
  Description of Artificial Sequence: Synthetic oligonucleotide
  Antisense Strand to SEQ ID NO: 359915
uauuucauagcaguacaau

SEQ ID NO: 359917 - RNA, 19 nt, Artificial Sequence
  Description of Artificial Sequence: Synthetic oligonucleotide
  Sense Strand Starting at position 524 of SEQ ID NO: 318871
aaauaaaguguuugggaau

SEQ ID NO: 359918 - RNA, 19 nt, Artificial Sequence
  Description of Artificial Sequence: Synthetic oligonucleotide
  Antisense Strand to SEQ ID NO: 359917
auucccaaacacuuuauuu

SEQ ID NO: 359919 - RNA, 19 nt, Artificial Sequence
  Description of Artificial Sequence: Synthetic oligonucleotide
  Sense Strand Starting at position 524 of SEQ ID NO: 319046
guggguuuaccuuauacac

SEQ ID NO: 359920 - RNA, 19 nt, Artificial Sequence
  Description of Artificial Sequence: Synthetic oligonucleotide
  Antisense Strand to SEQ ID NO: 359919
guguauaagguaaacccac

SEQ ID NO: 359921 - RNA, 19 nt, Artificial Sequence
  Description of Artificial Sequence: Synthetic oligonucleotide
  Sense Strand Starting at position 524 of SEQ ID NO: 319084
uaaugaaguggcuguagau

SEQ ID NO: 359922 - RNA, 19 nt, Artificial Sequence
  Description of Artificial Sequence: Synthetic oligonucleotide
  Antisense Strand to SEQ ID NO: 359921
aucuacagccacuucauua

SEQ ID NO: 359923 - RNA, 19 nt, Artificial Sequence
  Description of Artificial Sequence: Synthetic oligonucleotide
  Sense Strand Starting at position 525 of SEQ ID NO: 315265
guuauuuguuauucuguag

SEQ ID NO: 359924 - RNA, 19 nt, Artificial Sequence
  Description of Artificial Sequence: Synthetic oligonucleotide
  Antisense Strand to SEQ ID NO: 359923
cuacagaauaacaaauaac

SEQ ID NO: 359925 - RNA, 19 nt, Artificial Sequence
  Description of Artificial Sequence: Synthetic oligonucleotide
  Sense Strand Starting at position 525 of SEQ ID NO: 315268
auuuguuauucuguaguca

SEQ ID NO: 359926 - RNA, 19 nt, Artificial Sequence
  Description of Artificial Sequence: Synthetic oligonucleotide
  Antisense Strand to SEQ ID NO: 359925
ugacuacagaauaacaaau

SEQ ID NO: 359927 - RNA, 19 nt, Artificial Sequence
  Description of Artificial Sequence: Synthetic oligonucleotide
  Sense Strand Starting at position 525 of SEQ ID NO: 315269
uuuguuauucuguagucaa

SEQ ID NO: 359928 - RNA, 19 nt, Artificial Sequence
  Description of Artificial Sequence: Synthetic oligonucleotide
  Antisense Strand to SEQ ID NO: 359927
uugacuacagaauaacaaa

SEQ ID NO: 359929 - RNA, 19 nt, Artificial Sequence
  Description of Artificial Sequence: Synthetic oligonucleotide
  Sense Strand Starting at position 525 of SEQ ID NO: 315351
gucuaauuaccacguagaa

SEQ ID NO: 359930 - RNA, 19 nt, Artificial Sequence
  Description of Artificial Sequence: Synthetic oligonucleotide
  Antisense Strand to SEQ ID NO: 359929
uucuacgugguaauuagac

SEQ ID NO: 359931 - RNA, 19 nt, Artificial Sequence
  Description of Artificial Sequence: Synthetic oligonucleotide
  Sense Strand Starting at position 525 of SEQ ID NO: 315450
auuugagaguaacaaauca

SEQ ID NO: 359932 - RNA, 19 nt, Artificial Sequence
  Description of Artificial Sequence: Synthetic oligonucleotide
  Antisense Strand to SEQ ID NO: 359931
ugauuuguuacucucaaau

SEQ ID NO: 359933 - RNA, 19 nt, Artificial Sequence
  Description of Artificial Sequence: Synthetic oligonucleotide
  Sense Strand Starting at position 525 of SEQ ID NO: 315457
aguaacaaaucagaugaau

SEQ ID NO: 359934 - RNA, 19 nt, Artificial Sequence
  Description of Artificial Sequence: Synthetic oligonucleotide
  Antisense Strand to SEQ ID NO: 359933
auucaucugauuuguuacu

SEQ ID NO: 359935 - RNA, 19 nt, Artificial Sequence
  Description of Artificial Sequence: Synthetic oligonucleotide
  Sense Strand Starting at position 525 of SEQ ID NO: 315512
aggguugugagaggguuau

SEQ ID NO: 359936 - RNA, 19 nt, Artificial Sequence
  Description of Artificial Sequence: Synthetic oligonucleotide
  Antisense Strand to SEQ ID NO: 359935
auaacccucucacaacccu

SEQ ID NO: 359937 - RNA, 19 nt, Artificial Sequence
  Description of Artificial Sequence: Synthetic oligonucleotide
  Sense Strand Starting at position 525 of SEQ ID NO: 315513
ggguugugagaggguuaua

SEQ ID NO: 359938 - RNA, 19 nt, Artificial Sequence
  Description of Artificial Sequence: Synthetic oligonucleotide
  Antisense Strand to SEQ ID NO: 359937
uauaacccucucacaaccc

SEQ ID NO: 359939 - RNA, 19 nt, Artificial Sequence
  Description of Artificial Sequence: Synthetic oligonucleotide
  Sense Strand Starting at position 525 of SEQ ID NO: 315516
uugugagaggguuauacga

SEQ ID NO: 359940 - RNA, 19 nt, Artificial Sequence
  Description of Artificial Sequence: Synthetic oligonucleotide
  Antisense Strand to SEQ ID NO: 359939
ucguauaacccucucacaa

SEQ ID NO: 359941 - RNA, 19 nt, Artificial Sequence
  Description of Artificial Sequence: Synthetic oligonucleotide
  Sense Strand Starting at position 525 of SEQ ID NO: 315529
auacgaauugcucaguaca

SEQ ID NO: 359942 - RNA, 19 nt, Artificial Sequence
  Description of Artificial Sequence: Synthetic oligonucleotide
  Antisense Strand to SEQ ID NO: 359941
uguacugagcaauucguau

SEQ ID NO: 359943 - RNA, 19 nt, Artificial Sequence
  Description of Artificial Sequence: Synthetic oligonucleotide
  Sense Strand Starting at position 525 of SEQ ID NO: 315531
acgaauugcucaguacaag

SEQ ID NO: 359944 - RNA, 19 nt, Artificial Sequence
  Description of Artificial Sequence: Synthetic oligonucleotide
  Antisense Strand to SEQ ID NO: 359943
cuuguacugagcaauucgu

SEQ ID NO: 359945 - RNA, 19 nt, Artificial Sequence
  Description of Artificial Sequence: Synthetic oligonucleotide
  Sense Strand Starting at position 525 of SEQ ID NO: 315594
uagagaguccuggguucuu

SEQ ID NO: 359946 - RNA, 19 nt, Artificial Sequence
  Description of Artificial Sequence: Synthetic oligonucleotide
  Antisense Strand to SEQ ID NO: 359945
aagaacccaggacucucua

SEQ ID NO: 359947 - RNA, 19 nt, Artificial Sequence
  Description of Artificial Sequence: Synthetic oligonucleotide
  Sense Strand Starting at position 525 of SEQ ID NO: 315731
cguuguucucuuugaauga

SEQ ID NO: 359948 - RNA, 19 nt, Artificial Sequence
  Description of Artificial Sequence: Synthetic oligonucleotide
  Antisense Strand to SEQ ID NO: 359947
ucauucaaagagaacaacg

SEQ ID NO: 359949 - RNA, 19 nt, Artificial Sequence
  Description of Artificial Sequence: Synthetic oligonucleotide
  Sense Strand Starting at position 525 of SEQ ID NO: 315735
guucucuuugaaugauaua

SEQ ID NO: 359950 - RNA, 19 nt, Artificial Sequence
  Description of Artificial Sequence: Synthetic oligonucleotide
  Antisense Strand to SEQ ID NO: 359949
uauaucauucaaagagaac

SEQ ID NO: 359951 - RNA, 19 nt, Artificial Sequence
  Description of Artificial Sequence: Synthetic oligonucleotide
  Sense Strand Starting at position 525 of SEQ ID NO: 315892
cacaguaguugucccagau

SEQ ID NO: 359952 - RNA, 19 nt, Artificial Sequence
  Description of Artificial Sequence: Synthetic oligonucleotide
  Antisense Strand to SEQ ID NO: 359951
aucugggacaacuacugug

SEQ ID NO: 359953 - RNA, 19 nt, Artificial Sequence
  Description of Artificial Sequence: Synthetic oligonucleotide
  Sense Strand Starting at position 525 of SEQ ID NO: 315907
agauuucugucagaaaguu

SEQ ID NO: 359954 - RNA, 19 nt, Artificial Sequence
  Description of Artificial Sequence: Synthetic oligonucleotide
  Antisense Strand to SEQ ID NO: 359953
aacuuucugacagaaaucu

SEQ ID NO: 359955 - RNA, 19 nt, Artificial Sequence
  Description of Artificial Sequence: Synthetic oligonucleotide
  Sense Strand Starting at position 525 of SEQ ID NO: 315913
cugucagaaaguugaauag

SEQ ID NO: 359956 - RNA, 19 nt, Artificial Sequence
  Description of Artificial Sequence: Synthetic oligonucleotide
  Antisense Strand to SEQ ID NO: 359955
cuauucaacuuucugacag

SEQ ID NO: 359957 - RNA, 19 nt, Artificial Sequence
  Description of Artificial Sequence: Synthetic oligonucleotide
  Sense Strand Starting at position 525 of SEQ ID NO: 316080
gacguaacagguugaauga

SEQ ID NO: 359958 - RNA, 19 nt, Artificial Sequence
  Description of Artificial Sequence: Synthetic oligonucleotide
  Antisense Strand to SEQ ID NO: 359957
ucauucaaccuguuacguc

SEQ ID NO: 359959 - RNA, 19 nt, Artificial Sequence
  Description of Artificial Sequence: Synthetic oligonucleotide
  Sense Strand Starting at position 525 of SEQ ID NO: 316128
gggaauuacuaucuaaagc

SEQ ID NO: 359960 - RNA, 19 nt, Artificial Sequence
  Description of Artificial Sequence: Synthetic oligonucleotide
  Antisense Strand to SEQ ID NO: 359959
gcuuuagauaguaauuccc

SEQ ID NO: 359961 - RNA, 19 nt, Artificial Sequence
  Description of Artificial Sequence: Synthetic oligonucleotide
  Sense Strand Starting at position 525 of SEQ ID NO: 316320
cuccaaauaugugugucau

SEQ ID NO: 359962 - RNA, 19 nt, Artificial Sequence
  Description of Artificial Sequence: Synthetic oligonucleotide
  Antisense Strand to SEQ ID NO: 359961
augacacacauauuuggag

SEQ ID NO: 359963 - RNA, 19 nt, Artificial Sequence
  Description of Artificial Sequence: Synthetic oligonucleotide
  Sense Strand Starting at position 525 of SEQ ID NO: 316321
uccaaauaugugugucaug

SEQ ID NO: 359964 - RNA, 19 nt, Artificial Sequence
  Description of Artificial Sequence: Synthetic oligonucleotide
  Antisense Strand to SEQ ID NO: 359963
caugacacacauauuugga

SEQ ID NO: 359965 - RNA, 19 nt, Artificial Sequence
  Description of Artificial Sequence: Synthetic oligonucleotide
  Sense Strand Starting at position 525 of SEQ ID NO: 316552
uuacgcugugcuuuguaau

SEQ ID NO: 359966 - RNA, 19 nt, Artificial Sequence
  Description of Artificial Sequence: Synthetic oligonucleotide
  Antisense Strand to SEQ ID NO: 359965
auuacaaagcacagcguaa

SEQ ID NO: 359967 - RNA, 19 nt, Artificial Sequence
  Description of Artificial Sequence: Synthetic oligonucleotide
  Sense Strand Starting at position 525 of SEQ ID NO: 316697
acuggaagguccucugcua

SEQ ID NO: 359968 - RNA, 19 nt, Artificial Sequence
  Description of Artificial Sequence: Synthetic oligonucleotide
  Antisense Strand to SEQ ID NO: 359967
uagcagaggaccuuccagu

SEQ ID NO: 359969 - RNA, 19 nt, Artificial Sequence
  Description of Artificial Sequence: Synthetic oligonucleotide
  Sense Strand Starting at position 525 of SEQ ID NO: 317696
uuguucucgccguucagua

SEQ ID NO: 359970 - RNA, 19 nt, Artificial Sequence
  Description of Artificial Sequence: Synthetic oligonucleotide
  Antisense Strand to SEQ ID NO: 359969
uacugaacggcgagaacaa

SEQ ID NO: 359971 - RNA, 19 nt, Artificial Sequence
  Description of Artificial Sequence: Synthetic oligonucleotide
  Sense Strand Starting at position 525 of SEQ ID NO: 317697
uguucucgccguucaguaa

SEQ ID NO: 359972 - RNA, 19 nt, Artificial Sequence
  Description of Artificial Sequence: Synthetic oligonucleotide
  Antisense Strand to SEQ ID NO: 359971
uuacugaacggcgagaaca

SEQ ID NO: 359973 - RNA, 19 nt, Artificial Sequence
  Description of Artificial Sequence: Synthetic oligonucleotide
  Sense Strand Starting at position 525 of SEQ ID NO: 317742
cggaguuuauuucugcaac

SEQ ID NO: 359974 - RNA, 19 nt, Artificial Sequence
  Description of Artificial Sequence: Synthetic oligonucleotide
  Antisense Strand to SEQ ID NO: 359973
guugcagaaauaaacuccg

SEQ ID NO: 359975 - RNA, 19 nt, Artificial Sequence
  Description of Artificial Sequence: Synthetic oligonucleotide
  Sense Strand Starting at position 525 of SEQ ID NO: 317903
gggucaggugucuagacaa

SEQ ID NO: 359976 - RNA, 19 nt, Artificial Sequence
  Description of Artificial Sequence: Synthetic oligonucleotide
  Antisense Strand to SEQ ID NO: 359975
uugucuagacaccugaccc

SEQ ID NO: 359977 - RNA, 19 nt, Artificial Sequence
  Description of Artificial Sequence: Synthetic oligonucleotide
  Sense Strand Starting at position 525 of SEQ ID NO: 318100
caugcaucagaaugacagu

SEQ ID NO: 359978 - RNA, 19 nt, Artificial Sequence
  Description of Artificial Sequence: Synthetic oligonucleotide
  Antisense Strand to SEQ ID NO: 359977
acugucauucugaugcaug

SEQ ID NO: 359979 - RNA, 19 nt, Artificial Sequence
  Description of Artificial Sequence: Synthetic oligonucleotide
  Sense Strand Starting at position 525 of SEQ ID NO: 318152
ggagaucuggccugccaca

SEQ ID NO: 359980 - RNA, 19 nt, Artificial Sequence
  Description of Artificial Sequence: Synthetic oligonucleotide
  Antisense Strand to SEQ ID NO: 359979
uguggcaggccagaucucc

SEQ ID NO: 359981 - RNA, 19 nt, Artificial Sequence
  Description of Artificial Sequence: Synthetic oligonucleotide
  Sense Strand Starting at position 525 of SEQ ID NO: 318275
ggauccuuccuggagcuua

SEQ ID NO: 359982 - RNA, 19 nt, Artificial Sequence
  Description of Artificial Sequence: Synthetic oligonucleotide
  Antisense Strand to SEQ ID NO: 359981
uaagcuccaggaaggaucc

SEQ ID NO: 359983 - RNA, 19 nt, Artificial Sequence
  Description of Artificial Sequence: Synthetic oligonucleotide
  Sense Strand Starting at position 525 of SEQ ID NO: 318285
uggagcuuacacuauagua

SEQ ID NO: 359984 - RNA, 19 nt, Artificial Sequence
  Description of Artificial Sequence: Synthetic oligonucleotide
  Antisense Strand to SEQ ID NO: 359983
uacuauaguguaagcucca

SEQ ID NO: 359985 - RNA, 19 nt, Artificial Sequence
  Description of Artificial Sequence: Synthetic oligonucleotide
  Sense Strand Starting at position 525 of SEQ ID NO: 318362
ggcgaccuuucucucaaga

SEQ ID NO: 359986 - RNA, 19 nt, Artificial Sequence
  Description of Artificial Sequence: Synthetic oligonucleotide
  Antisense Strand to SEQ ID NO: 359985
ucuugagagaaaggucgcc

SEQ ID NO: 359987 - RNA, 19 nt, Artificial Sequence
  Description of Artificial Sequence: Synthetic oligonucleotide
  Sense Strand Starting at position 525 of SEQ ID NO: 318428
cuccuaauguguuugucaa

SEQ ID NO: 359988 - RNA, 19 nt, Artificial Sequence
  Description of Artificial Sequence: Synthetic oligonucleotide
  Antisense Strand to SEQ ID NO: 359987
uugacaaacacauuaggag

SEQ ID NO: 359989 - RNA, 19 nt, Artificial Sequence
  Description of Artificial Sequence: Synthetic oligonucleotide
  Sense Strand Starting at position 525 of SEQ ID NO: 318429
uccuaauguguuugucaag

SEQ ID NO: 359990 - RNA, 19 nt, Artificial Sequence
  Description of Artificial Sequence: Synthetic oligonucleotide
  Antisense Strand to SEQ ID NO: 359989
cuugacaaacacauuagga

SEQ ID NO: 359991 - RNA, 19 nt, Artificial Sequence
  Description of Artificial Sequence: Synthetic oligonucleotide
  Sense Strand Starting at position 525 of SEQ ID NO: 318436
guguuugucaaguaaauaa

SEQ ID NO: 359992 - RNA, 19 nt, Artificial Sequence
  Description of Artificial Sequence: Synthetic oligonucleotide
  Antisense Strand to SEQ ID NO: 359991
uuauuuacuugacaaacac

SEQ ID NO: 359993 - RNA, 19 nt, Artificial Sequence
  Description of Artificial Sequence: Synthetic oligonucleotide
  Sense Strand Starting at position 525 of SEQ ID NO: 318455
ugaguaauaauccggccaa

SEQ ID NO: 359994 - RNA, 19 nt, Artificial Sequence
  Description of Artificial Sequence: Synthetic oligonucleotide
  Antisense Strand to SEQ ID NO: 359993
uuggccggauuauuacuca

SEQ ID NO: 359995 - RNA, 19 nt, Artificial Sequence
  Description of Artificial Sequence: Synthetic oligonucleotide
  Sense Strand Starting at position 525 of SEQ ID NO: 318901
agauguuugaaaggugcua

SEQ ID NO: 359996 - RNA, 19 nt, Artificial Sequence
  Description of Artificial Sequence: Synthetic oligonucleotide
  Antisense Strand to SEQ ID NO: 359995
uagcaccuuucaaacaucu

SEQ ID NO: 359997 - RNA, 19 nt, Artificial Sequence
  Description of Artificial Sequence: Synthetic oligonucleotide
  Sense Strand Starting at position 525 of SEQ ID NO: 318903
auguuugaaaggugcuaga

SEQ ID NO: 359998 - RNA, 19 nt, Artificial Sequence
  Description of Artificial Sequence: Synthetic oligonucleotide
  Antisense Strand to SEQ ID NO: 359997
ucuagcaccuuucaaacau

SEQ ID NO: 359999 - RNA, 19 nt, Artificial Sequence
  Description of Artificial Sequence: Synthetic oligonucleotide
  Sense Strand Starting at position 525 of SEQ ID NO: 318960
agaucuagcuauguuauag

SEQ ID NO: 360000 - RNA, 19 nt, Artificial Sequence
  Description of Artificial Sequence: Synthetic oligonucleotide
  Antisense Strand to SEQ ID NO: 359999
cuauaacauagcuagaucu

SEQ ID NO: 360001 - RNA, 19 nt, Artificial Sequence
  Description of Artificial Sequence: Synthetic oligonucleotide
  Sense Strand Starting at position 525 of SEQ ID NO: 318977
agggauucuuuacagauga

SEQ ID NO: 360002 - RNA, 19 nt, Artificial Sequence
  Description of Artificial Sequence: Synthetic oligonucleotide
  Antisense Strand to SEQ ID NO: 360001
ucaucuguaaagaaucccu

SEQ ID NO: 360003 - RNA, 19 nt, Artificial Sequence
  Description of Artificial Sequence: Synthetic oligonucleotide
  Sense Strand Starting at position 526 of SEQ ID NO: 315258
gucuaauuaccacguagaa

SEQ ID NO: 360004 - RNA, 19 nt, Artificial Sequence
  Description of Artificial Sequence: Synthetic oligonucleotide
  Antisense Strand to SEQ ID NO: 360003
uucuacgugguaauuagac

SEQ ID NO: 360005 - RNA, 19 nt, Artificial Sequence
  Description of Artificial Sequence: Synthetic oligonucleotide
  Sense Strand Starting at position 526 of SEQ ID NO: 315357
auuugagaguaacaaauca

SEQ ID NO: 360006 - RNA, 19 nt, Artificial Sequence
  Description of Artificial Sequence: Synthetic oligonucleotide
  Antisense Strand to SEQ ID NO: 360005
ugauuuguuacucucaaau

SEQ ID NO: 360007 - RNA, 19 nt, Artificial Sequence
  Description of Artificial Sequence: Synthetic oligonucleotide
  Sense Strand Starting at position 526 of SEQ ID NO: 315364
aguaacaaaucagaugaau

SEQ ID NO: 360008 - RNA, 19 nt, Artificial Sequence
  Description of Artificial Sequence: Synthetic oligonucleotide
  Antisense Strand to SEQ ID NO: 360007
auucaucugauuuguuacu

SEQ ID NO: 360009 - RNA, 19 nt, Artificial Sequence
  Description of Artificial Sequence: Synthetic oligonucleotide
  Sense Strand Starting at position 526 of SEQ ID NO: 315419
aggguugugagaggguuau

SEQ ID NO: 360010 - RNA, 19 nt, Artificial Sequence
  Description of Artificial Sequence: Synthetic oligonucleotide
  Antisense Strand to SEQ ID NO: 360009
auaacccucucacaacccu

SEQ ID NO: 360011 - RNA, 19 nt, Artificial Sequence
  Description of Artificial Sequence: Synthetic oligonucleotide
  Sense Strand Starting at position 526 of SEQ ID NO: 315420
ggguugugagaggguuaua

SEQ ID NO: 360012 - RNA, 19 nt, Artificial Sequence
  Description of Artificial Sequence: Synthetic oligonucleotide
  Antisense Strand to SEQ ID NO: 360011
uauaacccucucacaaccc

SEQ ID NO: 360013 - RNA, 19 nt, Artificial Sequence
  Description of Artificial Sequence: Synthetic oligonucleotide
  Sense Strand Starting at position 526 of SEQ ID NO: 315423
uugugagaggguuauacga

SEQ ID NO: 360014 - RNA, 19 nt, Artificial Sequence
  Description of Artificial Sequence: Synthetic oligonucleotide
  Antisense Strand to SEQ ID NO: 360013
ucguauaacccucucacaa

SEQ ID NO: 360015 - RNA, 19 nt, Artificial Sequence
  Description of Artificial Sequence: Synthetic oligonucleotide
  Sense Strand Starting at position 526 of SEQ ID NO: 315436
auacgaauugcucaguaca

SEQ ID NO: 360016 - RNA, 19 nt, Artificial Sequence
  Description of Artificial Sequence: Synthetic oligonucleotide
  Antisense Strand to SEQ ID NO: 360015
uguacugagcaauucguau

SEQ ID NO: 360017 - RNA, 19 nt, Artificial Sequence
  Description of Artificial Sequence: Synthetic oligonucleotide
  Sense Strand Starting at position 526 of SEQ ID NO: 315438
acgaauugcucaguacaag

SEQ ID NO: 360018 - RNA, 19 nt, Artificial Sequence
  Description of Artificial Sequence: Synthetic oligonucleotide
  Antisense Strand to SEQ ID NO: 360017
cuuguacugagcaauucgu

SEQ ID NO: 360019 - RNA, 19 nt, Artificial Sequence
  Description of Artificial Sequence: Synthetic oligonucleotide
  Sense Strand Starting at position 526 of SEQ ID NO: 315501
uagagaguccuggguucuu

SEQ ID NO: 360020 - RNA, 19 nt, Artificial Sequence
  Description of Artificial Sequence: Synthetic oligonucleotide
  Antisense Strand to SEQ ID NO: 360019
aagaacccaggacucucua

SEQ ID NO: 360021 - RNA, 19 nt, Artificial Sequence
  Description of Artificial Sequence: Synthetic oligonucleotide
  Sense Strand Starting at position 526 of SEQ ID NO: 315638
cguuguucucuuugaauga

SEQ ID NO: 360022 - RNA, 19 nt, Artificial Sequence
  Description of Artificial Sequence: Synthetic oligonucleotide
  Antisense Strand to SEQ ID NO: 360021
ucauucaaagagaacaacg

SEQ ID NO: 360023 - RNA, 19 nt, Artificial Sequence
  Description of Artificial Sequence: Synthetic oligonucleotide
  Sense Strand Starting at position 526 of SEQ ID NO: 315642
guucucuuugaaugauaua

SEQ ID NO: 360024 - RNA, 19 nt, Artificial Sequence
  Description of Artificial Sequence: Synthetic oligonucleotide
  Antisense Strand to SEQ ID NO: 360023
uauaucauucaaagagaac

SEQ ID NO: 360025 - RNA, 19 nt, Artificial Sequence
  Description of Artificial Sequence: Synthetic oligonucleotide
  Sense Strand Starting at position 526 of SEQ ID NO: 315799
cacaguaguugucccagau

SEQ ID NO: 360026 - RNA, 19 nt, Artificial Sequence
  Description of Artificial Sequence: Synthetic oligonucleotide
  Antisense Strand to SEQ ID NO: 360025
aucugggacaacuacugug

SEQ ID NO: 360027 - RNA, 19 nt, Artificial Sequence
  Description of Artificial Sequence: Synthetic oligonucleotide
  Sense Strand Starting at position 526 of SEQ ID NO: 315814
agauuucugucagaaaguu

SEQ ID NO: 360028 - RNA, 19 nt, Artificial Sequence
  Description of Artificial Sequence: Synthetic oligonucleotide
  Antisense Strand to SEQ ID NO: 360027
aacuuucugacagaaaucu

SEQ ID NO: 360029 - RNA, 19 nt, Artificial Sequence
  Description of Artificial Sequence: Synthetic oligonucleotide
  Sense Strand Starting at position 526 of SEQ ID NO: 315820
cugucagaaaguugaauag

SEQ ID NO: 360030 - RNA, 19 nt, Artificial Sequence
  Description of Artificial Sequence: Synthetic oligonucleotide
  Antisense Strand to SEQ ID NO: 360029
cuauucaacuuucugacag

SEQ ID NO: 360031 - RNA, 19 nt, Artificial Sequence
  Description of Artificial Sequence: Synthetic oligonucleotide
  Sense Strand Starting at position 526 of SEQ ID NO: 315987
gacguaacagguugaauga

SEQ ID NO: 360032 - RNA, 19 nt, Artificial Sequence
  Description of Artificial Sequence: Synthetic oligonucleotide
  Antisense Strand to SEQ ID NO: 360031
ucauucaaccuguuacguc

SEQ ID NO: 360033 - RNA, 19 nt, Artificial Sequence
  Description of Artificial Sequence: Synthetic oligonucleotide
  Sense Strand Starting at position 526 of SEQ ID NO: 316035
gggaauuacuaucuaaagc

SEQ ID NO: 360034 - RNA, 19 nt, Artificial Sequence
  Description of Artificial Sequence: Synthetic oligonucleotide
  Antisense Strand to SEQ ID NO: 360033
gcuuuagauaguaauuccc

SEQ ID NO: 360035 - RNA, 19 nt, Artificial Sequence
  Description of Artificial Sequence: Synthetic oligonucleotide
  Sense Strand Starting at position 526 of SEQ ID NO: 316227
cuccaaauaugugugucau

SEQ ID NO: 360036 - RNA, 19 nt, Artificial Sequence
  Description of Artificial Sequence: Synthetic oligonucleotide
  Antisense Strand to SEQ ID NO: 360035
augacacacauauuuggag

SEQ ID NO: 360037 - RNA, 19 nt, Artificial Sequence
  Description of Artificial Sequence: Synthetic oligonucleotide
  Sense Strand Starting at position 526 of SEQ ID NO: 316228
uccaaauaugugugucaug

SEQ ID NO: 360038 - RNA, 19 nt, Artificial Sequence
  Description of Artificial Sequence: Synthetic oligonucleotide
  Antisense Strand to SEQ ID NO: 360037
caugacacacauauuugga

SEQ ID NO: 360039 - RNA, 19 nt, Artificial Sequence
  Description of Artificial Sequence: Synthetic oligonucleotide
  Sense Strand Starting at position 526 of SEQ ID NO: 316459
uuacgcugugcuuuguaau

SEQ ID NO: 360040 - RNA, 19 nt, Artificial Sequence
  Description of Artificial Sequence: Synthetic oligonucleotide
  Antisense Strand to SEQ ID NO: 360039
auuacaaagcacagcguaa

SEQ ID NO: 360041 - RNA, 19 nt, Artificial Sequence
  Description of Artificial Sequence: Synthetic oligonucleotide
  Sense Strand Starting at position 526 of SEQ ID NO: 316604
acuggaagguccucugcua

SEQ ID NO: 360042 - RNA, 19 nt, Artificial Sequence
  Description of Artificial Sequence: Synthetic oligonucleotide
  Antisense Strand to SEQ ID NO: 360041
uagcagaggaccuuccagu

SEQ ID NO: 360043 - RNA, 19 nt, Artificial Sequence
  Description of Artificial Sequence: Synthetic oligonucleotide
  Sense Strand Starting at position 526 of SEQ ID NO: 317603
uuguucucgccguucagua

SEQ ID NO: 360044 - RNA, 19 nt, Artificial Sequence
  Description of Artificial Sequence: Synthetic oligonucleotide
  Antisense Strand to SEQ ID NO: 360043
uacugaacggcgagaacaa

SEQ ID NO: 360045 - RNA, 19 nt, Artificial Sequence
  Description of Artificial Sequence: Synthetic oligonucleotide
  Sense Strand Starting at position 526 of SEQ ID NO: 317604
uguucucgccguucaguaa

SEQ ID NO: 360046 - RNA, 19 nt, Artificial Sequence
  Description of Artificial Sequence: Synthetic oligonucleotide
  Antisense Strand to SEQ ID NO: 360045
uuacugaacggcgagaaca

SEQ ID NO: 360047 - RNA, 19 nt, Artificial Sequence
  Description of Artificial Sequence: Synthetic oligonucleotide
  Sense Strand Starting at position 526 of SEQ ID NO: 317649
cggaguuuauuucugcaac

SEQ ID NO: 360048 - RNA, 19 nt, Artificial Sequence
  Description of Artificial Sequence: Synthetic oligonucleotide
  Antisense Strand to SEQ ID NO: 360047
guugcagaaauaaacuccg

SEQ ID NO: 360049 - RNA, 19 nt, Artificial Sequence
  Description of Artificial Sequence: Synthetic oligonucleotide
  Sense Strand Starting at position 526 of SEQ ID NO: 317810
gggucaggugucuagacaa

SEQ ID NO: 360050 - RNA, 19 nt, Artificial Sequence
  Description of Artificial Sequence: Synthetic oligonucleotide
  Antisense Strand to SEQ ID NO: 360049
uugucuagacaccugaccc

SEQ ID NO: 360051 - RNA, 19 nt, Artificial Sequence
  Description of Artificial Sequence: Synthetic oligonucleotide
  Sense Strand Starting at position 526 of SEQ ID NO: 318007
caugcaucagaaugacagu

SEQ ID NO: 360052 - RNA, 19 nt, Artificial Sequence
  Description of Artificial Sequence: Synthetic oligonucleotide
  Antisense Strand to SEQ ID NO: 360051
acugucauucugaugcaug

SEQ ID NO: 360053 - RNA, 19 nt, Artificial Sequence
  Description of Artificial Sequence: Synthetic oligonucleotide
  Sense Strand Starting at position 526 of SEQ ID NO: 318059
ggagaucuggccugccaca

SEQ ID NO: 360054 - RNA, 19 nt, Artificial Sequence
  Description of Artificial Sequence: Synthetic oligonucleotide
  Antisense Strand to SEQ ID NO: 360053
uguggcaggccagaucucc

SEQ ID NO: 360055 - RNA, 19 nt, Artificial Sequence
  Description of Artificial Sequence: Synthetic oligonucleotide
  Sense Strand Starting at position 526 of SEQ ID NO: 318182
ggauccuuccuggagcuua

SEQ ID NO: 360056 - RNA, 19 nt, Artificial Sequence
  Description of Artificial Sequence: Synthetic oligonucleotide
  Antisense Strand to SEQ ID NO: 360055
uaagcuccaggaaggaucc

SEQ ID NO: 360057 - RNA, 19 nt, Artificial Sequence
  Description of Artificial Sequence: Synthetic oligonucleotide
  Sense Strand Starting at position 526 of SEQ ID NO: 318192
uggagcuuacacuauagua

SEQ ID NO: 360058 - RNA, 19 nt, Artificial Sequence
  Description of Artificial Sequence: Synthetic oligonucleotide
  Antisense Strand to SEQ ID NO: 360057
uacuauaguguaagcucca

SEQ ID NO: 360059 - RNA, 19 nt, Artificial Sequence
  Description of Artificial Sequence: Synthetic oligonucleotide
  Sense Strand Starting at position 526 of SEQ ID NO: 318269
ggcgaccuuucucucaaga

SEQ ID NO: 360060 - RNA, 19 nt, Artificial Sequence
  Description of Artificial Sequence: Synthetic oligonucleotide
  Antisense Strand to SEQ ID NO: 360059
ucuugagagaaaggucgcc

SEQ ID NO: 360061 - RNA, 19 nt, Artificial Sequence
  Description of Artificial Sequence: Synthetic oligonucleotide
  Sense Strand Starting at position 526 of SEQ ID NO: 318335
cuccuaauguguuugucaa

SEQ ID NO: 360062 - RNA, 19 nt, Artificial Sequence
  Description of Artificial Sequence: Synthetic oligonucleotide
  Antisense Strand to SEQ ID NO: 360061
uugacaaacacauuaggag

SEQ ID NO: 360063 - RNA, 19 nt, Artificial Sequence
  Description of Artificial Sequence: Synthetic oligonucleotide
  Sense Strand Starting at position 526 of SEQ ID NO: 318336
uccuaauguguuugucaag

SEQ ID NO: 360064 - RNA, 19 nt, Artificial Sequence
  Description of Artificial Sequence: Synthetic oligonucleotide
  Antisense Strand to SEQ ID NO: 360063
cuugacaaacacauuagga

SEQ ID NO: 360065 - RNA, 19 nt, Artificial Sequence
  Description of Artificial Sequence: Synthetic oligonucleotide
  Sense Strand Starting at position 526 of SEQ ID NO: 318343
guguuugucaaguaaauaa

SEQ ID NO: 360066 - RNA, 19 nt, Artificial Sequence
  Description of Artificial Sequence: Synthetic oligonucleotide
  Antisense Strand to SEQ ID NO: 360065
uuauuuacuugacaaacac

SEQ ID NO: 360067 - RNA, 19 nt, Artificial Sequence
  Description of Artificial Sequence: Synthetic oligonucleotide
  Sense Strand Starting at position 526 of SEQ ID NO: 318362
ugaguaauaauccggccaa

SEQ ID NO: 360068 - RNA, 19 nt, Artificial Sequence
  Description of Artificial Sequence: Synthetic oligonucleotide
  Antisense Strand to SEQ ID NO: 360067
uuggccggauuauuacuca

SEQ ID NO: 360069 - RNA, 19 nt, Artificial Sequence
  Description of Artificial Sequence: Synthetic oligonucleotide
  Sense Strand Starting at position 526 of SEQ ID NO: 318808
agauguuugaaaggugcua

SEQ ID NO: 360070 - RNA, 19 nt, Artificial Sequence
  Description of Artificial Sequence: Synthetic oligonucleotide
  Antisense Strand to SEQ ID NO: 360069
uagcaccuuucaaacaucu

SEQ ID NO: 360071 - RNA, 19 nt, Artificial Sequence
  Description of Artificial Sequence: Synthetic oligonucleotide
  Sense Strand Starting at position 526 of SEQ ID NO: 318810
auguuugaaaggugcuaga

SEQ ID NO: 360072 - RNA, 19 nt, Artificial Sequence
  Description of Artificial Sequence: Synthetic oligonucleotide
  Antisense Strand to SEQ ID NO: 360071
ucuagcaccuuucaaacau

SEQ ID NO: 360073 - RNA, 19 nt, Artificial Sequence
  Description of Artificial Sequence: Synthetic oligonucleotide
  Sense Strand Starting at position 526 of SEQ ID NO: 318867
agaucuagcuauguuauag

SEQ ID NO: 360074 - RNA, 19 nt, Artificial Sequence
  Description of Artificial Sequence: Synthetic oligonucleotide
  Antisense Strand to SEQ ID NO: 360073
cuauaacauagcuagaucu

SEQ ID NO: 360075 - RNA, 19 nt, Artificial Sequence
  Description of Artificial Sequence: Synthetic oligonucleotide
  Sense Strand Starting at position 526 of SEQ ID NO: 318884
agggauucuuuacagauga

SEQ ID NO: 360076 - RNA, 19 nt, Artificial Sequence
  Description of Artificial Sequence: Synthetic oligonucleotide
  Antisense Strand to SEQ ID NO: 360075
ucaucuguaaagaaucccu

SEQ ID NO: 360077 - RNA, 19 nt, Artificial Sequence
  Description of Artificial Sequence: Synthetic oligonucleotide
  Sense Strand Starting at position 526 of SEQ ID NO: 319186
agaaaucugugauuaaguu

SEQ ID NO: 360078 - RNA, 19 nt, Artificial Sequence
  Description of Artificial Sequence: Synthetic oligonucleotide
  Antisense Strand to SEQ ID NO: 360077
aacuuaaucacagauuucu

SEQ ID NO: 360079 - RNA, 19 nt, Artificial Sequence
  Description of Artificial Sequence: Synthetic oligonucleotide
  Sense Strand Starting at position 526 of SEQ ID NO: 319192
cugugauuaaguuagaguu

SEQ ID NO: 360080 - RNA, 19 nt, Artificial Sequence
  Description of Artificial Sequence: Synthetic oligonucleotide
  Antisense Strand to SEQ ID NO: 360079
aacucuaacuuaaucacag

SEQ ID NO: 360081 - RNA, 19 nt, Artificial Sequence
  Description of Artificial Sequence: Synthetic oligonucleotide
  Sense Strand Starting at position 526 of SEQ ID NO: 319200
aaguuagaguuucuugaua

SEQ ID NO: 360082 - RNA, 19 nt, Artificial Sequence
  Description of Artificial Sequence: Synthetic oligonucleotide
  Antisense Strand to SEQ ID NO: 360081
uaucaagaaacucuaacuu

SEQ ID NO: 360083 - RNA, 19 nt, Artificial Sequence
  Description of Artificial Sequence: Synthetic oligonucleotide
  Sense Strand Starting at position 527 of SEQ ID NO: 315309
cuagguuaacgccagaaau

SEQ ID NO: 360084 - RNA, 19 nt, Artificial Sequence
  Description of Artificial Sequence: Synthetic oligonucleotide
  Antisense Strand to SEQ ID NO: 360083
auuucuggcguuaaccuag

SEQ ID NO: 360085 - RNA, 19 nt, Artificial Sequence
  Description of Artificial Sequence: Synthetic oligonucleotide
  Sense Strand Starting at position 527 of SEQ ID NO: 315311
agguuaacgccagaaauau

SEQ ID NO: 360086 - RNA, 19 nt, Artificial Sequence
  Description of Artificial Sequence: Synthetic oligonucleotide
  Antisense Strand to SEQ ID NO: 360085
auauuucuggcguuaaccu

SEQ ID NO: 360087 - RNA, 19 nt, Artificial Sequence
  Description of Artificial Sequence: Synthetic oligonucleotide
  Sense Strand Starting at position 527 of SEQ ID NO: 315442
guuagaaagucaucuggag

SEQ ID NO: 360088 - RNA, 19 nt, Artificial Sequence
  Description of Artificial Sequence: Synthetic oligonucleotide
  Antisense Strand to SEQ ID NO: 360087
cuccagaugacuuucuaac

SEQ ID NO: 360089 - RNA, 19 nt, Artificial Sequence
  Description of Artificial Sequence: Synthetic oligonucleotide
  Sense Strand Starting at position 527 of SEQ ID NO: 315488
gaaagaaaguuggauauga

SEQ ID NO: 360090 - RNA, 19 nt, Artificial Sequence
  Description of Artificial Sequence: Synthetic oligonucleotide
  Antisense Strand to SEQ ID NO: 360089
ucauauccaacuuucuuuc

SEQ ID NO: 360091 - RNA, 19 nt, Artificial Sequence
  Description of Artificial Sequence: Synthetic oligonucleotide
  Sense Strand Starting at position 527 of SEQ ID NO: 315499
ggauaugagaggcguggaa

SEQ ID NO: 360092 - RNA, 19 nt, Artificial Sequence
  Description of Artificial Sequence: Synthetic oligonucleotide
  Antisense Strand to SEQ ID NO: 360091
uuccacgccucucauaucc

SEQ ID NO: 360093 - RNA, 19 nt, Artificial Sequence
  Description of Artificial Sequence: Synthetic oligonucleotide
  Sense Strand Starting at position 527 of SEQ ID NO: 315544
gucugcaaguacuuccaaa

SEQ ID NO: 360094 - RNA, 19 nt, Artificial Sequence
  Description of Artificial Sequence: Synthetic oligonucleotide
  Antisense Strand to SEQ ID NO: 360093
uuuggaaguacuugcagac

SEQ ID NO: 360095 - RNA, 19 nt, Artificial Sequence
  Description of Artificial Sequence: Synthetic oligonucleotide
  Sense Strand Starting at position 527 of SEQ ID NO: 315682
cacgguaaagauuaauagu

SEQ ID NO: 360096 - RNA, 19 nt, Artificial Sequence
  Description of Artificial Sequence: Synthetic oligonucleotide
  Antisense Strand to SEQ ID NO: 360095
acuauuaaucuuuaccgug

SEQ ID NO: 360097 - RNA, 19 nt, Artificial Sequence
  Description of Artificial Sequence: Synthetic oligonucleotide
  Sense Strand Starting at position 527 of SEQ ID NO: 315698
aguuacucucguuaaagca

SEQ ID NO: 360098 - RNA, 19 nt, Artificial Sequence
  Description of Artificial Sequence: Synthetic oligonucleotide
  Antisense Strand to SEQ ID NO: 360097
ugcuuuaacgagaguaacu

SEQ ID NO: 360099 - RNA, 19 nt, Artificial Sequence
  Description of Artificial Sequence: Synthetic oligonucleotide
  Sense Strand Starting at position 527 of SEQ ID NO: 315861
uguauaugaugucuguaac

SEQ ID NO: 360100 - RNA, 19 nt, Artificial Sequence
  Description of Artificial Sequence: Synthetic oligonucleotide
  Antisense Strand to SEQ ID NO: 360099
guuacagacaucauauaca

SEQ ID NO: 360101 - RNA, 19 nt, Artificial Sequence
  Description of Artificial Sequence: Synthetic oligonucleotide
  Sense Strand Starting at position 527 of SEQ ID NO: 315862
guauaugaugucuguaacu

SEQ ID NO: 360102 - RNA, 19 nt, Artificial Sequence
  Description of Artificial Sequence: Synthetic oligonucleotide
  Antisense Strand to SEQ ID NO: 360101
aguuacagacaucauauac

SEQ ID NO: 360103 - RNA, 19 nt, Artificial Sequence
  Description of Artificial Sequence: Synthetic oligonucleotide
  Sense Strand Starting at position 527 of SEQ ID NO: 315864
auaugaugucuguaacuac

SEQ ID NO: 360104 - RNA, 19 nt, Artificial Sequence
  Description of Artificial Sequence: Synthetic oligonucleotide
  Antisense Strand to SEQ ID NO: 360103
guaguuacagacaucauau

SEQ ID NO: 360105 - RNA, 19 nt, Artificial Sequence
  Description of Artificial Sequence: Synthetic oligonucleotide
  Sense Strand Starting at position 527 of SEQ ID NO: 315867
ugaugucuguaacuacaau

SEQ ID NO: 360106 - RNA, 19 nt, Artificial Sequence
  Description of Artificial Sequence: Synthetic oligonucleotide
  Antisense Strand to SEQ ID NO: 360105
auuguaguuacagacauca

SEQ ID NO: 360107 - RNA, 19 nt, Artificial Sequence
  Description of Artificial Sequence: Synthetic oligonucleotide
  Sense Strand Starting at position 527 of SEQ ID NO: 316258
uguaccagaaguuguuuau

SEQ ID NO: 360108 - RNA, 19 nt, Artificial Sequence
  Description of Artificial Sequence: Synthetic oligonucleotide
  Antisense Strand to SEQ ID NO: 360107
auaaacaacuucugguaca

SEQ ID NO: 360109 - RNA, 19 nt, Artificial Sequence
  Description of Artificial Sequence: Synthetic oligonucleotide
  Sense Strand Starting at position 527 of SEQ ID NO: 316261
accagaaguuguuuauaau

SEQ ID NO: 360110 - RNA, 19 nt, Artificial Sequence
  Description of Artificial Sequence: Synthetic oligonucleotide
  Antisense Strand to SEQ ID NO: 360109
auuauaaacaacuucuggu

SEQ ID NO: 360111 - RNA, 19 nt, Artificial Sequence
  Description of Artificial Sequence: Synthetic oligonucleotide
  Sense Strand Starting at position 527 of SEQ ID NO: 316262
ccagaaguuguuuauaauu

SEQ ID NO: 360112 - RNA, 19 nt, Artificial Sequence
  Description of Artificial Sequence: Synthetic oligonucleotide
  Antisense Strand to SEQ ID NO: 360111
aauuauaaacaacuucugg

SEQ ID NO: 360113 - RNA, 19 nt, Artificial Sequence
  Description of Artificial Sequence: Synthetic oligonucleotide
  Sense Strand Starting at position 527 of SEQ ID NO: 316488
gggagucuacuggagcauu

SEQ ID NO: 360114 - RNA, 19 nt, Artificial Sequence
  Description of Artificial Sequence: Synthetic oligonucleotide
  Antisense Strand to SEQ ID NO: 360113
aaugcuccaguagacuccc

SEQ ID NO: 360115 - RNA, 19 nt, Artificial Sequence
  Description of Artificial Sequence: Synthetic oligonucleotide
  Sense Strand Starting at position 527 of SEQ ID NO: 316608
cacgucugugcauacagau

SEQ ID NO: 360116 - RNA, 19 nt, Artificial Sequence
  Description of Artificial Sequence: Synthetic oligonucleotide
  Antisense Strand to SEQ ID NO: 360115
aucuguaugcacagacgug

SEQ ID NO: 360117 - RNA, 19 nt, Artificial Sequence
  Description of Artificial Sequence: Synthetic oligonucleotide
  Sense Strand Starting at position 527 of SEQ ID NO: 316621
acagauaagcugugagcca

SEQ ID NO: 360118 - RNA, 19 nt, Artificial Sequence
  Description of Artificial Sequence: Synthetic oligonucleotide
  Antisense Strand to SEQ ID NO: 360117
uggcucacagcuuaucugu

SEQ ID NO: 360119 - RNA, 19 nt, Artificial Sequence
  Description of Artificial Sequence: Synthetic oligonucleotide
  Sense Strand Starting at position 527 of SEQ ID NO: 316698
uggguaucuaauggauguu

SEQ ID NO: 360120 - RNA, 19 nt, Artificial Sequence
  Description of Artificial Sequence: Synthetic oligonucleotide
  Antisense Strand to SEQ ID NO: 360119
aacauccauuagauaccca

SEQ ID NO: 360121 - RNA, 19 nt, Artificial Sequence
  Description of Artificial Sequence: Synthetic oligonucleotide
  Sense Strand Starting at position 527 of SEQ ID NO: 316699
ggguaucuaauggauguuu

SEQ ID NO: 360122 - RNA, 19 nt, Artificial Sequence
  Description of Artificial Sequence: Synthetic oligonucleotide
  Antisense Strand to SEQ ID NO: 360121
aaacauccauuagauaccc

SEQ ID NO: 360123 - RNA, 19 nt, Artificial Sequence
  Description of Artificial Sequence: Synthetic oligonucleotide
  Sense Strand Starting at position 527 of SEQ ID NO: 316892
gcacaaaucgcccagggaa

SEQ ID NO: 360124 - RNA, 19 nt, Artificial Sequence
  Description of Artificial Sequence: Synthetic oligonucleotide
  Antisense Strand to SEQ ID NO: 360123
uucccugggcgauuugugc

SEQ ID NO: 360125 - RNA, 19 nt, Artificial Sequence
  Description of Artificial Sequence: Synthetic oligonucleotide
  Sense Strand Starting at position 527 of SEQ ID NO: 317194
cgucuccuucugcaacaau

SEQ ID NO: 360126 - RNA, 19 nt, Artificial Sequence
  Description of Artificial Sequence: Synthetic oligonucleotide
  Antisense Strand to SEQ ID NO: 360125
auuguugcagaaggagacg

SEQ ID NO: 360127 - RNA, 19 nt, Artificial Sequence
  Description of Artificial Sequence: Synthetic oligonucleotide
  Sense Strand Starting at position 527 of SEQ ID NO: 317571
ucuaauguggcacauaaua

SEQ ID NO: 360128 - RNA, 19 nt, Artificial Sequence
  Description of Artificial Sequence: Synthetic oligonucleotide
  Antisense Strand to SEQ ID NO: 360127
uauuaugugccacauuaga

SEQ ID NO: 360129 - RNA, 19 nt, Artificial Sequence
  Description of Artificial Sequence: Synthetic oligonucleotide
  Sense Strand Starting at position 527 of SEQ ID NO: 317602
aaaggagcuccacgguuua

SEQ ID NO: 360130 - RNA, 19 nt, Artificial Sequence
  Description of Artificial Sequence: Synthetic oligonucleotide
  Antisense Strand to SEQ ID NO: 360129
uaaaccguggagcuccuuu

SEQ ID NO: 360131 - RNA, 19 nt, Artificial Sequence
  Description of Artificial Sequence: Synthetic oligonucleotide
  Sense Strand Starting at position 527 of SEQ ID NO: 317803
ccuuucuuggugcaggaaa

SEQ ID NO: 360132 - RNA, 19 nt, Artificial Sequence
  Description of Artificial Sequence: Synthetic oligonucleotide
  Antisense Strand to SEQ ID NO: 360131
uuuccugcaccaagaaagg

SEQ ID NO: 360133 - RNA, 19 nt, Artificial Sequence
  Description of Artificial Sequence: Synthetic oligonucleotide
  Sense Strand Starting at position 527 of SEQ ID NO: 317849
gggcguuugccugaaaugg

SEQ ID NO: 360134 - RNA, 19 nt, Artificial Sequence
  Description of Artificial Sequence: Synthetic oligonucleotide
  Antisense Strand to SEQ ID NO: 360133
ccauuucaggcaaacgccc

SEQ ID NO: 360135 - RNA, 19 nt, Artificial Sequence
  Description of Artificial Sequence: Synthetic oligonucleotide
  Sense Strand Starting at position 527 of SEQ ID NO: 317850
ggcguuugccugaaauggu

SEQ ID NO: 360136 - RNA, 19 nt, Artificial Sequence
  Description of Artificial Sequence: Synthetic oligonucleotide
  Antisense Strand to SEQ ID NO: 360135
accauuucaggcaaacgcc

SEQ ID NO: 360137 - RNA, 19 nt, Artificial Sequence
  Description of Artificial Sequence: Synthetic oligonucleotide
  Sense Strand Starting at position 527 of SEQ ID NO: 318065
ggucgcuuugcguugagga

SEQ ID NO: 360138 - RNA, 19 nt, Artificial Sequence
  Description of Artificial Sequence: Synthetic oligonucleotide
  Antisense Strand to SEQ ID NO: 360137
uccucaacgcaaagcgacc

SEQ ID NO: 360139 - RNA, 19 nt, Artificial Sequence
  Description of Artificial Sequence: Synthetic oligonucleotide
  Sense Strand Starting at position 527 of SEQ ID NO: 318163
auguaacugccagauaaua

SEQ ID NO: 360140 - RNA, 19 nt, Artificial Sequence
  Description of Artificial Sequence: Synthetic oligonucleotide
  Antisense Strand to SEQ ID NO: 360139
uauuaucuggcaguuacau

SEQ ID NO: 360141 - RNA, 19 nt, Artificial Sequence
  Description of Artificial Sequence: Synthetic oligonucleotide
  Sense Strand Starting at position 527 of SEQ ID NO: 318193
cagagagguccauguuaca

SEQ ID NO: 360142 - RNA, 19 nt, Artificial Sequence
  Description of Artificial Sequence: Synthetic oligonucleotide
  Antisense Strand to SEQ ID NO: 360141
uguaacauggaccucucug

SEQ ID NO: 360143 - RNA, 19 nt, Artificial Sequence
  Description of Artificial Sequence: Synthetic oligonucleotide
  Sense Strand Starting at position 527 of SEQ ID NO: 318224
caauaauauuaggugguca

SEQ ID NO: 360144 - RNA, 19 nt, Artificial Sequence
  Description of Artificial Sequence: Synthetic oligonucleotide
  Antisense Strand to SEQ ID NO: 360143
ugaccaccuaauauuauug

SEQ ID NO: 360145 - RNA, 19 nt, Artificial Sequence
  Description of Artificial Sequence: Synthetic oligonucleotide
  Sense Strand Starting at position 527 of SEQ ID NO: 318228
aauauuagguggucagcuu

SEQ ID NO: 360146 - RNA, 19 nt, Artificial Sequence
  Description of Artificial Sequence: Synthetic oligonucleotide
  Antisense Strand to SEQ ID NO: 360145
aagcugaccaccuaauauu

SEQ ID NO: 360147 - RNA, 19 nt, Artificial Sequence
  Description of Artificial Sequence: Synthetic oligonucleotide
  Sense Strand Starting at position 527 of SEQ ID NO: 318604
guaaauaaacuguagugau

SEQ ID NO: 360148 - RNA, 19 nt, Artificial Sequence
  Description of Artificial Sequence: Synthetic oligonucleotide
  Antisense Strand to SEQ ID NO: 360147
aucacuacaguuuauuuac

SEQ ID NO: 360149 - RNA, 19 nt, Artificial Sequence
  Description of Artificial Sequence: Synthetic oligonucleotide
  Sense Strand Starting at position 527 of SEQ ID NO: 318614
uguagugaucucuaaucau

SEQ ID NO: 360150 - RNA, 19 nt, Artificial Sequence
  Description of Artificial Sequence: Synthetic oligonucleotide
  Antisense Strand to SEQ ID NO: 360149
augauuagagaucacuaca

SEQ ID NO: 360151 - RNA, 19 nt, Artificial Sequence
  Description of Artificial Sequence: Synthetic oligonucleotide
  Sense Strand Starting at position 527 of SEQ ID NO: 318646
gcaauagaauuugaaacaa

SEQ ID NO: 360152 - RNA, 19 nt, Artificial Sequence
  Description of Artificial Sequence: Synthetic oligonucleotide
  Antisense Strand to SEQ ID NO: 360151
uuguuucaaauucuauugc

SEQ ID NO: 360153 - RNA, 19 nt, Artificial Sequence
  Description of Artificial Sequence: Synthetic oligonucleotide
  Sense Strand Starting at position 527 of SEQ ID NO: 318737
uauguucuucuugaagugu

SEQ ID NO: 360154 - RNA, 19 nt, Artificial Sequence
  Description of Artificial Sequence: Synthetic oligonucleotide
  Antisense Strand to SEQ ID NO: 360153
acacuucaagaagaacaua

SEQ ID NO: 360155 - RNA, 19 nt, Artificial Sequence
  Description of Artificial Sequence: Synthetic oligonucleotide
  Sense Strand Starting at position 527 of SEQ ID NO: 318761
ggcaaauggcaauacaguu

SEQ ID NO: 360156 - RNA, 19 nt, Artificial Sequence
  Description of Artificial Sequence: Synthetic oligonucleotide
  Antisense Strand to SEQ ID NO: 360155
aacuguauugccauuugcc

SEQ ID NO: 360157 - RNA, 19 nt, Artificial Sequence
  Description of Artificial Sequence: Synthetic oligonucleotide
  Sense Strand Starting at position 527 of SEQ ID NO: 318824
gccagaaauugcucaaauu

SEQ ID NO: 360158 - RNA, 19 nt, Artificial Sequence
  Description of Artificial Sequence: Synthetic oligonucleotide
  Antisense Strand to SEQ ID NO: 360157
aauuugagcaauuucuggc

SEQ ID NO: 360159 - RNA, 19 nt, Artificial Sequence
  Description of Artificial Sequence: Synthetic oligonucleotide
  Sense Strand Starting at position 527 of SEQ ID NO: 318861
gaaagucaugcucacuaga

SEQ ID NO: 360160 - RNA, 19 nt, Artificial Sequence
  Description of Artificial Sequence: Synthetic oligonucleotide
  Antisense Strand to SEQ ID NO: 360159
ucuagugagcaugacuuuc

SEQ ID NO: 360161 - RNA, 19 nt, Artificial Sequence
  Description of Artificial Sequence: Synthetic oligonucleotide
  Sense Strand Starting at position 527 of SEQ ID NO: 318864
agucaugcucacuagacaa

SEQ ID NO: 360162 - RNA, 19 nt, Artificial Sequence
  Description of Artificial Sequence: Synthetic oligonucleotide
  Antisense Strand to SEQ ID NO: 360161
uugucuagugagcaugacu

SEQ ID NO: 360163 - RNA, 19 nt, Artificial Sequence
  Description of Artificial Sequence: Synthetic oligonucleotide
  Sense Strand Starting at position 528 of SEQ ID NO: 315417
gaauguaagugacugguaa

SEQ ID NO: 360164 - RNA, 19 nt, Artificial Sequence
  Description of Artificial Sequence: Synthetic oligonucleotide
  Antisense Strand to SEQ ID NO: 360163
uuaccagucacuuacauuc

SEQ ID NO: 360165 - RNA, 19 nt, Artificial Sequence
  Description of Artificial Sequence: Synthetic oligonucleotide
  Sense Strand Starting at position 528 of SEQ ID NO: 315418
aauguaagugacugguaau

SEQ ID NO: 360166 - RNA, 19 nt, Artificial Sequence
  Description of Artificial Sequence: Synthetic oligonucleotide
  Antisense Strand to SEQ ID NO: 360165
auuaccagucacuuacauu

SEQ ID NO: 360167 - RNA, 19 nt, Artificial Sequence
  Description of Artificial Sequence: Synthetic oligonucleotide
  Sense Strand Starting at position 528 of SEQ ID NO: 315419
auguaagugacugguaauu

SEQ ID NO: 360168 - RNA, 19 nt, Artificial Sequence
  Description of Artificial Sequence: Synthetic oligonucleotide
  Antisense Strand to SEQ ID NO: 360167
aauuaccagucacuuacau

SEQ ID NO: 360169 - RNA, 19 nt, Artificial Sequence
  Description of Artificial Sequence: Synthetic oligonucleotide
  Sense Strand Starting at position 528 of SEQ ID NO: 315448
agggauaaauacuauaaac

SEQ ID NO: 360170 - RNA, 19 nt, Artificial Sequence
  Description of Artificial Sequence: Synthetic oligonucleotide
  Antisense Strand to SEQ ID NO: 360169
guuuauaguauuuaucccu

SEQ ID NO: 360171 - RNA, 19 nt, Artificial Sequence
  Description of Artificial Sequence: Synthetic oligonucleotide
  Sense Strand Starting at position 528 of SEQ ID NO: 315507
cguguuucuagccuuagua

SEQ ID NO: 360172 - RNA, 19 nt, Artificial Sequence
  Description of Artificial Sequence: Synthetic oligonucleotide
  Antisense Strand to SEQ ID NO: 360171
uacuaaggcuagaaacacg

SEQ ID NO: 360173 - RNA, 19 nt, Artificial Sequence
  Description of Artificial Sequence: Synthetic oligonucleotide
  Sense Strand Starting at position 528 of SEQ ID NO: 315509
uguuucuagccuuaguaaa

SEQ ID NO: 360174 - RNA, 19 nt, Artificial Sequence
  Description of Artificial Sequence: Synthetic oligonucleotide
  Antisense Strand to SEQ ID NO: 360173
uuuacuaaggcuagaaaca

SEQ ID NO: 360175 - RNA, 19 nt, Artificial Sequence
  Description of Artificial Sequence: Synthetic oligonucleotide
  Sense Strand Starting at position 528 of SEQ ID NO: 315614
ugaucuuaagccuguccua

SEQ ID NO: 360176 - RNA, 19 nt, Artificial Sequence
  Description of Artificial Sequence: Synthetic oligonucleotide
  Antisense Strand to SEQ ID NO: 360175
uaggacaggcuuaagauca

SEQ ID NO: 360177 - RNA, 19 nt, Artificial Sequence
  Description of Artificial Sequence: Synthetic oligonucleotide
  Sense Strand Starting at position 528 of SEQ ID NO: 315625
cuguccuaggccuagagaa

SEQ ID NO: 360178 - RNA, 19 nt, Artificial Sequence
  Description of Artificial Sequence: Synthetic oligonucleotide
  Antisense Strand to SEQ ID NO: 360177
uucucuaggccuaggacag

SEQ ID NO: 360179 - RNA, 19 nt, Artificial Sequence
  Description of Artificial Sequence: Synthetic oligonucleotide
  Sense Strand Starting at position 528 of SEQ ID NO: 315627
guccuaggccuagagaagu

SEQ ID NO: 360180 - RNA, 19 nt, Artificial Sequence
  Description of Artificial Sequence: Synthetic oligonucleotide
  Antisense Strand to SEQ ID NO: 360179
acuucucuaggccuaggac

SEQ ID NO: 360181 - RNA, 19 nt, Artificial Sequence
  Description of Artificial Sequence: Synthetic oligonucleotide
  Sense Strand Starting at position 528 of SEQ ID NO: 315635
ccuagagaagucugauuaa

SEQ ID NO: 360182 - RNA, 19 nt, Artificial Sequence
  Description of Artificial Sequence: Synthetic oligonucleotide
  Antisense Strand to SEQ ID NO: 360181
uuaaucagacuucucuagg

SEQ ID NO: 360183 - RNA, 19 nt, Artificial Sequence
  Description of Artificial Sequence: Synthetic oligonucleotide
  Sense Strand Starting at position 528 of SEQ ID NO: 315638
agagaagucugauuaagcu

SEQ ID NO: 360184 - RNA, 19 nt, Artificial Sequence
  Description of Artificial Sequence: Synthetic oligonucleotide
  Antisense Strand to SEQ ID NO: 360183
agcuuaaucagacuucucu

SEQ ID NO: 360185 - RNA, 19 nt, Artificial Sequence
  Description of Artificial Sequence: Synthetic oligonucleotide
  Sense Strand Starting at position 528 of SEQ ID NO: 315647
ugauuaagcuggccuggua

SEQ ID NO: 360186 - RNA, 19 nt, Artificial Sequence
  Description of Artificial Sequence: Synthetic oligonucleotide
  Antisense Strand to SEQ ID NO: 360185
uaccaggccagcuuaauca

SEQ ID NO: 360187 - RNA, 19 nt, Artificial Sequence
  Description of Artificial Sequence: Synthetic oligonucleotide
  Sense Strand Starting at position 528 of SEQ ID NO: 315976
cuccaaugacccugaugau

SEQ ID NO: 360188 - RNA, 19 nt, Artificial Sequence
  Description of Artificial Sequence: Synthetic oligonucleotide
  Antisense Strand to SEQ ID NO: 360187
aucaucagggucauuggag

SEQ ID NO: 360189 - RNA, 19 nt, Artificial Sequence
  Description of Artificial Sequence: Synthetic oligonucleotide
  Sense Strand Starting at position 528 of SEQ ID NO: 315985
cccugaugaucagugaaag

SEQ ID NO: 360190 - RNA, 19 nt, Artificial Sequence
  Description of Artificial Sequence: Synthetic oligonucleotide
  Antisense Strand to SEQ ID NO: 360189
cuuucacugaucaucaggg

SEQ ID NO: 360191 - RNA, 19 nt, Artificial Sequence
  Description of Artificial Sequence: Synthetic oligonucleotide
  Sense Strand Starting at position 528 of SEQ ID NO: 315986
ccugaugaucagugaaagc

SEQ ID NO: 360192 - RNA, 19 nt, Artificial Sequence
  Description of Artificial Sequence: Synthetic oligonucleotide
  Antisense Strand to SEQ ID NO: 360191
gcuuucacugaucaucagg

SEQ ID NO: 360193 - RNA, 19 nt, Artificial Sequence
  Description of Artificial Sequence: Synthetic oligonucleotide
  Sense Strand Starting at position 528 of SEQ ID NO: 316055
guaugccauguauagcaaa

SEQ ID NO: 360194 - RNA, 19 nt, Artificial Sequence
  Description of Artificial Sequence: Synthetic oligonucleotide
  Antisense Strand to SEQ ID NO: 360193
uuugcuauacauggcauac

SEQ ID NO: 360195 - RNA, 19 nt, Artificial Sequence
  Description of Artificial Sequence: Synthetic oligonucleotide
  Sense Strand Starting at position 528 of SEQ ID NO: 316099
acgucuuuaucaguguuag

SEQ ID NO: 360196 - RNA, 19 nt, Artificial Sequence
  Description of Artificial Sequence: Synthetic oligonucleotide
  Antisense Strand to SEQ ID NO: 360195
cuaacacugauaaagacgu

SEQ ID NO: 360197 - RNA, 19 nt, Artificial Sequence
  Description of Artificial Sequence: Synthetic oligonucleotide
  Sense Strand Starting at position 528 of SEQ ID NO: 316110
aguguuagaagccacugau

SEQ ID NO: 360198 - RNA, 19 nt, Artificial Sequence
  Description of Artificial Sequence: Synthetic oligonucleotide
  Antisense Strand to SEQ ID NO: 360197
aucaguggcuucuaacacu

SEQ ID NO: 360199 - RNA, 19 nt, Artificial Sequence
  Description of Artificial Sequence: Synthetic oligonucleotide
  Sense Strand Starting at position 528 of SEQ ID NO: 316113
guuagaagccacugauaaa

SEQ ID NO: 360200 - RNA, 19 nt, Artificial Sequence
  Description of Artificial Sequence: Synthetic oligonucleotide
  Antisense Strand to SEQ ID NO: 360199
uuuaucaguggcuucuaac

SEQ ID NO: 360201 - RNA, 19 nt, Artificial Sequence
  Description of Artificial Sequence: Synthetic oligonucleotide
  Sense Strand Starting at position 528 of SEQ ID NO: 316287
cugguuaccuucucaaagu

SEQ ID NO: 360202 - RNA, 19 nt, Artificial Sequence
  Description of Artificial Sequence: Synthetic oligonucleotide
  Antisense Strand to SEQ ID NO: 360201
acuuugagaagguaaccag

SEQ ID NO: 360203 - RNA, 19 nt, Artificial Sequence
  Description of Artificial Sequence: Synthetic oligonucleotide
  Sense Strand Starting at position 528 of SEQ ID NO: 316526
aggcuuacguaucucaaau

SEQ ID NO: 360204 - RNA, 19 nt, Artificial Sequence
  Description of Artificial Sequence: Synthetic oligonucleotide
  Antisense Strand to SEQ ID NO: 360203
auuugagauacguaagccu

SEQ ID NO: 360205 - RNA, 19 nt, Artificial Sequence
  Description of Artificial Sequence: Synthetic oligonucleotide
  Sense Strand Starting at position 528 of SEQ ID NO: 316547
uaggucuuauuccuugagu

SEQ ID NO: 360206 - RNA, 19 nt, Artificial Sequence
  Description of Artificial Sequence: Synthetic oligonucleotide
  Antisense Strand to SEQ ID NO: 360205
acucaaggaauaagaccua

SEQ ID NO: 360207 - RNA, 19 nt, Artificial Sequence
  Description of Artificial Sequence: Synthetic oligonucleotide
  Sense Strand Starting at position 528 of SEQ ID NO: 316548
aggucuuauuccuugaguc

SEQ ID NO: 360208 - RNA, 19 nt, Artificial Sequence
  Description of Artificial Sequence: Synthetic oligonucleotide
  Antisense Strand to SEQ ID NO: 360207
gacucaaggaauaagaccu

SEQ ID NO: 360209 - RNA, 19 nt, Artificial Sequence
  Description of Artificial Sequence: Synthetic oligonucleotide
  Sense Strand Starting at position 528 of SEQ ID NO: 317531
cagugacugccuugggaga

SEQ ID NO: 360210 - RNA, 19 nt, Artificial Sequence
  Description of Artificial Sequence: Synthetic oligonucleotide
  Antisense Strand to SEQ ID NO: 360209
ucucccaaggcagucacug

SEQ ID NO: 360211 - RNA, 19 nt, Artificial Sequence
  Description of Artificial Sequence: Synthetic oligonucleotide
  Sense Strand Starting at position 528 of SEQ ID NO: 317634
gcguguuucagggcuggca

SEQ ID NO: 360212 - RNA, 19 nt, Artificial Sequence
  Description of Artificial Sequence: Synthetic oligonucleotide
  Antisense Strand to SEQ ID NO: 360211
ugccagcccugaaacacgc

SEQ ID NO: 360213 - RNA, 19 nt, Artificial Sequence
  Description of Artificial Sequence: Synthetic oligonucleotide
  Sense Strand Starting at position 528 of SEQ ID NO: 317923
gguguacuuuggccucaaa

SEQ ID NO: 360214 - RNA, 19 nt, Artificial Sequence
  Description of Artificial Sequence: Synthetic oligonucleotide
  Antisense Strand to SEQ ID NO: 360213
uuugaggccaaaguacacc

SEQ ID NO: 360215 - RNA, 19 nt, Artificial Sequence
  Description of Artificial Sequence: Synthetic oligonucleotide
  Sense Strand Starting at position 528 of SEQ ID NO: 317926
guacuuuggccucaaaguu

SEQ ID NO: 360216 - RNA, 19 nt, Artificial Sequence
  Description of Artificial Sequence: Synthetic oligonucleotide
  Antisense Strand to SEQ ID NO: 360215
aacuuugaggccaaaguac

SEQ ID NO: 360217 - RNA, 19 nt, Artificial Sequence
  Description of Artificial Sequence: Synthetic oligonucleotide
  Sense Strand Starting at position 528 of SEQ ID NO: 317932
uggccucaaaguugguaaa

SEQ ID NO: 360218 - RNA, 19 nt, Artificial Sequence
  Description of Artificial Sequence: Synthetic oligonucleotide
  Antisense Strand to SEQ ID NO: 360217
uuuaccaacuuugaggcca

SEQ ID NO: 360219 - RNA, 19 nt, Artificial Sequence
  Description of Artificial Sequence: Synthetic oligonucleotide
  Sense Strand Starting at position 528 of SEQ ID NO: 318049
uaugcugauucgcugaacu

SEQ ID NO: 360220 - RNA, 19 nt, Artificial Sequence
  Description of Artificial Sequence: Synthetic oligonucleotide
  Antisense Strand to SEQ ID NO: 360219
aguucagcgaaucagcaua

SEQ ID NO: 360221 - RNA, 19 nt, Artificial Sequence
  Description of Artificial Sequence: Synthetic oligonucleotide
  Sense Strand Starting at position 528 of SEQ ID NO: 318051
ugcugauucgcugaacuga

SEQ ID NO: 360222 - RNA, 19 nt, Artificial Sequence
  Description of Artificial Sequence: Synthetic oligonucleotide
  Antisense Strand to SEQ ID NO: 360221
ucaguucagcgaaucagca

SEQ ID NO: 360223 - RNA, 19 nt, Artificial Sequence
  Description of Artificial Sequence: Synthetic oligonucleotide
  Sense Strand Starting at position 528 of SEQ ID NO: 318089
gggcacacuccauguaaga

SEQ ID NO: 360224 - RNA, 19 nt, Artificial Sequence
  Description of Artificial Sequence: Synthetic oligonucleotide
  Antisense Strand to SEQ ID NO: 360223
ucuuacauggagugugccc

SEQ ID NO: 360225 - RNA, 19 nt, Artificial Sequence
  Description of Artificial Sequence: Synthetic oligonucleotide
  Sense Strand Starting at position 528 of SEQ ID NO: 318173
aggaggaugcguugugaag

SEQ ID NO: 360226 - RNA, 19 nt, Artificial Sequence
  Description of Artificial Sequence: Synthetic oligonucleotide
  Antisense Strand to SEQ ID NO: 360225
cuucacaacgcauccuccu

SEQ ID NO: 360227 - RNA, 19 nt, Artificial Sequence
  Description of Artificial Sequence: Synthetic oligonucleotide
  Sense Strand Starting at position 528 of SEQ ID NO: 318211
ugugaacucugccuguuag

SEQ ID NO: 360228 - RNA, 19 nt, Artificial Sequence
  Description of Artificial Sequence: Synthetic oligonucleotide
  Antisense Strand to SEQ ID NO: 360227
cuaacaggcagaguucaca

SEQ ID NO: 360229 - RNA, 19 nt, Artificial Sequence
  Description of Artificial Sequence: Synthetic oligonucleotide
  Sense Strand Starting at position 528 of SEQ ID NO: 318357
gcagguguucugccucuuu

SEQ ID NO: 360230 - RNA, 19 nt, Artificial Sequence
  Description of Artificial Sequence: Synthetic oligonucleotide
  Antisense Strand to SEQ ID NO: 360229
aaagaggcagaacaccugc

SEQ ID NO: 360231 - RNA, 19 nt, Artificial Sequence
  Description of Artificial Sequence: Synthetic oligonucleotide
  Sense Strand Starting at position 528 of SEQ ID NO: 318408
gaagcaugagucugcagaa

SEQ ID NO: 360232 - RNA, 19 nt, Artificial Sequence
  Description of Artificial Sequence: Synthetic oligonucleotide
  Antisense Strand to SEQ ID NO: 360231
uucugcagacucaugcuuc

SEQ ID NO: 360233 - RNA, 19 nt, Artificial Sequence
  Description of Artificial Sequence: Synthetic oligonucleotide
  Sense Strand Starting at position 528 of SEQ ID NO: 318409
aagcaugagucugcagaag

SEQ ID NO: 360234 - RNA, 19 nt, Artificial Sequence
  Description of Artificial Sequence: Synthetic oligonucleotide
  Antisense Strand to SEQ ID NO: 360233
cuucugcagacucaugcuu

SEQ ID NO: 360235 - RNA, 19 nt, Artificial Sequence
  Description of Artificial Sequence: Synthetic oligonucleotide
  Sense Strand Starting at position 528 of SEQ ID NO: 319005
gcagcucugguguagugaa

SEQ ID NO: 360236 - RNA, 19 nt, Artificial Sequence
  Description of Artificial Sequence: Synthetic oligonucleotide
  Antisense Strand to SEQ ID NO: 360235
uucacuacaccagagcugc

SEQ ID NO: 360237 - RNA, 19 nt, Artificial Sequence
  Description of Artificial Sequence: Synthetic oligonucleotide
  Sense Strand Starting at position 528 of SEQ ID NO: 319040
ggcugaaaucccugaguga

SEQ ID NO: 360238 - RNA, 19 nt, Artificial Sequence
  Description of Artificial Sequence: Synthetic oligonucleotide
  Antisense Strand to SEQ ID NO: 360237
ucacucagggauuucagcc

SEQ ID NO: 360239 - RNA, 19 nt, Artificial Sequence
  Description of Artificial Sequence: Synthetic oligonucleotide
  Sense Strand Starting at position 528 of SEQ ID NO: 319041
gcugaaaucccugagugag

SEQ ID NO: 360240 - RNA, 19 nt, Artificial Sequence
  Description of Artificial Sequence: Synthetic oligonucleotide
  Antisense Strand to SEQ ID NO: 360239
cucacucagggauuucagc

SEQ ID NO: 360241 - RNA, 19 nt, Artificial Sequence
  Description of Artificial Sequence: Synthetic oligonucleotide
  Sense Strand Starting at position 528 of SEQ ID NO: 319069
ugugaaagucacugucucu

SEQ ID NO: 360242 - RNA, 19 nt, Artificial Sequence
  Description of Artificial Sequence: Synthetic oligonucleotide
  Antisense Strand to SEQ ID NO: 360241
agagacagugacuuucaca

SEQ ID NO: 360243 - RNA, 19 nt, Artificial Sequence
  Description of Artificial Sequence: Synthetic oligonucleotide
  Sense Strand Starting at position 529 of SEQ ID NO: 315284
gaauguaagugacugguaa

SEQ ID NO: 360244 - RNA, 19 nt, Artificial Sequence
  Description of Artificial Sequence: Synthetic oligonucleotide
  Antisense Strand to SEQ ID NO: 360243
uuaccagucacuuacauuc

SEQ ID NO: 360245 - RNA, 19 nt, Artificial Sequence
  Description of Artificial Sequence: Synthetic oligonucleotide
  Sense Strand Starting at position 529 of SEQ ID NO: 315285
aauguaagugacugguaau

SEQ ID NO: 360246 - RNA, 19 nt, Artificial Sequence
  Description of Artificial Sequence: Synthetic oligonucleotide
  Antisense Strand to SEQ ID NO: 360245
auuaccagucacuuacauu

SEQ ID NO: 360247 - RNA, 19 nt, Artificial Sequence
  Description of Artificial Sequence: Synthetic oligonucleotide
  Sense Strand Starting at position 529 of SEQ ID NO: 315286
auguaagugacugguaauu

SEQ ID NO: 360248 - RNA, 19 nt, Artificial Sequence
  Description of Artificial Sequence: Synthetic oligonucleotide
  Antisense Strand to SEQ ID NO: 360247
aauuaccagucacuuacau

SEQ ID NO: 360249 - RNA, 19 nt, Artificial Sequence
  Description of Artificial Sequence: Synthetic oligonucleotide
  Sense Strand Starting at position 529 of SEQ ID NO: 315315
agggauaaauacuauaaac

SEQ ID NO: 360250 - RNA, 19 nt, Artificial Sequence
  Description of Artificial Sequence: Synthetic oligonucleotide
  Antisense Strand to SEQ ID NO: 360249
guuuauaguauuuaucccu

SEQ ID NO: 360251 - RNA, 19 nt, Artificial Sequence
  Description of Artificial Sequence: Synthetic oligonucleotide
  Sense Strand Starting at position 529 of SEQ ID NO: 315374
cguguuucuagccuuagua

SEQ ID NO: 360252 - RNA, 19 nt, Artificial Sequence
  Description of Artificial Sequence: Synthetic oligonucleotide
  Antisense Strand to SEQ ID NO: 360251
uacuaaggcuagaaacacg

SEQ ID NO: 360253 - RNA, 19 nt, Artificial Sequence
  Description of Artificial Sequence: Synthetic oligonucleotide
  Sense Strand Starting at position 529 of SEQ ID NO: 315376
uguuucuagccuuaguaaa

SEQ ID NO: 360254 - RNA, 19 nt, Artificial Sequence
  Description of Artificial Sequence: Synthetic oligonucleotide
  Antisense Strand to SEQ ID NO: 360253
uuuacuaaggcuagaaaca

SEQ ID NO: 360255 - RNA, 19 nt, Artificial Sequence
  Description of Artificial Sequence: Synthetic oligonucleotide
  Sense Strand Starting at position 529 of SEQ ID NO: 315481
ugaucuuaagccuguccua

SEQ ID NO: 360256 - RNA, 19 nt, Artificial Sequence
  Description of Artificial Sequence: Synthetic oligonucleotide
  Antisense Strand to SEQ ID NO: 360255
uaggacaggcuuaagauca

SEQ ID NO: 360257 - RNA, 19 nt, Artificial Sequence
  Description of Artificial Sequence: Synthetic oligonucleotide
  Sense Strand Starting at position 529 of SEQ ID NO: 315492
cuguccuaggccuagagaa

SEQ ID NO: 360258 - RNA, 19 nt, Artificial Sequence
  Description of Artificial Sequence: Synthetic oligonucleotide
  Antisense Strand to SEQ ID NO: 360257
uucucuaggccuaggacag

SEQ ID NO: 360259 - RNA, 19 nt, Artificial Sequence
  Description of Artificial Sequence: Synthetic oligonucleotide
  Sense Strand Starting at position 529 of SEQ ID NO: 315494
guccuaggccuagagaagu

SEQ ID NO: 360260 - RNA, 19 nt, Artificial Sequence
  Description of Artificial Sequence: Synthetic oligonucleotide
  Antisense Strand to SEQ ID NO: 360259
acuucucuaggccuaggac

SEQ ID NO: 360261 - RNA, 19 nt, Artificial Sequence
  Description of Artificial Sequence: Synthetic oligonucleotide
  Sense Strand Starting at position 529 of SEQ ID NO: 315502
ccuagagaagucugauuaa

SEQ ID NO: 360262 - RNA, 19 nt, Artificial Sequence
  Description of Artificial Sequence: Synthetic oligonucleotide
  Antisense Strand to SEQ ID NO: 360261
uuaaucagacuucucuagg

SEQ ID NO: 360263 - RNA, 19 nt, Artificial Sequence
  Description of Artificial Sequence: Synthetic oligonucleotide
  Sense Strand Starting at position 529 of SEQ ID NO: 315505
agagaagucugauuaagcu

SEQ ID NO: 360264 - RNA, 19 nt, Artificial Sequence
  Description of Artificial Sequence: Synthetic oligonucleotide
  Antisense Strand to SEQ ID NO: 360263
agcuuaaucagacuucucu

SEQ ID NO: 360265 - RNA, 19 nt, Artificial Sequence
  Description of Artificial Sequence: Synthetic oligonucleotide
  Sense Strand Starting at position 529 of SEQ ID NO: 315514
ugauuaagcuggccuggua

SEQ ID NO: 360266 - RNA, 19 nt, Artificial Sequence
  Description of Artificial Sequence: Synthetic oligonucleotide
  Antisense Strand to SEQ ID NO: 360265
uaccaggccagcuuaauca

SEQ ID NO: 360267 - RNA, 19 nt, Artificial Sequence
  Description of Artificial Sequence: Synthetic oligonucleotide
  Sense Strand Starting at position 529 of SEQ ID NO: 315843
cuccaaugacccugaugau

SEQ ID NO: 360268 - RNA, 19 nt, Artificial Sequence
  Description of Artificial Sequence: Synthetic oligonucleotide
  Antisense Strand to SEQ ID NO: 360267
aucaucagggucauuggag

SEQ ID NO: 360269 - RNA, 19 nt, Artificial Sequence
  Description of Artificial Sequence: Synthetic oligonucleotide
  Sense Strand Starting at position 529 of SEQ ID NO: 315852
cccugaugaucagugaaag

SEQ ID NO: 360270 - RNA, 19 nt, Artificial Sequence
  Description of Artificial Sequence: Synthetic oligonucleotide
  Antisense Strand to SEQ ID NO: 360269
cuuucacugaucaucaggg

SEQ ID NO: 360271 - RNA, 19 nt, Artificial Sequence
  Description of Artificial Sequence: Synthetic oligonucleotide
  Sense Strand Starting at position 529 of SEQ ID NO: 315853
ccugaugaucagugaaagc

SEQ ID NO: 360272 - RNA, 19 nt, Artificial Sequence
  Description of Artificial Sequence: Synthetic oligonucleotide
  Antisense Strand to SEQ ID NO: 360271
gcuuucacugaucaucagg

SEQ ID NO: 360273 - RNA, 19 nt, Artificial Sequence
  Description of Artificial Sequence: Synthetic oligonucleotide
  Sense Strand Starting at position 529 of SEQ ID NO: 315922
guaugccauguauagcaaa

SEQ ID NO: 360274 - RNA, 19 nt, Artificial Sequence
  Description of Artificial Sequence: Synthetic oligonucleotide
  Antisense Strand to SEQ ID NO: 360273
uuugcuauacauggcauac

SEQ ID NO: 360275 - RNA, 19 nt, Artificial Sequence
  Description of Artificial Sequence: Synthetic oligonucleotide
  Sense Strand Starting at position 529 of SEQ ID NO: 315966
acgucuuuaucaguguuag

SEQ ID NO: 360276 - RNA, 19 nt, Artificial Sequence
  Description of Artificial Sequence: Synthetic oligonucleotide
  Antisense Strand to SEQ ID NO: 360275
cuaacacugauaaagacgu

SEQ ID NO: 360277 - RNA, 19 nt, Artificial Sequence
  Description of Artificial Sequence: Synthetic oligonucleotide
  Sense Strand Starting at position 529 of SEQ ID NO: 315977
aguguuagaagccacugau

SEQ ID NO: 360278 - RNA, 19 nt, Artificial Sequence
  Description of Artificial Sequence: Synthetic oligonucleotide
  Antisense Strand to SEQ ID NO: 360277
aucaguggcuucuaacacu

SEQ ID NO: 360279 - RNA, 19 nt, Artificial Sequence
  Description of Artificial Sequence: Synthetic oligonucleotide
  Sense Strand Starting at position 529 of SEQ ID NO: 315980
guuagaagccacugauaaa

SEQ ID NO: 360280 - RNA, 19 nt, Artificial Sequence
  Description of Artificial Sequence: Synthetic oligonucleotide
  Antisense Strand to SEQ ID NO: 360279
uuuaucaguggcuucuaac

SEQ ID NO: 360281 - RNA, 19 nt, Artificial Sequence
  Description of Artificial Sequence: Synthetic oligonucleotide
  Sense Strand Starting at position 529 of SEQ ID NO: 316154
cugguuaccuucucaaagu

SEQ ID NO: 360282 - RNA, 19 nt, Artificial Sequence
  Description of Artificial Sequence: Synthetic oligonucleotide
  Antisense Strand to SEQ ID NO: 360281
acuuugagaagguaaccag

SEQ ID NO: 360283 - RNA, 19 nt, Artificial Sequence
  Description of Artificial Sequence: Synthetic oligonucleotide
  Sense Strand Starting at position 529 of SEQ ID NO: 316393
aggcuuacguaucucaaau

SEQ ID NO: 360284 - RNA, 19 nt, Artificial Sequence
  Description of Artificial Sequence: Synthetic oligonucleotide
  Antisense Strand to SEQ ID NO: 360283
auuugagauacguaagccu

SEQ ID NO: 360285 - RNA, 19 nt, Artificial Sequence
  Description of Artificial Sequence: Synthetic oligonucleotide
  Sense Strand Starting at position 529 of SEQ ID NO: 316414
uaggucuuauuccuugagu

SEQ ID NO: 360286 - RNA, 19 nt, Artificial Sequence
  Description of Artificial Sequence: Synthetic oligonucleotide
  Antisense Strand to SEQ ID NO: 360285
acucaaggaauaagaccua

SEQ ID NO: 360287 - RNA, 19 nt, Artificial Sequence
  Description of Artificial Sequence: Synthetic oligonucleotide
  Sense Strand Starting at position 529 of SEQ ID NO: 316415
aggucuuauuccuugaguc

SEQ ID NO: 360288 - RNA, 19 nt, Artificial Sequence
  Description of Artificial Sequence: Synthetic oligonucleotide
  Antisense Strand to SEQ ID NO: 360287
gacucaaggaauaagaccu

SEQ ID NO: 360289 - RNA, 19 nt, Artificial Sequence
  Description of Artificial Sequence: Synthetic oligonucleotide
  Sense Strand Starting at position 529 of SEQ ID NO: 317398
cagugacugccuugggaga

SEQ ID NO: 360290 - RNA, 19 nt, Artificial Sequence
  Description of Artificial Sequence: Synthetic oligonucleotide
  Antisense Strand to SEQ ID NO: 360289
ucucccaaggcagucacug

SEQ ID NO: 360291 - RNA, 19 nt, Artificial Sequence
  Description of Artificial Sequence: Synthetic oligonucleotide
  Sense Strand Starting at position 529 of SEQ ID NO: 317501
gcguguuucagggcuggca

SEQ ID NO: 360292 - RNA, 19 nt, Artificial Sequence
  Description of Artificial Sequence: Synthetic oligonucleotide
  Antisense Strand to SEQ ID NO: 360291
ugccagcccugaaacacgc

SEQ ID NO: 360293 - RNA, 19 nt, Artificial Sequence
  Description of Artificial Sequence: Synthetic oligonucleotide
  Sense Strand Starting at position 529 of SEQ ID NO: 317790
gguguacuuuggccucaaa

SEQ ID NO: 360294 - RNA, 19 nt, Artificial Sequence
  Description of Artificial Sequence: Synthetic oligonucleotide
  Antisense Strand to SEQ ID NO: 360293
uuugaggccaaaguacacc

SEQ ID NO: 360295 - RNA, 19 nt, Artificial Sequence
  Description of Artificial Sequence: Synthetic oligonucleotide
  Sense Strand Starting at position 529 of SEQ ID NO: 317793
guacuuuggccucaaaguu

SEQ ID NO: 360296 - RNA, 19 nt, Artificial Sequence
  Description of Artificial Sequence: Synthetic oligonucleotide
  Antisense Strand to SEQ ID NO: 360295
aacuuugaggccaaaguac

SEQ ID NO: 360297 - RNA, 19 nt, Artificial Sequence
  Description of Artificial Sequence: Synthetic oligonucleotide
  Sense Strand Starting at position 529 of SEQ ID NO: 317799
uggccucaaaguugguaaa

SEQ ID NO: 360298 - RNA, 19 nt, Artificial Sequence
  Description of Artificial Sequence: Synthetic oligonucleotide
  Antisense Strand to SEQ ID NO: 360297
uuuaccaacuuugaggcca

SEQ ID NO: 360299 - RNA, 19 nt, Artificial Sequence
  Description of Artificial Sequence: Synthetic oligonucleotide
  Sense Strand Starting at position 529 of SEQ ID NO: 317916
uaugcugauucgcugaacu

SEQ ID NO: 360300 - RNA, 19 nt, Artificial Sequence
  Description of Artificial Sequence: Synthetic oligonucleotide
  Antisense Strand to SEQ ID NO: 360299
aguucagcgaaucagcaua

SEQ ID NO: 360301 - RNA, 19 nt, Artificial Sequence
  Description of Artificial Sequence: Synthetic oligonucleotide
  Sense Strand Starting at position 529 of SEQ ID NO: 317918
ugcugauucgcugaacuga

SEQ ID NO: 360302 - RNA, 19 nt, Artificial Sequence
  Description of Artificial Sequence: Synthetic oligonucleotide
  Antisense Strand to SEQ ID NO: 360301
ucaguucagcgaaucagca

SEQ ID NO: 360303 - RNA, 19 nt, Artificial Sequence
  Description of Artificial Sequence: Synthetic oligonucleotide
  Sense Strand Starting at position 529 of SEQ ID NO: 317956
gggcacacuccauguaaga

SEQ ID NO: 360304 - RNA, 19 nt, Artificial Sequence
  Description of Artificial Sequence: Synthetic oligonucleotide
  Antisense Strand to SEQ ID NO: 360303
ucuuacauggagugugccc

SEQ ID NO: 360305 - RNA, 19 nt, Artificial Sequence
  Description of Artificial Sequence: Synthetic oligonucleotide
  Sense Strand Starting at position 529 of SEQ ID NO: 318040
aggaggaugcguugugaag

SEQ ID NO: 360306 - RNA, 19 nt, Artificial Sequence
  Description of Artificial Sequence: Synthetic oligonucleotide
  Antisense Strand to SEQ ID NO: 360305
cuucacaacgcauccuccu

SEQ ID NO: 360307 - RNA, 19 nt, Artificial Sequence
  Description of Artificial Sequence: Synthetic oligonucleotide
  Sense Strand Starting at position 529 of SEQ ID NO: 318078
ugugaacucugccuguuag

SEQ ID NO: 360308 - RNA, 19 nt, Artificial Sequence
  Description of Artificial Sequence: Synthetic oligonucleotide
  Antisense Strand to SEQ ID NO: 360307
cuaacaggcagaguucaca

SEQ ID NO: 360309 - RNA, 19 nt, Artificial Sequence
  Description of Artificial Sequence: Synthetic oligonucleotide
  Sense Strand Starting at position 529 of SEQ ID NO: 318224
gcagguguucugccucuuu

SEQ ID NO: 360310 - RNA, 19 nt, Artificial Sequence
  Description of Artificial Sequence: Synthetic oligonucleotide
  Antisense Strand to SEQ ID NO: 360309
aaagaggcagaacaccugc

SEQ ID NO: 360311 - RNA, 19 nt, Artificial Sequence
  Description of Artificial Sequence: Synthetic oligonucleotide
  Sense Strand Starting at position 529 of SEQ ID NO: 318275
gaagcaugagucugcagaa

SEQ ID NO: 360312 - RNA, 19 nt, Artificial Sequence
  Description of Artificial Sequence: Synthetic oligonucleotide
  Antisense Strand to SEQ ID NO: 360311
uucugcagacucaugcuuc

SEQ ID NO: 360313 - RNA, 19 nt, Artificial Sequence
  Description of Artificial Sequence: Synthetic oligonucleotide
  Sense Strand Starting at position 529 of SEQ ID NO: 318276
aagcaugagucugcagaag

SEQ ID NO: 360314 - RNA, 19 nt, Artificial Sequence
  Description of Artificial Sequence: Synthetic oligonucleotide
  Antisense Strand to SEQ ID NO: 360313
cuucugcagacucaugcuu

SEQ ID NO: 360315 - RNA, 19 nt, Artificial Sequence
  Description of Artificial Sequence: Synthetic oligonucleotide
  Sense Strand Starting at position 529 of SEQ ID NO: 318872
gcagcucugguguagugaa

SEQ ID NO: 360316 - RNA, 19 nt, Artificial Sequence
  Description of Artificial Sequence: Synthetic oligonucleotide
  Antisense Strand to SEQ ID NO: 360315
uucacuacaccagagcugc

SEQ ID NO: 360317 - RNA, 19 nt, Artificial Sequence
  Description of Artificial Sequence: Synthetic oligonucleotide
  Sense Strand Starting at position 529 of SEQ ID NO: 318907
ggcugaaaucccugaguga

SEQ ID NO: 360318 - RNA, 19 nt, Artificial Sequence
  Description of Artificial Sequence: Synthetic oligonucleotide
  Antisense Strand to SEQ ID NO: 360317
ucacucagggauuucagcc

SEQ ID NO: 360319 - RNA, 19 nt, Artificial Sequence
  Description of Artificial Sequence: Synthetic oligonucleotide
  Sense Strand Starting at position 529 of SEQ ID NO: 318908
gcugaaaucccugagugag

SEQ ID NO: 360320 - RNA, 19 nt, Artificial Sequence
  Description of Artificial Sequence: Synthetic oligonucleotide
  Antisense Strand to SEQ ID NO: 360319
cucacucagggauuucagc

SEQ ID NO: 360321 - RNA, 19 nt, Artificial Sequence
  Description of Artificial Sequence: Synthetic oligonucleotide
  Sense Strand Starting at position 529 of SEQ ID NO: 318936
ugugaaagucacugucucu

SEQ ID NO: 360322 - RNA, 19 nt, Artificial Sequence
  Description of Artificial Sequence: Synthetic oligonucleotide
  Antisense Strand to SEQ ID NO: 360321
agagacagugacuuucaca

SEQ ID NO: 360323 - RNA, 19 nt, Artificial Sequence
  Description of Artificial Sequence: Synthetic oligonucleotide
  Sense Strand Starting at position 530 of SEQ ID NO: 315333
ugcugaucaccguaauaga

SEQ ID NO: 360324 - RNA, 19 nt, Artificial Sequence
  Description of Artificial Sequence: Synthetic oligonucleotide
  Antisense Strand to SEQ ID NO: 360323
ucuauuacggugaucagca

SEQ ID NO: 360325 - RNA, 19 nt, Artificial Sequence
  Description of Artificial Sequence: Synthetic oligonucleotide
  Sense Strand Starting at position 530 of SEQ ID NO: 315371
uuugaaauauugccaagaa

SEQ ID NO: 360326 - RNA, 19 nt, Artificial Sequence
  Description of Artificial Sequence: Synthetic oligonucleotide
  Antisense Strand to SEQ ID NO: 360325
uucuuggcaauauuucaaa

SEQ ID NO: 360327 - RNA, 19 nt, Artificial Sequence
  Description of Artificial Sequence: Synthetic oligonucleotide
  Sense Strand Starting at position 530 of SEQ ID NO: 315548
aagguaugccuguauaugu

SEQ ID NO: 360328 - RNA, 19 nt, Artificial Sequence
  Description of Artificial Sequence: Synthetic oligonucleotide
  Antisense Strand to SEQ ID NO: 360327
acauauacaggcauaccuu

SEQ ID NO: 360329 - RNA, 19 nt, Artificial Sequence
  Description of Artificial Sequence: Synthetic oligonucleotide
  Sense Strand Starting at position 530 of SEQ ID NO: 315558
uguauaugucuuuacuuga

SEQ ID NO: 360330 - RNA, 19 nt, Artificial Sequence
  Description of Artificial Sequence: Synthetic oligonucleotide
  Antisense Strand to SEQ ID NO: 360329
ucaaguaaagacauauaca

SEQ ID NO: 360331 - RNA, 19 nt, Artificial Sequence
  Description of Artificial Sequence: Synthetic oligonucleotide
  Sense Strand Starting at position 530 of SEQ ID NO: 315588
gucagauacuauguauggu

SEQ ID NO: 360332 - RNA, 19 nt, Artificial Sequence
  Description of Artificial Sequence: Synthetic oligonucleotide
  Antisense Strand to SEQ ID NO: 360331
accauacauaguaucugac

SEQ ID NO: 360333 - RNA, 19 nt, Artificial Sequence
  Description of Artificial Sequence: Synthetic oligonucleotide
  Sense Strand Starting at position 530 of SEQ ID NO: 315620
uuaauugagccacgaaauc

SEQ ID NO: 360334 - RNA, 19 nt, Artificial Sequence
  Description of Artificial Sequence: Synthetic oligonucleotide
  Antisense Strand to SEQ ID NO: 360333
gauuucguggcucaauuaa

SEQ ID NO: 360335 - RNA, 19 nt, Artificial Sequence
  Description of Artificial Sequence: Synthetic oligonucleotide
  Sense Strand Starting at position 530 of SEQ ID NO: 315645
ucuggauaucacugaucua

SEQ ID NO: 360336 - RNA, 19 nt, Artificial Sequence
  Description of Artificial Sequence: Synthetic oligonucleotide
  Antisense Strand to SEQ ID NO: 360335
uagaucagugauauccaga

SEQ ID NO: 360337 - RNA, 19 nt, Artificial Sequence
  Description of Artificial Sequence: Synthetic oligonucleotide
  Sense Strand Starting at position 530 of SEQ ID NO: 315865
guaugaaucgaagguaagu

SEQ ID NO: 360338 - RNA, 19 nt, Artificial Sequence
  Description of Artificial Sequence: Synthetic oligonucleotide
  Antisense Strand to SEQ ID NO: 360337
acuuaccuucgauucauac

SEQ ID NO: 360339 - RNA, 19 nt, Artificial Sequence
  Description of Artificial Sequence: Synthetic oligonucleotide
  Sense Strand Starting at position 530 of SEQ ID NO: 315871
aucgaagguaaguguauua

SEQ ID NO: 360340 - RNA, 19 nt, Artificial Sequence
  Description of Artificial Sequence: Synthetic oligonucleotide
  Antisense Strand to SEQ ID NO: 360339
uaauacacuuaccuucgau

SEQ ID NO: 360341 - RNA, 19 nt, Artificial Sequence
  Description of Artificial Sequence: Synthetic oligonucleotide
  Sense Strand Starting at position 530 of SEQ ID NO: 315903
guaaauucuucuguaaucu

SEQ ID NO: 360342 - RNA, 19 nt, Artificial Sequence
  Description of Artificial Sequence: Synthetic oligonucleotide
  Antisense Strand to SEQ ID NO: 360341
agauuacagaagaauuuac

SEQ ID NO: 360343 - RNA, 19 nt, Artificial Sequence
  Description of Artificial Sequence: Synthetic oligonucleotide
  Sense Strand Starting at position 530 of SEQ ID NO: 316443
acugccaagaguuggaaua

SEQ ID NO: 360344 - RNA, 19 nt, Artificial Sequence
  Description of Artificial Sequence: Synthetic oligonucleotide
  Antisense Strand to SEQ ID NO: 360343
uauuccaacucuuggcagu

SEQ ID NO: 360345 - RNA, 19 nt, Artificial Sequence
  Description of Artificial Sequence: Synthetic oligonucleotide
  Sense Strand Starting at position 530 of SEQ ID NO: 316444
cugccaagaguuggaauaa

SEQ ID NO: 360346 - RNA, 19 nt, Artificial Sequence
  Description of Artificial Sequence: Synthetic oligonucleotide
  Antisense Strand to SEQ ID NO: 360345
uuauuccaacucuuggcag

SEQ ID NO: 360347 - RNA, 19 nt, Artificial Sequence
  Description of Artificial Sequence: Synthetic oligonucleotide
  Sense Strand Starting at position 530 of SEQ ID NO: 316462
auuguuaaagcugggagua

SEQ ID NO: 360348 - RNA, 19 nt, Artificial Sequence
  Description of Artificial Sequence: Synthetic oligonucleotide
  Antisense Strand to SEQ ID NO: 360347
uacucccagcuuuaacaau

SEQ ID NO: 360349 - RNA, 19 nt, Artificial Sequence
  Description of Artificial Sequence: Synthetic oligonucleotide
  Sense Strand Starting at position 530 of SEQ ID NO: 316472
cugggaguacuuggagguu

SEQ ID NO: 360350 - RNA, 19 nt, Artificial Sequence
  Description of Artificial Sequence: Synthetic oligonucleotide
  Antisense Strand to SEQ ID NO: 360349
aaccuccaaguacucccag

SEQ ID NO: 360351 - RNA, 19 nt, Artificial Sequence
  Description of Artificial Sequence: Synthetic oligonucleotide
  Sense Strand Starting at position 530 of SEQ ID NO: 316485
gagguuccgggauacagua

SEQ ID NO: 360352 - RNA, 19 nt, Artificial Sequence
  Description of Artificial Sequence: Synthetic oligonucleotide
  Antisense Strand to SEQ ID NO: 360351
uacuguaucccggaaccuc

SEQ ID NO: 360353 - RNA, 19 nt, Artificial Sequence
  Description of Artificial Sequence: Synthetic oligonucleotide
  Sense Strand Starting at position 530 of SEQ ID NO: 316530
uuugguaagucuuugaaau

SEQ ID NO: 360354 - RNA, 19 nt, Artificial Sequence
  Description of Artificial Sequence: Synthetic oligonucleotide
  Antisense Strand to SEQ ID NO: 360353
auuucaaagacuuaccaaa

SEQ ID NO: 360355 - RNA, 19 nt, Artificial Sequence
  Description of Artificial Sequence: Synthetic oligonucleotide
  Sense Strand Starting at position 530 of SEQ ID NO: 316531
uugguaagucuuugaaauc

SEQ ID NO: 360356 - RNA, 19 nt, Artificial Sequence
  Description of Artificial Sequence: Synthetic oligonucleotide
  Antisense Strand to SEQ ID NO: 360355
gauuucaaagacuuaccaa

SEQ ID NO: 360357 - RNA, 19 nt, Artificial Sequence
  Description of Artificial Sequence: Synthetic oligonucleotide
  Sense Strand Starting at position 530 of SEQ ID NO: 316583
uuaaguauccgagaugagu

SEQ ID NO: 360358 - RNA, 19 nt, Artificial Sequence
  Description of Artificial Sequence: Synthetic oligonucleotide
  Antisense Strand to SEQ ID NO: 360357
acucaucucggauacuuaa

SEQ ID NO: 360359 - RNA, 19 nt, Artificial Sequence
  Description of Artificial Sequence: Synthetic oligonucleotide
  Sense Strand Starting at position 530 of SEQ ID NO: 316613
agaggccuuucugcagaaa

SEQ ID NO: 360360 - RNA, 19 nt, Artificial Sequence
  Description of Artificial Sequence: Synthetic oligonucleotide
  Antisense Strand to SEQ ID NO: 360359
uuucugcagaaaggccucu

SEQ ID NO: 360361 - RNA, 19 nt, Artificial Sequence
  Description of Artificial Sequence: Synthetic oligonucleotide
  Sense Strand Starting at position 530 of SEQ ID NO: 316639
cgaagagaugucagcgucu

SEQ ID NO: 360362 - RNA, 19 nt, Artificial Sequence
  Description of Artificial Sequence: Synthetic oligonucleotide
  Antisense Strand to SEQ ID NO: 360361
agacgcugacaucucuucg

SEQ ID NO: 360363 - RNA, 19 nt, Artificial Sequence
  Description of Artificial Sequence: Synthetic oligonucleotide
  Sense Strand Starting at position 530 of SEQ ID NO: 316758
ggcaaauuccgggaagcaa

SEQ ID NO: 360364 - RNA, 19 nt, Artificial Sequence
  Description of Artificial Sequence: Synthetic oligonucleotide
  Antisense Strand to SEQ ID NO: 360363
uugcuucccggaauuugcc

SEQ ID NO: 360365 - RNA, 19 nt, Artificial Sequence
  Description of Artificial Sequence: Synthetic oligonucleotide
  Sense Strand Starting at position 530 of SEQ ID NO: 316858
ccuggcucucuagauuacu

SEQ ID NO: 360366 - RNA, 19 nt, Artificial Sequence
  Description of Artificial Sequence: Synthetic oligonucleotide
  Antisense Strand to SEQ ID NO: 360365
aguaaucuagagagccagg

SEQ ID NO: 360367 - RNA, 19 nt, Artificial Sequence
  Description of Artificial Sequence: Synthetic oligonucleotide
  Sense Strand Starting at position 530 of SEQ ID NO: 317602
ggcuaaacacucugaagag

SEQ ID NO: 360368 - RNA, 19 nt, Artificial Sequence
  Description of Artificial Sequence: Synthetic oligonucleotide
  Antisense Strand to SEQ ID NO: 360367
cucuucagaguguuuagcc

SEQ ID NO: 360369 - RNA, 19 nt, Artificial Sequence
  Description of Artificial Sequence: Synthetic oligonucleotide
  Sense Strand Starting at position 530 of SEQ ID NO: 317612
ucugaagaguugcuuuaaa

SEQ ID NO: 360370 - RNA, 19 nt, Artificial Sequence
  Description of Artificial Sequence: Synthetic oligonucleotide
  Antisense Strand to SEQ ID NO: 360369
uuuaaagcaacucuucaga

SEQ ID NO: 360371 - RNA, 19 nt, Artificial Sequence
  Description of Artificial Sequence: Synthetic oligonucleotide
  Sense Strand Starting at position 530 of SEQ ID NO: 317846
gacaucucaacguggaguu

SEQ ID NO: 360372 - RNA, 19 nt, Artificial Sequence
  Description of Artificial Sequence: Synthetic oligonucleotide
  Antisense Strand to SEQ ID NO: 360371
aacuccacguugagauguc

SEQ ID NO: 360373 - RNA, 19 nt, Artificial Sequence
  Description of Artificial Sequence: Synthetic oligonucleotide
  Sense Strand Starting at position 530 of SEQ ID NO: 317948
auauauguguuagcaugga

SEQ ID NO: 360374 - RNA, 19 nt, Artificial Sequence
  Description of Artificial Sequence: Synthetic oligonucleotide
  Antisense Strand to SEQ ID NO: 360373
uccaugcuaacacauauau

SEQ ID NO: 360375 - RNA, 19 nt, Artificial Sequence
  Description of Artificial Sequence: Synthetic oligonucleotide
  Sense Strand Starting at position 530 of SEQ ID NO: 317952
auguguuagcauggauuga

SEQ ID NO: 360376 - RNA, 19 nt, Artificial Sequence
  Description of Artificial Sequence: Synthetic oligonucleotide
  Antisense Strand to SEQ ID NO: 360375
ucaauccaugcuaacacau

SEQ ID NO: 360377 - RNA, 19 nt, Artificial Sequence
  Description of Artificial Sequence: Synthetic oligonucleotide
  Sense Strand Starting at position 530 of SEQ ID NO: 318060
augcaauuggauugaaguu

SEQ ID NO: 360378 - RNA, 19 nt, Artificial Sequence
  Description of Artificial Sequence: Synthetic oligonucleotide
  Antisense Strand to SEQ ID NO: 360377
aacuucaauccaauugcau

SEQ ID NO: 360379 - RNA, 19 nt, Artificial Sequence
  Description of Artificial Sequence: Synthetic oligonucleotide
  Sense Strand Starting at position 530 of SEQ ID NO: 318061
ugcaauuggauugaaguua

SEQ ID NO: 360380 - RNA, 19 nt, Artificial Sequence
  Description of Artificial Sequence: Synthetic oligonucleotide
  Antisense Strand to SEQ ID NO: 360379
uaacuucaauccaauugca

SEQ ID NO: 360381 - RNA, 19 nt, Artificial Sequence
  Description of Artificial Sequence: Synthetic oligonucleotide
  Sense Strand Starting at position 530 of SEQ ID NO: 318136
aaacaacagguucgucaaa

SEQ ID NO: 360382 - RNA, 19 nt, Artificial Sequence
  Description of Artificial Sequence: Synthetic oligonucleotide
  Antisense Strand to SEQ ID NO: 360381
uuugacgaaccuguuguuu

SEQ ID NO: 360383 - RNA, 19 nt, Artificial Sequence
  Description of Artificial Sequence: Synthetic oligonucleotide
  Sense Strand Starting at position 530 of SEQ ID NO: 318138
acaacagguucgucaaacu

SEQ ID NO: 360384 - RNA, 19 nt, Artificial Sequence
  Description of Artificial Sequence: Synthetic oligonucleotide
  Antisense Strand to SEQ ID NO: 360383
aguuugacgaaccuguugu

SEQ ID NO: 360385 - RNA, 19 nt, Artificial Sequence
  Description of Artificial Sequence: Synthetic oligonucleotide
  Sense Strand Starting at position 530 of SEQ ID NO: 318149
gucaaacucagugaguuag

SEQ ID NO: 360386 - RNA, 19 nt, Artificial Sequence
  Description of Artificial Sequence: Synthetic oligonucleotide
  Antisense Strand to SEQ ID NO: 360385
cuaacucacugaguuugac

SEQ ID NO: 360387 - RNA, 19 nt, Artificial Sequence
  Description of Artificial Sequence: Synthetic oligonucleotide
  Sense Strand Starting at position 530 of SEQ ID NO: 318546
gcaccugacucaucuaaga

SEQ ID NO: 360388 - RNA, 19 nt, Artificial Sequence
  Description of Artificial Sequence: Synthetic oligonucleotide
  Antisense Strand to SEQ ID NO: 360387
ucuuagaugagucaggugc

SEQ ID NO: 360389 - RNA, 19 nt, Artificial Sequence
  Description of Artificial Sequence: Synthetic oligonucleotide
  Sense Strand Starting at position 530 of SEQ ID NO: 318561
aagauucuuugggaagaga

SEQ ID NO: 360390 - RNA, 19 nt, Artificial Sequence
  Description of Artificial Sequence: Synthetic oligonucleotide
  Antisense Strand to SEQ ID NO: 360389
ucucuucccaaagaaucuu

SEQ ID NO: 360391 - RNA, 19 nt, Artificial Sequence
  Description of Artificial Sequence: Synthetic oligonucleotide
  Sense Strand Starting at position 530 of SEQ ID NO: 318816
auaagaugucagcagguau

SEQ ID NO: 360392 - RNA, 19 nt, Artificial Sequence
  Description of Artificial Sequence: Synthetic oligonucleotide
  Antisense Strand to SEQ ID NO: 360391
auaccugcugacaucuuau

SEQ ID NO: 360393 - RNA, 19 nt, Artificial Sequence
  Description of Artificial Sequence: Synthetic oligonucleotide
  Sense Strand Starting at position 530 of SEQ ID NO: 318828
cagguaugguuucuccuga

SEQ ID NO: 360394 - RNA, 19 nt, Artificial Sequence
  Description of Artificial Sequence: Synthetic oligonucleotide
  Antisense Strand to SEQ ID NO: 360393
ucaggagaaaccauaccug

SEQ ID NO: 360395 - RNA, 19 nt, Artificial Sequence
  Description of Artificial Sequence: Synthetic oligonucleotide
  Sense Strand Starting at position 530 of SEQ ID NO: 318829
agguaugguuucuccugaa

SEQ ID NO: 360396 - RNA, 19 nt, Artificial Sequence
  Description of Artificial Sequence: Synthetic oligonucleotide
  Antisense Strand to SEQ ID NO: 360395
uucaggagaaaccauaccu

SEQ ID NO: 360397 - RNA, 19 nt, Artificial Sequence
  Description of Artificial Sequence: Synthetic oligonucleotide
  Sense Strand Starting at position 530 of SEQ ID NO: 319044
ugagguauuggagguuaca

SEQ ID NO: 360398 - RNA, 19 nt, Artificial Sequence
  Description of Artificial Sequence: Synthetic oligonucleotide
  Antisense Strand to SEQ ID NO: 360397
uguaaccuccaauaccuca

SEQ ID NO: 360399 - RNA, 19 nt, Artificial Sequence
  Description of Artificial Sequence: Synthetic oligonucleotide
  Sense Strand Starting at position 530 of SEQ ID NO: 319119
aggguagcacucuguugaa

SEQ ID NO: 360400 - RNA, 19 nt, Artificial Sequence
  Description of Artificial Sequence: Synthetic oligonucleotide
  Antisense Strand to SEQ ID NO: 360399
uucaacagagugcuacccu

SEQ ID NO: 360401 - RNA, 19 nt, Artificial Sequence
  Description of Artificial Sequence: Synthetic oligonucleotide
  Sense Strand Starting at position 530 of SEQ ID NO: 319138
aaggguugucuugagaacu

SEQ ID NO: 360402 - RNA, 19 nt, Artificial Sequence
  Description of Artificial Sequence: Synthetic oligonucleotide
  Antisense Strand to SEQ ID NO: 360401
aguucucaagacaacccuu

SEQ ID NO: 360403 - RNA, 19 nt, Artificial Sequence
  Description of Artificial Sequence: Synthetic oligonucleotide
  Sense Strand Starting at position 531 of SEQ ID NO: 316581
ugaggacaguaggcuuaaa

SEQ ID NO: 360404 - RNA, 19 nt, Artificial Sequence
  Description of Artificial Sequence: Synthetic oligonucleotide
  Antisense Strand to SEQ ID NO: 360403
uuuaagccuacuguccuca

SEQ ID NO: 360405 - RNA, 19 nt, Artificial Sequence
  Description of Artificial Sequence: Synthetic oligonucleotide
  Sense Strand Starting at position 531 of SEQ ID NO: 316641
uuaauagcuguguaaccua

SEQ ID NO: 360406 - RNA, 19 nt, Artificial Sequence
  Description of Artificial Sequence: Synthetic oligonucleotide
  Antisense Strand to SEQ ID NO: 360405
uagguuacacagcuauuaa

SEQ ID NO: 360407 - RNA, 19 nt, Artificial Sequence
  Description of Artificial Sequence: Synthetic oligonucleotide
  Sense Strand Starting at position 531 of SEQ ID NO: 316646
agcuguguaaccuagggaa

SEQ ID NO: 360408 - RNA, 19 nt, Artificial Sequence
  Description of Artificial Sequence: Synthetic oligonucleotide
  Antisense Strand to SEQ ID NO: 360407
uucccuagguuacacagcu

SEQ ID NO: 360409 - RNA, 19 nt, Artificial Sequence
  Description of Artificial Sequence: Synthetic oligonucleotide
  Sense Strand Starting at position 531 of SEQ ID NO: 316648
cuguguaaccuagggaaga

SEQ ID NO: 360410 - RNA, 19 nt, Artificial Sequence
  Description of Artificial Sequence: Synthetic oligonucleotide
  Antisense Strand to SEQ ID NO: 360409
ucuucccuagguuacacag

SEQ ID NO: 360411 - RNA, 19 nt, Artificial Sequence
  Description of Artificial Sequence: Synthetic oligonucleotide
  Sense Strand Starting at position 531 of SEQ ID NO: 316729
cguuguucucuagucaugu

SEQ ID NO: 360412 - RNA, 19 nt, Artificial Sequence
  Description of Artificial Sequence: Synthetic oligonucleotide
  Antisense Strand to SEQ ID NO: 360411
acaugacuagagaacaacg

SEQ ID NO: 360413 - RNA, 19 nt, Artificial Sequence
  Description of Artificial Sequence: Synthetic oligonucleotide
  Sense Strand Starting at position 531 of SEQ ID NO: 316761
uugccaguugguuagaaca

SEQ ID NO: 360414 - RNA, 19 nt, Artificial Sequence
  Description of Artificial Sequence: Synthetic oligonucleotide
  Antisense Strand to SEQ ID NO: 360413
uguucuaaccaacuggcaa

SEQ ID NO: 360415 - RNA, 19 nt, Artificial Sequence
  Description of Artificial Sequence: Synthetic oligonucleotide
  Sense Strand Starting at position 531 of SEQ ID NO: 317424
cgcgguuauaaagauaauc

SEQ ID NO: 360416 - RNA, 19 nt, Artificial Sequence
  Description of Artificial Sequence: Synthetic oligonucleotide
  Antisense Strand to SEQ ID NO: 360415
gauuaucuuuauaaccgcg

SEQ ID NO: 360417 - RNA, 19 nt, Artificial Sequence
  Description of Artificial Sequence: Synthetic oligonucleotide
  Sense Strand Starting at position 531 of SEQ ID NO: 317448
uguugagcccaggaauguu

SEQ ID NO: 360418 - RNA, 19 nt, Artificial Sequence
  Description of Artificial Sequence: Synthetic oligonucleotide
  Antisense Strand to SEQ ID NO: 360417
aacauuccugggcucaaca

SEQ ID NO: 360419 - RNA, 19 nt, Artificial Sequence
  Description of Artificial Sequence: Synthetic oligonucleotide
  Sense Strand Starting at position 531 of SEQ ID NO: 317468
ggguacacccaucaugagu

SEQ ID NO: 360420 - RNA, 19 nt, Artificial Sequence
  Description of Artificial Sequence: Synthetic oligonucleotide
  Antisense Strand to SEQ ID NO: 360419
acucaugauggguguaccc

SEQ ID NO: 360421 - RNA, 19 nt, Artificial Sequence
  Description of Artificial Sequence: Synthetic oligonucleotide
  Sense Strand Starting at position 531 of SEQ ID NO: 317564
gggucuuugagucagcaaa

SEQ ID NO: 360422 - RNA, 19 nt, Artificial Sequence
  Description of Artificial Sequence: Synthetic oligonucleotide
  Antisense Strand to SEQ ID NO: 360421
uuugcugacucaaagaccc

SEQ ID NO: 360423 - RNA, 19 nt, Artificial Sequence
  Description of Artificial Sequence: Synthetic oligonucleotide
  Sense Strand Starting at position 531 of SEQ ID NO: 317802
ccaggauauggcugugagu

SEQ ID NO: 360424 - RNA, 19 nt, Artificial Sequence
  Description of Artificial Sequence: Synthetic oligonucleotide
  Antisense Strand to SEQ ID NO: 360423
acucacagccauauccugg

SEQ ID NO: 360425 - RNA, 19 nt, Artificial Sequence
  Description of Artificial Sequence: Synthetic oligonucleotide
  Sense Strand Starting at position 531 of SEQ ID NO: 317804
aggauauggcugugaguuu

SEQ ID NO: 360426 - RNA, 19 nt, Artificial Sequence
  Description of Artificial Sequence: Synthetic oligonucleotide
  Antisense Strand to SEQ ID NO: 360425
aaacucacagccauauccu

SEQ ID NO: 360427 - RNA, 19 nt, Artificial Sequence
  Description of Artificial Sequence: Synthetic oligonucleotide
  Sense Strand Starting at position 531 of SEQ ID NO: 318125
uuguguuaugaagguuaag

SEQ ID NO: 360428 - RNA, 19 nt, Artificial Sequence
  Description of Artificial Sequence: Synthetic oligonucleotide
  Antisense Strand to SEQ ID NO: 360427
cuuaaccuucauaacacaa

SEQ ID NO: 360429 - RNA, 19 nt, Artificial Sequence
  Description of Artificial Sequence: Synthetic oligonucleotide
  Sense Strand Starting at position 531 of SEQ ID NO: 318134
gaagguuaagggugaaucu

SEQ ID NO: 360430 - RNA, 19 nt, Artificial Sequence
  Description of Artificial Sequence: Synthetic oligonucleotide
  Antisense Strand to SEQ ID NO: 360429
agauucacccuuaaccuuc

SEQ ID NO: 360431 - RNA, 19 nt, Artificial Sequence
  Description of Artificial Sequence: Synthetic oligonucleotide
  Sense Strand Starting at position 531 of SEQ ID NO: 318143
gggugaaucugagugaucu

SEQ ID NO: 360432 - RNA, 19 nt, Artificial Sequence
  Description of Artificial Sequence: Synthetic oligonucleotide
  Antisense Strand to SEQ ID NO: 360431
agaucacucagauucaccc

SEQ ID NO: 360433 - RNA, 19 nt, Artificial Sequence
  Description of Artificial Sequence: Synthetic oligonucleotide
  Sense Strand Starting at position 531 of SEQ ID NO: 318144
ggugaaucugagugaucug

SEQ ID NO: 360434 - RNA, 19 nt, Artificial Sequence
  Description of Artificial Sequence: Synthetic oligonucleotide
  Antisense Strand to SEQ ID NO: 360433
cagaucacucagauucacc

SEQ ID NO: 360435 - RNA, 19 nt, Artificial Sequence
  Description of Artificial Sequence: Synthetic oligonucleotide
  Sense Strand Starting at position 531 of SEQ ID NO: 318145
gugaaucugagugaucuga

SEQ ID NO: 360436 - RNA, 19 nt, Artificial Sequence
  Description of Artificial Sequence: Synthetic oligonucleotide
  Antisense Strand to SEQ ID NO: 360435
ucagaucacucagauucac

SEQ ID NO: 360437 - RNA, 19 nt, Artificial Sequence
  Description of Artificial Sequence: Synthetic oligonucleotide
  Sense Strand Starting at position 531 of SEQ ID NO: 318381
augcauuugcuuuauguuu

SEQ ID NO: 360438 - RNA, 19 nt, Artificial Sequence
  Description of Artificial Sequence: Synthetic oligonucleotide
  Antisense Strand to SEQ ID NO: 360437
aaacauaaagcaaaugcau

SEQ ID NO: 360439 - RNA, 19 nt, Artificial Sequence
  Description of Artificial Sequence: Synthetic oligonucleotide
  Sense Strand Starting at position 531 of SEQ ID NO: 318408
uuucgauggagucaucacu

SEQ ID NO: 360440 - RNA, 19 nt, Artificial Sequence
  Description of Artificial Sequence: Synthetic oligonucleotide
  Antisense Strand to SEQ ID NO: 360439
agugaugacuccaucgaaa

SEQ ID NO: 360441 - RNA, 19 nt, Artificial Sequence
  Description of Artificial Sequence: Synthetic oligonucleotide
  Sense Strand Starting at position 531 of SEQ ID NO: 318484
uccugcuuaugagccaaau

SEQ ID NO: 360442 - RNA, 19 nt, Artificial Sequence
  Description of Artificial Sequence: Synthetic oligonucleotide
  Antisense Strand to SEQ ID NO: 360441
auuuggcucauaagcagga

SEQ ID NO: 360443 - RNA, 19 nt, Artificial Sequence
  Description of Artificial Sequence: Synthetic oligonucleotide
  Sense Strand Starting at position 531 of SEQ ID NO: 318595
aggagaguugcucagucaa

SEQ ID NO: 360444 - RNA, 19 nt, Artificial Sequence
  Description of Artificial Sequence: Synthetic oligonucleotide
  Antisense Strand to SEQ ID NO: 360443
uugacugagcaacucuccu

SEQ ID NO: 360445 - RNA, 19 nt, Artificial Sequence
  Description of Artificial Sequence: Synthetic oligonucleotide
  Sense Strand Starting at position 531 of SEQ ID NO: 318597
gagaguugcucagucaagg

SEQ ID NO: 360446 - RNA, 19 nt, Artificial Sequence
  Description of Artificial Sequence: Synthetic oligonucleotide
  Antisense Strand to SEQ ID NO: 360445
ccuugacugagcaacucuc

SEQ ID NO: 360447 - RNA, 19 nt, Artificial Sequence
  Description of Artificial Sequence: Synthetic oligonucleotide
  Sense Strand Starting at position 531 of SEQ ID NO: 318643
caggguauuugugauuaaa

SEQ ID NO: 360448 - RNA, 19 nt, Artificial Sequence
  Description of Artificial Sequence: Synthetic oligonucleotide
  Antisense Strand to SEQ ID NO: 360447
uuuaaucacaaauacccug

SEQ ID NO: 360449 - RNA, 19 nt, Artificial Sequence
  Description of Artificial Sequence: Synthetic oligonucleotide
  Sense Strand Starting at position 531 of SEQ ID NO: 318762
caaugccugcguggaauuu

SEQ ID NO: 360450 - RNA, 19 nt, Artificial Sequence
  Description of Artificial Sequence: Synthetic oligonucleotide
  Antisense Strand to SEQ ID NO: 360449
aaauuccacgcaggcauug

SEQ ID NO: 360451 - RNA, 19 nt, Artificial Sequence
  Description of Artificial Sequence: Synthetic oligonucleotide
  Sense Strand Starting at position 531 of SEQ ID NO: 318784
ggagaaauguagaaagcgu

SEQ ID NO: 360452 - RNA, 19 nt, Artificial Sequence
  Description of Artificial Sequence: Synthetic oligonucleotide
  Antisense Strand to SEQ ID NO: 360451
acgcuuucuacauuucucc

SEQ ID NO: 360453 - RNA, 19 nt, Artificial Sequence
  Description of Artificial Sequence: Synthetic oligonucleotide
  Sense Strand Starting at position 531 of SEQ ID NO: 318798
agcguuguaguucaggaga

SEQ ID NO: 360454 - RNA, 19 nt, Artificial Sequence
  Description of Artificial Sequence: Synthetic oligonucleotide
  Antisense Strand to SEQ ID NO: 360453
ucuccugaacuacaacgcu

SEQ ID NO: 360455 - RNA, 19 nt, Artificial Sequence
  Description of Artificial Sequence: Synthetic oligonucleotide
  Sense Strand Starting at position 531 of SEQ ID NO: 318858
uugaucaaucggugguacu

SEQ ID NO: 360456 - RNA, 19 nt, Artificial Sequence
  Description of Artificial Sequence: Synthetic oligonucleotide
  Antisense Strand to SEQ ID NO: 360455
aguaccaccgauugaucaa

SEQ ID NO: 360457 - RNA, 19 nt, Artificial Sequence
  Description of Artificial Sequence: Synthetic oligonucleotide
  Sense Strand Starting at position 531 of SEQ ID NO: 318868
ggugguacucuacggauga

SEQ ID NO: 360458 - RNA, 19 nt, Artificial Sequence
  Description of Artificial Sequence: Synthetic oligonucleotide
  Antisense Strand to SEQ ID NO: 360457
ucauccguagaguaccacc

SEQ ID NO: 360459 - RNA, 19 nt, Artificial Sequence
  Description of Artificial Sequence: Synthetic oligonucleotide
  Sense Strand Starting at position 531 of SEQ ID NO: 318912
aagaaagaaugaggacuua

SEQ ID NO: 360460 - RNA, 19 nt, Artificial Sequence
  Description of Artificial Sequence: Synthetic oligonucleotide
  Antisense Strand to SEQ ID NO: 360459
uaaguccucauucuuucuu

SEQ ID NO: 360461 - RNA, 19 nt, Artificial Sequence
  Description of Artificial Sequence: Synthetic oligonucleotide
  Sense Strand Starting at position 531 of SEQ ID NO: 318937
ggcaguaauaggcaaaguu

SEQ ID NO: 360462 - RNA, 19 nt, Artificial Sequence
  Description of Artificial Sequence: Synthetic oligonucleotide
  Antisense Strand to SEQ ID NO: 360461
aacuuugccuauuacugcc

SEQ ID NO: 360463 - RNA, 19 nt, Artificial Sequence
  Description of Artificial Sequence: Synthetic oligonucleotide
  Sense Strand Starting at position 531 of SEQ ID NO: 318944
auaggcaaaguuugucuua

SEQ ID NO: 360464 - RNA, 19 nt, Artificial Sequence
  Description of Artificial Sequence: Synthetic oligonucleotide
  Antisense Strand to SEQ ID NO: 360463
uaagacaaacuuugccuau

SEQ ID NO: 360465 - RNA, 19 nt, Artificial Sequence
  Description of Artificial Sequence: Synthetic oligonucleotide
  Sense Strand Starting at position 531 of SEQ ID NO: 318945
uaggcaaaguuugucuuaa

SEQ ID NO: 360466 - RNA, 19 nt, Artificial Sequence
  Description of Artificial Sequence: Synthetic oligonucleotide
  Antisense Strand to SEQ ID NO: 360465
uuaagacaaacuuugccua

SEQ ID NO: 360467 - RNA, 19 nt, Artificial Sequence
  Description of Artificial Sequence: Synthetic oligonucleotide
  Sense Strand Starting at position 531 of SEQ ID NO: 318946
aggcaaaguuugucuuaau

SEQ ID NO: 360468 - RNA, 19 nt, Artificial Sequence
  Description of Artificial Sequence: Synthetic oligonucleotide
  Antisense Strand to SEQ ID NO: 360467
auuaagacaaacuuugccu

SEQ ID NO: 360469 - RNA, 19 nt, Artificial Sequence
  Description of Artificial Sequence: Synthetic oligonucleotide
  Sense Strand Starting at position 531 of SEQ ID NO: 318947
ggcaaaguuugucuuaauc

SEQ ID NO: 360470 - RNA, 19 nt, Artificial Sequence
  Description of Artificial Sequence: Synthetic oligonucleotide
  Antisense Strand to SEQ ID NO: 360469
gauuaagacaaacuuugcc

SEQ ID NO: 360471 - RNA, 19 nt, Artificial Sequence
  Description of Artificial Sequence: Synthetic oligonucleotide
  Sense Strand Starting at position 531 of SEQ ID NO: 318956
ugucuuaaucuagaguugu

SEQ ID NO: 360472 - RNA, 19 nt, Artificial Sequence
  Description of Artificial Sequence: Synthetic oligonucleotide
  Antisense Strand to SEQ ID NO: 360471
acaacucuagauuaagaca

SEQ ID NO: 360473 - RNA, 19 nt, Artificial Sequence
  Description of Artificial Sequence: Synthetic oligonucleotide
  Sense Strand Starting at position 531 of SEQ ID NO: 318984
cuaugauuggagcagaugu

SEQ ID NO: 360474 - RNA, 19 nt, Artificial Sequence
  Description of Artificial Sequence: Synthetic oligonucleotide
  Antisense Strand to SEQ ID NO: 360473
acaucugcuccaaucauag

SEQ ID NO: 360475 - RNA, 19 nt, Artificial Sequence
  Description of Artificial Sequence: Synthetic oligonucleotide
  Sense Strand Starting at position 531 of SEQ ID NO: 319073
cucuguugcugccuaauuu

SEQ ID NO: 360476 - RNA, 19 nt, Artificial Sequence
  Description of Artificial Sequence: Synthetic oligonucleotide
  Antisense Strand to SEQ ID NO: 360475
aaauuaggcagcaacagag

SEQ ID NO: 360477 - RNA, 19 nt, Artificial Sequence
  Description of Artificial Sequence: Synthetic oligonucleotide
  Sense Strand Starting at position 531 of SEQ ID NO: 319122
gcauaauggagaugacuua

SEQ ID NO: 360478 - RNA, 19 nt, Artificial Sequence
  Description of Artificial Sequence: Synthetic oligonucleotide
  Antisense Strand to SEQ ID NO: 360477
uaagucaucuccauuaugc

SEQ ID NO: 360479 - RNA, 19 nt, Artificial Sequence
  Description of Artificial Sequence: Synthetic oligonucleotide
  Sense Strand Starting at position 531 of SEQ ID NO: 319129
ggagaugacuuaguccugu

SEQ ID NO: 360480 - RNA, 19 nt, Artificial Sequence
  Description of Artificial Sequence: Synthetic oligonucleotide
  Antisense Strand to SEQ ID NO: 360479
acaggacuaagucaucucc

SEQ ID NO: 360481 - RNA, 19 nt, Artificial Sequence
  Description of Artificial Sequence: Synthetic oligonucleotide
  Sense Strand Starting at position 531 of SEQ ID NO: 319144
cuguuuguuguugagugaa

SEQ ID NO: 360482 - RNA, 19 nt, Artificial Sequence
  Description of Artificial Sequence: Synthetic oligonucleotide
  Antisense Strand to SEQ ID NO: 360481
uucacucaacaacaaacag

SEQ ID NO: 360483 - RNA, 19 nt, Artificial Sequence
  Description of Artificial Sequence: Synthetic oligonucleotide
  Sense Strand Starting at position 532 of SEQ ID NO: 315332
gcguguaaucuaagcgaag

SEQ ID NO: 360484 - RNA, 19 nt, Artificial Sequence
  Description of Artificial Sequence: Synthetic oligonucleotide
  Antisense Strand to SEQ ID NO: 360483
cuucgcuuagauuacacgc

SEQ ID NO: 360485 - RNA, 19 nt, Artificial Sequence
  Description of Artificial Sequence: Synthetic oligonucleotide
  Sense Strand Starting at position 532 of SEQ ID NO: 315335
uguaaucuaagcgaagaca

SEQ ID NO: 360486 - RNA, 19 nt, Artificial Sequence
  Description of Artificial Sequence: Synthetic oligonucleotide
  Antisense Strand to SEQ ID NO: 360485
ugucuucgcuuagauuaca

SEQ ID NO: 360487 - RNA, 19 nt, Artificial Sequence
  Description of Artificial Sequence: Synthetic oligonucleotide
  Sense Strand Starting at position 532 of SEQ ID NO: 315681
gguaucucaaaguauggua

SEQ ID NO: 360488 - RNA, 19 nt, Artificial Sequence
  Description of Artificial Sequence: Synthetic oligonucleotide
  Antisense Strand to SEQ ID NO: 360487
uaccauacuuugagauacc

SEQ ID NO: 360489 - RNA, 19 nt, Artificial Sequence
  Description of Artificial Sequence: Synthetic oligonucleotide
  Sense Strand Starting at position 532 of SEQ ID NO: 315706
gcgugcugaguccuuugaa

SEQ ID NO: 360490 - RNA, 19 nt, Artificial Sequence
  Description of Artificial Sequence: Synthetic oligonucleotide
  Antisense Strand to SEQ ID NO: 360489
uucaaaggacucagcacgc

SEQ ID NO: 360491 - RNA, 19 nt, Artificial Sequence
  Description of Artificial Sequence: Synthetic oligonucleotide
  Sense Strand Starting at position 532 of SEQ ID NO: 315842
gacagucacagaugguaga

SEQ ID NO: 360492 - RNA, 19 nt, Artificial Sequence
  Description of Artificial Sequence: Synthetic oligonucleotide
  Antisense Strand to SEQ ID NO: 360491
ucuaccaucugugacuguc

SEQ ID NO: 360493 - RNA, 19 nt, Artificial Sequence
  Description of Artificial Sequence: Synthetic oligonucleotide
  Sense Strand Starting at position 532 of SEQ ID NO: 315955
cugaccuacucuguuugau

SEQ ID NO: 360494 - RNA, 19 nt, Artificial Sequence
  Description of Artificial Sequence: Synthetic oligonucleotide
  Antisense Strand to SEQ ID NO: 360493
aucaaacagaguaggucag

SEQ ID NO: 360495 - RNA, 19 nt, Artificial Sequence
  Description of Artificial Sequence: Synthetic oligonucleotide
  Sense Strand Starting at position 532 of SEQ ID NO: 315957
gaccuacucuguuugauag

SEQ ID NO: 360496 - RNA, 19 nt, Artificial Sequence
  Description of Artificial Sequence: Synthetic oligonucleotide
  Antisense Strand to SEQ ID NO: 360495
cuaucaaacagaguagguc

SEQ ID NO: 360497 - RNA, 19 nt, Artificial Sequence
  Description of Artificial Sequence: Synthetic oligonucleotide
  Sense Strand Starting at position 532 of SEQ ID NO: 315971
gauaguagguccucagauc

SEQ ID NO: 360498 - RNA, 19 nt, Artificial Sequence
  Description of Artificial Sequence: Synthetic oligonucleotide
  Antisense Strand to SEQ ID NO: 360497
gaucugaggaccuacuauc

SEQ ID NO: 360499 - RNA, 19 nt, Artificial Sequence
  Description of Artificial Sequence: Synthetic oligonucleotide
  Sense Strand Starting at position 532 of SEQ ID NO: 316179
aguuucuuuggauaucuga

SEQ ID NO: 360500 - RNA, 19 nt, Artificial Sequence
  Description of Artificial Sequence: Synthetic oligonucleotide
  Antisense Strand to SEQ ID NO: 360499
ucagauauccaaagaaacu

SEQ ID NO: 360501 - RNA, 19 nt, Artificial Sequence
  Description of Artificial Sequence: Synthetic oligonucleotide
  Sense Strand Starting at position 532 of SEQ ID NO: 316216
uccagugucagguaaaccu

SEQ ID NO: 360502 - RNA, 19 nt, Artificial Sequence
  Description of Artificial Sequence: Synthetic oligonucleotide
  Antisense Strand to SEQ ID NO: 360501
agguuuaccugacacugga

SEQ ID NO: 360503 - RNA, 19 nt, Artificial Sequence
  Description of Artificial Sequence: Synthetic oligonucleotide
  Sense Strand Starting at position 532 of SEQ ID NO: 316223
ucagguaaaccuuggauua

SEQ ID NO: 360504 - RNA, 19 nt, Artificial Sequence
  Description of Artificial Sequence: Synthetic oligonucleotide
  Antisense Strand to SEQ ID NO: 360503
uaauccaagguuuaccuga

SEQ ID NO: 360505 - RNA, 19 nt, Artificial Sequence
  Description of Artificial Sequence: Synthetic oligonucleotide
  Sense Strand Starting at position 532 of SEQ ID NO: 316224
cagguaaaccuuggauuaa

SEQ ID NO: 360506 - RNA, 19 nt, Artificial Sequence
  Description of Artificial Sequence: Synthetic oligonucleotide
  Antisense Strand to SEQ ID NO: 360505
uuaauccaagguuuaccug

SEQ ID NO: 360507 - RNA, 19 nt, Artificial Sequence
  Description of Artificial Sequence: Synthetic oligonucleotide
  Sense Strand Starting at position 532 of SEQ ID NO: 316661
cuguaugugccaguguauu

SEQ ID NO: 360508 - RNA, 19 nt, Artificial Sequence
  Description of Artificial Sequence: Synthetic oligonucleotide
  Antisense Strand to SEQ ID NO: 360507
aauacacuggcacauacag

SEQ ID NO: 360509 - RNA, 19 nt, Artificial Sequence
  Description of Artificial Sequence: Synthetic oligonucleotide
  Sense Strand Starting at position 532 of SEQ ID NO: 316754
agcauaaaugcuuauaugu

SEQ ID NO: 360510 - RNA, 19 nt, Artificial Sequence
  Description of Artificial Sequence: Synthetic oligonucleotide
  Antisense Strand to SEQ ID NO: 360509
acauauaagcauuuaugcu

SEQ ID NO: 360511 - RNA, 19 nt, Artificial Sequence
  Description of Artificial Sequence: Synthetic oligonucleotide
  Sense Strand Starting at position 532 of SEQ ID NO: 317227
acacgcaauugauuaaaca

SEQ ID NO: 360512 - RNA, 19 nt, Artificial Sequence
  Description of Artificial Sequence: Synthetic oligonucleotide
  Antisense Strand to SEQ ID NO: 360511
uguuuaaucaauugcgugu

SEQ ID NO: 360513 - RNA, 19 nt, Artificial Sequence
  Description of Artificial Sequence: Synthetic oligonucleotide
  Sense Strand Starting at position 532 of SEQ ID NO: 317376
ggaacugugaucugcacaa

SEQ ID NO: 360514 - RNA, 19 nt, Artificial Sequence
  Description of Artificial Sequence: Synthetic oligonucleotide
  Antisense Strand to SEQ ID NO: 360513
uugugcagaucacaguucc

SEQ ID NO: 360515 - RNA, 19 nt, Artificial Sequence
  Description of Artificial Sequence: Synthetic oligonucleotide
  Sense Strand Starting at position 532 of SEQ ID NO: 317380
cugugaucugcacaaaucu

SEQ ID NO: 360516 - RNA, 19 nt, Artificial Sequence
  Description of Artificial Sequence: Synthetic oligonucleotide
  Antisense Strand to SEQ ID NO: 360515
agauuugugcagaucacag

SEQ ID NO: 360517 - RNA, 19 nt, Artificial Sequence
  Description of Artificial Sequence: Synthetic oligonucleotide
  Sense Strand Starting at position 532 of SEQ ID NO: 317424
uaaaguacgucuuugaaua

SEQ ID NO: 360518 - RNA, 19 nt, Artificial Sequence
  Description of Artificial Sequence: Synthetic oligonucleotide
  Antisense Strand to SEQ ID NO: 360517
uauucaaagacguacuuua

SEQ ID NO: 360519 - RNA, 19 nt, Artificial Sequence
  Description of Artificial Sequence: Synthetic oligonucleotide
  Sense Strand Starting at position 532 of SEQ ID NO: 317505
cugucucagcuggaaaucu

SEQ ID NO: 360520 - RNA, 19 nt, Artificial Sequence
  Description of Artificial Sequence: Synthetic oligonucleotide
  Antisense Strand to SEQ ID NO: 360519
agauuuccagcugagacag

SEQ ID NO: 360521 - RNA, 19 nt, Artificial Sequence
  Description of Artificial Sequence: Synthetic oligonucleotide
  Sense Strand Starting at position 532 of SEQ ID NO: 317513
gcuggaaaucuccaucauc

SEQ ID NO: 360522 - RNA, 19 nt, Artificial Sequence
  Description of Artificial Sequence: Synthetic oligonucleotide
  Antisense Strand to SEQ ID NO: 360521
gaugauggagauuuccagc

SEQ ID NO: 360523 - RNA, 19 nt, Artificial Sequence
  Description of Artificial Sequence: Synthetic oligonucleotide
  Sense Strand Starting at position 532 of SEQ ID NO: 317721
uguaaugcuggguaagcaa

SEQ ID NO: 360524 - RNA, 19 nt, Artificial Sequence
  Description of Artificial Sequence: Synthetic oligonucleotide
  Antisense Strand to SEQ ID NO: 360523
uugcuuacccagcauuaca

SEQ ID NO: 360525 - RNA, 19 nt, Artificial Sequence
  Description of Artificial Sequence: Synthetic oligonucleotide
  Sense Strand Starting at position 532 of SEQ ID NO: 318137
aguauaauucuuggcauag

SEQ ID NO: 360526 - RNA, 19 nt, Artificial Sequence
  Description of Artificial Sequence: Synthetic oligonucleotide
  Antisense Strand to SEQ ID NO: 360525
cuaugccaagaauuauacu

SEQ ID NO: 360527 - RNA, 19 nt, Artificial Sequence
  Description of Artificial Sequence: Synthetic oligonucleotide
  Sense Strand Starting at position 532 of SEQ ID NO: 318138
guauaauucuuggcauaga

SEQ ID NO: 360528 - RNA, 19 nt, Artificial Sequence
  Description of Artificial Sequence: Synthetic oligonucleotide
  Antisense Strand to SEQ ID NO: 360527
ucuaugccaagaauuauac

SEQ ID NO: 360529 - RNA, 19 nt, Artificial Sequence
  Description of Artificial Sequence: Synthetic oligonucleotide
  Sense Strand Starting at position 532 of SEQ ID NO: 318141
uaauucuuggcauagagua

SEQ ID NO: 360530 - RNA, 19 nt, Artificial Sequence
  Description of Artificial Sequence: Synthetic oligonucleotide
  Antisense Strand to SEQ ID NO: 360529
uacucuaugccaagaauua

SEQ ID NO: 360531 - RNA, 19 nt, Artificial Sequence
  Description of Artificial Sequence: Synthetic oligonucleotide
  Sense Strand Starting at position 532 of SEQ ID NO: 318143
auucuuggcauagaguaga

SEQ ID NO: 360532 - RNA, 19 nt, Artificial Sequence
  Description of Artificial Sequence: Synthetic oligonucleotide
  Antisense Strand to SEQ ID NO: 360531
ucuacucuaugccaagaau

SEQ ID NO: 360533 - RNA, 19 nt, Artificial Sequence
  Description of Artificial Sequence: Synthetic oligonucleotide
  Sense Strand Starting at position 532 of SEQ ID NO: 318157
guagaugcugaauaaguga

SEQ ID NO: 360534 - RNA, 19 nt, Artificial Sequence
  Description of Artificial Sequence: Synthetic oligonucleotide
  Antisense Strand to SEQ ID NO: 360533
ucacuuauucagcaucuac

SEQ ID NO: 360535 - RNA, 19 nt, Artificial Sequence
  Description of Artificial Sequence: Synthetic oligonucleotide
  Sense Strand Starting at position 532 of SEQ ID NO: 318162
ugcugaauaagugaugcua

SEQ ID NO: 360536 - RNA, 19 nt, Artificial Sequence
  Description of Artificial Sequence: Synthetic oligonucleotide
  Antisense Strand to SEQ ID NO: 360535
uagcaucacuuauucagca

SEQ ID NO: 360537 - RNA, 19 nt, Artificial Sequence
  Description of Artificial Sequence: Synthetic oligonucleotide
  Sense Strand Starting at position 532 of SEQ ID NO: 318248
auugauucacguggaagag

SEQ ID NO: 360538 - RNA, 19 nt, Artificial Sequence
  Description of Artificial Sequence: Synthetic oligonucleotide
  Antisense Strand to SEQ ID NO: 360537
cucuuccacgugaaucaau

SEQ ID NO: 360539 - RNA, 19 nt, Artificial Sequence
  Description of Artificial Sequence: Synthetic oligonucleotide
  Sense Strand Starting at position 532 of SEQ ID NO: 318269
ugguggugagaguaagagu

SEQ ID NO: 360540 - RNA, 19 nt, Artificial Sequence
  Description of Artificial Sequence: Synthetic oligonucleotide
  Antisense Strand to SEQ ID NO: 360539
acucuuacucucaccacca

SEQ ID NO: 360541 - RNA, 19 nt, Artificial Sequence
  Description of Artificial Sequence: Synthetic oligonucleotide
  Sense Strand Starting at position 532 of SEQ ID NO: 318334
gggacugggcuaugauaca

SEQ ID NO: 360542 - RNA, 19 nt, Artificial Sequence
  Description of Artificial Sequence: Synthetic oligonucleotide
  Antisense Strand to SEQ ID NO: 360541
uguaucauagcccaguccc

SEQ ID NO: 360543 - RNA, 19 nt, Artificial Sequence
  Description of Artificial Sequence: Synthetic oligonucleotide
  Sense Strand Starting at position 532 of SEQ ID NO: 318385
cccguauaccuauaugcaa

SEQ ID NO: 360544 - RNA, 19 nt, Artificial Sequence
  Description of Artificial Sequence: Synthetic oligonucleotide
  Antisense Strand to SEQ ID NO: 360543
uugcauauagguauacggg

SEQ ID NO: 360545 - RNA, 19 nt, Artificial Sequence
  Description of Artificial Sequence: Synthetic oligonucleotide
  Sense Strand Starting at position 532 of SEQ ID NO: 318649
gggaguggacuuugguauu

SEQ ID NO: 360546 - RNA, 19 nt, Artificial Sequence
  Description of Artificial Sequence: Synthetic oligonucleotide
  Antisense Strand to SEQ ID NO: 360545
aauaccaaaguccacuccc

SEQ ID NO: 360547 - RNA, 19 nt, Artificial Sequence
  Description of Artificial Sequence: Synthetic oligonucleotide
  Sense Strand Starting at position 532 of SEQ ID NO: 318702
gcagucaagguugagaauu

SEQ ID NO: 360548 - RNA, 19 nt, Artificial Sequence
  Description of Artificial Sequence: Synthetic oligonucleotide
  Antisense Strand to SEQ ID NO: 360547
aauucucaaccuugacugc

SEQ ID NO: 360549 - RNA, 19 nt, Artificial Sequence
  Description of Artificial Sequence: Synthetic oligonucleotide
  Sense Strand Starting at position 532 of SEQ ID NO: 318724
gggauucuagagugaacug

SEQ ID NO: 360550 - RNA, 19 nt, Artificial Sequence
  Description of Artificial Sequence: Synthetic oligonucleotide
  Antisense Strand to SEQ ID NO: 360549
caguucacucuagaauccc

SEQ ID NO: 360551 - RNA, 19 nt, Artificial Sequence
  Description of Artificial Sequence: Synthetic oligonucleotide
  Sense Strand Starting at position 532 of SEQ ID NO: 318817
aggguuaaugagugcaaca

SEQ ID NO: 360552 - RNA, 19 nt, Artificial Sequence
  Description of Artificial Sequence: Synthetic oligonucleotide
  Antisense Strand to SEQ ID NO: 360551
uguugcacucauuaacccu

SEQ ID NO: 360553 - RNA, 19 nt, Artificial Sequence
  Description of Artificial Sequence: Synthetic oligonucleotide
  Sense Strand Starting at position 532 of SEQ ID NO: 318822
uaaugagugcaacagguuu

SEQ ID NO: 360554 - RNA, 19 nt, Artificial Sequence
  Description of Artificial Sequence: Synthetic oligonucleotide
  Antisense Strand to SEQ ID NO: 360553
aaaccuguugcacucauua

SEQ ID NO: 360555 - RNA, 19 nt, Artificial Sequence
  Description of Artificial Sequence: Synthetic oligonucleotide
  Sense Strand Starting at position 532 of SEQ ID NO: 318841
ugaauaauguuugcaauug

SEQ ID NO: 360556 - RNA, 19 nt, Artificial Sequence
  Description of Artificial Sequence: Synthetic oligonucleotide
  Antisense Strand to SEQ ID NO: 360555
caauugcaaacauuauuca

SEQ ID NO: 360557 - RNA, 19 nt, Artificial Sequence
  Description of Artificial Sequence: Synthetic oligonucleotide
  Sense Strand Starting at position 532 of SEQ ID NO: 318933
auguauggaaucuggucaa

SEQ ID NO: 360558 - RNA, 19 nt, Artificial Sequence
  Description of Artificial Sequence: Synthetic oligonucleotide
  Antisense Strand to SEQ ID NO: 360557
uugaccagauuccauacau

SEQ ID NO: 360559 - RNA, 19 nt, Artificial Sequence
  Description of Artificial Sequence: Synthetic oligonucleotide
  Sense Strand Starting at position 532 of SEQ ID NO: 318936
uauggaaucuggucaaggu

SEQ ID NO: 360560 - RNA, 19 nt, Artificial Sequence
  Description of Artificial Sequence: Synthetic oligonucleotide
  Antisense Strand to SEQ ID NO: 360559
accuugaccagauuccaua

SEQ ID NO: 360561 - RNA, 19 nt, Artificial Sequence
  Description of Artificial Sequence: Synthetic oligonucleotide
  Sense Strand Starting at position 532 of SEQ ID NO: 319033
aguugagcuccuuaaugaa

SEQ ID NO: 360562 - RNA, 19 nt, Artificial Sequence
  Description of Artificial Sequence: Synthetic oligonucleotide
  Antisense Strand to SEQ ID NO: 360561
uucauuaaggagcucaacu

SEQ ID NO: 360563 - RNA, 19 nt, Artificial Sequence
  Description of Artificial Sequence: Synthetic oligonucleotide
  Sense Strand Starting at position 533 of SEQ ID NO: 315353
ggacucuagcaaugaggga

SEQ ID NO: 360564 - RNA, 19 nt, Artificial Sequence
  Description of Artificial Sequence: Synthetic oligonucleotide
  Antisense Strand to SEQ ID NO: 360563
ucccucauugcuagagucc

SEQ ID NO: 360565 - RNA, 19 nt, Artificial Sequence
  Description of Artificial Sequence: Synthetic oligonucleotide
  Sense Strand Starting at position 533 of SEQ ID NO: 315400
cagguaacucugugcauag

SEQ ID NO: 360566 - RNA, 19 nt, Artificial Sequence
  Description of Artificial Sequence: Synthetic oligonucleotide
  Antisense Strand to SEQ ID NO: 360565
cuaugcacagaguuaccug

SEQ ID NO: 360567 - RNA, 19 nt, Artificial Sequence
  Description of Artificial Sequence: Synthetic oligonucleotide
  Sense Strand Starting at position 533 of SEQ ID NO: 315401
agguaacucugugcauaga

SEQ ID NO: 360568 - RNA, 19 nt, Artificial Sequence
  Description of Artificial Sequence: Synthetic oligonucleotide
  Antisense Strand to SEQ ID NO: 360567
ucuaugcacagaguuaccu

SEQ ID NO: 360569 - RNA, 19 nt, Artificial Sequence
  Description of Artificial Sequence: Synthetic oligonucleotide
  Sense Strand Starting at position 533 of SEQ ID NO: 315485
gaaagugugugaguaagac

SEQ ID NO: 360570 - RNA, 19 nt, Artificial Sequence
  Description of Artificial Sequence: Synthetic oligonucleotide
  Antisense Strand to SEQ ID NO: 360569
gucuuacucacacacuuuc

SEQ ID NO: 360571 - RNA, 19 nt, Artificial Sequence
  Description of Artificial Sequence: Synthetic oligonucleotide
  Sense Strand Starting at position 533 of SEQ ID NO: 315536
ggaucugguucuguaguca

SEQ ID NO: 360572 - RNA, 19 nt, Artificial Sequence
  Description of Artificial Sequence: Synthetic oligonucleotide
  Antisense Strand to SEQ ID NO: 360571
ugacuacagaaccagaucc

SEQ ID NO: 360573 - RNA, 19 nt, Artificial Sequence
  Description of Artificial Sequence: Synthetic oligonucleotide
  Sense Strand Starting at position 533 of SEQ ID NO: 315666
aaagcugaagagugugaaa

SEQ ID NO: 360574 - RNA, 19 nt, Artificial Sequence
  Description of Artificial Sequence: Synthetic oligonucleotide
  Antisense Strand to SEQ ID NO: 360573
uuucacacucuucagcuuu

SEQ ID NO: 360575 - RNA, 19 nt, Artificial Sequence
  Description of Artificial Sequence: Synthetic oligonucleotide
  Sense Strand Starting at position 533 of SEQ ID NO: 315864
uaggccuaacguuagaaua

SEQ ID NO: 360576 - RNA, 19 nt, Artificial Sequence
  Description of Artificial Sequence: Synthetic oligonucleotide
  Antisense Strand to SEQ ID NO: 360575
uauucuaacguuaggccua

SEQ ID NO: 360577 - RNA, 19 nt, Artificial Sequence
  Description of Artificial Sequence: Synthetic oligonucleotide
  Sense Strand Starting at position 533 of SEQ ID NO: 316054
gcagaucagaucgaucagu

SEQ ID NO: 360578 - RNA, 19 nt, Artificial Sequence
  Description of Artificial Sequence: Synthetic oligonucleotide
  Antisense Strand to SEQ ID NO: 360577
acugaucgaucugaucugc

SEQ ID NO: 360579 - RNA, 19 nt, Artificial Sequence
  Description of Artificial Sequence: Synthetic oligonucleotide
  Sense Strand Starting at position 533 of SEQ ID NO: 316089
uauacuuuagacgaguuaa

SEQ ID NO: 360580 - RNA, 19 nt, Artificial Sequence
  Description of Artificial Sequence: Synthetic oligonucleotide
  Antisense Strand to SEQ ID NO: 360579
uuaacucgucuaaaguaua

SEQ ID NO: 360581 - RNA, 19 nt, Artificial Sequence
  Description of Artificial Sequence: Synthetic oligonucleotide
  Sense Strand Starting at position 533 of SEQ ID NO: 316099
acgaguuaaugucuaucuu

SEQ ID NO: 360582 - RNA, 19 nt, Artificial Sequence
  Description of Artificial Sequence: Synthetic oligonucleotide
  Antisense Strand to SEQ ID NO: 360581
aagauagacauuaacucgu

SEQ ID NO: 360583 - RNA, 19 nt, Artificial Sequence
  Description of Artificial Sequence: Synthetic oligonucleotide
  Sense Strand Starting at position 533 of SEQ ID NO: 316100
cgaguuaaugucuaucuua

SEQ ID NO: 360584 - RNA, 19 nt, Artificial Sequence
  Description of Artificial Sequence: Synthetic oligonucleotide
  Antisense Strand to SEQ ID NO: 360583
uaagauagacauuaacucg

SEQ ID NO: 360585 - RNA, 19 nt, Artificial Sequence
  Description of Artificial Sequence: Synthetic oligonucleotide
  Sense Strand Starting at position 533 of SEQ ID NO: 316103
guuaaugucuaucuuagac

SEQ ID NO: 360586 - RNA, 19 nt, Artificial Sequence
  Description of Artificial Sequence: Synthetic oligonucleotide
  Antisense Strand to SEQ ID NO: 360585
gucuaagauagacauuaac

SEQ ID NO: 360587 - RNA, 19 nt, Artificial Sequence
  Description of Artificial Sequence: Synthetic oligonucleotide
  Sense Strand Starting at position 533 of SEQ ID NO: 316185
gaacauccucccggucaga

SEQ ID NO: 360588 - RNA, 19 nt, Artificial Sequence
  Description of Artificial Sequence: Synthetic oligonucleotide
  Antisense Strand to SEQ ID NO: 360587
ucugaccgggaggauguuc

SEQ ID NO: 360589 - RNA, 19 nt, Artificial Sequence
  Description of Artificial Sequence: Synthetic oligonucleotide
  Sense Strand Starting at position 533 of SEQ ID NO: 316456
ucggacaaggaauguuaaa

SEQ ID NO: 360590 - RNA, 19 nt, Artificial Sequence
  Description of Artificial Sequence: Synthetic oligonucleotide
  Antisense Strand to SEQ ID NO: 360589
uuuaacauuccuuguccga

SEQ ID NO: 360591 - RNA, 19 nt, Artificial Sequence
  Description of Artificial Sequence: Synthetic oligonucleotide
  Sense Strand Starting at position 533 of SEQ ID NO: 316489
ccaauagcuggcgagauau

SEQ ID NO: 360592 - RNA, 19 nt, Artificial Sequence
  Description of Artificial Sequence: Synthetic oligonucleotide
  Antisense Strand to SEQ ID NO: 360591
auaucucgccagcuauugg

SEQ ID NO: 360593 - RNA, 19 nt, Artificial Sequence
  Description of Artificial Sequence: Synthetic oligonucleotide
  Sense Strand Starting at position 533 of SEQ ID NO: 316491
aauagcuggcgagauauua

SEQ ID NO: 360594 - RNA, 19 nt, Artificial Sequence
  Description of Artificial Sequence: Synthetic oligonucleotide
  Antisense Strand to SEQ ID NO: 360593
uaauaucucgccagcuauu

SEQ ID NO: 360595 - RNA, 19 nt, Artificial Sequence
  Description of Artificial Sequence: Synthetic oligonucleotide
  Sense Strand Starting at position 533 of SEQ ID NO: 316665
accaacagcccuugguaaa

SEQ ID NO: 360596 - RNA, 19 nt, Artificial Sequence
  Description of Artificial Sequence: Synthetic oligonucleotide
  Antisense Strand to SEQ ID NO: 360595
uuuaccaagggcuguuggu

SEQ ID NO: 360597 - RNA, 19 nt, Artificial Sequence
  Description of Artificial Sequence: Synthetic oligonucleotide
  Sense Strand Starting at position 533 of SEQ ID NO: 316666
ccaacagcccuugguaaau

SEQ ID NO: 360598 - RNA, 19 nt, Artificial Sequence
  Description of Artificial Sequence: Synthetic oligonucleotide
  Antisense Strand to SEQ ID NO: 360597
auuuaccaagggcuguugg

SEQ ID NO: 360599 - RNA, 19 nt, Artificial Sequence
  Description of Artificial Sequence: Synthetic oligonucleotide
  Sense Strand Starting at position 533 of SEQ ID NO: 317058
caaggaaaguuacagauuu

SEQ ID NO: 360600 - RNA, 19 nt, Artificial Sequence
  Description of Artificial Sequence: Synthetic oligonucleotide
  Antisense Strand to SEQ ID NO: 360599
aaaucuguaacuuuccuug

SEQ ID NO: 360601 - RNA, 19 nt, Artificial Sequence
  Description of Artificial Sequence: Synthetic oligonucleotide
  Sense Strand Starting at position 533 of SEQ ID NO: 317254
acaggucauacugguuagu

SEQ ID NO: 360602 - RNA, 19 nt, Artificial Sequence
  Description of Artificial Sequence: Synthetic oligonucleotide
  Antisense Strand to SEQ ID NO: 360601
acuaaccaguaugaccugu

SEQ ID NO: 360603 - RNA, 19 nt, Artificial Sequence
  Description of Artificial Sequence: Synthetic oligonucleotide
  Sense Strand Starting at position 533 of SEQ ID NO: 317365
acuugccuuugaguggaaa

SEQ ID NO: 360604 - RNA, 19 nt, Artificial Sequence
  Description of Artificial Sequence: Synthetic oligonucleotide
  Antisense Strand to SEQ ID NO: 360603
uuuccacucaaaggcaagu

SEQ ID NO: 360605 - RNA, 19 nt, Artificial Sequence
  Description of Artificial Sequence: Synthetic oligonucleotide
  Sense Strand Starting at position 533 of SEQ ID NO: 317367
uugccuuugaguggaaaga

SEQ ID NO: 360606 - RNA, 19 nt, Artificial Sequence
  Description of Artificial Sequence: Synthetic oligonucleotide
  Antisense Strand to SEQ ID NO: 360605
ucuuuccacucaaaggcaa

SEQ ID NO: 360607 - RNA, 19 nt, Artificial Sequence
  Description of Artificial Sequence: Synthetic oligonucleotide
  Sense Strand Starting at position 533 of SEQ ID NO: 317524
guacauggaugaucuucua

SEQ ID NO: 360608 - RNA, 19 nt, Artificial Sequence
  Description of Artificial Sequence: Synthetic oligonucleotide
  Antisense Strand to SEQ ID NO: 360607
uagaagaucauccauguac

SEQ ID NO: 360609 - RNA, 19 nt, Artificial Sequence
  Description of Artificial Sequence: Synthetic oligonucleotide
  Sense Strand Starting at position 533 of SEQ ID NO: 317732
gauacugccgucuauggau

SEQ ID NO: 360610 - RNA, 19 nt, Artificial Sequence
  Description of Artificial Sequence: Synthetic oligonucleotide
  Antisense Strand to SEQ ID NO: 360609
auccauagacggcaguauc

SEQ ID NO: 360611 - RNA, 19 nt, Artificial Sequence
  Description of Artificial Sequence: Synthetic oligonucleotide
  Sense Strand Starting at position 533 of SEQ ID NO: 318021
acccauggaugguccaaau

SEQ ID NO: 360612 - RNA, 19 nt, Artificial Sequence
  Description of Artificial Sequence: Synthetic oligonucleotide
  Antisense Strand to SEQ ID NO: 360611
auuuggaccauccaugggu

SEQ ID NO: 360613 - RNA, 19 nt, Artificial Sequence
  Description of Artificial Sequence: Synthetic oligonucleotide
  Sense Strand Starting at position 533 of SEQ ID NO: 318056
ggcaacuacuuugcuaaca

SEQ ID NO: 360614 - RNA, 19 nt, Artificial Sequence
  Description of Artificial Sequence: Synthetic oligonucleotide
  Antisense Strand to SEQ ID NO: 360613
uguuagcaaaguaguugcc

SEQ ID NO: 360615 - RNA, 19 nt, Artificial Sequence
  Description of Artificial Sequence: Synthetic oligonucleotide
  Sense Strand Starting at position 533 of SEQ ID NO: 318157
cagaaagguugcuuacuga

SEQ ID NO: 360616 - RNA, 19 nt, Artificial Sequence
  Description of Artificial Sequence: Synthetic oligonucleotide
  Antisense Strand to SEQ ID NO: 360615
ucaguaagcaaccuuucug

SEQ ID NO: 360617 - RNA, 19 nt, Artificial Sequence
  Description of Artificial Sequence: Synthetic oligonucleotide
  Sense Strand Starting at position 533 of SEQ ID NO: 318164
guugcuuacugacucaaga

SEQ ID NO: 360618 - RNA, 19 nt, Artificial Sequence
  Description of Artificial Sequence: Synthetic oligonucleotide
  Antisense Strand to SEQ ID NO: 360617
ucuugagucaguaagcaac

SEQ ID NO: 360619 - RNA, 19 nt, Artificial Sequence
  Description of Artificial Sequence: Synthetic oligonucleotide
  Sense Strand Starting at position 533 of SEQ ID NO: 318217
augauuuaauccgaacuac

SEQ ID NO: 360620 - RNA, 19 nt, Artificial Sequence
  Description of Artificial Sequence: Synthetic oligonucleotide
  Antisense Strand to SEQ ID NO: 360619
guaguucggauuaaaucau

SEQ ID NO: 360621 - RNA, 19 nt, Artificial Sequence
  Description of Artificial Sequence: Synthetic oligonucleotide
  Sense Strand Starting at position 533 of SEQ ID NO: 318408
acagguacucagcaguaga

SEQ ID NO: 360622 - RNA, 19 nt, Artificial Sequence
  Description of Artificial Sequence: Synthetic oligonucleotide
  Antisense Strand to SEQ ID NO: 360621
ucuacugcugaguaccugu

SEQ ID NO: 360623 - RNA, 19 nt, Artificial Sequence
  Description of Artificial Sequence: Synthetic oligonucleotide
  Sense Strand Starting at position 533 of SEQ ID NO: 318442
uaaugacuggucugagcaa

SEQ ID NO: 360624 - RNA, 19 nt, Artificial Sequence
  Description of Artificial Sequence: Synthetic oligonucleotide
  Antisense Strand to SEQ ID NO: 360623
uugcucagaccagucauua

SEQ ID NO: 360625 - RNA, 19 nt, Artificial Sequence
  Description of Artificial Sequence: Synthetic oligonucleotide
  Sense Strand Starting at position 533 of SEQ ID NO: 318454
ugagcaaacaugugaguug

SEQ ID NO: 360626 - RNA, 19 nt, Artificial Sequence
  Description of Artificial Sequence: Synthetic oligonucleotide
  Antisense Strand to SEQ ID NO: 360625
caacucacauguuugcuca

SEQ ID NO: 360627 - RNA, 19 nt, Artificial Sequence
  Description of Artificial Sequence: Synthetic oligonucleotide
  Sense Strand Starting at position 533 of SEQ ID NO: 318461
acaugugaguuguuuacac

SEQ ID NO: 360628 - RNA, 19 nt, Artificial Sequence
  Description of Artificial Sequence: Synthetic oligonucleotide
  Antisense Strand to SEQ ID NO: 360627
guguaaacaacucacaugu

SEQ ID NO: 360629 - RNA, 19 nt, Artificial Sequence
  Description of Artificial Sequence: Synthetic oligonucleotide
  Sense Strand Starting at position 533 of SEQ ID NO: 318463
augugaguuguuuacacua

SEQ ID NO: 360630 - RNA, 19 nt, Artificial Sequence
  Description of Artificial Sequence: Synthetic oligonucleotide
  Antisense Strand to SEQ ID NO: 360629
uaguguaaacaacucacau

SEQ ID NO: 360631 - RNA, 19 nt, Artificial Sequence
  Description of Artificial Sequence: Synthetic oligonucleotide
  Sense Strand Starting at position 533 of SEQ ID NO: 318468
aguuguuuacacuaaauca

SEQ ID NO: 360632 - RNA, 19 nt, Artificial Sequence
  Description of Artificial Sequence: Synthetic oligonucleotide
  Antisense Strand to SEQ ID NO: 360631
ugauuuaguguaaacaacu

SEQ ID NO: 360633 - RNA, 19 nt, Artificial Sequence
  Description of Artificial Sequence: Synthetic oligonucleotide
  Sense Strand Starting at position 533 of SEQ ID NO: 318624
gagacuugauaauccaagu

SEQ ID NO: 360634 - RNA, 19 nt, Artificial Sequence
  Description of Artificial Sequence: Synthetic oligonucleotide
  Antisense Strand to SEQ ID NO: 360633
acuuggauuaucaagucuc

SEQ ID NO: 360635 - RNA, 19 nt, Artificial Sequence
  Description of Artificial Sequence: Synthetic oligonucleotide
  Sense Strand Starting at position 533 of SEQ ID NO: 318726
ggaauaaucuagcugacca

SEQ ID NO: 360636 - RNA, 19 nt, Artificial Sequence
  Description of Artificial Sequence: Synthetic oligonucleotide
  Antisense Strand to SEQ ID NO: 360635
uggucagcuagauuauucc

SEQ ID NO: 360637 - RNA, 19 nt, Artificial Sequence
  Description of Artificial Sequence: Synthetic oligonucleotide
  Sense Strand Starting at position 533 of SEQ ID NO: 318929
cccuucaugcgagagguau

SEQ ID NO: 360638 - RNA, 19 nt, Artificial Sequence
  Description of Artificial Sequence: Synthetic oligonucleotide
  Antisense Strand to SEQ ID NO: 360637
auaccucucgcaugaaggg

SEQ ID NO: 360639 - RNA, 19 nt, Artificial Sequence
  Description of Artificial Sequence: Synthetic oligonucleotide
  Sense Strand Starting at position 533 of SEQ ID NO: 319001
guccucagaguuuauggau

SEQ ID NO: 360640 - RNA, 19 nt, Artificial Sequence
  Description of Artificial Sequence: Synthetic oligonucleotide
  Antisense Strand to SEQ ID NO: 360639
auccauaaacucugaggac

SEQ ID NO: 360641 - RNA, 19 nt, Artificial Sequence
  Description of Artificial Sequence: Synthetic oligonucleotide
  Sense Strand Starting at position 533 of SEQ ID NO: 319043
agacaaguugcagaucguu

SEQ ID NO: 360642 - RNA, 19 nt, Artificial Sequence
  Description of Artificial Sequence: Synthetic oligonucleotide
  Antisense Strand to SEQ ID NO: 360641
aacgaucugcaacuugucu

SEQ ID NO: 360643 - RNA, 19 nt, Artificial Sequence
  Description of Artificial Sequence: Synthetic oligonucleotide
  Sense Strand Starting at position 534 of SEQ ID NO: 315333
uucuguccugcugauuaau

SEQ ID NO: 360644 - RNA, 19 nt, Artificial Sequence
  Description of Artificial Sequence: Synthetic oligonucleotide
  Antisense Strand to SEQ ID NO: 360643
auuaaucagcaggacagaa

SEQ ID NO: 360645 - RNA, 19 nt, Artificial Sequence
  Description of Artificial Sequence: Synthetic oligonucleotide
  Sense Strand Starting at position 534 of SEQ ID NO: 315421
gcaagugcuaucuaaggac

SEQ ID NO: 360646 - RNA, 19 nt, Artificial Sequence
  Description of Artificial Sequence: Synthetic oligonucleotide
  Antisense Strand to SEQ ID NO: 360645
guccuuagauagcacuugc

SEQ ID NO: 360647 - RNA, 19 nt, Artificial Sequence
  Description of Artificial Sequence: Synthetic oligonucleotide
  Sense Strand Starting at position 534 of SEQ ID NO: 315508
aguggucuugucuagaucu

SEQ ID NO: 360648 - RNA, 19 nt, Artificial Sequence
  Description of Artificial Sequence: Synthetic oligonucleotide
  Antisense Strand to SEQ ID NO: 360647
agaucuagacaagaccacu

SEQ ID NO: 360649 - RNA, 19 nt, Artificial Sequence
  Description of Artificial Sequence: Synthetic oligonucleotide
  Sense Strand Starting at position 534 of SEQ ID NO: 315510
uggucuugucuagaucucu

SEQ ID NO: 360650 - RNA, 19 nt, Artificial Sequence
  Description of Artificial Sequence: Synthetic oligonucleotide
  Antisense Strand to SEQ ID NO: 360649
agagaucuagacaagacca

SEQ ID NO: 360651 - RNA, 19 nt, Artificial Sequence
  Description of Artificial Sequence: Synthetic oligonucleotide
  Sense Strand Starting at position 534 of SEQ ID NO: 315529
ucaagcacuccagaaguga

SEQ ID NO: 360652 - RNA, 19 nt, Artificial Sequence
  Description of Artificial Sequence: Synthetic oligonucleotide
  Antisense Strand to SEQ ID NO: 360651
ucacuucuggagugcuuga

SEQ ID NO: 360653 - RNA, 19 nt, Artificial Sequence
  Description of Artificial Sequence: Synthetic oligonucleotide
  Sense Strand Starting at position 534 of SEQ ID NO: 315599
ccuucuggguguguauuua

SEQ ID NO: 360654 - RNA, 19 nt, Artificial Sequence
  Description of Artificial Sequence: Synthetic oligonucleotide
  Antisense Strand to SEQ ID NO: 360653
uaaauacacacccagaagg

SEQ ID NO: 360655 - RNA, 19 nt, Artificial Sequence
  Description of Artificial Sequence: Synthetic oligonucleotide
  Sense Strand Starting at position 534 of SEQ ID NO: 315901
cgagacuccgccugaggaa

SEQ ID NO: 360656 - RNA, 19 nt, Artificial Sequence
  Description of Artificial Sequence: Synthetic oligonucleotide
  Antisense Strand to SEQ ID NO: 360655
uuccucaggcggagucucg

SEQ ID NO: 360657 - RNA, 19 nt, Artificial Sequence
  Description of Artificial Sequence: Synthetic oligonucleotide
  Sense Strand Starting at position 534 of SEQ ID NO: 316227
cacuguugucaggauauac

SEQ ID NO: 360658 - RNA, 19 nt, Artificial Sequence
  Description of Artificial Sequence: Synthetic oligonucleotide
  Antisense Strand to SEQ ID NO: 360657
guauauccugacaacagug

SEQ ID NO: 360659 - RNA, 19 nt, Artificial Sequence
  Description of Artificial Sequence: Synthetic oligonucleotide
  Sense Strand Starting at position 534 of SEQ ID NO: 316267
gugugauacaaggguaaca

SEQ ID NO: 360660 - RNA, 19 nt, Artificial Sequence
  Description of Artificial Sequence: Synthetic oligonucleotide
  Antisense Strand to SEQ ID NO: 360659
uguuacccuuguaucacac

SEQ ID NO: 360661 - RNA, 19 nt, Artificial Sequence
  Description of Artificial Sequence: Synthetic oligonucleotide
  Sense Strand Starting at position 534 of SEQ ID NO: 316871
cuuucugauuuauggaaga

SEQ ID NO: 360662 - RNA, 19 nt, Artificial Sequence
  Description of Artificial Sequence: Synthetic oligonucleotide
  Antisense Strand to SEQ ID NO: 360661
ucuuccauaaaucagaaag

SEQ ID NO: 360663 - RNA, 19 nt, Artificial Sequence
  Description of Artificial Sequence: Synthetic oligonucleotide
  Sense Strand Starting at position 534 of SEQ ID NO: 316955
cucuaaucagccuggcaaa

SEQ ID NO: 360664 - RNA, 19 nt, Artificial Sequence
  Description of Artificial Sequence: Synthetic oligonucleotide
  Antisense Strand to SEQ ID NO: 360663
uuugccaggcugauuagag

SEQ ID NO: 360665 - RNA, 19 nt, Artificial Sequence
  Description of Artificial Sequence: Synthetic oligonucleotide
  Sense Strand Starting at position 534 of SEQ ID NO: 316956
ucuaaucagccuggcaaau

SEQ ID NO: 360666 - RNA, 19 nt, Artificial Sequence
  Description of Artificial Sequence: Synthetic oligonucleotide
  Antisense Strand to SEQ ID NO: 360665
auuugccaggcugauuaga

SEQ ID NO: 360667 - RNA, 19 nt, Artificial Sequence
  Description of Artificial Sequence: Synthetic oligonucleotide
  Sense Strand Starting at position 534 of SEQ ID NO: 316968
ggcaaaugcccacgagaua

SEQ ID NO: 360668 - RNA, 19 nt, Artificial Sequence
  Description of Artificial Sequence: Synthetic oligonucleotide
  Antisense Strand to SEQ ID NO: 360667
uaucucgugggcauuugcc

SEQ ID NO: 360669 - RNA, 19 nt, Artificial Sequence
  Description of Artificial Sequence: Synthetic oligonucleotide
  Sense Strand Starting at position 534 of SEQ ID NO: 316969
gcaaaugcccacgagauaa

SEQ ID NO: 360670 - RNA, 19 nt, Artificial Sequence
  Description of Artificial Sequence: Synthetic oligonucleotide
  Antisense Strand to SEQ ID NO: 360669
uuaucucgugggcauuugc

SEQ ID NO: 360671 - RNA, 19 nt, Artificial Sequence
  Description of Artificial Sequence: Synthetic oligonucleotide
  Sense Strand Starting at position 534 of SEQ ID NO: 317024
cgggcaguggcuaguauau

SEQ ID NO: 360672 - RNA, 19 nt, Artificial Sequence
  Description of Artificial Sequence: Synthetic oligonucleotide
  Antisense Strand to SEQ ID NO: 360671
auauacuagccacugcccg

SEQ ID NO: 360673 - RNA, 19 nt, Artificial Sequence
  Description of Artificial Sequence: Synthetic oligonucleotide
  Sense Strand Starting at position 534 of SEQ ID NO: 317031
uggcuaguauaugucaaua

SEQ ID NO: 360674 - RNA, 19 nt, Artificial Sequence
  Description of Artificial Sequence: Synthetic oligonucleotide
  Antisense Strand to SEQ ID NO: 360673
uauugacauauacuagcca

SEQ ID NO: 360675 - RNA, 19 nt, Artificial Sequence
  Description of Artificial Sequence: Synthetic oligonucleotide
  Sense Strand Starting at position 534 of SEQ ID NO: 317223
ucaguuaguucuuuacaac

SEQ ID NO: 360676 - RNA, 19 nt, Artificial Sequence
  Description of Artificial Sequence: Synthetic oligonucleotide
  Antisense Strand to SEQ ID NO: 360675
guuguaaagaacuaacuga

SEQ ID NO: 360677 - RNA, 19 nt, Artificial Sequence
  Description of Artificial Sequence: Synthetic oligonucleotide
  Sense Strand Starting at position 534 of SEQ ID NO: 317411
gagacugaggcaugugagu

SEQ ID NO: 360678 - RNA, 19 nt, Artificial Sequence
  Description of Artificial Sequence: Synthetic oligonucleotide
  Antisense Strand to SEQ ID NO: 360677
acucacaugccucagucuc

SEQ ID NO: 360679 - RNA, 19 nt, Artificial Sequence
  Description of Artificial Sequence: Synthetic oligonucleotide
  Sense Strand Starting at position 534 of SEQ ID NO: 317540
auaauaaagcuagguugua

SEQ ID NO: 360680 - RNA, 19 nt, Artificial Sequence
  Description of Artificial Sequence: Synthetic oligonucleotide
  Antisense Strand to SEQ ID NO: 360679
uacaaccuagcuuuauuau

SEQ ID NO: 360681 - RNA, 19 nt, Artificial Sequence
  Description of Artificial Sequence: Synthetic oligonucleotide
  Sense Strand Starting at position 534 of SEQ ID NO: 317541
uaauaaagcuagguuguaa

SEQ ID NO: 360682 - RNA, 19 nt, Artificial Sequence
  Description of Artificial Sequence: Synthetic oligonucleotide
  Antisense Strand to SEQ ID NO: 360681
uuacaaccuagcuuuauua

SEQ ID NO: 360683 - RNA, 19 nt, Artificial Sequence
  Description of Artificial Sequence: Synthetic oligonucleotide
  Sense Strand Starting at position 534 of SEQ ID NO: 317552
gguuguaauuccuuaauua

SEQ ID NO: 360684 - RNA, 19 nt, Artificial Sequence
  Description of Artificial Sequence: Synthetic oligonucleotide
  Antisense Strand to SEQ ID NO: 360683
uaauuaaggaauuacaacc

SEQ ID NO: 360685 - RNA, 19 nt, Artificial Sequence
  Description of Artificial Sequence: Synthetic oligonucleotide
  Sense Strand Starting at position 534 of SEQ ID NO: 317553
guuguaauuccuuaauuac

SEQ ID NO: 360686 - RNA, 19 nt, Artificial Sequence
  Description of Artificial Sequence: Synthetic oligonucleotide
  Antisense Strand to SEQ ID NO: 360685
guaauuaaggaauuacaac

SEQ ID NO: 360687 - RNA, 19 nt, Artificial Sequence
  Description of Artificial Sequence: Synthetic oligonucleotide
  Sense Strand Starting at position 534 of SEQ ID NO: 317667
guuacugaaugcuccagaa

SEQ ID NO: 360688 - RNA, 19 nt, Artificial Sequence
  Description of Artificial Sequence: Synthetic oligonucleotide
  Antisense Strand to SEQ ID NO: 360687
uucuggagcauucaguaac

SEQ ID NO: 360689 - RNA, 19 nt, Artificial Sequence
  Description of Artificial Sequence: Synthetic oligonucleotide
  Sense Strand Starting at position 534 of SEQ ID NO: 317698
cacugagugcuccaaagag

SEQ ID NO: 360690 - RNA, 19 nt, Artificial Sequence
  Description of Artificial Sequence: Synthetic oligonucleotide
  Antisense Strand to SEQ ID NO: 360689
cucuuuggagcacucagug

SEQ ID NO: 360691 - RNA, 19 nt, Artificial Sequence
  Description of Artificial Sequence: Synthetic oligonucleotide
  Sense Strand Starting at position 534 of SEQ ID NO: 317763
gagugccugccagaucaga

SEQ ID NO: 360692 - RNA, 19 nt, Artificial Sequence
  Description of Artificial Sequence: Synthetic oligonucleotide
  Antisense Strand to SEQ ID NO: 360691
ucugaucuggcaggcacuc

SEQ ID NO: 360693 - RNA, 19 nt, Artificial Sequence
  Description of Artificial Sequence: Synthetic oligonucleotide
  Sense Strand Starting at position 534 of SEQ ID NO: 317808
ccugacuaggccuacauau

SEQ ID NO: 360694 - RNA, 19 nt, Artificial Sequence
  Description of Artificial Sequence: Synthetic oligonucleotide
  Antisense Strand to SEQ ID NO: 360693
auauguaggccuagucagg

SEQ ID NO: 360695 - RNA, 19 nt, Artificial Sequence
  Description of Artificial Sequence: Synthetic oligonucleotide
  Sense Strand Starting at position 534 of SEQ ID NO: 317894
ugguucucacauugucaaa

SEQ ID NO: 360696 - RNA, 19 nt, Artificial Sequence
  Description of Artificial Sequence: Synthetic oligonucleotide
  Antisense Strand to SEQ ID NO: 360695
uuugacaaugugagaacca

SEQ ID NO: 360697 - RNA, 19 nt, Artificial Sequence
  Description of Artificial Sequence: Synthetic oligonucleotide
  Sense Strand Starting at position 534 of SEQ ID NO: 317988
gugaaacuauuugaagaua

SEQ ID NO: 360698 - RNA, 19 nt, Artificial Sequence
  Description of Artificial Sequence: Synthetic oligonucleotide
  Antisense Strand to SEQ ID NO: 360697
uaucuucaaauaguuucac

SEQ ID NO: 360699 - RNA, 19 nt, Artificial Sequence
  Description of Artificial Sequence: Synthetic oligonucleotide
  Sense Strand Starting at position 534 of SEQ ID NO: 318001
aagauaacauggucuuguu

SEQ ID NO: 360700 - RNA, 19 nt, Artificial Sequence
  Description of Artificial Sequence: Synthetic oligonucleotide
  Antisense Strand to SEQ ID NO: 360699
aacaagaccauguuaucuu

SEQ ID NO: 360701 - RNA, 19 nt, Artificial Sequence
  Description of Artificial Sequence: Synthetic oligonucleotide
  Sense Strand Starting at position 534 of SEQ ID NO: 318009
auggucuuguuuguagaaa

SEQ ID NO: 360702 - RNA, 19 nt, Artificial Sequence
  Description of Artificial Sequence: Synthetic oligonucleotide
  Antisense Strand to SEQ ID NO: 360701
uuucuacaaacaagaccau

SEQ ID NO: 360703 - RNA, 19 nt, Artificial Sequence
  Description of Artificial Sequence: Synthetic oligonucleotide
  Sense Strand Starting at position 534 of SEQ ID NO: 318254
ugaagagcuucugucucau

SEQ ID NO: 360704 - RNA, 19 nt, Artificial Sequence
  Description of Artificial Sequence: Synthetic oligonucleotide
  Antisense Strand to SEQ ID NO: 360703
augagacagaagcucuuca

SEQ ID NO: 360705 - RNA, 19 nt, Artificial Sequence
  Description of Artificial Sequence: Synthetic oligonucleotide
  Sense Strand Starting at position 534 of SEQ ID NO: 318330
ggaccuguguuaucucauu

SEQ ID NO: 360706 - RNA, 19 nt, Artificial Sequence
  Description of Artificial Sequence: Synthetic oligonucleotide
  Antisense Strand to SEQ ID NO: 360705
aaugagauaacacaggucc

SEQ ID NO: 360707 - RNA, 19 nt, Artificial Sequence
  Description of Artificial Sequence: Synthetic oligonucleotide
  Sense Strand Starting at position 534 of SEQ ID NO: 318369
ggaagugggaacuguaauu

SEQ ID NO: 360708 - RNA, 19 nt, Artificial Sequence
  Description of Artificial Sequence: Synthetic oligonucleotide
  Antisense Strand to SEQ ID NO: 360707
aauuacaguucccacuucc

SEQ ID NO: 360709 - RNA, 19 nt, Artificial Sequence
  Description of Artificial Sequence: Synthetic oligonucleotide
  Sense Strand Starting at position 534 of SEQ ID NO: 318877
cuagauguaucucuucuuu

SEQ ID NO: 360710 - RNA, 19 nt, Artificial Sequence
  Description of Artificial Sequence: Synthetic oligonucleotide
  Antisense Strand to SEQ ID NO: 360709
aaagaagagauacaucuag

SEQ ID NO: 360711 - RNA, 19 nt, Artificial Sequence
  Description of Artificial Sequence: Synthetic oligonucleotide
  Sense Strand Starting at position 534 of SEQ ID NO: 318942
gacucuguacugugaucau

SEQ ID NO: 360712 - RNA, 19 nt, Artificial Sequence
  Description of Artificial Sequence: Synthetic oligonucleotide
  Antisense Strand to SEQ ID NO: 360711
augaucacaguacagaguc

SEQ ID NO: 360713 - RNA, 19 nt, Artificial Sequence
  Description of Artificial Sequence: Synthetic oligonucleotide
  Sense Strand Starting at position 534 of SEQ ID NO: 318981
cccuguuuggcuggaagau

SEQ ID NO: 360714 - RNA, 19 nt, Artificial Sequence
  Description of Artificial Sequence: Synthetic oligonucleotide
  Antisense Strand to SEQ ID NO: 360713
aucuuccagccaaacaggg

SEQ ID NO: 360715 - RNA, 19 nt, Artificial Sequence
  Description of Artificial Sequence: Synthetic oligonucleotide
  Sense Strand Starting at position 534 of SEQ ID NO: 318982
ccuguuuggcuggaagauc

SEQ ID NO: 360716 - RNA, 19 nt, Artificial Sequence
  Description of Artificial Sequence: Synthetic oligonucleotide
  Antisense Strand to SEQ ID NO: 360715
gaucuuccagccaaacagg

SEQ ID NO: 360717 - RNA, 19 nt, Artificial Sequence
  Description of Artificial Sequence: Synthetic oligonucleotide
  Sense Strand Starting at position 534 of SEQ ID NO: 319094
aaaugagaugguugaggca

SEQ ID NO: 360718 - RNA, 19 nt, Artificial Sequence
  Description of Artificial Sequence: Synthetic oligonucleotide
  Antisense Strand to SEQ ID NO: 360717
ugccucaaccaucucauuu

SEQ ID NO: 360719 - RNA, 19 nt, Artificial Sequence
  Description of Artificial Sequence: Synthetic oligonucleotide
  Sense Strand Starting at position 534 of SEQ ID NO: 319127
gaacaaauguguguucucu

SEQ ID NO: 360720 - RNA, 19 nt, Artificial Sequence
  Description of Artificial Sequence: Synthetic oligonucleotide
  Antisense Strand to SEQ ID NO: 360719
agagaacacacauuuguuc

SEQ ID NO: 360721 - RNA, 19 nt, Artificial Sequence
  Description of Artificial Sequence: Synthetic oligonucleotide
  Sense Strand Starting at position 534 of SEQ ID NO: 319192
gaugauguggcuggaacau

SEQ ID NO: 360722 - RNA, 19 nt, Artificial Sequence
  Description of Artificial Sequence: Synthetic oligonucleotide
  Antisense Strand to SEQ ID NO: 360721
auguuccagccacaucauc

SEQ ID NO: 360723 - RNA, 19 nt, Artificial Sequence
  Description of Artificial Sequence: Synthetic oligonucleotide
  Sense Strand Starting at position 535 of SEQ ID NO: 315302
acagaauucugagagaguc

SEQ ID NO: 360724 - RNA, 19 nt, Artificial Sequence
  Description of Artificial Sequence: Synthetic oligonucleotide
  Antisense Strand to SEQ ID NO: 360723
gacucucucagaauucugu

SEQ ID NO: 360725 - RNA, 19 nt, Artificial Sequence
  Description of Artificial Sequence: Synthetic oligonucleotide
  Sense Strand Starting at position 535 of SEQ ID NO: 315506
acgggauucucugucacau

SEQ ID NO: 360726 - RNA, 19 nt, Artificial Sequence
  Description of Artificial Sequence: Synthetic oligonucleotide
  Antisense Strand to SEQ ID NO: 360725
augugacagagaaucccgu

SEQ ID NO: 360727 - RNA, 19 nt, Artificial Sequence
  Description of Artificial Sequence: Synthetic oligonucleotide
  Sense Strand Starting at position 535 of SEQ ID NO: 315508
gggauucucugucacauuu

SEQ ID NO: 360728 - RNA, 19 nt, Artificial Sequence
  Description of Artificial Sequence: Synthetic oligonucleotide
  Antisense Strand to SEQ ID NO: 360727
aaaugugacagagaauccc

SEQ ID NO: 360729 - RNA, 19 nt, Artificial Sequence
  Description of Artificial Sequence: Synthetic oligonucleotide
  Sense Strand Starting at position 535 of SEQ ID NO: 315595
cugaaucacacucgaggau

SEQ ID NO: 360730 - RNA, 19 nt, Artificial Sequence
  Description of Artificial Sequence: Synthetic oligonucleotide
  Antisense Strand to SEQ ID NO: 360729
auccucgagugugauucag

SEQ ID NO: 360731 - RNA, 19 nt, Artificial Sequence
  Description of Artificial Sequence: Synthetic oligonucleotide
  Sense Strand Starting at position 535 of SEQ ID NO: 315628
ccaggauuccugugagcag

SEQ ID NO: 360732 - RNA, 19 nt, Artificial Sequence
  Description of Artificial Sequence: Synthetic oligonucleotide
  Antisense Strand to SEQ ID NO: 360731
cugcucacaggaauccugg

SEQ ID NO: 360733 - RNA, 19 nt, Artificial Sequence
  Description of Artificial Sequence: Synthetic oligonucleotide
  Sense Strand Starting at position 535 of SEQ ID NO: 315761
aggcaacauggguguucaa

SEQ ID NO: 360734 - RNA, 19 nt, Artificial Sequence
  Description of Artificial Sequence: Synthetic oligonucleotide
  Antisense Strand to SEQ ID NO: 360733
uugaacacccauguugccu

SEQ ID NO: 360735 - RNA, 19 nt, Artificial Sequence
  Description of Artificial Sequence: Synthetic oligonucleotide
  Sense Strand Starting at position 535 of SEQ ID NO: 315882
gaaugcugugaugggauaa

SEQ ID NO: 360736 - RNA, 19 nt, Artificial Sequence
  Description of Artificial Sequence: Synthetic oligonucleotide
  Antisense Strand to SEQ ID NO: 360735
uuaucccaucacagcauuc

SEQ ID NO: 360737 - RNA, 19 nt, Artificial Sequence
  Description of Artificial Sequence: Synthetic oligonucleotide
  Sense Strand Starting at position 535 of SEQ ID NO: 315902
gcauaaugaugcucucaug

SEQ ID NO: 360738 - RNA, 19 nt, Artificial Sequence
  Description of Artificial Sequence: Synthetic oligonucleotide
  Antisense Strand to SEQ ID NO: 360737
caugagagcaucauuaugc

SEQ ID NO: 360739 - RNA, 19 nt, Artificial Sequence
  Description of Artificial Sequence: Synthetic oligonucleotide
  Sense Strand Starting at position 535 of SEQ ID NO: 316178
gccacucugccuggaacau

SEQ ID NO: 360740 - RNA, 19 nt, Artificial Sequence
  Description of Artificial Sequence: Synthetic oligonucleotide
  Antisense Strand to SEQ ID NO: 360739
auguuccaggcagaguggc

SEQ ID NO: 360741 - RNA, 19 nt, Artificial Sequence
  Description of Artificial Sequence: Synthetic oligonucleotide
  Sense Strand Starting at position 535 of SEQ ID NO: 316188
cuggaacaucucugcacua

SEQ ID NO: 360742 - RNA, 19 nt, Artificial Sequence
  Description of Artificial Sequence: Synthetic oligonucleotide
  Antisense Strand to SEQ ID NO: 360741
uagugcagagauguuccag

SEQ ID NO: 360743 - RNA, 19 nt, Artificial Sequence
  Description of Artificial Sequence: Synthetic oligonucleotide
  Sense Strand Starting at position 535 of SEQ ID NO: 316189
uggaacaucucugcacuau

SEQ ID NO: 360744 - RNA, 19 nt, Artificial Sequence
  Description of Artificial Sequence: Synthetic oligonucleotide
  Antisense Strand to SEQ ID NO: 360743
auagugcagagauguucca

SEQ ID NO: 360745 - RNA, 19 nt, Artificial Sequence
  Description of Artificial Sequence: Synthetic oligonucleotide
  Sense Strand Starting at position 535 of SEQ ID NO: 316190
ggaacaucucugcacuauc

SEQ ID NO: 360746 - RNA, 19 nt, Artificial Sequence
  Description of Artificial Sequence: Synthetic oligonucleotide
  Antisense Strand to SEQ ID NO: 360745
gauagugcagagauguucc

SEQ ID NO: 360747 - RNA, 19 nt, Artificial Sequence
  Description of Artificial Sequence: Synthetic oligonucleotide
  Sense Strand Starting at position 535 of SEQ ID NO: 316314
acgugacuuccuugaggag

SEQ ID NO: 360748 - RNA, 19 nt, Artificial Sequence
  Description of Artificial Sequence: Synthetic oligonucleotide
  Antisense Strand to SEQ ID NO: 360747
cuccucaaggaagucacgu

SEQ ID NO: 360749 - RNA, 19 nt, Artificial Sequence
  Description of Artificial Sequence: Synthetic oligonucleotide
  Sense Strand Starting at position 535 of SEQ ID NO: 316396
ucuagaaucugaucucuga

SEQ ID NO: 360750 - RNA, 19 nt, Artificial Sequence
  Description of Artificial Sequence: Synthetic oligonucleotide
  Antisense Strand to SEQ ID NO: 360749
ucagagaucagauucuaga

SEQ ID NO: 360751 - RNA, 19 nt, Artificial Sequence
  Description of Artificial Sequence: Synthetic oligonucleotide
  Sense Strand Starting at position 535 of SEQ ID NO: 316574
gguggugguccggacaguu

SEQ ID NO: 360752 - RNA, 19 nt, Artificial Sequence
  Description of Artificial Sequence: Synthetic oligonucleotide
  Antisense Strand to SEQ ID NO: 360751
aacuguccggaccaccacc

SEQ ID NO: 360753 - RNA, 19 nt, Artificial Sequence
  Description of Artificial Sequence: Synthetic oligonucleotide
  Sense Strand Starting at position 535 of SEQ ID NO: 316625
gggcuuaccucaguguauu

SEQ ID NO: 360754 - RNA, 19 nt, Artificial Sequence
  Description of Artificial Sequence: Synthetic oligonucleotide
  Antisense Strand to SEQ ID NO: 360753
aauacacugagguaagccc

SEQ ID NO: 360755 - RNA, 19 nt, Artificial Sequence
  Description of Artificial Sequence: Synthetic oligonucleotide
  Sense Strand Starting at position 535 of SEQ ID NO: 316626
ggcuuaccucaguguauuc

SEQ ID NO: 360756 - RNA, 19 nt, Artificial Sequence
  Description of Artificial Sequence: Synthetic oligonucleotide
  Antisense Strand to SEQ ID NO: 360755
gaauacacugagguaagcc

SEQ ID NO: 360757 - RNA, 19 nt, Artificial Sequence
  Description of Artificial Sequence: Synthetic oligonucleotide
  Sense Strand Starting at position 535 of SEQ ID NO: 316758
ugaguauaacaauauugca

SEQ ID NO: 360758 - RNA, 19 nt, Artificial Sequence
  Description of Artificial Sequence: Synthetic oligonucleotide
  Antisense Strand to SEQ ID NO: 360757
ugcaauauuguuauacuca

SEQ ID NO: 360759 - RNA, 19 nt, Artificial Sequence
  Description of Artificial Sequence: Synthetic oligonucleotide
  Sense Strand Starting at position 535 of SEQ ID NO: 317591
gaaccuuggugagacaacu

SEQ ID NO: 360760 - RNA, 19 nt, Artificial Sequence
  Description of Artificial Sequence: Synthetic oligonucleotide
  Antisense Strand to SEQ ID NO: 360759
aguugucucaccaagguuc

SEQ ID NO: 360761 - RNA, 19 nt, Artificial Sequence
  Description of Artificial Sequence: Synthetic oligonucleotide
  Sense Strand Starting at position 535 of SEQ ID NO: 317693
ugaaacgauguuuggcaga

SEQ ID NO: 360762 - RNA, 19 nt, Artificial Sequence
  Description of Artificial Sequence: Synthetic oligonucleotide
  Antisense Strand to SEQ ID NO: 360761
ucugccaaacaucguuuca

SEQ ID NO: 360763 - RNA, 19 nt, Artificial Sequence
  Description of Artificial Sequence: Synthetic oligonucleotide
  Sense Strand Starting at position 535 of SEQ ID NO: 317695
aaacgauguuuggcagagu

SEQ ID NO: 360764 - RNA, 19 nt, Artificial Sequence
  Description of Artificial Sequence: Synthetic oligonucleotide
  Antisense Strand to SEQ ID NO: 360763
acucugccaaacaucguuu

SEQ ID NO: 360765 - RNA, 19 nt, Artificial Sequence
  Description of Artificial Sequence: Synthetic oligonucleotide
  Sense Strand Starting at position 535 of SEQ ID NO: 317698
cgauguuuggcagagucaa

SEQ ID NO: 360766 - RNA, 19 nt, Artificial Sequence
  Description of Artificial Sequence: Synthetic oligonucleotide
  Antisense Strand to SEQ ID NO: 360765
uugacucugccaaacaucg

SEQ ID NO: 360767 - RNA, 19 nt, Artificial Sequence
  Description of Artificial Sequence: Synthetic oligonucleotide
  Sense Strand Starting at position 535 of SEQ ID NO: 317907
cuagcccguccugaugaau

SEQ ID NO: 360768 - RNA, 19 nt, Artificial Sequence
  Description of Artificial Sequence: Synthetic oligonucleotide
  Antisense Strand to SEQ ID NO: 360767
auucaucaggacgggcuag

SEQ ID NO: 360769 - RNA, 19 nt, Artificial Sequence
  Description of Artificial Sequence: Synthetic oligonucleotide
  Sense Strand Starting at position 535 of SEQ ID NO: 318144
auuugaaccuuugaacagu

SEQ ID NO: 360770 - RNA, 19 nt, Artificial Sequence
  Description of Artificial Sequence: Synthetic oligonucleotide
  Antisense Strand to SEQ ID NO: 360769
acuguucaaagguucaaau

SEQ ID NO: 360771 - RNA, 19 nt, Artificial Sequence
  Description of Artificial Sequence: Synthetic oligonucleotide
  Sense Strand Starting at position 535 of SEQ ID NO: 318361
ucacaagcuguguauggua

SEQ ID NO: 360772 - RNA, 19 nt, Artificial Sequence
  Description of Artificial Sequence: Synthetic oligonucleotide
  Antisense Strand to SEQ ID NO: 360771
uaccauacacagcuuguga

SEQ ID NO: 360773 - RNA, 19 nt, Artificial Sequence
  Description of Artificial Sequence: Synthetic oligonucleotide
  Sense Strand Starting at position 535 of SEQ ID NO: 318408
ggcccaugucgguaacaca

SEQ ID NO: 360774 - RNA, 19 nt, Artificial Sequence
  Description of Artificial Sequence: Synthetic oligonucleotide
  Antisense Strand to SEQ ID NO: 360773
uguguuaccgacaugggcc

SEQ ID NO: 360775 - RNA, 19 nt, Artificial Sequence
  Description of Artificial Sequence: Synthetic oligonucleotide
  Sense Strand Starting at position 535 of SEQ ID NO: 318473
gcuacagaugcuuacucau

SEQ ID NO: 360776 - RNA, 19 nt, Artificial Sequence
  Description of Artificial Sequence: Synthetic oligonucleotide
  Antisense Strand to SEQ ID NO: 360775
augaguaagcaucuguagc

SEQ ID NO: 360777 - RNA, 19 nt, Artificial Sequence
  Description of Artificial Sequence: Synthetic oligonucleotide
  Sense Strand Starting at position 535 of SEQ ID NO: 318697
ugaugccauuucuauaaag

SEQ ID NO: 360778 - RNA, 19 nt, Artificial Sequence
  Description of Artificial Sequence: Synthetic oligonucleotide
  Antisense Strand to SEQ ID NO: 360777
cuuuauagaaauggcauca

SEQ ID NO: 360779 - RNA, 19 nt, Artificial Sequence
  Description of Artificial Sequence: Synthetic oligonucleotide
  Sense Strand Starting at position 535 of SEQ ID NO: 318714
agggcuuagugcuccauaa

SEQ ID NO: 360780 - RNA, 19 nt, Artificial Sequence
  Description of Artificial Sequence: Synthetic oligonucleotide
  Antisense Strand to SEQ ID NO: 360779
uuauggagcacuaagcccu

SEQ ID NO: 360781 - RNA, 19 nt, Artificial Sequence
  Description of Artificial Sequence: Synthetic oligonucleotide
  Sense Strand Starting at position 535 of SEQ ID NO: 318716
ggcuuagugcuccauaaau

SEQ ID NO: 360782 - RNA, 19 nt, Artificial Sequence
  Description of Artificial Sequence: Synthetic oligonucleotide
  Antisense Strand to SEQ ID NO: 360781
auuuauggagcacuaagcc

SEQ ID NO: 360783 - RNA, 19 nt, Artificial Sequence
  Description of Artificial Sequence: Synthetic oligonucleotide
  Sense Strand Starting at position 535 of SEQ ID NO: 318774
auuaaaggacuuugugaug

SEQ ID NO: 360784 - RNA, 19 nt, Artificial Sequence
  Description of Artificial Sequence: Synthetic oligonucleotide
  Antisense Strand to SEQ ID NO: 360783
caucacaaaguccuuuaau

SEQ ID NO: 360785 - RNA, 19 nt, Artificial Sequence
  Description of Artificial Sequence: Synthetic oligonucleotide
  Sense Strand Starting at position 535 of SEQ ID NO: 318783
cuuugugaugcccagugau

SEQ ID NO: 360786 - RNA, 19 nt, Artificial Sequence
  Description of Artificial Sequence: Synthetic oligonucleotide
  Antisense Strand to SEQ ID NO: 360785
aucacugggcaucacaaag

SEQ ID NO: 360787 - RNA, 19 nt, Artificial Sequence
  Description of Artificial Sequence: Synthetic oligonucleotide
  Sense Strand Starting at position 535 of SEQ ID NO: 318786
ugugaugcccagugauaug

SEQ ID NO: 360788 - RNA, 19 nt, Artificial Sequence
  Description of Artificial Sequence: Synthetic oligonucleotide
  Antisense Strand to SEQ ID NO: 360787
cauaucacugggcaucaca

SEQ ID NO: 360789 - RNA, 19 nt, Artificial Sequence
  Description of Artificial Sequence: Synthetic oligonucleotide
  Sense Strand Starting at position 535 of SEQ ID NO: 318791
ugcccagugauaugagacu

SEQ ID NO: 360790 - RNA, 19 nt, Artificial Sequence
  Description of Artificial Sequence: Synthetic oligonucleotide
  Antisense Strand to SEQ ID NO: 360789
agucucauaucacugggca

SEQ ID NO: 360791 - RNA, 19 nt, Artificial Sequence
  Description of Artificial Sequence: Synthetic oligonucleotide
  Sense Strand Starting at position 535 of SEQ ID NO: 318805
agacuuuggccuugagaua

SEQ ID NO: 360792 - RNA, 19 nt, Artificial Sequence
  Description of Artificial Sequence: Synthetic oligonucleotide
  Antisense Strand to SEQ ID NO: 360791
uaucucaaggccaaagucu

SEQ ID NO: 360793 - RNA, 19 nt, Artificial Sequence
  Description of Artificial Sequence: Synthetic oligonucleotide
  Sense Strand Starting at position 535 of SEQ ID NO: 318836
gucacuguccugggcauua

SEQ ID NO: 360794 - RNA, 19 nt, Artificial Sequence
  Description of Artificial Sequence: Synthetic oligonucleotide
  Antisense Strand to SEQ ID NO: 360793
uaaugcccaggacagugac

SEQ ID NO: 360795 - RNA, 19 nt, Artificial Sequence
  Description of Artificial Sequence: Synthetic oligonucleotide
  Sense Strand Starting at position 535 of SEQ ID NO: 318849
gcauuauggauucgagaag

SEQ ID NO: 360796 - RNA, 19 nt, Artificial Sequence
  Description of Artificial Sequence: Synthetic oligonucleotide
  Antisense Strand to SEQ ID NO: 360795
cuucucgaauccauaaugc

SEQ ID NO: 360797 - RNA, 19 nt, Artificial Sequence
  Description of Artificial Sequence: Synthetic oligonucleotide
  Sense Strand Starting at position 535 of SEQ ID NO: 318958
cucccacucccuggugauu

SEQ ID NO: 360798 - RNA, 19 nt, Artificial Sequence
  Description of Artificial Sequence: Synthetic oligonucleotide
  Antisense Strand to SEQ ID NO: 360797
aaucaccagggagugggag

SEQ ID NO: 360799 - RNA, 19 nt, Artificial Sequence
  Description of Artificial Sequence: Synthetic oligonucleotide
  Sense Strand Starting at position 535 of SEQ ID NO: 319017
acccuuuggaaccgaguua

SEQ ID NO: 360800 - RNA, 19 nt, Artificial Sequence
  Description of Artificial Sequence: Synthetic oligonucleotide
  Antisense Strand to SEQ ID NO: 360799
uaacucgguuccaaagggu

SEQ ID NO: 360801 - RNA, 19 nt, Artificial Sequence
  Description of Artificial Sequence: Synthetic oligonucleotide
  Sense Strand Starting at position 535 of SEQ ID NO: 319029
cgaguuagcacucaggaua

SEQ ID NO: 360802 - RNA, 19 nt, Artificial Sequence
  Description of Artificial Sequence: Synthetic oligonucleotide
  Antisense Strand to SEQ ID NO: 360801
uauccugagugcuaacucg

SEQ ID NO: 360803 - RNA, 19 nt, Artificial Sequence
  Description of Artificial Sequence: Synthetic oligonucleotide
  Sense Strand Starting at position 536 of SEQ ID NO: 315698
gauggucuuguuggaucau

SEQ ID NO: 360804 - RNA, 19 nt, Artificial Sequence
  Description of Artificial Sequence: Synthetic oligonucleotide
  Antisense Strand to SEQ ID NO: 360803
augauccaacaagaccauc

SEQ ID NO: 360805 - RNA, 19 nt, Artificial Sequence
  Description of Artificial Sequence: Synthetic oligonucleotide
  Sense Strand Starting at position 536 of SEQ ID NO: 315717
augguaaucccacgauuaa

SEQ ID NO: 360806 - RNA, 19 nt, Artificial Sequence
  Description of Artificial Sequence: Synthetic oligonucleotide
  Antisense Strand to SEQ ID NO: 360805
uuaaucgugggauuaccau

SEQ ID NO: 360807 - RNA, 19 nt, Artificial Sequence
  Description of Artificial Sequence: Synthetic oligonucleotide
  Sense Strand Starting at position 536 of SEQ ID NO: 315718
ugguaaucccacgauuaac

SEQ ID NO: 360808 - RNA, 19 nt, Artificial Sequence
  Description of Artificial Sequence: Synthetic oligonucleotide
  Antisense Strand to SEQ ID NO: 360807
guuaaucgugggauuacca

SEQ ID NO: 360809 - RNA, 19 nt, Artificial Sequence
  Description of Artificial Sequence: Synthetic oligonucleotide
  Sense Strand Starting at position 536 of SEQ ID NO: 315990
guaagaguuccuuguuuag

SEQ ID NO: 360810 - RNA, 19 nt, Artificial Sequence
  Description of Artificial Sequence: Synthetic oligonucleotide
  Antisense Strand to SEQ ID NO: 360809
cuaaacaaggaacucuuac

SEQ ID NO: 360811 - RNA, 19 nt, Artificial Sequence
  Description of Artificial Sequence: Synthetic oligonucleotide
  Sense Strand Starting at position 536 of SEQ ID NO: 316313
uuguguauucuggauagua

SEQ ID NO: 360812 - RNA, 19 nt, Artificial Sequence
  Description of Artificial Sequence: Synthetic oligonucleotide
  Antisense Strand to SEQ ID NO: 360811
uacuauccagaauacacaa

SEQ ID NO: 360813 - RNA, 19 nt, Artificial Sequence
  Description of Artificial Sequence: Synthetic oligonucleotide
  Sense Strand Starting at position 536 of SEQ ID NO: 316315
guguauucuggauaguaca

SEQ ID NO: 360814 - RNA, 19 nt, Artificial Sequence
  Description of Artificial Sequence: Synthetic oligonucleotide
  Antisense Strand to SEQ ID NO: 360813
uguacuauccagaauacac

SEQ ID NO: 360815 - RNA, 19 nt, Artificial Sequence
  Description of Artificial Sequence: Synthetic oligonucleotide
  Sense Strand Starting at position 536 of SEQ ID NO: 316333
accuguaucagguguacua

SEQ ID NO: 360816 - RNA, 19 nt, Artificial Sequence
  Description of Artificial Sequence: Synthetic oligonucleotide
  Antisense Strand to SEQ ID NO: 360815
uaguacaccugauacaggu

SEQ ID NO: 360817 - RNA, 19 nt, Artificial Sequence
  Description of Artificial Sequence: Synthetic oligonucleotide
  Sense Strand Starting at position 536 of SEQ ID NO: 316335
cuguaucagguguacuaua

SEQ ID NO: 360818 - RNA, 19 nt, Artificial Sequence
  Description of Artificial Sequence: Synthetic oligonucleotide
  Antisense Strand to SEQ ID NO: 360817
uauaguacaccugauacag

SEQ ID NO: 360819 - RNA, 19 nt, Artificial Sequence
  Description of Artificial Sequence: Synthetic oligonucleotide
  Sense Strand Starting at position 536 of SEQ ID NO: 316345
uguacuauaugaguugcaa

SEQ ID NO: 360820 - RNA, 19 nt, Artificial Sequence
  Description of Artificial Sequence: Synthetic oligonucleotide
  Antisense Strand to SEQ ID NO: 360819
uugcaacucauauaguaca

SEQ ID NO: 360821 - RNA, 19 nt, Artificial Sequence
  Description of Artificial Sequence: Synthetic oligonucleotide
  Sense Strand Starting at position 536 of SEQ ID NO: 316349
cuauaugaguugcaaauau

SEQ ID NO: 360822 - RNA, 19 nt, Artificial Sequence
  Description of Artificial Sequence: Synthetic oligonucleotide
  Antisense Strand to SEQ ID NO: 360821
auauuugcaacucauauag

SEQ ID NO: 360823 - RNA, 19 nt, Artificial Sequence
  Description of Artificial Sequence: Synthetic oligonucleotide
  Sense Strand Starting at position 536 of SEQ ID NO: 316567
ggaugugaaucugaagaua

SEQ ID NO: 360824 - RNA, 19 nt, Artificial Sequence
  Description of Artificial Sequence: Synthetic oligonucleotide
  Antisense Strand to SEQ ID NO: 360823
uaucuucagauucacaucc

SEQ ID NO: 360825 - RNA, 19 nt, Artificial Sequence
  Description of Artificial Sequence: Synthetic oligonucleotide
  Sense Strand Starting at position 536 of SEQ ID NO: 316902
cggagucuaggcgguaauu

SEQ ID NO: 360826 - RNA, 19 nt, Artificial Sequence
  Description of Artificial Sequence: Synthetic oligonucleotide
  Antisense Strand to SEQ ID NO: 360825
aauuaccgccuagacuccg

SEQ ID NO: 360827 - RNA, 19 nt, Artificial Sequence
  Description of Artificial Sequence: Synthetic oligonucleotide
  Sense Strand Starting at position 536 of SEQ ID NO: 317219
cauggugugcuuugaaaug

SEQ ID NO: 360828 - RNA, 19 nt, Artificial Sequence
  Description of Artificial Sequence: Synthetic oligonucleotide
  Antisense Strand to SEQ ID NO: 360827
cauuucaaagcacaccaug

SEQ ID NO: 360829 - RNA, 19 nt, Artificial Sequence
  Description of Artificial Sequence: Synthetic oligonucleotide
  Sense Strand Starting at position 536 of SEQ ID NO: 317224
ugugcuuugaaaugaggga

SEQ ID NO: 360830 - RNA, 19 nt, Artificial Sequence
  Description of Artificial Sequence: Synthetic oligonucleotide
  Antisense Strand to SEQ ID NO: 360829
ucccucauuucaaagcaca

SEQ ID NO: 360831 - RNA, 19 nt, Artificial Sequence
  Description of Artificial Sequence: Synthetic oligonucleotide
  Sense Strand Starting at position 536 of SEQ ID NO: 317270
gaaauaagucacggguuag

SEQ ID NO: 360832 - RNA, 19 nt, Artificial Sequence
  Description of Artificial Sequence: Synthetic oligonucleotide
  Antisense Strand to SEQ ID NO: 360831
cuaacccgugacuuauuuc

SEQ ID NO: 360833 - RNA, 19 nt, Artificial Sequence
  Description of Artificial Sequence: Synthetic oligonucleotide
  Sense Strand Starting at position 536 of SEQ ID NO: 317288
ggcaguaacuugucaggca

SEQ ID NO: 360834 - RNA, 19 nt, Artificial Sequence
  Description of Artificial Sequence: Synthetic oligonucleotide
  Antisense Strand to SEQ ID NO: 360833
ugccugacaaguuacugcc

SEQ ID NO: 360835 - RNA, 19 nt, Artificial Sequence
  Description of Artificial Sequence: Synthetic oligonucleotide
  Sense Strand Starting at position 536 of SEQ ID NO: 317335
aaggguuccgguuauggga

SEQ ID NO: 360836 - RNA, 19 nt, Artificial Sequence
  Description of Artificial Sequence: Synthetic oligonucleotide
  Antisense Strand to SEQ ID NO: 360835
ucccauaaccggaacccuu

SEQ ID NO: 360837 - RNA, 19 nt, Artificial Sequence
  Description of Artificial Sequence: Synthetic oligonucleotide
  Sense Strand Starting at position 536 of SEQ ID NO: 317398
ugccuuggugcucaugagu

SEQ ID NO: 360838 - RNA, 19 nt, Artificial Sequence
  Description of Artificial Sequence: Synthetic oligonucleotide
  Antisense Strand to SEQ ID NO: 360837
acucaugagcaccaaggca

SEQ ID NO: 360839 - RNA, 19 nt, Artificial Sequence
  Description of Artificial Sequence: Synthetic oligonucleotide
  Sense Strand Starting at position 536 of SEQ ID NO: 317407
gcucaugagucacccgaga

SEQ ID NO: 360840 - RNA, 19 nt, Artificial Sequence
  Description of Artificial Sequence: Synthetic oligonucleotide
  Antisense Strand to SEQ ID NO: 360839
ucucgggugacucaugagc

SEQ ID NO: 360841 - RNA, 19 nt, Artificial Sequence
  Description of Artificial Sequence: Synthetic oligonucleotide
  Sense Strand Starting at position 536 of SEQ ID NO: 317409
ucaugagucacccgagaag

SEQ ID NO: 360842 - RNA, 19 nt, Artificial Sequence
  Description of Artificial Sequence: Synthetic oligonucleotide
  Antisense Strand to SEQ ID NO: 360841
cuucucgggugacucauga

SEQ ID NO: 360843 - RNA, 19 nt, Artificial Sequence
  Description of Artificial Sequence: Synthetic oligonucleotide
  Sense Strand Starting at position 536 of SEQ ID NO: 317420
ccgagaagaugugccuaga

SEQ ID NO: 360844 - RNA, 19 nt, Artificial Sequence
  Description of Artificial Sequence: Synthetic oligonucleotide
  Antisense Strand to SEQ ID NO: 360843
ucuaggcacaucuucucgg

SEQ ID NO: 360845 - RNA, 19 nt, Artificial Sequence
  Description of Artificial Sequence: Synthetic oligonucleotide
  Sense Strand Starting at position 536 of SEQ ID NO: 317455
gugugagagccugagucua

SEQ ID NO: 360846 - RNA, 19 nt, Artificial Sequence
  Description of Artificial Sequence: Synthetic oligonucleotide
  Antisense Strand to SEQ ID NO: 360845
uagacucaggcucucacac

SEQ ID NO: 360847 - RNA, 19 nt, Artificial Sequence
  Description of Artificial Sequence: Synthetic oligonucleotide
  Sense Strand Starting at position 536 of SEQ ID NO: 317646
ggccgugaggcucaaagaa

SEQ ID NO: 360848 - RNA, 19 nt, Artificial Sequence
  Description of Artificial Sequence: Synthetic oligonucleotide
  Antisense Strand to SEQ ID NO: 360847
uucuuugagccucacggcc

SEQ ID NO: 360849 - RNA, 19 nt, Artificial Sequence
  Description of Artificial Sequence: Synthetic oligonucleotide
  Sense Strand Starting at position 536 of SEQ ID NO: 317670
ucuagacuccugugugagu

SEQ ID NO: 360850 - RNA, 19 nt, Artificial Sequence
  Description of Artificial Sequence: Synthetic oligonucleotide
  Antisense Strand to SEQ ID NO: 360849
acucacacaggagucuaga

SEQ ID NO: 360851 - RNA, 19 nt, Artificial Sequence
  Description of Artificial Sequence: Synthetic oligonucleotide
  Sense Strand Starting at position 536 of SEQ ID NO: 317671
cuagacuccugugugaguu

SEQ ID NO: 360852 - RNA, 19 nt, Artificial Sequence
  Description of Artificial Sequence: Synthetic oligonucleotide
  Antisense Strand to SEQ ID NO: 360851
aacucacacaggagucuag

SEQ ID NO: 360853 - RNA, 19 nt, Artificial Sequence
  Description of Artificial Sequence: Synthetic oligonucleotide
  Sense Strand Starting at position 536 of SEQ ID NO: 317672
uagacuccugugugaguuu

SEQ ID NO: 360854 - RNA, 19 nt, Artificial Sequence
  Description of Artificial Sequence: Synthetic oligonucleotide
  Antisense Strand to SEQ ID NO: 360853
aaacucacacaggagucua

SEQ ID NO: 360855 - RNA, 19 nt, Artificial Sequence
  Description of Artificial Sequence: Synthetic oligonucleotide
  Sense Strand Starting at position 536 of SEQ ID NO: 317740
agccuugacguguguugga

SEQ ID NO: 360856 - RNA, 19 nt, Artificial Sequence
  Description of Artificial Sequence: Synthetic oligonucleotide
  Antisense Strand to SEQ ID NO: 360855
uccaacacacgucaaggcu

SEQ ID NO: 360857 - RNA, 19 nt, Artificial Sequence
  Description of Artificial Sequence: Synthetic oligonucleotide
  Sense Strand Starting at position 536 of SEQ ID NO: 317767
gggaguuuguuagaaauaa

SEQ ID NO: 360858 - RNA, 19 nt, Artificial Sequence
  Description of Artificial Sequence: Synthetic oligonucleotide
  Antisense Strand to SEQ ID NO: 360857
uuauuucuaacaaacuccc

SEQ ID NO: 360859 - RNA, 19 nt, Artificial Sequence
  Description of Artificial Sequence: Synthetic oligonucleotide
  Sense Strand Starting at position 536 of SEQ ID NO: 317818
gagacccagucaucuguau

SEQ ID NO: 360860 - RNA, 19 nt, Artificial Sequence
  Description of Artificial Sequence: Synthetic oligonucleotide
  Antisense Strand to SEQ ID NO: 360859
auacagaugacugggucuc

SEQ ID NO: 360861 - RNA, 19 nt, Artificial Sequence
  Description of Artificial Sequence: Synthetic oligonucleotide
  Sense Strand Starting at position 536 of SEQ ID NO: 317982
uggcuuucccacugccaaa

SEQ ID NO: 360862 - RNA, 19 nt, Artificial Sequence
  Description of Artificial Sequence: Synthetic oligonucleotide
  Antisense Strand to SEQ ID NO: 360861
uuuggcagugggaaagcca

SEQ ID NO: 360863 - RNA, 19 nt, Artificial Sequence
  Description of Artificial Sequence: Synthetic oligonucleotide
  Sense Strand Starting at position 536 of SEQ ID NO: 317994
ugccaaacugcuggcaaua

SEQ ID NO: 360864 - RNA, 19 nt, Artificial Sequence
  Description of Artificial Sequence: Synthetic oligonucleotide
  Antisense Strand to SEQ ID NO: 360863
uauugccagcaguuuggca

SEQ ID NO: 360865 - RNA, 19 nt, Artificial Sequence
  Description of Artificial Sequence: Synthetic oligonucleotide
  Sense Strand Starting at position 536 of SEQ ID NO: 318036
uucuaaauguggcuaucaa

SEQ ID NO: 360866 - RNA, 19 nt, Artificial Sequence
  Description of Artificial Sequence: Synthetic oligonucleotide
  Antisense Strand to SEQ ID NO: 360865
uugauagccacauuuagaa

SEQ ID NO: 360867 - RNA, 19 nt, Artificial Sequence
  Description of Artificial Sequence: Synthetic oligonucleotide
  Sense Strand Starting at position 536 of SEQ ID NO: 318037
ucuaaauguggcuaucaag

SEQ ID NO: 360868 - RNA, 19 nt, Artificial Sequence
  Description of Artificial Sequence: Synthetic oligonucleotide
  Antisense Strand to SEQ ID NO: 360867
cuugauagccacauuuaga

SEQ ID NO: 360869 - RNA, 19 nt, Artificial Sequence
  Description of Artificial Sequence: Synthetic oligonucleotide
  Sense Strand Starting at position 536 of SEQ ID NO: 318040
aaauguggcuaucaaggau

SEQ ID NO: 360870 - RNA, 19 nt, Artificial Sequence
  Description of Artificial Sequence: Synthetic oligonucleotide
  Antisense Strand to SEQ ID NO: 360869
auccuugauagccacauuu

SEQ ID NO: 360871 - RNA, 19 nt, Artificial Sequence
  Description of Artificial Sequence: Synthetic oligonucleotide
  Sense Strand Starting at position 536 of SEQ ID NO: 318052
caaggauguucugggagag

SEQ ID NO: 360872 - RNA, 19 nt, Artificial Sequence
  Description of Artificial Sequence: Synthetic oligonucleotide
  Antisense Strand to SEQ ID NO: 360871
cucucccagaacauccuug

SEQ ID NO: 360873 - RNA, 19 nt, Artificial Sequence
  Description of Artificial Sequence: Synthetic oligonucleotide
  Sense Strand Starting at position 536 of SEQ ID NO: 318569
ggaggugcuucaguuguca

SEQ ID NO: 360874 - RNA, 19 nt, Artificial Sequence
  Description of Artificial Sequence: Synthetic oligonucleotide
  Antisense Strand to SEQ ID NO: 360873
ugacaacugaagcaccucc

SEQ ID NO: 360875 - RNA, 19 nt, Artificial Sequence
  Description of Artificial Sequence: Synthetic oligonucleotide
  Sense Strand Starting at position 536 of SEQ ID NO: 318669
gaggcacaguuaucuaauc

SEQ ID NO: 360876 - RNA, 19 nt, Artificial Sequence
  Description of Artificial Sequence: Synthetic oligonucleotide
  Antisense Strand to SEQ ID NO: 360875
gauuagauaacugugccuc

SEQ ID NO: 360877 - RNA, 19 nt, Artificial Sequence
  Description of Artificial Sequence: Synthetic oligonucleotide
  Sense Strand Starting at position 536 of SEQ ID NO: 318670
aggcacaguuaucuaauca

SEQ ID NO: 360878 - RNA, 19 nt, Artificial Sequence
  Description of Artificial Sequence: Synthetic oligonucleotide
  Antisense Strand to SEQ ID NO: 360877
ugauuagauaacugugccu

SEQ ID NO: 360879 - RNA, 19 nt, Artificial Sequence
  Description of Artificial Sequence: Synthetic oligonucleotide
  Sense Strand Starting at position 536 of SEQ ID NO: 319164
cucauuuauuaucgauguu

SEQ ID NO: 360880 - RNA, 19 nt, Artificial Sequence
  Description of Artificial Sequence: Synthetic oligonucleotide
  Antisense Strand to SEQ ID NO: 360879
aacaucgauaauaaaugag

SEQ ID NO: 360881 - RNA, 19 nt, Artificial Sequence
  Description of Artificial Sequence: Synthetic oligonucleotide
  Sense Strand Starting at position 536 of SEQ ID NO: 319214
gucauaauguaucccacuu

SEQ ID NO: 360882 - RNA, 19 nt, Artificial Sequence
  Description of Artificial Sequence: Synthetic oligonucleotide
  Antisense Strand to SEQ ID NO: 360881
aagugggauacauuaugac

SEQ ID NO: 360883 - RNA, 19 nt, Artificial Sequence
  Description of Artificial Sequence: Synthetic oligonucleotide
  Sense Strand Starting at position 537 of SEQ ID NO: 315255
uucuaagggcaauguaauu

SEQ ID NO: 360884 - RNA, 19 nt, Artificial Sequence
  Description of Artificial Sequence: Synthetic oligonucleotide
  Antisense Strand to SEQ ID NO: 360883
aauuacauugcccuuagaa

SEQ ID NO: 360885 - RNA, 19 nt, Artificial Sequence
  Description of Artificial Sequence: Synthetic oligonucleotide
  Sense Strand Starting at position 537 of SEQ ID NO: 315264
caauguaauucgcugaaga

SEQ ID NO: 360886 - RNA, 19 nt, Artificial Sequence
  Description of Artificial Sequence: Synthetic oligonucleotide
  Antisense Strand to SEQ ID NO: 360885
ucuucagcgaauuacauug

SEQ ID NO: 360887 - RNA, 19 nt, Artificial Sequence
  Description of Artificial Sequence: Synthetic oligonucleotide
  Sense Strand Starting at position 537 of SEQ ID NO: 315265
aauguaauucgcugaagaa

SEQ ID NO: 360888 - RNA, 19 nt, Artificial Sequence
  Description of Artificial Sequence: Synthetic oligonucleotide
  Antisense Strand to SEQ ID NO: 360887
uucuucagcgaauuacauu

SEQ ID NO: 360889 - RNA, 19 nt, Artificial Sequence
  Description of Artificial Sequence: Synthetic oligonucleotide
  Sense Strand Starting at position 537 of SEQ ID NO: 315266
auguaauucgcugaagaau

SEQ ID NO: 360890 - RNA, 19 nt, Artificial Sequence
  Description of Artificial Sequence: Synthetic oligonucleotide
  Antisense Strand to SEQ ID NO: 360889
auucuucagcgaauuacau

SEQ ID NO: 360891 - RNA, 19 nt, Artificial Sequence
  Description of Artificial Sequence: Synthetic oligonucleotide
  Sense Strand Starting at position 537 of SEQ ID NO: 315421
cggucugauagugaaagga

SEQ ID NO: 360892 - RNA, 19 nt, Artificial Sequence
  Description of Artificial Sequence: Synthetic oligonucleotide
  Antisense Strand to SEQ ID NO: 360891
uccuuucacuaucagaccg

SEQ ID NO: 360893 - RNA, 19 nt, Artificial Sequence
  Description of Artificial Sequence: Synthetic oligonucleotide
  Sense Strand Starting at position 537 of SEQ ID NO: 315460
gcagaauugaccugacuug

SEQ ID NO: 360894 - RNA, 19 nt, Artificial Sequence
  Description of Artificial Sequence: Synthetic oligonucleotide
  Antisense Strand to SEQ ID NO: 360893
caagucaggucaauucugc

SEQ ID NO: 360895 - RNA, 19 nt, Artificial Sequence
  Description of Artificial Sequence: Synthetic oligonucleotide
  Sense Strand Starting at position 537 of SEQ ID NO: 315476
uugcaaagucauuaccuga

SEQ ID NO: 360896 - RNA, 19 nt, Artificial Sequence
  Description of Artificial Sequence: Synthetic oligonucleotide
  Antisense Strand to SEQ ID NO: 360895
ucagguaaugacuuugcaa

SEQ ID NO: 360897 - RNA, 19 nt, Artificial Sequence
  Description of Artificial Sequence: Synthetic oligonucleotide
  Sense Strand Starting at position 537 of SEQ ID NO: 315517
gguuauagaguuugggaau

SEQ ID NO: 360898 - RNA, 19 nt, Artificial Sequence
  Description of Artificial Sequence: Synthetic oligonucleotide
  Antisense Strand to SEQ ID NO: 360897
auucccaaacucuauaacc

SEQ ID NO: 360899 - RNA, 19 nt, Artificial Sequence
  Description of Artificial Sequence: Synthetic oligonucleotide
  Sense Strand Starting at position 537 of SEQ ID NO: 315520
uauagaguuugggaauuug

SEQ ID NO: 360900 - RNA, 19 nt, Artificial Sequence
  Description of Artificial Sequence: Synthetic oligonucleotide
  Antisense Strand to SEQ ID NO: 360899
caaauucccaaacucuaua

SEQ ID NO: 360901 - RNA, 19 nt, Artificial Sequence
  Description of Artificial Sequence: Synthetic oligonucleotide
  Sense Strand Starting at position 537 of SEQ ID NO: 315528
uugggaauuugucauugga

SEQ ID NO: 360902 - RNA, 19 nt, Artificial Sequence
  Description of Artificial Sequence: Synthetic oligonucleotide
  Antisense Strand to SEQ ID NO: 360901
uccaaugacaaauucccaa

SEQ ID NO: 360903 - RNA, 19 nt, Artificial Sequence
  Description of Artificial Sequence: Synthetic oligonucleotide
  Sense Strand Starting at position 537 of SEQ ID NO: 315535
uuugucauuggagaacguu

SEQ ID NO: 360904 - RNA, 19 nt, Artificial Sequence
  Description of Artificial Sequence: Synthetic oligonucleotide
  Antisense Strand to SEQ ID NO: 360903
aacguucuccaaugacaaa

SEQ ID NO: 360905 - RNA, 19 nt, Artificial Sequence
  Description of Artificial Sequence: Synthetic oligonucleotide
  Sense Strand Starting at position 537 of SEQ ID NO: 315594
agcccauacugacugaaua

SEQ ID NO: 360906 - RNA, 19 nt, Artificial Sequence
  Description of Artificial Sequence: Synthetic oligonucleotide
  Antisense Strand to SEQ ID NO: 360905
uauucagucaguaugggcu

SEQ ID NO: 360907 - RNA, 19 nt, Artificial Sequence
  Description of Artificial Sequence: Synthetic oligonucleotide
  Sense Strand Starting at position 537 of SEQ ID NO: 315595
gcccauacugacugaauau

SEQ ID NO: 360908 - RNA, 19 nt, Artificial Sequence
  Description of Artificial Sequence: Synthetic oligonucleotide
  Antisense Strand to SEQ ID NO: 360907
auauucagucaguaugggc

SEQ ID NO: 360909 - RNA, 19 nt, Artificial Sequence
  Description of Artificial Sequence: Synthetic oligonucleotide
  Sense Strand Starting at position 537 of SEQ ID NO: 315634
acuuuauacggucaucagu

SEQ ID NO: 360910 - RNA, 19 nt, Artificial Sequence
  Description of Artificial Sequence: Synthetic oligonucleotide
  Antisense Strand to SEQ ID NO: 360909
acugaugaccguauaaagu

SEQ ID NO: 360911 - RNA, 19 nt, Artificial Sequence
  Description of Artificial Sequence: Synthetic oligonucleotide
  Sense Strand Starting at position 537 of SEQ ID NO: 315863
caagaauugucucccuggu

SEQ ID NO: 360912 - RNA, 19 nt, Artificial Sequence
  Description of Artificial Sequence: Synthetic oligonucleotide
  Antisense Strand to SEQ ID NO: 360911
accagggagacaauucuug

SEQ ID NO: 360913 - RNA, 19 nt, Artificial Sequence
  Description of Artificial Sequence: Synthetic oligonucleotide
  Sense Strand Starting at position 537 of SEQ ID NO: 315865
agaauugucucccugguag

SEQ ID NO: 360914 - RNA, 19 nt, Artificial Sequence
  Description of Artificial Sequence: Synthetic oligonucleotide
  Antisense Strand to SEQ ID NO: 360913
cuaccagggagacaauucu

SEQ ID NO: 360915 - RNA, 19 nt, Artificial Sequence
  Description of Artificial Sequence: Synthetic oligonucleotide
  Sense Strand Starting at position 537 of SEQ ID NO: 315867
aauugucucccugguagaa

SEQ ID NO: 360916 - RNA, 19 nt, Artificial Sequence
  Description of Artificial Sequence: Synthetic oligonucleotide
  Antisense Strand to SEQ ID NO: 360915
uucuaccagggagacaauu

SEQ ID NO: 360917 - RNA, 19 nt, Artificial Sequence
  Description of Artificial Sequence: Synthetic oligonucleotide
  Sense Strand Starting at position 537 of SEQ ID NO: 316022
ugaguuugucaccaucuca

SEQ ID NO: 360918 - RNA, 19 nt, Artificial Sequence
  Description of Artificial Sequence: Synthetic oligonucleotide
  Antisense Strand to SEQ ID NO: 360917
ugagauggugacaaacuca

SEQ ID NO: 360919 - RNA, 19 nt, Artificial Sequence
  Description of Artificial Sequence: Synthetic oligonucleotide
  Sense Strand Starting at position 537 of SEQ ID NO: 316403
gaguguacuacugguagaa

SEQ ID NO: 360920 - RNA, 19 nt, Artificial Sequence
  Description of Artificial Sequence: Synthetic oligonucleotide
  Antisense Strand to SEQ ID NO: 360919
uucuaccaguaguacacuc

SEQ ID NO: 360921 - RNA, 19 nt, Artificial Sequence
  Description of Artificial Sequence: Synthetic oligonucleotide
  Sense Strand Starting at position 537 of SEQ ID NO: 316407
guacuacugguagaauagu

SEQ ID NO: 360922 - RNA, 19 nt, Artificial Sequence
  Description of Artificial Sequence: Synthetic oligonucleotide
  Antisense Strand to SEQ ID NO: 360921
acuauucuaccaguaguac

SEQ ID NO: 360923 - RNA, 19 nt, Artificial Sequence
  Description of Artificial Sequence: Synthetic oligonucleotide
  Sense Strand Starting at position 537 of SEQ ID NO: 316415
gguagaauaguucagguga

SEQ ID NO: 360924 - RNA, 19 nt, Artificial Sequence
  Description of Artificial Sequence: Synthetic oligonucleotide
  Antisense Strand to SEQ ID NO: 360923
ucaccugaacuauucuacc

SEQ ID NO: 360925 - RNA, 19 nt, Artificial Sequence
  Description of Artificial Sequence: Synthetic oligonucleotide
  Sense Strand Starting at position 537 of SEQ ID NO: 316459
uuucuaggcuccuuuggaa

SEQ ID NO: 360926 - RNA, 19 nt, Artificial Sequence
  Description of Artificial Sequence: Synthetic oligonucleotide
  Antisense Strand to SEQ ID NO: 360925
uuccaaaggagccuagaaa

SEQ ID NO: 360927 - RNA, 19 nt, Artificial Sequence
  Description of Artificial Sequence: Synthetic oligonucleotide
  Sense Strand Starting at position 537 of SEQ ID NO: 316759
agcuaaugaugggcaaaua

SEQ ID NO: 360928 - RNA, 19 nt, Artificial Sequence
  Description of Artificial Sequence: Synthetic oligonucleotide
  Antisense Strand to SEQ ID NO: 360927
uauuugcccaucauuagcu

SEQ ID NO: 360929 - RNA, 19 nt, Artificial Sequence
  Description of Artificial Sequence: Synthetic oligonucleotide
  Sense Strand Starting at position 537 of SEQ ID NO: 316760
gcuaaugaugggcaaauau

SEQ ID NO: 360930 - RNA, 19 nt, Artificial Sequence
  Description of Artificial Sequence: Synthetic oligonucleotide
  Antisense Strand to SEQ ID NO: 360929
auauuugcccaucauuagc

SEQ ID NO: 360931 - RNA, 19 nt, Artificial Sequence
  Description of Artificial Sequence: Synthetic oligonucleotide
  Sense Strand Starting at position 537 of SEQ ID NO: 316975
acgagagucaacuggcauu

SEQ ID NO: 360932 - RNA, 19 nt, Artificial Sequence
  Description of Artificial Sequence: Synthetic oligonucleotide
  Antisense Strand to SEQ ID NO: 360931
aaugccaguugacucucgu

SEQ ID NO: 360933 - RNA, 19 nt, Artificial Sequence
  Description of Artificial Sequence: Synthetic oligonucleotide
  Sense Strand Starting at position 537 of SEQ ID NO: 317327
gucugaguuguggcgcuuu

SEQ ID NO: 360934 - RNA, 19 nt, Artificial Sequence
  Description of Artificial Sequence: Synthetic oligonucleotide
  Antisense Strand to SEQ ID NO: 360933
aaagcgccacaacucagac

SEQ ID NO: 360935 - RNA, 19 nt, Artificial Sequence
  Description of Artificial Sequence: Synthetic oligonucleotide
  Sense Strand Starting at position 537 of SEQ ID NO: 317446
acccuaaaggauuggaguu

SEQ ID NO: 360936 - RNA, 19 nt, Artificial Sequence
  Description of Artificial Sequence: Synthetic oligonucleotide
  Antisense Strand to SEQ ID NO: 360935
aacuccaauccuuuagggu

SEQ ID NO: 360937 - RNA, 19 nt, Artificial Sequence
  Description of Artificial Sequence: Synthetic oligonucleotide
  Sense Strand Starting at position 537 of SEQ ID NO: 317447
cccuaaaggauuggaguuu

SEQ ID NO: 360938 - RNA, 19 nt, Artificial Sequence
  Description of Artificial Sequence: Synthetic oligonucleotide
  Antisense Strand to SEQ ID NO: 360937
aaacuccaauccuuuaggg

SEQ ID NO: 360939 - RNA, 19 nt, Artificial Sequence
  Description of Artificial Sequence: Synthetic oligonucleotide
  Sense Strand Starting at position 537 of SEQ ID NO: 317654
caaagaauccugugauugc

SEQ ID NO: 360940 - RNA, 19 nt, Artificial Sequence
  Description of Artificial Sequence: Synthetic oligonucleotide
  Antisense Strand to SEQ ID NO: 360939
gcaaucacaggauucuuug

SEQ ID NO: 360941 - RNA, 19 nt, Artificial Sequence
  Description of Artificial Sequence: Synthetic oligonucleotide
  Sense Strand Starting at position 537 of SEQ ID NO: 317663
cugugauugcguucccugu

SEQ ID NO: 360942 - RNA, 19 nt, Artificial Sequence
  Description of Artificial Sequence: Synthetic oligonucleotide
  Antisense Strand to SEQ ID NO: 360941
acagggaacgcaaucacag

SEQ ID NO: 360943 - RNA, 19 nt, Artificial Sequence
  Description of Artificial Sequence: Synthetic oligonucleotide
  Sense Strand Starting at position 537 of SEQ ID NO: 317705
gccaaauugcuugacuuua

SEQ ID NO: 360944 - RNA, 19 nt, Artificial Sequence
  Description of Artificial Sequence: Synthetic oligonucleotide
  Antisense Strand to SEQ ID NO: 360943
uaaagucaagcaauuuggc

SEQ ID NO: 360945 - RNA, 19 nt, Artificial Sequence
  Description of Artificial Sequence: Synthetic oligonucleotide
  Sense Strand Starting at position 537 of SEQ ID NO: 317899
ccuuuauugcucgccuauu

SEQ ID NO: 360946 - RNA, 19 nt, Artificial Sequence
  Description of Artificial Sequence: Synthetic oligonucleotide
  Antisense Strand to SEQ ID NO: 360945
aauaggcgagcaauaaagg

SEQ ID NO: 360947 - RNA, 19 nt, Artificial Sequence
  Description of Artificial Sequence: Synthetic oligonucleotide
  Sense Strand Starting at position 537 of SEQ ID NO: 317921
aggcgaaauggguaaaguu

SEQ ID NO: 360948 - RNA, 19 nt, Artificial Sequence
  Description of Artificial Sequence: Synthetic oligonucleotide
  Antisense Strand to SEQ ID NO: 360947
aacuuuacccauuucgccu

SEQ ID NO: 360949 - RNA, 19 nt, Artificial Sequence
  Description of Artificial Sequence: Synthetic oligonucleotide
  Sense Strand Starting at position 537 of SEQ ID NO: 317951
gaaugaaauuggcuaguuu

SEQ ID NO: 360950 - RNA, 19 nt, Artificial Sequence
  Description of Artificial Sequence: Synthetic oligonucleotide
  Antisense Strand to SEQ ID NO: 360949
aaacuagccaauuucauuc

SEQ ID NO: 360951 - RNA, 19 nt, Artificial Sequence
  Description of Artificial Sequence: Synthetic oligonucleotide
  Sense Strand Starting at position 537 of SEQ ID NO: 317955
gaaauuggcuaguuuggaa

SEQ ID NO: 360952 - RNA, 19 nt, Artificial Sequence
  Description of Artificial Sequence: Synthetic oligonucleotide
  Antisense Strand to SEQ ID NO: 360951
uuccaaacuagccaauuuc

SEQ ID NO: 360953 - RNA, 19 nt, Artificial Sequence
  Description of Artificial Sequence: Synthetic oligonucleotide
  Sense Strand Starting at position 537 of SEQ ID NO: 317975
cuccucuuuggauauguaa

SEQ ID NO: 360954 - RNA, 19 nt, Artificial Sequence
  Description of Artificial Sequence: Synthetic oligonucleotide
  Antisense Strand to SEQ ID NO: 360953
uuacauauccaaagaggag

SEQ ID NO: 360955 - RNA, 19 nt, Artificial Sequence
  Description of Artificial Sequence: Synthetic oligonucleotide
  Sense Strand Starting at position 537 of SEQ ID NO: 318092
cgccuauaauuucugaagu

SEQ ID NO: 360956 - RNA, 19 nt, Artificial Sequence
  Description of Artificial Sequence: Synthetic oligonucleotide
  Antisense Strand to SEQ ID NO: 360955
acuucagaaauuauaggcg

SEQ ID NO: 360957 - RNA, 19 nt, Artificial Sequence
  Description of Artificial Sequence: Synthetic oligonucleotide
  Sense Strand Starting at position 537 of SEQ ID NO: 318161
guuaacugacgucacuuaa

SEQ ID NO: 360958 - RNA, 19 nt, Artificial Sequence
  Description of Artificial Sequence: Synthetic oligonucleotide
  Antisense Strand to SEQ ID NO: 360957
uuaagugacgucaguuaac

SEQ ID NO: 360959 - RNA, 19 nt, Artificial Sequence
  Description of Artificial Sequence: Synthetic oligonucleotide
  Sense Strand Starting at position 537 of SEQ ID NO: 318194
guuuauuaggcacaagauu

SEQ ID NO: 360960 - RNA, 19 nt, Artificial Sequence
  Description of Artificial Sequence: Synthetic oligonucleotide
  Antisense Strand to SEQ ID NO: 360959
aaucuugugccuaauaaac

SEQ ID NO: 360961 - RNA, 19 nt, Artificial Sequence
  Description of Artificial Sequence: Synthetic oligonucleotide
  Sense Strand Starting at position 537 of SEQ ID NO: 318208
agauuuaacuuggacacuu

SEQ ID NO: 360962 - RNA, 19 nt, Artificial Sequence
  Description of Artificial Sequence: Synthetic oligonucleotide
  Antisense Strand to SEQ ID NO: 360961
aaguguccaaguuaaaucu

SEQ ID NO: 360963 - RNA, 19 nt, Artificial Sequence
  Description of Artificial Sequence: Synthetic oligonucleotide
  Sense Strand Starting at position 538 of SEQ ID NO: 315450
uuguacuugucauuaagaa

SEQ ID NO: 360964 - RNA, 19 nt, Artificial Sequence
  Description of Artificial Sequence: Synthetic oligonucleotide
  Antisense Strand to SEQ ID NO: 360963
uucuuaaugacaaguacaa

SEQ ID NO: 360965 - RNA, 19 nt, Artificial Sequence
  Description of Artificial Sequence: Synthetic oligonucleotide
  Sense Strand Starting at position 538 of SEQ ID NO: 315451
uguacuugucauuaagaag

SEQ ID NO: 360966 - RNA, 19 nt, Artificial Sequence
  Description of Artificial Sequence: Synthetic oligonucleotide
  Antisense Strand to SEQ ID NO: 360965
cuucuuaaugacaaguaca

SEQ ID NO: 360967 - RNA, 19 nt, Artificial Sequence
  Description of Artificial Sequence: Synthetic oligonucleotide
  Sense Strand Starting at position 538 of SEQ ID NO: 315524
gggcauuauggagauaugu

SEQ ID NO: 360968 - RNA, 19 nt, Artificial Sequence
  Description of Artificial Sequence: Synthetic oligonucleotide
  Antisense Strand to SEQ ID NO: 360967
acauaucuccauaaugccc

SEQ ID NO: 360969 - RNA, 19 nt, Artificial Sequence
  Description of Artificial Sequence: Synthetic oligonucleotide
  Sense Strand Starting at position 538 of SEQ ID NO: 315526
gcauuauggagauauguau

SEQ ID NO: 360970 - RNA, 19 nt, Artificial Sequence
  Description of Artificial Sequence: Synthetic oligonucleotide
  Antisense Strand to SEQ ID NO: 360969
auacauaucuccauaaugc

SEQ ID NO: 360971 - RNA, 19 nt, Artificial Sequence
  Description of Artificial Sequence: Synthetic oligonucleotide
  Sense Strand Starting at position 538 of SEQ ID NO: 315540
uguauaaaguuuccuggaa

SEQ ID NO: 360972 - RNA, 19 nt, Artificial Sequence
  Description of Artificial Sequence: Synthetic oligonucleotide
  Antisense Strand to SEQ ID NO: 360971
uuccaggaaacuuuauaca

SEQ ID NO: 360973 - RNA, 19 nt, Artificial Sequence
  Description of Artificial Sequence: Synthetic oligonucleotide
  Sense Strand Starting at position 538 of SEQ ID NO: 315541
guauaaaguuuccuggaaa

SEQ ID NO: 360974 - RNA, 19 nt, Artificial Sequence
  Description of Artificial Sequence: Synthetic oligonucleotide
  Antisense Strand to SEQ ID NO: 360973
uuuccaggaaacuuuauac

SEQ ID NO: 360975 - RNA, 19 nt, Artificial Sequence
  Description of Artificial Sequence: Synthetic oligonucleotide
  Sense Strand Starting at position 538 of SEQ ID NO: 315580
uuaaucauagcaugguuaa

SEQ ID NO: 360976 - RNA, 19 nt, Artificial Sequence
  Description of Artificial Sequence: Synthetic oligonucleotide
  Antisense Strand to SEQ ID NO: 360975
uuaaccaugcuaugauuaa

SEQ ID NO: 360977 - RNA, 19 nt, Artificial Sequence
  Description of Artificial Sequence: Synthetic oligonucleotide
  Sense Strand Starting at position 538 of SEQ ID NO: 315583
aucauagcaugguuaaaca

SEQ ID NO: 360978 - RNA, 19 nt, Artificial Sequence
  Description of Artificial Sequence: Synthetic oligonucleotide
  Antisense Strand to SEQ ID NO: 360977
uguuuaaccaugcuaugau

SEQ ID NO: 360979 - RNA, 19 nt, Artificial Sequence
  Description of Artificial Sequence: Synthetic oligonucleotide
  Sense Strand Starting at position 538 of SEQ ID NO: 315835
aauguuuaagaagguaagu

SEQ ID NO: 360980 - RNA, 19 nt, Artificial Sequence
  Description of Artificial Sequence: Synthetic oligonucleotide
  Antisense Strand to SEQ ID NO: 360979
acuuaccuucuuaaacauu

SEQ ID NO: 360981 - RNA, 19 nt, Artificial Sequence
  Description of Artificial Sequence: Synthetic oligonucleotide
  Sense Strand Starting at position 538 of SEQ ID NO: 315837
uguuuaagaagguaaguga

SEQ ID NO: 360982 - RNA, 19 nt, Artificial Sequence
  Description of Artificial Sequence: Synthetic oligonucleotide
  Antisense Strand to SEQ ID NO: 360981
ucacuuaccuucuuaaaca

SEQ ID NO: 360983 - RNA, 19 nt, Artificial Sequence
  Description of Artificial Sequence: Synthetic oligonucleotide
  Sense Strand Starting at position 538 of SEQ ID NO: 315852
gugaaaggauaucugaguu

SEQ ID NO: 360984 - RNA, 19 nt, Artificial Sequence
  Description of Artificial Sequence: Synthetic oligonucleotide
  Antisense Strand to SEQ ID NO: 360983
aacucagauauccuuucac

SEQ ID NO: 360985 - RNA, 19 nt, Artificial Sequence
  Description of Artificial Sequence: Synthetic oligonucleotide
  Sense Strand Starting at position 538 of SEQ ID NO: 316110
caggaauugggaugcagau

SEQ ID NO: 360986 - RNA, 19 nt, Artificial Sequence
  Description of Artificial Sequence: Synthetic oligonucleotide
  Antisense Strand to SEQ ID NO: 360985
aucugcaucccaauuccug

SEQ ID NO: 360987 - RNA, 19 nt, Artificial Sequence
  Description of Artificial Sequence: Synthetic oligonucleotide
  Sense Strand Starting at position 538 of SEQ ID NO: 316284
ucagguaaugugcaaggau

SEQ ID NO: 360988 - RNA, 19 nt, Artificial Sequence
  Description of Artificial Sequence: Synthetic oligonucleotide
  Antisense Strand to SEQ ID NO: 360987
auccuugcacauuaccuga

SEQ ID NO: 360989 - RNA, 19 nt, Artificial Sequence
  Description of Artificial Sequence: Synthetic oligonucleotide
  Sense Strand Starting at position 538 of SEQ ID NO: 316364
gagugauuccagggcugga

SEQ ID NO: 360990 - RNA, 19 nt, Artificial Sequence
  Description of Artificial Sequence: Synthetic oligonucleotide
  Antisense Strand to SEQ ID NO: 360989
uccagcccuggaaucacuc

SEQ ID NO: 360991 - RNA, 19 nt, Artificial Sequence
  Description of Artificial Sequence: Synthetic oligonucleotide
  Sense Strand Starting at position 538 of SEQ ID NO: 316395
auaggauugcuccauaacu

SEQ ID NO: 360992 - RNA, 19 nt, Artificial Sequence
  Description of Artificial Sequence: Synthetic oligonucleotide
  Antisense Strand to SEQ ID NO: 360991
aguuauggagcaauccuau

SEQ ID NO: 360993 - RNA, 19 nt, Artificial Sequence
  Description of Artificial Sequence: Synthetic oligonucleotide
  Sense Strand Starting at position 538 of SEQ ID NO: 316397
aggauugcuccauaacucu

SEQ ID NO: 360994 - RNA, 19 nt, Artificial Sequence
  Description of Artificial Sequence: Synthetic oligonucleotide
  Antisense Strand to SEQ ID NO: 360993
agaguuauggagcaauccu

SEQ ID NO: 360995 - RNA, 19 nt, Artificial Sequence
  Description of Artificial Sequence: Synthetic oligonucleotide
  Sense Strand Starting at position 538 of SEQ ID NO: 316408
auaacucuucuguaucagu

SEQ ID NO: 360996 - RNA, 19 nt, Artificial Sequence
  Description of Artificial Sequence: Synthetic oligonucleotide
  Antisense Strand to SEQ ID NO: 360995
acugauacagaagaguuau

SEQ ID NO: 360997 - RNA, 19 nt, Artificial Sequence
  Description of Artificial Sequence: Synthetic oligonucleotide
  Sense Strand Starting at position 538 of SEQ ID NO: 316496
ugccuauauuugccaugua

SEQ ID NO: 360998 - RNA, 19 nt, Artificial Sequence
  Description of Artificial Sequence: Synthetic oligonucleotide
  Antisense Strand to SEQ ID NO: 360997
uacauggcaaauauaggca

SEQ ID NO: 360999 - RNA, 19 nt, Artificial Sequence
  Description of Artificial Sequence: Synthetic oligonucleotide
  Sense Strand Starting at position 538 of SEQ ID NO: 316695
cuagaugucugaccuauuc

SEQ ID NO: 361000 - RNA, 19 nt, Artificial Sequence
  Description of Artificial Sequence: Synthetic oligonucleotide
  Antisense Strand to SEQ ID NO: 360999
gaauaggucagacaucuag

SEQ ID NO: 361001 - RNA, 19 nt, Artificial Sequence
  Description of Artificial Sequence: Synthetic oligonucleotide
  Sense Strand Starting at position 538 of SEQ ID NO: 316921
cucagagagcuguaaacua

SEQ ID NO: 361002 - RNA, 19 nt, Artificial Sequence
  Description of Artificial Sequence: Synthetic oligonucleotide
  Antisense Strand to SEQ ID NO: 361001
uaguuuacagcucucugag

SEQ ID NO: 361003 - RNA, 19 nt, Artificial Sequence
  Description of Artificial Sequence: Synthetic oligonucleotide
  Sense Strand Starting at position 538 of SEQ ID NO: 316971
auauguaauggugaguuga

SEQ ID NO: 361004 - RNA, 19 nt, Artificial Sequence
  Description of Artificial Sequence: Synthetic oligonucleotide
  Antisense Strand to SEQ ID NO: 361003
ucaacucaccauuacauau

SEQ ID NO: 361005 - RNA, 19 nt, Artificial Sequence
  Description of Artificial Sequence: Synthetic oligonucleotide
  Sense Strand Starting at position 538 of SEQ ID NO: 316981
gugaguugagggcaggaua

SEQ ID NO: 361006 - RNA, 19 nt, Artificial Sequence
  Description of Artificial Sequence: Synthetic oligonucleotide
  Antisense Strand to SEQ ID NO: 361005
uauccugcccucaacucac

SEQ ID NO: 361007 - RNA, 19 nt, Artificial Sequence
  Description of Artificial Sequence: Synthetic oligonucleotide
  Sense Strand Starting at position 538 of SEQ ID NO: 317075
agacaaauguuaucagagu

SEQ ID NO: 361008 - RNA, 19 nt, Artificial Sequence
  Description of Artificial Sequence: Synthetic oligonucleotide
  Antisense Strand to SEQ ID NO: 361007
acucugauaacauuugucu

SEQ ID NO: 361009 - RNA, 19 nt, Artificial Sequence
  Description of Artificial Sequence: Synthetic oligonucleotide
  Sense Strand Starting at position 538 of SEQ ID NO: 317095
cucuccucugaggguuaga

SEQ ID NO: 361010 - RNA, 19 nt, Artificial Sequence
  Description of Artificial Sequence: Synthetic oligonucleotide
  Antisense Strand to SEQ ID NO: 361009
ucuaacccucagaggagag

SEQ ID NO: 361011 - RNA, 19 nt, Artificial Sequence
  Description of Artificial Sequence: Synthetic oligonucleotide
  Sense Strand Starting at position 538 of SEQ ID NO: 317100
cucugaggguuagaaauuu

SEQ ID NO: 361012 - RNA, 19 nt, Artificial Sequence
  Description of Artificial Sequence: Synthetic oligonucleotide
  Antisense Strand to SEQ ID NO: 361011
aaauuucuaacccucagag

SEQ ID NO: 361013 - RNA, 19 nt, Artificial Sequence
  Description of Artificial Sequence: Synthetic oligonucleotide
  Sense Strand Starting at position 538 of SEQ ID NO: 317235
ucuggaaaguagucuggau

SEQ ID NO: 361014 - RNA, 19 nt, Artificial Sequence
  Description of Artificial Sequence: Synthetic oligonucleotide
  Antisense Strand to SEQ ID NO: 361013
auccagacuacuuuccaga

SEQ ID NO: 361015 - RNA, 19 nt, Artificial Sequence
  Description of Artificial Sequence: Synthetic oligonucleotide
  Sense Strand Starting at position 538 of SEQ ID NO: 317237
uggaaaguagucuggauua

SEQ ID NO: 361016 - RNA, 19 nt, Artificial Sequence
  Description of Artificial Sequence: Synthetic oligonucleotide
  Antisense Strand to SEQ ID NO: 361015
uaauccagacuacuuucca

SEQ ID NO: 361017 - RNA, 19 nt, Artificial Sequence
  Description of Artificial Sequence: Synthetic oligonucleotide
  Sense Strand Starting at position 538 of SEQ ID NO: 317247
ucuggauuauagcuaagua

SEQ ID NO: 361018 - RNA, 19 nt, Artificial Sequence
  Description of Artificial Sequence: Synthetic oligonucleotide
  Antisense Strand to SEQ ID NO: 361017
uacuuagcuauaauccaga

SEQ ID NO: 361019 - RNA, 19 nt, Artificial Sequence
  Description of Artificial Sequence: Synthetic oligonucleotide
  Sense Strand Starting at position 538 of SEQ ID NO: 317248
cuggauuauagcuaaguag

SEQ ID NO: 361020 - RNA, 19 nt, Artificial Sequence
  Description of Artificial Sequence: Synthetic oligonucleotide
  Antisense Strand to SEQ ID NO: 361019
cuacuuagcuauaauccag

SEQ ID NO: 361021 - RNA, 19 nt, Artificial Sequence
  Description of Artificial Sequence: Synthetic oligonucleotide
  Sense Strand Starting at position 538 of SEQ ID NO: 317279
gcuuucugccuacagaaag

SEQ ID NO: 361022 - RNA, 19 nt, Artificial Sequence
  Description of Artificial Sequence: Synthetic oligonucleotide
  Antisense Strand to SEQ ID NO: 361021
cuuucuguaggcagaaagc

SEQ ID NO: 361023 - RNA, 19 nt, Artificial Sequence
  Description of Artificial Sequence: Synthetic oligonucleotide
  Sense Strand Starting at position 538 of SEQ ID NO: 317364
ucccuaugaaucggauuga

SEQ ID NO: 361024 - RNA, 19 nt, Artificial Sequence
  Description of Artificial Sequence: Synthetic oligonucleotide
  Antisense Strand to SEQ ID NO: 361023
ucaauccgauucauaggga

SEQ ID NO: 361025 - RNA, 19 nt, Artificial Sequence
  Description of Artificial Sequence: Synthetic oligonucleotide
  Sense Strand Starting at position 538 of SEQ ID NO: 317368
uaugaaucggauugacagu

SEQ ID NO: 361026 - RNA, 19 nt, Artificial Sequence
  Description of Artificial Sequence: Synthetic oligonucleotide
  Antisense Strand to SEQ ID NO: 361025
acugucaauccgauucaua

SEQ ID NO: 361027 - RNA, 19 nt, Artificial Sequence
  Description of Artificial Sequence: Synthetic oligonucleotide
  Sense Strand Starting at position 538 of SEQ ID NO: 317778
augagaacugcuugaggug

SEQ ID NO: 361028 - RNA, 19 nt, Artificial Sequence
  Description of Artificial Sequence: Synthetic oligonucleotide
  Antisense Strand to SEQ ID NO: 361027
caccucaagcaguucucau

SEQ ID NO: 361029 - RNA, 19 nt, Artificial Sequence
  Description of Artificial Sequence: Synthetic oligonucleotide
  Sense Strand Starting at position 538 of SEQ ID NO: 317931
aauggaucugguuauuguu

SEQ ID NO: 361030 - RNA, 19 nt, Artificial Sequence
  Description of Artificial Sequence: Synthetic oligonucleotide
  Antisense Strand to SEQ ID NO: 361029
aacaauaaccagauccauu

SEQ ID NO: 361031 - RNA, 19 nt, Artificial Sequence
  Description of Artificial Sequence: Synthetic oligonucleotide
  Sense Strand Starting at position 538 of SEQ ID NO: 318219
uggaguugugaagguaaua

SEQ ID NO: 361032 - RNA, 19 nt, Artificial Sequence
  Description of Artificial Sequence: Synthetic oligonucleotide
  Antisense Strand to SEQ ID NO: 361031
uauuaccuucacaacucca

SEQ ID NO: 361033 - RNA, 19 nt, Artificial Sequence
  Description of Artificial Sequence: Synthetic oligonucleotide
  Sense Strand Starting at position 538 of SEQ ID NO: 318231
gguaauagaaacugauguu

SEQ ID NO: 361034 - RNA, 19 nt, Artificial Sequence
  Description of Artificial Sequence: Synthetic oligonucleotide
  Antisense Strand to SEQ ID NO: 361033
aacaucaguuucuauuacc

SEQ ID NO: 361035 - RNA, 19 nt, Artificial Sequence
  Description of Artificial Sequence: Synthetic oligonucleotide
  Sense Strand Starting at position 538 of SEQ ID NO: 318243
ugauguuuauuccugagau

SEQ ID NO: 361036 - RNA, 19 nt, Artificial Sequence
  Description of Artificial Sequence: Synthetic oligonucleotide
  Antisense Strand to SEQ ID NO: 361035
aucucaggaauaaacauca

SEQ ID NO: 361037 - RNA, 19 nt, Artificial Sequence
  Description of Artificial Sequence: Synthetic oligonucleotide
  Sense Strand Starting at position 538 of SEQ ID NO: 318245
auguuuauuccugagauua

SEQ ID NO: 361038 - RNA, 19 nt, Artificial Sequence
  Description of Artificial Sequence: Synthetic oligonucleotide
  Antisense Strand to SEQ ID NO: 361037
uaaucucaggaauaaacau

SEQ ID NO: 361039 - RNA, 19 nt, Artificial Sequence
  Description of Artificial Sequence: Synthetic oligonucleotide
  Sense Strand Starting at position 538 of SEQ ID NO: 319003
gcuugaagcagugaugaua

SEQ ID NO: 361040 - RNA, 19 nt, Artificial Sequence
  Description of Artificial Sequence: Synthetic oligonucleotide
  Antisense Strand to SEQ ID NO: 361039
uaucaucacugcuucaagc

SEQ ID NO: 361041 - RNA, 19 nt, Artificial Sequence
  Description of Artificial Sequence: Synthetic oligonucleotide
  Sense Strand Starting at position 538 of SEQ ID NO: 319152
ggaugauguaauugauggu

SEQ ID NO: 361042 - RNA, 19 nt, Artificial Sequence
  Description of Artificial Sequence: Synthetic oligonucleotide
  Antisense Strand to SEQ ID NO: 361041
accaucaauuacaucaucc

SEQ ID NO: 361043 - RNA, 19 nt, Artificial Sequence
  Description of Artificial Sequence: Synthetic oligonucleotide
  Sense Strand Starting at position 539 of SEQ ID NO: 315242
cucuccaucgcauaggaaa

SEQ ID NO: 361044 - RNA, 19 nt, Artificial Sequence
  Description of Artificial Sequence: Synthetic oligonucleotide
  Antisense Strand to SEQ ID NO: 361043
uuuccuaugcgauggagag

SEQ ID NO: 361045 - RNA, 19 nt, Artificial Sequence
  Description of Artificial Sequence: Synthetic oligonucleotide
  Sense Strand Starting at position 539 of SEQ ID NO: 315316
gggccauguuggguugaca

SEQ ID NO: 361046 - RNA, 19 nt, Artificial Sequence
  Description of Artificial Sequence: Synthetic oligonucleotide
  Antisense Strand to SEQ ID NO: 361045
ugucaacccaacauggccc

SEQ ID NO: 361047 - RNA, 19 nt, Artificial Sequence
  Description of Artificial Sequence: Synthetic oligonucleotide
  Sense Strand Starting at position 539 of SEQ ID NO: 315344
guccucguuccuuauuaga

SEQ ID NO: 361048 - RNA, 19 nt, Artificial Sequence
  Description of Artificial Sequence: Synthetic oligonucleotide
  Antisense Strand to SEQ ID NO: 361047
ucuaauaaggaacgaggac

SEQ ID NO: 361049 - RNA, 19 nt, Artificial Sequence
  Description of Artificial Sequence: Synthetic oligonucleotide
  Sense Strand Starting at position 539 of SEQ ID NO: 315346
ccucguuccuuauuagaag

SEQ ID NO: 361050 - RNA, 19 nt, Artificial Sequence
  Description of Artificial Sequence: Synthetic oligonucleotide
  Antisense Strand to SEQ ID NO: 361049
cuucuaauaaggaacgagg

SEQ ID NO: 361051 - RNA, 19 nt, Artificial Sequence
  Description of Artificial Sequence: Synthetic oligonucleotide
  Sense Strand Starting at position 539 of SEQ ID NO: 315610
uggagucucucugcagaga

SEQ ID NO: 361052 - RNA, 19 nt, Artificial Sequence
  Description of Artificial Sequence: Synthetic oligonucleotide
  Antisense Strand to SEQ ID NO: 361051
ucucugcagagagacucca

SEQ ID NO: 361053 - RNA, 19 nt, Artificial Sequence
  Description of Artificial Sequence: Synthetic oligonucleotide
  Sense Strand Starting at position 539 of SEQ ID NO: 315613
agucucucugcagagagau

SEQ ID NO: 361054 - RNA, 19 nt, Artificial Sequence
  Description of Artificial Sequence: Synthetic oligonucleotide
  Antisense Strand to SEQ ID NO: 361053
aucucucugcagagagacu

SEQ ID NO: 361055 - RNA, 19 nt, Artificial Sequence
  Description of Artificial Sequence: Synthetic oligonucleotide
  Sense Strand Starting at position 539 of SEQ ID NO: 315806
uugcccaaaucuguaugaa

SEQ ID NO: 361056 - RNA, 19 nt, Artificial Sequence
  Description of Artificial Sequence: Synthetic oligonucleotide
  Antisense Strand to SEQ ID NO: 361055
uucauacagauuugggcaa

SEQ ID NO: 361057 - RNA, 19 nt, Artificial Sequence
  Description of Artificial Sequence: Synthetic oligonucleotide
  Sense Strand Starting at position 539 of SEQ ID NO: 315807
ugcccaaaucuguaugaaa

SEQ ID NO: 361058 - RNA, 19 nt, Artificial Sequence
  Description of Artificial Sequence: Synthetic oligonucleotide
  Antisense Strand to SEQ ID NO: 361057
uuucauacagauuugggca

SEQ ID NO: 361059 - RNA, 19 nt, Artificial Sequence
  Description of Artificial Sequence: Synthetic oligonucleotide
  Sense Strand Starting at position 539 of SEQ ID NO: 315855
ccaggaguccuuuaaugua

SEQ ID NO: 361060 - RNA, 19 nt, Artificial Sequence
  Description of Artificial Sequence: Synthetic oligonucleotide
  Antisense Strand to SEQ ID NO: 361059
uacauuaaaggacuccugg

SEQ ID NO: 361061 - RNA, 19 nt, Artificial Sequence
  Description of Artificial Sequence: Synthetic oligonucleotide
  Sense Strand Starting at position 539 of SEQ ID NO: 315917
aaacuugugguccaaguca

SEQ ID NO: 361062 - RNA, 19 nt, Artificial Sequence
  Description of Artificial Sequence: Synthetic oligonucleotide
  Antisense Strand to SEQ ID NO: 361061
ugacuuggaccacaaguuu

SEQ ID NO: 361063 - RNA, 19 nt, Artificial Sequence
  Description of Artificial Sequence: Synthetic oligonucleotide
  Sense Strand Starting at position 539 of SEQ ID NO: 315974
uuaggaucuuaagucuacu

SEQ ID NO: 361064 - RNA, 19 nt, Artificial Sequence
  Description of Artificial Sequence: Synthetic oligonucleotide
  Antisense Strand to SEQ ID NO: 361063
aguagacuuaagauccuaa

SEQ ID NO: 361065 - RNA, 19 nt, Artificial Sequence
  Description of Artificial Sequence: Synthetic oligonucleotide
  Sense Strand Starting at position 539 of SEQ ID NO: 316060
ugagaaacacgguagguau

SEQ ID NO: 361066 - RNA, 19 nt, Artificial Sequence
  Description of Artificial Sequence: Synthetic oligonucleotide
  Antisense Strand to SEQ ID NO: 361065
auaccuaccguguuucuca

SEQ ID NO: 361067 - RNA, 19 nt, Artificial Sequence
  Description of Artificial Sequence: Synthetic oligonucleotide
  Sense Strand Starting at position 539 of SEQ ID NO: 316138
cucaguugucucguggguu

SEQ ID NO: 361068 - RNA, 19 nt, Artificial Sequence
  Description of Artificial Sequence: Synthetic oligonucleotide
  Antisense Strand to SEQ ID NO: 361067
aacccacgagacaacugag

SEQ ID NO: 361069 - RNA, 19 nt, Artificial Sequence
  Description of Artificial Sequence: Synthetic oligonucleotide
  Sense Strand Starting at position 539 of SEQ ID NO: 316142
guugucucguggguuauuu

SEQ ID NO: 361070 - RNA, 19 nt, Artificial Sequence
  Description of Artificial Sequence: Synthetic oligonucleotide
  Antisense Strand to SEQ ID NO: 361069
aaauaacccacgagacaac

SEQ ID NO: 361071 - RNA, 19 nt, Artificial Sequence
  Description of Artificial Sequence: Synthetic oligonucleotide
  Sense Strand Starting at position 539 of SEQ ID NO: 316178
aggugacaucacugagcau

SEQ ID NO: 361072 - RNA, 19 nt, Artificial Sequence
  Description of Artificial Sequence: Synthetic oligonucleotide
  Antisense Strand to SEQ ID NO: 361071
augcucagugaugucaccu

SEQ ID NO: 361073 - RNA, 19 nt, Artificial Sequence
  Description of Artificial Sequence: Synthetic oligonucleotide
  Sense Strand Starting at position 539 of SEQ ID NO: 316179
ggugacaucacugagcaua

SEQ ID NO: 361074 - RNA, 19 nt, Artificial Sequence
  Description of Artificial Sequence: Synthetic oligonucleotide
  Antisense Strand to SEQ ID NO: 361073
uaugcucagugaugucacc

SEQ ID NO: 361075 - RNA, 19 nt, Artificial Sequence
  Description of Artificial Sequence: Synthetic oligonucleotide
  Sense Strand Starting at position 539 of SEQ ID NO: 316181
ugacaucacugagcauaca

SEQ ID NO: 361076 - RNA, 19 nt, Artificial Sequence
  Description of Artificial Sequence: Synthetic oligonucleotide
  Antisense Strand to SEQ ID NO: 361075
uguaugcucagugauguca

SEQ ID NO: 361077 - RNA, 19 nt, Artificial Sequence
  Description of Artificial Sequence: Synthetic oligonucleotide
  Sense Strand Starting at position 539 of SEQ ID NO: 316583
gggagucaucuggguagua

SEQ ID NO: 361078 - RNA, 19 nt, Artificial Sequence
  Description of Artificial Sequence: Synthetic oligonucleotide
  Antisense Strand to SEQ ID NO: 361077
uacuacccagaugacuccc

SEQ ID NO: 361079 - RNA, 19 nt, Artificial Sequence
  Description of Artificial Sequence: Synthetic oligonucleotide
  Sense Strand Starting at position 539 of SEQ ID NO: 316584
ggagucaucuggguaguac

SEQ ID NO: 361080 - RNA, 19 nt, Artificial Sequence
  Description of Artificial Sequence: Synthetic oligonucleotide
  Antisense Strand to SEQ ID NO: 361079
guacuacccagaugacucc

SEQ ID NO: 361081 - RNA, 19 nt, Artificial Sequence
  Description of Artificial Sequence: Synthetic oligonucleotide
  Sense Strand Starting at position 539 of SEQ ID NO: 316691
aagguauguguccagauug

SEQ ID NO: 361082 - RNA, 19 nt, Artificial Sequence
  Description of Artificial Sequence: Synthetic oligonucleotide
  Antisense Strand to SEQ ID NO: 361081
caaucuggacacauaccuu

SEQ ID NO: 361083 - RNA, 19 nt, Artificial Sequence
  Description of Artificial Sequence: Synthetic oligonucleotide
  Sense Strand Starting at position 539 of SEQ ID NO: 316770
ucccucagggcauguuuaa

SEQ ID NO: 361084 - RNA, 19 nt, Artificial Sequence
  Description of Artificial Sequence: Synthetic oligonucleotide
  Antisense Strand to SEQ ID NO: 361083
uuaaacaugcccugaggga

SEQ ID NO: 361085 - RNA, 19 nt, Artificial Sequence
  Description of Artificial Sequence: Synthetic oligonucleotide
  Sense Strand Starting at position 539 of SEQ ID NO: 316795
uggcuacucuucucauaga

SEQ ID NO: 361086 - RNA, 19 nt, Artificial Sequence
  Description of Artificial Sequence: Synthetic oligonucleotide
  Antisense Strand to SEQ ID NO: 361085
ucuaugagaagaguagcca

SEQ ID NO: 361087 - RNA, 19 nt, Artificial Sequence
  Description of Artificial Sequence: Synthetic oligonucleotide
  Sense Strand Starting at position 539 of SEQ ID NO: 316848
ggaagaagggugugguagu

SEQ ID NO: 361088 - RNA, 19 nt, Artificial Sequence
  Description of Artificial Sequence: Synthetic oligonucleotide
  Antisense Strand to SEQ ID NO: 361087
acuaccacacccuucuucc

SEQ ID NO: 361089 - RNA, 19 nt, Artificial Sequence
  Description of Artificial Sequence: Synthetic oligonucleotide
  Sense Strand Starting at position 539 of SEQ ID NO: 316922
uuugauagaucccugugca

SEQ ID NO: 361090 - RNA, 19 nt, Artificial Sequence
  Description of Artificial Sequence: Synthetic oligonucleotide
  Antisense Strand to SEQ ID NO: 361089
ugcacagggaucuaucaaa

SEQ ID NO: 361091 - RNA, 19 nt, Artificial Sequence
  Description of Artificial Sequence: Synthetic oligonucleotide
  Sense Strand Starting at position 539 of SEQ ID NO: 316923
uugauagaucccugugcag

SEQ ID NO: 361092 - RNA, 19 nt, Artificial Sequence
  Description of Artificial Sequence: Synthetic oligonucleotide
  Antisense Strand to SEQ ID NO: 361091
cugcacagggaucuaucaa

SEQ ID NO: 361093 - RNA, 19 nt, Artificial Sequence
  Description of Artificial Sequence: Synthetic oligonucleotide
  Sense Strand Starting at position 539 of SEQ ID NO: 316961
gugugcacucaucagugaa

SEQ ID NO: 361094 - RNA, 19 nt, Artificial Sequence
  Description of Artificial Sequence: Synthetic oligonucleotide
  Antisense Strand to SEQ ID NO: 361093
uucacugaugagugcacac

SEQ ID NO: 361095 - RNA, 19 nt, Artificial Sequence
  Description of Artificial Sequence: Synthetic oligonucleotide
  Sense Strand Starting at position 539 of SEQ ID NO: 316974
agugaacugucuuucuauc

SEQ ID NO: 361096 - RNA, 19 nt, Artificial Sequence
  Description of Artificial Sequence: Synthetic oligonucleotide
  Antisense Strand to SEQ ID NO: 361095
gauagaaagacaguucacu

SEQ ID NO: 361097 - RNA, 19 nt, Artificial Sequence
  Description of Artificial Sequence: Synthetic oligonucleotide
  Sense Strand Starting at position 539 of SEQ ID NO: 317313
gugaccacucccugugaca

SEQ ID NO: 361098 - RNA, 19 nt, Artificial Sequence
  Description of Artificial Sequence: Synthetic oligonucleotide
  Antisense Strand to SEQ ID NO: 361097
ugucacagggaguggucac

SEQ ID NO: 361099 - RNA, 19 nt, Artificial Sequence
  Description of Artificial Sequence: Synthetic oligonucleotide
  Sense Strand Starting at position 539 of SEQ ID NO: 317448
ggcagcugugugcugagau

SEQ ID NO: 361100 - RNA, 19 nt, Artificial Sequence
  Description of Artificial Sequence: Synthetic oligonucleotide
  Antisense Strand to SEQ ID NO: 361099
aucucagcacacagcugcc

SEQ ID NO: 361101 - RNA, 19 nt, Artificial Sequence
  Description of Artificial Sequence: Synthetic oligonucleotide
  Sense Strand Starting at position 539 of SEQ ID NO: 317562
aggugcaauacuuagugau

SEQ ID NO: 361102 - RNA, 19 nt, Artificial Sequence
  Description of Artificial Sequence: Synthetic oligonucleotide
  Antisense Strand to SEQ ID NO: 361101
aucacuaaguauugcaccu

SEQ ID NO: 361103 - RNA, 19 nt, Artificial Sequence
  Description of Artificial Sequence: Synthetic oligonucleotide
  Sense Strand Starting at position 539 of SEQ ID NO: 317564
gugcaauacuuagugauuu

SEQ ID NO: 361104 - RNA, 19 nt, Artificial Sequence
  Description of Artificial Sequence: Synthetic oligonucleotide
  Antisense Strand to SEQ ID NO: 361103
aaaucacuaaguauugcac

SEQ ID NO: 361105 - RNA, 19 nt, Artificial Sequence
  Description of Artificial Sequence: Synthetic oligonucleotide
  Sense Strand Starting at position 539 of SEQ ID NO: 317805
ugugauagccaggaugguu

SEQ ID NO: 361106 - RNA, 19 nt, Artificial Sequence
  Description of Artificial Sequence: Synthetic oligonucleotide
  Antisense Strand to SEQ ID NO: 361105
aaccauccuggcuaucaca

SEQ ID NO: 361107 - RNA, 19 nt, Artificial Sequence
  Description of Artificial Sequence: Synthetic oligonucleotide
  Sense Strand Starting at position 539 of SEQ ID NO: 318039
gcgucucugccuuucugau

SEQ ID NO: 361108 - RNA, 19 nt, Artificial Sequence
  Description of Artificial Sequence: Synthetic oligonucleotide
  Antisense Strand to SEQ ID NO: 361107
aucagaaaggcagagacgc

SEQ ID NO: 361109 - RNA, 19 nt, Artificial Sequence
  Description of Artificial Sequence: Synthetic oligonucleotide
  Sense Strand Starting at position 539 of SEQ ID NO: 318040
cgucucugccuuucugauu

SEQ ID NO: 361110 - RNA, 19 nt, Artificial Sequence
  Description of Artificial Sequence: Synthetic oligonucleotide
  Antisense Strand to SEQ ID NO: 361109
aaucagaaaggcagagacg

SEQ ID NO: 361111 - RNA, 19 nt, Artificial Sequence
  Description of Artificial Sequence: Synthetic oligonucleotide
  Sense Strand Starting at position 539 of SEQ ID NO: 318237
ugucuuaugucaccacauu

SEQ ID NO: 361112 - RNA, 19 nt, Artificial Sequence
  Description of Artificial Sequence: Synthetic oligonucleotide
  Antisense Strand to SEQ ID NO: 361111
aauguggugacauaagaca

SEQ ID NO: 361113 - RNA, 19 nt, Artificial Sequence
  Description of Artificial Sequence: Synthetic oligonucleotide
  Sense Strand Starting at position 539 of SEQ ID NO: 318238
gucuuaugucaccacauuc

SEQ ID NO: 361114 - RNA, 19 nt, Artificial Sequence
  Description of Artificial Sequence: Synthetic oligonucleotide
  Antisense Strand to SEQ ID NO: 361113
gaauguggugacauaagac

SEQ ID NO: 361115 - RNA, 19 nt, Artificial Sequence
  Description of Artificial Sequence: Synthetic oligonucleotide
  Sense Strand Starting at position 539 of SEQ ID NO: 318399
cagaauuagugaucaugac

SEQ ID NO: 361116 - RNA, 19 nt, Artificial Sequence
  Description of Artificial Sequence: Synthetic oligonucleotide
  Antisense Strand to SEQ ID NO: 361115
gucaugaucacuaauucug

SEQ ID NO: 361117 - RNA, 19 nt, Artificial Sequence
  Description of Artificial Sequence: Synthetic oligonucleotide
  Sense Strand Starting at position 539 of SEQ ID NO: 318502
ccauuugagguuugcggua

SEQ ID NO: 361118 - RNA, 19 nt, Artificial Sequence
  Description of Artificial Sequence: Synthetic oligonucleotide
  Antisense Strand to SEQ ID NO: 361117
uaccgcaaaccucaaaugg

SEQ ID NO: 361119 - RNA, 19 nt, Artificial Sequence
  Description of Artificial Sequence: Synthetic oligonucleotide
  Sense Strand Starting at position 539 of SEQ ID NO: 318639
cagaaagguggcuagaagu

SEQ ID NO: 361120 - RNA, 19 nt, Artificial Sequence
  Description of Artificial Sequence: Synthetic oligonucleotide
  Antisense Strand to SEQ ID NO: 361119
acuucuagccaccuuucug

SEQ ID NO: 361121 - RNA, 19 nt, Artificial Sequence
  Description of Artificial Sequence: Synthetic oligonucleotide
  Sense Strand Starting at position 539 of SEQ ID NO: 319194
aguucucacuacuugggau

SEQ ID NO: 361122 - RNA, 19 nt, Artificial Sequence
  Description of Artificial Sequence: Synthetic oligonucleotide
  Antisense Strand to SEQ ID NO: 361121
aucccaaguagugagaacu

SEQ ID NO: 361123 - RNA, 19 nt, Artificial Sequence
  Description of Artificial Sequence: Synthetic oligonucleotide
  Sense Strand Starting at position 540 of SEQ ID NO: 315374
gugggugugagauaucuua

SEQ ID NO: 361124 - RNA, 19 nt, Artificial Sequence
  Description of Artificial Sequence: Synthetic oligonucleotide
  Antisense Strand to SEQ ID NO: 361123
uaagauaucucacacccac

SEQ ID NO: 361125 - RNA, 19 nt, Artificial Sequence
  Description of Artificial Sequence: Synthetic oligonucleotide
  Sense Strand Starting at position 540 of SEQ ID NO: 315381
ugagauaucuuacuguagc

SEQ ID NO: 361126 - RNA, 19 nt, Artificial Sequence
  Description of Artificial Sequence: Synthetic oligonucleotide
  Antisense Strand to SEQ ID NO: 361125
gcuacaguaagauaucuca

SEQ ID NO: 361127 - RNA, 19 nt, Artificial Sequence
  Description of Artificial Sequence: Synthetic oligonucleotide
  Sense Strand Starting at position 540 of SEQ ID NO: 315516
ugaauuggguuguuugauu

SEQ ID NO: 361128 - RNA, 19 nt, Artificial Sequence
  Description of Artificial Sequence: Synthetic oligonucleotide
  Antisense Strand to SEQ ID NO: 361127
aaucaaacaacccaauuca

SEQ ID NO: 361129 - RNA, 19 nt, Artificial Sequence
  Description of Artificial Sequence: Synthetic oligonucleotide
  Sense Strand Starting at position 540 of SEQ ID NO: 315894
cugcaauguugggugagga

SEQ ID NO: 361130 - RNA, 19 nt, Artificial Sequence
  Description of Artificial Sequence: Synthetic oligonucleotide
  Antisense Strand to SEQ ID NO: 361129
uccucacccaacauugcag

SEQ ID NO: 361131 - RNA, 19 nt, Artificial Sequence
  Description of Artificial Sequence: Synthetic oligonucleotide
  Sense Strand Starting at position 540 of SEQ ID NO: 316130
uggagaguguuucugcaug

SEQ ID NO: 361132 - RNA, 19 nt, Artificial Sequence
  Description of Artificial Sequence: Synthetic oligonucleotide
  Antisense Strand to SEQ ID NO: 361131
caugcagaaacacucucca

SEQ ID NO: 361133 - RNA, 19 nt, Artificial Sequence
  Description of Artificial Sequence: Synthetic oligonucleotide
  Sense Strand Starting at position 540 of SEQ ID NO: 316132
gagaguguuucugcaugga

SEQ ID NO: 361134 - RNA, 19 nt, Artificial Sequence
  Description of Artificial Sequence: Synthetic oligonucleotide
  Antisense Strand to SEQ ID NO: 361133
uccaugcagaaacacucuc

SEQ ID NO: 361135 - RNA, 19 nt, Artificial Sequence
  Description of Artificial Sequence: Synthetic oligonucleotide
  Sense Strand Starting at position 540 of SEQ ID NO: 316135
aguguuucugcauggagag

SEQ ID NO: 361136 - RNA, 19 nt, Artificial Sequence
  Description of Artificial Sequence: Synthetic oligonucleotide
  Antisense Strand to SEQ ID NO: 361135
cucuccaugcagaaacacu

SEQ ID NO: 361137 - RNA, 19 nt, Artificial Sequence
  Description of Artificial Sequence: Synthetic oligonucleotide
  Sense Strand Starting at position 540 of SEQ ID NO: 316136
guguuucugcauggagaga

SEQ ID NO: 361138 - RNA, 19 nt, Artificial Sequence
  Description of Artificial Sequence: Synthetic oligonucleotide
  Antisense Strand to SEQ ID NO: 361137
ucucuccaugcagaaacac

SEQ ID NO: 361139 - RNA, 19 nt, Artificial Sequence
  Description of Artificial Sequence: Synthetic oligonucleotide
  Sense Strand Starting at position 540 of SEQ ID NO: 316137
uguuucugcauggagagaa

SEQ ID NO: 361140 - RNA, 19 nt, Artificial Sequence
  Description of Artificial Sequence: Synthetic oligonucleotide
  Antisense Strand to SEQ ID NO: 361139
uucucuccaugcagaaaca

SEQ ID NO: 361141 - RNA, 19 nt, Artificial Sequence
  Description of Artificial Sequence: Synthetic oligonucleotide
  Sense Strand Starting at position 540 of SEQ ID NO: 316251
agcugagucaaggauccau

SEQ ID NO: 361142 - RNA, 19 nt, Artificial Sequence
  Description of Artificial Sequence: Synthetic oligonucleotide
  Antisense Strand to SEQ ID NO: 361141
auggauccuugacucagcu

SEQ ID NO: 361143 - RNA, 19 nt, Artificial Sequence
  Description of Artificial Sequence: Synthetic oligonucleotide
  Sense Strand Starting at position 540 of SEQ ID NO: 316304
uguccagauguguaugcaa

SEQ ID NO: 361144 - RNA, 19 nt, Artificial Sequence
  Description of Artificial Sequence: Synthetic oligonucleotide
  Antisense Strand to SEQ ID NO: 361143
uugcauacacaucuggaca

SEQ ID NO: 361145 - RNA, 19 nt, Artificial Sequence
  Description of Artificial Sequence: Synthetic oligonucleotide
  Sense Strand Starting at position 540 of SEQ ID NO: 316306
uccagauguguaugcaaac

SEQ ID NO: 361146 - RNA, 19 nt, Artificial Sequence
  Description of Artificial Sequence: Synthetic oligonucleotide
  Antisense Strand to SEQ ID NO: 361145
guuugcauacacaucugga

SEQ ID NO: 361147 - RNA, 19 nt, Artificial Sequence
  Description of Artificial Sequence: Synthetic oligonucleotide
  Sense Strand Starting at position 540 of SEQ ID NO: 316307
ccagauguguaugcaaacu

SEQ ID NO: 361148 - RNA, 19 nt, Artificial Sequence
  Description of Artificial Sequence: Synthetic oligonucleotide
  Antisense Strand to SEQ ID NO: 361147
aguuugcauacacaucugg

SEQ ID NO: 361149 - RNA, 19 nt, Artificial Sequence
  Description of Artificial Sequence: Synthetic oligonucleotide
  Sense Strand Starting at position 540 of SEQ ID NO: 316438
gggugaugucagugacaaa

SEQ ID NO: 361150 - RNA, 19 nt, Artificial Sequence
  Description of Artificial Sequence: Synthetic oligonucleotide
  Antisense Strand to SEQ ID NO: 361149
uuugucacugacaucaccc

SEQ ID NO: 361151 - RNA, 19 nt, Artificial Sequence
  Description of Artificial Sequence: Synthetic oligonucleotide
  Sense Strand Starting at position 540 of SEQ ID NO: 316439
ggugaugucagugacaaau

SEQ ID NO: 361152 - RNA, 19 nt, Artificial Sequence
  Description of Artificial Sequence: Synthetic oligonucleotide
  Antisense Strand to SEQ ID NO: 361151
auuugucacugacaucacc

SEQ ID NO: 361153 - RNA, 19 nt, Artificial Sequence
  Description of Artificial Sequence: Synthetic oligonucleotide
  Sense Strand Starting at position 540 of SEQ ID NO: 316441
ugaugucagugacaaauuu

SEQ ID NO: 361154 - RNA, 19 nt, Artificial Sequence
  Description of Artificial Sequence: Synthetic oligonucleotide
  Antisense Strand to SEQ ID NO: 361153
aaauuugucacugacauca

SEQ ID NO: 361155 - RNA, 19 nt, Artificial Sequence
  Description of Artificial Sequence: Synthetic oligonucleotide
  Sense Strand Starting at position 540 of SEQ ID NO: 316476
cgccucgcuguauuaauau

SEQ ID NO: 361156 - RNA, 19 nt, Artificial Sequence
  Description of Artificial Sequence: Synthetic oligonucleotide
  Antisense Strand to SEQ ID NO: 361155
auauuaauacagcgaggcg

SEQ ID NO: 361157 - RNA, 19 nt, Artificial Sequence
  Description of Artificial Sequence: Synthetic oligonucleotide
  Sense Strand Starting at position 540 of SEQ ID NO: 316543
gugugagauauaugggauc

SEQ ID NO: 361158 - RNA, 19 nt, Artificial Sequence
  Description of Artificial Sequence: Synthetic oligonucleotide
  Antisense Strand to SEQ ID NO: 361157
gaucccauauaucucacac

SEQ ID NO: 361159 - RNA, 19 nt, Artificial Sequence
  Description of Artificial Sequence: Synthetic oligonucleotide
  Sense Strand Starting at position 540 of SEQ ID NO: 316545
gugagauauaugggaucuu

SEQ ID NO: 361160 - RNA, 19 nt, Artificial Sequence
  Description of Artificial Sequence: Synthetic oligonucleotide
  Antisense Strand to SEQ ID NO: 361159
aagaucccauauaucucac

SEQ ID NO: 361161 - RNA, 19 nt, Artificial Sequence
  Description of Artificial Sequence: Synthetic oligonucleotide
  Sense Strand Starting at position 540 of SEQ ID NO: 316546
ugagauauaugggaucuua

SEQ ID NO: 361162 - RNA, 19 nt, Artificial Sequence
  Description of Artificial Sequence: Synthetic oligonucleotide
  Antisense Strand to SEQ ID NO: 361161
uaagaucccauauaucuca

SEQ ID NO: 361163 - RNA, 19 nt, Artificial Sequence
  Description of Artificial Sequence: Synthetic oligonucleotide
  Sense Strand Starting at position 540 of SEQ ID NO: 316599
gaguauuuacugugucuuu

SEQ ID NO: 361164 - RNA, 19 nt, Artificial Sequence
  Description of Artificial Sequence: Synthetic oligonucleotide
  Antisense Strand to SEQ ID NO: 361163
aaagacacaguaaauacuc

SEQ ID NO: 361165 - RNA, 19 nt, Artificial Sequence
  Description of Artificial Sequence: Synthetic oligonucleotide
  Sense Strand Starting at position 540 of SEQ ID NO: 316600
aguauuuacugugucuuua

SEQ ID NO: 361166 - RNA, 19 nt, Artificial Sequence
  Description of Artificial Sequence: Synthetic oligonucleotide
  Antisense Strand to SEQ ID NO: 361165
uaaagacacaguaaauacu

SEQ ID NO: 361167 - RNA, 19 nt, Artificial Sequence
  Description of Artificial Sequence: Synthetic oligonucleotide
  Sense Strand Starting at position 540 of SEQ ID NO: 316604
uuuacugugucuuuacuau

SEQ ID NO: 361168 - RNA, 19 nt, Artificial Sequence
  Description of Artificial Sequence: Synthetic oligonucleotide
  Antisense Strand to SEQ ID NO: 361167
auaguaaagacacaguaaa

SEQ ID NO: 361169 - RNA, 19 nt, Artificial Sequence
  Description of Artificial Sequence: Synthetic oligonucleotide
  Sense Strand Starting at position 540 of SEQ ID NO: 316660
cuaggauuaucuuaaagag

SEQ ID NO: 361170 - RNA, 19 nt, Artificial Sequence
  Description of Artificial Sequence: Synthetic oligonucleotide
  Antisense Strand to SEQ ID NO: 361169
cucuuuaagauaauccuag

SEQ ID NO: 361171 - RNA, 19 nt, Artificial Sequence
  Description of Artificial Sequence: Synthetic oligonucleotide
  Sense Strand Starting at position 540 of SEQ ID NO: 316868
gaggcaugagaucguuuga

SEQ ID NO: 361172 - RNA, 19 nt, Artificial Sequence
  Description of Artificial Sequence: Synthetic oligonucleotide
  Antisense Strand to SEQ ID NO: 361171
ucaaacgaucucaugccuc

SEQ ID NO: 361173 - RNA, 19 nt, Artificial Sequence
  Description of Artificial Sequence: Synthetic oligonucleotide
  Sense Strand Starting at position 540 of SEQ ID NO: 316903
uugcaaugggcugagauau

SEQ ID NO: 361174 - RNA, 19 nt, Artificial Sequence
  Description of Artificial Sequence: Synthetic oligonucleotide
  Antisense Strand to SEQ ID NO: 361173
auaucucagcccauugcaa

SEQ ID NO: 361175 - RNA, 19 nt, Artificial Sequence
  Description of Artificial Sequence: Synthetic oligonucleotide
  Sense Strand Starting at position 540 of SEQ ID NO: 317004
auauuaggauccuaggaag

SEQ ID NO: 361176 - RNA, 19 nt, Artificial Sequence
  Description of Artificial Sequence: Synthetic oligonucleotide
  Antisense Strand to SEQ ID NO: 361175
cuuccuaggauccuaauau

SEQ ID NO: 361177 - RNA, 19 nt, Artificial Sequence
  Description of Artificial Sequence: Synthetic oligonucleotide
  Sense Strand Starting at position 540 of SEQ ID NO: 317037
cagugucacgagcaucauu

SEQ ID NO: 361178 - RNA, 19 nt, Artificial Sequence
  Description of Artificial Sequence: Synthetic oligonucleotide
  Antisense Strand to SEQ ID NO: 361177
aaugaugcucgugacacug

SEQ ID NO: 361179 - RNA, 19 nt, Artificial Sequence
  Description of Artificial Sequence: Synthetic oligonucleotide
  Sense Strand Starting at position 540 of SEQ ID NO: 317116
cucugcuucccaggaguua

SEQ ID NO: 361180 - RNA, 19 nt, Artificial Sequence
  Description of Artificial Sequence: Synthetic oligonucleotide
  Antisense Strand to SEQ ID NO: 361179
uaacuccugggaagcagag

SEQ ID NO: 361181 - RNA, 19 nt, Artificial Sequence
  Description of Artificial Sequence: Synthetic oligonucleotide
  Sense Strand Starting at position 540 of SEQ ID NO: 317128
ggaguuacaugucugcuca

SEQ ID NO: 361182 - RNA, 19 nt, Artificial Sequence
  Description of Artificial Sequence: Synthetic oligonucleotide
  Antisense Strand to SEQ ID NO: 361181
ugagcagacauguaacucc

SEQ ID NO: 361183 - RNA, 19 nt, Artificial Sequence
  Description of Artificial Sequence: Synthetic oligonucleotide
  Sense Strand Starting at position 540 of SEQ ID NO: 317262
guacuugaugaugauguua

SEQ ID NO: 361184 - RNA, 19 nt, Artificial Sequence
  Description of Artificial Sequence: Synthetic oligonucleotide
  Antisense Strand to SEQ ID NO: 361183
uaacaucaucaucaaguac

SEQ ID NO: 361185 - RNA, 19 nt, Artificial Sequence
  Description of Artificial Sequence: Synthetic oligonucleotide
  Sense Strand Starting at position 540 of SEQ ID NO: 317270
ugaugauguuaaccuuuaa

SEQ ID NO: 361186 - RNA, 19 nt, Artificial Sequence
  Description of Artificial Sequence: Synthetic oligonucleotide
  Antisense Strand to SEQ ID NO: 361185
uuaaagguuaacaucauca

SEQ ID NO: 361187 - RNA, 19 nt, Artificial Sequence
  Description of Artificial Sequence: Synthetic oligonucleotide
  Sense Strand Starting at position 540 of SEQ ID NO: 317423
gccugaaucuagccuccaa

SEQ ID NO: 361188 - RNA, 19 nt, Artificial Sequence
  Description of Artificial Sequence: Synthetic oligonucleotide
  Antisense Strand to SEQ ID NO: 361187
uuggaggcuagauucaggc

SEQ ID NO: 361189 - RNA, 19 nt, Artificial Sequence
  Description of Artificial Sequence: Synthetic oligonucleotide
  Sense Strand Starting at position 540 of SEQ ID NO: 317451
ggcaaaucaguuuggagaa

SEQ ID NO: 361190 - RNA, 19 nt, Artificial Sequence
  Description of Artificial Sequence: Synthetic oligonucleotide
  Antisense Strand to SEQ ID NO: 361189
uucuccaaacugauuugcc

SEQ ID NO: 361191 - RNA, 19 nt, Artificial Sequence
  Description of Artificial Sequence: Synthetic oligonucleotide
  Sense Strand Starting at position 540 of SEQ ID NO: 317482
auauguggucccuggagca

SEQ ID NO: 361192 - RNA, 19 nt, Artificial Sequence
  Description of Artificial Sequence: Synthetic oligonucleotide
  Antisense Strand to SEQ ID NO: 361191
ugcuccagggaccacauau

SEQ ID NO: 361193 - RNA, 19 nt, Artificial Sequence
  Description of Artificial Sequence: Synthetic oligonucleotide
  Sense Strand Starting at position 540 of SEQ ID NO: 318209
ugaggaagccauuagcacu

SEQ ID NO: 361194 - RNA, 19 nt, Artificial Sequence
  Description of Artificial Sequence: Synthetic oligonucleotide
  Antisense Strand to SEQ ID NO: 361193
agugcuaauggcuuccuca

SEQ ID NO: 361195 - RNA, 19 nt, Artificial Sequence
  Description of Artificial Sequence: Synthetic oligonucleotide
  Sense Strand Starting at position 540 of SEQ ID NO: 318220
uuagcacugcuccagugau

SEQ ID NO: 361196 - RNA, 19 nt, Artificial Sequence
  Description of Artificial Sequence: Synthetic oligonucleotide
  Antisense Strand to SEQ ID NO: 361195
aucacuggagcagugcuaa

SEQ ID NO: 361197 - RNA, 19 nt, Artificial Sequence
  Description of Artificial Sequence: Synthetic oligonucleotide
  Sense Strand Starting at position 540 of SEQ ID NO: 318227
ugcuccagugaugacauau

SEQ ID NO: 361198 - RNA, 19 nt, Artificial Sequence
  Description of Artificial Sequence: Synthetic oligonucleotide
  Antisense Strand to SEQ ID NO: 361197
auaugucaucacuggagca

SEQ ID NO: 361199 - RNA, 19 nt, Artificial Sequence
  Description of Artificial Sequence: Synthetic oligonucleotide
  Sense Strand Starting at position 540 of SEQ ID NO: 318266
gcugauuugcuaugccuuu

SEQ ID NO: 361200 - RNA, 19 nt, Artificial Sequence
  Description of Artificial Sequence: Synthetic oligonucleotide
  Antisense Strand to SEQ ID NO: 361199
aaaggcauagcaaaucagc

SEQ ID NO: 361201 - RNA, 19 nt, Artificial Sequence
  Description of Artificial Sequence: Synthetic oligonucleotide
  Sense Strand Starting at position 540 of SEQ ID NO: 318350
ggugguggcagagguaaua

SEQ ID NO: 361202 - RNA, 19 nt, Artificial Sequence
  Description of Artificial Sequence: Synthetic oligonucleotide
  Antisense Strand to SEQ ID NO: 361201
uauuaccucugccaccacc

SEQ ID NO: 361203 - RNA, 19 nt, Artificial Sequence
  Description of Artificial Sequence: Synthetic oligonucleotide
  Sense Strand Starting at position 541 of SEQ ID NO: 315519
uacaguuccguggcguuaa

SEQ ID NO: 361204 - RNA, 19 nt, Artificial Sequence
  Description of Artificial Sequence: Synthetic oligonucleotide
  Antisense Strand to SEQ ID NO: 361203
uuaacgccacggaacugua

SEQ ID NO: 361205 - RNA, 19 nt, Artificial Sequence
  Description of Artificial Sequence: Synthetic oligonucleotide
  Sense Strand Starting at position 541 of SEQ ID NO: 315522
aguuccguggcguuaaaca

SEQ ID NO: 361206 - RNA, 19 nt, Artificial Sequence
  Description of Artificial Sequence: Synthetic oligonucleotide
  Antisense Strand to SEQ ID NO: 361205
uguuuaacgccacggaacu

SEQ ID NO: 361207 - RNA, 19 nt, Artificial Sequence
  Description of Artificial Sequence: Synthetic oligonucleotide
  Sense Strand Starting at position 541 of SEQ ID NO: 315895
gugaguaauucugcuauga

SEQ ID NO: 361208 - RNA, 19 nt, Artificial Sequence
  Description of Artificial Sequence: Synthetic oligonucleotide
  Antisense Strand to SEQ ID NO: 361207
ucauagcagaauuacucac

SEQ ID NO: 361209 - RNA, 19 nt, Artificial Sequence
  Description of Artificial Sequence: Synthetic oligonucleotide
  Sense Strand Starting at position 541 of SEQ ID NO: 316463
gugggugugagauaucuua

SEQ ID NO: 361210 - RNA, 19 nt, Artificial Sequence
  Description of Artificial Sequence: Synthetic oligonucleotide
  Antisense Strand to SEQ ID NO: 361209
uaagauaucucacacccac

SEQ ID NO: 361211 - RNA, 19 nt, Artificial Sequence
  Description of Artificial Sequence: Synthetic oligonucleotide
  Sense Strand Starting at position 541 of SEQ ID NO: 316470
ugagauaucuuacuguagc

SEQ ID NO: 361212 - RNA, 19 nt, Artificial Sequence
  Description of Artificial Sequence: Synthetic oligonucleotide
  Antisense Strand to SEQ ID NO: 361211
gcuacaguaagauaucuca

SEQ ID NO: 361213 - RNA, 19 nt, Artificial Sequence
  Description of Artificial Sequence: Synthetic oligonucleotide
  Sense Strand Starting at position 541 of SEQ ID NO: 316605
ugaauuggguuguuugauu

SEQ ID NO: 361214 - RNA, 19 nt, Artificial Sequence
  Description of Artificial Sequence: Synthetic oligonucleotide
  Antisense Strand to SEQ ID NO: 361213
aaucaaacaacccaauuca

SEQ ID NO: 361215 - RNA, 19 nt, Artificial Sequence
  Description of Artificial Sequence: Synthetic oligonucleotide
  Sense Strand Starting at position 541 of SEQ ID NO: 316983
cugcaauguugggugagga

SEQ ID NO: 361216 - RNA, 19 nt, Artificial Sequence
  Description of Artificial Sequence: Synthetic oligonucleotide
  Antisense Strand to SEQ ID NO: 361215
uccucacccaacauugcag

SEQ ID NO: 361217 - RNA, 19 nt, Artificial Sequence
  Description of Artificial Sequence: Synthetic oligonucleotide
  Sense Strand Starting at position 541 of SEQ ID NO: 317219
uggagaguguuucugcaug

SEQ ID NO: 361218 - RNA, 19 nt, Artificial Sequence
  Description of Artificial Sequence: Synthetic oligonucleotide
  Antisense Strand to SEQ ID NO: 361217
caugcagaaacacucucca

SEQ ID NO: 361219 - RNA, 19 nt, Artificial Sequence
  Description of Artificial Sequence: Synthetic oligonucleotide
  Sense Strand Starting at position 541 of SEQ ID NO: 317221
gagaguguuucugcaugga

SEQ ID NO: 361220 - RNA, 19 nt, Artificial Sequence
  Description of Artificial Sequence: Synthetic oligonucleotide
  Antisense Strand to SEQ ID NO: 361219
uccaugcagaaacacucuc

SEQ ID NO: 361221 - RNA, 19 nt, Artificial Sequence
  Description of Artificial Sequence: Synthetic oligonucleotide
  Sense Strand Starting at position 541 of SEQ ID NO: 317224
aguguuucugcauggagag

SEQ ID NO: 361222 - RNA, 19 nt, Artificial Sequence
  Description of Artificial Sequence: Synthetic oligonucleotide
  Antisense Strand to SEQ ID NO: 361221
cucuccaugcagaaacacu

SEQ ID NO: 361223 - RNA, 19 nt, Artificial Sequence
  Description of Artificial Sequence: Synthetic oligonucleotide
  Sense Strand Starting at position 541 of SEQ ID NO: 317225
guguuucugcauggagaga

SEQ ID NO: 361224 - RNA, 19 nt, Artificial Sequence
  Description of Artificial Sequence: Synthetic oligonucleotide
  Antisense Strand to SEQ ID NO: 361223
ucucuccaugcagaaacac

SEQ ID NO: 361225 - RNA, 19 nt, Artificial Sequence
  Description of Artificial Sequence: Synthetic oligonucleotide
  Sense Strand Starting at position 541 of SEQ ID NO: 317226
uguuucugcauggagagaa

SEQ ID NO: 361226 - RNA, 19 nt, Artificial Sequence
  Description of Artificial Sequence: Synthetic oligonucleotide
  Antisense Strand to SEQ ID NO: 361225
uucucuccaugcagaaaca

SEQ ID NO: 361227 - RNA, 19 nt, Artificial Sequence
  Description of Artificial Sequence: Synthetic oligonucleotide
  Sense Strand Starting at position 541 of SEQ ID NO: 317340
agcugagucaaggauccau

SEQ ID NO: 361228 - RNA, 19 nt, Artificial Sequence
  Description of Artificial Sequence: Synthetic oligonucleotide
  Antisense Strand to SEQ ID NO: 361227
auggauccuugacucagcu

SEQ ID NO: 361229 - RNA, 19 nt, Artificial Sequence
  Description of Artificial Sequence: Synthetic oligonucleotide
  Sense Strand Starting at position 541 of SEQ ID NO: 317393
uguccagauguguaugcaa

SEQ ID NO: 361230 - RNA, 19 nt, Artificial Sequence
  Description of Artificial Sequence: Synthetic oligonucleotide
  Antisense Strand to SEQ ID NO: 361229
uugcauacacaucuggaca

SEQ ID NO: 361231 - RNA, 19 nt, Artificial Sequence
  Description of Artificial Sequence: Synthetic oligonucleotide
  Sense Strand Starting at position 541 of SEQ ID NO: 317395
uccagauguguaugcaaac

SEQ ID NO: 361232 - RNA, 19 nt, Artificial Sequence
  Description of Artificial Sequence: Synthetic oligonucleotide
  Antisense Strand to SEQ ID NO: 361231
guuugcauacacaucugga

SEQ ID NO: 361233 - RNA, 19 nt, Artificial Sequence
  Description of Artificial Sequence: Synthetic oligonucleotide
  Sense Strand Starting at position 541 of SEQ ID NO: 317396
ccagauguguaugcaaacu

SEQ ID NO: 361234 - RNA, 19 nt, Artificial Sequence
  Description of Artificial Sequence: Synthetic oligonucleotide
  Antisense Strand to SEQ ID NO: 361233
aguuugcauacacaucugg

SEQ ID NO: 361235 - RNA, 19 nt, Artificial Sequence
  Description of Artificial Sequence: Synthetic oligonucleotide
  Sense Strand Starting at position 541 of SEQ ID NO: 317527
gggugaugucagugacaaa

SEQ ID NO: 361236 - RNA, 19 nt, Artificial Sequence
  Description of Artificial Sequence: Synthetic oligonucleotide
  Antisense Strand to SEQ ID NO: 361235
uuugucacugacaucaccc

SEQ ID NO: 361237 - RNA, 19 nt, Artificial Sequence
  Description of Artificial Sequence: Synthetic oligonucleotide
  Sense Strand Starting at position 541 of SEQ ID NO: 317528
ggugaugucagugacaaau

SEQ ID NO: 361238 - RNA, 19 nt, Artificial Sequence
  Description of Artificial Sequence: Synthetic oligonucleotide
  Antisense Strand to SEQ ID NO: 361237
auuugucacugacaucacc

SEQ ID NO: 361239 - RNA, 19 nt, Artificial Sequence
  Description of Artificial Sequence: Synthetic oligonucleotide
  Sense Strand Starting at position 541 of SEQ ID NO: 317530
ugaugucagugacaaauuu

SEQ ID NO: 361240 - RNA, 19 nt, Artificial Sequence
  Description of Artificial Sequence: Synthetic oligonucleotide
  Antisense Strand to SEQ ID NO: 361239
aaauuugucacugacauca

SEQ ID NO: 361241 - RNA, 19 nt, Artificial Sequence
  Description of Artificial Sequence: Synthetic oligonucleotide
  Sense Strand Starting at position 541 of SEQ ID NO: 317565
cgccucgcuguauuaauau

SEQ ID NO: 361242 - RNA, 19 nt, Artificial Sequence
  Description of Artificial Sequence: Synthetic oligonucleotide
  Antisense Strand to SEQ ID NO: 361241
auauuaauacagcgaggcg

SEQ ID NO: 361243 - RNA, 19 nt, Artificial Sequence
  Description of Artificial Sequence: Synthetic oligonucleotide
  Sense Strand Starting at position 541 of SEQ ID NO: 317632
gugugagauauaugggauc

SEQ ID NO: 361244 - RNA, 19 nt, Artificial Sequence
  Description of Artificial Sequence: Synthetic oligonucleotide
  Antisense Strand to SEQ ID NO: 361243
gaucccauauaucucacac

SEQ ID NO: 361245 - RNA, 19 nt, Artificial Sequence
  Description of Artificial Sequence: Synthetic oligonucleotide
  Sense Strand Starting at position 541 of SEQ ID NO: 317634
gugagauauaugggaucuu

SEQ ID NO: 361246 - RNA, 19 nt, Artificial Sequence
  Description of Artificial Sequence: Synthetic oligonucleotide
  Antisense Strand to SEQ ID NO: 361245
aagaucccauauaucucac

SEQ ID NO: 361247 - RNA, 19 nt, Artificial Sequence
  Description of Artificial Sequence: Synthetic oligonucleotide
  Sense Strand Starting at position 541 of SEQ ID NO: 317635
ugagauauaugggaucuua

SEQ ID NO: 361248 - RNA, 19 nt, Artificial Sequence
  Description of Artificial Sequence: Synthetic oligonucleotide
  Antisense Strand to SEQ ID NO: 361247
uaagaucccauauaucuca

SEQ ID NO: 361249 - RNA, 19 nt, Artificial Sequence
  Description of Artificial Sequence: Synthetic oligonucleotide
  Sense Strand Starting at position 541 of SEQ ID NO: 317688
gaguauuuacugugucuuu

SEQ ID NO: 361250 - RNA, 19 nt, Artificial Sequence
  Description of Artificial Sequence: Synthetic oligonucleotide
  Antisense Strand to SEQ ID NO: 361249
aaagacacaguaaauacuc

SEQ ID NO: 361251 - RNA, 19 nt, Artificial Sequence
  Description of Artificial Sequence: Synthetic oligonucleotide
  Sense Strand Starting at position 541 of SEQ ID NO: 317689
aguauuuacugugucuuua

SEQ ID NO: 361252 - RNA, 19 nt, Artificial Sequence
  Description of Artificial Sequence: Synthetic oligonucleotide
  Antisense Strand to SEQ ID NO: 361251
uaaagacacaguaaauacu

SEQ ID NO: 361253 - RNA, 19 nt, Artificial Sequence
  Description of Artificial Sequence: Synthetic oligonucleotide
  Sense Strand Starting at position 541 of SEQ ID NO: 317693
uuuacugugucuuuacuau

SEQ ID NO: 361254 - RNA, 19 nt, Artificial Sequence
  Description of Artificial Sequence: Synthetic oligonucleotide
  Antisense Strand to SEQ ID NO: 361253
auaguaaagacacaguaaa

SEQ ID NO: 361255 - RNA, 19 nt, Artificial Sequence
  Description of Artificial Sequence: Synthetic oligonucleotide
  Sense Strand Starting at position 541 of SEQ ID NO: 317713
ugcugugauuguucuaaca

SEQ ID NO: 361256 - RNA, 19 nt, Artificial Sequence
  Description of Artificial Sequence: Synthetic oligonucleotide
  Antisense Strand to SEQ ID NO: 361255
uguuagaacaaucacagca

SEQ ID NO: 361257 - RNA, 19 nt, Artificial Sequence
  Description of Artificial Sequence: Synthetic oligonucleotide
  Sense Strand Starting at position 541 of SEQ ID NO: 317749
cuaggauuaucuuaaagag

SEQ ID NO: 361258 - RNA, 19 nt, Artificial Sequence
  Description of Artificial Sequence: Synthetic oligonucleotide
  Antisense Strand to SEQ ID NO: 361257
cucuuuaagauaauccuag

SEQ ID NO: 361259 - RNA, 19 nt, Artificial Sequence
  Description of Artificial Sequence: Synthetic oligonucleotide
  Sense Strand Starting at position 541 of SEQ ID NO: 317957
gaggcaugagaucguuuga

SEQ ID NO: 361260 - RNA, 19 nt, Artificial Sequence
  Description of Artificial Sequence: Synthetic oligonucleotide
  Antisense Strand to SEQ ID NO: 361259
ucaaacgaucucaugccuc

SEQ ID NO: 361261 - RNA, 19 nt, Artificial Sequence
  Description of Artificial Sequence: Synthetic oligonucleotide
  Sense Strand Starting at position 541 of SEQ ID NO: 317992
uugcaaugggcugagauau

SEQ ID NO: 361262 - RNA, 19 nt, Artificial Sequence
  Description of Artificial Sequence: Synthetic oligonucleotide
  Antisense Strand to SEQ ID NO: 361261
auaucucagcccauugcaa

SEQ ID NO: 361263 - RNA, 19 nt, Artificial Sequence
  Description of Artificial Sequence: Synthetic oligonucleotide
  Sense Strand Starting at position 541 of SEQ ID NO: 318093
auauuaggauccuaggaag

SEQ ID NO: 361264 - RNA, 19 nt, Artificial Sequence
  Description of Artificial Sequence: Synthetic oligonucleotide
  Antisense Strand to SEQ ID NO: 361263
cuuccuaggauccuaauau

SEQ ID NO: 361265 - RNA, 19 nt, Artificial Sequence
  Description of Artificial Sequence: Synthetic oligonucleotide
  Sense Strand Starting at position 541 of SEQ ID NO: 318126
cagugucacgagcaucauu

SEQ ID NO: 361266 - RNA, 19 nt, Artificial Sequence
  Description of Artificial Sequence: Synthetic oligonucleotide
  Antisense Strand to SEQ ID NO: 361265
aaugaugcucgugacacug

SEQ ID NO: 361267 - RNA, 19 nt, Artificial Sequence
  Description of Artificial Sequence: Synthetic oligonucleotide
  Sense Strand Starting at position 541 of SEQ ID NO: 318205
cucugcuucccaggaguua

SEQ ID NO: 361268 - RNA, 19 nt, Artificial Sequence
  Description of Artificial Sequence: Synthetic oligonucleotide
  Antisense Strand to SEQ ID NO: 361267
uaacuccugggaagcagag

SEQ ID NO: 361269 - RNA, 19 nt, Artificial Sequence
  Description of Artificial Sequence: Synthetic oligonucleotide
  Sense Strand Starting at position 541 of SEQ ID NO: 318217
ggaguuacaugucugcuca

SEQ ID NO: 361270 - RNA, 19 nt, Artificial Sequence
  Description of Artificial Sequence: Synthetic oligonucleotide
  Antisense Strand to SEQ ID NO: 361269
ugagcagacauguaacucc

SEQ ID NO: 361271 - RNA, 19 nt, Artificial Sequence
  Description of Artificial Sequence: Synthetic oligonucleotide
  Sense Strand Starting at position 541 of SEQ ID NO: 318338
ggcacuucucuggguacuu

SEQ ID NO: 361272 - RNA, 19 nt, Artificial Sequence
  Description of Artificial Sequence: Synthetic oligonucleotide
  Antisense Strand to SEQ ID NO: 361271
aaguacccagagaagugcc

SEQ ID NO: 361273 - RNA, 19 nt, Artificial Sequence
  Description of Artificial Sequence: Synthetic oligonucleotide
  Sense Strand Starting at position 541 of SEQ ID NO: 318351
guacuugaugaugauguua

SEQ ID NO: 361274 - RNA, 19 nt, Artificial Sequence
  Description of Artificial Sequence: Synthetic oligonucleotide
  Antisense Strand to SEQ ID NO: 361273
uaacaucaucaucaaguac

SEQ ID NO: 361275 - RNA, 19 nt, Artificial Sequence
  Description of Artificial Sequence: Synthetic oligonucleotide
  Sense Strand Starting at position 541 of SEQ ID NO: 318359
ugaugauguuaaccuuuaa

SEQ ID NO: 361276 - RNA, 19 nt, Artificial Sequence
  Description of Artificial Sequence: Synthetic oligonucleotide
  Antisense Strand to SEQ ID NO: 361275
uuaaagguuaacaucauca

SEQ ID NO: 361277 - RNA, 19 nt, Artificial Sequence
  Description of Artificial Sequence: Synthetic oligonucleotide
  Sense Strand Starting at position 541 of SEQ ID NO: 318512
gccugaaucuagccuccaa

SEQ ID NO: 361278 - RNA, 19 nt, Artificial Sequence
  Description of Artificial Sequence: Synthetic oligonucleotide
  Antisense Strand to SEQ ID NO: 361277
uuggaggcuagauucaggc

SEQ ID NO: 361279 - RNA, 19 nt, Artificial Sequence
  Description of Artificial Sequence: Synthetic oligonucleotide
  Sense Strand Starting at position 541 of SEQ ID NO: 318540
ggcaaaucaguuuggagaa

SEQ ID NO: 361280 - RNA, 19 nt, Artificial Sequence
  Description of Artificial Sequence: Synthetic oligonucleotide
  Antisense Strand to SEQ ID NO: 361279
uucuccaaacugauuugcc

SEQ ID NO: 361281 - RNA, 19 nt, Artificial Sequence
  Description of Artificial Sequence: Synthetic oligonucleotide
  Sense Strand Starting at position 541 of SEQ ID NO: 318571
auauguggucccuggagca

SEQ ID NO: 361282 - RNA, 19 nt, Artificial Sequence
  Description of Artificial Sequence: Synthetic oligonucleotide
  Antisense Strand to SEQ ID NO: 361281
ugcuccagggaccacauau

SEQ ID NO: 361283 - RNA, 19 nt, Artificial Sequence
  Description of Artificial Sequence: Synthetic oligonucleotide
  Sense Strand Starting at position 542 of SEQ ID NO: 315318
ugaauuggguuguuugauu

SEQ ID NO: 361284 - RNA, 19 nt, Artificial Sequence
  Description of Artificial Sequence: Synthetic oligonucleotide
  Antisense Strand to SEQ ID NO: 361283
aaucaaacaacccaauuca

SEQ ID NO: 361285 - RNA, 19 nt, Artificial Sequence
  Description of Artificial Sequence: Synthetic oligonucleotide
  Sense Strand Starting at position 542 of SEQ ID NO: 315696
cugcaauguugggugagga

SEQ ID NO: 361286 - RNA, 19 nt, Artificial Sequence
  Description of Artificial Sequence: Synthetic oligonucleotide
  Antisense Strand to SEQ ID NO: 361285
uccucacccaacauugcag

SEQ ID NO: 361287 - RNA, 19 nt, Artificial Sequence
  Description of Artificial Sequence: Synthetic oligonucleotide
  Sense Strand Starting at position 542 of SEQ ID NO: 315932
uggagaguguuucugcaug

SEQ ID NO: 361288 - RNA, 19 nt, Artificial Sequence
  Description of Artificial Sequence: Synthetic oligonucleotide
  Antisense Strand to SEQ ID NO: 361287
caugcagaaacacucucca

SEQ ID NO: 361289 - RNA, 19 nt, Artificial Sequence
  Description of Artificial Sequence: Synthetic oligonucleotide
  Sense Strand Starting at position 542 of SEQ ID NO: 315934
gagaguguuucugcaugga

SEQ ID NO: 361290 - RNA, 19 nt, Artificial Sequence
  Description of Artificial Sequence: Synthetic oligonucleotide
  Antisense Strand to SEQ ID NO: 361289
uccaugcagaaacacucuc

SEQ ID NO: 361291 - RNA, 19 nt, Artificial Sequence
  Description of Artificial Sequence: Synthetic oligonucleotide
  Sense Strand Starting at position 542 of SEQ ID NO: 315937
aguguuucugcauggagag

SEQ ID NO: 361292 - RNA, 19 nt, Artificial Sequence
  Description of Artificial Sequence: Synthetic oligonucleotide
  Antisense Strand to SEQ ID NO: 361291
cucuccaugcagaaacacu

SEQ ID NO: 361293 - RNA, 19 nt, Artificial Sequence
  Description of Artificial Sequence: Synthetic oligonucleotide
  Sense Strand Starting at position 542 of SEQ ID NO: 315938
guguuucugcauggagaga

SEQ ID NO: 361294 - RNA, 19 nt, Artificial Sequence
  Description of Artificial Sequence: Synthetic oligonucleotide
  Antisense Strand to SEQ ID NO: 361293
ucucuccaugcagaaacac

SEQ ID NO: 361295 - RNA, 19 nt, Artificial Sequence
  Description of Artificial Sequence: Synthetic oligonucleotide
  Sense Strand Starting at position 542 of SEQ ID NO: 315939
uguuucugcauggagagaa

SEQ ID NO: 361296 - RNA, 19 nt, Artificial Sequence
  Description of Artificial Sequence: Synthetic oligonucleotide
  Antisense Strand to SEQ ID NO: 361295
uucucuccaugcagaaaca

SEQ ID NO: 361297 - RNA, 19 nt, Artificial Sequence
  Description of Artificial Sequence: Synthetic oligonucleotide
  Sense Strand Starting at position 542 of SEQ ID NO: 316053
agcugagucaaggauccau

SEQ ID NO: 361298 - RNA, 19 nt, Artificial Sequence
  Description of Artificial Sequence: Synthetic oligonucleotide
  Antisense Strand to SEQ ID NO: 361297
auggauccuugacucagcu

SEQ ID NO: 361299 - RNA, 19 nt, Artificial Sequence
  Description of Artificial Sequence: Synthetic oligonucleotide
  Sense Strand Starting at position 542 of SEQ ID NO: 316106
uguccagauguguaugcaa

SEQ ID NO: 361300 - RNA, 19 nt, Artificial Sequence
  Description of Artificial Sequence: Synthetic oligonucleotide
  Antisense Strand to SEQ ID NO: 361299
uugcauacacaucuggaca

SEQ ID NO: 361301 - RNA, 19 nt, Artificial Sequence
  Description of Artificial Sequence: Synthetic oligonucleotide
  Sense Strand Starting at position 542 of SEQ ID NO: 316108
uccagauguguaugcaaac

SEQ ID NO: 361302 - RNA, 19 nt, Artificial Sequence
  Description of Artificial Sequence: Synthetic oligonucleotide
  Antisense Strand to SEQ ID NO: 361301
guuugcauacacaucugga

SEQ ID NO: 361303 - RNA, 19 nt, Artificial Sequence
  Description of Artificial Sequence: Synthetic oligonucleotide
  Sense Strand Starting at position 542 of SEQ ID NO: 316109
ccagauguguaugcaaacu

SEQ ID NO: 361304 - RNA, 19 nt, Artificial Sequence
  Description of Artificial Sequence: Synthetic oligonucleotide
  Antisense Strand to SEQ ID NO: 361303
aguuugcauacacaucugg

SEQ ID NO: 361305 - RNA, 19 nt, Artificial Sequence
  Description of Artificial Sequence: Synthetic oligonucleotide
  Sense Strand Starting at position 542 of SEQ ID NO: 316240
gggugaugucagugacaaa

SEQ ID NO: 361306 - RNA, 19 nt, Artificial Sequence
  Description of Artificial Sequence: Synthetic oligonucleotide
  Antisense Strand to SEQ ID NO: 361305
uuugucacugacaucaccc

SEQ ID NO: 361307 - RNA, 19 nt, Artificial Sequence
  Description of Artificial Sequence: Synthetic oligonucleotide
  Sense Strand Starting at position 542 of SEQ ID NO: 316241
ggugaugucagugacaaau

SEQ ID NO: 361308 - RNA, 19 nt, Artificial Sequence
  Description of Artificial Sequence: Synthetic oligonucleotide
  Antisense Strand to SEQ ID NO: 361307
auuugucacugacaucacc

SEQ ID NO: 361309 - RNA, 19 nt, Artificial Sequence
  Description of Artificial Sequence: Synthetic oligonucleotide
  Sense Strand Starting at position 542 of SEQ ID NO: 316243
ugaugucagugacaaauuu

SEQ ID NO: 361310 - RNA, 19 nt, Artificial Sequence
  Description of Artificial Sequence: Synthetic oligonucleotide
  Antisense Strand to SEQ ID NO: 361309
aaauuugucacugacauca

SEQ ID NO: 361311 - RNA, 19 nt, Artificial Sequence
  Description of Artificial Sequence: Synthetic oligonucleotide
  Sense Strand Starting at position 542 of SEQ ID NO: 316278
cgccucgcuguauuaauau

SEQ ID NO: 361312 - RNA, 19 nt, Artificial Sequence
  Description of Artificial Sequence: Synthetic oligonucleotide
  Antisense Strand to SEQ ID NO: 361311
auauuaauacagcgaggcg

SEQ ID NO: 361313 - RNA, 19 nt, Artificial Sequence
  Description of Artificial Sequence: Synthetic oligonucleotide
  Sense Strand Starting at position 542 of SEQ ID NO: 316345
gugugagauauaugggauc

SEQ ID NO: 361314 - RNA, 19 nt, Artificial Sequence
  Description of Artificial Sequence: Synthetic oligonucleotide
  Antisense Strand to SEQ ID NO: 361313
gaucccauauaucucacac

SEQ ID NO: 361315 - RNA, 19 nt, Artificial Sequence
  Description of Artificial Sequence: Synthetic oligonucleotide
  Sense Strand Starting at position 542 of SEQ ID NO: 316347
gugagauauaugggaucuu

SEQ ID NO: 361316 - RNA, 19 nt, Artificial Sequence
  Description of Artificial Sequence: Synthetic oligonucleotide
  Antisense Strand to SEQ ID NO: 361315
aagaucccauauaucucac

SEQ ID NO: 361317 - RNA, 19 nt, Artificial Sequence
  Description of Artificial Sequence: Synthetic oligonucleotide
  Sense Strand Starting at position 542 of SEQ ID NO: 316348
ugagauauaugggaucuua

SEQ ID NO: 361318 - RNA, 19 nt, Artificial Sequence
  Description of Artificial Sequence: Synthetic oligonucleotide
  Antisense Strand to SEQ ID NO: 361317
uaagaucccauauaucuca

SEQ ID NO: 361319 - RNA, 19 nt, Artificial Sequence
  Description of Artificial Sequence: Synthetic oligonucleotide
  Sense Strand Starting at position 542 of SEQ ID NO: 316401
gaguauuuacugugucuuu

SEQ ID NO: 361320 - RNA, 19 nt, Artificial Sequence
  Description of Artificial Sequence: Synthetic oligonucleotide
  Antisense Strand to SEQ ID NO: 361319
aaagacacaguaaauacuc

SEQ ID NO: 361321 - RNA, 19 nt, Artificial Sequence
  Description of Artificial Sequence: Synthetic oligonucleotide
  Sense Strand Starting at position 542 of SEQ ID NO: 316402
aguauuuacugugucuuua

SEQ ID NO: 361322 - RNA, 19 nt, Artificial Sequence
  Description of Artificial Sequence: Synthetic oligonucleotide
  Antisense Strand to SEQ ID NO: 361321
uaaagacacaguaaauacu

SEQ ID NO: 361323 - RNA, 19 nt, Artificial Sequence
  Description of Artificial Sequence: Synthetic oligonucleotide
  Sense Strand Starting at position 542 of SEQ ID NO: 316406
uuuacugugucuuuacuau

SEQ ID NO: 361324 - RNA, 19 nt, Artificial Sequence
  Description of Artificial Sequence: Synthetic oligonucleotide
  Antisense Strand to SEQ ID NO: 361323
auaguaaagacacaguaaa

SEQ ID NO: 361325 - RNA, 19 nt, Artificial Sequence
  Description of Artificial Sequence: Synthetic oligonucleotide
  Sense Strand Starting at position 542 of SEQ ID NO: 316462
cuaggauuaucuuaaagag

SEQ ID NO: 361326 - RNA, 19 nt, Artificial Sequence
  Description of Artificial Sequence: Synthetic oligonucleotide
  Antisense Strand to SEQ ID NO: 361325
cucuuuaagauaauccuag

SEQ ID NO: 361327 - RNA, 19 nt, Artificial Sequence
  Description of Artificial Sequence: Synthetic oligonucleotide
  Sense Strand Starting at position 542 of SEQ ID NO: 316670
gaggcaugagaucguuuga

SEQ ID NO: 361328 - RNA, 19 nt, Artificial Sequence
  Description of Artificial Sequence: Synthetic oligonucleotide
  Antisense Strand to SEQ ID NO: 361327
ucaaacgaucucaugccuc

SEQ ID NO: 361329 - RNA, 19 nt, Artificial Sequence
  Description of Artificial Sequence: Synthetic oligonucleotide
  Sense Strand Starting at position 542 of SEQ ID NO: 316705
uugcaaugggcugagauau

SEQ ID NO: 361330 - RNA, 19 nt, Artificial Sequence
  Description of Artificial Sequence: Synthetic oligonucleotide
  Antisense Strand to SEQ ID NO: 361329
auaucucagcccauugcaa

SEQ ID NO: 361331 - RNA, 19 nt, Artificial Sequence
  Description of Artificial Sequence: Synthetic oligonucleotide
  Sense Strand Starting at position 542 of SEQ ID NO: 316806
auauuaggauccuaggaag

SEQ ID NO: 361332 - RNA, 19 nt, Artificial Sequence
  Description of Artificial Sequence: Synthetic oligonucleotide
  Antisense Strand to SEQ ID NO: 361331
cuuccuaggauccuaauau

SEQ ID NO: 361333 - RNA, 19 nt, Artificial Sequence
  Description of Artificial Sequence: Synthetic oligonucleotide
  Sense Strand Starting at position 542 of SEQ ID NO: 316839
cagugucacgagcaucauu

SEQ ID NO: 361334 - RNA, 19 nt, Artificial Sequence
  Description of Artificial Sequence: Synthetic oligonucleotide
  Antisense Strand to SEQ ID NO: 361333
aaugaugcucgugacacug

SEQ ID NO: 361335 - RNA, 19 nt, Artificial Sequence
  Description of Artificial Sequence: Synthetic oligonucleotide
  Sense Strand Starting at position 542 of SEQ ID NO: 316918
cucugcuucccaggaguua

SEQ ID NO: 361336 - RNA, 19 nt, Artificial Sequence
  Description of Artificial Sequence: Synthetic oligonucleotide
  Antisense Strand to SEQ ID NO: 361335
uaacuccugggaagcagag

SEQ ID NO: 361337 - RNA, 19 nt, Artificial Sequence
  Description of Artificial Sequence: Synthetic oligonucleotide
  Sense Strand Starting at position 542 of SEQ ID NO: 316930
ggaguuacaugucugcuca

SEQ ID NO: 361338 - RNA, 19 nt, Artificial Sequence
  Description of Artificial Sequence: Synthetic oligonucleotide
  Antisense Strand to SEQ ID NO: 361337
ugagcagacauguaacucc

SEQ ID NO: 361339 - RNA, 19 nt, Artificial Sequence
  Description of Artificial Sequence: Synthetic oligonucleotide
  Sense Strand Starting at position 542 of SEQ ID NO: 317064
guacuugaugaugauguua

SEQ ID NO: 361340 - RNA, 19 nt, Artificial Sequence
  Description of Artificial Sequence: Synthetic oligonucleotide
  Antisense Strand to SEQ ID NO: 361339
uaacaucaucaucaaguac

SEQ ID NO: 361341 - RNA, 19 nt, Artificial Sequence
  Description of Artificial Sequence: Synthetic oligonucleotide
  Sense Strand Starting at position 542 of SEQ ID NO: 317072
ugaugauguuaaccuuuaa

SEQ ID NO: 361342 - RNA, 19 nt, Artificial Sequence
  Description of Artificial Sequence: Synthetic oligonucleotide
  Antisense Strand to SEQ ID NO: 361341
uuaaagguuaacaucauca

SEQ ID NO: 361343 - RNA, 19 nt, Artificial Sequence
  Description of Artificial Sequence: Synthetic oligonucleotide
  Sense Strand Starting at position 542 of SEQ ID NO: 317225
gccugaaucuagccuccaa

SEQ ID NO: 361344 - RNA, 19 nt, Artificial Sequence
  Description of Artificial Sequence: Synthetic oligonucleotide
  Antisense Strand to SEQ ID NO: 361343
uuggaggcuagauucaggc

SEQ ID NO: 361345 - RNA, 19 nt, Artificial Sequence
  Description of Artificial Sequence: Synthetic oligonucleotide
  Sense Strand Starting at position 542 of SEQ ID NO: 317253
ggcaaaucaguuuggagaa

SEQ ID NO: 361346 - RNA, 19 nt, Artificial Sequence
  Description of Artificial Sequence: Synthetic oligonucleotide
  Antisense Strand to SEQ ID NO: 361345
uucuccaaacugauuugcc

SEQ ID NO: 361347 - RNA, 19 nt, Artificial Sequence
  Description of Artificial Sequence: Synthetic oligonucleotide
  Sense Strand Starting at position 542 of SEQ ID NO: 317284
auauguggucccuggagca

SEQ ID NO: 361348 - RNA, 19 nt, Artificial Sequence
  Description of Artificial Sequence: Synthetic oligonucleotide
  Antisense Strand to SEQ ID NO: 361347
ugcuccagggaccacauau

SEQ ID NO: 361349 - RNA, 19 nt, Artificial Sequence
  Description of Artificial Sequence: Synthetic oligonucleotide
  Sense Strand Starting at position 542 of SEQ ID NO: 318011
ugaggaagccauuagcacu

SEQ ID NO: 361350 - RNA, 19 nt, Artificial Sequence
  Description of Artificial Sequence: Synthetic oligonucleotide
  Antisense Strand to SEQ ID NO: 361349
agugcuaauggcuuccuca

SEQ ID NO: 361351 - RNA, 19 nt, Artificial Sequence
  Description of Artificial Sequence: Synthetic oligonucleotide
  Sense Strand Starting at position 542 of SEQ ID NO: 318022
uuagcacugcuccagugau

SEQ ID NO: 361352 - RNA, 19 nt, Artificial Sequence
  Description of Artificial Sequence: Synthetic oligonucleotide
  Antisense Strand to SEQ ID NO: 361351
aucacuggagcagugcuaa

SEQ ID NO: 361353 - RNA, 19 nt, Artificial Sequence
  Description of Artificial Sequence: Synthetic oligonucleotide
  Sense Strand Starting at position 542 of SEQ ID NO: 318029
ugcuccagugaugacauau

SEQ ID NO: 361354 - RNA, 19 nt, Artificial Sequence
  Description of Artificial Sequence: Synthetic oligonucleotide
  Antisense Strand to SEQ ID NO: 361353
auaugucaucacuggagca

SEQ ID NO: 361355 - RNA, 19 nt, Artificial Sequence
  Description of Artificial Sequence: Synthetic oligonucleotide
  Sense Strand Starting at position 542 of SEQ ID NO: 318068
gcugauuugcuaugccuuu

SEQ ID NO: 361356 - RNA, 19 nt, Artificial Sequence
  Description of Artificial Sequence: Synthetic oligonucleotide
  Antisense Strand to SEQ ID NO: 361355
aaaggcauagcaaaucagc

SEQ ID NO: 361357 - RNA, 19 nt, Artificial Sequence
  Description of Artificial Sequence: Synthetic oligonucleotide
  Sense Strand Starting at position 542 of SEQ ID NO: 318152
ggugguggcagagguaaua

SEQ ID NO: 361358 - RNA, 19 nt, Artificial Sequence
  Description of Artificial Sequence: Synthetic oligonucleotide
  Antisense Strand to SEQ ID NO: 361357
uauuaccucugccaccacc

SEQ ID NO: 361359 - RNA, 19 nt, Artificial Sequence
  Description of Artificial Sequence: Synthetic oligonucleotide
  Sense Strand Starting at position 542 of SEQ ID NO: 319084
agcuauuagccugaaaguu

SEQ ID NO: 361360 - RNA, 19 nt, Artificial Sequence
  Description of Artificial Sequence: Synthetic oligonucleotide
  Antisense Strand to SEQ ID NO: 361359
aacuuucaggcuaauagcu

SEQ ID NO: 361361 - RNA, 19 nt, Artificial Sequence
  Description of Artificial Sequence: Synthetic oligonucleotide
  Sense Strand Starting at position 542 of SEQ ID NO: 319147
aaguuaguuguguaacacu

SEQ ID NO: 361362 - RNA, 19 nt, Artificial Sequence
  Description of Artificial Sequence: Synthetic oligonucleotide
  Antisense Strand to SEQ ID NO: 361361
aguguuacacaacuaacuu

SEQ ID NO: 361363 - RNA, 19 nt, Artificial Sequence
  Description of Artificial Sequence: Synthetic oligonucleotide
  Sense Strand Starting at position 543 of SEQ ID NO: 315586
aaauguguuggaggagcaa

SEQ ID NO: 361364 - RNA, 19 nt, Artificial Sequence
  Description of Artificial Sequence: Synthetic oligonucleotide
  Antisense Strand to SEQ ID NO: 361363
uugcuccuccaacacauuu

SEQ ID NO: 361365 - RNA, 19 nt, Artificial Sequence
  Description of Artificial Sequence: Synthetic oligonucleotide
  Sense Strand Starting at position 543 of SEQ ID NO: 315627
uugauaaccucugugccaa

SEQ ID NO: 361366 - RNA, 19 nt, Artificial Sequence
  Description of Artificial Sequence: Synthetic oligonucleotide
  Antisense Strand to SEQ ID NO: 361365
uuggcacagagguuaucaa

SEQ ID NO: 361367 - RNA, 19 nt, Artificial Sequence
  Description of Artificial Sequence: Synthetic oligonucleotide
  Sense Strand Starting at position 543 of SEQ ID NO: 315678
agugcuuuccagcaaauuc

SEQ ID NO: 361368 - RNA, 19 nt, Artificial Sequence
  Description of Artificial Sequence: Synthetic oligonucleotide
  Antisense Strand to SEQ ID NO: 361367
gaauuugcuggaaagcacu

SEQ ID NO: 361369 - RNA, 19 nt, Artificial Sequence
  Description of Artificial Sequence: Synthetic oligonucleotide
  Sense Strand Starting at position 543 of SEQ ID NO: 316257
gcuacaaugguuuggguuu

SEQ ID NO: 361370 - RNA, 19 nt, Artificial Sequence
  Description of Artificial Sequence: Synthetic oligonucleotide
  Antisense Strand to SEQ ID NO: 361369
aaacccaaaccauuguagc

SEQ ID NO: 361371 - RNA, 19 nt, Artificial Sequence
  Description of Artificial Sequence: Synthetic oligonucleotide
  Sense Strand Starting at position 543 of SEQ ID NO: 316294
gaauuacaccuguggauag

SEQ ID NO: 361372 - RNA, 19 nt, Artificial Sequence
  Description of Artificial Sequence: Synthetic oligonucleotide
  Antisense Strand to SEQ ID NO: 361371
cuauccacagguguaauuc

SEQ ID NO: 361373 - RNA, 19 nt, Artificial Sequence
  Description of Artificial Sequence: Synthetic oligonucleotide
  Sense Strand Starting at position 543 of SEQ ID NO: 316343
agagaagacgaucguggau

SEQ ID NO: 361374 - RNA, 19 nt, Artificial Sequence
  Description of Artificial Sequence: Synthetic oligonucleotide
  Antisense Strand to SEQ ID NO: 361373
auccacgaucgucuucucu

SEQ ID NO: 361375 - RNA, 19 nt, Artificial Sequence
  Description of Artificial Sequence: Synthetic oligonucleotide
  Sense Strand Starting at position 543 of SEQ ID NO: 316356
guggaugguugucuuccau

SEQ ID NO: 361376 - RNA, 19 nt, Artificial Sequence
  Description of Artificial Sequence: Synthetic oligonucleotide
  Antisense Strand to SEQ ID NO: 361375
auggaagacaaccauccac

SEQ ID NO: 361377 - RNA, 19 nt, Artificial Sequence
  Description of Artificial Sequence: Synthetic oligonucleotide
  Sense Strand Starting at position 543 of SEQ ID NO: 316364
uugucuuccauguagggua

SEQ ID NO: 361378 - RNA, 19 nt, Artificial Sequence
  Description of Artificial Sequence: Synthetic oligonucleotide
  Antisense Strand to SEQ ID NO: 361377
uacccuacauggaagacaa

SEQ ID NO: 361379 - RNA, 19 nt, Artificial Sequence
  Description of Artificial Sequence: Synthetic oligonucleotide
  Sense Strand Starting at position 543 of SEQ ID NO: 316429
auauccauaugugaaagga

SEQ ID NO: 361380 - RNA, 19 nt, Artificial Sequence
  Description of Artificial Sequence: Synthetic oligonucleotide
  Antisense Strand to SEQ ID NO: 361379
uccuuucacauauggauau

SEQ ID NO: 361381 - RNA, 19 nt, Artificial Sequence
  Description of Artificial Sequence: Synthetic oligonucleotide
  Sense Strand Starting at position 543 of SEQ ID NO: 316445
ggauaaaguuugcuggugu

SEQ ID NO: 361382 - RNA, 19 nt, Artificial Sequence
  Description of Artificial Sequence: Synthetic oligonucleotide
  Antisense Strand to SEQ ID NO: 361381
acaccagcaaacuuuaucc

SEQ ID NO: 361383 - RNA, 19 nt, Artificial Sequence
  Description of Artificial Sequence: Synthetic oligonucleotide
  Sense Strand Starting at position 543 of SEQ ID NO: 316487
aaaugaaagugcucuuguu

SEQ ID NO: 361384 - RNA, 19 nt, Artificial Sequence
  Description of Artificial Sequence: Synthetic oligonucleotide
  Antisense Strand to SEQ ID NO: 361383
aacaagagcacuuucauuu

SEQ ID NO: 361385 - RNA, 19 nt, Artificial Sequence
  Description of Artificial Sequence: Synthetic oligonucleotide
  Sense Strand Starting at position 543 of SEQ ID NO: 316550
agucuaugugggcaucuua

SEQ ID NO: 361386 - RNA, 19 nt, Artificial Sequence
  Description of Artificial Sequence: Synthetic oligonucleotide
  Antisense Strand to SEQ ID NO: 361385
uaagaugcccacauagacu

SEQ ID NO: 361387 - RNA, 19 nt, Artificial Sequence
  Description of Artificial Sequence: Synthetic oligonucleotide
  Sense Strand Starting at position 543 of SEQ ID NO: 316566
uuaguaauguagcuaugaa

SEQ ID NO: 361388 - RNA, 19 nt, Artificial Sequence
  Description of Artificial Sequence: Synthetic oligonucleotide
  Antisense Strand to SEQ ID NO: 361387
uucauagcuacauuacuaa

SEQ ID NO: 361389 - RNA, 19 nt, Artificial Sequence
  Description of Artificial Sequence: Synthetic oligonucleotide
  Sense Strand Starting at position 543 of SEQ ID NO: 316602
agacaaucucuaggaguug

SEQ ID NO: 361390 - RNA, 19 nt, Artificial Sequence
  Description of Artificial Sequence: Synthetic oligonucleotide
  Antisense Strand to SEQ ID NO: 361389
caacuccuagagauugucu

SEQ ID NO: 361391 - RNA, 19 nt, Artificial Sequence
  Description of Artificial Sequence: Synthetic oligonucleotide
  Sense Strand Starting at position 543 of SEQ ID NO: 316608
ucucuaggaguuggaaauu

SEQ ID NO: 361392 - RNA, 19 nt, Artificial Sequence
  Description of Artificial Sequence: Synthetic oligonucleotide
  Antisense Strand to SEQ ID NO: 361391
aauuuccaacuccuagaga

SEQ ID NO: 361393 - RNA, 19 nt, Artificial Sequence
  Description of Artificial Sequence: Synthetic oligonucleotide
  Sense Strand Starting at position 543 of SEQ ID NO: 316635
guuccuagauguucuacua

SEQ ID NO: 361394 - RNA, 19 nt, Artificial Sequence
  Description of Artificial Sequence: Synthetic oligonucleotide
  Antisense Strand to SEQ ID NO: 361393
uaguagaacaucuaggaac

SEQ ID NO: 361395 - RNA, 19 nt, Artificial Sequence
  Description of Artificial Sequence: Synthetic oligonucleotide
  Sense Strand Starting at position 543 of SEQ ID NO: 317234
uacuguucugugggccaga

SEQ ID NO: 361396 - RNA, 19 nt, Artificial Sequence
  Description of Artificial Sequence: Synthetic oligonucleotide
  Antisense Strand to SEQ ID NO: 361395
ucuggcccacagaacagua

SEQ ID NO: 361397 - RNA, 19 nt, Artificial Sequence
  Description of Artificial Sequence: Synthetic oligonucleotide
  Sense Strand Starting at position 543 of SEQ ID NO: 317237
uguucugugggccagaagu

SEQ ID NO: 361398 - RNA, 19 nt, Artificial Sequence
  Description of Artificial Sequence: Synthetic oligonucleotide
  Antisense Strand to SEQ ID NO: 361397
acuucuggcccacagaaca

SEQ ID NO: 361399 - RNA, 19 nt, Artificial Sequence
  Description of Artificial Sequence: Synthetic oligonucleotide
  Sense Strand Starting at position 543 of SEQ ID NO: 317245
gggccagaaguuugaaaug

SEQ ID NO: 361400 - RNA, 19 nt, Artificial Sequence
  Description of Artificial Sequence: Synthetic oligonucleotide
  Antisense Strand to SEQ ID NO: 361399
cauuucaaacuucuggccc

SEQ ID NO: 361401 - RNA, 19 nt, Artificial Sequence
  Description of Artificial Sequence: Synthetic oligonucleotide
  Sense Strand Starting at position 543 of SEQ ID NO: 317250
agaaguuugaaaugggucu

SEQ ID NO: 361402 - RNA, 19 nt, Artificial Sequence
  Description of Artificial Sequence: Synthetic oligonucleotide
  Antisense Strand to SEQ ID NO: 361401
agacccauuucaaacuucu

SEQ ID NO: 361403 - RNA, 19 nt, Artificial Sequence
  Description of Artificial Sequence: Synthetic oligonucleotide
  Sense Strand Starting at position 543 of SEQ ID NO: 317716
gcaacaucaggccaauguu

SEQ ID NO: 361404 - RNA, 19 nt, Artificial Sequence
  Description of Artificial Sequence: Synthetic oligonucleotide
  Antisense Strand to SEQ ID NO: 361403
aacauuggccugauguugc

SEQ ID NO: 361405 - RNA, 19 nt, Artificial Sequence
  Description of Artificial Sequence: Synthetic oligonucleotide
  Sense Strand Starting at position 543 of SEQ ID NO: 317724
aggccaauguuucucacaa

SEQ ID NO: 361406 - RNA, 19 nt, Artificial Sequence
  Description of Artificial Sequence: Synthetic oligonucleotide
  Antisense Strand to SEQ ID NO: 361405
uugugagaaacauuggccu

SEQ ID NO: 361407 - RNA, 19 nt, Artificial Sequence
  Description of Artificial Sequence: Synthetic oligonucleotide
  Sense Strand Starting at position 543 of SEQ ID NO: 317725
ggccaauguuucucacaag

SEQ ID NO: 361408 - RNA, 19 nt, Artificial Sequence
  Description of Artificial Sequence: Synthetic oligonucleotide
  Antisense Strand to SEQ ID NO: 361407
cuugugagaaacauuggcc

SEQ ID NO: 361409 - RNA, 19 nt, Artificial Sequence
  Description of Artificial Sequence: Synthetic oligonucleotide
  Sense Strand Starting at position 543 of SEQ ID NO: 317749
ucaucucucugguucuuau

SEQ ID NO: 361410 - RNA, 19 nt, Artificial Sequence
  Description of Artificial Sequence: Synthetic oligonucleotide
  Antisense Strand to SEQ ID NO: 361409
auaagaaccagagagauga

SEQ ID NO: 361411 - RNA, 19 nt, Artificial Sequence
  Description of Artificial Sequence: Synthetic oligonucleotide
  Sense Strand Starting at position 543 of SEQ ID NO: 317793
auaagagccuuugugauug

SEQ ID NO: 361412 - RNA, 19 nt, Artificial Sequence
  Description of Artificial Sequence: Synthetic oligonucleotide
  Antisense Strand to SEQ ID NO: 361411
caaucacaaaggcucuuau

SEQ ID NO: 361413 - RNA, 19 nt, Artificial Sequence
  Description of Artificial Sequence: Synthetic oligonucleotide
  Sense Strand Starting at position 543 of SEQ ID NO: 317799
gccuuugugauugcauugu

SEQ ID NO: 361414 - RNA, 19 nt, Artificial Sequence
  Description of Artificial Sequence: Synthetic oligonucleotide
  Antisense Strand to SEQ ID NO: 361413
acaaugcaaucacaaaggc

SEQ ID NO: 361415 - RNA, 19 nt, Artificial Sequence
  Description of Artificial Sequence: Synthetic oligonucleotide
  Sense Strand Starting at position 543 of SEQ ID NO: 317955
gccguuauucugccuagca

SEQ ID NO: 361416 - RNA, 19 nt, Artificial Sequence
  Description of Artificial Sequence: Synthetic oligonucleotide
  Antisense Strand to SEQ ID NO: 361415
ugcuaggcagaauaacggc

SEQ ID NO: 361417 - RNA, 19 nt, Artificial Sequence
  Description of Artificial Sequence: Synthetic oligonucleotide
  Sense Strand Starting at position 543 of SEQ ID NO: 318053
ucuccucaacuguguuuau

SEQ ID NO: 361418 - RNA, 19 nt, Artificial Sequence
  Description of Artificial Sequence: Synthetic oligonucleotide
  Antisense Strand to SEQ ID NO: 361417
auaaacacaguugaggaga

SEQ ID NO: 361419 - RNA, 19 nt, Artificial Sequence
  Description of Artificial Sequence: Synthetic oligonucleotide
  Sense Strand Starting at position 543 of SEQ ID NO: 318054
cuccucaacuguguuuauu

SEQ ID NO: 361420 - RNA, 19 nt, Artificial Sequence
  Description of Artificial Sequence: Synthetic oligonucleotide
  Antisense Strand to SEQ ID NO: 361419
aauaaacacaguugaggag

SEQ ID NO: 361421 - RNA, 19 nt, Artificial Sequence
  Description of Artificial Sequence: Synthetic oligonucleotide
  Sense Strand Starting at position 543 of SEQ ID NO: 318199
auuugucuuugacaauaug

SEQ ID NO: 361422 - RNA, 19 nt, Artificial Sequence
  Description of Artificial Sequence: Synthetic oligonucleotide
  Antisense Strand to SEQ ID NO: 361421
cauauugucaaagacaaau

SEQ ID NO: 361423 - RNA, 19 nt, Artificial Sequence
  Description of Artificial Sequence: Synthetic oligonucleotide
  Sense Strand Starting at position 543 of SEQ ID NO: 318247
auggaugccuuccauauuu

SEQ ID NO: 361424 - RNA, 19 nt, Artificial Sequence
  Description of Artificial Sequence: Synthetic oligonucleotide
  Antisense Strand to SEQ ID NO: 361423
aaauauggaaggcauccau

SEQ ID NO: 361425 - RNA, 19 nt, Artificial Sequence
  Description of Artificial Sequence: Synthetic oligonucleotide
  Sense Strand Starting at position 543 of SEQ ID NO: 318349
ccuugauuugagcgauucu

SEQ ID NO: 361426 - RNA, 19 nt, Artificial Sequence
  Description of Artificial Sequence: Synthetic oligonucleotide
  Antisense Strand to SEQ ID NO: 361425
agaaucgcucaaaucaagg

SEQ ID NO: 361427 - RNA, 19 nt, Artificial Sequence
  Description of Artificial Sequence: Synthetic oligonucleotide
  Sense Strand Starting at position 543 of SEQ ID NO: 318556
acccucaacugugucuaau

SEQ ID NO: 361428 - RNA, 19 nt, Artificial Sequence
  Description of Artificial Sequence: Synthetic oligonucleotide
  Antisense Strand to SEQ ID NO: 361427
auuagacacaguugagggu

SEQ ID NO: 361429 - RNA, 19 nt, Artificial Sequence
  Description of Artificial Sequence: Synthetic oligonucleotide
  Sense Strand Starting at position 543 of SEQ ID NO: 318567
ugucuaaucuguccaucua

SEQ ID NO: 361430 - RNA, 19 nt, Artificial Sequence
  Description of Artificial Sequence: Synthetic oligonucleotide
  Antisense Strand to SEQ ID NO: 361429
uagauggacagauuagaca

SEQ ID NO: 361431 - RNA, 19 nt, Artificial Sequence
  Description of Artificial Sequence: Synthetic oligonucleotide
  Sense Strand Starting at position 543 of SEQ ID NO: 318568
gucuaaucuguccaucuaa

SEQ ID NO: 361432 - RNA, 19 nt, Artificial Sequence
  Description of Artificial Sequence: Synthetic oligonucleotide
  Antisense Strand to SEQ ID NO: 361431
uuagauggacagauuagac

SEQ ID NO: 361433 - RNA, 19 nt, Artificial Sequence
  Description of Artificial Sequence: Synthetic oligonucleotide
  Sense Strand Starting at position 543 of SEQ ID NO: 318732
ugucuaaucuguccacuga

SEQ ID NO: 361434 - RNA, 19 nt, Artificial Sequence
  Description of Artificial Sequence: Synthetic oligonucleotide
  Antisense Strand to SEQ ID NO: 361433
ucaguggacagauuagaca

SEQ ID NO: 361435 - RNA, 19 nt, Artificial Sequence
  Description of Artificial Sequence: Synthetic oligonucleotide
  Sense Strand Starting at position 543 of SEQ ID NO: 319108
ucaggaauucuauguauag

SEQ ID NO: 361436 - RNA, 19 nt, Artificial Sequence
  Description of Artificial Sequence: Synthetic oligonucleotide
  Antisense Strand to SEQ ID NO: 361435
cuauacauagaauuccuga

SEQ ID NO: 361437 - RNA, 19 nt, Artificial Sequence
  Description of Artificial Sequence: Synthetic oligonucleotide
  Sense Strand Starting at position 543 of SEQ ID NO: 319109
caggaauucuauguauagu

SEQ ID NO: 361438 - RNA, 19 nt, Artificial Sequence
  Description of Artificial Sequence: Synthetic oligonucleotide
  Antisense Strand to SEQ ID NO: 361437
acuauacauagaauuccug

SEQ ID NO: 361439 - RNA, 19 nt, Artificial Sequence
  Description of Artificial Sequence: Synthetic oligonucleotide
  Sense Strand Starting at position 543 of SEQ ID NO: 319115
uucuauguauaguuuggau

SEQ ID NO: 361440 - RNA, 19 nt, Artificial Sequence
  Description of Artificial Sequence: Synthetic oligonucleotide
  Antisense Strand to SEQ ID NO: 361439
auccaaacuauacauagaa

SEQ ID NO: 361441 - RNA, 19 nt, Artificial Sequence
  Description of Artificial Sequence: Synthetic oligonucleotide
  Sense Strand Starting at position 543 of SEQ ID NO: 319117
cuauguauaguuuggauau

SEQ ID NO: 361442 - RNA, 19 nt, Artificial Sequence
  Description of Artificial Sequence: Synthetic oligonucleotide
  Antisense Strand to SEQ ID NO: 361441
auauccaaacuauacauag

SEQ ID NO: 361443 - RNA, 19 nt, Artificial Sequence
  Description of Artificial Sequence: Synthetic oligonucleotide
  Sense Strand Starting at position 544 of SEQ ID NO: 315271
uugagaauacucuaugugu

SEQ ID NO: 361444 - RNA, 19 nt, Artificial Sequence
  Description of Artificial Sequence: Synthetic oligonucleotide
  Antisense Strand to SEQ ID NO: 361443
acacauagaguauucucaa

SEQ ID NO: 361445 - RNA, 19 nt, Artificial Sequence
  Description of Artificial Sequence: Synthetic oligonucleotide
  Sense Strand Starting at position 544 of SEQ ID NO: 315273
gagaauacucuaugugugu

SEQ ID NO: 361446 - RNA, 19 nt, Artificial Sequence
  Description of Artificial Sequence: Synthetic oligonucleotide
  Antisense Strand to SEQ ID NO: 361445
acacacauagaguauucuc

SEQ ID NO: 361447 - RNA, 19 nt, Artificial Sequence
  Description of Artificial Sequence: Synthetic oligonucleotide
  Sense Strand Starting at position 544 of SEQ ID NO: 315299
aauuauguauggucauuga

SEQ ID NO: 361448 - RNA, 19 nt, Artificial Sequence
  Description of Artificial Sequence: Synthetic oligonucleotide
  Antisense Strand to SEQ ID NO: 361447
ucaaugaccauacauaauu

SEQ ID NO: 361449 - RNA, 19 nt, Artificial Sequence
  Description of Artificial Sequence: Synthetic oligonucleotide
  Sense Strand Starting at position 544 of SEQ ID NO: 315302
uauguauggucauugauac

SEQ ID NO: 361450 - RNA, 19 nt, Artificial Sequence
  Description of Artificial Sequence: Synthetic oligonucleotide
  Antisense Strand to SEQ ID NO: 361449
guaucaaugaccauacaua

SEQ ID NO: 361451 - RNA, 19 nt, Artificial Sequence
  Description of Artificial Sequence: Synthetic oligonucleotide
  Sense Strand Starting at position 544 of SEQ ID NO: 315303
auguauggucauugauaca

SEQ ID NO: 361452 - RNA, 19 nt, Artificial Sequence
  Description of Artificial Sequence: Synthetic oligonucleotide
  Antisense Strand to SEQ ID NO: 361451
uguaucaaugaccauacau

SEQ ID NO: 361453 - RNA, 19 nt, Artificial Sequence
  Description of Artificial Sequence: Synthetic oligonucleotide
  Sense Strand Starting at position 544 of SEQ ID NO: 315306
uauggucauugauacaaag

SEQ ID NO: 361454 - RNA, 19 nt, Artificial Sequence
  Description of Artificial Sequence: Synthetic oligonucleotide
  Antisense Strand to SEQ ID NO: 361453
cuuuguaucaaugaccaua

SEQ ID NO: 361455 - RNA, 19 nt, Artificial Sequence
  Description of Artificial Sequence: Synthetic oligonucleotide
  Sense Strand Starting at position 544 of SEQ ID NO: 315324
guuugacauguuuauuaga

SEQ ID NO: 361456 - RNA, 19 nt, Artificial Sequence
  Description of Artificial Sequence: Synthetic oligonucleotide
  Antisense Strand to SEQ ID NO: 361455
ucuaauaaacaugucaaac

SEQ ID NO: 361457 - RNA, 19 nt, Artificial Sequence
  Description of Artificial Sequence: Synthetic oligonucleotide
  Sense Strand Starting at position 544 of SEQ ID NO: 315326
uugacauguuuauuagacu

SEQ ID NO: 361458 - RNA, 19 nt, Artificial Sequence
  Description of Artificial Sequence: Synthetic oligonucleotide
  Antisense Strand to SEQ ID NO: 361457
agucuaauaaacaugucaa

SEQ ID NO: 361459 - RNA, 19 nt, Artificial Sequence
  Description of Artificial Sequence: Synthetic oligonucleotide
  Sense Strand Starting at position 544 of SEQ ID NO: 315327
ugacauguuuauuagacua

SEQ ID NO: 361460 - RNA, 19 nt, Artificial Sequence
  Description of Artificial Sequence: Synthetic oligonucleotide
  Antisense Strand to SEQ ID NO: 361459
uagucuaauaaacauguca

SEQ ID NO: 361461 - RNA, 19 nt, Artificial Sequence
  Description of Artificial Sequence: Synthetic oligonucleotide
  Sense Strand Starting at position 544 of SEQ ID NO: 315329
acauguuuauuagacuaag

SEQ ID NO: 361462 - RNA, 19 nt, Artificial Sequence
  Description of Artificial Sequence: Synthetic oligonucleotide
  Antisense Strand to SEQ ID NO: 361461
cuuagucuaauaaacaugu

SEQ ID NO: 361463 - RNA, 19 nt, Artificial Sequence
  Description of Artificial Sequence: Synthetic oligonucleotide
  Sense Strand Starting at position 544 of SEQ ID NO: 315332
uguuuauuagacuaagcuu

SEQ ID NO: 361464 - RNA, 19 nt, Artificial Sequence
  Description of Artificial Sequence: Synthetic oligonucleotide
  Antisense Strand to SEQ ID NO: 361463
aagcuuagucuaauaaaca

SEQ ID NO: 361465 - RNA, 19 nt, Artificial Sequence
  Description of Artificial Sequence: Synthetic oligonucleotide
  Sense Strand Starting at position 544 of SEQ ID NO: 315340
agacuaagcuucuuaauug

SEQ ID NO: 361466 - RNA, 19 nt, Artificial Sequence
  Description of Artificial Sequence: Synthetic oligonucleotide
  Antisense Strand to SEQ ID NO: 361465
caauuaagaagcuuagucu

SEQ ID NO: 361467 - RNA, 19 nt, Artificial Sequence
  Description of Artificial Sequence: Synthetic oligonucleotide
  Sense Strand Starting at position 544 of SEQ ID NO: 315348
cuucuuaauugugcuguga

SEQ ID NO: 361468 - RNA, 19 nt, Artificial Sequence
  Description of Artificial Sequence: Synthetic oligonucleotide
  Antisense Strand to SEQ ID NO: 361467
ucacagcacaauuaagaag

SEQ ID NO: 361469 - RNA, 19 nt, Artificial Sequence
  Description of Artificial Sequence: Synthetic oligonucleotide
  Sense Strand Starting at position 544 of SEQ ID NO: 315720
uugaaagcaguguauuaaa

SEQ ID NO: 361470 - RNA, 19 nt, Artificial Sequence
  Description of Artificial Sequence: Synthetic oligonucleotide
  Antisense Strand to SEQ ID NO: 361469
uuuaauacacugcuuucaa

SEQ ID NO: 361471 - RNA, 19 nt, Artificial Sequence
  Description of Artificial Sequence: Synthetic oligonucleotide
  Sense Strand Starting at position 544 of SEQ ID NO: 315787
aaaccaauguuagggacau

SEQ ID NO: 361472 - RNA, 19 nt, Artificial Sequence
  Description of Artificial Sequence: Synthetic oligonucleotide
  Antisense Strand to SEQ ID NO: 361471
augucccuaacauugguuu

SEQ ID NO: 361473 - RNA, 19 nt, Artificial Sequence
  Description of Artificial Sequence: Synthetic oligonucleotide
  Sense Strand Starting at position 544 of SEQ ID NO: 315788
aaccaauguuagggacaua

SEQ ID NO: 361474 - RNA, 19 nt, Artificial Sequence
  Description of Artificial Sequence: Synthetic oligonucleotide
  Antisense Strand to SEQ ID NO: 361473
uaugucccuaacauugguu

SEQ ID NO: 361475 - RNA, 19 nt, Artificial Sequence
  Description of Artificial Sequence: Synthetic oligonucleotide
  Sense Strand Starting at position 544 of SEQ ID NO: 315862
gagagaauaaaguguuguc

SEQ ID NO: 361476 - RNA, 19 nt, Artificial Sequence
  Description of Artificial Sequence: Synthetic oligonucleotide
  Antisense Strand to SEQ ID NO: 361475
gacaacacuuuauucucuc

SEQ ID NO: 361477 - RNA, 19 nt, Artificial Sequence
  Description of Artificial Sequence: Synthetic oligonucleotide
  Sense Strand Starting at position 544 of SEQ ID NO: 315952
uccaucauguugccaguaa

SEQ ID NO: 361478 - RNA, 19 nt, Artificial Sequence
  Description of Artificial Sequence: Synthetic oligonucleotide
  Antisense Strand to SEQ ID NO: 361477
uuacuggcaacaugaugga

SEQ ID NO: 361479 - RNA, 19 nt, Artificial Sequence
  Description of Artificial Sequence: Synthetic oligonucleotide
  Sense Strand Starting at position 544 of SEQ ID NO: 315956
ucauguugccaguaagaag

SEQ ID NO: 361480 - RNA, 19 nt, Artificial Sequence
  Description of Artificial Sequence: Synthetic oligonucleotide
  Antisense Strand to SEQ ID NO: 361479
cuucuuacuggcaacauga

SEQ ID NO: 361481 - RNA, 19 nt, Artificial Sequence
  Description of Artificial Sequence: Synthetic oligonucleotide
  Sense Strand Starting at position 544 of SEQ ID NO: 315965
caguaagaagucuguucca

SEQ ID NO: 361482 - RNA, 19 nt, Artificial Sequence
  Description of Artificial Sequence: Synthetic oligonucleotide
  Antisense Strand to SEQ ID NO: 361481
uggaacagacuucuuacug

SEQ ID NO: 361483 - RNA, 19 nt, Artificial Sequence
  Description of Artificial Sequence: Synthetic oligonucleotide
  Sense Strand Starting at position 544 of SEQ ID NO: 316109
ggaguaaaguaguccuucu

SEQ ID NO: 361484 - RNA, 19 nt, Artificial Sequence
  Description of Artificial Sequence: Synthetic oligonucleotide
  Antisense Strand to SEQ ID NO: 361483
agaaggacuacuuuacucc

SEQ ID NO: 361485 - RNA, 19 nt, Artificial Sequence
  Description of Artificial Sequence: Synthetic oligonucleotide
  Sense Strand Starting at position 544 of SEQ ID NO: 316125
ucucaacccucgcuguaua

SEQ ID NO: 361486 - RNA, 19 nt, Artificial Sequence
  Description of Artificial Sequence: Synthetic oligonucleotide
  Antisense Strand to SEQ ID NO: 361485
uauacagcgaggguugaga

SEQ ID NO: 361487 - RNA, 19 nt, Artificial Sequence
  Description of Artificial Sequence: Synthetic oligonucleotide
  Sense Strand Starting at position 544 of SEQ ID NO: 316132
ccucgcuguauaugagaau

SEQ ID NO: 361488 - RNA, 19 nt, Artificial Sequence
  Description of Artificial Sequence: Synthetic oligonucleotide
  Antisense Strand to SEQ ID NO: 361487
auucucauauacagcgagg

SEQ ID NO: 361489 - RNA, 19 nt, Artificial Sequence
  Description of Artificial Sequence: Synthetic oligonucleotide
  Sense Strand Starting at position 544 of SEQ ID NO: 316317
ugugacgcaugccugaaau

SEQ ID NO: 361490 - RNA, 19 nt, Artificial Sequence
  Description of Artificial Sequence: Synthetic oligonucleotide
  Antisense Strand to SEQ ID NO: 361489
auuucaggcaugcgucaca

SEQ ID NO: 361491 - RNA, 19 nt, Artificial Sequence
  Description of Artificial Sequence: Synthetic oligonucleotide
  Sense Strand Starting at position 544 of SEQ ID NO: 316524
agauuagaaccuggucacu

SEQ ID NO: 361492 - RNA, 19 nt, Artificial Sequence
  Description of Artificial Sequence: Synthetic oligonucleotide
  Antisense Strand to SEQ ID NO: 361491
agugaccagguucuaaucu

SEQ ID NO: 361493 - RNA, 19 nt, Artificial Sequence
  Description of Artificial Sequence: Synthetic oligonucleotide
  Sense Strand Starting at position 544 of SEQ ID NO: 316530
gaaccuggucacugguaua

SEQ ID NO: 361494 - RNA, 19 nt, Artificial Sequence
  Description of Artificial Sequence: Synthetic oligonucleotide
  Antisense Strand to SEQ ID NO: 361493
uauaccagugaccagguuc

SEQ ID NO: 361495 - RNA, 19 nt, Artificial Sequence
  Description of Artificial Sequence: Synthetic oligonucleotide
  Sense Strand Starting at position 544 of SEQ ID NO: 316611
gacagagcuucuuugagau

SEQ ID NO: 361496 - RNA, 19 nt, Artificial Sequence
  Description of Artificial Sequence: Synthetic oligonucleotide
  Antisense Strand to SEQ ID NO: 361495
aucucaaagaagcucuguc

SEQ ID NO: 361497 - RNA, 19 nt, Artificial Sequence
  Description of Artificial Sequence: Synthetic oligonucleotide
  Sense Strand Starting at position 544 of SEQ ID NO: 317371
augcaaauucuggaagcua

SEQ ID NO: 361498 - RNA, 19 nt, Artificial Sequence
  Description of Artificial Sequence: Synthetic oligonucleotide
  Antisense Strand to SEQ ID NO: 361497
uagcuuccagaauuugcau

SEQ ID NO: 361499 - RNA, 19 nt, Artificial Sequence
  Description of Artificial Sequence: Synthetic oligonucleotide
  Sense Strand Starting at position 544 of SEQ ID NO: 317467
ugcaaacugugccuggaau

SEQ ID NO: 361500 - RNA, 19 nt, Artificial Sequence
  Description of Artificial Sequence: Synthetic oligonucleotide
  Antisense Strand to SEQ ID NO: 361499
auuccaggcacaguuugca

SEQ ID NO: 361501 - RNA, 19 nt, Artificial Sequence
  Description of Artificial Sequence: Synthetic oligonucleotide
  Sense Strand Starting at position 544 of SEQ ID NO: 317485
uguugauagucauccgaua

SEQ ID NO: 361502 - RNA, 19 nt, Artificial Sequence
  Description of Artificial Sequence: Synthetic oligonucleotide
  Antisense Strand to SEQ ID NO: 361501
uaucggaugacuaucaaca

SEQ ID NO: 361503 - RNA, 19 nt, Artificial Sequence
  Description of Artificial Sequence: Synthetic oligonucleotide
  Sense Strand Starting at position 544 of SEQ ID NO: 317490
auagucauccgauaggauu

SEQ ID NO: 361504 - RNA, 19 nt, Artificial Sequence
  Description of Artificial Sequence: Synthetic oligonucleotide
  Antisense Strand to SEQ ID NO: 361503
aauccuaucggaugacuau

SEQ ID NO: 361505 - RNA, 19 nt, Artificial Sequence
  Description of Artificial Sequence: Synthetic oligonucleotide
  Sense Strand Starting at position 544 of SEQ ID NO: 317589
cucuaucaccagcguucua

SEQ ID NO: 361506 - RNA, 19 nt, Artificial Sequence
  Description of Artificial Sequence: Synthetic oligonucleotide
  Antisense Strand to SEQ ID NO: 361505
uagaacgcuggugauagag

SEQ ID NO: 361507 - RNA, 19 nt, Artificial Sequence
  Description of Artificial Sequence: Synthetic oligonucleotide
  Sense Strand Starting at position 544 of SEQ ID NO: 317978
cggccuaauugugcauauu

SEQ ID NO: 361508 - RNA, 19 nt, Artificial Sequence
  Description of Artificial Sequence: Synthetic oligonucleotide
  Antisense Strand to SEQ ID NO: 361507
aauaugcacaauuaggccg

SEQ ID NO: 361509 - RNA, 19 nt, Artificial Sequence
  Description of Artificial Sequence: Synthetic oligonucleotide
  Sense Strand Starting at position 544 of SEQ ID NO: 318316
uuagaagugugggugggau

SEQ ID NO: 361510 - RNA, 19 nt, Artificial Sequence
  Description of Artificial Sequence: Synthetic oligonucleotide
  Antisense Strand to SEQ ID NO: 361509
aucccacccacacuucuaa

SEQ ID NO: 361511 - RNA, 19 nt, Artificial Sequence
  Description of Artificial Sequence: Synthetic oligonucleotide
  Sense Strand Starting at position 544 of SEQ ID NO: 318701
aaauguguuggaggagcaa

SEQ ID NO: 361512 - RNA, 19 nt, Artificial Sequence
  Description of Artificial Sequence: Synthetic oligonucleotide
  Antisense Strand to SEQ ID NO: 361511
uugcuccuccaacacauuu

SEQ ID NO: 361513 - RNA, 19 nt, Artificial Sequence
  Description of Artificial Sequence: Synthetic oligonucleotide
  Sense Strand Starting at position 544 of SEQ ID NO: 318741
guugauaaccucugugcca

SEQ ID NO: 361514 - RNA, 19 nt, Artificial Sequence
  Description of Artificial Sequence: Synthetic oligonucleotide
  Antisense Strand to SEQ ID NO: 361513
uggcacagagguuaucaac

SEQ ID NO: 361515 - RNA, 19 nt, Artificial Sequence
  Description of Artificial Sequence: Synthetic oligonucleotide
  Sense Strand Starting at position 544 of SEQ ID NO: 318742
uugauaaccucugugccaa

SEQ ID NO: 361516 - RNA, 19 nt, Artificial Sequence
  Description of Artificial Sequence: Synthetic oligonucleotide
  Antisense Strand to SEQ ID NO: 361515
uuggcacagagguuaucaa

SEQ ID NO: 361517 - RNA, 19 nt, Artificial Sequence
  Description of Artificial Sequence: Synthetic oligonucleotide
  Sense Strand Starting at position 544 of SEQ ID NO: 318793
agugcuuuccagcaaauuc

SEQ ID NO: 361518 - RNA, 19 nt, Artificial Sequence
  Description of Artificial Sequence: Synthetic oligonucleotide
  Antisense Strand to SEQ ID NO: 361517
gaauuugcuggaaagcacu

SEQ ID NO: 361519 - RNA, 19 nt, Artificial Sequence
  Description of Artificial Sequence: Synthetic oligonucleotide
  Sense Strand Starting at position 544 of SEQ ID NO: 318993
ggaauaaucuaacgaggag

SEQ ID NO: 361520 - RNA, 19 nt, Artificial Sequence
  Description of Artificial Sequence: Synthetic oligonucleotide
  Antisense Strand to SEQ ID NO: 361519
cuccucguuagauuauucc

SEQ ID NO: 361521 - RNA, 19 nt, Artificial Sequence
  Description of Artificial Sequence: Synthetic oligonucleotide
  Sense Strand Starting at position 544 of SEQ ID NO: 319217
ccauguucuugucucucua

SEQ ID NO: 361522 - RNA, 19 nt, Artificial Sequence
  Description of Artificial Sequence: Synthetic oligonucleotide
  Antisense Strand to SEQ ID NO: 361521
uagagagacaagaacaugg

SEQ ID NO: 361523 - RNA, 19 nt, Artificial Sequence
  Description of Artificial Sequence: Synthetic oligonucleotide
  Sense Strand Starting at position 545 of SEQ ID NO: 315696
gcagaaagugguuugucgu

SEQ ID NO: 361524 - RNA, 19 nt, Artificial Sequence
  Description of Artificial Sequence: Synthetic oligonucleotide
  Antisense Strand to SEQ ID NO: 361523
acgacaaaccacuuucugc

SEQ ID NO: 361525 - RNA, 19 nt, Artificial Sequence
  Description of Artificial Sequence: Synthetic oligonucleotide
  Sense Strand Starting at position 545 of SEQ ID NO: 315703
gugguuugucgugucauag

SEQ ID NO: 361526 - RNA, 19 nt, Artificial Sequence
  Description of Artificial Sequence: Synthetic oligonucleotide
  Antisense Strand to SEQ ID NO: 361525
cuaugacacgacaaaccac

SEQ ID NO: 361527 - RNA, 19 nt, Artificial Sequence
  Description of Artificial Sequence: Synthetic oligonucleotide
  Sense Strand Starting at position 545 of SEQ ID NO: 315709
ugucgugucauagaagauc

SEQ ID NO: 361528 - RNA, 19 nt, Artificial Sequence
  Description of Artificial Sequence: Synthetic oligonucleotide
  Antisense Strand to SEQ ID NO: 361527
gaucuucuaugacacgaca

SEQ ID NO: 361529 - RNA, 19 nt, Artificial Sequence
  Description of Artificial Sequence: Synthetic oligonucleotide
  Sense Strand Starting at position 545 of SEQ ID NO: 315795
cacgguguugcacauacau

SEQ ID NO: 361530 - RNA, 19 nt, Artificial Sequence
  Description of Artificial Sequence: Synthetic oligonucleotide
  Antisense Strand to SEQ ID NO: 361529
auguaugugcaacaccgug

SEQ ID NO: 361531 - RNA, 19 nt, Artificial Sequence
  Description of Artificial Sequence: Synthetic oligonucleotide
  Sense Strand Starting at position 545 of SEQ ID NO: 315804
gcacauacaucugugacuu

SEQ ID NO: 361532 - RNA, 19 nt, Artificial Sequence
  Description of Artificial Sequence: Synthetic oligonucleotide
  Antisense Strand to SEQ ID NO: 361531
aagucacagauguaugugc

SEQ ID NO: 361533 - RNA, 19 nt, Artificial Sequence
  Description of Artificial Sequence: Synthetic oligonucleotide
  Sense Strand Starting at position 545 of SEQ ID NO: 315948
ggcuuagaaagucauaguu

SEQ ID NO: 361534 - RNA, 19 nt, Artificial Sequence
  Description of Artificial Sequence: Synthetic oligonucleotide
  Antisense Strand to SEQ ID NO: 361533
aacuaugacuuucuaagcc

SEQ ID NO: 361535 - RNA, 19 nt, Artificial Sequence
  Description of Artificial Sequence: Synthetic oligonucleotide
  Sense Strand Starting at position 545 of SEQ ID NO: 315963
aguuguagcagucagggaa

SEQ ID NO: 361536 - RNA, 19 nt, Artificial Sequence
  Description of Artificial Sequence: Synthetic oligonucleotide
  Antisense Strand to SEQ ID NO: 361535
uucccugacugcuacaacu

SEQ ID NO: 361537 - RNA, 19 nt, Artificial Sequence
  Description of Artificial Sequence: Synthetic oligonucleotide
  Sense Strand Starting at position 545 of SEQ ID NO: 316149
gguaaauguccuugguguc

SEQ ID NO: 361538 - RNA, 19 nt, Artificial Sequence
  Description of Artificial Sequence: Synthetic oligonucleotide
  Antisense Strand to SEQ ID NO: 361537
gacaccaaggacauuuacc

SEQ ID NO: 361539 - RNA, 19 nt, Artificial Sequence
  Description of Artificial Sequence: Synthetic oligonucleotide
  Sense Strand Starting at position 545 of SEQ ID NO: 316278
gggcaaucaggcuggcauu

SEQ ID NO: 361540 - RNA, 19 nt, Artificial Sequence
  Description of Artificial Sequence: Synthetic oligonucleotide
  Antisense Strand to SEQ ID NO: 361539
aaugccagccugauugccc

SEQ ID NO: 361541 - RNA, 19 nt, Artificial Sequence
  Description of Artificial Sequence: Synthetic oligonucleotide
  Sense Strand Starting at position 545 of SEQ ID NO: 316353
ccagcugggagcuauagaa

SEQ ID NO: 361542 - RNA, 19 nt, Artificial Sequence
  Description of Artificial Sequence: Synthetic oligonucleotide
  Antisense Strand to SEQ ID NO: 361541
uucuauagcucccagcugg

SEQ ID NO: 361543 - RNA, 19 nt, Artificial Sequence
  Description of Artificial Sequence: Synthetic oligonucleotide
  Sense Strand Starting at position 545 of SEQ ID NO: 316534
ggccauaucgaguaagguc

SEQ ID NO: 361544 - RNA, 19 nt, Artificial Sequence
  Description of Artificial Sequence: Synthetic oligonucleotide
  Antisense Strand to SEQ ID NO: 361543
gaccuuacucgauauggcc

SEQ ID NO: 361545 - RNA, 19 nt, Artificial Sequence
  Description of Artificial Sequence: Synthetic oligonucleotide
  Sense Strand Starting at position 545 of SEQ ID NO: 316595
cgggacuggucgaggacaa

SEQ ID NO: 361546 - RNA, 19 nt, Artificial Sequence
  Description of Artificial Sequence: Synthetic oligonucleotide
  Antisense Strand to SEQ ID NO: 361545
uuguccucgaccagucccg

SEQ ID NO: 361547 - RNA, 19 nt, Artificial Sequence
  Description of Artificial Sequence: Synthetic oligonucleotide
  Sense Strand Starting at position 545 of SEQ ID NO: 316687
ugagcccuugcgcauuaau

SEQ ID NO: 361548 - RNA, 19 nt, Artificial Sequence
  Description of Artificial Sequence: Synthetic oligonucleotide
  Antisense Strand to SEQ ID NO: 361547
auuaaugcgcaagggcuca

SEQ ID NO: 361549 - RNA, 19 nt, Artificial Sequence
  Description of Artificial Sequence: Synthetic oligonucleotide
  Sense Strand Starting at position 545 of SEQ ID NO: 316690
gcccuugcgcauuaaucca

SEQ ID NO: 361550 - RNA, 19 nt, Artificial Sequence
  Description of Artificial Sequence: Synthetic oligonucleotide
  Antisense Strand to SEQ ID NO: 361549
uggauuaaugcgcaagggc

SEQ ID NO: 361551 - RNA, 19 nt, Artificial Sequence
  Description of Artificial Sequence: Synthetic oligonucleotide
  Sense Strand Starting at position 545 of SEQ ID NO: 316711
gcugcucugguuucuguua

SEQ ID NO: 361552 - RNA, 19 nt, Artificial Sequence
  Description of Artificial Sequence: Synthetic oligonucleotide
  Antisense Strand to SEQ ID NO: 361551
uaacagaaaccagagcagc

SEQ ID NO: 361553 - RNA, 19 nt, Artificial Sequence
  Description of Artificial Sequence: Synthetic oligonucleotide
  Sense Strand Starting at position 545 of SEQ ID NO: 316840
caggacuugcucuagccua

SEQ ID NO: 361554 - RNA, 19 nt, Artificial Sequence
  Description of Artificial Sequence: Synthetic oligonucleotide
  Antisense Strand to SEQ ID NO: 361553
uaggcuagagcaaguccug

SEQ ID NO: 361555 - RNA, 19 nt, Artificial Sequence
  Description of Artificial Sequence: Synthetic oligonucleotide
  Sense Strand Starting at position 545 of SEQ ID NO: 316897
caugacauauguucuggga

SEQ ID NO: 361556 - RNA, 19 nt, Artificial Sequence
  Description of Artificial Sequence: Synthetic oligonucleotide
  Antisense Strand to SEQ ID NO: 361555
ucccagaacauaugucaug

SEQ ID NO: 361557 - RNA, 19 nt, Artificial Sequence
  Description of Artificial Sequence: Synthetic oligonucleotide
  Sense Strand Starting at position 545 of SEQ ID NO: 317111
agggccuuauccuccaaau

SEQ ID NO: 361558 - RNA, 19 nt, Artificial Sequence
  Description of Artificial Sequence: Synthetic oligonucleotide
  Antisense Strand to SEQ ID NO: 361557
auuuggaggauaaggcccu

SEQ ID NO: 361559 - RNA, 19 nt, Artificial Sequence
  Description of Artificial Sequence: Synthetic oligonucleotide
  Sense Strand Starting at position 545 of SEQ ID NO: 317322
cucugaaucccuggcaaag

SEQ ID NO: 361560 - RNA, 19 nt, Artificial Sequence
  Description of Artificial Sequence: Synthetic oligonucleotide
  Antisense Strand to SEQ ID NO: 361559
cuuugccagggauucagag

SEQ ID NO: 361561 - RNA, 19 nt, Artificial Sequence
  Description of Artificial Sequence: Synthetic oligonucleotide
  Sense Strand Starting at position 545 of SEQ ID NO: 317511
gggaguguucuuuguccac

SEQ ID NO: 361562 - RNA, 19 nt, Artificial Sequence
  Description of Artificial Sequence: Synthetic oligonucleotide
  Antisense Strand to SEQ ID NO: 361561
guggacaaagaacacuccc

SEQ ID NO: 361563 - RNA, 19 nt, Artificial Sequence
  Description of Artificial Sequence: Synthetic oligonucleotide
  Sense Strand Starting at position 545 of SEQ ID NO: 317974
gcuauagucuuagcacuuu

SEQ ID NO: 361564 - RNA, 19 nt, Artificial Sequence
  Description of Artificial Sequence: Synthetic oligonucleotide
  Antisense Strand to SEQ ID NO: 361563
aaagugcuaagacuauagc

SEQ ID NO: 361565 - RNA, 19 nt, Artificial Sequence
  Description of Artificial Sequence: Synthetic oligonucleotide
  Sense Strand Starting at position 545 of SEQ ID NO: 318161
ggaggucaugucuggguua

SEQ ID NO: 361566 - RNA, 19 nt, Artificial Sequence
  Description of Artificial Sequence: Synthetic oligonucleotide
  Antisense Strand to SEQ ID NO: 361565
uaacccagacaugaccucc

SEQ ID NO: 361567 - RNA, 19 nt, Artificial Sequence
  Description of Artificial Sequence: Synthetic oligonucleotide
  Sense Strand Starting at position 545 of SEQ ID NO: 318163
aggucaugucuggguuaca

SEQ ID NO: 361568 - RNA, 19 nt, Artificial Sequence
  Description of Artificial Sequence: Synthetic oligonucleotide
  Antisense Strand to SEQ ID NO: 361567
uguaacccagacaugaccu

SEQ ID NO: 361569 - RNA, 19 nt, Artificial Sequence
  Description of Artificial Sequence: Synthetic oligonucleotide
  Sense Strand Starting at position 545 of SEQ ID NO: 318164
ggucaugucuggguuacac

SEQ ID NO: 361570 - RNA, 19 nt, Artificial Sequence
  Description of Artificial Sequence: Synthetic oligonucleotide
  Antisense Strand to SEQ ID NO: 361569
guguaacccagacaugacc

SEQ ID NO: 361571 - RNA, 19 nt, Artificial Sequence
  Description of Artificial Sequence: Synthetic oligonucleotide
  Sense Strand Starting at position 545 of SEQ ID NO: 318166
ucaugucuggguuacacua

SEQ ID NO: 361572 - RNA, 19 nt, Artificial Sequence
  Description of Artificial Sequence: Synthetic oligonucleotide
  Antisense Strand to SEQ ID NO: 361571
uaguguaacccagacauga

SEQ ID NO: 361573 - RNA, 19 nt, Artificial Sequence
  Description of Artificial Sequence: Synthetic oligonucleotide
  Sense Strand Starting at position 545 of SEQ ID NO: 318282
gucuauugugcuuagugga

SEQ ID NO: 361574 - RNA, 19 nt, Artificial Sequence
  Description of Artificial Sequence: Synthetic oligonucleotide
  Antisense Strand to SEQ ID NO: 361573
uccacuaagcacaauagac

SEQ ID NO: 361575 - RNA, 19 nt, Artificial Sequence
  Description of Artificial Sequence: Synthetic oligonucleotide
  Sense Strand Starting at position 545 of SEQ ID NO: 318287
uugugcuuaguggauaagu

SEQ ID NO: 361576 - RNA, 19 nt, Artificial Sequence
  Description of Artificial Sequence: Synthetic oligonucleotide
  Antisense Strand to SEQ ID NO: 361575
acuuauccacuaagcacaa

SEQ ID NO: 361577 - RNA, 19 nt, Artificial Sequence
  Description of Artificial Sequence: Synthetic oligonucleotide
  Sense Strand Starting at position 545 of SEQ ID NO: 318289
gugcuuaguggauaaguca

SEQ ID NO: 361578 - RNA, 19 nt, Artificial Sequence
  Description of Artificial Sequence: Synthetic oligonucleotide
  Antisense Strand to SEQ ID NO: 361577
ugacuuauccacuaagcac

SEQ ID NO: 361579 - RNA, 19 nt, Artificial Sequence
  Description of Artificial Sequence: Synthetic oligonucleotide
  Sense Strand Starting at position 545 of SEQ ID NO: 318296
guggauaagucaucccugu

SEQ ID NO: 361580 - RNA, 19 nt, Artificial Sequence
  Description of Artificial Sequence: Synthetic oligonucleotide
  Antisense Strand to SEQ ID NO: 361579
acagggaugacuuauccac

SEQ ID NO: 361581 - RNA, 19 nt, Artificial Sequence
  Description of Artificial Sequence: Synthetic oligonucleotide
  Sense Strand Starting at position 545 of SEQ ID NO: 318300
auaagucaucccuguugua

SEQ ID NO: 361582 - RNA, 19 nt, Artificial Sequence
  Description of Artificial Sequence: Synthetic oligonucleotide
  Antisense Strand to SEQ ID NO: 361581
uacaacagggaugacuuau

SEQ ID NO: 361583 - RNA, 19 nt, Artificial Sequence
  Description of Artificial Sequence: Synthetic oligonucleotide
  Sense Strand Starting at position 545 of SEQ ID NO: 318364
gucaucacccuuuguauau

SEQ ID NO: 361584 - RNA, 19 nt, Artificial Sequence
  Description of Artificial Sequence: Synthetic oligonucleotide
  Antisense Strand to SEQ ID NO: 361583
auauacaaagggugaugac

SEQ ID NO: 361585 - RNA, 19 nt, Artificial Sequence
  Description of Artificial Sequence: Synthetic oligonucleotide
  Sense Strand Starting at position 545 of SEQ ID NO: 318394
gugacugugucuuugugaa

SEQ ID NO: 361586 - RNA, 19 nt, Artificial Sequence
  Description of Artificial Sequence: Synthetic oligonucleotide
  Antisense Strand to SEQ ID NO: 361585
uucacaaagacacagucac

SEQ ID NO: 361587 - RNA, 19 nt, Artificial Sequence
  Description of Artificial Sequence: Synthetic oligonucleotide
  Sense Strand Starting at position 545 of SEQ ID NO: 318459
aguaggugugaguguggaa

SEQ ID NO: 361588 - RNA, 19 nt, Artificial Sequence
  Description of Artificial Sequence: Synthetic oligonucleotide
  Antisense Strand to SEQ ID NO: 361587
uuccacacucacaccuacu

SEQ ID NO: 361589 - RNA, 19 nt, Artificial Sequence
  Description of Artificial Sequence: Synthetic oligonucleotide
  Sense Strand Starting at position 545 of SEQ ID NO: 318500
gugugagcccugcugucuu

SEQ ID NO: 361590 - RNA, 19 nt, Artificial Sequence
  Description of Artificial Sequence: Synthetic oligonucleotide
  Antisense Strand to SEQ ID NO: 361589
aagacagcagggcucacac

SEQ ID NO: 361591 - RNA, 19 nt, Artificial Sequence
  Description of Artificial Sequence: Synthetic oligonucleotide
  Sense Strand Starting at position 545 of SEQ ID NO: 318512
cugucuugugagcaugaga

SEQ ID NO: 361592 - RNA, 19 nt, Artificial Sequence
  Description of Artificial Sequence: Synthetic oligonucleotide
  Antisense Strand to SEQ ID NO: 361591
ucucaugcucacaagacag

SEQ ID NO: 361593 - RNA, 19 nt, Artificial Sequence
  Description of Artificial Sequence: Synthetic oligonucleotide
  Sense Strand Starting at position 545 of SEQ ID NO: 318525
augagauccuguguuugug

SEQ ID NO: 361594 - RNA, 19 nt, Artificial Sequence
  Description of Artificial Sequence: Synthetic oligonucleotide
  Antisense Strand to SEQ ID NO: 361593
cacaaacacaggaucucau

SEQ ID NO: 361595 - RNA, 19 nt, Artificial Sequence
  Description of Artificial Sequence: Synthetic oligonucleotide
  Sense Strand Starting at position 545 of SEQ ID NO: 318528
agauccuguguuuguguga

SEQ ID NO: 361596 - RNA, 19 nt, Artificial Sequence
  Description of Artificial Sequence: Synthetic oligonucleotide
  Antisense Strand to SEQ ID NO: 361595
ucacacaaacacaggaucu

SEQ ID NO: 361597 - RNA, 19 nt, Artificial Sequence
  Description of Artificial Sequence: Synthetic oligonucleotide
  Sense Strand Starting at position 545 of SEQ ID NO: 318549
augcauaugagcugucagu

SEQ ID NO: 361598 - RNA, 19 nt, Artificial Sequence
  Description of Artificial Sequence: Synthetic oligonucleotide
  Antisense Strand to SEQ ID NO: 361597
acugacagcucauaugcau

SEQ ID NO: 361599 - RNA, 19 nt, Artificial Sequence
  Description of Artificial Sequence: Synthetic oligonucleotide
  Sense Strand Starting at position 545 of SEQ ID NO: 318556
ugagcugucagugagcaca

SEQ ID NO: 361600 - RNA, 19 nt, Artificial Sequence
  Description of Artificial Sequence: Synthetic oligonucleotide
  Antisense Strand to SEQ ID NO: 361599
ugugcucacugacagcuca

SEQ ID NO: 361601 - RNA, 19 nt, Artificial Sequence
  Description of Artificial Sequence: Synthetic oligonucleotide
  Sense Strand Starting at position 545 of SEQ ID NO: 318856
gagcuuauguacuucuguu

SEQ ID NO: 361602 - RNA, 19 nt, Artificial Sequence
  Description of Artificial Sequence: Synthetic oligonucleotide
  Antisense Strand to SEQ ID NO: 361601
aacagaaguacauaagcuc

SEQ ID NO: 361603 - RNA, 19 nt, Artificial Sequence
  Description of Artificial Sequence: Synthetic oligonucleotide
  Sense Strand Starting at position 546 of SEQ ID NO: 315844
acgucuacaucuuucuaca

SEQ ID NO: 361604 - RNA, 19 nt, Artificial Sequence
  Description of Artificial Sequence: Synthetic oligonucleotide
  Antisense Strand to SEQ ID NO: 361603
uguagaaagauguagacgu

SEQ ID NO: 361605 - RNA, 19 nt, Artificial Sequence
  Description of Artificial Sequence: Synthetic oligonucleotide
  Sense Strand Starting at position 546 of SEQ ID NO: 318256
acaguaaccuguuuaugua

SEQ ID NO: 361606 - RNA, 19 nt, Artificial Sequence
  Description of Artificial Sequence: Synthetic oligonucleotide
  Antisense Strand to SEQ ID NO: 361605
uacauaaacagguuacugu

SEQ ID NO: 361607 - RNA, 19 nt, Artificial Sequence
  Description of Artificial Sequence: Synthetic oligonucleotide
  Sense Strand Starting at position 546 of SEQ ID NO: 318259
guaaccuguuuauguacau

SEQ ID NO: 361608 - RNA, 19 nt, Artificial Sequence
  Description of Artificial Sequence: Synthetic oligonucleotide
  Antisense Strand to SEQ ID NO: 361607
auguacauaaacagguuac

SEQ ID NO: 361609 - RNA, 19 nt, Artificial Sequence
  Description of Artificial Sequence: Synthetic oligonucleotide
  Sense Strand Starting at position 546 of SEQ ID NO: 318263
ccuguuuauguacauacau

SEQ ID NO: 361610 - RNA, 19 nt, Artificial Sequence
  Description of Artificial Sequence: Synthetic oligonucleotide
  Antisense Strand to SEQ ID NO: 361609
auguauguacauaaacagg

SEQ ID NO: 361611 - RNA, 19 nt, Artificial Sequence
  Description of Artificial Sequence: Synthetic oligonucleotide
  Sense Strand Starting at position 546 of SEQ ID NO: 318754
ggaccuacuuaucuagcaa

SEQ ID NO: 361612 - RNA, 19 nt, Artificial Sequence
  Description of Artificial Sequence: Synthetic oligonucleotide
  Antisense Strand to SEQ ID NO: 361611
uugcuagauaaguaggucc

SEQ ID NO: 361613 - RNA, 19 nt, Artificial Sequence
  Description of Artificial Sequence: Synthetic oligonucleotide
  Sense Strand Starting at position 546 of SEQ ID NO: 318758
cuacuuaucuagcaaugag

SEQ ID NO: 361614 - RNA, 19 nt, Artificial Sequence
  Description of Artificial Sequence: Synthetic oligonucleotide
  Antisense Strand to SEQ ID NO: 361613
cucauugcuagauaaguag

SEQ ID NO: 361615 - RNA, 19 nt, Artificial Sequence
  Description of Artificial Sequence: Synthetic oligonucleotide
  Sense Strand Starting at position 546 of SEQ ID NO: 318761
cuuaucuagcaaugagaga

SEQ ID NO: 361616 - RNA, 19 nt, Artificial Sequence
  Description of Artificial Sequence: Synthetic oligonucleotide
  Antisense Strand to SEQ ID NO: 361615
ucucucauugcuagauaag

SEQ ID NO: 361617 - RNA, 19 nt, Artificial Sequence
  Description of Artificial Sequence: Synthetic oligonucleotide
  Sense Strand Starting at position 546 of SEQ ID NO: 318869
gaaaguaucuugggccucu

SEQ ID NO: 361618 - RNA, 19 nt, Artificial Sequence
  Description of Artificial Sequence: Synthetic oligonucleotide
  Antisense Strand to SEQ ID NO: 361617
agaggcccaagauacuuuc

SEQ ID NO: 361619 - RNA, 19 nt, Artificial Sequence
  Description of Artificial Sequence: Synthetic oligonucleotide
  Sense Strand Starting at position 547 of SEQ ID NO: 315266
cccuguacaccgugaagaa

SEQ ID NO: 361620 - RNA, 19 nt, Artificial Sequence
  Description of Artificial Sequence: Synthetic oligonucleotide
  Antisense Strand to SEQ ID NO: 361619
uucuucacgguguacaggg

SEQ ID NO: 361621 - RNA, 19 nt, Artificial Sequence
  Description of Artificial Sequence: Synthetic oligonucleotide
  Sense Strand Starting at position 547 of SEQ ID NO: 315301
acgacagcauuuggguaaa

SEQ ID NO: 361622 - RNA, 19 nt, Artificial Sequence
  Description of Artificial Sequence: Synthetic oligonucleotide
  Antisense Strand to SEQ ID NO: 361621
uuuacccaaaugcugucgu

SEQ ID NO: 361623 - RNA, 19 nt, Artificial Sequence
  Description of Artificial Sequence: Synthetic oligonucleotide
  Sense Strand Starting at position 547 of SEQ ID NO: 315369
ggaggcuucuauccgugua

SEQ ID NO: 361624 - RNA, 19 nt, Artificial Sequence
  Description of Artificial Sequence: Synthetic oligonucleotide
  Antisense Strand to SEQ ID NO: 361623
uacacggauagaagccucc

SEQ ID NO: 361625 - RNA, 19 nt, Artificial Sequence
  Description of Artificial Sequence: Synthetic oligonucleotide
  Sense Strand Starting at position 547 of SEQ ID NO: 315370
gaggcuucuauccguguaa

SEQ ID NO: 361626 - RNA, 19 nt, Artificial Sequence
  Description of Artificial Sequence: Synthetic oligonucleotide
  Antisense Strand to SEQ ID NO: 361625
uuacacggauagaagccuc

SEQ ID NO: 361627 - RNA, 19 nt, Artificial Sequence
  Description of Artificial Sequence: Synthetic oligonucleotide
  Sense Strand Starting at position 547 of SEQ ID NO: 315371
aggcuucuauccguguaac

SEQ ID NO: 361628 - RNA, 19 nt, Artificial Sequence
  Description of Artificial Sequence: Synthetic oligonucleotide
  Antisense Strand to SEQ ID NO: 361627
guuacacggauagaagccu

SEQ ID NO: 361629 - RNA, 19 nt, Artificial Sequence
  Description of Artificial Sequence: Synthetic oligonucleotide
  Sense Strand Starting at position 547 of SEQ ID NO: 315372
ggcuucuauccguguaaca

SEQ ID NO: 361630 - RNA, 19 nt, Artificial Sequence
  Description of Artificial Sequence: Synthetic oligonucleotide
  Antisense Strand to SEQ ID NO: 361629
uguuacacggauagaagcc

SEQ ID NO: 361631 - RNA, 19 nt, Artificial Sequence
  Description of Artificial Sequence: Synthetic oligonucleotide
  Sense Strand Starting at position 547 of SEQ ID NO: 315374
cuucuauccguguaacacu

SEQ ID NO: 361632 - RNA, 19 nt, Artificial Sequence
  Description of Artificial Sequence: Synthetic oligonucleotide
  Antisense Strand to SEQ ID NO: 361631
aguguuacacggauagaag

SEQ ID NO: 361633 - RNA, 19 nt, Artificial Sequence
  Description of Artificial Sequence: Synthetic oligonucleotide
  Sense Strand Starting at position 547 of SEQ ID NO: 315938
gaaggugugguccaccuuu

SEQ ID NO: 361634 - RNA, 19 nt, Artificial Sequence
  Description of Artificial Sequence: Synthetic oligonucleotide
  Antisense Strand to SEQ ID NO: 361633
aaagguggaccacaccuuc

SEQ ID NO: 361635 - RNA, 19 nt, Artificial Sequence
  Description of Artificial Sequence: Synthetic oligonucleotide
  Sense Strand Starting at position 547 of SEQ ID NO: 316050
ccgggcuuucuaugggagu

SEQ ID NO: 361636 - RNA, 19 nt, Artificial Sequence
  Description of Artificial Sequence: Synthetic oligonucleotide
  Antisense Strand to SEQ ID NO: 361635
acucccauagaaagcccgg

SEQ ID NO: 361637 - RNA, 19 nt, Artificial Sequence
  Description of Artificial Sequence: Synthetic oligonucleotide
  Sense Strand Starting at position 547 of SEQ ID NO: 316052
gggcuuucuaugggagucu

SEQ ID NO: 361638 - RNA, 19 nt, Artificial Sequence
  Description of Artificial Sequence: Synthetic oligonucleotide
  Antisense Strand to SEQ ID NO: 361637
agacucccauagaaagccc

SEQ ID NO: 361639 - RNA, 19 nt, Artificial Sequence
  Description of Artificial Sequence: Synthetic oligonucleotide
  Sense Strand Starting at position 547 of SEQ ID NO: 316080
gcgccagucagccugaaau

SEQ ID NO: 361640 - RNA, 19 nt, Artificial Sequence
  Description of Artificial Sequence: Synthetic oligonucleotide
  Antisense Strand to SEQ ID NO: 361639
auuucaggcugacuggcgc

SEQ ID NO: 361641 - RNA, 19 nt, Artificial Sequence
  Description of Artificial Sequence: Synthetic oligonucleotide
  Sense Strand Starting at position 547 of SEQ ID NO: 316082
gccagucagccugaaaugu

SEQ ID NO: 361642 - RNA, 19 nt, Artificial Sequence
  Description of Artificial Sequence: Synthetic oligonucleotide
  Antisense Strand to SEQ ID NO: 361641
acauuucaggcugacuggc

SEQ ID NO: 361643 - RNA, 19 nt, Artificial Sequence
  Description of Artificial Sequence: Synthetic oligonucleotide
  Sense Strand Starting at position 547 of SEQ ID NO: 316350
ggacuuugaccugaggcga

SEQ ID NO: 361644 - RNA, 19 nt, Artificial Sequence
  Description of Artificial Sequence: Synthetic oligonucleotide
  Antisense Strand to SEQ ID NO: 361643
ucgccucaggucaaagucc

SEQ ID NO: 361645 - RNA, 19 nt, Artificial Sequence
  Description of Artificial Sequence: Synthetic oligonucleotide
  Sense Strand Starting at position 547 of SEQ ID NO: 316371
ucuggucuccuggagagua

SEQ ID NO: 361646 - RNA, 19 nt, Artificial Sequence
  Description of Artificial Sequence: Synthetic oligonucleotide
  Antisense Strand to SEQ ID NO: 361645
uacucuccaggagaccaga

SEQ ID NO: 361647 - RNA, 19 nt, Artificial Sequence
  Description of Artificial Sequence: Synthetic oligonucleotide
  Sense Strand Starting at position 547 of SEQ ID NO: 316631
gcgggacagucaucccuga

SEQ ID NO: 361648 - RNA, 19 nt, Artificial Sequence
  Description of Artificial Sequence: Synthetic oligonucleotide
  Antisense Strand to SEQ ID NO: 361647
ucagggaugacugucccgc

SEQ ID NO: 361649 - RNA, 19 nt, Artificial Sequence
  Description of Artificial Sequence: Synthetic oligonucleotide
  Sense Strand Starting at position 547 of SEQ ID NO: 316635
gacagucaucccugagauc

SEQ ID NO: 361650 - RNA, 19 nt, Artificial Sequence
  Description of Artificial Sequence: Synthetic oligonucleotide
  Antisense Strand to SEQ ID NO: 361649
gaucucagggaugacuguc

SEQ ID NO: 361651 - RNA, 19 nt, Artificial Sequence
  Description of Artificial Sequence: Synthetic oligonucleotide
  Sense Strand Starting at position 547 of SEQ ID NO: 316897
ucccuugugcgagacucaa

SEQ ID NO: 361652 - RNA, 19 nt, Artificial Sequence
  Description of Artificial Sequence: Synthetic oligonucleotide
  Antisense Strand to SEQ ID NO: 361651
uugagucucgcacaaggga

SEQ ID NO: 361653 - RNA, 19 nt, Artificial Sequence
  Description of Artificial Sequence: Synthetic oligonucleotide
  Sense Strand Starting at position 547 of SEQ ID NO: 317088
gggugagccucuccagcua

SEQ ID NO: 361654 - RNA, 19 nt, Artificial Sequence
  Description of Artificial Sequence: Synthetic oligonucleotide
  Antisense Strand to SEQ ID NO: 361653
uagcuggagaggcucaccc

SEQ ID NO: 361655 - RNA, 19 nt, Artificial Sequence
  Description of Artificial Sequence: Synthetic oligonucleotide
  Sense Strand Starting at position 547 of SEQ ID NO: 317142
cgccgaggacuugauaaac

SEQ ID NO: 361656 - RNA, 19 nt, Artificial Sequence
  Description of Artificial Sequence: Synthetic oligonucleotide
  Antisense Strand to SEQ ID NO: 361655
guuuaucaaguccucggcg

SEQ ID NO: 361657 - RNA, 19 nt, Artificial Sequence
  Description of Artificial Sequence: Synthetic oligonucleotide
  Sense Strand Starting at position 547 of SEQ ID NO: 317274
ccuguuucccuccagaaug

SEQ ID NO: 361658 - RNA, 19 nt, Artificial Sequence
  Description of Artificial Sequence: Synthetic oligonucleotide
  Antisense Strand to SEQ ID NO: 361657
cauucuggagggaaacagg

SEQ ID NO: 361659 - RNA, 19 nt, Artificial Sequence
  Description of Artificial Sequence: Synthetic oligonucleotide
  Sense Strand Starting at position 547 of SEQ ID NO: 317648
uccugugugacaggacaau

SEQ ID NO: 361660 - RNA, 19 nt, Artificial Sequence
  Description of Artificial Sequence: Synthetic oligonucleotide
  Antisense Strand to SEQ ID NO: 361659
auuguccugucacacagga

SEQ ID NO: 361661 - RNA, 19 nt, Artificial Sequence
  Description of Artificial Sequence: Synthetic oligonucleotide
  Sense Strand Starting at position 547 of SEQ ID NO: 317654
gugacaggacaauguguua

SEQ ID NO: 361662 - RNA, 19 nt, Artificial Sequence
  Description of Artificial Sequence: Synthetic oligonucleotide
  Antisense Strand to SEQ ID NO: 361661
uaacacauuguccugucac

SEQ ID NO: 361663 - RNA, 19 nt, Artificial Sequence
  Description of Artificial Sequence: Synthetic oligonucleotide
  Sense Strand Starting at position 547 of SEQ ID NO: 318001
ggugaauacccaggagucu

SEQ ID NO: 361664 - RNA, 19 nt, Artificial Sequence
  Description of Artificial Sequence: Synthetic oligonucleotide
  Antisense Strand to SEQ ID NO: 361663
agacuccuggguauucacc

SEQ ID NO: 361665 - RNA, 19 nt, Artificial Sequence
  Description of Artificial Sequence: Synthetic oligonucleotide
  Sense Strand Starting at position 547 of SEQ ID NO: 318098
gccagaagccuugaaagcu

SEQ ID NO: 361666 - RNA, 19 nt, Artificial Sequence
  Description of Artificial Sequence: Synthetic oligonucleotide
  Antisense Strand to SEQ ID NO: 361665
agcuuucaaggcuucuggc

SEQ ID NO: 361667 - RNA, 19 nt, Artificial Sequence
  Description of Artificial Sequence: Synthetic oligonucleotide
  Sense Strand Starting at position 547 of SEQ ID NO: 318106
ccuugaaagcuccaugggu

SEQ ID NO: 361668 - RNA, 19 nt, Artificial Sequence
  Description of Artificial Sequence: Synthetic oligonucleotide
  Antisense Strand to SEQ ID NO: 361667
acccauggagcuuucaagg

SEQ ID NO: 361669 - RNA, 19 nt, Artificial Sequence
  Description of Artificial Sequence: Synthetic oligonucleotide
  Sense Strand Starting at position 547 of SEQ ID NO: 318329
acaggaugcuaucuggcau

SEQ ID NO: 361670 - RNA, 19 nt, Artificial Sequence
  Description of Artificial Sequence: Synthetic oligonucleotide
  Antisense Strand to SEQ ID NO: 361669
augccagauagcauccugu

SEQ ID NO: 361671 - RNA, 19 nt, Artificial Sequence
  Description of Artificial Sequence: Synthetic oligonucleotide
  Sense Strand Starting at position 547 of SEQ ID NO: 318539
agaagccugucccugaaau

SEQ ID NO: 361672 - RNA, 19 nt, Artificial Sequence
  Description of Artificial Sequence: Synthetic oligonucleotide
  Antisense Strand to SEQ ID NO: 361671
auuucagggacaggcuucu

SEQ ID NO: 361673 - RNA, 19 nt, Artificial Sequence
  Description of Artificial Sequence: Synthetic oligonucleotide
  Sense Strand Starting at position 547 of SEQ ID NO: 318540
gaagccugucccugaaauc

SEQ ID NO: 361674 - RNA, 19 nt, Artificial Sequence
  Description of Artificial Sequence: Synthetic oligonucleotide
  Antisense Strand to SEQ ID NO: 361673
gauuucagggacaggcuuc

SEQ ID NO: 361675 - RNA, 19 nt, Artificial Sequence
  Description of Artificial Sequence: Synthetic oligonucleotide
  Sense Strand Starting at position 547 of SEQ ID NO: 318605
aguagagaaucugccuuau

SEQ ID NO: 361676 - RNA, 19 nt, Artificial Sequence
  Description of Artificial Sequence: Synthetic oligonucleotide
  Antisense Strand to SEQ ID NO: 361675
auaaggcagauucucuacu

SEQ ID NO: 361677 - RNA, 19 nt, Artificial Sequence
  Description of Artificial Sequence: Synthetic oligonucleotide
  Sense Strand Starting at position 547 of SEQ ID NO: 318723
gagccuugcuugcugaaac

SEQ ID NO: 361678 - RNA, 19 nt, Artificial Sequence
  Description of Artificial Sequence: Synthetic oligonucleotide
  Antisense Strand to SEQ ID NO: 361677
guuucagcaagcaaggcuc

SEQ ID NO: 361679 - RNA, 19 nt, Artificial Sequence
  Description of Artificial Sequence: Synthetic oligonucleotide
  Sense Strand Starting at position 547 of SEQ ID NO: 318786
agaggaggcacaugaguuu

SEQ ID NO: 361680 - RNA, 19 nt, Artificial Sequence
  Description of Artificial Sequence: Synthetic oligonucleotide
  Antisense Strand to SEQ ID NO: 361679
aaacucaugugccuccucu

SEQ ID NO: 361681 - RNA, 19 nt, Artificial Sequence
  Description of Artificial Sequence: Synthetic oligonucleotide
  Sense Strand Starting at position 547 of SEQ ID NO: 318850
cuggcugcuguccauuaaa

SEQ ID NO: 361682 - RNA, 19 nt, Artificial Sequence
  Description of Artificial Sequence: Synthetic oligonucleotide
  Antisense Strand to SEQ ID NO: 361681
uuuaauggacagcagccag

SEQ ID NO: 361683 - RNA, 19 nt, Artificial Sequence
  Description of Artificial Sequence: Synthetic oligonucleotide
  Sense Strand Starting at position 547 of SEQ ID NO: 318853
gcugcuguccauuaaagcu

SEQ ID NO: 361684 - RNA, 19 nt, Artificial Sequence
  Description of Artificial Sequence: Synthetic oligonucleotide
  Antisense Strand to SEQ ID NO: 361683
agcuuuaauggacagcagc

SEQ ID NO: 361685 - RNA, 19 nt, Artificial Sequence
  Description of Artificial Sequence: Synthetic oligonucleotide
  Sense Strand Starting at position 547 of SEQ ID NO: 318925
cgaugcuacagcuaagaca

SEQ ID NO: 361686 - RNA, 19 nt, Artificial Sequence
  Description of Artificial Sequence: Synthetic oligonucleotide
  Antisense Strand to SEQ ID NO: 361685
ugucuuagcuguagcaucg

SEQ ID NO: 361687 - RNA, 19 nt, Artificial Sequence
  Description of Artificial Sequence: Synthetic oligonucleotide
  Sense Strand Starting at position 547 of SEQ ID NO: 318953
gaacuaucuugggucacac

SEQ ID NO: 361688 - RNA, 19 nt, Artificial Sequence
  Description of Artificial Sequence: Synthetic oligonucleotide
  Antisense Strand to SEQ ID NO: 361687
gugugacccaagauaguuc

SEQ ID NO: 361689 - RNA, 19 nt, Artificial Sequence
  Description of Artificial Sequence: Synthetic oligonucleotide
  Sense Strand Starting at position 547 of SEQ ID NO: 318998
ggccaauccuuagugaagu

SEQ ID NO: 361690 - RNA, 19 nt, Artificial Sequence
  Description of Artificial Sequence: Synthetic oligonucleotide
  Antisense Strand to SEQ ID NO: 361689
acuucacuaaggauuggcc

SEQ ID NO: 361691 - RNA, 19 nt, Artificial Sequence
  Description of Artificial Sequence: Synthetic oligonucleotide
  Sense Strand Starting at position 547 of SEQ ID NO: 319011
ugaaguaucccagggccuu

SEQ ID NO: 361692 - RNA, 19 nt, Artificial Sequence
  Description of Artificial Sequence: Synthetic oligonucleotide
  Antisense Strand to SEQ ID NO: 361691
aaggcccugggauacuuca

SEQ ID NO: 361693 - RNA, 19 nt, Artificial Sequence
  Description of Artificial Sequence: Synthetic oligonucleotide
  Sense Strand Starting at position 547 of SEQ ID NO: 319049
ccacauggaucacaacaga

SEQ ID NO: 361694 - RNA, 19 nt, Artificial Sequence
  Description of Artificial Sequence: Synthetic oligonucleotide
  Antisense Strand to SEQ ID NO: 361693
ucuguugugauccaugugg

SEQ ID NO: 361695 - RNA, 19 nt, Artificial Sequence
  Description of Artificial Sequence: Synthetic oligonucleotide
  Sense Strand Starting at position 547 of SEQ ID NO: 319168
agacuuacucuugggcuuu

SEQ ID NO: 361696 - RNA, 19 nt, Artificial Sequence
  Description of Artificial Sequence: Synthetic oligonucleotide
  Antisense Strand to SEQ ID NO: 361695
aaagcccaagaguaagucu

SEQ ID NO: 361697 - RNA, 19 nt, Artificial Sequence
  Description of Artificial Sequence: Synthetic oligonucleotide
  Sense Strand Starting at position 547 of SEQ ID NO: 319178
uugggcuuugcuggucaua

SEQ ID NO: 361698 - RNA, 19 nt, Artificial Sequence
  Description of Artificial Sequence: Synthetic oligonucleotide
  Antisense Strand to SEQ ID NO: 361697
uaugaccagcaaagcccaa

SEQ ID NO: 361699 - RNA, 19 nt, Artificial Sequence
  Description of Artificial Sequence: Synthetic oligonucleotide
  Sense Strand Starting at position 548 of SEQ ID NO: 315586
ggccacugaucauugauga

SEQ ID NO: 361700 - RNA, 19 nt, Artificial Sequence
  Description of Artificial Sequence: Synthetic oligonucleotide
  Antisense Strand to SEQ ID NO: 361699
ucaucaaugaucaguggcc

SEQ ID NO: 361701 - RNA, 19 nt, Artificial Sequence
  Description of Artificial Sequence: Synthetic oligonucleotide
  Sense Strand Starting at position 548 of SEQ ID NO: 315587
gccacugaucauugaugag

SEQ ID NO: 361702 - RNA, 19 nt, Artificial Sequence
  Description of Artificial Sequence: Synthetic oligonucleotide
  Antisense Strand to SEQ ID NO: 361701
cucaucaaugaucaguggc

SEQ ID NO: 361703 - RNA, 19 nt, Artificial Sequence
  Description of Artificial Sequence: Synthetic oligonucleotide
  Sense Strand Starting at position 548 of SEQ ID NO: 315596
cauugaugaggucagcaca

SEQ ID NO: 361704 - RNA, 19 nt, Artificial Sequence
  Description of Artificial Sequence: Synthetic oligonucleotide
  Antisense Strand to SEQ ID NO: 361703
ugugcugaccucaucaaug

SEQ ID NO: 361705 - RNA, 19 nt, Artificial Sequence
  Description of Artificial Sequence: Synthetic oligonucleotide
  Sense Strand Starting at position 548 of SEQ ID NO: 316037
gcucuccuccuguagauaa

SEQ ID NO: 361706 - RNA, 19 nt, Artificial Sequence
  Description of Artificial Sequence: Synthetic oligonucleotide
  Antisense Strand to SEQ ID NO: 361705
uuaucuacaggaggagagc

SEQ ID NO: 361707 - RNA, 19 nt, Artificial Sequence
  Description of Artificial Sequence: Synthetic oligonucleotide
  Sense Strand Starting at position 548 of SEQ ID NO: 316167
gucccacacucaccugaua

SEQ ID NO: 361708 - RNA, 19 nt, Artificial Sequence
  Description of Artificial Sequence: Synthetic oligonucleotide
  Antisense Strand to SEQ ID NO: 361707
uaucaggugagugugggac

SEQ ID NO: 361709 - RNA, 19 nt, Artificial Sequence
  Description of Artificial Sequence: Synthetic oligonucleotide
  Sense Strand Starting at position 548 of SEQ ID NO: 316226
ggcagauagauccaggugu

SEQ ID NO: 361710 - RNA, 19 nt, Artificial Sequence
  Description of Artificial Sequence: Synthetic oligonucleotide
  Antisense Strand to SEQ ID NO: 361709
acaccuggaucuaucugcc

SEQ ID NO: 361711 - RNA, 19 nt, Artificial Sequence
  Description of Artificial Sequence: Synthetic oligonucleotide
  Sense Strand Starting at position 548 of SEQ ID NO: 316228
cagauagauccaggugucu

SEQ ID NO: 361712 - RNA, 19 nt, Artificial Sequence
  Description of Artificial Sequence: Synthetic oligonucleotide
  Antisense Strand to SEQ ID NO: 361711
agacaccuggaucuaucug

SEQ ID NO: 361713 - RNA, 19 nt, Artificial Sequence
  Description of Artificial Sequence: Synthetic oligonucleotide
  Sense Strand Starting at position 548 of SEQ ID NO: 316277
ggaugagcugcuuaaggcu

SEQ ID NO: 361714 - RNA, 19 nt, Artificial Sequence
  Description of Artificial Sequence: Synthetic oligonucleotide
  Antisense Strand to SEQ ID NO: 361713
agccuuaagcagcucaucc

SEQ ID NO: 361715 - RNA, 19 nt, Artificial Sequence
  Description of Artificial Sequence: Synthetic oligonucleotide
  Sense Strand Starting at position 548 of SEQ ID NO: 316761
ccaacugucuccucagaug

SEQ ID NO: 361716 - RNA, 19 nt, Artificial Sequence
  Description of Artificial Sequence: Synthetic oligonucleotide
  Antisense Strand to SEQ ID NO: 361715
caucugaggagacaguugg

SEQ ID NO: 361717 - RNA, 19 nt, Artificial Sequence
  Description of Artificial Sequence: Synthetic oligonucleotide
  Sense Strand Starting at position 548 of SEQ ID NO: 317105
ugagcuugaggccaauuaa

SEQ ID NO: 361718 - RNA, 19 nt, Artificial Sequence
  Description of Artificial Sequence: Synthetic oligonucleotide
  Antisense Strand to SEQ ID NO: 361717
uuaauuggccucaagcuca

SEQ ID NO: 361719 - RNA, 19 nt, Artificial Sequence
  Description of Artificial Sequence: Synthetic oligonucleotide
  Sense Strand Starting at position 548 of SEQ ID NO: 317119
auuaaacacuggucaguaa

SEQ ID NO: 361720 - RNA, 19 nt, Artificial Sequence
  Description of Artificial Sequence: Synthetic oligonucleotide
  Antisense Strand to SEQ ID NO: 361719
uuacugaccaguguuuaau

SEQ ID NO: 361721 - RNA, 19 nt, Artificial Sequence
  Description of Artificial Sequence: Synthetic oligonucleotide
  Sense Strand Starting at position 548 of SEQ ID NO: 317466
cggcauggucuggaaacga

SEQ ID NO: 361722 - RNA, 19 nt, Artificial Sequence
  Description of Artificial Sequence: Synthetic oligonucleotide
  Antisense Strand to SEQ ID NO: 361721
ucguuuccagaccaugccg

SEQ ID NO: 361723 - RNA, 19 nt, Artificial Sequence
  Description of Artificial Sequence: Synthetic oligonucleotide
  Sense Strand Starting at position 548 of SEQ ID NO: 317787
ccugguuugcgcgucacaa

SEQ ID NO: 361724 - RNA, 19 nt, Artificial Sequence
  Description of Artificial Sequence: Synthetic oligonucleotide
  Antisense Strand to SEQ ID NO: 361723
uugugacgcgcaaaccagg

SEQ ID NO: 361725 - RNA, 19 nt, Artificial Sequence
  Description of Artificial Sequence: Synthetic oligonucleotide
  Sense Strand Starting at position 548 of SEQ ID NO: 317788
cugguuugcgcgucacaac

SEQ ID NO: 361726 - RNA, 19 nt, Artificial Sequence
  Description of Artificial Sequence: Synthetic oligonucleotide
  Antisense Strand to SEQ ID NO: 361725
guugugacgcgcaaaccag

SEQ ID NO: 361727 - RNA, 19 nt, Artificial Sequence
  Description of Artificial Sequence: Synthetic oligonucleotide
  Sense Strand Starting at position 548 of SEQ ID NO: 318180
gucagaucuggugagagug

SEQ ID NO: 361728 - RNA, 19 nt, Artificial Sequence
  Description of Artificial Sequence: Synthetic oligonucleotide
  Antisense Strand to SEQ ID NO: 361727
cacucucaccagaucugac

SEQ ID NO: 361729 - RNA, 19 nt, Artificial Sequence
  Description of Artificial Sequence: Synthetic oligonucleotide
  Sense Strand Starting at position 548 of SEQ ID NO: 318264
aguaaaucaugacugcuuu

SEQ ID NO: 361730 - RNA, 19 nt, Artificial Sequence
  Description of Artificial Sequence: Synthetic oligonucleotide
  Antisense Strand to SEQ ID NO: 361729
aaagcagucaugauuuacu

SEQ ID NO: 361731 - RNA, 19 nt, Artificial Sequence
  Description of Artificial Sequence: Synthetic oligonucleotide
  Sense Strand Starting at position 548 of SEQ ID NO: 318265
guaaaucaugacugcuuua

SEQ ID NO: 361732 - RNA, 19 nt, Artificial Sequence
  Description of Artificial Sequence: Synthetic oligonucleotide
  Antisense Strand to SEQ ID NO: 361731
uaaagcagucaugauuuac

SEQ ID NO: 361733 - RNA, 19 nt, Artificial Sequence
  Description of Artificial Sequence: Synthetic oligonucleotide
  Sense Strand Starting at position 548 of SEQ ID NO: 318445
ucucaaugugagugacuca

SEQ ID NO: 361734 - RNA, 19 nt, Artificial Sequence
  Description of Artificial Sequence: Synthetic oligonucleotide
  Antisense Strand to SEQ ID NO: 361733
ugagucacucacauugaga

SEQ ID NO: 361735 - RNA, 19 nt, Artificial Sequence
  Description of Artificial Sequence: Synthetic oligonucleotide
  Sense Strand Starting at position 548 of SEQ ID NO: 318448
caaugugagugacucaguu

SEQ ID NO: 361736 - RNA, 19 nt, Artificial Sequence
  Description of Artificial Sequence: Synthetic oligonucleotide
  Antisense Strand to SEQ ID NO: 361735
aacugagucacucacauug

SEQ ID NO: 361737 - RNA, 19 nt, Artificial Sequence
  Description of Artificial Sequence: Synthetic oligonucleotide
  Sense Strand Starting at position 548 of SEQ ID NO: 318532
agaguaggcacucagugaa

SEQ ID NO: 361738 - RNA, 19 nt, Artificial Sequence
  Description of Artificial Sequence: Synthetic oligonucleotide
  Antisense Strand to SEQ ID NO: 361737
uucacugagugccuacucu

SEQ ID NO: 361739 - RNA, 19 nt, Artificial Sequence
  Description of Artificial Sequence: Synthetic oligonucleotide
  Sense Strand Starting at position 548 of SEQ ID NO: 318601
aggaauugucuaugaccuu

SEQ ID NO: 361740 - RNA, 19 nt, Artificial Sequence
  Description of Artificial Sequence: Synthetic oligonucleotide
  Antisense Strand to SEQ ID NO: 361739
aaggucauagacaauuccu

SEQ ID NO: 361741 - RNA, 19 nt, Artificial Sequence
  Description of Artificial Sequence: Synthetic oligonucleotide
  Sense Strand Starting at position 548 of SEQ ID NO: 318607
ugucuaugaccuugccaag

SEQ ID NO: 361742 - RNA, 19 nt, Artificial Sequence
  Description of Artificial Sequence: Synthetic oligonucleotide
  Antisense Strand to SEQ ID NO: 361741
cuuggcaaggucauagaca

SEQ ID NO: 361743 - RNA, 19 nt, Artificial Sequence
  Description of Artificial Sequence: Synthetic oligonucleotide
  Sense Strand Starting at position 548 of SEQ ID NO: 318624
aguagaugcauauggacau

SEQ ID NO: 361744 - RNA, 19 nt, Artificial Sequence
  Description of Artificial Sequence: Synthetic oligonucleotide
  Antisense Strand to SEQ ID NO: 361743
auguccauaugcaucuacu

SEQ ID NO: 361745 - RNA, 19 nt, Artificial Sequence
  Description of Artificial Sequence: Synthetic oligonucleotide
  Sense Strand Starting at position 548 of SEQ ID NO: 318653
gugucugcugugguucuaa

SEQ ID NO: 361746 - RNA, 19 nt, Artificial Sequence
  Description of Artificial Sequence: Synthetic oligonucleotide
  Antisense Strand to SEQ ID NO: 361745
uuagaaccacagcagacac

SEQ ID NO: 361747 - RNA, 19 nt, Artificial Sequence
  Description of Artificial Sequence: Synthetic oligonucleotide
  Sense Strand Starting at position 548 of SEQ ID NO: 318684
cuauuccagucuguaagua

SEQ ID NO: 361748 - RNA, 19 nt, Artificial Sequence
  Description of Artificial Sequence: Synthetic oligonucleotide
  Antisense Strand to SEQ ID NO: 361747
uacuuacagacuggaauag

SEQ ID NO: 361749 - RNA, 19 nt, Artificial Sequence
  Description of Artificial Sequence: Synthetic oligonucleotide
  Sense Strand Starting at position 548 of SEQ ID NO: 318689
ccagucuguaaguaugcau

SEQ ID NO: 361750 - RNA, 19 nt, Artificial Sequence
  Description of Artificial Sequence: Synthetic oligonucleotide
  Antisense Strand to SEQ ID NO: 361749
augcauacuuacagacugg

SEQ ID NO: 361751 - RNA, 19 nt, Artificial Sequence
  Description of Artificial Sequence: Synthetic oligonucleotide
  Sense Strand Starting at position 548 of SEQ ID NO: 318716
agggaauaugccugugaca

SEQ ID NO: 361752 - RNA, 19 nt, Artificial Sequence
  Description of Artificial Sequence: Synthetic oligonucleotide
  Antisense Strand to SEQ ID NO: 361751
ugucacaggcauauucccu

SEQ ID NO: 361753 - RNA, 19 nt, Artificial Sequence
  Description of Artificial Sequence: Synthetic oligonucleotide
  Sense Strand Starting at position 548 of SEQ ID NO: 318718
ggaauaugccugugacagu

SEQ ID NO: 361754 - RNA, 19 nt, Artificial Sequence
  Description of Artificial Sequence: Synthetic oligonucleotide
  Antisense Strand to SEQ ID NO: 361753
acugucacaggcauauucc

SEQ ID NO: 361755 - RNA, 19 nt, Artificial Sequence
  Description of Artificial Sequence: Synthetic oligonucleotide
  Sense Strand Starting at position 548 of SEQ ID NO: 318741
gaguguacucuuuacugug

SEQ ID NO: 361756 - RNA, 19 nt, Artificial Sequence
  Description of Artificial Sequence: Synthetic oligonucleotide
  Antisense Strand to SEQ ID NO: 361755
cacaguaaagaguacacuc

SEQ ID NO: 361757 - RNA, 19 nt, Artificial Sequence
  Description of Artificial Sequence: Synthetic oligonucleotide
  Sense Strand Starting at position 548 of SEQ ID NO: 318755
cugugaccaugacuuguau

SEQ ID NO: 361758 - RNA, 19 nt, Artificial Sequence
  Description of Artificial Sequence: Synthetic oligonucleotide
  Antisense Strand to SEQ ID NO: 361757
auacaagucauggucacag

SEQ ID NO: 361759 - RNA, 19 nt, Artificial Sequence
  Description of Artificial Sequence: Synthetic oligonucleotide
  Sense Strand Starting at position 548 of SEQ ID NO: 318757
gugaccaugacuuguauga

SEQ ID NO: 361760 - RNA, 19 nt, Artificial Sequence
  Description of Artificial Sequence: Synthetic oligonucleotide
  Antisense Strand to SEQ ID NO: 361759
ucauacaagucauggucac

SEQ ID NO: 361761 - RNA, 19 nt, Artificial Sequence
  Description of Artificial Sequence: Synthetic oligonucleotide
  Sense Strand Starting at position 548 of SEQ ID NO: 318761
ccaugacuuguaugacugu

SEQ ID NO: 361762 - RNA, 19 nt, Artificial Sequence
  Description of Artificial Sequence: Synthetic oligonucleotide
  Antisense Strand to SEQ ID NO: 361761
acagucauacaagucaugg

SEQ ID NO: 361763 - RNA, 19 nt, Artificial Sequence
  Description of Artificial Sequence: Synthetic oligonucleotide
  Sense Strand Starting at position 548 of SEQ ID NO: 318771
uaugacugugcauguauuu

SEQ ID NO: 361764 - RNA, 19 nt, Artificial Sequence
  Description of Artificial Sequence: Synthetic oligonucleotide
  Antisense Strand to SEQ ID NO: 361763
aaauacaugcacagucaua

SEQ ID NO: 361765 - RNA, 19 nt, Artificial Sequence
  Description of Artificial Sequence: Synthetic oligonucleotide
  Sense Strand Starting at position 548 of SEQ ID NO: 318815
ugcauuagguucucaauau

SEQ ID NO: 361766 - RNA, 19 nt, Artificial Sequence
  Description of Artificial Sequence: Synthetic oligonucleotide
  Antisense Strand to SEQ ID NO: 361765
auauugagaaccuaaugca

SEQ ID NO: 361767 - RNA, 19 nt, Artificial Sequence
  Description of Artificial Sequence: Synthetic oligonucleotide
  Sense Strand Starting at position 548 of SEQ ID NO: 319001
gagaaacuggcaggguuaa

SEQ ID NO: 361768 - RNA, 19 nt, Artificial Sequence
  Description of Artificial Sequence: Synthetic oligonucleotide
  Antisense Strand to SEQ ID NO: 361767
uuaacccugccaguuucuc

SEQ ID NO: 361769 - RNA, 19 nt, Artificial Sequence
  Description of Artificial Sequence: Synthetic oligonucleotide
  Sense Strand Starting at position 548 of SEQ ID NO: 319079
agggcuugacugcagagaa

SEQ ID NO: 361770 - RNA, 19 nt, Artificial Sequence
  Description of Artificial Sequence: Synthetic oligonucleotide
  Antisense Strand to SEQ ID NO: 361769
uucucugcagucaagcccu

SEQ ID NO: 361771 - RNA, 19 nt, Artificial Sequence
  Description of Artificial Sequence: Synthetic oligonucleotide
  Sense Strand Starting at position 548 of SEQ ID NO: 319132
caguguaguguccauauac

SEQ ID NO: 361772 - RNA, 19 nt, Artificial Sequence
  Description of Artificial Sequence: Synthetic oligonucleotide
  Antisense Strand to SEQ ID NO: 361771
guauauggacacuacacug

SEQ ID NO: 361773 - RNA, 19 nt, Artificial Sequence
  Description of Artificial Sequence: Synthetic oligonucleotide
  Sense Strand Starting at position 548 of SEQ ID NO: 319152
ccuugauggccugacauga

SEQ ID NO: 361774 - RNA, 19 nt, Artificial Sequence
  Description of Artificial Sequence: Synthetic oligonucleotide
  Antisense Strand to SEQ ID NO: 361773
ucaugucaggccaucaagg

SEQ ID NO: 361775 - RNA, 19 nt, Artificial Sequence
  Description of Artificial Sequence: Synthetic oligonucleotide
  Sense Strand Starting at position 548 of SEQ ID NO: 319165
acaugauuccuagguggga

SEQ ID NO: 361776 - RNA, 19 nt, Artificial Sequence
  Description of Artificial Sequence: Synthetic oligonucleotide
  Antisense Strand to SEQ ID NO: 361775
ucccaccuaggaaucaugu

SEQ ID NO: 361777 - RNA, 19 nt, Artificial Sequence
  Description of Artificial Sequence: Synthetic oligonucleotide
  Sense Strand Starting at position 548 of SEQ ID NO: 319166
caugauuccuaggugggaa

SEQ ID NO: 361778 - RNA, 19 nt, Artificial Sequence
  Description of Artificial Sequence: Synthetic oligonucleotide
  Antisense Strand to SEQ ID NO: 361777
uucccaccuaggaaucaug

SEQ ID NO: 361779 - RNA, 19 nt, Artificial Sequence
  Description of Artificial Sequence: Synthetic oligonucleotide
  Sense Strand Starting at position 549 of SEQ ID NO: 315431
gcucuccuccuguagauaa

SEQ ID NO: 361780 - RNA, 19 nt, Artificial Sequence
  Description of Artificial Sequence: Synthetic oligonucleotide
  Antisense Strand to SEQ ID NO: 361779
uuaucuacaggaggagagc

SEQ ID NO: 361781 - RNA, 19 nt, Artificial Sequence
  Description of Artificial Sequence: Synthetic oligonucleotide
  Sense Strand Starting at position 549 of SEQ ID NO: 315561
gucccacacucaccugaua

SEQ ID NO: 361782 - RNA, 19 nt, Artificial Sequence
  Description of Artificial Sequence: Synthetic oligonucleotide
  Antisense Strand to SEQ ID NO: 361781
uaucaggugagugugggac

SEQ ID NO: 361783 - RNA, 19 nt, Artificial Sequence
  Description of Artificial Sequence: Synthetic oligonucleotide
  Sense Strand Starting at position 549 of SEQ ID NO: 315620
ggcagauagauccaggugu

SEQ ID NO: 361784 - RNA, 19 nt, Artificial Sequence
  Description of Artificial Sequence: Synthetic oligonucleotide
  Antisense Strand to SEQ ID NO: 361783
acaccuggaucuaucugcc

SEQ ID NO: 361785 - RNA, 19 nt, Artificial Sequence
  Description of Artificial Sequence: Synthetic oligonucleotide
  Sense Strand Starting at position 549 of SEQ ID NO: 315622
cagauagauccaggugucu

SEQ ID NO: 361786 - RNA, 19 nt, Artificial Sequence
  Description of Artificial Sequence: Synthetic oligonucleotide
  Antisense Strand to SEQ ID NO: 361785
agacaccuggaucuaucug

SEQ ID NO: 361787 - RNA, 19 nt, Artificial Sequence
  Description of Artificial Sequence: Synthetic oligonucleotide
  Sense Strand Starting at position 549 of SEQ ID NO: 315671
ggaugagcugcuuaaggcu

SEQ ID NO: 361788 - RNA, 19 nt, Artificial Sequence
  Description of Artificial Sequence: Synthetic oligonucleotide
  Antisense Strand to SEQ ID NO: 361787
agccuuaagcagcucaucc

SEQ ID NO: 361789 - RNA, 19 nt, Artificial Sequence
  Description of Artificial Sequence: Synthetic oligonucleotide
  Sense Strand Starting at position 549 of SEQ ID NO: 316155
ccaacugucuccucagaug

SEQ ID NO: 361790 - RNA, 19 nt, Artificial Sequence
  Description of Artificial Sequence: Synthetic oligonucleotide
  Antisense Strand to SEQ ID NO: 361789
caucugaggagacaguugg

SEQ ID NO: 361791 - RNA, 19 nt, Artificial Sequence
  Description of Artificial Sequence: Synthetic oligonucleotide
  Sense Strand Starting at position 549 of SEQ ID NO: 316499
ugagcuugaggccaauuaa

SEQ ID NO: 361792 - RNA, 19 nt, Artificial Sequence
  Description of Artificial Sequence: Synthetic oligonucleotide
  Antisense Strand to SEQ ID NO: 361791
uuaauuggccucaagcuca

SEQ ID NO: 361793 - RNA, 19 nt, Artificial Sequence
  Description of Artificial Sequence: Synthetic oligonucleotide
  Sense Strand Starting at position 549 of SEQ ID NO: 316513
auuaaacacuggucaguaa

SEQ ID NO: 361794 - RNA, 19 nt, Artificial Sequence
  Description of Artificial Sequence: Synthetic oligonucleotide
  Antisense Strand to SEQ ID NO: 361793
uuacugaccaguguuuaau

SEQ ID NO: 361795 - RNA, 19 nt, Artificial Sequence
  Description of Artificial Sequence: Synthetic oligonucleotide
  Sense Strand Starting at position 549 of SEQ ID NO: 316860
cggcauggucuggaaacga

SEQ ID NO: 361796 - RNA, 19 nt, Artificial Sequence
  Description of Artificial Sequence: Synthetic oligonucleotide
  Antisense Strand to SEQ ID NO: 361795
ucguuuccagaccaugccg

SEQ ID NO: 361797 - RNA, 19 nt, Artificial Sequence
  Description of Artificial Sequence: Synthetic oligonucleotide
  Sense Strand Starting at position 549 of SEQ ID NO: 317181
ccugguuugcgcgucacaa

SEQ ID NO: 361798 - RNA, 19 nt, Artificial Sequence
  Description of Artificial Sequence: Synthetic oligonucleotide
  Antisense Strand to SEQ ID NO: 361797
uugugacgcgcaaaccagg

SEQ ID NO: 361799 - RNA, 19 nt, Artificial Sequence
  Description of Artificial Sequence: Synthetic oligonucleotide
  Sense Strand Starting at position 549 of SEQ ID NO: 317182
cugguuugcgcgucacaac

SEQ ID NO: 361800 - RNA, 19 nt, Artificial Sequence
  Description of Artificial Sequence: Synthetic oligonucleotide
  Antisense Strand to SEQ ID NO: 361799
guugugacgcgcaaaccag

SEQ ID NO: 361801 - RNA, 19 nt, Artificial Sequence
  Description of Artificial Sequence: Synthetic oligonucleotide
  Sense Strand Starting at position 549 of SEQ ID NO: 317574
gucagaucuggugagagug

SEQ ID NO: 361802 - RNA, 19 nt, Artificial Sequence
  Description of Artificial Sequence: Synthetic oligonucleotide
  Antisense Strand to SEQ ID NO: 361801
cacucucaccagaucugac

SEQ ID NO: 361803 - RNA, 19 nt, Artificial Sequence
  Description of Artificial Sequence: Synthetic oligonucleotide
  Sense Strand Starting at position 549 of SEQ ID NO: 317658
aguaaaucaugacugcuuu

SEQ ID NO: 361804 - RNA, 19 nt, Artificial Sequence
  Description of Artificial Sequence: Synthetic oligonucleotide
  Antisense Strand to SEQ ID NO: 361803
aaagcagucaugauuuacu

SEQ ID NO: 361805 - RNA, 19 nt, Artificial Sequence
  Description of Artificial Sequence: Synthetic oligonucleotide
  Sense Strand Starting at position 549 of SEQ ID NO: 317659
guaaaucaugacugcuuua

SEQ ID NO: 361806 - RNA, 19 nt, Artificial Sequence
  Description of Artificial Sequence: Synthetic oligonucleotide
  Antisense Strand to SEQ ID NO: 361805
uaaagcagucaugauuuac

SEQ ID NO: 361807 - RNA, 19 nt, Artificial Sequence
  Description of Artificial Sequence: Synthetic oligonucleotide
  Sense Strand Starting at position 549 of SEQ ID NO: 317839
ucucaaugugagugacuca

SEQ ID NO: 361808 - RNA, 19 nt, Artificial Sequence
  Description of Artificial Sequence: Synthetic oligonucleotide
  Antisense Strand to SEQ ID NO: 361807
ugagucacucacauugaga

SEQ ID NO: 361809 - RNA, 19 nt, Artificial Sequence
  Description of Artificial Sequence: Synthetic oligonucleotide
  Sense Strand Starting at position 549 of SEQ ID NO: 317842
caaugugagugacucaguu

SEQ ID NO: 361810 - RNA, 19 nt, Artificial Sequence
  Description of Artificial Sequence: Synthetic oligonucleotide
  Antisense Strand to SEQ ID NO: 361809
aacugagucacucacauug

SEQ ID NO: 361811 - RNA, 19 nt, Artificial Sequence
  Description of Artificial Sequence: Synthetic oligonucleotide
  Sense Strand Starting at position 549 of SEQ ID NO: 317926
agaguaggcacucagugaa

SEQ ID NO: 361812 - RNA, 19 nt, Artificial Sequence
  Description of Artificial Sequence: Synthetic oligonucleotide
  Antisense Strand to SEQ ID NO: 361811
uucacugagugccuacucu

SEQ ID NO: 361813 - RNA, 19 nt, Artificial Sequence
  Description of Artificial Sequence: Synthetic oligonucleotide
  Sense Strand Starting at position 549 of SEQ ID NO: 317995
aggaauugucuaugaccuu

SEQ ID NO: 361814 - RNA, 19 nt, Artificial Sequence
  Description of Artificial Sequence: Synthetic oligonucleotide
  Antisense Strand to SEQ ID NO: 361813
aaggucauagacaauuccu

SEQ ID NO: 361815 - RNA, 19 nt, Artificial Sequence
  Description of Artificial Sequence: Synthetic oligonucleotide
  Sense Strand Starting at position 549 of SEQ ID NO: 318001
ugucuaugaccuugccaag

SEQ ID NO: 361816 - RNA, 19 nt, Artificial Sequence
  Description of Artificial Sequence: Synthetic oligonucleotide
  Antisense Strand to SEQ ID NO: 361815
cuuggcaaggucauagaca

SEQ ID NO: 361817 - RNA, 19 nt, Artificial Sequence
  Description of Artificial Sequence: Synthetic oligonucleotide
  Sense Strand Starting at position 549 of SEQ ID NO: 318018
aguagaugcauauggacau

SEQ ID NO: 361818 - RNA, 19 nt, Artificial Sequence
  Description of Artificial Sequence: Synthetic oligonucleotide
  Antisense Strand to SEQ ID NO: 361817
auguccauaugcaucuacu

SEQ ID NO: 361819 - RNA, 19 nt, Artificial Sequence
  Description of Artificial Sequence: Synthetic oligonucleotide
  Sense Strand Starting at position 549 of SEQ ID NO: 318047
gugucugcugugguucuaa

SEQ ID NO: 361820 - RNA, 19 nt, Artificial Sequence
  Description of Artificial Sequence: Synthetic oligonucleotide
  Antisense Strand to SEQ ID NO: 361819
uuagaaccacagcagacac

SEQ ID NO: 361821 - RNA, 19 nt, Artificial Sequence
  Description of Artificial Sequence: Synthetic oligonucleotide
  Sense Strand Starting at position 549 of SEQ ID NO: 318078
cuauuccagucuguaagua

SEQ ID NO: 361822 - RNA, 19 nt, Artificial Sequence
  Description of Artificial Sequence: Synthetic oligonucleotide
  Antisense Strand to SEQ ID NO: 361821
uacuuacagacuggaauag

SEQ ID NO: 361823 - RNA, 19 nt, Artificial Sequence
  Description of Artificial Sequence: Synthetic oligonucleotide
  Sense Strand Starting at position 549 of SEQ ID NO: 318083
ccagucuguaaguaugcau

SEQ ID NO: 361824 - RNA, 19 nt, Artificial Sequence
  Description of Artificial Sequence: Synthetic oligonucleotide
  Antisense Strand to SEQ ID NO: 361823
augcauacuuacagacugg

SEQ ID NO: 361825 - RNA, 19 nt, Artificial Sequence
  Description of Artificial Sequence: Synthetic oligonucleotide
  Sense Strand Starting at position 549 of SEQ ID NO: 318110
agggaauaugccugugaca

SEQ ID NO: 361826 - RNA, 19 nt, Artificial Sequence
  Description of Artificial Sequence: Synthetic oligonucleotide
  Antisense Strand to SEQ ID NO: 361825
ugucacaggcauauucccu

SEQ ID NO: 361827 - RNA, 19 nt, Artificial Sequence
  Description of Artificial Sequence: Synthetic oligonucleotide
  Sense Strand Starting at position 549 of SEQ ID NO: 318112
ggaauaugccugugacagu

SEQ ID NO: 361828 - RNA, 19 nt, Artificial Sequence
  Description of Artificial Sequence: Synthetic oligonucleotide
  Antisense Strand to SEQ ID NO: 361827
acugucacaggcauauucc

SEQ ID NO: 361829 - RNA, 19 nt, Artificial Sequence
  Description of Artificial Sequence: Synthetic oligonucleotide
  Sense Strand Starting at position 549 of SEQ ID NO: 318135
gaguguacucuuuacugug

SEQ ID NO: 361830 - RNA, 19 nt, Artificial Sequence
  Description of Artificial Sequence: Synthetic oligonucleotide
  Antisense Strand to SEQ ID NO: 361829
cacaguaaagaguacacuc

SEQ ID NO: 361831 - RNA, 19 nt, Artificial Sequence
  Description of Artificial Sequence: Synthetic oligonucleotide
  Sense Strand Starting at position 549 of SEQ ID NO: 318149
cugugaccaugacuuguau

SEQ ID NO: 361832 - RNA, 19 nt, Artificial Sequence
  Description of Artificial Sequence: Synthetic oligonucleotide
  Antisense Strand to SEQ ID NO: 361831
auacaagucauggucacag

SEQ ID NO: 361833 - RNA, 19 nt, Artificial Sequence
  Description of Artificial Sequence: Synthetic oligonucleotide
  Sense Strand Starting at position 549 of SEQ ID NO: 318151
gugaccaugacuuguauga

SEQ ID NO: 361834 - RNA, 19 nt, Artificial Sequence
  Description of Artificial Sequence: Synthetic oligonucleotide
  Antisense Strand to SEQ ID NO: 361833
ucauacaagucauggucac

SEQ ID NO: 361835 - RNA, 19 nt, Artificial Sequence
  Description of Artificial Sequence: Synthetic oligonucleotide
  Sense Strand Starting at position 549 of SEQ ID NO: 318155
ccaugacuuguaugacugu

SEQ ID NO: 361836 - RNA, 19 nt, Artificial Sequence
  Description of Artificial Sequence: Synthetic oligonucleotide
  Antisense Strand to SEQ ID NO: 361835
acagucauacaagucaugg

SEQ ID NO: 361837 - RNA, 19 nt, Artificial Sequence
  Description of Artificial Sequence: Synthetic oligonucleotide
  Sense Strand Starting at position 549 of SEQ ID NO: 318165
uaugacugugcauguauuu

SEQ ID NO: 361838 - RNA, 19 nt, Artificial Sequence
  Description of Artificial Sequence: Synthetic oligonucleotide
  Antisense Strand to SEQ ID NO: 361837
aaauacaugcacagucaua

SEQ ID NO: 361839 - RNA, 19 nt, Artificial Sequence
  Description of Artificial Sequence: Synthetic oligonucleotide
  Sense Strand Starting at position 549 of SEQ ID NO: 318209
ugcauuagguucucaauau

SEQ ID NO: 361840 - RNA, 19 nt, Artificial Sequence
  Description of Artificial Sequence: Synthetic oligonucleotide
  Antisense Strand to SEQ ID NO: 361839
auauugagaaccuaaugca

SEQ ID NO: 361841 - RNA, 19 nt, Artificial Sequence
  Description of Artificial Sequence: Synthetic oligonucleotide
  Sense Strand Starting at position 549 of SEQ ID NO: 318395
gagaaacuggcaggguuaa

SEQ ID NO: 361842 - RNA, 19 nt, Artificial Sequence
  Description of Artificial Sequence: Synthetic oligonucleotide
  Antisense Strand to SEQ ID NO: 361841
uuaacccugccaguuucuc

SEQ ID NO: 361843 - RNA, 19 nt, Artificial Sequence
  Description of Artificial Sequence: Synthetic oligonucleotide
  Sense Strand Starting at position 549 of SEQ ID NO: 318473
agggcuugacugcagagaa

SEQ ID NO: 361844 - RNA, 19 nt, Artificial Sequence
  Description of Artificial Sequence: Synthetic oligonucleotide
  Antisense Strand to SEQ ID NO: 361843
uucucugcagucaagcccu

SEQ ID NO: 361845 - RNA, 19 nt, Artificial Sequence
  Description of Artificial Sequence: Synthetic oligonucleotide
  Sense Strand Starting at position 549 of SEQ ID NO: 318526
caguguaguguccauauac

SEQ ID NO: 361846 - RNA, 19 nt, Artificial Sequence
  Description of Artificial Sequence: Synthetic oligonucleotide
  Antisense Strand to SEQ ID NO: 361845
guauauggacacuacacug

SEQ ID NO: 361847 - RNA, 19 nt, Artificial Sequence
  Description of Artificial Sequence: Synthetic oligonucleotide
  Sense Strand Starting at position 549 of SEQ ID NO: 318546
ccuugauggccugacauga

SEQ ID NO: 361848 - RNA, 19 nt, Artificial Sequence
  Description of Artificial Sequence: Synthetic oligonucleotide
  Antisense Strand to SEQ ID NO: 361847
ucaugucaggccaucaagg

SEQ ID NO: 361849 - RNA, 19 nt, Artificial Sequence
  Description of Artificial Sequence: Synthetic oligonucleotide
  Sense Strand Starting at position 549 of SEQ ID NO: 318559
acaugauuccuagguggga

SEQ ID NO: 361850 - RNA, 19 nt, Artificial Sequence
  Description of Artificial Sequence: Synthetic oligonucleotide
  Antisense Strand to SEQ ID NO: 361849
ucccaccuaggaaucaugu

SEQ ID NO: 361851 - RNA, 19 nt, Artificial Sequence
  Description of Artificial Sequence: Synthetic oligonucleotide
  Sense Strand Starting at position 549 of SEQ ID NO: 318560
caugauuccuaggugggaa

SEQ ID NO: 361852 - RNA, 19 nt, Artificial Sequence
  Description of Artificial Sequence: Synthetic oligonucleotide
  Antisense Strand to SEQ ID NO: 361851
uucccaccuaggaaucaug

SEQ ID NO: 361853 - RNA, 19 nt, Artificial Sequence
  Description of Artificial Sequence: Synthetic oligonucleotide
  Sense Strand Starting at position 549 of SEQ ID NO: 318655
caggacuuugcagguagaa

SEQ ID NO: 361854 - RNA, 19 nt, Artificial Sequence
  Description of Artificial Sequence: Synthetic oligonucleotide
  Antisense Strand to SEQ ID NO: 361853
uucuaccugcaaaguccug

SEQ ID NO: 361855 - RNA, 19 nt, Artificial Sequence
  Description of Artificial Sequence: Synthetic oligonucleotide
  Sense Strand Starting at position 549 of SEQ ID NO: 318908
accauuagaugggacaaau

SEQ ID NO: 361856 - RNA, 19 nt, Artificial Sequence
  Description of Artificial Sequence: Synthetic oligonucleotide
  Antisense Strand to SEQ ID NO: 361855
auuugucccaucuaauggu

SEQ ID NO: 361857 - RNA, 19 nt, Artificial Sequence
  Description of Artificial Sequence: Synthetic oligonucleotide
  Sense Strand Starting at position 549 of SEQ ID NO: 318994
cuaugaauuccaugcagac

SEQ ID NO: 361858 - RNA, 19 nt, Artificial Sequence
  Description of Artificial Sequence: Synthetic oligonucleotide
  Antisense Strand to SEQ ID NO: 361857
gucugcauggaauucauag

SEQ ID NO: 361859 - RNA, 19 nt, Artificial Sequence
  Description of Artificial Sequence: Synthetic oligonucleotide
  Sense Strand Starting at position 550 of SEQ ID NO: 315350
gccucuacugaugagggau

SEQ ID NO: 361860 - RNA, 19 nt, Artificial Sequence
  Description of Artificial Sequence: Synthetic oligonucleotide
  Antisense Strand to SEQ ID NO: 361859
aucccucaucaguagaggc

SEQ ID NO: 361861 - RNA, 19 nt, Artificial Sequence
  Description of Artificial Sequence: Synthetic oligonucleotide
  Sense Strand Starting at position 550 of SEQ ID NO: 315413
uggugucccucucagagau

SEQ ID NO: 361862 - RNA, 19 nt, Artificial Sequence
  Description of Artificial Sequence: Synthetic oligonucleotide
  Antisense Strand to SEQ ID NO: 361861
aucucugagagggacacca

SEQ ID NO: 361863 - RNA, 19 nt, Artificial Sequence
  Description of Artificial Sequence: Synthetic oligonucleotide
  Sense Strand Starting at position 550 of SEQ ID NO: 315415
gugucccucucagagauga

SEQ ID NO: 361864 - RNA, 19 nt, Artificial Sequence
  Description of Artificial Sequence: Synthetic oligonucleotide
  Antisense Strand to SEQ ID NO: 361863
ucaucucugagagggacac

SEQ ID NO: 361865 - RNA, 19 nt, Artificial Sequence
  Description of Artificial Sequence: Synthetic oligonucleotide
  Sense Strand Starting at position 550 of SEQ ID NO: 315504
ggcugacauuggcaagguu

SEQ ID NO: 361866 - RNA, 19 nt, Artificial Sequence
  Description of Artificial Sequence: Synthetic oligonucleotide
  Antisense Strand to SEQ ID NO: 361865
aaccuugccaaugucagcc

SEQ ID NO: 361867 - RNA, 19 nt, Artificial Sequence
  Description of Artificial Sequence: Synthetic oligonucleotide
  Sense Strand Starting at position 550 of SEQ ID NO: 315523
ggcugcuguggcagaguuu

SEQ ID NO: 361868 - RNA, 19 nt, Artificial Sequence
  Description of Artificial Sequence: Synthetic oligonucleotide
  Antisense Strand to SEQ ID NO: 361867
aaacucugccacagcagcc

SEQ ID NO: 361869 - RNA, 19 nt, Artificial Sequence
  Description of Artificial Sequence: Synthetic oligonucleotide
  Sense Strand Starting at position 550 of SEQ ID NO: 316032
gcugccaggucuuuguaca

SEQ ID NO: 361870 - RNA, 19 nt, Artificial Sequence
  Description of Artificial Sequence: Synthetic oligonucleotide
  Antisense Strand to SEQ ID NO: 361869
uguacaaagaccuggcagc

SEQ ID NO: 361871 - RNA, 19 nt, Artificial Sequence
  Description of Artificial Sequence: Synthetic oligonucleotide
  Sense Strand Starting at position 550 of SEQ ID NO: 316033
cugccaggucuuuguacaa

SEQ ID NO: 361872 - RNA, 19 nt, Artificial Sequence
  Description of Artificial Sequence: Synthetic oligonucleotide
  Antisense Strand to SEQ ID NO: 361871
uuguacaaagaccuggcag

SEQ ID NO: 361873 - RNA, 19 nt, Artificial Sequence
  Description of Artificial Sequence: Synthetic oligonucleotide
  Sense Strand Starting at position 550 of SEQ ID NO: 316194
uggugaccaguuuaaaguu

SEQ ID NO: 361874 - RNA, 19 nt, Artificial Sequence
  Description of Artificial Sequence: Synthetic oligonucleotide
  Antisense Strand to SEQ ID NO: 361873
aacuuuaaacuggucacca

SEQ ID NO: 361875 - RNA, 19 nt, Artificial Sequence
  Description of Artificial Sequence: Synthetic oligonucleotide
  Sense Strand Starting at position 550 of SEQ ID NO: 316206
uaaaguugugccuagguau

SEQ ID NO: 361876 - RNA, 19 nt, Artificial Sequence
  Description of Artificial Sequence: Synthetic oligonucleotide
  Antisense Strand to SEQ ID NO: 361875
auaccuaggcacaacuuua

SEQ ID NO: 361877 - RNA, 19 nt, Artificial Sequence
  Description of Artificial Sequence: Synthetic oligonucleotide
  Sense Strand Starting at position 550 of SEQ ID NO: 316278
aauaaauuugugcguggua

SEQ ID NO: 361878 - RNA, 19 nt, Artificial Sequence
  Description of Artificial Sequence: Synthetic oligonucleotide
  Antisense Strand to SEQ ID NO: 361877
uaccacgcacaaauuuauu

SEQ ID NO: 361879 - RNA, 19 nt, Artificial Sequence
  Description of Artificial Sequence: Synthetic oligonucleotide
  Sense Strand Starting at position 550 of SEQ ID NO: 316313
agaguaaacauauguguuu

SEQ ID NO: 361880 - RNA, 19 nt, Artificial Sequence
  Description of Artificial Sequence: Synthetic oligonucleotide
  Antisense Strand to SEQ ID NO: 361879
aaacacauauguuuacucu

SEQ ID NO: 361881 - RNA, 19 nt, Artificial Sequence
  Description of Artificial Sequence: Synthetic oligonucleotide
  Sense Strand Starting at position 550 of SEQ ID NO: 316314
gaguaaacauauguguuua

SEQ ID NO: 361882 - RNA, 19 nt, Artificial Sequence
  Description of Artificial Sequence: Synthetic oligonucleotide
  Antisense Strand to SEQ ID NO: 361881
uaaacacauauguuuacuc

SEQ ID NO: 361883 - RNA, 19 nt, Artificial Sequence
  Description of Artificial Sequence: Synthetic oligonucleotide
  Sense Strand Starting at position 550 of SEQ ID NO: 316316
guaaacauauguguuuaac

SEQ ID NO: 361884 - RNA, 19 nt, Artificial Sequence
  Description of Artificial Sequence: Synthetic oligonucleotide
  Antisense Strand to SEQ ID NO: 361883
guuaaacacauauguuuac

SEQ ID NO: 361885 - RNA, 19 nt, Artificial Sequence
  Description of Artificial Sequence: Synthetic oligonucleotide
  Sense Strand Starting at position 550 of SEQ ID NO: 316319
aacauauguguuuaacgca

SEQ ID NO: 361886 - RNA, 19 nt, Artificial Sequence
  Description of Artificial Sequence: Synthetic oligonucleotide
  Antisense Strand to SEQ ID NO: 361885
ugcguuaaacacauauguu

SEQ ID NO: 361887 - RNA, 19 nt, Artificial Sequence
  Description of Artificial Sequence: Synthetic oligonucleotide
  Sense Strand Starting at position 550 of SEQ ID NO: 316324
auguguuuaacgcauuaag

SEQ ID NO: 361888 - RNA, 19 nt, Artificial Sequence
  Description of Artificial Sequence: Synthetic oligonucleotide
  Antisense Strand to SEQ ID NO: 361887
cuuaaugcguuaaacacau

SEQ ID NO: 361889 - RNA, 19 nt, Artificial Sequence
  Description of Artificial Sequence: Synthetic oligonucleotide
  Sense Strand Starting at position 550 of SEQ ID NO: 316327
uguuuaacgcauuaagaua

SEQ ID NO: 361890 - RNA, 19 nt, Artificial Sequence
  Description of Artificial Sequence: Synthetic oligonucleotide
  Antisense Strand to SEQ ID NO: 361889
uaucuuaaugcguuaaaca

SEQ ID NO: 361891 - RNA, 19 nt, Artificial Sequence
  Description of Artificial Sequence: Synthetic oligonucleotide
  Sense Strand Starting at position 550 of SEQ ID NO: 316449
cagguagcuucccaacaga

SEQ ID NO: 361892 - RNA, 19 nt, Artificial Sequence
  Description of Artificial Sequence: Synthetic oligonucleotide
  Antisense Strand to SEQ ID NO: 361891
ucuguugggaagcuaccug

SEQ ID NO: 361893 - RNA, 19 nt, Artificial Sequence
  Description of Artificial Sequence: Synthetic oligonucleotide
  Sense Strand Starting at position 550 of SEQ ID NO: 316565
ugcccuguccggugaguuu

SEQ ID NO: 361894 - RNA, 19 nt, Artificial Sequence
  Description of Artificial Sequence: Synthetic oligonucleotide
  Antisense Strand to SEQ ID NO: 361893
aaacucaccggacagggca

SEQ ID NO: 361895 - RNA, 19 nt, Artificial Sequence
  Description of Artificial Sequence: Synthetic oligonucleotide
  Sense Strand Starting at position 550 of SEQ ID NO: 316574
cggugaguuuguccaccca

SEQ ID NO: 361896 - RNA, 19 nt, Artificial Sequence
  Description of Artificial Sequence: Synthetic oligonucleotide
  Antisense Strand to SEQ ID NO: 361895
uggguggacaaacucaccg

SEQ ID NO: 361897 - RNA, 19 nt, Artificial Sequence
  Description of Artificial Sequence: Synthetic oligonucleotide
  Sense Strand Starting at position 550 of SEQ ID NO: 316720
ucgguagaguuaugggaag

SEQ ID NO: 361898 - RNA, 19 nt, Artificial Sequence
  Description of Artificial Sequence: Synthetic oligonucleotide
  Antisense Strand to SEQ ID NO: 361897
cuucccauaacucuaccga

SEQ ID NO: 361899 - RNA, 19 nt, Artificial Sequence
  Description of Artificial Sequence: Synthetic oligonucleotide
  Sense Strand Starting at position 550 of SEQ ID NO: 316722
gguagaguuaugggaagcu

SEQ ID NO: 361900 - RNA, 19 nt, Artificial Sequence
  Description of Artificial Sequence: Synthetic oligonucleotide
  Antisense Strand to SEQ ID NO: 361899
agcuucccauaacucuacc

SEQ ID NO: 361901 - RNA, 19 nt, Artificial Sequence
  Description of Artificial Sequence: Synthetic oligonucleotide
  Sense Strand Starting at position 550 of SEQ ID NO: 317186
cguagagcaccaugggaau

SEQ ID NO: 361902 - RNA, 19 nt, Artificial Sequence
  Description of Artificial Sequence: Synthetic oligonucleotide
  Antisense Strand to SEQ ID NO: 361901
auucccauggugcucuacg

SEQ ID NO: 361903 - RNA, 19 nt, Artificial Sequence
  Description of Artificial Sequence: Synthetic oligonucleotide
  Sense Strand Starting at position 550 of SEQ ID NO: 317192
gcaccaugggaaugguagu

SEQ ID NO: 361904 - RNA, 19 nt, Artificial Sequence
  Description of Artificial Sequence: Synthetic oligonucleotide
  Antisense Strand to SEQ ID NO: 361903
acuaccauucccauggugc

SEQ ID NO: 361905 - RNA, 19 nt, Artificial Sequence
  Description of Artificial Sequence: Synthetic oligonucleotide
  Sense Strand Starting at position 550 of SEQ ID NO: 317428
gggcuuagagcuugggaua

SEQ ID NO: 361906 - RNA, 19 nt, Artificial Sequence
  Description of Artificial Sequence: Synthetic oligonucleotide
  Antisense Strand to SEQ ID NO: 361905
uaucccaagcucuaagccc

SEQ ID NO: 361907 - RNA, 19 nt, Artificial Sequence
  Description of Artificial Sequence: Synthetic oligonucleotide
  Sense Strand Starting at position 550 of SEQ ID NO: 317429
ggcuuagagcuugggauaa

SEQ ID NO: 361908 - RNA, 19 nt, Artificial Sequence
  Description of Artificial Sequence: Synthetic oligonucleotide
  Antisense Strand to SEQ ID NO: 361907
uuaucccaagcucuaagcc

SEQ ID NO: 361909 - RNA, 19 nt, Artificial Sequence
  Description of Artificial Sequence: Synthetic oligonucleotide
  Sense Strand Starting at position 550 of SEQ ID NO: 317431
cuuagagcuugggauaaca

SEQ ID NO: 361910 - RNA, 19 nt, Artificial Sequence
  Description of Artificial Sequence: Synthetic oligonucleotide
  Antisense Strand to SEQ ID NO: 361909
uguuaucccaagcucuaag

SEQ ID NO: 361911 - RNA, 19 nt, Artificial Sequence
  Description of Artificial Sequence: Synthetic oligonucleotide
  Sense Strand Starting at position 550 of SEQ ID NO: 317482
aagugacuuuaugaugaaa

SEQ ID NO: 361912 - RNA, 19 nt, Artificial Sequence
  Description of Artificial Sequence: Synthetic oligonucleotide
  Antisense Strand to SEQ ID NO: 361911
uuucaucauaaagucacuu

SEQ ID NO: 361913 - RNA, 19 nt, Artificial Sequence
  Description of Artificial Sequence: Synthetic oligonucleotide
  Sense Strand Starting at position 550 of SEQ ID NO: 317484
gugacuuuaugaugaaaga

SEQ ID NO: 361914 - RNA, 19 nt, Artificial Sequence
  Description of Artificial Sequence: Synthetic oligonucleotide
  Antisense Strand to SEQ ID NO: 361913
ucuuucaucauaaagucac

SEQ ID NO: 361915 - RNA, 19 nt, Artificial Sequence
  Description of Artificial Sequence: Synthetic oligonucleotide
  Sense Strand Starting at position 550 of SEQ ID NO: 317527
accgaccuucgccaagauu

SEQ ID NO: 361916 - RNA, 19 nt, Artificial Sequence
  Description of Artificial Sequence: Synthetic oligonucleotide
  Antisense Strand to SEQ ID NO: 361915
aaucuuggcgaaggucggu

SEQ ID NO: 361917 - RNA, 19 nt, Artificial Sequence
  Description of Artificial Sequence: Synthetic oligonucleotide
  Sense Strand Starting at position 550 of SEQ ID NO: 318089
uggucacauugaucacaua

SEQ ID NO: 361918 - RNA, 19 nt, Artificial Sequence
  Description of Artificial Sequence: Synthetic oligonucleotide
  Antisense Strand to SEQ ID NO: 361917
uaugugaucaaugugacca

SEQ ID NO: 361919 - RNA, 19 nt, Artificial Sequence
  Description of Artificial Sequence: Synthetic oligonucleotide
  Sense Strand Starting at position 550 of SEQ ID NO: 318125
ccagguagucauggagaug

SEQ ID NO: 361920 - RNA, 19 nt, Artificial Sequence
  Description of Artificial Sequence: Synthetic oligonucleotide
  Antisense Strand to SEQ ID NO: 361919
caucuccaugacuaccugg

SEQ ID NO: 361921 - RNA, 19 nt, Artificial Sequence
  Description of Artificial Sequence: Synthetic oligonucleotide
  Sense Strand Starting at position 550 of SEQ ID NO: 318128
gguagucauggagaugcca

SEQ ID NO: 361922 - RNA, 19 nt, Artificial Sequence
  Description of Artificial Sequence: Synthetic oligonucleotide
  Antisense Strand to SEQ ID NO: 361921
uggcaucuccaugacuacc

SEQ ID NO: 361923 - RNA, 19 nt, Artificial Sequence
  Description of Artificial Sequence: Synthetic oligonucleotide
  Sense Strand Starting at position 550 of SEQ ID NO: 318165
agggaagauaugugucaau

SEQ ID NO: 361924 - RNA, 19 nt, Artificial Sequence
  Description of Artificial Sequence: Synthetic oligonucleotide
  Antisense Strand to SEQ ID NO: 361923
auugacacauaucuucccu

SEQ ID NO: 361925 - RNA, 19 nt, Artificial Sequence
  Description of Artificial Sequence: Synthetic oligonucleotide
  Sense Strand Starting at position 550 of SEQ ID NO: 318168
gaagauaugugucaauaug

SEQ ID NO: 361926 - RNA, 19 nt, Artificial Sequence
  Description of Artificial Sequence: Synthetic oligonucleotide
  Antisense Strand to SEQ ID NO: 361925
cauauugacacauaucuuc

SEQ ID NO: 361927 - RNA, 19 nt, Artificial Sequence
  Description of Artificial Sequence: Synthetic oligonucleotide
  Sense Strand Starting at position 550 of SEQ ID NO: 318177
ugucaauaugccugcucua

SEQ ID NO: 361928 - RNA, 19 nt, Artificial Sequence
  Description of Artificial Sequence: Synthetic oligonucleotide
  Antisense Strand to SEQ ID NO: 361927
uagagcaggcauauugaca

SEQ ID NO: 361929 - RNA, 19 nt, Artificial Sequence
  Description of Artificial Sequence: Synthetic oligonucleotide
  Sense Strand Starting at position 550 of SEQ ID NO: 318190
gcucuauaaucuugacaug

SEQ ID NO: 361930 - RNA, 19 nt, Artificial Sequence
  Description of Artificial Sequence: Synthetic oligonucleotide
  Antisense Strand to SEQ ID NO: 361929
caugucaagauuauagagc

SEQ ID NO: 361931 - RNA, 19 nt, Artificial Sequence
  Description of Artificial Sequence: Synthetic oligonucleotide
  Sense Strand Starting at position 550 of SEQ ID NO: 318259
gggcaaugaucaccucaga

SEQ ID NO: 361932 - RNA, 19 nt, Artificial Sequence
  Description of Artificial Sequence: Synthetic oligonucleotide
  Antisense Strand to SEQ ID NO: 361931
ucugaggugaucauugccc

SEQ ID NO: 361933 - RNA, 19 nt, Artificial Sequence
  Description of Artificial Sequence: Synthetic oligonucleotide
  Sense Strand Starting at position 550 of SEQ ID NO: 318427
ucaagaaacucuucugguu

SEQ ID NO: 361934 - RNA, 19 nt, Artificial Sequence
  Description of Artificial Sequence: Synthetic oligonucleotide
  Antisense Strand to SEQ ID NO: 361933
aaccagaagaguuucuuga

SEQ ID NO: 361935 - RNA, 19 nt, Artificial Sequence
  Description of Artificial Sequence: Synthetic oligonucleotide
  Sense Strand Starting at position 550 of SEQ ID NO: 318478
gggacucucuaguuugguu

SEQ ID NO: 361936 - RNA, 19 nt, Artificial Sequence
  Description of Artificial Sequence: Synthetic oligonucleotide
  Antisense Strand to SEQ ID NO: 361935
aaccaaacuagagaguccc

SEQ ID NO: 361937 - RNA, 19 nt, Artificial Sequence
  Description of Artificial Sequence: Synthetic oligonucleotide
  Sense Strand Starting at position 550 of SEQ ID NO: 318631
ugcauaacaccuggcuaau

SEQ ID NO: 361938 - RNA, 19 nt, Artificial Sequence
  Description of Artificial Sequence: Synthetic oligonucleotide
  Antisense Strand to SEQ ID NO: 361937
auuagccagguguuaugca

SEQ ID NO: 361939 - RNA, 19 nt, Artificial Sequence
  Description of Artificial Sequence: Synthetic oligonucleotide
  Sense Strand Starting at position 551 of SEQ ID NO: 315269
gccaaauuccugcauggug

SEQ ID NO: 361940 - RNA, 19 nt, Artificial Sequence
  Description of Artificial Sequence: Synthetic oligonucleotide
  Antisense Strand to SEQ ID NO: 361939
caccaugcaggaauuuggc

SEQ ID NO: 361941 - RNA, 19 nt, Artificial Sequence
  Description of Artificial Sequence: Synthetic oligonucleotide
  Sense Strand Starting at position 551 of SEQ ID NO: 315328
cgagcaugagcucugcagu

SEQ ID NO: 361942 - RNA, 19 nt, Artificial Sequence
  Description of Artificial Sequence: Synthetic oligonucleotide
  Antisense Strand to SEQ ID NO: 361941
acugcagagcucaugcucg

SEQ ID NO: 361943 - RNA, 19 nt, Artificial Sequence
  Description of Artificial Sequence: Synthetic oligonucleotide
  Sense Strand Starting at position 551 of SEQ ID NO: 315341
ugcaguuugccacacucua

SEQ ID NO: 361944 - RNA, 19 nt, Artificial Sequence
  Description of Artificial Sequence: Synthetic oligonucleotide
  Antisense Strand to SEQ ID NO: 361943
uagaguguggcaaacugca

SEQ ID NO: 361945 - RNA, 19 nt, Artificial Sequence
  Description of Artificial Sequence: Synthetic oligonucleotide
  Sense Strand Starting at position 551 of SEQ ID NO: 315566
ccuaguguugaagaugcaa

SEQ ID NO: 361946 - RNA, 19 nt, Artificial Sequence
  Description of Artificial Sequence: Synthetic oligonucleotide
  Antisense Strand to SEQ ID NO: 361945
uugcaucuucaacacuagg

SEQ ID NO: 361947 - RNA, 19 nt, Artificial Sequence
  Description of Artificial Sequence: Synthetic oligonucleotide
  Sense Strand Starting at position 551 of SEQ ID NO: 315631
ugaguuugccacgucugua

SEQ ID NO: 361948 - RNA, 19 nt, Artificial Sequence
  Description of Artificial Sequence: Synthetic oligonucleotide
  Antisense Strand to SEQ ID NO: 361947
uacagacguggcaaacuca

SEQ ID NO: 361949 - RNA, 19 nt, Artificial Sequence
  Description of Artificial Sequence: Synthetic oligonucleotide
  Sense Strand Starting at position 551 of SEQ ID NO: 315636
uugccacgucuguaacaua

SEQ ID NO: 361950 - RNA, 19 nt, Artificial Sequence
  Description of Artificial Sequence: Synthetic oligonucleotide
  Antisense Strand to SEQ ID NO: 361949
uauguuacagacguggcaa

SEQ ID NO: 361951 - RNA, 19 nt, Artificial Sequence
  Description of Artificial Sequence: Synthetic oligonucleotide
  Sense Strand Starting at position 551 of SEQ ID NO: 315641
acgucuguaacauaaggaa

SEQ ID NO: 361952 - RNA, 19 nt, Artificial Sequence
  Description of Artificial Sequence: Synthetic oligonucleotide
  Antisense Strand to SEQ ID NO: 361951
uuccuuauguuacagacgu

SEQ ID NO: 361953 - RNA, 19 nt, Artificial Sequence
  Description of Artificial Sequence: Synthetic oligonucleotide
  Sense Strand Starting at position 551 of SEQ ID NO: 315813
uaccuuagagaguggugaa

SEQ ID NO: 361954 - RNA, 19 nt, Artificial Sequence
  Description of Artificial Sequence: Synthetic oligonucleotide
  Antisense Strand to SEQ ID NO: 361953
uucaccacucucuaaggua

SEQ ID NO: 361955 - RNA, 19 nt, Artificial Sequence
  Description of Artificial Sequence: Synthetic oligonucleotide
  Sense Strand Starting at position 551 of SEQ ID NO: 315928
caacgugagccuugaagga

SEQ ID NO: 361956 - RNA, 19 nt, Artificial Sequence
  Description of Artificial Sequence: Synthetic oligonucleotide
  Antisense Strand to SEQ ID NO: 361955
uccuucaaggcucacguug

SEQ ID NO: 361957 - RNA, 19 nt, Artificial Sequence
  Description of Artificial Sequence: Synthetic oligonucleotide
  Sense Strand Starting at position 551 of SEQ ID NO: 315930
acgugagccuugaaggaug

SEQ ID NO: 361958 - RNA, 19 nt, Artificial Sequence
  Description of Artificial Sequence: Synthetic oligonucleotide
  Antisense Strand to SEQ ID NO: 361957
cauccuucaaggcucacgu

SEQ ID NO: 361959 - RNA, 19 nt, Artificial Sequence
  Description of Artificial Sequence: Synthetic oligonucleotide
  Sense Strand Starting at position 551 of SEQ ID NO: 316151
aggcgauaacaauggaaua

SEQ ID NO: 361960 - RNA, 19 nt, Artificial Sequence
  Description of Artificial Sequence: Synthetic oligonucleotide
  Antisense Strand to SEQ ID NO: 361959
uauuccauuguuaucgccu

SEQ ID NO: 361961 - RNA, 19 nt, Artificial Sequence
  Description of Artificial Sequence: Synthetic oligonucleotide
  Sense Strand Starting at position 551 of SEQ ID NO: 316471
guaauaaaguuuccuugua

SEQ ID NO: 361962 - RNA, 19 nt, Artificial Sequence
  Description of Artificial Sequence: Synthetic oligonucleotide
  Antisense Strand to SEQ ID NO: 361961
uacaaggaaacuuuauuac

SEQ ID NO: 361963 - RNA, 19 nt, Artificial Sequence
  Description of Artificial Sequence: Synthetic oligonucleotide
  Sense Strand Starting at position 551 of SEQ ID NO: 316546
acaagaguauggguacuau

SEQ ID NO: 361964 - RNA, 19 nt, Artificial Sequence
  Description of Artificial Sequence: Synthetic oligonucleotide
  Antisense Strand to SEQ ID NO: 361963
auaguacccauacucuugu

SEQ ID NO: 361965 - RNA, 19 nt, Artificial Sequence
  Description of Artificial Sequence: Synthetic oligonucleotide
  Sense Strand Starting at position 551 of SEQ ID NO: 317221
cgucuuccucgagaaugga

SEQ ID NO: 361966 - RNA, 19 nt, Artificial Sequence
  Description of Artificial Sequence: Synthetic oligonucleotide
  Antisense Strand to SEQ ID NO: 361965
uccauucucgaggaagacg

SEQ ID NO: 361967 - RNA, 19 nt, Artificial Sequence
  Description of Artificial Sequence: Synthetic oligonucleotide
  Sense Strand Starting at position 551 of SEQ ID NO: 317244
auugguggagcguggaaau

SEQ ID NO: 361968 - RNA, 19 nt, Artificial Sequence
  Description of Artificial Sequence: Synthetic oligonucleotide
  Antisense Strand to SEQ ID NO: 361967
auuuccacgcuccaccaau

SEQ ID NO: 361969 - RNA, 19 nt, Artificial Sequence
  Description of Artificial Sequence: Synthetic oligonucleotide
  Sense Strand Starting at position 551 of SEQ ID NO: 317532
aaugaccuccgguaaguua

SEQ ID NO: 361970 - RNA, 19 nt, Artificial Sequence
  Description of Artificial Sequence: Synthetic oligonucleotide
  Antisense Strand to SEQ ID NO: 361969
uaacuuaccggaggucauu

SEQ ID NO: 361971 - RNA, 19 nt, Artificial Sequence
  Description of Artificial Sequence: Synthetic oligonucleotide
  Sense Strand Starting at position 551 of SEQ ID NO: 317615
gggccuuucuaaccuuuga

SEQ ID NO: 361972 - RNA, 19 nt, Artificial Sequence
  Description of Artificial Sequence: Synthetic oligonucleotide
  Antisense Strand to SEQ ID NO: 361971
ucaaagguuagaaaggccc

SEQ ID NO: 361973 - RNA, 19 nt, Artificial Sequence
  Description of Artificial Sequence: Synthetic oligonucleotide
  Sense Strand Starting at position 551 of SEQ ID NO: 317692
ggugcucuuccugugcgau

SEQ ID NO: 361974 - RNA, 19 nt, Artificial Sequence
  Description of Artificial Sequence: Synthetic oligonucleotide
  Antisense Strand to SEQ ID NO: 361973
aucgcacaggaagagcacc

SEQ ID NO: 361975 - RNA, 19 nt, Artificial Sequence
  Description of Artificial Sequence: Synthetic oligonucleotide
  Sense Strand Starting at position 551 of SEQ ID NO: 317725
gcucgacuuccucaucuaa

SEQ ID NO: 361976 - RNA, 19 nt, Artificial Sequence
  Description of Artificial Sequence: Synthetic oligonucleotide
  Antisense Strand to SEQ ID NO: 361975
uuagaugaggaagucgagc

SEQ ID NO: 361977 - RNA, 19 nt, Artificial Sequence
  Description of Artificial Sequence: Synthetic oligonucleotide
  Sense Strand Starting at position 551 of SEQ ID NO: 317817
aagucauuagacuacgugu

SEQ ID NO: 361978 - RNA, 19 nt, Artificial Sequence
  Description of Artificial Sequence: Synthetic oligonucleotide
  Antisense Strand to SEQ ID NO: 361977
acacguagucuaaugacuu

SEQ ID NO: 361979 - RNA, 19 nt, Artificial Sequence
  Description of Artificial Sequence: Synthetic oligonucleotide
  Sense Strand Starting at position 551 of SEQ ID NO: 317972
gcugguagagcuggaauuu

SEQ ID NO: 361980 - RNA, 19 nt, Artificial Sequence
  Description of Artificial Sequence: Synthetic oligonucleotide
  Antisense Strand to SEQ ID NO: 361979
aaauuccagcucuaccagc

SEQ ID NO: 361981 - RNA, 19 nt, Artificial Sequence
  Description of Artificial Sequence: Synthetic oligonucleotide
  Sense Strand Starting at position 551 of SEQ ID NO: 318007
agaguuugugcugauucca

SEQ ID NO: 361982 - RNA, 19 nt, Artificial Sequence
  Description of Artificial Sequence: Synthetic oligonucleotide
  Antisense Strand to SEQ ID NO: 361981
uggaaucagcacaaacucu

SEQ ID NO: 361983 - RNA, 19 nt, Artificial Sequence
  Description of Artificial Sequence: Synthetic oligonucleotide
  Sense Strand Starting at position 551 of SEQ ID NO: 318015
ugcugauuccaccaggcuu

SEQ ID NO: 361984 - RNA, 19 nt, Artificial Sequence
  Description of Artificial Sequence: Synthetic oligonucleotide
  Antisense Strand to SEQ ID NO: 361983
aagccugguggaaucagca

SEQ ID NO: 361985 - RNA, 19 nt, Artificial Sequence
  Description of Artificial Sequence: Synthetic oligonucleotide
  Sense Strand Starting at position 551 of SEQ ID NO: 318177
uggguuaaaugaucucucu

SEQ ID NO: 361986 - RNA, 19 nt, Artificial Sequence
  Description of Artificial Sequence: Synthetic oligonucleotide
  Antisense Strand to SEQ ID NO: 361985
agagagaucauuuaaccca

SEQ ID NO: 361987 - RNA, 19 nt, Artificial Sequence
  Description of Artificial Sequence: Synthetic oligonucleotide
  Sense Strand Starting at position 551 of SEQ ID NO: 318180
guuaaaugaucucucuaga

SEQ ID NO: 361988 - RNA, 19 nt, Artificial Sequence
  Description of Artificial Sequence: Synthetic oligonucleotide
  Antisense Strand to SEQ ID NO: 361987
ucuagagagaucauuuaac

SEQ ID NO: 361989 - RNA, 19 nt, Artificial Sequence
  Description of Artificial Sequence: Synthetic oligonucleotide
  Sense Strand Starting at position 551 of SEQ ID NO: 318214
caaucugugguuuagugau

SEQ ID NO: 361990 - RNA, 19 nt, Artificial Sequence
  Description of Artificial Sequence: Synthetic oligonucleotide
  Antisense Strand to SEQ ID NO: 361989
aucacuaaaccacagauug

SEQ ID NO: 361991 - RNA, 19 nt, Artificial Sequence
  Description of Artificial Sequence: Synthetic oligonucleotide
  Sense Strand Starting at position 551 of SEQ ID NO: 318216
aucugugguuuagugauua

SEQ ID NO: 361992 - RNA, 19 nt, Artificial Sequence
  Description of Artificial Sequence: Synthetic oligonucleotide
  Antisense Strand to SEQ ID NO: 361991
uaaucacuaaaccacagau

SEQ ID NO: 361993 - RNA, 19 nt, Artificial Sequence
  Description of Artificial Sequence: Synthetic oligonucleotide
  Sense Strand Starting at position 551 of SEQ ID NO: 318220
gugguuuagugauuaggau

SEQ ID NO: 361994 - RNA, 19 nt, Artificial Sequence
  Description of Artificial Sequence: Synthetic oligonucleotide
  Antisense Strand to SEQ ID NO: 361993
auccuaaucacuaaaccac

SEQ ID NO: 361995 - RNA, 19 nt, Artificial Sequence
  Description of Artificial Sequence: Synthetic oligonucleotide
  Sense Strand Starting at position 551 of SEQ ID NO: 318221
ugguuuagugauuaggaua

SEQ ID NO: 361996 - RNA, 19 nt, Artificial Sequence
  Description of Artificial Sequence: Synthetic oligonucleotide
  Antisense Strand to SEQ ID NO: 361995
uauccuaaucacuaaacca

SEQ ID NO: 361997 - RNA, 19 nt, Artificial Sequence
  Description of Artificial Sequence: Synthetic oligonucleotide
  Sense Strand Starting at position 551 of SEQ ID NO: 318673
ggagaaguauuagaccaag

SEQ ID NO: 361998 - RNA, 19 nt, Artificial Sequence
  Description of Artificial Sequence: Synthetic oligonucleotide
  Antisense Strand to SEQ ID NO: 361997
cuuggucuaauacuucucc

SEQ ID NO: 361999 - RNA, 19 nt, Artificial Sequence
  Description of Artificial Sequence: Synthetic oligonucleotide
  Sense Strand Starting at position 551 of SEQ ID NO: 318840
uuauuuaccuucuggagga

SEQ ID NO: 362000 - RNA, 19 nt, Artificial Sequence
  Description of Artificial Sequence: Synthetic oligonucleotide
  Antisense Strand to SEQ ID NO: 361999
uccuccagaagguaaauaa

SEQ ID NO: 362001 - RNA, 19 nt, Artificial Sequence
  Description of Artificial Sequence: Synthetic oligonucleotide
  Sense Strand Starting at position 551 of SEQ ID NO: 318841
uauuuaccuucuggaggau

SEQ ID NO: 362002 - RNA, 19 nt, Artificial Sequence
  Description of Artificial Sequence: Synthetic oligonucleotide
  Antisense Strand to SEQ ID NO: 362001
auccuccagaagguaaaua

SEQ ID NO: 362003 - RNA, 19 nt, Artificial Sequence
  Description of Artificial Sequence: Synthetic oligonucleotide
  Sense Strand Starting at position 551 of SEQ ID NO: 318855
aggauuacaucugaugaaa

SEQ ID NO: 362004 - RNA, 19 nt, Artificial Sequence
  Description of Artificial Sequence: Synthetic oligonucleotide
  Antisense Strand to SEQ ID NO: 362003
uuucaucagauguaauccu

SEQ ID NO: 362005 - RNA, 19 nt, Artificial Sequence
  Description of Artificial Sequence: Synthetic oligonucleotide
  Sense Strand Starting at position 551 of SEQ ID NO: 318934
cagagaagacaguguaacu

SEQ ID NO: 362006 - RNA, 19 nt, Artificial Sequence
  Description of Artificial Sequence: Synthetic oligonucleotide
  Antisense Strand to SEQ ID NO: 362005
aguuacacugucuucucug

SEQ ID NO: 362007 - RNA, 19 nt, Artificial Sequence
  Description of Artificial Sequence: Synthetic oligonucleotide
  Sense Strand Starting at position 551 of SEQ ID NO: 318979
ugcuuaagagcuuagcuau

SEQ ID NO: 362008 - RNA, 19 nt, Artificial Sequence
  Description of Artificial Sequence: Synthetic oligonucleotide
  Antisense Strand to SEQ ID NO: 362007
auagcuaagcucuuaagca

SEQ ID NO: 362009 - RNA, 19 nt, Artificial Sequence
  Description of Artificial Sequence: Synthetic oligonucleotide
  Sense Strand Starting at position 551 of SEQ ID NO: 319007
uucucaaauuuaugguaag

SEQ ID NO: 362010 - RNA, 19 nt, Artificial Sequence
  Description of Artificial Sequence: Synthetic oligonucleotide
  Antisense Strand to SEQ ID NO: 362009
cuuaccauaaauuugagaa

SEQ ID NO: 362011 - RNA, 19 nt, Artificial Sequence
  Description of Artificial Sequence: Synthetic oligonucleotide
  Sense Strand Starting at position 551 of SEQ ID NO: 319048
agcccuacucagugauuaa

SEQ ID NO: 362012 - RNA, 19 nt, Artificial Sequence
  Description of Artificial Sequence: Synthetic oligonucleotide
  Antisense Strand to SEQ ID NO: 362011
uuaaucacugaguagggcu

SEQ ID NO: 362013 - RNA, 19 nt, Artificial Sequence
  Description of Artificial Sequence: Synthetic oligonucleotide
  Sense Strand Starting at position 551 of SEQ ID NO: 319055
cucagugauuaauccgaaa

SEQ ID NO: 362014 - RNA, 19 nt, Artificial Sequence
  Description of Artificial Sequence: Synthetic oligonucleotide
  Antisense Strand to SEQ ID NO: 362013
uuucggauuaaucacugag

SEQ ID NO: 362015 - RNA, 19 nt, Artificial Sequence
  Description of Artificial Sequence: Synthetic oligonucleotide
  Sense Strand Starting at position 551 of SEQ ID NO: 319121
uaaccugugcuagaggaua

SEQ ID NO: 362016 - RNA, 19 nt, Artificial Sequence
  Description of Artificial Sequence: Synthetic oligonucleotide
  Antisense Strand to SEQ ID NO: 362015
uauccucuagcacagguua

SEQ ID NO: 362017 - RNA, 19 nt, Artificial Sequence
  Description of Artificial Sequence: Synthetic oligonucleotide
  Sense Strand Starting at position 551 of SEQ ID NO: 319186
gguccacacugacuuuaau

SEQ ID NO: 362018 - RNA, 19 nt, Artificial Sequence
  Description of Artificial Sequence: Synthetic oligonucleotide
  Antisense Strand to SEQ ID NO: 362017
auuaaagucaguguggacc

SEQ ID NO: 362019 - RNA, 19 nt, Artificial Sequence
  Description of Artificial Sequence: Synthetic oligonucleotide
  Sense Strand Starting at position 552 of SEQ ID NO: 315254
uuuccuuaucggcagauaa

SEQ ID NO: 362020 - RNA, 19 nt, Artificial Sequence
  Description of Artificial Sequence: Synthetic oligonucleotide
  Antisense Strand to SEQ ID NO: 362019
uuaucugccgauaaggaaa

SEQ ID NO: 362021 - RNA, 19 nt, Artificial Sequence
  Description of Artificial Sequence: Synthetic oligonucleotide
  Sense Strand Starting at position 552 of SEQ ID NO: 315256
uccuuaucggcagauaacu

SEQ ID NO: 362022 - RNA, 19 nt, Artificial Sequence
  Description of Artificial Sequence: Synthetic oligonucleotide
  Antisense Strand to SEQ ID NO: 362021
aguuaucugccgauaagga

SEQ ID NO: 362023 - RNA, 19 nt, Artificial Sequence
  Description of Artificial Sequence: Synthetic oligonucleotide
  Sense Strand Starting at position 552 of SEQ ID NO: 315269
auaacucuucuagggcaga

SEQ ID NO: 362024 - RNA, 19 nt, Artificial Sequence
  Description of Artificial Sequence: Synthetic oligonucleotide
  Antisense Strand to SEQ ID NO: 362023
ucugcccuagaagaguuau

SEQ ID NO: 362025 - RNA, 19 nt, Artificial Sequence
  Description of Artificial Sequence: Synthetic oligonucleotide
  Sense Strand Starting at position 552 of SEQ ID NO: 315307
acuguaaaccuaggacagu

SEQ ID NO: 362026 - RNA, 19 nt, Artificial Sequence
  Description of Artificial Sequence: Synthetic oligonucleotide
  Antisense Strand to SEQ ID NO: 362025
acuguccuagguuuacagu

SEQ ID NO: 362027 - RNA, 19 nt, Artificial Sequence
  Description of Artificial Sequence: Synthetic oligonucleotide
  Sense Strand Starting at position 552 of SEQ ID NO: 315324
gugguucccaaacauuagu

SEQ ID NO: 362028 - RNA, 19 nt, Artificial Sequence
  Description of Artificial Sequence: Synthetic oligonucleotide
  Antisense Strand to SEQ ID NO: 362027
acuaauguuugggaaccac

SEQ ID NO: 362029 - RNA, 19 nt, Artificial Sequence
  Description of Artificial Sequence: Synthetic oligonucleotide
  Sense Strand Starting at position 552 of SEQ ID NO: 315337
auuaguguccaucagaauc

SEQ ID NO: 362030 - RNA, 19 nt, Artificial Sequence
  Description of Artificial Sequence: Synthetic oligonucleotide
  Antisense Strand to SEQ ID NO: 362029
gauucugauggacacuaau

SEQ ID NO: 362031 - RNA, 19 nt, Artificial Sequence
  Description of Artificial Sequence: Synthetic oligonucleotide
  Sense Strand Starting at position 552 of SEQ ID NO: 315702
guaauaaucccaggacuac

SEQ ID NO: 362032 - RNA, 19 nt, Artificial Sequence
  Description of Artificial Sequence: Synthetic oligonucleotide
  Antisense Strand to SEQ ID NO: 362031
guaguccugggauuauuac

SEQ ID NO: 362033 - RNA, 19 nt, Artificial Sequence
  Description of Artificial Sequence: Synthetic oligonucleotide
  Sense Strand Starting at position 552 of SEQ ID NO: 315777
ggacuaauuuaauaugaac

SEQ ID NO: 362034 - RNA, 19 nt, Artificial Sequence
  Description of Artificial Sequence: Synthetic oligonucleotide
  Antisense Strand to SEQ ID NO: 362033
guucauauuaaauuagucc

SEQ ID NO: 362035 - RNA, 19 nt, Artificial Sequence
  Description of Artificial Sequence: Synthetic oligonucleotide
  Sense Strand Starting at position 552 of SEQ ID NO: 315841
acagcaguggaaugagauu

SEQ ID NO: 362036 - RNA, 19 nt, Artificial Sequence
  Description of Artificial Sequence: Synthetic oligonucleotide
  Antisense Strand to SEQ ID NO: 362035
aaucucauuccacugcugu

SEQ ID NO: 362037 - RNA, 19 nt, Artificial Sequence
  Description of Artificial Sequence: Synthetic oligonucleotide
  Sense Strand Starting at position 552 of SEQ ID NO: 315877
uuauuugagccuggcugua

SEQ ID NO: 362038 - RNA, 19 nt, Artificial Sequence
  Description of Artificial Sequence: Synthetic oligonucleotide
  Antisense Strand to SEQ ID NO: 362037
uacagccaggcucaaauaa

SEQ ID NO: 362039 - RNA, 19 nt, Artificial Sequence
  Description of Artificial Sequence: Synthetic oligonucleotide
  Sense Strand Starting at position 552 of SEQ ID NO: 315889
ggcuguagacauuaaguac

SEQ ID NO: 362040 - RNA, 19 nt, Artificial Sequence
  Description of Artificial Sequence: Synthetic oligonucleotide
  Antisense Strand to SEQ ID NO: 362039
guacuuaaugucuacagcc

SEQ ID NO: 362041 - RNA, 19 nt, Artificial Sequence
  Description of Artificial Sequence: Synthetic oligonucleotide
  Sense Strand Starting at position 552 of SEQ ID NO: 315892
uguagacauuaaguacuau

SEQ ID NO: 362042 - RNA, 19 nt, Artificial Sequence
  Description of Artificial Sequence: Synthetic oligonucleotide
  Antisense Strand to SEQ ID NO: 362041
auaguacuuaaugucuaca

SEQ ID NO: 362043 - RNA, 19 nt, Artificial Sequence
  Description of Artificial Sequence: Synthetic oligonucleotide
  Sense Strand Starting at position 552 of SEQ ID NO: 316075
ucaggauauguuggacuuu

SEQ ID NO: 362044 - RNA, 19 nt, Artificial Sequence
  Description of Artificial Sequence: Synthetic oligonucleotide
  Antisense Strand to SEQ ID NO: 362043
aaaguccaacauauccuga

SEQ ID NO: 362045 - RNA, 19 nt, Artificial Sequence
  Description of Artificial Sequence: Synthetic oligonucleotide
  Sense Strand Starting at position 552 of SEQ ID NO: 316177
aguuucugagaguaugguu

SEQ ID NO: 362046 - RNA, 19 nt, Artificial Sequence
  Description of Artificial Sequence: Synthetic oligonucleotide
  Antisense Strand to SEQ ID NO: 362045
aaccauacucucagaaacu

SEQ ID NO: 362047 - RNA, 19 nt, Artificial Sequence
  Description of Artificial Sequence: Synthetic oligonucleotide
  Sense Strand Starting at position 552 of SEQ ID NO: 316182
cugagaguaugguuauuac

SEQ ID NO: 362048 - RNA, 19 nt, Artificial Sequence
  Description of Artificial Sequence: Synthetic oligonucleotide
  Antisense Strand to SEQ ID NO: 362047
guaauaaccauacucucag

SEQ ID NO: 362049 - RNA, 19 nt, Artificial Sequence
  Description of Artificial Sequence: Synthetic oligonucleotide
  Sense Strand Starting at position 552 of SEQ ID NO: 316185
agaguaugguuauuacaaa

SEQ ID NO: 362050 - RNA, 19 nt, Artificial Sequence
  Description of Artificial Sequence: Synthetic oligonucleotide
  Antisense Strand to SEQ ID NO: 362049
uuuguaauaaccauacucu

SEQ ID NO: 362051 - RNA, 19 nt, Artificial Sequence
  Description of Artificial Sequence: Synthetic oligonucleotide
  Sense Strand Starting at position 552 of SEQ ID NO: 316192
gguuauuacaaaggcagaa

SEQ ID NO: 362052 - RNA, 19 nt, Artificial Sequence
  Description of Artificial Sequence: Synthetic oligonucleotide
  Antisense Strand to SEQ ID NO: 362051
uucugccuuuguaauaacc

SEQ ID NO: 362053 - RNA, 19 nt, Artificial Sequence
  Description of Artificial Sequence: Synthetic oligonucleotide
  Sense Strand Starting at position 552 of SEQ ID NO: 316300
uuguaugaacagggucuua

SEQ ID NO: 362054 - RNA, 19 nt, Artificial Sequence
  Description of Artificial Sequence: Synthetic oligonucleotide
  Antisense Strand to SEQ ID NO: 362053
uaagacccuguucauacaa

SEQ ID NO: 362055 - RNA, 19 nt, Artificial Sequence
  Description of Artificial Sequence: Synthetic oligonucleotide
  Sense Strand Starting at position 552 of SEQ ID NO: 317200
uggaaaugguggucgggaa

SEQ ID NO: 362056 - RNA, 19 nt, Artificial Sequence
  Description of Artificial Sequence: Synthetic oligonucleotide
  Antisense Strand to SEQ ID NO: 362055
uucccgaccaccauuucca

SEQ ID NO: 362057 - RNA, 19 nt, Artificial Sequence
  Description of Artificial Sequence: Synthetic oligonucleotide
  Sense Strand Starting at position 552 of SEQ ID NO: 317268
gcgucuucucccucgcuga

SEQ ID NO: 362058 - RNA, 19 nt, Artificial Sequence
  Description of Artificial Sequence: Synthetic oligonucleotide
  Antisense Strand to SEQ ID NO: 362057
ucagcgagggagaagacgc

SEQ ID NO: 362059 - RNA, 19 nt, Artificial Sequence
  Description of Artificial Sequence: Synthetic oligonucleotide
  Sense Strand Starting at position 552 of SEQ ID NO: 317510
uuguaaagauagucaauac

SEQ ID NO: 362060 - RNA, 19 nt, Artificial Sequence
  Description of Artificial Sequence: Synthetic oligonucleotide
  Antisense Strand to SEQ ID NO: 362059
guauugacuaucuuuacaa

SEQ ID NO: 362061 - RNA, 19 nt, Artificial Sequence
  Description of Artificial Sequence: Synthetic oligonucleotide
  Sense Strand Starting at position 552 of SEQ ID NO: 317882
gcccuaaagcucuaagggu

SEQ ID NO: 362062 - RNA, 19 nt, Artificial Sequence
  Description of Artificial Sequence: Synthetic oligonucleotide
  Antisense Strand to SEQ ID NO: 362061
acccuuagagcuuuagggc

SEQ ID NO: 362063 - RNA, 19 nt, Artificial Sequence
  Description of Artificial Sequence: Synthetic oligonucleotide
  Sense Strand Starting at position 552 of SEQ ID NO: 317931
ugcaguuauugaccuagaa

SEQ ID NO: 362064 - RNA, 19 nt, Artificial Sequence
  Description of Artificial Sequence: Synthetic oligonucleotide
  Antisense Strand to SEQ ID NO: 362063
uucuaggucaauaacugca

SEQ ID NO: 362065 - RNA, 19 nt, Artificial Sequence
  Description of Artificial Sequence: Synthetic oligonucleotide
  Sense Strand Starting at position 552 of SEQ ID NO: 317977
acagaaauggcccagcuuu

SEQ ID NO: 362066 - RNA, 19 nt, Artificial Sequence
  Description of Artificial Sequence: Synthetic oligonucleotide
  Antisense Strand to SEQ ID NO: 362065
aaagcugggccauuucugu

SEQ ID NO: 362067 - RNA, 19 nt, Artificial Sequence
  Description of Artificial Sequence: Synthetic oligonucleotide
  Sense Strand Starting at position 552 of SEQ ID NO: 318297
cuaauaagguuaucaaagu

SEQ ID NO: 362068 - RNA, 19 nt, Artificial Sequence
  Description of Artificial Sequence: Synthetic oligonucleotide
  Antisense Strand to SEQ ID NO: 362067
acuuugauaaccuuauuag

SEQ ID NO: 362069 - RNA, 19 nt, Artificial Sequence
  Description of Artificial Sequence: Synthetic oligonucleotide
  Sense Strand Starting at position 552 of SEQ ID NO: 318399
agggcagcccacugagaau

SEQ ID NO: 362070 - RNA, 19 nt, Artificial Sequence
  Description of Artificial Sequence: Synthetic oligonucleotide
  Antisense Strand to SEQ ID NO: 362069
auucucagugggcugcccu

SEQ ID NO: 362071 - RNA, 19 nt, Artificial Sequence
  Description of Artificial Sequence: Synthetic oligonucleotide
  Sense Strand Starting at position 552 of SEQ ID NO: 318632
gucacaguaguguaagaua

SEQ ID NO: 362072 - RNA, 19 nt, Artificial Sequence
  Description of Artificial Sequence: Synthetic oligonucleotide
  Antisense Strand to SEQ ID NO: 362071
uaucuuacacuacugugac

SEQ ID NO: 362073 - RNA, 19 nt, Artificial Sequence
  Description of Artificial Sequence: Synthetic oligonucleotide
  Sense Strand Starting at position 552 of SEQ ID NO: 318637
aguaguguaagauagaugu

SEQ ID NO: 362074 - RNA, 19 nt, Artificial Sequence
  Description of Artificial Sequence: Synthetic oligonucleotide
  Antisense Strand to SEQ ID NO: 362073
acaucuaucuuacacuacu

SEQ ID NO: 362075 - RNA, 19 nt, Artificial Sequence
  Description of Artificial Sequence: Synthetic oligonucleotide
  Sense Strand Starting at position 552 of SEQ ID NO: 318643
guaagauagauguauggcu

SEQ ID NO: 362076 - RNA, 19 nt, Artificial Sequence
  Description of Artificial Sequence: Synthetic oligonucleotide
  Antisense Strand to SEQ ID NO: 362075
agccauacaucuaucuuac

SEQ ID NO: 362077 - RNA, 19 nt, Artificial Sequence
  Description of Artificial Sequence: Synthetic oligonucleotide
  Sense Strand Starting at position 552 of SEQ ID NO: 318645
aagauagauguauggcuuu

SEQ ID NO: 362078 - RNA, 19 nt, Artificial Sequence
  Description of Artificial Sequence: Synthetic oligonucleotide
  Antisense Strand to SEQ ID NO: 362077
aaagccauacaucuaucuu

SEQ ID NO: 362079 - RNA, 19 nt, Artificial Sequence
  Description of Artificial Sequence: Synthetic oligonucleotide
  Sense Strand Starting at position 552 of SEQ ID NO: 318648
auagauguauggcuuuaua

SEQ ID NO: 362080 - RNA, 19 nt, Artificial Sequence
  Description of Artificial Sequence: Synthetic oligonucleotide
  Antisense Strand to SEQ ID NO: 362079
uauaaagccauacaucuau

SEQ ID NO: 362081 - RNA, 19 nt, Artificial Sequence
  Description of Artificial Sequence: Synthetic oligonucleotide
  Sense Strand Starting at position 552 of SEQ ID NO: 318651
gauguauggcuuuauaaga

SEQ ID NO: 362082 - RNA, 19 nt, Artificial Sequence
  Description of Artificial Sequence: Synthetic oligonucleotide
  Antisense Strand to SEQ ID NO: 362081
ucuuauaaagccauacauc

SEQ ID NO: 362083 - RNA, 19 nt, Artificial Sequence
  Description of Artificial Sequence: Synthetic oligonucleotide
  Sense Strand Starting at position 552 of SEQ ID NO: 318851
uacguaacacaguaugaaa

SEQ ID NO: 362084 - RNA, 19 nt, Artificial Sequence
  Description of Artificial Sequence: Synthetic oligonucleotide
  Antisense Strand to SEQ ID NO: 362083
uuucauacuguguuacgua

SEQ ID NO: 362085 - RNA, 19 nt, Artificial Sequence
  Description of Artificial Sequence: Synthetic oligonucleotide
  Sense Strand Starting at position 552 of SEQ ID NO: 318853
cguaacacaguaugaaaua

SEQ ID NO: 362086 - RNA, 19 nt, Artificial Sequence
  Description of Artificial Sequence: Synthetic oligonucleotide
  Antisense Strand to SEQ ID NO: 362085
uauuucauacuguguuacg

SEQ ID NO: 362087 - RNA, 19 nt, Artificial Sequence
  Description of Artificial Sequence: Synthetic oligonucleotide
  Sense Strand Starting at position 552 of SEQ ID NO: 318862
guaugaaauagucaaacgu

SEQ ID NO: 362088 - RNA, 19 nt, Artificial Sequence
  Description of Artificial Sequence: Synthetic oligonucleotide
  Antisense Strand to SEQ ID NO: 362087
acguuugacuauuucauac

SEQ ID NO: 362089 - RNA, 19 nt, Artificial Sequence
  Description of Artificial Sequence: Synthetic oligonucleotide
  Sense Strand Starting at position 552 of SEQ ID NO: 318957
gccauuuccuucccaggua

SEQ ID NO: 362090 - RNA, 19 nt, Artificial Sequence
  Description of Artificial Sequence: Synthetic oligonucleotide
  Antisense Strand to SEQ ID NO: 362089
uaccugggaaggaaauggc

SEQ ID NO: 362091 - RNA, 19 nt, Artificial Sequence
  Description of Artificial Sequence: Synthetic oligonucleotide
  Sense Strand Starting at position 552 of SEQ ID NO: 318994
gccugaaagcaguauacag

SEQ ID NO: 362092 - RNA, 19 nt, Artificial Sequence
  Description of Artificial Sequence: Synthetic oligonucleotide
  Antisense Strand to SEQ ID NO: 362091
cuguauacugcuuucaggc

SEQ ID NO: 362093 - RNA, 19 nt, Artificial Sequence
  Description of Artificial Sequence: Synthetic oligonucleotide
  Sense Strand Starting at position 552 of SEQ ID NO: 319072
guaauuguggcacaaagag

SEQ ID NO: 362094 - RNA, 19 nt, Artificial Sequence
  Description of Artificial Sequence: Synthetic oligonucleotide
  Antisense Strand to SEQ ID NO: 362093
cucuuugugccacaauuac

SEQ ID NO: 362095 - RNA, 19 nt, Artificial Sequence
  Description of Artificial Sequence: Synthetic oligonucleotide
  Sense Strand Starting at position 552 of SEQ ID NO: 319168
uuguaaagcccagggauua

SEQ ID NO: 362096 - RNA, 19 nt, Artificial Sequence
  Description of Artificial Sequence: Synthetic oligonucleotide
  Antisense Strand to SEQ ID NO: 362095
uaaucccugggcuuuacaa

SEQ ID NO: 362097 - RNA, 19 nt, Artificial Sequence
  Description of Artificial Sequence: Synthetic oligonucleotide
  Sense Strand Starting at position 552 of SEQ ID NO: 319169
uguaaagcccagggauuau

SEQ ID NO: 362098 - RNA, 19 nt, Artificial Sequence
  Description of Artificial Sequence: Synthetic oligonucleotide
  Antisense Strand to SEQ ID NO: 362097
auaaucccugggcuuuaca

SEQ ID NO: 362099 - RNA, 19 nt, Artificial Sequence
  Description of Artificial Sequence: Synthetic oligonucleotide
  Sense Strand Starting at position 553 of SEQ ID NO: 315248
cagguauuauaugcuaguu

SEQ ID NO: 362100 - RNA, 19 nt, Artificial Sequence
  Description of Artificial Sequence: Synthetic oligonucleotide
  Antisense Strand to SEQ ID NO: 362099
aacuagcauauaauaccug

SEQ ID NO: 362101 - RNA, 19 nt, Artificial Sequence
  Description of Artificial Sequence: Synthetic oligonucleotide
  Sense Strand Starting at position 553 of SEQ ID NO: 315656
ucaggugauccgcauaguu

SEQ ID NO: 362102 - RNA, 19 nt, Artificial Sequence
  Description of Artificial Sequence: Synthetic oligonucleotide
  Antisense Strand to SEQ ID NO: 362101
aacuaugcggaucaccuga

SEQ ID NO: 362103 - RNA, 19 nt, Artificial Sequence
  Description of Artificial Sequence: Synthetic oligonucleotide
  Sense Strand Starting at position 553 of SEQ ID NO: 315658
aggugauccgcauaguuga

SEQ ID NO: 362104 - RNA, 19 nt, Artificial Sequence
  Description of Artificial Sequence: Synthetic oligonucleotide
  Antisense Strand to SEQ ID NO: 362103
ucaacuaugcggaucaccu

SEQ ID NO: 362105 - RNA, 19 nt, Artificial Sequence
  Description of Artificial Sequence: Synthetic oligonucleotide
  Sense Strand Starting at position 553 of SEQ ID NO: 315753
ccuuauaucuucuugguau

SEQ ID NO: 362106 - RNA, 19 nt, Artificial Sequence
  Description of Artificial Sequence: Synthetic oligonucleotide
  Antisense Strand to SEQ ID NO: 362105
auaccaagaagauauaagg

SEQ ID NO: 362107 - RNA, 19 nt, Artificial Sequence
  Description of Artificial Sequence: Synthetic oligonucleotide
  Sense Strand Starting at position 553 of SEQ ID NO: 315873
cgauauugagucuacgcuu

SEQ ID NO: 362108 - RNA, 19 nt, Artificial Sequence
  Description of Artificial Sequence: Synthetic oligonucleotide
  Antisense Strand to SEQ ID NO: 362107
aagcguagacucaauaucg

SEQ ID NO: 362109 - RNA, 19 nt, Artificial Sequence
  Description of Artificial Sequence: Synthetic oligonucleotide
  Sense Strand Starting at position 553 of SEQ ID NO: 315876
uauugagucuacgcuuaug

SEQ ID NO: 362110 - RNA, 19 nt, Artificial Sequence
  Description of Artificial Sequence: Synthetic oligonucleotide
  Antisense Strand to SEQ ID NO: 362109
cauaagcguagacucaaua

SEQ ID NO: 362111 - RNA, 19 nt, Artificial Sequence
  Description of Artificial Sequence: Synthetic oligonucleotide
  Sense Strand Starting at position 553 of SEQ ID NO: 315879
ugagucuacgcuuaugcaa

SEQ ID NO: 362112 - RNA, 19 nt, Artificial Sequence
  Description of Artificial Sequence: Synthetic oligonucleotide
  Antisense Strand to SEQ ID NO: 362111
uugcauaagcguagacuca

SEQ ID NO: 362113 - RNA, 19 nt, Artificial Sequence
  Description of Artificial Sequence: Synthetic oligonucleotide
  Sense Strand Starting at position 553 of SEQ ID NO: 315991
caugcucuuccagggaaga

SEQ ID NO: 362114 - RNA, 19 nt, Artificial Sequence
  Description of Artificial Sequence: Synthetic oligonucleotide
  Antisense Strand to SEQ ID NO: 362113
ucuucccuggaagagcaug

SEQ ID NO: 362115 - RNA, 19 nt, Artificial Sequence
  Description of Artificial Sequence: Synthetic oligonucleotide
  Sense Strand Starting at position 553 of SEQ ID NO: 315992
augcucuuccagggaagaa

SEQ ID NO: 362116 - RNA, 19 nt, Artificial Sequence
  Description of Artificial Sequence: Synthetic oligonucleotide
  Antisense Strand to SEQ ID NO: 362115
uucuucccuggaagagcau

SEQ ID NO: 362117 - RNA, 19 nt, Artificial Sequence
  Description of Artificial Sequence: Synthetic oligonucleotide
  Sense Strand Starting at position 553 of SEQ ID NO: 316114
ggaggcuaguaguucucaa

SEQ ID NO: 362118 - RNA, 19 nt, Artificial Sequence
  Description of Artificial Sequence: Synthetic oligonucleotide
  Antisense Strand to SEQ ID NO: 362117
uugagaacuacuagccucc

SEQ ID NO: 362119 - RNA, 19 nt, Artificial Sequence
  Description of Artificial Sequence: Synthetic oligonucleotide
  Sense Strand Starting at position 553 of SEQ ID NO: 316121
aguaguucucaaugucaag

SEQ ID NO: 362120 - RNA, 19 nt, Artificial Sequence
  Description of Artificial Sequence: Synthetic oligonucleotide
  Antisense Strand to SEQ ID NO: 362119
cuugacauugagaacuacu

SEQ ID NO: 362121 - RNA, 19 nt, Artificial Sequence
  Description of Artificial Sequence: Synthetic oligonucleotide
  Sense Strand Starting at position 553 of SEQ ID NO: 316141
acuuaagaguuguugcaug

SEQ ID NO: 362122 - RNA, 19 nt, Artificial Sequence
  Description of Artificial Sequence: Synthetic oligonucleotide
  Antisense Strand to SEQ ID NO: 362121
caugcaacaacucuuaagu

SEQ ID NO: 362123 - RNA, 19 nt, Artificial Sequence
  Description of Artificial Sequence: Synthetic oligonucleotide
  Sense Strand Starting at position 553 of SEQ ID NO: 316146
agaguuguugcaugaauac

SEQ ID NO: 362124 - RNA, 19 nt, Artificial Sequence
  Description of Artificial Sequence: Synthetic oligonucleotide
  Antisense Strand to SEQ ID NO: 362123
guauucaugcaacaacucu

SEQ ID NO: 362125 - RNA, 19 nt, Artificial Sequence
  Description of Artificial Sequence: Synthetic oligonucleotide
  Sense Strand Starting at position 553 of SEQ ID NO: 316182
gccaguggcucuuuaacaa

SEQ ID NO: 362126 - RNA, 19 nt, Artificial Sequence
  Description of Artificial Sequence: Synthetic oligonucleotide
  Antisense Strand to SEQ ID NO: 362125
uuguuaaagagccacuggc

SEQ ID NO: 362127 - RNA, 19 nt, Artificial Sequence
  Description of Artificial Sequence: Synthetic oligonucleotide
  Sense Strand Starting at position 553 of SEQ ID NO: 316231
ugauuauaaaguuguagga

SEQ ID NO: 362128 - RNA, 19 nt, Artificial Sequence
  Description of Artificial Sequence: Synthetic oligonucleotide
  Antisense Strand to SEQ ID NO: 362127
uccuacaacuuuauaauca

SEQ ID NO: 362129 - RNA, 19 nt, Artificial Sequence
  Description of Artificial Sequence: Synthetic oligonucleotide
  Sense Strand Starting at position 553 of SEQ ID NO: 316288
uacaaugucaggcgaguua

SEQ ID NO: 362130 - RNA, 19 nt, Artificial Sequence
  Description of Artificial Sequence: Synthetic oligonucleotide
  Antisense Strand to SEQ ID NO: 362129
uaacucgccugacauugua

SEQ ID NO: 362131 - RNA, 19 nt, Artificial Sequence
  Description of Artificial Sequence: Synthetic oligonucleotide
  Sense Strand Starting at position 553 of SEQ ID NO: 316421
augccuuacccagggcaau

SEQ ID NO: 362132 - RNA, 19 nt, Artificial Sequence
  Description of Artificial Sequence: Synthetic oligonucleotide
  Antisense Strand to SEQ ID NO: 362131
auugcccuggguaaggcau

SEQ ID NO: 362133 - RNA, 19 nt, Artificial Sequence
  Description of Artificial Sequence: Synthetic oligonucleotide
  Sense Strand Starting at position 553 of SEQ ID NO: 316612
ucacaugucgacuaagcua

SEQ ID NO: 362134 - RNA, 19 nt, Artificial Sequence
  Description of Artificial Sequence: Synthetic oligonucleotide
  Antisense Strand to SEQ ID NO: 362133
uagcuuagucgacauguga

SEQ ID NO: 362135 - RNA, 19 nt, Artificial Sequence
  Description of Artificial Sequence: Synthetic oligonucleotide
  Sense Strand Starting at position 553 of SEQ ID NO: 316623
cuaagcuaucacgaaucca

SEQ ID NO: 362136 - RNA, 19 nt, Artificial Sequence
  Description of Artificial Sequence: Synthetic oligonucleotide
  Antisense Strand to SEQ ID NO: 362135
uggauucgugauagcuuag

SEQ ID NO: 362137 - RNA, 19 nt, Artificial Sequence
  Description of Artificial Sequence: Synthetic oligonucleotide
  Sense Strand Starting at position 553 of SEQ ID NO: 316787
uccagugauggcuacaacu

SEQ ID NO: 362138 - RNA, 19 nt, Artificial Sequence
  Description of Artificial Sequence: Synthetic oligonucleotide
  Antisense Strand to SEQ ID NO: 362137
aguuguagccaucacugga

SEQ ID NO: 362139 - RNA, 19 nt, Artificial Sequence
  Description of Artificial Sequence: Synthetic oligonucleotide
  Sense Strand Starting at position 553 of SEQ ID NO: 317438
uggacuguccugcagguaa

SEQ ID NO: 362140 - RNA, 19 nt, Artificial Sequence
  Description of Artificial Sequence: Synthetic oligonucleotide
  Antisense Strand to SEQ ID NO: 362139
uuaccugcaggacagucca

SEQ ID NO: 362141 - RNA, 19 nt, Artificial Sequence
  Description of Artificial Sequence: Synthetic oligonucleotide
  Sense Strand Starting at position 553 of SEQ ID NO: 317442
cuguccugcagguaaagua

SEQ ID NO: 362142 - RNA, 19 nt, Artificial Sequence
  Description of Artificial Sequence: Synthetic oligonucleotide
  Antisense Strand to SEQ ID NO: 362141
uacuuuaccugcaggacag

SEQ ID NO: 362143 - RNA, 19 nt, Artificial Sequence
  Description of Artificial Sequence: Synthetic oligonucleotide
  Sense Strand Starting at position 553 of SEQ ID NO: 317477
gguugucacgcucuuacuu

SEQ ID NO: 362144 - RNA, 19 nt, Artificial Sequence
  Description of Artificial Sequence: Synthetic oligonucleotide
  Antisense Strand to SEQ ID NO: 362143
aaguaagagcgugacaacc

SEQ ID NO: 362145 - RNA, 19 nt, Artificial Sequence
  Description of Artificial Sequence: Synthetic oligonucleotide
  Sense Strand Starting at position 553 of SEQ ID NO: 317719
ccuagucucuaucuggaaa

SEQ ID NO: 362146 - RNA, 19 nt, Artificial Sequence
  Description of Artificial Sequence: Synthetic oligonucleotide
  Antisense Strand to SEQ ID NO: 362145
uuuccagauagagacuagg

SEQ ID NO: 362147 - RNA, 19 nt, Artificial Sequence
  Description of Artificial Sequence: Synthetic oligonucleotide
  Sense Strand Starting at position 553 of SEQ ID NO: 318033
gcgagucgccaguuagucu

SEQ ID NO: 362148 - RNA, 19 nt, Artificial Sequence
  Description of Artificial Sequence: Synthetic oligonucleotide
  Antisense Strand to SEQ ID NO: 362147
agacuaacuggcgacucgc

SEQ ID NO: 362149 - RNA, 19 nt, Artificial Sequence
  Description of Artificial Sequence: Synthetic oligonucleotide
  Sense Strand Starting at position 553 of SEQ ID NO: 318179
ggaguuccuuaauuagaaa

SEQ ID NO: 362150 - RNA, 19 nt, Artificial Sequence
  Description of Artificial Sequence: Synthetic oligonucleotide
  Antisense Strand to SEQ ID NO: 362149
uuucuaauuaaggaacucc

SEQ ID NO: 362151 - RNA, 19 nt, Artificial Sequence
  Description of Artificial Sequence: Synthetic oligonucleotide
  Sense Strand Starting at position 553 of SEQ ID NO: 318191
uuagaaaugcguuagcgaa

SEQ ID NO: 362152 - RNA, 19 nt, Artificial Sequence
  Description of Artificial Sequence: Synthetic oligonucleotide
  Antisense Strand to SEQ ID NO: 362151
uucgcuaacgcauuucuaa

SEQ ID NO: 362153 - RNA, 19 nt, Artificial Sequence
  Description of Artificial Sequence: Synthetic oligonucleotide
  Sense Strand Starting at position 553 of SEQ ID NO: 318193
agaaaugcguuagcgaaua

SEQ ID NO: 362154 - RNA, 19 nt, Artificial Sequence
  Description of Artificial Sequence: Synthetic oligonucleotide
  Antisense Strand to SEQ ID NO: 362153
uauucgcuaacgcauuucu

SEQ ID NO: 362155 - RNA, 19 nt, Artificial Sequence
  Description of Artificial Sequence: Synthetic oligonucleotide
  Sense Strand Starting at position 553 of SEQ ID NO: 318206
cgaauauuauacgcuuaua

SEQ ID NO: 362156 - RNA, 19 nt, Artificial Sequence
  Description of Artificial Sequence: Synthetic oligonucleotide
  Antisense Strand to SEQ ID NO: 362155
uauaagcguauaauauucg

SEQ ID NO: 362157 - RNA, 19 nt, Artificial Sequence
  Description of Artificial Sequence: Synthetic oligonucleotide
  Sense Strand Starting at position 553 of SEQ ID NO: 318761
ggaguugacaucugaaggu

SEQ ID NO: 362158 - RNA, 19 nt, Artificial Sequence
  Description of Artificial Sequence: Synthetic oligonucleotide
  Antisense Strand to SEQ ID NO: 362157
accuucagaugucaacucc

SEQ ID NO: 362159 - RNA, 19 nt, Artificial Sequence
  Description of Artificial Sequence: Synthetic oligonucleotide
  Sense Strand Starting at position 553 of SEQ ID NO: 318829
auaggauucccgugcaauu

SEQ ID NO: 362160 - RNA, 19 nt, Artificial Sequence
  Description of Artificial Sequence: Synthetic oligonucleotide
  Antisense Strand to SEQ ID NO: 362159
aauugcacgggaauccuau

SEQ ID NO: 362161 - RNA, 19 nt, Artificial Sequence
  Description of Artificial Sequence: Synthetic oligonucleotide
  Sense Strand Starting at position 553 of SEQ ID NO: 318905
uuguuugugaccuguggaa

SEQ ID NO: 362162 - RNA, 19 nt, Artificial Sequence
  Description of Artificial Sequence: Synthetic oligonucleotide
  Antisense Strand to SEQ ID NO: 362161
uuccacaggucacaaacaa

SEQ ID NO: 362163 - RNA, 19 nt, Artificial Sequence
  Description of Artificial Sequence: Synthetic oligonucleotide
  Sense Strand Starting at position 553 of SEQ ID NO: 318907
guuugugaccuguggaaug

SEQ ID NO: 362164 - RNA, 19 nt, Artificial Sequence
  Description of Artificial Sequence: Synthetic oligonucleotide
  Antisense Strand to SEQ ID NO: 362163
cauuccacaggucacaaac

SEQ ID NO: 362165 - RNA, 19 nt, Artificial Sequence
  Description of Artificial Sequence: Synthetic oligonucleotide
  Sense Strand Starting at position 553 of SEQ ID NO: 318919
uggaaugguacaggucaca

SEQ ID NO: 362166 - RNA, 19 nt, Artificial Sequence
  Description of Artificial Sequence: Synthetic oligonucleotide
  Antisense Strand to SEQ ID NO: 362165
ugugaccuguaccauucca

SEQ ID NO: 362167 - RNA, 19 nt, Artificial Sequence
  Description of Artificial Sequence: Synthetic oligonucleotide
  Sense Strand Starting at position 553 of SEQ ID NO: 318974
aaucgagacggucaaucaa

SEQ ID NO: 362168 - RNA, 19 nt, Artificial Sequence
  Description of Artificial Sequence: Synthetic oligonucleotide
  Antisense Strand to SEQ ID NO: 362167
uugauugaccgucucgauu

SEQ ID NO: 362169 - RNA, 19 nt, Artificial Sequence
  Description of Artificial Sequence: Synthetic oligonucleotide
  Sense Strand Starting at position 553 of SEQ ID NO: 319029
augacuaugugagcaugau

SEQ ID NO: 362170 - RNA, 19 nt, Artificial Sequence
  Description of Artificial Sequence: Synthetic oligonucleotide
  Antisense Strand to SEQ ID NO: 362169
aucaugcucacauagucau

SEQ ID NO: 362171 - RNA, 19 nt, Artificial Sequence
  Description of Artificial Sequence: Synthetic oligonucleotide
  Sense Strand Starting at position 553 of SEQ ID NO: 319030
ugacuaugugagcaugaug

SEQ ID NO: 362172 - RNA, 19 nt, Artificial Sequence
  Description of Artificial Sequence: Synthetic oligonucleotide
  Antisense Strand to SEQ ID NO: 362171
caucaugcucacauaguca

SEQ ID NO: 362173 - RNA, 19 nt, Artificial Sequence
  Description of Artificial Sequence: Synthetic oligonucleotide
  Sense Strand Starting at position 553 of SEQ ID NO: 319084
uuagauugccguuaaagag

SEQ ID NO: 362174 - RNA, 19 nt, Artificial Sequence
  Description of Artificial Sequence: Synthetic oligonucleotide
  Antisense Strand to SEQ ID NO: 362173
cucuuuaacggcaaucuaa

SEQ ID NO: 362175 - RNA, 19 nt, Artificial Sequence
  Description of Artificial Sequence: Synthetic oligonucleotide
  Sense Strand Starting at position 553 of SEQ ID NO: 319144
ccaggaguugggugacauu

SEQ ID NO: 362176 - RNA, 19 nt, Artificial Sequence
  Description of Artificial Sequence: Synthetic oligonucleotide
  Antisense Strand to SEQ ID NO: 362175
aaugucacccaacuccugg

SEQ ID NO: 362177 - RNA, 19 nt, Artificial Sequence
  Description of Artificial Sequence: Synthetic oligonucleotide
  Sense Strand Starting at position 553 of SEQ ID NO: 319161
uuauuaaacccucguggca

SEQ ID NO: 362178 - RNA, 19 nt, Artificial Sequence
  Description of Artificial Sequence: Synthetic oligonucleotide
  Antisense Strand to SEQ ID NO: 362177
ugccacgaggguuuaauaa

SEQ ID NO: 362179 - RNA, 19 nt, Artificial Sequence
  Description of Artificial Sequence: Synthetic oligonucleotide
  Sense Strand Starting at position 554 of SEQ ID NO: 315747
gguuuaacagcugaaacua

SEQ ID NO: 362180 - RNA, 19 nt, Artificial Sequence
  Description of Artificial Sequence: Synthetic oligonucleotide
  Antisense Strand to SEQ ID NO: 362179
uaguuucagcuguuaaacc

SEQ ID NO: 362181 - RNA, 19 nt, Artificial Sequence
  Description of Artificial Sequence: Synthetic oligonucleotide
  Sense Strand Starting at position 554 of SEQ ID NO: 315891
ugcauagugcuggaugaga

SEQ ID NO: 362182 - RNA, 19 nt, Artificial Sequence
  Description of Artificial Sequence: Synthetic oligonucleotide
  Antisense Strand to SEQ ID NO: 362181
ucucauccagcacuaugca

SEQ ID NO: 362183 - RNA, 19 nt, Artificial Sequence
  Description of Artificial Sequence: Synthetic oligonucleotide
  Sense Strand Starting at position 554 of SEQ ID NO: 315893
cauagugcuggaugagaua

SEQ ID NO: 362184 - RNA, 19 nt, Artificial Sequence
  Description of Artificial Sequence: Synthetic oligonucleotide
  Antisense Strand to SEQ ID NO: 362183
uaucucauccagcacuaug

SEQ ID NO: 362185 - RNA, 19 nt, Artificial Sequence
  Description of Artificial Sequence: Synthetic oligonucleotide
  Sense Strand Starting at position 554 of SEQ ID NO: 316024
gggugauuacccuagcaga

SEQ ID NO: 362186 - RNA, 19 nt, Artificial Sequence
  Description of Artificial Sequence: Synthetic oligonucleotide
  Antisense Strand to SEQ ID NO: 362185
ucugcuaggguaaucaccc

SEQ ID NO: 362187 - RNA, 19 nt, Artificial Sequence
  Description of Artificial Sequence: Synthetic oligonucleotide
  Sense Strand Starting at position 554 of SEQ ID NO: 316037
agcagaauuguguaccuaa

SEQ ID NO: 362188 - RNA, 19 nt, Artificial Sequence
  Description of Artificial Sequence: Synthetic oligonucleotide
  Antisense Strand to SEQ ID NO: 362187
uuagguacacaauucugcu

SEQ ID NO: 362189 - RNA, 19 nt, Artificial Sequence
  Description of Artificial Sequence: Synthetic oligonucleotide
  Sense Strand Starting at position 554 of SEQ ID NO: 316093
ucuugcuacgucuggauuu

SEQ ID NO: 362190 - RNA, 19 nt, Artificial Sequence
  Description of Artificial Sequence: Synthetic oligonucleotide
  Antisense Strand to SEQ ID NO: 362189
aaauccagacguagcaaga

SEQ ID NO: 362191 - RNA, 19 nt, Artificial Sequence
  Description of Artificial Sequence: Synthetic oligonucleotide
  Sense Strand Starting at position 554 of SEQ ID NO: 316121
cagauuauuccugguugag

SEQ ID NO: 362192 - RNA, 19 nt, Artificial Sequence
  Description of Artificial Sequence: Synthetic oligonucleotide
  Antisense Strand to SEQ ID NO: 362191
cucaaccaggaauaaucug

SEQ ID NO: 362193 - RNA, 19 nt, Artificial Sequence
  Description of Artificial Sequence: Synthetic oligonucleotide
  Sense Strand Starting at position 554 of SEQ ID NO: 316205
gucuuaucugagcaauaau

SEQ ID NO: 362194 - RNA, 19 nt, Artificial Sequence
  Description of Artificial Sequence: Synthetic oligonucleotide
  Antisense Strand to SEQ ID NO: 362193
auuauugcucagauaagac

SEQ ID NO: 362195 - RNA, 19 nt, Artificial Sequence
  Description of Artificial Sequence: Synthetic oligonucleotide
  Sense Strand Starting at position 554 of SEQ ID NO: 316249
agacaaugcgccuaauuau

SEQ ID NO: 362196 - RNA, 19 nt, Artificial Sequence
  Description of Artificial Sequence: Synthetic oligonucleotide
  Antisense Strand to SEQ ID NO: 362195
auaauuaggcgcauugucu

SEQ ID NO: 362197 - RNA, 19 nt, Artificial Sequence
  Description of Artificial Sequence: Synthetic oligonucleotide
  Sense Strand Starting at position 554 of SEQ ID NO: 316260
cuaauuauucuaggauguu

SEQ ID NO: 362198 - RNA, 19 nt, Artificial Sequence
  Description of Artificial Sequence: Synthetic oligonucleotide
  Antisense Strand to SEQ ID NO: 362197
aacauccuagaauaauuag

SEQ ID NO: 362199 - RNA, 19 nt, Artificial Sequence
  Description of Artificial Sequence: Synthetic oligonucleotide
  Sense Strand Starting at position 554 of SEQ ID NO: 316266
auucuaggauguuccaaga

SEQ ID NO: 362200 - RNA, 19 nt, Artificial Sequence
  Description of Artificial Sequence: Synthetic oligonucleotide
  Antisense Strand to SEQ ID NO: 362199
ucuuggaacauccuagaau

SEQ ID NO: 362201 - RNA, 19 nt, Artificial Sequence
  Description of Artificial Sequence: Synthetic oligonucleotide
  Sense Strand Starting at position 554 of SEQ ID NO: 316352
aucuuaagagucugcacaa

SEQ ID NO: 362202 - RNA, 19 nt, Artificial Sequence
  Description of Artificial Sequence: Synthetic oligonucleotide
  Antisense Strand to SEQ ID NO: 362201
uugugcagacucuuaagau

SEQ ID NO: 362203 - RNA, 19 nt, Artificial Sequence
  Description of Artificial Sequence: Synthetic oligonucleotide
  Sense Strand Starting at position 554 of SEQ ID NO: 316353
ucuuaagagucugcacaaa

SEQ ID NO: 362204 - RNA, 19 nt, Artificial Sequence
  Description of Artificial Sequence: Synthetic oligonucleotide
  Antisense Strand to SEQ ID NO: 362203
uuugugcagacucuuaaga

SEQ ID NO: 362205 - RNA, 19 nt, Artificial Sequence
  Description of Artificial Sequence: Synthetic oligonucleotide
  Sense Strand Starting at position 554 of SEQ ID NO: 316460
uuauuauugcugucgccua

SEQ ID NO: 362206 - RNA, 19 nt, Artificial Sequence
  Description of Artificial Sequence: Synthetic oligonucleotide
  Antisense Strand to SEQ ID NO: 362205
uaggcgacagcaauaauaa

SEQ ID NO: 362207 - RNA, 19 nt, Artificial Sequence
  Description of Artificial Sequence: Synthetic oligonucleotide
  Sense Strand Starting at position 554 of SEQ ID NO: 316617
ccagacguccaugacauua

SEQ ID NO: 362208 - RNA, 19 nt, Artificial Sequence
  Description of Artificial Sequence: Synthetic oligonucleotide
  Antisense Strand to SEQ ID NO: 362207
uaaugucauggacgucugg

SEQ ID NO: 362209 - RNA, 19 nt, Artificial Sequence
  Description of Artificial Sequence: Synthetic oligonucleotide
  Sense Strand Starting at position 554 of SEQ ID NO: 316713
uauucuuuggcuugaaagg

SEQ ID NO: 362210 - RNA, 19 nt, Artificial Sequence
  Description of Artificial Sequence: Synthetic oligonucleotide
  Antisense Strand to SEQ ID NO: 362209
ccuuucaagccaaagaaua

SEQ ID NO: 362211 - RNA, 19 nt, Artificial Sequence
  Description of Artificial Sequence: Synthetic oligonucleotide
  Sense Strand Starting at position 554 of SEQ ID NO: 316714
auucuuuggcuugaaaggu

SEQ ID NO: 362212 - RNA, 19 nt, Artificial Sequence
  Description of Artificial Sequence: Synthetic oligonucleotide
  Antisense Strand to SEQ ID NO: 362211
accuuucaagccaaagaau

SEQ ID NO: 362213 - RNA, 19 nt, Artificial Sequence
  Description of Artificial Sequence: Synthetic oligonucleotide
  Sense Strand Starting at position 554 of SEQ ID NO: 316740
gacaguagacauggucaaa

SEQ ID NO: 362214 - RNA, 19 nt, Artificial Sequence
  Description of Artificial Sequence: Synthetic oligonucleotide
  Antisense Strand to SEQ ID NO: 362213
uuugaccaugucuacuguc

SEQ ID NO: 362215 - RNA, 19 nt, Artificial Sequence
  Description of Artificial Sequence: Synthetic oligonucleotide
  Sense Strand Starting at position 554 of SEQ ID NO: 316778
gugugaacucuugaaagca

SEQ ID NO: 362216 - RNA, 19 nt, Artificial Sequence
  Description of Artificial Sequence: Synthetic oligonucleotide
  Antisense Strand to SEQ ID NO: 362215
ugcuuucaagaguucacac

SEQ ID NO: 362217 - RNA, 19 nt, Artificial Sequence
  Description of Artificial Sequence: Synthetic oligonucleotide
  Sense Strand Starting at position 554 of SEQ ID NO: 317139
aggauacuuugagcagaau

SEQ ID NO: 362218 - RNA, 19 nt, Artificial Sequence
  Description of Artificial Sequence: Synthetic oligonucleotide
  Antisense Strand to SEQ ID NO: 362217
auucugcucaaaguauccu

SEQ ID NO: 362219 - RNA, 19 nt, Artificial Sequence
  Description of Artificial Sequence: Synthetic oligonucleotide
  Sense Strand Starting at position 554 of SEQ ID NO: 317151
gcagaauuagucuaaaugu

SEQ ID NO: 362220 - RNA, 19 nt, Artificial Sequence
  Description of Artificial Sequence: Synthetic oligonucleotide
  Antisense Strand to SEQ ID NO: 362219
acauuuagacuaauucugc

SEQ ID NO: 362221 - RNA, 19 nt, Artificial Sequence
  Description of Artificial Sequence: Synthetic oligonucleotide
  Sense Strand Starting at position 554 of SEQ ID NO: 317194
gucauaucuccuugacaca

SEQ ID NO: 362222 - RNA, 19 nt, Artificial Sequence
  Description of Artificial Sequence: Synthetic oligonucleotide
  Antisense Strand to SEQ ID NO: 362221
ugugucaaggagauaugac

SEQ ID NO: 362223 - RNA, 19 nt, Artificial Sequence
  Description of Artificial Sequence: Synthetic oligonucleotide
  Sense Strand Starting at position 554 of SEQ ID NO: 317298
ggaucugacugcucagauu

SEQ ID NO: 362224 - RNA, 19 nt, Artificial Sequence
  Description of Artificial Sequence: Synthetic oligonucleotide
  Antisense Strand to SEQ ID NO: 362223
aaucugagcagucagaucc

SEQ ID NO: 362225 - RNA, 19 nt, Artificial Sequence
  Description of Artificial Sequence: Synthetic oligonucleotide
  Sense Strand Starting at position 554 of SEQ ID NO: 317335
cuuuaucaugaauguaaag

SEQ ID NO: 362226 - RNA, 19 nt, Artificial Sequence
  Description of Artificial Sequence: Synthetic oligonucleotide
  Antisense Strand to SEQ ID NO: 362225
cuuuacauucaugauaaag

SEQ ID NO: 362227 - RNA, 19 nt, Artificial Sequence
  Description of Artificial Sequence: Synthetic oligonucleotide
  Sense Strand Starting at position 554 of SEQ ID NO: 317381
gcuagaucacacuagcaaa

SEQ ID NO: 362228 - RNA, 19 nt, Artificial Sequence
  Description of Artificial Sequence: Synthetic oligonucleotide
  Antisense Strand to SEQ ID NO: 362227
uuugcuagugugaucuagc

SEQ ID NO: 362229 - RNA, 19 nt, Artificial Sequence
  Description of Artificial Sequence: Synthetic oligonucleotide
  Sense Strand Starting at position 554 of SEQ ID NO: 317397
aaagaaacaguuugguuua

SEQ ID NO: 362230 - RNA, 19 nt, Artificial Sequence
  Description of Artificial Sequence: Synthetic oligonucleotide
  Antisense Strand to SEQ ID NO: 362229
uaaaccaaacuguuucuuu

SEQ ID NO: 362231 - RNA, 19 nt, Artificial Sequence
  Description of Artificial Sequence: Synthetic oligonucleotide
  Sense Strand Starting at position 554 of SEQ ID NO: 317647
gaggguugcagugaguuga

SEQ ID NO: 362232 - RNA, 19 nt, Artificial Sequence
  Description of Artificial Sequence: Synthetic oligonucleotide
  Antisense Strand to SEQ ID NO: 362231
ucaacucacugcaacccuc

SEQ ID NO: 362233 - RNA, 19 nt, Artificial Sequence
  Description of Artificial Sequence: Synthetic oligonucleotide
  Sense Strand Starting at position 554 of SEQ ID NO: 317788
auaguacuuaaguagagua

SEQ ID NO: 362234 - RNA, 19 nt, Artificial Sequence
  Description of Artificial Sequence: Synthetic oligonucleotide
  Antisense Strand to SEQ ID NO: 362233
uacucuacuuaaguacuau

SEQ ID NO: 362235 - RNA, 19 nt, Artificial Sequence
  Description of Artificial Sequence: Synthetic oligonucleotide
  Sense Strand Starting at position 554 of SEQ ID NO: 318052
agauaucuuuagucucaug

SEQ ID NO: 362236 - RNA, 19 nt, Artificial Sequence
  Description of Artificial Sequence: Synthetic oligonucleotide
  Antisense Strand to SEQ ID NO: 362235
caugagacuaaagauaucu

SEQ ID NO: 362237 - RNA, 19 nt, Artificial Sequence
  Description of Artificial Sequence: Synthetic oligonucleotide
  Sense Strand Starting at position 554 of SEQ ID NO: 318315
ccaggaguccucuaaaccu

SEQ ID NO: 362238 - RNA, 19 nt, Artificial Sequence
  Description of Artificial Sequence: Synthetic oligonucleotide
  Antisense Strand to SEQ ID NO: 362237
agguuuagaggacuccugg

SEQ ID NO: 362239 - RNA, 19 nt, Artificial Sequence
  Description of Artificial Sequence: Synthetic oligonucleotide
  Sense Strand Starting at position 554 of SEQ ID NO: 318325
ucuaaaccugccugagaca

SEQ ID NO: 362240 - RNA, 19 nt, Artificial Sequence
  Description of Artificial Sequence: Synthetic oligonucleotide
  Antisense Strand to SEQ ID NO: 362239
ugucucaggcagguuuaga

SEQ ID NO: 362241 - RNA, 19 nt, Artificial Sequence
  Description of Artificial Sequence: Synthetic oligonucleotide
  Sense Strand Starting at position 554 of SEQ ID NO: 318338
gagacagaucuacgcagaa

SEQ ID NO: 362242 - RNA, 19 nt, Artificial Sequence
  Description of Artificial Sequence: Synthetic oligonucleotide
  Antisense Strand to SEQ ID NO: 362241
uucugcguagaucugucuc

SEQ ID NO: 362243 - RNA, 19 nt, Artificial Sequence
  Description of Artificial Sequence: Synthetic oligonucleotide
  Sense Strand Starting at position 554 of SEQ ID NO: 318364
agguaaaucuggucaggua

SEQ ID NO: 362244 - RNA, 19 nt, Artificial Sequence
  Description of Artificial Sequence: Synthetic oligonucleotide
  Antisense Strand to SEQ ID NO: 362243
uaccugaccagauuuaccu

SEQ ID NO: 362245 - RNA, 19 nt, Artificial Sequence
  Description of Artificial Sequence: Synthetic oligonucleotide
  Sense Strand Starting at position 554 of SEQ ID NO: 318365
gguaaaucuggucagguaa

SEQ ID NO: 362246 - RNA, 19 nt, Artificial Sequence
  Description of Artificial Sequence: Synthetic oligonucleotide
  Antisense Strand to SEQ ID NO: 362245
uuaccugaccagauuuacc

SEQ ID NO: 362247 - RNA, 19 nt, Artificial Sequence
  Description of Artificial Sequence: Synthetic oligonucleotide
  Sense Strand Starting at position 554 of SEQ ID NO: 318473
acaaauauccaagguguga

SEQ ID NO: 362248 - RNA, 19 nt, Artificial Sequence
  Description of Artificial Sequence: Synthetic oligonucleotide
  Antisense Strand to SEQ ID NO: 362247
ucacaccuuggauauuugu

SEQ ID NO: 362249 - RNA, 19 nt, Artificial Sequence
  Description of Artificial Sequence: Synthetic oligonucleotide
  Sense Strand Starting at position 554 of SEQ ID NO: 318477
auauccaaggugugauuga

SEQ ID NO: 362250 - RNA, 19 nt, Artificial Sequence
  Description of Artificial Sequence: Synthetic oligonucleotide
  Antisense Strand to SEQ ID NO: 362249
ucaaucacaccuuggauau

SEQ ID NO: 362251 - RNA, 19 nt, Artificial Sequence
  Description of Artificial Sequence: Synthetic oligonucleotide
  Sense Strand Starting at position 554 of SEQ ID NO: 318488
gugauugagggcuaagcua

SEQ ID NO: 362252 - RNA, 19 nt, Artificial Sequence
  Description of Artificial Sequence: Synthetic oligonucleotide
  Antisense Strand to SEQ ID NO: 362251
uagcuuagcccucaaucac

SEQ ID NO: 362253 - RNA, 19 nt, Artificial Sequence
  Description of Artificial Sequence: Synthetic oligonucleotide
  Sense Strand Starting at position 554 of SEQ ID NO: 318638
ugacuuauuuaaggaagag

SEQ ID NO: 362254 - RNA, 19 nt, Artificial Sequence
  Description of Artificial Sequence: Synthetic oligonucleotide
  Antisense Strand to SEQ ID NO: 362253
cucuuccuuaaauaaguca

SEQ ID NO: 362255 - RNA, 19 nt, Artificial Sequence
  Description of Artificial Sequence: Synthetic oligonucleotide
  Sense Strand Starting at position 554 of SEQ ID NO: 318825
auugucugaguccgauuua

SEQ ID NO: 362256 - RNA, 19 nt, Artificial Sequence
  Description of Artificial Sequence: Synthetic oligonucleotide
  Antisense Strand to SEQ ID NO: 362255
uaaaucggacucagacaau

SEQ ID NO: 362257 - RNA, 19 nt, Artificial Sequence
  Description of Artificial Sequence: Synthetic oligonucleotide
  Sense Strand Starting at position 554 of SEQ ID NO: 319037
ccuuuagaucagcaagcua

SEQ ID NO: 362258 - RNA, 19 nt, Artificial Sequence
  Description of Artificial Sequence: Synthetic oligonucleotide
  Antisense Strand to SEQ ID NO: 362257
uagcuugcugaucuaaagg

SEQ ID NO: 362259 - RNA, 19 nt, Artificial Sequence
  Description of Artificial Sequence: Synthetic oligonucleotide
  Sense Strand Starting at position 555 of SEQ ID NO: 315357
uuuagagacugaguaauca

SEQ ID NO: 362260 - RNA, 19 nt, Artificial Sequence
  Description of Artificial Sequence: Synthetic oligonucleotide
  Antisense Strand to SEQ ID NO: 362259
ugauuacucagucucuaaa

SEQ ID NO: 362261 - RNA, 19 nt, Artificial Sequence
  Description of Artificial Sequence: Synthetic oligonucleotide
  Sense Strand Starting at position 555 of SEQ ID NO: 315361
gagacugaguaaucaacuu

SEQ ID NO: 362262 - RNA, 19 nt, Artificial Sequence
  Description of Artificial Sequence: Synthetic oligonucleotide
  Antisense Strand to SEQ ID NO: 362261
aaguugauuacucagucuc

SEQ ID NO: 362263 - RNA, 19 nt, Artificial Sequence
  Description of Artificial Sequence: Synthetic oligonucleotide
  Sense Strand Starting at position 555 of SEQ ID NO: 315432
cucagaaccuugcuuagau

SEQ ID NO: 362264 - RNA, 19 nt, Artificial Sequence
  Description of Artificial Sequence: Synthetic oligonucleotide
  Antisense Strand to SEQ ID NO: 362263
aucuaagcaagguucugag

SEQ ID NO: 362265 - RNA, 19 nt, Artificial Sequence
  Description of Artificial Sequence: Synthetic oligonucleotide
  Sense Strand Starting at position 555 of SEQ ID NO: 315433
ucagaaccuugcuuagauc

SEQ ID NO: 362266 - RNA, 19 nt, Artificial Sequence
  Description of Artificial Sequence: Synthetic oligonucleotide
  Antisense Strand to SEQ ID NO: 362265
gaucuaagcaagguucuga

SEQ ID NO: 362267 - RNA, 19 nt, Artificial Sequence
  Description of Artificial Sequence: Synthetic oligonucleotide
  Sense Strand Starting at position 555 of SEQ ID NO: 315550
gaacuugguucccaguaga

SEQ ID NO: 362268 - RNA, 19 nt, Artificial Sequence
  Description of Artificial Sequence: Synthetic oligonucleotide
  Antisense Strand to SEQ ID NO: 362267
ucuacugggaaccaaguuc

SEQ ID NO: 362269 - RNA, 19 nt, Artificial Sequence
  Description of Artificial Sequence: Synthetic oligonucleotide
  Sense Strand Starting at position 555 of SEQ ID NO: 315553
cuugguucccaguagaaag

SEQ ID NO: 362270 - RNA, 19 nt, Artificial Sequence
  Description of Artificial Sequence: Synthetic oligonucleotide
  Antisense Strand to SEQ ID NO: 362269
cuuucuacugggaaccaag

SEQ ID NO: 362271 - RNA, 19 nt, Artificial Sequence
  Description of Artificial Sequence: Synthetic oligonucleotide
  Sense Strand Starting at position 555 of SEQ ID NO: 315691
uugaaaggaugagcucauu

SEQ ID NO: 362272 - RNA, 19 nt, Artificial Sequence
  Description of Artificial Sequence: Synthetic oligonucleotide
  Antisense Strand to SEQ ID NO: 362271
aaugagcucauccuuucaa

SEQ ID NO: 362273 - RNA, 19 nt, Artificial Sequence
  Description of Artificial Sequence: Synthetic oligonucleotide
  Sense Strand Starting at position 555 of SEQ ID NO: 316242
ccgaguucuucucaauaaa

SEQ ID NO: 362274 - RNA, 19 nt, Artificial Sequence
  Description of Artificial Sequence: Synthetic oligonucleotide
  Antisense Strand to SEQ ID NO: 362273
uuuauugagaagaacucgg

SEQ ID NO: 362275 - RNA, 19 nt, Artificial Sequence
  Description of Artificial Sequence: Synthetic oligonucleotide
  Sense Strand Starting at position 555 of SEQ ID NO: 316314
gggacugagguucgggaaa

SEQ ID NO: 362276 - RNA, 19 nt, Artificial Sequence
  Description of Artificial Sequence: Synthetic oligonucleotide
  Antisense Strand to SEQ ID NO: 362275
uuucccgaaccucaguccc

SEQ ID NO: 362277 - RNA, 19 nt, Artificial Sequence
  Description of Artificial Sequence: Synthetic oligonucleotide
  Sense Strand Starting at position 555 of SEQ ID NO: 317126
ucagguucccgauguaaag

SEQ ID NO: 362278 - RNA, 19 nt, Artificial Sequence
  Description of Artificial Sequence: Synthetic oligonucleotide
  Antisense Strand to SEQ ID NO: 362277
cuuuacaucgggaaccuga

SEQ ID NO: 362279 - RNA, 19 nt, Artificial Sequence
  Description of Artificial Sequence: Synthetic oligonucleotide
  Sense Strand Starting at position 555 of SEQ ID NO: 317493
cgcgugugucugugugaga

SEQ ID NO: 362280 - RNA, 19 nt, Artificial Sequence
  Description of Artificial Sequence: Synthetic oligonucleotide
  Antisense Strand to SEQ ID NO: 362279
ucucacacagacacacgcg

SEQ ID NO: 362281 - RNA, 19 nt, Artificial Sequence
  Description of Artificial Sequence: Synthetic oligonucleotide
  Sense Strand Starting at position 555 of SEQ ID NO: 317497
ugugucugugugagaguuu

SEQ ID NO: 362282 - RNA, 19 nt, Artificial Sequence
  Description of Artificial Sequence: Synthetic oligonucleotide
  Antisense Strand to SEQ ID NO: 362281
aaacucucacacagacaca

SEQ ID NO: 362283 - RNA, 19 nt, Artificial Sequence
  Description of Artificial Sequence: Synthetic oligonucleotide
  Sense Strand Starting at position 555 of SEQ ID NO: 317883
aggugugucccggagguga

SEQ ID NO: 362284 - RNA, 19 nt, Artificial Sequence
  Description of Artificial Sequence: Synthetic oligonucleotide
  Antisense Strand to SEQ ID NO: 362283
ucaccuccgggacacaccu

SEQ ID NO: 362285 - RNA, 19 nt, Artificial Sequence
  Description of Artificial Sequence: Synthetic oligonucleotide
  Sense Strand Starting at position 555 of SEQ ID NO: 318031
gcgcguguggucgaaggau

SEQ ID NO: 362286 - RNA, 19 nt, Artificial Sequence
  Description of Artificial Sequence: Synthetic oligonucleotide
  Antisense Strand to SEQ ID NO: 362285
auccuucgaccacacgcgc

SEQ ID NO: 362287 - RNA, 19 nt, Artificial Sequence
  Description of Artificial Sequence: Synthetic oligonucleotide
  Sense Strand Starting at position 555 of SEQ ID NO: 318253
cucucuauucugggaagug

SEQ ID NO: 362288 - RNA, 19 nt, Artificial Sequence
  Description of Artificial Sequence: Synthetic oligonucleotide
  Antisense Strand to SEQ ID NO: 362287
cacuucccagaauagagag

SEQ ID NO: 362289 - RNA, 19 nt, Artificial Sequence
  Description of Artificial Sequence: Synthetic oligonucleotide
  Sense Strand Starting at position 555 of SEQ ID NO: 318704
ggagaagaauggcgggauu

SEQ ID NO: 362290 - RNA, 19 nt, Artificial Sequence
  Description of Artificial Sequence: Synthetic oligonucleotide
  Antisense Strand to SEQ ID NO: 362289
aaucccgccauucuucucc

SEQ ID NO: 362291 - RNA, 19 nt, Artificial Sequence
  Description of Artificial Sequence: Synthetic oligonucleotide
  Sense Strand Starting at position 555 of SEQ ID NO: 318706
agaagaauggcgggauuca

SEQ ID NO: 362292 - RNA, 19 nt, Artificial Sequence
  Description of Artificial Sequence: Synthetic oligonucleotide
  Antisense Strand to SEQ ID NO: 362291
ugaaucccgccauucuucu

SEQ ID NO: 362293 - RNA, 19 nt, Artificial Sequence
  Description of Artificial Sequence: Synthetic oligonucleotide
  Sense Strand Starting at position 555 of SEQ ID NO: 318776
gggagaguugaagguuuga

SEQ ID NO: 362294 - RNA, 19 nt, Artificial Sequence
  Description of Artificial Sequence: Synthetic oligonucleotide
  Antisense Strand to SEQ ID NO: 362293
ucaaaccuucaacucuccc

SEQ ID NO: 362295 - RNA, 19 nt, Artificial Sequence
  Description of Artificial Sequence: Synthetic oligonucleotide
  Sense Strand Starting at position 555 of SEQ ID NO: 318787
agguuugaucgcggauaug

SEQ ID NO: 362296 - RNA, 19 nt, Artificial Sequence
  Description of Artificial Sequence: Synthetic oligonucleotide
  Antisense Strand to SEQ ID NO: 362295
cauauccgcgaucaaaccu

SEQ ID NO: 362297 - RNA, 19 nt, Artificial Sequence
  Description of Artificial Sequence: Synthetic oligonucleotide
  Sense Strand Starting at position 555 of SEQ ID NO: 318788
gguuugaucgcggauaugu

SEQ ID NO: 362298 - RNA, 19 nt, Artificial Sequence
  Description of Artificial Sequence: Synthetic oligonucleotide
  Antisense Strand to SEQ ID NO: 362297
acauauccgcgaucaaacc

SEQ ID NO: 362299 - RNA, 19 nt, Artificial Sequence
  Description of Artificial Sequence: Synthetic oligonucleotide
  Sense Strand Starting at position 555 of SEQ ID NO: 318840
gggaguguccuugggugga

SEQ ID NO: 362300 - RNA, 19 nt, Artificial Sequence
  Description of Artificial Sequence: Synthetic oligonucleotide
  Antisense Strand to SEQ ID NO: 362299
uccacccaaggacacuccc

SEQ ID NO: 362301 - RNA, 19 nt, Artificial Sequence
  Description of Artificial Sequence: Synthetic oligonucleotide
  Sense Strand Starting at position 555 of SEQ ID NO: 318842
gaguguccuuggguggaga

SEQ ID NO: 362302 - RNA, 19 nt, Artificial Sequence
  Description of Artificial Sequence: Synthetic oligonucleotide
  Antisense Strand to SEQ ID NO: 362301
ucuccacccaaggacacuc

SEQ ID NO: 362303 - RNA, 19 nt, Artificial Sequence
  Description of Artificial Sequence: Synthetic oligonucleotide
  Sense Strand Starting at position 555 of SEQ ID NO: 318843
aguguccuuggguggagaa

SEQ ID NO: 362304 - RNA, 19 nt, Artificial Sequence
  Description of Artificial Sequence: Synthetic oligonucleotide
  Antisense Strand to SEQ ID NO: 362303
uucuccacccaaggacacu

SEQ ID NO: 362305 - RNA, 19 nt, Artificial Sequence
  Description of Artificial Sequence: Synthetic oligonucleotide
  Sense Strand Starting at position 555 of SEQ ID NO: 318855
uggagaagucacgaaugua

SEQ ID NO: 362306 - RNA, 19 nt, Artificial Sequence
  Description of Artificial Sequence: Synthetic oligonucleotide
  Antisense Strand to SEQ ID NO: 362305
uacauucgugacuucucca

SEQ ID NO: 362307 - RNA, 19 nt, Artificial Sequence
  Description of Artificial Sequence: Synthetic oligonucleotide
  Sense Strand Starting at position 555 of SEQ ID NO: 318858
agaagucacgaauguagga

SEQ ID NO: 362308 - RNA, 19 nt, Artificial Sequence
  Description of Artificial Sequence: Synthetic oligonucleotide
  Antisense Strand to SEQ ID NO: 362307
uccuacauucgugacuucu

SEQ ID NO: 362309 - RNA, 19 nt, Artificial Sequence
  Description of Artificial Sequence: Synthetic oligonucleotide
  Sense Strand Starting at position 555 of SEQ ID NO: 318902
ugggucgugaaguaguauu

SEQ ID NO: 362310 - RNA, 19 nt, Artificial Sequence
  Description of Artificial Sequence: Synthetic oligonucleotide
  Antisense Strand to SEQ ID NO: 362309
aauacuacuucacgaccca

SEQ ID NO: 362311 - RNA, 19 nt, Artificial Sequence
  Description of Artificial Sequence: Synthetic oligonucleotide
  Sense Strand Starting at position 555 of SEQ ID NO: 318913
guaguauugucuuucccaa

SEQ ID NO: 362312 - RNA, 19 nt, Artificial Sequence
  Description of Artificial Sequence: Synthetic oligonucleotide
  Antisense Strand to SEQ ID NO: 362311
uugggaaagacaauacuac

SEQ ID NO: 362313 - RNA, 19 nt, Artificial Sequence
  Description of Artificial Sequence: Synthetic oligonucleotide
  Sense Strand Starting at position 555 of SEQ ID NO: 318930
aagcuuuccuguugaugag

SEQ ID NO: 362314 - RNA, 19 nt, Artificial Sequence
  Description of Artificial Sequence: Synthetic oligonucleotide
  Antisense Strand to SEQ ID NO: 362313
cucaucaacaggaaagcuu

SEQ ID NO: 362315 - RNA, 19 nt, Artificial Sequence
  Description of Artificial Sequence: Synthetic oligonucleotide
  Sense Strand Starting at position 555 of SEQ ID NO: 318991
caaguacucccaggugauu

SEQ ID NO: 362316 - RNA, 19 nt, Artificial Sequence
  Description of Artificial Sequence: Synthetic oligonucleotide
  Antisense Strand to SEQ ID NO: 362315
aaucaccugggaguacuug

SEQ ID NO: 362317 - RNA, 19 nt, Artificial Sequence
  Description of Artificial Sequence: Synthetic oligonucleotide
  Sense Strand Starting at position 555 of SEQ ID NO: 319002
aggugauucuggucuggua

SEQ ID NO: 362318 - RNA, 19 nt, Artificial Sequence
  Description of Artificial Sequence: Synthetic oligonucleotide
  Antisense Strand to SEQ ID NO: 362317
uaccagaccagaaucaccu

SEQ ID NO: 362319 - RNA, 19 nt, Artificial Sequence
  Description of Artificial Sequence: Synthetic oligonucleotide
  Sense Strand Starting at position 555 of SEQ ID NO: 319004
gugauucuggucugguaaa

SEQ ID NO: 362320 - RNA, 19 nt, Artificial Sequence
  Description of Artificial Sequence: Synthetic oligonucleotide
  Antisense Strand to SEQ ID NO: 362319
uuuaccagaccagaaucac

SEQ ID NO: 362321 - RNA, 19 nt, Artificial Sequence
  Description of Artificial Sequence: Synthetic oligonucleotide
  Sense Strand Starting at position 555 of SEQ ID NO: 319005
ugauucuggucugguaaac

SEQ ID NO: 362322 - RNA, 19 nt, Artificial Sequence
  Description of Artificial Sequence: Synthetic oligonucleotide
  Antisense Strand to SEQ ID NO: 362321
guuuaccagaccagaauca

SEQ ID NO: 362323 - RNA, 19 nt, Artificial Sequence
  Description of Artificial Sequence: Synthetic oligonucleotide
  Sense Strand Starting at position 555 of SEQ ID NO: 319076
ccaucuuugugcccugaga

SEQ ID NO: 362324 - RNA, 19 nt, Artificial Sequence
  Description of Artificial Sequence: Synthetic oligonucleotide
  Antisense Strand to SEQ ID NO: 362323
ucucagggcacaaagaugg

SEQ ID NO: 362325 - RNA, 19 nt, Artificial Sequence
  Description of Artificial Sequence: Synthetic oligonucleotide
  Sense Strand Starting at position 555 of SEQ ID NO: 319078
aucuuugugcccugagaug

SEQ ID NO: 362326 - RNA, 19 nt, Artificial Sequence
  Description of Artificial Sequence: Synthetic oligonucleotide
  Antisense Strand to SEQ ID NO: 362325
caucucagggcacaaagau

SEQ ID NO: 362327 - RNA, 19 nt, Artificial Sequence
  Description of Artificial Sequence: Synthetic oligonucleotide
  Sense Strand Starting at position 555 of SEQ ID NO: 319098
uccagcauucucgagccua

SEQ ID NO: 362328 - RNA, 19 nt, Artificial Sequence
  Description of Artificial Sequence: Synthetic oligonucleotide
  Antisense Strand to SEQ ID NO: 362327
uaggcucgagaaugcugga

SEQ ID NO: 362329 - RNA, 19 nt, Artificial Sequence
  Description of Artificial Sequence: Synthetic oligonucleotide
  Sense Strand Starting at position 555 of SEQ ID NO: 319103
cauucucgagccuaaguuu

SEQ ID NO: 362330 - RNA, 19 nt, Artificial Sequence
  Description of Artificial Sequence: Synthetic oligonucleotide
  Antisense Strand to SEQ ID NO: 362329
aaacuuaggcucgagaaug

SEQ ID NO: 362331 - RNA, 19 nt, Artificial Sequence
  Description of Artificial Sequence: Synthetic oligonucleotide
  Sense Strand Starting at position 555 of SEQ ID NO: 319160
ggcuguugugagggcuaca

SEQ ID NO: 362332 - RNA, 19 nt, Artificial Sequence
  Description of Artificial Sequence: Synthetic oligonucleotide
  Antisense Strand to SEQ ID NO: 362331
uguagcccucacaacagcc

SEQ ID NO: 362333 - RNA, 19 nt, Artificial Sequence
  Description of Artificial Sequence: Synthetic oligonucleotide
  Sense Strand Starting at position 555 of SEQ ID NO: 319163
uguugugagggcuacaaga

SEQ ID NO: 362334 - RNA, 19 nt, Artificial Sequence
  Description of Artificial Sequence: Synthetic oligonucleotide
  Antisense Strand to SEQ ID NO: 362333
ucuuguagcccucacaaca

SEQ ID NO: 362335 - RNA, 19 nt, Artificial Sequence
  Description of Artificial Sequence: Synthetic oligonucleotide
  Sense Strand Starting at position 555 of SEQ ID NO: 319202
ugagacauggguggucaga

SEQ ID NO: 362336 - RNA, 19 nt, Artificial Sequence
  Description of Artificial Sequence: Synthetic oligonucleotide
  Antisense Strand to SEQ ID NO: 362335
ucugaccacccaugucuca

SEQ ID NO: 362337 - RNA, 19 nt, Artificial Sequence
  Description of Artificial Sequence: Synthetic oligonucleotide
  Sense Strand Starting at position 555 of SEQ ID NO: 319204
agacauggguggucagaca

SEQ ID NO: 362338 - RNA, 19 nt, Artificial Sequence
  Description of Artificial Sequence: Synthetic oligonucleotide
  Antisense Strand to SEQ ID NO: 362337
ugucugaccacccaugucu

SEQ ID NO: 362339 - RNA, 19 nt, Artificial Sequence
  Description of Artificial Sequence: Synthetic oligonucleotide
  Sense Strand Starting at position 556 of SEQ ID NO: 315256
aucucuuacuggucaucuu

SEQ ID NO: 362340 - RNA, 19 nt, Artificial Sequence
  Description of Artificial Sequence: Synthetic oligonucleotide
  Antisense Strand to SEQ ID NO: 362339
aagaugaccaguaagagau

SEQ ID NO: 362341 - RNA, 19 nt, Artificial Sequence
  Description of Artificial Sequence: Synthetic oligonucleotide
  Sense Strand Starting at position 556 of SEQ ID NO: 315257
ucucuuacuggucaucuua

SEQ ID NO: 362342 - RNA, 19 nt, Artificial Sequence
  Description of Artificial Sequence: Synthetic oligonucleotide
  Antisense Strand to SEQ ID NO: 362341
uaagaugaccaguaagaga

SEQ ID NO: 362343 - RNA, 19 nt, Artificial Sequence
  Description of Artificial Sequence: Synthetic oligonucleotide
  Sense Strand Starting at position 556 of SEQ ID NO: 315259
ucuuacuggucaucuuaua

SEQ ID NO: 362344 - RNA, 19 nt, Artificial Sequence
  Description of Artificial Sequence: Synthetic oligonucleotide
  Antisense Strand to SEQ ID NO: 362343
uauaagaugaccaguaaga

SEQ ID NO: 362345 - RNA, 19 nt, Artificial Sequence
  Description of Artificial Sequence: Synthetic oligonucleotide
  Sense Strand Starting at position 556 of SEQ ID NO: 315352
ggaauuaauguuuaggugu

SEQ ID NO: 362346 - RNA, 19 nt, Artificial Sequence
  Description of Artificial Sequence: Synthetic oligonucleotide
  Antisense Strand to SEQ ID NO: 362345
acaccuaaacauuaauucc

SEQ ID NO: 362347 - RNA, 19 nt, Artificial Sequence
  Description of Artificial Sequence: Synthetic oligonucleotide
  Sense Strand Starting at position 556 of SEQ ID NO: 315367
guguuuagccauuaaacag

SEQ ID NO: 362348 - RNA, 19 nt, Artificial Sequence
  Description of Artificial Sequence: Synthetic oligonucleotide
  Antisense Strand to SEQ ID NO: 362347
cuguuuaauggcuaaacac

SEQ ID NO: 362349 - RNA, 19 nt, Artificial Sequence
  Description of Artificial Sequence: Synthetic oligonucleotide
  Sense Strand Starting at position 556 of SEQ ID NO: 315473
guauaaaucucauugguuu

SEQ ID NO: 362350 - RNA, 19 nt, Artificial Sequence
  Description of Artificial Sequence: Synthetic oligonucleotide
  Antisense Strand to SEQ ID NO: 362349
aaaccaaugagauuuauac

SEQ ID NO: 362351 - RNA, 19 nt, Artificial Sequence
  Description of Artificial Sequence: Synthetic oligonucleotide
  Sense Strand Starting at position 556 of SEQ ID NO: 315613
auacuuaucucuuugaggu

SEQ ID NO: 362352 - RNA, 19 nt, Artificial Sequence
  Description of Artificial Sequence: Synthetic oligonucleotide
  Antisense Strand to SEQ ID NO: 362351
accucaaagagauaaguau

SEQ ID NO: 362353 - RNA, 19 nt, Artificial Sequence
  Description of Artificial Sequence: Synthetic oligonucleotide
  Sense Strand Starting at position 556 of SEQ ID NO: 315620
ucucuuugagguuacaaua

SEQ ID NO: 362354 - RNA, 19 nt, Artificial Sequence
  Description of Artificial Sequence: Synthetic oligonucleotide
  Antisense Strand to SEQ ID NO: 362353
uauuguaaccucaaagaga

SEQ ID NO: 362355 - RNA, 19 nt, Artificial Sequence
  Description of Artificial Sequence: Synthetic oligonucleotide
  Sense Strand Starting at position 556 of SEQ ID NO: 315637
uaugcaacucucuagggua

SEQ ID NO: 362356 - RNA, 19 nt, Artificial Sequence
  Description of Artificial Sequence: Synthetic oligonucleotide
  Antisense Strand to SEQ ID NO: 362355
uacccuagagaguugcaua

SEQ ID NO: 362357 - RNA, 19 nt, Artificial Sequence
  Description of Artificial Sequence: Synthetic oligonucleotide
  Sense Strand Starting at position 556 of SEQ ID NO: 315788
cauggaaucuauguaagua

SEQ ID NO: 362358 - RNA, 19 nt, Artificial Sequence
  Description of Artificial Sequence: Synthetic oligonucleotide
  Antisense Strand to SEQ ID NO: 362357
uacuuacauagauuccaug

SEQ ID NO: 362359 - RNA, 19 nt, Artificial Sequence
  Description of Artificial Sequence: Synthetic oligonucleotide
  Sense Strand Starting at position 556 of SEQ ID NO: 315792
gaaucuauguaaguaaaug

SEQ ID NO: 362360 - RNA, 19 nt, Artificial Sequence
  Description of Artificial Sequence: Synthetic oligonucleotide
  Antisense Strand to SEQ ID NO: 362359
cauuuacuuacauagauuc

SEQ ID NO: 362361 - RNA, 19 nt, Artificial Sequence
  Description of Artificial Sequence: Synthetic oligonucleotide
  Sense Strand Starting at position 556 of SEQ ID NO: 315801
uaaguaaaugcagguauua

SEQ ID NO: 362362 - RNA, 19 nt, Artificial Sequence
  Description of Artificial Sequence: Synthetic oligonucleotide
  Antisense Strand to SEQ ID NO: 362361
uaauaccugcauuuacuua

SEQ ID NO: 362363 - RNA, 19 nt, Artificial Sequence
  Description of Artificial Sequence: Synthetic oligonucleotide
  Sense Strand Starting at position 556 of SEQ ID NO: 315828
gucaacaaauucuugaagu

SEQ ID NO: 362364 - RNA, 19 nt, Artificial Sequence
  Description of Artificial Sequence: Synthetic oligonucleotide
  Antisense Strand to SEQ ID NO: 362363
acuucaagaauuuguugac

SEQ ID NO: 362365 - RNA, 19 nt, Artificial Sequence
  Description of Artificial Sequence: Synthetic oligonucleotide
  Sense Strand Starting at position 556 of SEQ ID NO: 315936
gggccugagauuggauguu

SEQ ID NO: 362366 - RNA, 19 nt, Artificial Sequence
  Description of Artificial Sequence: Synthetic oligonucleotide
  Antisense Strand to SEQ ID NO: 362365
aacauccaaucucaggccc

SEQ ID NO: 362367 - RNA, 19 nt, Artificial Sequence
  Description of Artificial Sequence: Synthetic oligonucleotide
  Sense Strand Starting at position 556 of SEQ ID NO: 316159
gugaaagaaugucuagaac

SEQ ID NO: 362368 - RNA, 19 nt, Artificial Sequence
  Description of Artificial Sequence: Synthetic oligonucleotide
  Antisense Strand to SEQ ID NO: 362367
guucuagacauucuuucac

SEQ ID NO: 362369 - RNA, 19 nt, Artificial Sequence
  Description of Artificial Sequence: Synthetic oligonucleotide
  Sense Strand Starting at position 556 of SEQ ID NO: 316413
ugaaauuucugucaaggaa

SEQ ID NO: 362370 - RNA, 19 nt, Artificial Sequence
  Description of Artificial Sequence: Synthetic oligonucleotide
  Antisense Strand to SEQ ID NO: 362369
uuccuugacagaaauuuca

SEQ ID NO: 362371 - RNA, 19 nt, Artificial Sequence
  Description of Artificial Sequence: Synthetic oligonucleotide
  Sense Strand Starting at position 556 of SEQ ID NO: 316590
gcuuuaugugcgguugaca

SEQ ID NO: 362372 - RNA, 19 nt, Artificial Sequence
  Description of Artificial Sequence: Synthetic oligonucleotide
  Antisense Strand to SEQ ID NO: 362371
ugucaaccgcacauaaagc

SEQ ID NO: 362373 - RNA, 19 nt, Artificial Sequence
  Description of Artificial Sequence: Synthetic oligonucleotide
  Sense Strand Starting at position 556 of SEQ ID NO: 316598
ugcgguugacauuagaaua

SEQ ID NO: 362374 - RNA, 19 nt, Artificial Sequence
  Description of Artificial Sequence: Synthetic oligonucleotide
  Antisense Strand to SEQ ID NO: 362373
uauucuaaugucaaccgca

SEQ ID NO: 362375 - RNA, 19 nt, Artificial Sequence
  Description of Artificial Sequence: Synthetic oligonucleotide
  Sense Strand Starting at position 556 of SEQ ID NO: 317141
gguaguguccaggacauga

SEQ ID NO: 362376 - RNA, 19 nt, Artificial Sequence
  Description of Artificial Sequence: Synthetic oligonucleotide
  Antisense Strand to SEQ ID NO: 362375
ucauguccuggacacuacc

SEQ ID NO: 362377 - RNA, 19 nt, Artificial Sequence
  Description of Artificial Sequence: Synthetic oligonucleotide
  Sense Strand Starting at position 556 of SEQ ID NO: 317180
ccugaagucugaucucagu

SEQ ID NO: 362378 - RNA, 19 nt, Artificial Sequence
  Description of Artificial Sequence: Synthetic oligonucleotide
  Antisense Strand to SEQ ID NO: 362377
acugagaucagacuucagg

SEQ ID NO: 362379 - RNA, 19 nt, Artificial Sequence
  Description of Artificial Sequence: Synthetic oligonucleotide
  Sense Strand Starting at position 556 of SEQ ID NO: 317186
gucugaucucaguacacaa

SEQ ID NO: 362380 - RNA, 19 nt, Artificial Sequence
  Description of Artificial Sequence: Synthetic oligonucleotide
  Antisense Strand to SEQ ID NO: 362379
uuguguacugagaucagac

SEQ ID NO: 362381 - RNA, 19 nt, Artificial Sequence
  Description of Artificial Sequence: Synthetic oligonucleotide
  Sense Strand Starting at position 556 of SEQ ID NO: 317312
ugauguaacuccucuagag

SEQ ID NO: 362382 - RNA, 19 nt, Artificial Sequence
  Description of Artificial Sequence: Synthetic oligonucleotide
  Antisense Strand to SEQ ID NO: 362381
cucuagaggaguuacauca

SEQ ID NO: 362383 - RNA, 19 nt, Artificial Sequence
  Description of Artificial Sequence: Synthetic oligonucleotide
  Sense Strand Starting at position 556 of SEQ ID NO: 317314
auguaacuccucuagagca

SEQ ID NO: 362384 - RNA, 19 nt, Artificial Sequence
  Description of Artificial Sequence: Synthetic oligonucleotide
  Antisense Strand to SEQ ID NO: 362383
ugcucuagaggaguuacau

SEQ ID NO: 362385 - RNA, 19 nt, Artificial Sequence
  Description of Artificial Sequence: Synthetic oligonucleotide
  Sense Strand Starting at position 556 of SEQ ID NO: 317333
gcagcuuaugcauacauuu

SEQ ID NO: 362386 - RNA, 19 nt, Artificial Sequence
  Description of Artificial Sequence: Synthetic oligonucleotide
  Antisense Strand to SEQ ID NO: 362385
aaauguaugcauaagcugc

SEQ ID NO: 362387 - RNA, 19 nt, Artificial Sequence
  Description of Artificial Sequence: Synthetic oligonucleotide
  Sense Strand Starting at position 556 of SEQ ID NO: 317370
aguguagugaaucauacac

SEQ ID NO: 362388 - RNA, 19 nt, Artificial Sequence
  Description of Artificial Sequence: Synthetic oligonucleotide
  Antisense Strand to SEQ ID NO: 362387
guguaugauucacuacacu

SEQ ID NO: 362389 - RNA, 19 nt, Artificial Sequence
  Description of Artificial Sequence: Synthetic oligonucleotide
  Sense Strand Starting at position 556 of SEQ ID NO: 317451
cuaauagggcuguauaaau

SEQ ID NO: 362390 - RNA, 19 nt, Artificial Sequence
  Description of Artificial Sequence: Synthetic oligonucleotide
  Antisense Strand to SEQ ID NO: 362389
auuuauacagcccuauuag

SEQ ID NO: 362391 - RNA, 19 nt, Artificial Sequence
  Description of Artificial Sequence: Synthetic oligonucleotide
  Sense Strand Starting at position 556 of SEQ ID NO: 317462
guauaaauccuagauugcu

SEQ ID NO: 362392 - RNA, 19 nt, Artificial Sequence
  Description of Artificial Sequence: Synthetic oligonucleotide
  Antisense Strand to SEQ ID NO: 362391
agcaaucuaggauuuauac

SEQ ID NO: 362393 - RNA, 19 nt, Artificial Sequence
  Description of Artificial Sequence: Synthetic oligonucleotide
  Sense Strand Starting at position 556 of SEQ ID NO: 317636
agcuguuaauaacuuuaga

SEQ ID NO: 362394 - RNA, 19 nt, Artificial Sequence
  Description of Artificial Sequence: Synthetic oligonucleotide
  Antisense Strand to SEQ ID NO: 362393
ucuaaaguuauuaacagcu

SEQ ID NO: 362395 - RNA, 19 nt, Artificial Sequence
  Description of Artificial Sequence: Synthetic oligonucleotide
  Sense Strand Starting at position 556 of SEQ ID NO: 317884
aguguugugagauaguaau

SEQ ID NO: 362396 - RNA, 19 nt, Artificial Sequence
  Description of Artificial Sequence: Synthetic oligonucleotide
  Antisense Strand to SEQ ID NO: 362395
auuacuaucucacaacacu

SEQ ID NO: 362397 - RNA, 19 nt, Artificial Sequence
  Description of Artificial Sequence: Synthetic oligonucleotide
  Sense Strand Starting at position 556 of SEQ ID NO: 318135
ucucauaugccacagagau

SEQ ID NO: 362398 - RNA, 19 nt, Artificial Sequence
  Description of Artificial Sequence: Synthetic oligonucleotide
  Antisense Strand to SEQ ID NO: 362397
aucucuguggcauaugaga

SEQ ID NO: 362399 - RNA, 19 nt, Artificial Sequence
  Description of Artificial Sequence: Synthetic oligonucleotide
  Sense Strand Starting at position 556 of SEQ ID NO: 318148
agagauuauuugcaaacaa

SEQ ID NO: 362400 - RNA, 19 nt, Artificial Sequence
  Description of Artificial Sequence: Synthetic oligonucleotide
  Antisense Strand to SEQ ID NO: 362399
uuguuugcaaauaaucucu

SEQ ID NO: 362401 - RNA, 19 nt, Artificial Sequence
  Description of Artificial Sequence: Synthetic oligonucleotide
  Sense Strand Starting at position 556 of SEQ ID NO: 318334
cuguaaagguggucaucaa

SEQ ID NO: 362402 - RNA, 19 nt, Artificial Sequence
  Description of Artificial Sequence: Synthetic oligonucleotide
  Antisense Strand to SEQ ID NO: 362401
uugaugaccaccuuuacag

SEQ ID NO: 362403 - RNA, 19 nt, Artificial Sequence
  Description of Artificial Sequence: Synthetic oligonucleotide
  Sense Strand Starting at position 556 of SEQ ID NO: 318335
uguaaagguggucaucaaa

SEQ ID NO: 362404 - RNA, 19 nt, Artificial Sequence
  Description of Artificial Sequence: Synthetic oligonucleotide
  Antisense Strand to SEQ ID NO: 362403
uuugaugaccaccuuuaca

SEQ ID NO: 362405 - RNA, 19 nt, Artificial Sequence
  Description of Artificial Sequence: Synthetic oligonucleotide
  Sense Strand Starting at position 556 of SEQ ID NO: 318398
ugaagaaauguaugugaau

SEQ ID NO: 362406 - RNA, 19 nt, Artificial Sequence
  Description of Artificial Sequence: Synthetic oligonucleotide
  Antisense Strand to SEQ ID NO: 362405
auucacauacauuucuuca

SEQ ID NO: 362407 - RNA, 19 nt, Artificial Sequence
  Description of Artificial Sequence: Synthetic oligonucleotide
  Sense Strand Starting at position 556 of SEQ ID NO: 318419
gauauaaacuaaguuucga

SEQ ID NO: 362408 - RNA, 19 nt, Artificial Sequence
  Description of Artificial Sequence: Synthetic oligonucleotide
  Antisense Strand to SEQ ID NO: 362407
ucgaaacuuaguuuauauc

SEQ ID NO: 362409 - RNA, 19 nt, Artificial Sequence
  Description of Artificial Sequence: Synthetic oligonucleotide
  Sense Strand Starting at position 556 of SEQ ID NO: 318540
agcaaaucacuguggagaa

SEQ ID NO: 362410 - RNA, 19 nt, Artificial Sequence
  Description of Artificial Sequence: Synthetic oligonucleotide
  Antisense Strand to SEQ ID NO: 362409
uucuccacagugauuugcu

SEQ ID NO: 362411 - RNA, 19 nt, Artificial Sequence
  Description of Artificial Sequence: Synthetic oligonucleotide
  Sense Strand Starting at position 556 of SEQ ID NO: 318577
uuguuacuccgucauuaac

SEQ ID NO: 362412 - RNA, 19 nt, Artificial Sequence
  Description of Artificial Sequence: Synthetic oligonucleotide
  Antisense Strand to SEQ ID NO: 362411
guuaaugacggaguaacaa

SEQ ID NO: 362413 - RNA, 19 nt, Artificial Sequence
  Description of Artificial Sequence: Synthetic oligonucleotide
  Sense Strand Starting at position 556 of SEQ ID NO: 318698
aguagucucagugacugaa

SEQ ID NO: 362414 - RNA, 19 nt, Artificial Sequence
  Description of Artificial Sequence: Synthetic oligonucleotide
  Antisense Strand to SEQ ID NO: 362413
uucagucacugagacuacu

SEQ ID NO: 362415 - RNA, 19 nt, Artificial Sequence
  Description of Artificial Sequence: Synthetic oligonucleotide
  Sense Strand Starting at position 556 of SEQ ID NO: 318838
guaauuaaucgcuaaguuu

SEQ ID NO: 362416 - RNA, 19 nt, Artificial Sequence
  Description of Artificial Sequence: Synthetic oligonucleotide
  Antisense Strand to SEQ ID NO: 362415
aaacuuagcgauuaauuac

SEQ ID NO: 362417 - RNA, 19 nt, Artificial Sequence
  Description of Artificial Sequence: Synthetic oligonucleotide
  Sense Strand Starting at position 556 of SEQ ID NO: 318844
aaucgcuaaguuuaguuaa

SEQ ID NO: 362418 - RNA, 19 nt, Artificial Sequence
  Description of Artificial Sequence: Synthetic oligonucleotide
  Antisense Strand to SEQ ID NO: 362417
uuaacuaaacuuagcgauu

SEQ ID NO: 362419 - RNA, 19 nt, Artificial Sequence
  Description of Artificial Sequence: Synthetic oligonucleotide
  Sense Strand Starting at position 557 of SEQ ID NO: 315343
uguccaucaccucauaguu

SEQ ID NO: 362420 - RNA, 19 nt, Artificial Sequence
  Description of Artificial Sequence: Synthetic oligonucleotide
  Antisense Strand to SEQ ID NO: 362419
aacuaugaggugauggaca

SEQ ID NO: 362421 - RNA, 19 nt, Artificial Sequence
  Description of Artificial Sequence: Synthetic oligonucleotide
  Sense Strand Starting at position 557 of SEQ ID NO: 315377
ugugauuagcuuuaaauug

SEQ ID NO: 362422 - RNA, 19 nt, Artificial Sequence
  Description of Artificial Sequence: Synthetic oligonucleotide
  Antisense Strand to SEQ ID NO: 362421
caauuuaaagcuaaucaca

SEQ ID NO: 362423 - RNA, 19 nt, Artificial Sequence
  Description of Artificial Sequence: Synthetic oligonucleotide
  Sense Strand Starting at position 557 of SEQ ID NO: 315495
aaguauuucucagauggaa

SEQ ID NO: 362424 - RNA, 19 nt, Artificial Sequence
  Description of Artificial Sequence: Synthetic oligonucleotide
  Antisense Strand to SEQ ID NO: 362423
uuccaucugagaaauacuu

SEQ ID NO: 362425 - RNA, 19 nt, Artificial Sequence
  Description of Artificial Sequence: Synthetic oligonucleotide
  Sense Strand Starting at position 557 of SEQ ID NO: 315519
augaaucuccguuacauag

SEQ ID NO: 362426 - RNA, 19 nt, Artificial Sequence
  Description of Artificial Sequence: Synthetic oligonucleotide
  Antisense Strand to SEQ ID NO: 362425
cuauguaacggagauucau

SEQ ID NO: 362427 - RNA, 19 nt, Artificial Sequence
  Description of Artificial Sequence: Synthetic oligonucleotide
  Sense Strand Starting at position 557 of SEQ ID NO: 315566
aggcacaugcuagaaauau

SEQ ID NO: 362428 - RNA, 19 nt, Artificial Sequence
  Description of Artificial Sequence: Synthetic oligonucleotide
  Antisense Strand to SEQ ID NO: 362427
auauuucuagcaugugccu

SEQ ID NO: 362429 - RNA, 19 nt, Artificial Sequence
  Description of Artificial Sequence: Synthetic oligonucleotide
  Sense Strand Starting at position 557 of SEQ ID NO: 315572
augcuagaaauaugggagu

SEQ ID NO: 362430 - RNA, 19 nt, Artificial Sequence
  Description of Artificial Sequence: Synthetic oligonucleotide
  Antisense Strand to SEQ ID NO: 362429
acucccauauuucuagcau

SEQ ID NO: 362431 - RNA, 19 nt, Artificial Sequence
  Description of Artificial Sequence: Synthetic oligonucleotide
  Sense Strand Starting at position 557 of SEQ ID NO: 315574
gcuagaaauaugggaguuc

SEQ ID NO: 362432 - RNA, 19 nt, Artificial Sequence
  Description of Artificial Sequence: Synthetic oligonucleotide
  Antisense Strand to SEQ ID NO: 362431
gaacucccauauuucuagc

SEQ ID NO: 362433 - RNA, 19 nt, Artificial Sequence
  Description of Artificial Sequence: Synthetic oligonucleotide
  Sense Strand Starting at position 557 of SEQ ID NO: 315702
gccagaugauacuuucuaa

SEQ ID NO: 362434 - RNA, 19 nt, Artificial Sequence
  Description of Artificial Sequence: Synthetic oligonucleotide
  Antisense Strand to SEQ ID NO: 362433
uuagaaaguaucaucuggc

SEQ ID NO: 362435 - RNA, 19 nt, Artificial Sequence
  Description of Artificial Sequence: Synthetic oligonucleotide
  Sense Strand Starting at position 557 of SEQ ID NO: 316091
aacgcaagguuccuuagaa

SEQ ID NO: 362436 - RNA, 19 nt, Artificial Sequence
  Description of Artificial Sequence: Synthetic oligonucleotide
  Antisense Strand to SEQ ID NO: 362435
uucuaaggaaccuugcguu

SEQ ID NO: 362437 - RNA, 19 nt, Artificial Sequence
  Description of Artificial Sequence: Synthetic oligonucleotide
  Sense Strand Starting at position 557 of SEQ ID NO: 316165
uagauugagcuguguggaa

SEQ ID NO: 362438 - RNA, 19 nt, Artificial Sequence
  Description of Artificial Sequence: Synthetic oligonucleotide
  Antisense Strand to SEQ ID NO: 362437
uuccacacagcucaaucua

SEQ ID NO: 362439 - RNA, 19 nt, Artificial Sequence
  Description of Artificial Sequence: Synthetic oligonucleotide
  Sense Strand Starting at position 557 of SEQ ID NO: 316167
gauugagcuguguggaaua

SEQ ID NO: 362440 - RNA, 19 nt, Artificial Sequence
  Description of Artificial Sequence: Synthetic oligonucleotide
  Antisense Strand to SEQ ID NO: 362439
uauuccacacagcucaauc

SEQ ID NO: 362441 - RNA, 19 nt, Artificial Sequence
  Description of Artificial Sequence: Synthetic oligonucleotide
  Sense Strand Starting at position 557 of SEQ ID NO: 316172
agcuguguggaauaccauu

SEQ ID NO: 362442 - RNA, 19 nt, Artificial Sequence
  Description of Artificial Sequence: Synthetic oligonucleotide
  Antisense Strand to SEQ ID NO: 362441
aaugguauuccacacagcu

SEQ ID NO: 362443 - RNA, 19 nt, Artificial Sequence
  Description of Artificial Sequence: Synthetic oligonucleotide
  Sense Strand Starting at position 557 of SEQ ID NO: 316314
agugcuaucagggauaccu

SEQ ID NO: 362444 - RNA, 19 nt, Artificial Sequence
  Description of Artificial Sequence: Synthetic oligonucleotide
  Antisense Strand to SEQ ID NO: 362443
agguaucccugauagcacu

SEQ ID NO: 362445 - RNA, 19 nt, Artificial Sequence
  Description of Artificial Sequence: Synthetic oligonucleotide
  Sense Strand Starting at position 557 of SEQ ID NO: 316316
ugcuaucagggauaccuau

SEQ ID NO: 362446 - RNA, 19 nt, Artificial Sequence
  Description of Artificial Sequence: Synthetic oligonucleotide
  Antisense Strand to SEQ ID NO: 362445
auagguaucccugauagca

SEQ ID NO: 362447 - RNA, 19 nt, Artificial Sequence
  Description of Artificial Sequence: Synthetic oligonucleotide
  Sense Strand Starting at position 557 of SEQ ID NO: 316369
gggcuaagcagguagauaa

SEQ ID NO: 362448 - RNA, 19 nt, Artificial Sequence
  Description of Artificial Sequence: Synthetic oligonucleotide
  Antisense Strand to SEQ ID NO: 362447
uuaucuaccugcuuagccc

SEQ ID NO: 362449 - RNA, 19 nt, Artificial Sequence
  Description of Artificial Sequence: Synthetic oligonucleotide
  Sense Strand Starting at position 557 of SEQ ID NO: 316786
guuauucuccagcaaaggu

SEQ ID NO: 362450 - RNA, 19 nt, Artificial Sequence
  Description of Artificial Sequence: Synthetic oligonucleotide
  Antisense Strand to SEQ ID NO: 362449
accuuugcuggagaauaac

SEQ ID NO: 362451 - RNA, 19 nt, Artificial Sequence
  Description of Artificial Sequence: Synthetic oligonucleotide
  Sense Strand Starting at position 557 of SEQ ID NO: 316862
gaaggaaguucucuggcau

SEQ ID NO: 362452 - RNA, 19 nt, Artificial Sequence
  Description of Artificial Sequence: Synthetic oligonucleotide
  Antisense Strand to SEQ ID NO: 362451
augccagagaacuuccuuc

SEQ ID NO: 362453 - RNA, 19 nt, Artificial Sequence
  Description of Artificial Sequence: Synthetic oligonucleotide
  Sense Strand Starting at position 557 of SEQ ID NO: 316863
aaggaaguucucuggcaua

SEQ ID NO: 362454 - RNA, 19 nt, Artificial Sequence
  Description of Artificial Sequence: Synthetic oligonucleotide
  Antisense Strand to SEQ ID NO: 362453
uaugccagagaacuuccuu

SEQ ID NO: 362455 - RNA, 19 nt, Artificial Sequence
  Description of Artificial Sequence: Synthetic oligonucleotide
  Sense Strand Starting at position 557 of SEQ ID NO: 316868
aguucucuggcauauaaac

SEQ ID NO: 362456 - RNA, 19 nt, Artificial Sequence
  Description of Artificial Sequence: Synthetic oligonucleotide
  Antisense Strand to SEQ ID NO: 362455
guuuauaugccagagaacu

SEQ ID NO: 362457 - RNA, 19 nt, Artificial Sequence
  Description of Artificial Sequence: Synthetic oligonucleotide
  Sense Strand Starting at position 557 of SEQ ID NO: 316944
cugguuguuuaaucuugaa

SEQ ID NO: 362458 - RNA, 19 nt, Artificial Sequence
  Description of Artificial Sequence: Synthetic oligonucleotide
  Antisense Strand to SEQ ID NO: 362457
uucaagauuaaacaaccag

SEQ ID NO: 362459 - RNA, 19 nt, Artificial Sequence
  Description of Artificial Sequence: Synthetic oligonucleotide
  Sense Strand Starting at position 557 of SEQ ID NO: 317105
guucuuaaacuuggcuaaa

SEQ ID NO: 362460 - RNA, 19 nt, Artificial Sequence
  Description of Artificial Sequence: Synthetic oligonucleotide
  Antisense Strand to SEQ ID NO: 362459
uuuagccaaguuuaagaac

SEQ ID NO: 362461 - RNA, 19 nt, Artificial Sequence
  Description of Artificial Sequence: Synthetic oligonucleotide
  Sense Strand Starting at position 557 of SEQ ID NO: 317150
uaauaaugaugucugaguc

SEQ ID NO: 362462 - RNA, 19 nt, Artificial Sequence
  Description of Artificial Sequence: Synthetic oligonucleotide
  Antisense Strand to SEQ ID NO: 362461
gacucagacaucauuauua

SEQ ID NO: 362463 - RNA, 19 nt, Artificial Sequence
  Description of Artificial Sequence: Synthetic oligonucleotide
  Sense Strand Starting at position 557 of SEQ ID NO: 317237
gauuaaagguuuccaugug

SEQ ID NO: 362464 - RNA, 19 nt, Artificial Sequence
  Description of Artificial Sequence: Synthetic oligonucleotide
  Antisense Strand to SEQ ID NO: 362463
cacauggaaaccuuuaauc

SEQ ID NO: 362465 - RNA, 19 nt, Artificial Sequence
  Description of Artificial Sequence: Synthetic oligonucleotide
  Sense Strand Starting at position 557 of SEQ ID NO: 317274
cuaacuggguucucaauga

SEQ ID NO: 362466 - RNA, 19 nt, Artificial Sequence
  Description of Artificial Sequence: Synthetic oligonucleotide
  Antisense Strand to SEQ ID NO: 362465
ucauugagaacccaguuag

SEQ ID NO: 362467 - RNA, 19 nt, Artificial Sequence
  Description of Artificial Sequence: Synthetic oligonucleotide
  Sense Strand Starting at position 557 of SEQ ID NO: 317278
cuggguucucaaugaagau

SEQ ID NO: 362468 - RNA, 19 nt, Artificial Sequence
  Description of Artificial Sequence: Synthetic oligonucleotide
  Antisense Strand to SEQ ID NO: 362467
aucuucauugagaacccag

SEQ ID NO: 362469 - RNA, 19 nt, Artificial Sequence
  Description of Artificial Sequence: Synthetic oligonucleotide
  Sense Strand Starting at position 557 of SEQ ID NO: 317298
ccucaucagcugcauuaga

SEQ ID NO: 362470 - RNA, 19 nt, Artificial Sequence
  Description of Artificial Sequence: Synthetic oligonucleotide
  Antisense Strand to SEQ ID NO: 362469
ucuaaugcagcugaugagg

SEQ ID NO: 362471 - RNA, 19 nt, Artificial Sequence
  Description of Artificial Sequence: Synthetic oligonucleotide
  Sense Strand Starting at position 557 of SEQ ID NO: 317314
agaauuacaugggucgagu

SEQ ID NO: 362472 - RNA, 19 nt, Artificial Sequence
  Description of Artificial Sequence: Synthetic oligonucleotide
  Antisense Strand to SEQ ID NO: 362471
acucgacccauguaauucu

SEQ ID NO: 362473 - RNA, 19 nt, Artificial Sequence
  Description of Artificial Sequence: Synthetic oligonucleotide
  Sense Strand Starting at position 557 of SEQ ID NO: 317317
auuacaugggucgaguuua

SEQ ID NO: 362474 - RNA, 19 nt, Artificial Sequence
  Description of Artificial Sequence: Synthetic oligonucleotide
  Antisense Strand to SEQ ID NO: 362473
uaaacucgacccauguaau

SEQ ID NO: 362475 - RNA, 19 nt, Artificial Sequence
  Description of Artificial Sequence: Synthetic oligonucleotide
  Sense Strand Starting at position 557 of SEQ ID NO: 317494
uuaagaacagauugcuuau

SEQ ID NO: 362476 - RNA, 19 nt, Artificial Sequence
  Description of Artificial Sequence: Synthetic oligonucleotide
  Antisense Strand to SEQ ID NO: 362475
auaagcaaucuguucuuaa

SEQ ID NO: 362477 - RNA, 19 nt, Artificial Sequence
  Description of Artificial Sequence: Synthetic oligonucleotide
  Sense Strand Starting at position 557 of SEQ ID NO: 317575
gggucuucccuuggagaaa

SEQ ID NO: 362478 - RNA, 19 nt, Artificial Sequence
  Description of Artificial Sequence: Synthetic oligonucleotide
  Antisense Strand to SEQ ID NO: 362477
uuucuccaagggaagaccc

SEQ ID NO: 362479 - RNA, 19 nt, Artificial Sequence
  Description of Artificial Sequence: Synthetic oligonucleotide
  Sense Strand Starting at position 557 of SEQ ID NO: 317595
acuggcuuagagugauauc

SEQ ID NO: 362480 - RNA, 19 nt, Artificial Sequence
  Description of Artificial Sequence: Synthetic oligonucleotide
  Antisense Strand to SEQ ID NO: 362479
gauaucacucuaagccagu

SEQ ID NO: 362481 - RNA, 19 nt, Artificial Sequence
  Description of Artificial Sequence: Synthetic oligonucleotide
  Sense Strand Starting at position 557 of SEQ ID NO: 317627
aucugaugcaacuggagau

SEQ ID NO: 362482 - RNA, 19 nt, Artificial Sequence
  Description of Artificial Sequence: Synthetic oligonucleotide
  Antisense Strand to SEQ ID NO: 362481
aucuccaguugcaucagau

SEQ ID NO: 362483 - RNA, 19 nt, Artificial Sequence
  Description of Artificial Sequence: Synthetic oligonucleotide
  Sense Strand Starting at position 557 of SEQ ID NO: 317628
ucugaugcaacuggagauu

SEQ ID NO: 362484 - RNA, 19 nt, Artificial Sequence
  Description of Artificial Sequence: Synthetic oligonucleotide
  Antisense Strand to SEQ ID NO: 362483
aaucuccaguugcaucaga

SEQ ID NO: 362485 - RNA, 19 nt, Artificial Sequence
  Description of Artificial Sequence: Synthetic oligonucleotide
  Sense Strand Starting at position 557 of SEQ ID NO: 317725
auagaagguuucccagagu

SEQ ID NO: 362486 - RNA, 19 nt, Artificial Sequence
  Description of Artificial Sequence: Synthetic oligonucleotide
  Antisense Strand to SEQ ID NO: 362485
acucugggaaaccuucuau

SEQ ID NO: 362487 - RNA, 19 nt, Artificial Sequence
  Description of Artificial Sequence: Synthetic oligonucleotide
  Sense Strand Starting at position 557 of SEQ ID NO: 317960
caacucgugucauuagaag

SEQ ID NO: 362488 - RNA, 19 nt, Artificial Sequence
  Description of Artificial Sequence: Synthetic oligonucleotide
  Antisense Strand to SEQ ID NO: 362487
cuucuaaugacacgaguug

SEQ ID NO: 362489 - RNA, 19 nt, Artificial Sequence
  Description of Artificial Sequence: Synthetic oligonucleotide
  Sense Strand Starting at position 557 of SEQ ID NO: 317989
acuccuaagcaugaguaca

SEQ ID NO: 362490 - RNA, 19 nt, Artificial Sequence
  Description of Artificial Sequence: Synthetic oligonucleotide
  Antisense Strand to SEQ ID NO: 362489
uguacucaugcuuaggagu

SEQ ID NO: 362491 - RNA, 19 nt, Artificial Sequence
  Description of Artificial Sequence: Synthetic oligonucleotide
  Sense Strand Starting at position 557 of SEQ ID NO: 317991
uccuaagcaugaguacaaa

SEQ ID NO: 362492 - RNA, 19 nt, Artificial Sequence
  Description of Artificial Sequence: Synthetic oligonucleotide
  Antisense Strand to SEQ ID NO: 362491
uuuguacucaugcuuagga

SEQ ID NO: 362493 - RNA, 19 nt, Artificial Sequence
  Description of Artificial Sequence: Synthetic oligonucleotide
  Sense Strand Starting at position 557 of SEQ ID NO: 318064
acagauauauaagauggaa

SEQ ID NO: 362494 - RNA, 19 nt, Artificial Sequence
  Description of Artificial Sequence: Synthetic oligonucleotide
  Antisense Strand to SEQ ID NO: 362493
uuccaucuuauauaucugu

SEQ ID NO: 362495 - RNA, 19 nt, Artificial Sequence
  Description of Artificial Sequence: Synthetic oligonucleotide
  Sense Strand Starting at position 557 of SEQ ID NO: 318789
guuuacagagagugugaau

SEQ ID NO: 362496 - RNA, 19 nt, Artificial Sequence
  Description of Artificial Sequence: Synthetic oligonucleotide
  Antisense Strand to SEQ ID NO: 362495
auucacacucucuguaaac

SEQ ID NO: 362497 - RNA, 19 nt, Artificial Sequence
  Description of Artificial Sequence: Synthetic oligonucleotide
  Sense Strand Starting at position 557 of SEQ ID NO: 319155
gugccaaguauggagauaa

SEQ ID NO: 362498 - RNA, 19 nt, Artificial Sequence
  Description of Artificial Sequence: Synthetic oligonucleotide
  Antisense Strand to SEQ ID NO: 362497
uuaucuccauacuuggcac

SEQ ID NO: 362499 - RNA, 19 nt, Artificial Sequence
  Description of Artificial Sequence: Synthetic oligonucleotide
  Sense Strand Starting at position 558 of SEQ ID NO: 315303
aucgucucuggguauugau

SEQ ID NO: 362500 - RNA, 19 nt, Artificial Sequence
  Description of Artificial Sequence: Synthetic oligonucleotide
  Antisense Strand to SEQ ID NO: 362499
aucaauacccagagacgau

SEQ ID NO: 362501 - RNA, 19 nt, Artificial Sequence
  Description of Artificial Sequence: Synthetic oligonucleotide
  Sense Strand Starting at position 558 of SEQ ID NO: 315331
auuagcuugagguaguaga

SEQ ID NO: 362502 - RNA, 19 nt, Artificial Sequence
  Description of Artificial Sequence: Synthetic oligonucleotide
  Antisense Strand to SEQ ID NO: 362501
ucuacuaccucaagcuaau

SEQ ID NO: 362503 - RNA, 19 nt, Artificial Sequence
  Description of Artificial Sequence: Synthetic oligonucleotide
  Sense Strand Starting at position 558 of SEQ ID NO: 315460
ucguauuguguagagauag

SEQ ID NO: 362504 - RNA, 19 nt, Artificial Sequence
  Description of Artificial Sequence: Synthetic oligonucleotide
  Antisense Strand to SEQ ID NO: 362503
cuaucucuacacaauacga

SEQ ID NO: 362505 - RNA, 19 nt, Artificial Sequence
  Description of Artificial Sequence: Synthetic oligonucleotide
  Sense Strand Starting at position 558 of SEQ ID NO: 315576
ggucuugucagggauugug

SEQ ID NO: 362506 - RNA, 19 nt, Artificial Sequence
  Description of Artificial Sequence: Synthetic oligonucleotide
  Antisense Strand to SEQ ID NO: 362505
cacaaucccugacaagacc

SEQ ID NO: 362507 - RNA, 19 nt, Artificial Sequence
  Description of Artificial Sequence: Synthetic oligonucleotide
  Sense Strand Starting at position 558 of SEQ ID NO: 315592
gugugaaugccauugcugu

SEQ ID NO: 362508 - RNA, 19 nt, Artificial Sequence
  Description of Artificial Sequence: Synthetic oligonucleotide
  Antisense Strand to SEQ ID NO: 362507
acagcaauggcauucacac

SEQ ID NO: 362509 - RNA, 19 nt, Artificial Sequence
  Description of Artificial Sequence: Synthetic oligonucleotide
  Sense Strand Starting at position 558 of SEQ ID NO: 315694
augacauucuaggcauaag

SEQ ID NO: 362510 - RNA, 19 nt, Artificial Sequence
  Description of Artificial Sequence: Synthetic oligonucleotide
  Antisense Strand to SEQ ID NO: 362509
cuuaugccuagaaugucau

SEQ ID NO: 362511 - RNA, 19 nt, Artificial Sequence
  Description of Artificial Sequence: Synthetic oligonucleotide
  Sense Strand Starting at position 558 of SEQ ID NO: 315697
acauucuaggcauaagcua

SEQ ID NO: 362512 - RNA, 19 nt, Artificial Sequence
  Description of Artificial Sequence: Synthetic oligonucleotide
  Antisense Strand to SEQ ID NO: 362511
uagcuuaugccuagaaugu

SEQ ID NO: 362513 - RNA, 19 nt, Artificial Sequence
  Description of Artificial Sequence: Synthetic oligonucleotide
  Sense Strand Starting at position 558 of SEQ ID NO: 315892
ccucauauucugggaacuu

SEQ ID NO: 362514 - RNA, 19 nt, Artificial Sequence
  Description of Artificial Sequence: Synthetic oligonucleotide
  Antisense Strand to SEQ ID NO: 362513
aaguucccagaauaugagg

SEQ ID NO: 362515 - RNA, 19 nt, Artificial Sequence
  Description of Artificial Sequence: Synthetic oligonucleotide
  Sense Strand Starting at position 558 of SEQ ID NO: 316054
guggaauucgucagcagug

SEQ ID NO: 362516 - RNA, 19 nt, Artificial Sequence
  Description of Artificial Sequence: Synthetic oligonucleotide
  Antisense Strand to SEQ ID NO: 362515
cacugcugacgaauuccac

SEQ ID NO: 362517 - RNA, 19 nt, Artificial Sequence
  Description of Artificial Sequence: Synthetic oligonucleotide
  Sense Strand Starting at position 558 of SEQ ID NO: 316151
gugguacaacccuggguaa

SEQ ID NO: 362518 - RNA, 19 nt, Artificial Sequence
  Description of Artificial Sequence: Synthetic oligonucleotide
  Antisense Strand to SEQ ID NO: 362517
uuacccaggguuguaccac

SEQ ID NO: 362519 - RNA, 19 nt, Artificial Sequence
  Description of Artificial Sequence: Synthetic oligonucleotide
  Sense Strand Starting at position 558 of SEQ ID NO: 316289
ugagcacaaccuuaauguu

SEQ ID NO: 362520 - RNA, 19 nt, Artificial Sequence
  Description of Artificial Sequence: Synthetic oligonucleotide
  Antisense Strand to SEQ ID NO: 362519
aacauuaagguugugcuca

SEQ ID NO: 362521 - RNA, 19 nt, Artificial Sequence
  Description of Artificial Sequence: Synthetic oligonucleotide
  Sense Strand Starting at position 558 of SEQ ID NO: 316318
auuagugacugucucuaaa

SEQ ID NO: 362522 - RNA, 19 nt, Artificial Sequence
  Description of Artificial Sequence: Synthetic oligonucleotide
  Antisense Strand to SEQ ID NO: 362521
uuuagagacagucacuaau

SEQ ID NO: 362523 - RNA, 19 nt, Artificial Sequence
  Description of Artificial Sequence: Synthetic oligonucleotide
  Sense Strand Starting at position 558 of SEQ ID NO: 316378
cguacauuugucuggucuu

SEQ ID NO: 362524 - RNA, 19 nt, Artificial Sequence
  Description of Artificial Sequence: Synthetic oligonucleotide
  Antisense Strand to SEQ ID NO: 362523
aagaccagacaaauguacg

SEQ ID NO: 362525 - RNA, 19 nt, Artificial Sequence
  Description of Artificial Sequence: Synthetic oligonucleotide
  Sense Strand Starting at position 558 of SEQ ID NO: 316672
uguauuauauaggcagaca

SEQ ID NO: 362526 - RNA, 19 nt, Artificial Sequence
  Description of Artificial Sequence: Synthetic oligonucleotide
  Antisense Strand to SEQ ID NO: 362525
ugucugccuauauaauaca

SEQ ID NO: 362527 - RNA, 19 nt, Artificial Sequence
  Description of Artificial Sequence: Synthetic oligonucleotide
  Sense Strand Starting at position 558 of SEQ ID NO: 316711
ucuuaugaugaaugaucau

SEQ ID NO: 362528 - RNA, 19 nt, Artificial Sequence
  Description of Artificial Sequence: Synthetic oligonucleotide
  Antisense Strand to SEQ ID NO: 362527
augaucauucaucauaaga

SEQ ID NO: 362529 - RNA, 19 nt, Artificial Sequence
  Description of Artificial Sequence: Synthetic oligonucleotide
  Sense Strand Starting at position 558 of SEQ ID NO: 316965
gucauagauguuugaggga

SEQ ID NO: 362530 - RNA, 19 nt, Artificial Sequence
  Description of Artificial Sequence: Synthetic oligonucleotide
  Antisense Strand to SEQ ID NO: 362529
ucccucaaacaucuaugac

SEQ ID NO: 362531 - RNA, 19 nt, Artificial Sequence
  Description of Artificial Sequence: Synthetic oligonucleotide
  Sense Strand Starting at position 558 of SEQ ID NO: 316999
acugaucccucuuugagaa

SEQ ID NO: 362532 - RNA, 19 nt, Artificial Sequence
  Description of Artificial Sequence: Synthetic oligonucleotide
  Antisense Strand to SEQ ID NO: 362531
uucucaaagagggaucagu

SEQ ID NO: 362533 - RNA, 19 nt, Artificial Sequence
  Description of Artificial Sequence: Synthetic oligonucleotide
  Sense Strand Starting at position 558 of SEQ ID NO: 317000
cugaucccucuuugagaag

SEQ ID NO: 362534 - RNA, 19 nt, Artificial Sequence
  Description of Artificial Sequence: Synthetic oligonucleotide
  Antisense Strand to SEQ ID NO: 362533
cuucucaaagagggaucag

SEQ ID NO: 362535 - RNA, 19 nt, Artificial Sequence
  Description of Artificial Sequence: Synthetic oligonucleotide
  Sense Strand Starting at position 558 of SEQ ID NO: 317070
ggaugcugucugggaugga

SEQ ID NO: 362536 - RNA, 19 nt, Artificial Sequence
  Description of Artificial Sequence: Synthetic oligonucleotide
  Antisense Strand to SEQ ID NO: 362535
uccaucccagacagcaucc

SEQ ID NO: 362537 - RNA, 19 nt, Artificial Sequence
  Description of Artificial Sequence: Synthetic oligonucleotide
  Sense Strand Starting at position 558 of SEQ ID NO: 317088
aagucagguaccgaaaugu

SEQ ID NO: 362538 - RNA, 19 nt, Artificial Sequence
  Description of Artificial Sequence: Synthetic oligonucleotide
  Antisense Strand to SEQ ID NO: 362537
acauuucgguaccugacuu

SEQ ID NO: 362539 - RNA, 19 nt, Artificial Sequence
  Description of Artificial Sequence: Synthetic oligonucleotide
  Sense Strand Starting at position 558 of SEQ ID NO: 317259
aguuauaaagaguggugga

SEQ ID NO: 362540 - RNA, 19 nt, Artificial Sequence
  Description of Artificial Sequence: Synthetic oligonucleotide
  Antisense Strand to SEQ ID NO: 362539
uccaccacucuuuauaacu

SEQ ID NO: 362541 - RNA, 19 nt, Artificial Sequence
  Description of Artificial Sequence: Synthetic oligonucleotide
  Sense Strand Starting at position 558 of SEQ ID NO: 317297
acacacucacucugggaau

SEQ ID NO: 362542 - RNA, 19 nt, Artificial Sequence
  Description of Artificial Sequence: Synthetic oligonucleotide
  Antisense Strand to SEQ ID NO: 362541
auucccagagugagugugu

SEQ ID NO: 362543 - RNA, 19 nt, Artificial Sequence
  Description of Artificial Sequence: Synthetic oligonucleotide
  Sense Strand Starting at position 558 of SEQ ID NO: 317426
uuaugaucaagugggauau

SEQ ID NO: 362544 - RNA, 19 nt, Artificial Sequence
  Description of Artificial Sequence: Synthetic oligonucleotide
  Antisense Strand to SEQ ID NO: 362543
auaucccacuugaucauaa

SEQ ID NO: 362545 - RNA, 19 nt, Artificial Sequence
  Description of Artificial Sequence: Synthetic oligonucleotide
  Sense Strand Starting at position 558 of SEQ ID NO: 317427
uaugaucaagugggauauu

SEQ ID NO: 362546 - RNA, 19 nt, Artificial Sequence
  Description of Artificial Sequence: Synthetic oligonucleotide
  Antisense Strand to SEQ ID NO: 362545
aauaucccacuugaucaua

SEQ ID NO: 362547 - RNA, 19 nt, Artificial Sequence
  Description of Artificial Sequence: Synthetic oligonucleotide
  Sense Strand Starting at position 558 of SEQ ID NO: 317428
augaucaagugggauauuu

SEQ ID NO: 362548 - RNA, 19 nt, Artificial Sequence
  Description of Artificial Sequence: Synthetic oligonucleotide
  Antisense Strand to SEQ ID NO: 362547
aaauaucccacuugaucau

SEQ ID NO: 362549 - RNA, 19 nt, Artificial Sequence
  Description of Artificial Sequence: Synthetic oligonucleotide
  Sense Strand Starting at position 558 of SEQ ID NO: 317436
gugggauauuuacuguugu

SEQ ID NO: 362550 - RNA, 19 nt, Artificial Sequence
  Description of Artificial Sequence: Synthetic oligonucleotide
  Antisense Strand to SEQ ID NO: 362549
acaacaguaaauaucccac

SEQ ID NO: 362551 - RNA, 19 nt, Artificial Sequence
  Description of Artificial Sequence: Synthetic oligonucleotide
  Sense Strand Starting at position 558 of SEQ ID NO: 317636
guaauaucugugcauaaua

SEQ ID NO: 362552 - RNA, 19 nt, Artificial Sequence
  Description of Artificial Sequence: Synthetic oligonucleotide
  Antisense Strand to SEQ ID NO: 362551
uauuaugcacagauauuac

SEQ ID NO: 362553 - RNA, 19 nt, Artificial Sequence
  Description of Artificial Sequence: Synthetic oligonucleotide
  Sense Strand Starting at position 558 of SEQ ID NO: 317662
uggaaacuguaauuaagca

SEQ ID NO: 362554 - RNA, 19 nt, Artificial Sequence
  Description of Artificial Sequence: Synthetic oligonucleotide
  Antisense Strand to SEQ ID NO: 362553
ugcuuaauuacaguuucca

SEQ ID NO: 362555 - RNA, 19 nt, Artificial Sequence
  Description of Artificial Sequence: Synthetic oligonucleotide
  Sense Strand Starting at position 558 of SEQ ID NO: 317777
uguauagguguacauacau

SEQ ID NO: 362556 - RNA, 19 nt, Artificial Sequence
  Description of Artificial Sequence: Synthetic oligonucleotide
  Antisense Strand to SEQ ID NO: 362555
auguauguacaccuauaca

SEQ ID NO: 362557 - RNA, 19 nt, Artificial Sequence
  Description of Artificial Sequence: Synthetic oligonucleotide
  Sense Strand Starting at position 558 of SEQ ID NO: 317809
uguacaugugaucaaacuc

SEQ ID NO: 362558 - RNA, 19 nt, Artificial Sequence
  Description of Artificial Sequence: Synthetic oligonucleotide
  Antisense Strand to SEQ ID NO: 362557
gaguuugaucacauguaca

SEQ ID NO: 362559 - RNA, 19 nt, Artificial Sequence
  Description of Artificial Sequence: Synthetic oligonucleotide
  Sense Strand Starting at position 558 of SEQ ID NO: 318261
uccugaaaugcaggauuga

SEQ ID NO: 362560 - RNA, 19 nt, Artificial Sequence
  Description of Artificial Sequence: Synthetic oligonucleotide
  Antisense Strand to SEQ ID NO: 362559
ucaauccugcauuucagga

SEQ ID NO: 362561 - RNA, 19 nt, Artificial Sequence
  Description of Artificial Sequence: Synthetic oligonucleotide
  Sense Strand Starting at position 558 of SEQ ID NO: 318363
guuggauuccaccagcaac

SEQ ID NO: 362562 - RNA, 19 nt, Artificial Sequence
  Description of Artificial Sequence: Synthetic oligonucleotide
  Antisense Strand to SEQ ID NO: 362561
guugcugguggaauccaac

SEQ ID NO: 362563 - RNA, 19 nt, Artificial Sequence
  Description of Artificial Sequence: Synthetic oligonucleotide
  Sense Strand Starting at position 558 of SEQ ID NO: 318421
ggcugaacugcuuggauuu

SEQ ID NO: 362564 - RNA, 19 nt, Artificial Sequence
  Description of Artificial Sequence: Synthetic oligonucleotide
  Antisense Strand to SEQ ID NO: 362563
aaauccaagcaguucagcc

SEQ ID NO: 362565 - RNA, 19 nt, Artificial Sequence
  Description of Artificial Sequence: Synthetic oligonucleotide
  Sense Strand Starting at position 558 of SEQ ID NO: 318532
guaaccaccugguuacaau

SEQ ID NO: 362566 - RNA, 19 nt, Artificial Sequence
  Description of Artificial Sequence: Synthetic oligonucleotide
  Antisense Strand to SEQ ID NO: 362565
auuguaaccaggugguuac

SEQ ID NO: 362567 - RNA, 19 nt, Artificial Sequence
  Description of Artificial Sequence: Synthetic oligonucleotide
  Sense Strand Starting at position 558 of SEQ ID NO: 318562
agcuuuguaugauuggaga

SEQ ID NO: 362568 - RNA, 19 nt, Artificial Sequence
  Description of Artificial Sequence: Synthetic oligonucleotide
  Antisense Strand to SEQ ID NO: 362567
ucuccaaucauacaaagcu

SEQ ID NO: 362569 - RNA, 19 nt, Artificial Sequence
  Description of Artificial Sequence: Synthetic oligonucleotide
  Sense Strand Starting at position 558 of SEQ ID NO: 318564
cuuuguaugauuggagaca

SEQ ID NO: 362570 - RNA, 19 nt, Artificial Sequence
  Description of Artificial Sequence: Synthetic oligonucleotide
  Antisense Strand to SEQ ID NO: 362569
ugucuccaaucauacaaag

SEQ ID NO: 362571 - RNA, 19 nt, Artificial Sequence
  Description of Artificial Sequence: Synthetic oligonucleotide
  Sense Strand Starting at position 558 of SEQ ID NO: 318929
gcuuacagccaggaguaau

SEQ ID NO: 362572 - RNA, 19 nt, Artificial Sequence
  Description of Artificial Sequence: Synthetic oligonucleotide
  Antisense Strand to SEQ ID NO: 362571
auuacuccuggcuguaagc

SEQ ID NO: 362573 - RNA, 19 nt, Artificial Sequence
  Description of Artificial Sequence: Synthetic oligonucleotide
  Sense Strand Starting at position 558 of SEQ ID NO: 319039
cuugcuguugcagaaacaa

SEQ ID NO: 362574 - RNA, 19 nt, Artificial Sequence
  Description of Artificial Sequence: Synthetic oligonucleotide
  Antisense Strand to SEQ ID NO: 362573
uuguuucugcaacagcaag

SEQ ID NO: 362575 - RNA, 19 nt, Artificial Sequence
  Description of Artificial Sequence: Synthetic oligonucleotide
  Sense Strand Starting at position 558 of SEQ ID NO: 319094
cccucaguaguguacuuaa

SEQ ID NO: 362576 - RNA, 19 nt, Artificial Sequence
  Description of Artificial Sequence: Synthetic oligonucleotide
  Antisense Strand to SEQ ID NO: 362575
uuaaguacacuacugaggg

SEQ ID NO: 362577 - RNA, 19 nt, Artificial Sequence
  Description of Artificial Sequence: Synthetic oligonucleotide
  Sense Strand Starting at position 558 of SEQ ID NO: 319179
agagcuucuccucaaauug

SEQ ID NO: 362578 - RNA, 19 nt, Artificial Sequence
  Description of Artificial Sequence: Synthetic oligonucleotide
  Antisense Strand to SEQ ID NO: 362577
caauuugaggagaagcucu

SEQ ID NO: 362579 - RNA, 19 nt, Artificial Sequence
  Description of Artificial Sequence: Synthetic oligonucleotide
  Sense Strand Starting at position 559 of SEQ ID NO: 315319
cuguaaauaucuguugaac

SEQ ID NO: 362580 - RNA, 19 nt, Artificial Sequence
  Description of Artificial Sequence: Synthetic oligonucleotide
  Antisense Strand to SEQ ID NO: 362579
guucaacagauauuuacag

SEQ ID NO: 362581 - RNA, 19 nt, Artificial Sequence
  Description of Artificial Sequence: Synthetic oligonucleotide
  Sense Strand Starting at position 559 of SEQ ID NO: 315395
cugagaaguccuuggaagu

SEQ ID NO: 362582 - RNA, 19 nt, Artificial Sequence
  Description of Artificial Sequence: Synthetic oligonucleotide
  Antisense Strand to SEQ ID NO: 362581
acuuccaaggacuucucag

SEQ ID NO: 362583 - RNA, 19 nt, Artificial Sequence
  Description of Artificial Sequence: Synthetic oligonucleotide
  Sense Strand Starting at position 559 of SEQ ID NO: 315396
ugagaaguccuuggaaguc

SEQ ID NO: 362584 - RNA, 19 nt, Artificial Sequence
  Description of Artificial Sequence: Synthetic oligonucleotide
  Antisense Strand to SEQ ID NO: 362583
gacuuccaaggacuucuca

SEQ ID NO: 362585 - RNA, 19 nt, Artificial Sequence
  Description of Artificial Sequence: Synthetic oligonucleotide
  Sense Strand Starting at position 559 of SEQ ID NO: 315427
uuucuauggcuugggaaua

SEQ ID NO: 362586 - RNA, 19 nt, Artificial Sequence
  Description of Artificial Sequence: Synthetic oligonucleotide
  Antisense Strand to SEQ ID NO: 362585
uauucccaagccauagaaa

SEQ ID NO: 362587 - RNA, 19 nt, Artificial Sequence
  Description of Artificial Sequence: Synthetic oligonucleotide
  Sense Strand Starting at position 559 of SEQ ID NO: 315657
uagagcuguguccaaggau

SEQ ID NO: 362588 - RNA, 19 nt, Artificial Sequence
  Description of Artificial Sequence: Synthetic oligonucleotide
  Antisense Strand to SEQ ID NO: 362587
auccuuggacacagcucua

SEQ ID NO: 362589 - RNA, 19 nt, Artificial Sequence
  Description of Artificial Sequence: Synthetic oligonucleotide
  Sense Strand Starting at position 559 of SEQ ID NO: 315664
guguccaaggauugcauaa

SEQ ID NO: 362590 - RNA, 19 nt, Artificial Sequence
  Description of Artificial Sequence: Synthetic oligonucleotide
  Antisense Strand to SEQ ID NO: 362589
uuaugcaauccuuggacac

SEQ ID NO: 362591 - RNA, 19 nt, Artificial Sequence
  Description of Artificial Sequence: Synthetic oligonucleotide
  Sense Strand Starting at position 559 of SEQ ID NO: 315806
uguuauugugugcacauca

SEQ ID NO: 362592 - RNA, 19 nt, Artificial Sequence
  Description of Artificial Sequence: Synthetic oligonucleotide
  Antisense Strand to SEQ ID NO: 362591
ugaugugcacacaauaaca

SEQ ID NO: 362593 - RNA, 19 nt, Artificial Sequence
  Description of Artificial Sequence: Synthetic oligonucleotide
  Sense Strand Starting at position 559 of SEQ ID NO: 315813
gugugcacaucaucacuaa

SEQ ID NO: 362594 - RNA, 19 nt, Artificial Sequence
  Description of Artificial Sequence: Synthetic oligonucleotide
  Antisense Strand to SEQ ID NO: 362593
uuagugaugaugugcacac

SEQ ID NO: 362595 - RNA, 19 nt, Artificial Sequence
  Description of Artificial Sequence: Synthetic oligonucleotide
  Sense Strand Starting at position 559 of SEQ ID NO: 315951
caaguuaaguuggcuagua

SEQ ID NO: 362596 - RNA, 19 nt, Artificial Sequence
  Description of Artificial Sequence: Synthetic oligonucleotide
  Antisense Strand to SEQ ID NO: 362595
uacuagccaacuuaacuug

SEQ ID NO: 362597 - RNA, 19 nt, Artificial Sequence
  Description of Artificial Sequence: Synthetic oligonucleotide
  Sense Strand Starting at position 559 of SEQ ID NO: 315952
aaguuaaguuggcuaguau

SEQ ID NO: 362598 - RNA, 19 nt, Artificial Sequence
  Description of Artificial Sequence: Synthetic oligonucleotide
  Antisense Strand to SEQ ID NO: 362597
auacuagccaacuuaacuu

SEQ ID NO: 362599 - RNA, 19 nt, Artificial Sequence
  Description of Artificial Sequence: Synthetic oligonucleotide
  Sense Strand Starting at position 559 of SEQ ID NO: 315953
aguuaaguuggcuaguauu

SEQ ID NO: 362600 - RNA, 19 nt, Artificial Sequence
  Description of Artificial Sequence: Synthetic oligonucleotide
  Antisense Strand to SEQ ID NO: 362599
aauacuagccaacuuaacu

SEQ ID NO: 362601 - RNA, 19 nt, Artificial Sequence
  Description of Artificial Sequence: Synthetic oligonucleotide
  Sense Strand Starting at position 559 of SEQ ID NO: 315992
cgaauaaggccaugaaaug

SEQ ID NO: 362602 - RNA, 19 nt, Artificial Sequence
  Description of Artificial Sequence: Synthetic oligonucleotide
  Antisense Strand to SEQ ID NO: 362601
cauuucauggccuuauucg

SEQ ID NO: 362603 - RNA, 19 nt, Artificial Sequence
  Description of Artificial Sequence: Synthetic oligonucleotide
  Sense Strand Starting at position 559 of SEQ ID NO: 316125
agcaauaaaugggacagaa

SEQ ID NO: 362604 - RNA, 19 nt, Artificial Sequence
  Description of Artificial Sequence: Synthetic oligonucleotide
  Antisense Strand to SEQ ID NO: 362603
uucugucccauuuauugcu

SEQ ID NO: 362605 - RNA, 19 nt, Artificial Sequence
  Description of Artificial Sequence: Synthetic oligonucleotide
  Sense Strand Starting at position 559 of SEQ ID NO: 316351
uucuauguauuguugagag

SEQ ID NO: 362606 - RNA, 19 nt, Artificial Sequence
  Description of Artificial Sequence: Synthetic oligonucleotide
  Antisense Strand to SEQ ID NO: 362605
cucucaacaauacauagaa

SEQ ID NO: 362607 - RNA, 19 nt, Artificial Sequence
  Description of Artificial Sequence: Synthetic oligonucleotide
  Sense Strand Starting at position 559 of SEQ ID NO: 316373
acuuaaguccuuuggagau

SEQ ID NO: 362608 - RNA, 19 nt, Artificial Sequence
  Description of Artificial Sequence: Synthetic oligonucleotide
  Antisense Strand to SEQ ID NO: 362607
aucuccaaaggacuuaagu

SEQ ID NO: 362609 - RNA, 19 nt, Artificial Sequence
  Description of Artificial Sequence: Synthetic oligonucleotide
  Sense Strand Starting at position 559 of SEQ ID NO: 316379
guccuuuggagaugaagcu

SEQ ID NO: 362610 - RNA, 19 nt, Artificial Sequence
  Description of Artificial Sequence: Synthetic oligonucleotide
  Antisense Strand to SEQ ID NO: 362609
agcuucaucuccaaaggac

SEQ ID NO: 362611 - RNA, 19 nt, Artificial Sequence
  Description of Artificial Sequence: Synthetic oligonucleotide
  Sense Strand Starting at position 559 of SEQ ID NO: 316426
uguaguauagcacaguaua

SEQ ID NO: 362612 - RNA, 19 nt, Artificial Sequence
  Description of Artificial Sequence: Synthetic oligonucleotide
  Antisense Strand to SEQ ID NO: 362611
uauacugugcuauacuaca

SEQ ID NO: 362613 - RNA, 19 nt, Artificial Sequence
  Description of Artificial Sequence: Synthetic oligonucleotide
  Sense Strand Starting at position 559 of SEQ ID NO: 316505
acguuaaagcuauaaaguu

SEQ ID NO: 362614 - RNA, 19 nt, Artificial Sequence
  Description of Artificial Sequence: Synthetic oligonucleotide
  Antisense Strand to SEQ ID NO: 362613
aacuuuauagcuuuaacgu

SEQ ID NO: 362615 - RNA, 19 nt, Artificial Sequence
  Description of Artificial Sequence: Synthetic oligonucleotide
  Sense Strand Starting at position 559 of SEQ ID NO: 316617
aagggaguucguuaucuaa

SEQ ID NO: 362616 - RNA, 19 nt, Artificial Sequence
  Description of Artificial Sequence: Synthetic oligonucleotide
  Antisense Strand to SEQ ID NO: 362615
uuagauaacgaacucccuu

SEQ ID NO: 362617 - RNA, 19 nt, Artificial Sequence
  Description of Artificial Sequence: Synthetic oligonucleotide
  Sense Strand Starting at position 559 of SEQ ID NO: 316705
ggacgaguuuaguuaccuc

SEQ ID NO: 362618 - RNA, 19 nt, Artificial Sequence
  Description of Artificial Sequence: Synthetic oligonucleotide
  Antisense Strand to SEQ ID NO: 362617
gagguaacuaaacucgucc

SEQ ID NO: 362619 - RNA, 19 nt, Artificial Sequence
  Description of Artificial Sequence: Synthetic oligonucleotide
  Sense Strand Starting at position 559 of SEQ ID NO: 317583
ccuggagagcucuagcaau

SEQ ID NO: 362620 - RNA, 19 nt, Artificial Sequence
  Description of Artificial Sequence: Synthetic oligonucleotide
  Antisense Strand to SEQ ID NO: 362619
auugcuagagcucuccagg

SEQ ID NO: 362621 - RNA, 19 nt, Artificial Sequence
  Description of Artificial Sequence: Synthetic oligonucleotide
  Sense Strand Starting at position 559 of SEQ ID NO: 317630
gcaagagucuuuccuguug

SEQ ID NO: 362622 - RNA, 19 nt, Artificial Sequence
  Description of Artificial Sequence: Synthetic oligonucleotide
  Antisense Strand to SEQ ID NO: 362621
caacaggaaagacucuugc

SEQ ID NO: 362623 - RNA, 19 nt, Artificial Sequence
  Description of Artificial Sequence: Synthetic oligonucleotide
  Sense Strand Starting at position 559 of SEQ ID NO: 317991
cauuuauuguaaucguugu

SEQ ID NO: 362624 - RNA, 19 nt, Artificial Sequence
  Description of Artificial Sequence: Synthetic oligonucleotide
  Antisense Strand to SEQ ID NO: 362623
acaacgauuacaauaaaug

SEQ ID NO: 362625 - RNA, 19 nt, Artificial Sequence
  Description of Artificial Sequence: Synthetic oligonucleotide
  Sense Strand Starting at position 559 of SEQ ID NO: 318206
ccuucuaaauuugaggaca

SEQ ID NO: 362626 - RNA, 19 nt, Artificial Sequence
  Description of Artificial Sequence: Synthetic oligonucleotide
  Antisense Strand to SEQ ID NO: 362625
uguccucaaauuuagaagg

SEQ ID NO: 362627 - RNA, 19 nt, Artificial Sequence
  Description of Artificial Sequence: Synthetic oligonucleotide
  Sense Strand Starting at position 559 of SEQ ID NO: 318208
uucuaaauuugaggacaua

SEQ ID NO: 362628 - RNA, 19 nt, Artificial Sequence
  Description of Artificial Sequence: Synthetic oligonucleotide
  Antisense Strand to SEQ ID NO: 362627
uauguccucaaauuuagaa

SEQ ID NO: 362629 - RNA, 19 nt, Artificial Sequence
  Description of Artificial Sequence: Synthetic oligonucleotide
  Sense Strand Starting at position 559 of SEQ ID NO: 318323
auacaauccucccagggaa

SEQ ID NO: 362630 - RNA, 19 nt, Artificial Sequence
  Description of Artificial Sequence: Synthetic oligonucleotide
  Antisense Strand to SEQ ID NO: 362629
uucccugggaggauuguau

SEQ ID NO: 362631 - RNA, 19 nt, Artificial Sequence
  Description of Artificial Sequence: Synthetic oligonucleotide
  Sense Strand Starting at position 559 of SEQ ID NO: 318406
ggacaaggauuggaagaua

SEQ ID NO: 362632 - RNA, 19 nt, Artificial Sequence
  Description of Artificial Sequence: Synthetic oligonucleotide
  Antisense Strand to SEQ ID NO: 362631
uaucuuccaauccuugucc

SEQ ID NO: 362633 - RNA, 19 nt, Artificial Sequence
  Description of Artificial Sequence: Synthetic oligonucleotide
  Sense Strand Starting at position 559 of SEQ ID NO: 318440
uaucaagaugguggaguua

SEQ ID NO: 362634 - RNA, 19 nt, Artificial Sequence
  Description of Artificial Sequence: Synthetic oligonucleotide
  Antisense Strand to SEQ ID NO: 362633
uaacuccaccaucuugaua

SEQ ID NO: 362635 - RNA, 19 nt, Artificial Sequence
  Description of Artificial Sequence: Synthetic oligonucleotide
  Sense Strand Starting at position 559 of SEQ ID NO: 318449
gguggaguuauggauguac

SEQ ID NO: 362636 - RNA, 19 nt, Artificial Sequence
  Description of Artificial Sequence: Synthetic oligonucleotide
  Antisense Strand to SEQ ID NO: 362635
guacauccauaacuccacc

SEQ ID NO: 362637 - RNA, 19 nt, Artificial Sequence
  Description of Artificial Sequence: Synthetic oligonucleotide
  Sense Strand Starting at position 559 of SEQ ID NO: 318451
uggaguuauggauguacuu

SEQ ID NO: 362638 - RNA, 19 nt, Artificial Sequence
  Description of Artificial Sequence: Synthetic oligonucleotide
  Antisense Strand to SEQ ID NO: 362637
aaguacauccauaacucca

SEQ ID NO: 362639 - RNA, 19 nt, Artificial Sequence
  Description of Artificial Sequence: Synthetic oligonucleotide
  Sense Strand Starting at position 559 of SEQ ID NO: 318544
acaagaauauccugaaagg

SEQ ID NO: 362640 - RNA, 19 nt, Artificial Sequence
  Description of Artificial Sequence: Synthetic oligonucleotide
  Antisense Strand to SEQ ID NO: 362639
ccuuucaggauauucuugu

SEQ ID NO: 362641 - RNA, 19 nt, Artificial Sequence
  Description of Artificial Sequence: Synthetic oligonucleotide
  Sense Strand Starting at position 559 of SEQ ID NO: 318618
gcuagaauucccuaccaga

SEQ ID NO: 362642 - RNA, 19 nt, Artificial Sequence
  Description of Artificial Sequence: Synthetic oligonucleotide
  Antisense Strand to SEQ ID NO: 362641
ucugguagggaauucuagc

SEQ ID NO: 362643 - RNA, 19 nt, Artificial Sequence
  Description of Artificial Sequence: Synthetic oligonucleotide
  Sense Strand Starting at position 559 of SEQ ID NO: 318709
augauaucacgaggcucau

SEQ ID NO: 362644 - RNA, 19 nt, Artificial Sequence
  Description of Artificial Sequence: Synthetic oligonucleotide
  Antisense Strand to SEQ ID NO: 362643
augagccucgugauaucau

SEQ ID NO: 362645 - RNA, 19 nt, Artificial Sequence
  Description of Artificial Sequence: Synthetic oligonucleotide
  Sense Strand Starting at position 559 of SEQ ID NO: 318715
ucacgaggcucauucucau

SEQ ID NO: 362646 - RNA, 19 nt, Artificial Sequence
  Description of Artificial Sequence: Synthetic oligonucleotide
  Antisense Strand to SEQ ID NO: 362645
augagaaugagccucguga

SEQ ID NO: 362647 - RNA, 19 nt, Artificial Sequence
  Description of Artificial Sequence: Synthetic oligonucleotide
  Sense Strand Starting at position 559 of SEQ ID NO: 318826
aguccuaagcaggguauaa

SEQ ID NO: 362648 - RNA, 19 nt, Artificial Sequence
  Description of Artificial Sequence: Synthetic oligonucleotide
  Antisense Strand to SEQ ID NO: 362647
uuauacccugcuuaggacu

SEQ ID NO: 362649 - RNA, 19 nt, Artificial Sequence
  Description of Artificial Sequence: Synthetic oligonucleotide
  Sense Strand Starting at position 559 of SEQ ID NO: 318839
guauaagaguaagcaauau

SEQ ID NO: 362650 - RNA, 19 nt, Artificial Sequence
  Description of Artificial Sequence: Synthetic oligonucleotide
  Antisense Strand to SEQ ID NO: 362649
auauugcuuacucuuauac

SEQ ID NO: 362651 - RNA, 19 nt, Artificial Sequence
  Description of Artificial Sequence: Synthetic oligonucleotide
  Sense Strand Starting at position 559 of SEQ ID NO: 318878
ggucaagugauaggagcua

SEQ ID NO: 362652 - RNA, 19 nt, Artificial Sequence
  Description of Artificial Sequence: Synthetic oligonucleotide
  Antisense Strand to SEQ ID NO: 362651
uagcuccuaucacuugacc

SEQ ID NO: 362653 - RNA, 19 nt, Artificial Sequence
  Description of Artificial Sequence: Synthetic oligonucleotide
  Sense Strand Starting at position 559 of SEQ ID NO: 318988
auaaucugagcuuaaagcu

SEQ ID NO: 362654 - RNA, 19 nt, Artificial Sequence
  Description of Artificial Sequence: Synthetic oligonucleotide
  Antisense Strand to SEQ ID NO: 362653
agcuuuaagcucagauuau

SEQ ID NO: 362655 - RNA, 19 nt, Artificial Sequence
  Description of Artificial Sequence: Synthetic oligonucleotide
  Sense Strand Starting at position 559 of SEQ ID NO: 318996
agcuuaaagcucugauaaa

SEQ ID NO: 362656 - RNA, 19 nt, Artificial Sequence
  Description of Artificial Sequence: Synthetic oligonucleotide
  Antisense Strand to SEQ ID NO: 362655
uuuaucagagcuuuaagcu

SEQ ID NO: 362657 - RNA, 19 nt, Artificial Sequence
  Description of Artificial Sequence: Synthetic oligonucleotide
  Sense Strand Starting at position 559 of SEQ ID NO: 319210
ggauacuucugccuugcca

SEQ ID NO: 362658 - RNA, 19 nt, Artificial Sequence
  Description of Artificial Sequence: Synthetic oligonucleotide
  Antisense Strand to SEQ ID NO: 362657
uggcaaggcagaaguaucc

SEQ ID NO: 362659 - RNA, 19 nt, Artificial Sequence
  Description of Artificial Sequence: Synthetic oligonucleotide
  Sense Strand Starting at position 560 of SEQ ID NO: 315251
ugugaaauagggugucacu

SEQ ID NO: 362660 - RNA, 19 nt, Artificial Sequence
  Description of Artificial Sequence: Synthetic oligonucleotide
  Antisense Strand to SEQ ID NO: 362659
agugacacccuauuucaca

SEQ ID NO: 362661 - RNA, 19 nt, Artificial Sequence
  Description of Artificial Sequence: Synthetic oligonucleotide
  Sense Strand Starting at position 560 of SEQ ID NO: 315405
uuguguuucucacuuugaa

SEQ ID NO: 362662 - RNA, 19 nt, Artificial Sequence
  Description of Artificial Sequence: Synthetic oligonucleotide
  Antisense Strand to SEQ ID NO: 362661
uucaaagugagaaacacaa

SEQ ID NO: 362663 - RNA, 19 nt, Artificial Sequence
  Description of Artificial Sequence: Synthetic oligonucleotide
  Sense Strand Starting at position 560 of SEQ ID NO: 315839
gagggaaauuuguaacuau

SEQ ID NO: 362664 - RNA, 19 nt, Artificial Sequence
  Description of Artificial Sequence: Synthetic oligonucleotide
  Antisense Strand to SEQ ID NO: 362663
auaguuacaaauuucccuc

SEQ ID NO: 362665 - RNA, 19 nt, Artificial Sequence
  Description of Artificial Sequence: Synthetic oligonucleotide
  Sense Strand Starting at position 560 of SEQ ID NO: 315993
agguuaucucuugaguguu

SEQ ID NO: 362666 - RNA, 19 nt, Artificial Sequence
  Description of Artificial Sequence: Synthetic oligonucleotide
  Antisense Strand to SEQ ID NO: 362665
aacacucaagagauaaccu

SEQ ID NO: 362667 - RNA, 19 nt, Artificial Sequence
  Description of Artificial Sequence: Synthetic oligonucleotide
  Sense Strand Starting at position 560 of SEQ ID NO: 315999
ucucuugaguguuugggaa

SEQ ID NO: 362668 - RNA, 19 nt, Artificial Sequence
  Description of Artificial Sequence: Synthetic oligonucleotide
  Antisense Strand to SEQ ID NO: 362667
uucccaaacacucaagaga

SEQ ID NO: 362669 - RNA, 19 nt, Artificial Sequence
  Description of Artificial Sequence: Synthetic oligonucleotide
  Sense Strand Starting at position 560 of SEQ ID NO: 316152
acaguauccaaugguguca

SEQ ID NO: 362670 - RNA, 19 nt, Artificial Sequence
  Description of Artificial Sequence: Synthetic oligonucleotide
  Antisense Strand to SEQ ID NO: 362669
ugacaccauuggauacugu

SEQ ID NO: 362671 - RNA, 19 nt, Artificial Sequence
  Description of Artificial Sequence: Synthetic oligonucleotide
  Sense Strand Starting at position 560 of SEQ ID NO: 316221
gcacuucuugagcaccuau

SEQ ID NO: 362672 - RNA, 19 nt, Artificial Sequence
  Description of Artificial Sequence: Synthetic oligonucleotide
  Antisense Strand to SEQ ID NO: 362671
auaggugcucaagaagugc

SEQ ID NO: 362673 - RNA, 19 nt, Artificial Sequence
  Description of Artificial Sequence: Synthetic oligonucleotide
  Sense Strand Starting at position 560 of SEQ ID NO: 316242
uguucuaggcacuguuaca

SEQ ID NO: 362674 - RNA, 19 nt, Artificial Sequence
  Description of Artificial Sequence: Synthetic oligonucleotide
  Antisense Strand to SEQ ID NO: 362673
uguaacagugccuagaaca

SEQ ID NO: 362675 - RNA, 19 nt, Artificial Sequence
  Description of Artificial Sequence: Synthetic oligonucleotide
  Sense Strand Starting at position 560 of SEQ ID NO: 316437
uggccugccucagugauuu

SEQ ID NO: 362676 - RNA, 19 nt, Artificial Sequence
  Description of Artificial Sequence: Synthetic oligonucleotide
  Antisense Strand to SEQ ID NO: 362675
aaaucacugaggcaggcca

SEQ ID NO: 362677 - RNA, 19 nt, Artificial Sequence
  Description of Artificial Sequence: Synthetic oligonucleotide
  Sense Strand Starting at position 560 of SEQ ID NO: 316456
caggcuuugcaaggucaaa

SEQ ID NO: 362678 - RNA, 19 nt, Artificial Sequence
  Description of Artificial Sequence: Synthetic oligonucleotide
  Antisense Strand to SEQ ID NO: 362677
uuugaccuugcaaagccug

SEQ ID NO: 362679 - RNA, 19 nt, Artificial Sequence
  Description of Artificial Sequence: Synthetic oligonucleotide
  Sense Strand Starting at position 560 of SEQ ID NO: 316474
aguaauuugucucaucaau

SEQ ID NO: 362680 - RNA, 19 nt, Artificial Sequence
  Description of Artificial Sequence: Synthetic oligonucleotide
  Antisense Strand to SEQ ID NO: 362679
auugaugagacaaauuacu

SEQ ID NO: 362681 - RNA, 19 nt, Artificial Sequence
  Description of Artificial Sequence: Synthetic oligonucleotide
  Sense Strand Starting at position 560 of SEQ ID NO: 316507
uggccuacuccugaaagua

SEQ ID NO: 362682 - RNA, 19 nt, Artificial Sequence
  Description of Artificial Sequence: Synthetic oligonucleotide
  Antisense Strand to SEQ ID NO: 362681
uacuuucaggaguaggcca

SEQ ID NO: 362683 - RNA, 19 nt, Artificial Sequence
  Description of Artificial Sequence: Synthetic oligonucleotide
  Sense Strand Starting at position 560 of SEQ ID NO: 316542
ugaggugcauucuuaaggu

SEQ ID NO: 362684 - RNA, 19 nt, Artificial Sequence
  Description of Artificial Sequence: Synthetic oligonucleotide
  Antisense Strand to SEQ ID NO: 362683
accuuaagaaugcaccuca

SEQ ID NO: 362685 - RNA, 19 nt, Artificial Sequence
  Description of Artificial Sequence: Synthetic oligonucleotide
  Sense Strand Starting at position 560 of SEQ ID NO: 316552
ucuuaagguugauugcaaa

SEQ ID NO: 362686 - RNA, 19 nt, Artificial Sequence
  Description of Artificial Sequence: Synthetic oligonucleotide
  Antisense Strand to SEQ ID NO: 362685
uuugcaaucaaccuuaaga

SEQ ID NO: 362687 - RNA, 19 nt, Artificial Sequence
  Description of Artificial Sequence: Synthetic oligonucleotide
  Sense Strand Starting at position 560 of SEQ ID NO: 316638
gcuaaauauuccuucuggu

SEQ ID NO: 362688 - RNA, 19 nt, Artificial Sequence
  Description of Artificial Sequence: Synthetic oligonucleotide
  Antisense Strand to SEQ ID NO: 362687
accagaaggaauauuuagc

SEQ ID NO: 362689 - RNA, 19 nt, Artificial Sequence
  Description of Artificial Sequence: Synthetic oligonucleotide
  Sense Strand Starting at position 560 of SEQ ID NO: 316652
cugguaucuuucucccacu

SEQ ID NO: 362690 - RNA, 19 nt, Artificial Sequence
  Description of Artificial Sequence: Synthetic oligonucleotide
  Antisense Strand to SEQ ID NO: 362689
agugggagaaagauaccag

SEQ ID NO: 362691 - RNA, 19 nt, Artificial Sequence
  Description of Artificial Sequence: Synthetic oligonucleotide
  Sense Strand Starting at position 560 of SEQ ID NO: 316816
ugucuaauccagcaagaaa

SEQ ID NO: 362692 - RNA, 19 nt, Artificial Sequence
  Description of Artificial Sequence: Synthetic oligonucleotide
  Antisense Strand to SEQ ID NO: 362691
uuucuugcuggauuagaca

SEQ ID NO: 362693 - RNA, 19 nt, Artificial Sequence
  Description of Artificial Sequence: Synthetic oligonucleotide
  Sense Strand Starting at position 560 of SEQ ID NO: 316847
aggaguuuccacugccaag

SEQ ID NO: 362694 - RNA, 19 nt, Artificial Sequence
  Description of Artificial Sequence: Synthetic oligonucleotide
  Antisense Strand to SEQ ID NO: 362693
cuuggcaguggaaacuccu

SEQ ID NO: 362695 - RNA, 19 nt, Artificial Sequence
  Description of Artificial Sequence: Synthetic oligonucleotide
  Sense Strand Starting at position 560 of SEQ ID NO: 316930
gcugguuguguguucaucu

SEQ ID NO: 362696 - RNA, 19 nt, Artificial Sequence
  Description of Artificial Sequence: Synthetic oligonucleotide
  Antisense Strand to SEQ ID NO: 362695
agaugaacacacaaccagc

SEQ ID NO: 362697 - RNA, 19 nt, Artificial Sequence
  Description of Artificial Sequence: Synthetic oligonucleotide
  Sense Strand Starting at position 560 of SEQ ID NO: 316976
uguuaaucagaggagcagu

SEQ ID NO: 362698 - RNA, 19 nt, Artificial Sequence
  Description of Artificial Sequence: Synthetic oligonucleotide
  Antisense Strand to SEQ ID NO: 362697
acugcuccucugauuaaca

SEQ ID NO: 362699 - RNA, 19 nt, Artificial Sequence
  Description of Artificial Sequence: Synthetic oligonucleotide
  Sense Strand Starting at position 560 of SEQ ID NO: 316986
aggagcaguaccugagaga

SEQ ID NO: 362700 - RNA, 19 nt, Artificial Sequence
  Description of Artificial Sequence: Synthetic oligonucleotide
  Antisense Strand to SEQ ID NO: 362699
ucucucagguacugcuccu

SEQ ID NO: 362701 - RNA, 19 nt, Artificial Sequence
  Description of Artificial Sequence: Synthetic oligonucleotide
  Sense Strand Starting at position 560 of SEQ ID NO: 317026
cggagaaccucugugaaca

SEQ ID NO: 362702 - RNA, 19 nt, Artificial Sequence
  Description of Artificial Sequence: Synthetic oligonucleotide
  Antisense Strand to SEQ ID NO: 362701
uguucacagagguucuccg

SEQ ID NO: 362703 - RNA, 19 nt, Artificial Sequence
  Description of Artificial Sequence: Synthetic oligonucleotide
  Sense Strand Starting at position 560 of SEQ ID NO: 317263
gaacaaagcccgugggaau

SEQ ID NO: 362704 - RNA, 19 nt, Artificial Sequence
  Description of Artificial Sequence: Synthetic oligonucleotide
  Antisense Strand to SEQ ID NO: 362703
auucccacgggcuuuguuc

SEQ ID NO: 362705 - RNA, 19 nt, Artificial Sequence
  Description of Artificial Sequence: Synthetic oligonucleotide
  Sense Strand Starting at position 560 of SEQ ID NO: 318760
guaaccaaaucuguaaguu

SEQ ID NO: 362706 - RNA, 19 nt, Artificial Sequence
  Description of Artificial Sequence: Synthetic oligonucleotide
  Antisense Strand to SEQ ID NO: 362705
aacuuacagauuugguuac

SEQ ID NO: 362707 - RNA, 19 nt, Artificial Sequence
  Description of Artificial Sequence: Synthetic oligonucleotide
  Sense Strand Starting at position 560 of SEQ ID NO: 318770
cuguaaguuaaaugggcau

SEQ ID NO: 362708 - RNA, 19 nt, Artificial Sequence
  Description of Artificial Sequence: Synthetic oligonucleotide
  Antisense Strand to SEQ ID NO: 362707
augcccauuuaacuuacag

SEQ ID NO: 362709 - RNA, 19 nt, Artificial Sequence
  Description of Artificial Sequence: Synthetic oligonucleotide
  Sense Strand Starting at position 560 of SEQ ID NO: 318900
ugguaugugugacccauaa

SEQ ID NO: 362710 - RNA, 19 nt, Artificial Sequence
  Description of Artificial Sequence: Synthetic oligonucleotide
  Antisense Strand to SEQ ID NO: 362709
uuaugggucacacauacca

SEQ ID NO: 362711 - RNA, 19 nt, Artificial Sequence
  Description of Artificial Sequence: Synthetic oligonucleotide
  Sense Strand Starting at position 560 of SEQ ID NO: 318902
guaugugugacccauaauu

SEQ ID NO: 362712 - RNA, 19 nt, Artificial Sequence
  Description of Artificial Sequence: Synthetic oligonucleotide
  Antisense Strand to SEQ ID NO: 362711
aauuaugggucacacauac

SEQ ID NO: 362713 - RNA, 19 nt, Artificial Sequence
  Description of Artificial Sequence: Synthetic oligonucleotide
  Sense Strand Starting at position 560 of SEQ ID NO: 318933
agagaaggaugggaaauaa

SEQ ID NO: 362714 - RNA, 19 nt, Artificial Sequence
  Description of Artificial Sequence: Synthetic oligonucleotide
  Antisense Strand to SEQ ID NO: 362713
uuauuucccauccuucucu

SEQ ID NO: 362715 - RNA, 19 nt, Artificial Sequence
  Description of Artificial Sequence: Synthetic oligonucleotide
  Sense Strand Starting at position 560 of SEQ ID NO: 318953
agagaauuauugccuucuc

SEQ ID NO: 362716 - RNA, 19 nt, Artificial Sequence
  Description of Artificial Sequence: Synthetic oligonucleotide
  Antisense Strand to SEQ ID NO: 362715
gagaaggcaauaauucucu

SEQ ID NO: 362717 - RNA, 19 nt, Artificial Sequence
  Description of Artificial Sequence: Synthetic oligonucleotide
  Sense Strand Starting at position 560 of SEQ ID NO: 319033
aguccuaguucugcaacua

SEQ ID NO: 362718 - RNA, 19 nt, Artificial Sequence
  Description of Artificial Sequence: Synthetic oligonucleotide
  Antisense Strand to SEQ ID NO: 362717
uaguugcagaacuaggacu

SEQ ID NO: 362719 - RNA, 19 nt, Artificial Sequence
  Description of Artificial Sequence: Synthetic oligonucleotide
  Sense Strand Starting at position 560 of SEQ ID NO: 319034
guccuaguucugcaacuaa

SEQ ID NO: 362720 - RNA, 19 nt, Artificial Sequence
  Description of Artificial Sequence: Synthetic oligonucleotide
  Antisense Strand to SEQ ID NO: 362719
uuaguugcagaacuaggac

SEQ ID NO: 362721 - RNA, 19 nt, Artificial Sequence
  Description of Artificial Sequence: Synthetic oligonucleotide
  Sense Strand Starting at position 560 of SEQ ID NO: 319044
ugcaacuaacucugugaua

SEQ ID NO: 362722 - RNA, 19 nt, Artificial Sequence
  Description of Artificial Sequence: Synthetic oligonucleotide
  Antisense Strand to SEQ ID NO: 362721
uaucacagaguuaguugca

SEQ ID NO: 362723 - RNA, 19 nt, Artificial Sequence
  Description of Artificial Sequence: Synthetic oligonucleotide
  Sense Strand Starting at position 560 of SEQ ID NO: 319045
gcaacuaacucugugauau

SEQ ID NO: 362724 - RNA, 19 nt, Artificial Sequence
  Description of Artificial Sequence: Synthetic oligonucleotide
  Antisense Strand to SEQ ID NO: 362723
auaucacagaguuaguugc

SEQ ID NO: 362725 - RNA, 19 nt, Artificial Sequence
  Description of Artificial Sequence: Synthetic oligonucleotide
  Sense Strand Starting at position 560 of SEQ ID NO: 319083
gggcuucuaccaggagaag

SEQ ID NO: 362726 - RNA, 19 nt, Artificial Sequence
  Description of Artificial Sequence: Synthetic oligonucleotide
  Antisense Strand to SEQ ID NO: 362725
cuucuccugguagaagccc

SEQ ID NO: 362727 - RNA, 19 nt, Artificial Sequence
  Description of Artificial Sequence: Synthetic oligonucleotide
  Sense Strand Starting at position 560 of SEQ ID NO: 319116
auuagacaucccugugaag

SEQ ID NO: 362728 - RNA, 19 nt, Artificial Sequence
  Description of Artificial Sequence: Synthetic oligonucleotide
  Antisense Strand to SEQ ID NO: 362727
cuucacagggaugucuaau

SEQ ID NO: 362729 - RNA, 19 nt, Artificial Sequence
  Description of Artificial Sequence: Synthetic oligonucleotide
  Sense Strand Starting at position 560 of SEQ ID NO: 319118
uagacaucccugugaagga

SEQ ID NO: 362730 - RNA, 19 nt, Artificial Sequence
  Description of Artificial Sequence: Synthetic oligonucleotide
  Antisense Strand to SEQ ID NO: 362729
uccuucacagggaugucua

SEQ ID NO: 362731 - RNA, 19 nt, Artificial Sequence
  Description of Artificial Sequence: Synthetic oligonucleotide
  Sense Strand Starting at position 560 of SEQ ID NO: 319143
acuugaaguugauuggcaa

SEQ ID NO: 362732 - RNA, 19 nt, Artificial Sequence
  Description of Artificial Sequence: Synthetic oligonucleotide
  Antisense Strand to SEQ ID NO: 362731
uugccaaucaacuucaagu

SEQ ID NO: 362733 - RNA, 19 nt, Artificial Sequence
  Description of Artificial Sequence: Synthetic oligonucleotide
  Sense Strand Starting at position 560 of SEQ ID NO: 319144
cuugaaguugauuggcaau

SEQ ID NO: 362734 - RNA, 19 nt, Artificial Sequence
  Description of Artificial Sequence: Synthetic oligonucleotide
  Antisense Strand to SEQ ID NO: 362733
auugccaaucaacuucaag

SEQ ID NO: 362735 - RNA, 19 nt, Artificial Sequence
  Description of Artificial Sequence: Synthetic oligonucleotide
  Sense Strand Starting at position 560 of SEQ ID NO: 319150
guugauuggcaaugccuaa

SEQ ID NO: 362736 - RNA, 19 nt, Artificial Sequence
  Description of Artificial Sequence: Synthetic oligonucleotide
  Antisense Strand to SEQ ID NO: 362735
uuaggcauugccaaucaac

SEQ ID NO: 362737 - RNA, 19 nt, Artificial Sequence
  Description of Artificial Sequence: Synthetic oligonucleotide
  Sense Strand Starting at position 560 of SEQ ID NO: 319212
ccuggaggauuauccaagu

SEQ ID NO: 362738 - RNA, 19 nt, Artificial Sequence
  Description of Artificial Sequence: Synthetic oligonucleotide
  Antisense Strand to SEQ ID NO: 362737
acuuggauaauccuccagg

SEQ ID NO: 362739 - RNA, 19 nt, Artificial Sequence
  Description of Artificial Sequence: Synthetic oligonucleotide
  Sense Strand Starting at position 561 of SEQ ID NO: 315259
gcaugugcacugucauagu

SEQ ID NO: 362740 - RNA, 19 nt, Artificial Sequence
  Description of Artificial Sequence: Synthetic oligonucleotide
  Antisense Strand to SEQ ID NO: 362739
acuaugacagugcacaugc

SEQ ID NO: 362741 - RNA, 19 nt, Artificial Sequence
  Description of Artificial Sequence: Synthetic oligonucleotide
  Sense Strand Starting at position 561 of SEQ ID NO: 315272
cauaguccucccugagaug

SEQ ID NO: 362742 - RNA, 19 nt, Artificial Sequence
  Description of Artificial Sequence: Synthetic oligonucleotide
  Antisense Strand to SEQ ID NO: 362741
caucucagggaggacuaug

SEQ ID NO: 362743 - RNA, 19 nt, Artificial Sequence
  Description of Artificial Sequence: Synthetic oligonucleotide
  Sense Strand Starting at position 561 of SEQ ID NO: 315273
auaguccucccugagaugu

SEQ ID NO: 362744 - RNA, 19 nt, Artificial Sequence
  Description of Artificial Sequence: Synthetic oligonucleotide
  Antisense Strand to SEQ ID NO: 362743
acaucucagggaggacuau

SEQ ID NO: 362745 - RNA, 19 nt, Artificial Sequence
  Description of Artificial Sequence: Synthetic oligonucleotide
  Sense Strand Starting at position 561 of SEQ ID NO: 315284
ugagauguguugcuccaag

SEQ ID NO: 362746 - RNA, 19 nt, Artificial Sequence
  Description of Artificial Sequence: Synthetic oligonucleotide
  Antisense Strand to SEQ ID NO: 362745
cuuggagcaacacaucuca

SEQ ID NO: 362747 - RNA, 19 nt, Artificial Sequence
  Description of Artificial Sequence: Synthetic oligonucleotide
  Sense Strand Starting at position 561 of SEQ ID NO: 315298
ccaagaaggaacuguguca

SEQ ID NO: 362748 - RNA, 19 nt, Artificial Sequence
  Description of Artificial Sequence: Synthetic oligonucleotide
  Antisense Strand to SEQ ID NO: 362747
ugacacaguuccuucuugg

SEQ ID NO: 362749 - RNA, 19 nt, Artificial Sequence
  Description of Artificial Sequence: Synthetic oligonucleotide
  Sense Strand Starting at position 561 of SEQ ID NO: 315305
ggaacugugucaccaagua

SEQ ID NO: 362750 - RNA, 19 nt, Artificial Sequence
  Description of Artificial Sequence: Synthetic oligonucleotide
  Antisense Strand to SEQ ID NO: 362749
uacuuggugacacaguucc

SEQ ID NO: 362751 - RNA, 19 nt, Artificial Sequence
  Description of Artificial Sequence: Synthetic oligonucleotide
  Sense Strand Starting at position 561 of SEQ ID NO: 315413
gggauugaucaguggugug

SEQ ID NO: 362752 - RNA, 19 nt, Artificial Sequence
  Description of Artificial Sequence: Synthetic oligonucleotide
  Antisense Strand to SEQ ID NO: 362751
cacaccacugaucaauccc

SEQ ID NO: 362753 - RNA, 19 nt, Artificial Sequence
  Description of Artificial Sequence: Synthetic oligonucleotide
  Sense Strand Starting at position 561 of SEQ ID NO: 315503
ccacuuuacucaguguaga

SEQ ID NO: 362754 - RNA, 19 nt, Artificial Sequence
  Description of Artificial Sequence: Synthetic oligonucleotide
  Antisense Strand to SEQ ID NO: 362753
ucuacacugaguaaagugg

SEQ ID NO: 362755 - RNA, 19 nt, Artificial Sequence
  Description of Artificial Sequence: Synthetic oligonucleotide
  Sense Strand Starting at position 561 of SEQ ID NO: 315506
cuuuacucaguguagacau

SEQ ID NO: 362756 - RNA, 19 nt, Artificial Sequence
  Description of Artificial Sequence: Synthetic oligonucleotide
  Antisense Strand to SEQ ID NO: 362755
augucuacacugaguaaag

SEQ ID NO: 362757 - RNA, 19 nt, Artificial Sequence
  Description of Artificial Sequence: Synthetic oligonucleotide
  Sense Strand Starting at position 561 of SEQ ID NO: 315563
gcuuucucuggagacacaa

SEQ ID NO: 362758 - RNA, 19 nt, Artificial Sequence
  Description of Artificial Sequence: Synthetic oligonucleotide
  Antisense Strand to SEQ ID NO: 362757
uugugucuccagagaaagc

SEQ ID NO: 362759 - RNA, 19 nt, Artificial Sequence
  Description of Artificial Sequence: Synthetic oligonucleotide
  Sense Strand Starting at position 561 of SEQ ID NO: 316059
ugacucgaguuauuacaaa

SEQ ID NO: 362760 - RNA, 19 nt, Artificial Sequence
  Description of Artificial Sequence: Synthetic oligonucleotide
  Antisense Strand to SEQ ID NO: 362759
uuuguaauaacucgaguca

SEQ ID NO: 362761 - RNA, 19 nt, Artificial Sequence
  Description of Artificial Sequence: Synthetic oligonucleotide
  Sense Strand Starting at position 561 of SEQ ID NO: 316142
ggguguugaacccaacacu

SEQ ID NO: 362762 - RNA, 19 nt, Artificial Sequence
  Description of Artificial Sequence: Synthetic oligonucleotide
  Antisense Strand to SEQ ID NO: 362761
aguguuggguucaacaccc

SEQ ID NO: 362763 - RNA, 19 nt, Artificial Sequence
  Description of Artificial Sequence: Synthetic oligonucleotide
  Sense Strand Starting at position 561 of SEQ ID NO: 316166
agagaaagccuacauguuu

SEQ ID NO: 362764 - RNA, 19 nt, Artificial Sequence
  Description of Artificial Sequence: Synthetic oligonucleotide
  Antisense Strand to SEQ ID NO: 362763
aaacauguaggcuuucucu

SEQ ID NO: 362765 - RNA, 19 nt, Artificial Sequence
  Description of Artificial Sequence: Synthetic oligonucleotide
  Sense Strand Starting at position 561 of SEQ ID NO: 316442
guguauuuguuaguagaga

SEQ ID NO: 362766 - RNA, 19 nt, Artificial Sequence
  Description of Artificial Sequence: Synthetic oligonucleotide
  Antisense Strand to SEQ ID NO: 362765
ucucuacuaacaaauacac

SEQ ID NO: 362767 - RNA, 19 nt, Artificial Sequence
  Description of Artificial Sequence: Synthetic oligonucleotide
  Sense Strand Starting at position 561 of SEQ ID NO: 316569
ggccaagccugacuuuaga

SEQ ID NO: 362768 - RNA, 19 nt, Artificial Sequence
  Description of Artificial Sequence: Synthetic oligonucleotide
  Antisense Strand to SEQ ID NO: 362767
ucuaaagucaggcuuggcc

SEQ ID NO: 362769 - RNA, 19 nt, Artificial Sequence
  Description of Artificial Sequence: Synthetic oligonucleotide
  Sense Strand Starting at position 561 of SEQ ID NO: 316686
gcauaaugauagcucauca

SEQ ID NO: 362770 - RNA, 19 nt, Artificial Sequence
  Description of Artificial Sequence: Synthetic oligonucleotide
  Antisense Strand to SEQ ID NO: 362769
ugaugagcuaucauuaugc

SEQ ID NO: 362771 - RNA, 19 nt, Artificial Sequence
  Description of Artificial Sequence: Synthetic oligonucleotide
  Sense Strand Starting at position 561 of SEQ ID NO: 316814
agacuugaguuucuaccca

SEQ ID NO: 362772 - RNA, 19 nt, Artificial Sequence
  Description of Artificial Sequence: Synthetic oligonucleotide
  Antisense Strand to SEQ ID NO: 362771
uggguagaaacucaagucu

SEQ ID NO: 362773 - RNA, 19 nt, Artificial Sequence
  Description of Artificial Sequence: Synthetic oligonucleotide
  Sense Strand Starting at position 561 of SEQ ID NO: 317468
ucaucaucguuccuuuaga

SEQ ID NO: 362774 - RNA, 19 nt, Artificial Sequence
  Description of Artificial Sequence: Synthetic oligonucleotide
  Antisense Strand to SEQ ID NO: 362773
ucuaaaggaacgaugauga

SEQ ID NO: 362775 - RNA, 19 nt, Artificial Sequence
  Description of Artificial Sequence: Synthetic oligonucleotide
  Sense Strand Starting at position 561 of SEQ ID NO: 317478
uccuuuagauggcucacua

SEQ ID NO: 362776 - RNA, 19 nt, Artificial Sequence
  Description of Artificial Sequence: Synthetic oligonucleotide
  Antisense Strand to SEQ ID NO: 362775
uagugagccaucuaaagga

SEQ ID NO: 362777 - RNA, 19 nt, Artificial Sequence
  Description of Artificial Sequence: Synthetic oligonucleotide
  Sense Strand Starting at position 561 of SEQ ID NO: 317482
uuagauggcucacuagaug

SEQ ID NO: 362778 - RNA, 19 nt, Artificial Sequence
  Description of Artificial Sequence: Synthetic oligonucleotide
  Antisense Strand to SEQ ID NO: 362777
caucuagugagccaucuaa

SEQ ID NO: 362779 - RNA, 19 nt, Artificial Sequence
  Description of Artificial Sequence: Synthetic oligonucleotide
  Sense Strand Starting at position 561 of SEQ ID NO: 317666
aguuuaacgauaggaugaa

SEQ ID NO: 362780 - RNA, 19 nt, Artificial Sequence
  Description of Artificial Sequence: Synthetic oligonucleotide
  Antisense Strand to SEQ ID NO: 362779
uucauccuaucguuaaacu

SEQ ID NO: 362781 - RNA, 19 nt, Artificial Sequence
  Description of Artificial Sequence: Synthetic oligonucleotide
  Sense Strand Starting at position 561 of SEQ ID NO: 317866
ggaucagaagcgcagucau

SEQ ID NO: 362782 - RNA, 19 nt, Artificial Sequence
  Description of Artificial Sequence: Synthetic oligonucleotide
  Antisense Strand to SEQ ID NO: 362781
augacugcgcuucugaucc

SEQ ID NO: 362783 - RNA, 19 nt, Artificial Sequence
  Description of Artificial Sequence: Synthetic oligonucleotide
  Sense Strand Starting at position 561 of SEQ ID NO: 317975
cauacuaaggaguguacuu

SEQ ID NO: 362784 - RNA, 19 nt, Artificial Sequence
  Description of Artificial Sequence: Synthetic oligonucleotide
  Antisense Strand to SEQ ID NO: 362783
aaguacacuccuuaguaug

SEQ ID NO: 362785 - RNA, 19 nt, Artificial Sequence
  Description of Artificial Sequence: Synthetic oligonucleotide
  Sense Strand Starting at position 561 of SEQ ID NO: 317990
acuuucugugcugagagua

SEQ ID NO: 362786 - RNA, 19 nt, Artificial Sequence
  Description of Artificial Sequence: Synthetic oligonucleotide
  Antisense Strand to SEQ ID NO: 362785
uacucucagcacagaaagu

SEQ ID NO: 362787 - RNA, 19 nt, Artificial Sequence
  Description of Artificial Sequence: Synthetic oligonucleotide
  Sense Strand Starting at position 561 of SEQ ID NO: 318257
gggaauggagauuguucua

SEQ ID NO: 362788 - RNA, 19 nt, Artificial Sequence
  Description of Artificial Sequence: Synthetic oligonucleotide
  Antisense Strand to SEQ ID NO: 362787
uagaacaaucuccauuccc

SEQ ID NO: 362789 - RNA, 19 nt, Artificial Sequence
  Description of Artificial Sequence: Synthetic oligonucleotide
  Sense Strand Starting at position 561 of SEQ ID NO: 318260
aauggagauuguucuagcu

SEQ ID NO: 362790 - RNA, 19 nt, Artificial Sequence
  Description of Artificial Sequence: Synthetic oligonucleotide
  Antisense Strand to SEQ ID NO: 362789
agcuagaacaaucuccauu

SEQ ID NO: 362791 - RNA, 19 nt, Artificial Sequence
  Description of Artificial Sequence: Synthetic oligonucleotide
  Sense Strand Starting at position 561 of SEQ ID NO: 318293
guauaagaggacugaguuu

SEQ ID NO: 362792 - RNA, 19 nt, Artificial Sequence
  Description of Artificial Sequence: Synthetic oligonucleotide
  Antisense Strand to SEQ ID NO: 362791
aaacucaguccucuuauac

SEQ ID NO: 362793 - RNA, 19 nt, Artificial Sequence
  Description of Artificial Sequence: Synthetic oligonucleotide
  Sense Strand Starting at position 561 of SEQ ID NO: 318426
ggaggauguguuugaucuc

SEQ ID NO: 362794 - RNA, 19 nt, Artificial Sequence
  Description of Artificial Sequence: Synthetic oligonucleotide
  Antisense Strand to SEQ ID NO: 362793
gagaucaaacacauccucc

SEQ ID NO: 362795 - RNA, 19 nt, Artificial Sequence
  Description of Artificial Sequence: Synthetic oligonucleotide
  Sense Strand Starting at position 561 of SEQ ID NO: 318429
ggauguguuugaucucuga

SEQ ID NO: 362796 - RNA, 19 nt, Artificial Sequence
  Description of Artificial Sequence: Synthetic oligonucleotide
  Antisense Strand to SEQ ID NO: 362795
ucagagaucaaacacaucc

SEQ ID NO: 362797 - RNA, 19 nt, Artificial Sequence
  Description of Artificial Sequence: Synthetic oligonucleotide
  Sense Strand Starting at position 561 of SEQ ID NO: 318580
agaaaugguugaucucuaa

SEQ ID NO: 362798 - RNA, 19 nt, Artificial Sequence
  Description of Artificial Sequence: Synthetic oligonucleotide
  Antisense Strand to SEQ ID NO: 362797
uuagagaucaaccauuucu

SEQ ID NO: 362799 - RNA, 19 nt, Artificial Sequence
  Description of Artificial Sequence: Synthetic oligonucleotide
  Sense Strand Starting at position 561 of SEQ ID NO: 318643
agaguaauccauugucaga

SEQ ID NO: 362800 - RNA, 19 nt, Artificial Sequence
  Description of Artificial Sequence: Synthetic oligonucleotide
  Antisense Strand to SEQ ID NO: 362799
ucugacaauggauuacucu

SEQ ID NO: 362801 - RNA, 19 nt, Artificial Sequence
  Description of Artificial Sequence: Synthetic oligonucleotide
  Sense Strand Starting at position 561 of SEQ ID NO: 318645
aguaauccauugucagaaa

SEQ ID NO: 362802 - RNA, 19 nt, Artificial Sequence
  Description of Artificial Sequence: Synthetic oligonucleotide
  Antisense Strand to SEQ ID NO: 362801
uuucugacaauggauuacu

SEQ ID NO: 362803 - RNA, 19 nt, Artificial Sequence
  Description of Artificial Sequence: Synthetic oligonucleotide
  Sense Strand Starting at position 561 of SEQ ID NO: 318669
gcguuuagcaguuugucua

SEQ ID NO: 362804 - RNA, 19 nt, Artificial Sequence
  Description of Artificial Sequence: Synthetic oligonucleotide
  Antisense Strand to SEQ ID NO: 362803
uagacaaacugcuaaacgc

SEQ ID NO: 362805 - RNA, 19 nt, Artificial Sequence
  Description of Artificial Sequence: Synthetic oligonucleotide
  Sense Strand Starting at position 561 of SEQ ID NO: 318676
gcaguuugucuagagcaaa

SEQ ID NO: 362806 - RNA, 19 nt, Artificial Sequence
  Description of Artificial Sequence: Synthetic oligonucleotide
  Antisense Strand to SEQ ID NO: 362805
uuugcucuagacaaacugc

SEQ ID NO: 362807 - RNA, 19 nt, Artificial Sequence
  Description of Artificial Sequence: Synthetic oligonucleotide
  Sense Strand Starting at position 561 of SEQ ID NO: 318679
guuugucuagagcaaauga

SEQ ID NO: 362808 - RNA, 19 nt, Artificial Sequence
  Description of Artificial Sequence: Synthetic oligonucleotide
  Antisense Strand to SEQ ID NO: 362807
ucauuugcucuagacaaac

SEQ ID NO: 362809 - RNA, 19 nt, Artificial Sequence
  Description of Artificial Sequence: Synthetic oligonucleotide
  Sense Strand Starting at position 561 of SEQ ID NO: 318726
ggguuuaguguggaguuaa

SEQ ID NO: 362810 - RNA, 19 nt, Artificial Sequence
  Description of Artificial Sequence: Synthetic oligonucleotide
  Antisense Strand to SEQ ID NO: 362809
uuaacuccacacuaaaccc

SEQ ID NO: 362811 - RNA, 19 nt, Artificial Sequence
  Description of Artificial Sequence: Synthetic oligonucleotide
  Sense Strand Starting at position 561 of SEQ ID NO: 318734
uguggaguuaaauguacuu

SEQ ID NO: 362812 - RNA, 19 nt, Artificial Sequence
  Description of Artificial Sequence: Synthetic oligonucleotide
  Antisense Strand to SEQ ID NO: 362811
aaguacauuuaacuccaca

SEQ ID NO: 362813 - RNA, 19 nt, Artificial Sequence
  Description of Artificial Sequence: Synthetic oligonucleotide
  Sense Strand Starting at position 561 of SEQ ID NO: 318910
gugaaauaguuuccugaag

SEQ ID NO: 362814 - RNA, 19 nt, Artificial Sequence
  Description of Artificial Sequence: Synthetic oligonucleotide
  Antisense Strand to SEQ ID NO: 362813
cuucaggaaacuauuucac

SEQ ID NO: 362815 - RNA, 19 nt, Artificial Sequence
  Description of Artificial Sequence: Synthetic oligonucleotide
  Sense Strand Starting at position 561 of SEQ ID NO: 318911
ugaaauaguuuccugaagu

SEQ ID NO: 362816 - RNA, 19 nt, Artificial Sequence
  Description of Artificial Sequence: Synthetic oligonucleotide
  Antisense Strand to SEQ ID NO: 362815
acuucaggaaacuauuuca

SEQ ID NO: 362817 - RNA, 19 nt, Artificial Sequence
  Description of Artificial Sequence: Synthetic oligonucleotide
  Sense Strand Starting at position 561 of SEQ ID NO: 319053
cggccaaugcuauaaggaa

SEQ ID NO: 362818 - RNA, 19 nt, Artificial Sequence
  Description of Artificial Sequence: Synthetic oligonucleotide
  Antisense Strand to SEQ ID NO: 362817
uuccuuauagcauuggccg

SEQ ID NO: 362819 - RNA, 19 nt, Artificial Sequence
  Description of Artificial Sequence: Synthetic oligonucleotide
  Sense Strand Starting at position 562 of SEQ ID NO: 315316
uggauuagccaucaguaua

SEQ ID NO: 362820 - RNA, 19 nt, Artificial Sequence
  Description of Artificial Sequence: Synthetic oligonucleotide
  Antisense Strand to SEQ ID NO: 362819
uauacugauggcuaaucca

SEQ ID NO: 362821 - RNA, 19 nt, Artificial Sequence
  Description of Artificial Sequence: Synthetic oligonucleotide
  Sense Strand Starting at position 562 of SEQ ID NO: 315352
ugcauaaccucacuugaag

SEQ ID NO: 362822 - RNA, 19 nt, Artificial Sequence
  Description of Artificial Sequence: Synthetic oligonucleotide
  Antisense Strand to SEQ ID NO: 362821
cuucaagugagguuaugca

SEQ ID NO: 362823 - RNA, 19 nt, Artificial Sequence
  Description of Artificial Sequence: Synthetic oligonucleotide
  Sense Strand Starting at position 562 of SEQ ID NO: 315517
cagguuaaggaguagcuau

SEQ ID NO: 362824 - RNA, 19 nt, Artificial Sequence
  Description of Artificial Sequence: Synthetic oligonucleotide
  Antisense Strand to SEQ ID NO: 362823
auagcuacuccuuaaccug

SEQ ID NO: 362825 - RNA, 19 nt, Artificial Sequence
  Description of Artificial Sequence: Synthetic oligonucleotide
  Sense Strand Starting at position 562 of SEQ ID NO: 315667
ucaagaaaggcugguacua

SEQ ID NO: 362826 - RNA, 19 nt, Artificial Sequence
  Description of Artificial Sequence: Synthetic oligonucleotide
  Antisense Strand to SEQ ID NO: 362825
uaguaccagccuuucuuga

SEQ ID NO: 362827 - RNA, 19 nt, Artificial Sequence
  Description of Artificial Sequence: Synthetic oligonucleotide
  Sense Strand Starting at position 562 of SEQ ID NO: 315669
aagaaaggcugguacuaaa

SEQ ID NO: 362828 - RNA, 19 nt, Artificial Sequence
  Description of Artificial Sequence: Synthetic oligonucleotide
  Antisense Strand to SEQ ID NO: 362827
uuuaguaccagccuuucuu

SEQ ID NO: 362829 - RNA, 19 nt, Artificial Sequence
  Description of Artificial Sequence: Synthetic oligonucleotide
  Sense Strand Starting at position 562 of SEQ ID NO: 315679
gguacuaaaucguuugaag

SEQ ID NO: 362830 - RNA, 19 nt, Artificial Sequence
  Description of Artificial Sequence: Synthetic oligonucleotide
  Antisense Strand to SEQ ID NO: 362829
cuucaaacgauuuaguacc

SEQ ID NO: 362831 - RNA, 19 nt, Artificial Sequence
  Description of Artificial Sequence: Synthetic oligonucleotide
  Sense Strand Starting at position 562 of SEQ ID NO: 315681
uacuaaaucguuugaaguu

SEQ ID NO: 362832 - RNA, 19 nt, Artificial Sequence
  Description of Artificial Sequence: Synthetic oligonucleotide
  Antisense Strand to SEQ ID NO: 362831
aacuucaaacgauuuagua

SEQ ID NO: 362833 - RNA, 19 nt, Artificial Sequence
  Description of Artificial Sequence: Synthetic oligonucleotide
  Sense Strand Starting at position 562 of SEQ ID NO: 315727
aauaauuugugcuuugguu

SEQ ID NO: 362834 - RNA, 19 nt, Artificial Sequence
  Description of Artificial Sequence: Synthetic oligonucleotide
  Antisense Strand to SEQ ID NO: 362833
aaccaaagcacaaauuauu

SEQ ID NO: 362835 - RNA, 19 nt, Artificial Sequence
  Description of Artificial Sequence: Synthetic oligonucleotide
  Sense Strand Starting at position 562 of SEQ ID NO: 315900
ugauuugaguuugggcaaa

SEQ ID NO: 362836 - RNA, 19 nt, Artificial Sequence
  Description of Artificial Sequence: Synthetic oligonucleotide
  Antisense Strand to SEQ ID NO: 362835
uuugcccaaacucaaauca

SEQ ID NO: 362837 - RNA, 19 nt, Artificial Sequence
  Description of Artificial Sequence: Synthetic oligonucleotide
  Sense Strand Starting at position 562 of SEQ ID NO: 316322
ggagcugaguucuuaucaa

SEQ ID NO: 362838 - RNA, 19 nt, Artificial Sequence
  Description of Artificial Sequence: Synthetic oligonucleotide
  Antisense Strand to SEQ ID NO: 362837
uugauaagaacucagcucc

SEQ ID NO: 362839 - RNA, 19 nt, Artificial Sequence
  Description of Artificial Sequence: Synthetic oligonucleotide
  Sense Strand Starting at position 562 of SEQ ID NO: 316418
agggaugaauucuucccuu

SEQ ID NO: 362840 - RNA, 19 nt, Artificial Sequence
  Description of Artificial Sequence: Synthetic oligonucleotide
  Antisense Strand to SEQ ID NO: 362839
aagggaagaauucaucccu

SEQ ID NO: 362841 - RNA, 19 nt, Artificial Sequence
  Description of Artificial Sequence: Synthetic oligonucleotide
  Sense Strand Starting at position 562 of SEQ ID NO: 316455
gggcuucugaacugacaca

SEQ ID NO: 362842 - RNA, 19 nt, Artificial Sequence
  Description of Artificial Sequence: Synthetic oligonucleotide
  Antisense Strand to SEQ ID NO: 362841
ugugucaguucagaagccc

SEQ ID NO: 362843 - RNA, 19 nt, Artificial Sequence
  Description of Artificial Sequence: Synthetic oligonucleotide
  Sense Strand Starting at position 562 of SEQ ID NO: 316553
gcuauaugcuauucuaaga

SEQ ID NO: 362844 - RNA, 19 nt, Artificial Sequence
  Description of Artificial Sequence: Synthetic oligonucleotide
  Antisense Strand to SEQ ID NO: 362843
ucuuagaauagcauauagc

SEQ ID NO: 362845 - RNA, 19 nt, Artificial Sequence
  Description of Artificial Sequence: Synthetic oligonucleotide
  Sense Strand Starting at position 562 of SEQ ID NO: 316629
cccagaagauucccucgau

SEQ ID NO: 362846 - RNA, 19 nt, Artificial Sequence
  Description of Artificial Sequence: Synthetic oligonucleotide
  Antisense Strand to SEQ ID NO: 362845
aucgagggaaucuucuggg

SEQ ID NO: 362847 - RNA, 19 nt, Artificial Sequence
  Description of Artificial Sequence: Synthetic oligonucleotide
  Sense Strand Starting at position 562 of SEQ ID NO: 316630
ccagaagauucccucgauc

SEQ ID NO: 362848 - RNA, 19 nt, Artificial Sequence
  Description of Artificial Sequence: Synthetic oligonucleotide
  Antisense Strand to SEQ ID NO: 362847
gaucgagggaaucuucugg

SEQ ID NO: 362849 - RNA, 19 nt, Artificial Sequence
  Description of Artificial Sequence: Synthetic oligonucleotide
  Sense Strand Starting at position 562 of SEQ ID NO: 316632
agaagauucccucgaucau

SEQ ID NO: 362850 - RNA, 19 nt, Artificial Sequence
  Description of Artificial Sequence: Synthetic oligonucleotide
  Antisense Strand to SEQ ID NO: 362849
augaucgagggaaucuucu

SEQ ID NO: 362851 - RNA, 19 nt, Artificial Sequence
  Description of Artificial Sequence: Synthetic oligonucleotide
  Sense Strand Starting at position 562 of SEQ ID NO: 316815
aggccaugucguuauaccu

SEQ ID NO: 362852 - RNA, 19 nt, Artificial Sequence
  Description of Artificial Sequence: Synthetic oligonucleotide
  Antisense Strand to SEQ ID NO: 362851
agguauaacgacauggccu

SEQ ID NO: 362853 - RNA, 19 nt, Artificial Sequence
  Description of Artificial Sequence: Synthetic oligonucleotide
  Sense Strand Starting at position 562 of SEQ ID NO: 316822
gucguuauaccuuaagaga

SEQ ID NO: 362854 - RNA, 19 nt, Artificial Sequence
  Description of Artificial Sequence: Synthetic oligonucleotide
  Antisense Strand to SEQ ID NO: 362853
ucucuuaagguauaacgac

SEQ ID NO: 362855 - RNA, 19 nt, Artificial Sequence
  Description of Artificial Sequence: Synthetic oligonucleotide
  Sense Strand Starting at position 562 of SEQ ID NO: 316884
uuggaacuuggugagcaua

SEQ ID NO: 362856 - RNA, 19 nt, Artificial Sequence
  Description of Artificial Sequence: Synthetic oligonucleotide
  Antisense Strand to SEQ ID NO: 362855
uaugcucaccaaguuccaa

SEQ ID NO: 362857 - RNA, 19 nt, Artificial Sequence
  Description of Artificial Sequence: Synthetic oligonucleotide
  Sense Strand Starting at position 562 of SEQ ID NO: 316886
ggaacuuggugagcauaaa

SEQ ID NO: 362858 - RNA, 19 nt, Artificial Sequence
  Description of Artificial Sequence: Synthetic oligonucleotide
  Antisense Strand to SEQ ID NO: 362857
uuuaugcucaccaaguucc

SEQ ID NO: 362859 - RNA, 19 nt, Artificial Sequence
  Description of Artificial Sequence: Synthetic oligonucleotide
  Sense Strand Starting at position 562 of SEQ ID NO: 317879
cacugacuccuuugaggga

SEQ ID NO: 362860 - RNA, 19 nt, Artificial Sequence
  Description of Artificial Sequence: Synthetic oligonucleotide
  Antisense Strand to SEQ ID NO: 362859
ucccucaaaggagucagug

SEQ ID NO: 362861 - RNA, 19 nt, Artificial Sequence
  Description of Artificial Sequence: Synthetic oligonucleotide
  Sense Strand Starting at position 562 of SEQ ID NO: 317919
ggguuagagcgguaggagu

SEQ ID NO: 362862 - RNA, 19 nt, Artificial Sequence
  Description of Artificial Sequence: Synthetic oligonucleotide
  Antisense Strand to SEQ ID NO: 362861
acuccuaccgcucuaaccc

SEQ ID NO: 362863 - RNA, 19 nt, Artificial Sequence
  Description of Artificial Sequence: Synthetic oligonucleotide
  Sense Strand Starting at position 562 of SEQ ID NO: 317971
gucuguuuccaccaaguga

SEQ ID NO: 362864 - RNA, 19 nt, Artificial Sequence
  Description of Artificial Sequence: Synthetic oligonucleotide
  Antisense Strand to SEQ ID NO: 362863
ucacuugguggaaacagac

SEQ ID NO: 362865 - RNA, 19 nt, Artificial Sequence
  Description of Artificial Sequence: Synthetic oligonucleotide
  Sense Strand Starting at position 562 of SEQ ID NO: 318335
uuaaacuuguaggcagaau

SEQ ID NO: 362866 - RNA, 19 nt, Artificial Sequence
  Description of Artificial Sequence: Synthetic oligonucleotide
  Antisense Strand to SEQ ID NO: 362865
auucugccuacaaguuuaa

SEQ ID NO: 362867 - RNA, 19 nt, Artificial Sequence
  Description of Artificial Sequence: Synthetic oligonucleotide
  Sense Strand Starting at position 562 of SEQ ID NO: 318355
agcuccauucuacagauga

SEQ ID NO: 362868 - RNA, 19 nt, Artificial Sequence
  Description of Artificial Sequence: Synthetic oligonucleotide
  Antisense Strand to SEQ ID NO: 362867
ucaucuguagaauggagcu

SEQ ID NO: 362869 - RNA, 19 nt, Artificial Sequence
  Description of Artificial Sequence: Synthetic oligonucleotide
  Sense Strand Starting at position 562 of SEQ ID NO: 318411
guguguugucagcugguga

SEQ ID NO: 362870 - RNA, 19 nt, Artificial Sequence
  Description of Artificial Sequence: Synthetic oligonucleotide
  Antisense Strand to SEQ ID NO: 362869
ucaccagcugacaacacac

SEQ ID NO: 362871 - RNA, 19 nt, Artificial Sequence
  Description of Artificial Sequence: Synthetic oligonucleotide
  Sense Strand Starting at position 562 of SEQ ID NO: 318565
uggaguugcagguagcauu

SEQ ID NO: 362872 - RNA, 19 nt, Artificial Sequence
  Description of Artificial Sequence: Synthetic oligonucleotide
  Antisense Strand to SEQ ID NO: 362871
aaugcuaccugcaacucca

SEQ ID NO: 362873 - RNA, 19 nt, Artificial Sequence
  Description of Artificial Sequence: Synthetic oligonucleotide
  Sense Strand Starting at position 562 of SEQ ID NO: 318587
agagaauugcucuguuucc

SEQ ID NO: 362874 - RNA, 19 nt, Artificial Sequence
  Description of Artificial Sequence: Synthetic oligonucleotide
  Antisense Strand to SEQ ID NO: 362873
ggaaacagagcaauucucu

SEQ ID NO: 362875 - RNA, 19 nt, Artificial Sequence
  Description of Artificial Sequence: Synthetic oligonucleotide
  Sense Strand Starting at position 562 of SEQ ID NO: 318588
gagaauugcucuguuuccu

SEQ ID NO: 362876 - RNA, 19 nt, Artificial Sequence
  Description of Artificial Sequence: Synthetic oligonucleotide
  Antisense Strand to SEQ ID NO: 362875
aggaaacagagcaauucuc

SEQ ID NO: 362877 - RNA, 19 nt, Artificial Sequence
  Description of Artificial Sequence: Synthetic oligonucleotide
  Sense Strand Starting at position 562 of SEQ ID NO: 318597
ucuguuuccugaccaagga

SEQ ID NO: 362878 - RNA, 19 nt, Artificial Sequence
  Description of Artificial Sequence: Synthetic oligonucleotide
  Antisense Strand to SEQ ID NO: 362877
uccuuggucaggaaacaga

SEQ ID NO: 362879 - RNA, 19 nt, Artificial Sequence
  Description of Artificial Sequence: Synthetic oligonucleotide
  Sense Strand Starting at position 562 of SEQ ID NO: 318798
auggguacuccuggaguga

SEQ ID NO: 362880 - RNA, 19 nt, Artificial Sequence
  Description of Artificial Sequence: Synthetic oligonucleotide
  Antisense Strand to SEQ ID NO: 362879
ucacuccaggaguacccau

SEQ ID NO: 362881 - RNA, 19 nt, Artificial Sequence
  Description of Artificial Sequence: Synthetic oligonucleotide
  Sense Strand Starting at position 562 of SEQ ID NO: 318802
guacuccuggagugaggau

SEQ ID NO: 362882 - RNA, 19 nt, Artificial Sequence
  Description of Artificial Sequence: Synthetic oligonucleotide
  Antisense Strand to SEQ ID NO: 362881
auccucacuccaggaguac

SEQ ID NO: 362883 - RNA, 19 nt, Artificial Sequence
  Description of Artificial Sequence: Synthetic oligonucleotide
  Sense Strand Starting at position 562 of SEQ ID NO: 318817
ggaugagugcagugagaau

SEQ ID NO: 362884 - RNA, 19 nt, Artificial Sequence
  Description of Artificial Sequence: Synthetic oligonucleotide
  Antisense Strand to SEQ ID NO: 362883
auucucacugcacucaucc

SEQ ID NO: 362885 - RNA, 19 nt, Artificial Sequence
  Description of Artificial Sequence: Synthetic oligonucleotide
  Sense Strand Starting at position 562 of SEQ ID NO: 318866
ugcggaagcccagaugaaa

SEQ ID NO: 362886 - RNA, 19 nt, Artificial Sequence
  Description of Artificial Sequence: Synthetic oligonucleotide
  Antisense Strand to SEQ ID NO: 362885
uuucaucugggcuuccgca

SEQ ID NO: 362887 - RNA, 19 nt, Artificial Sequence
  Description of Artificial Sequence: Synthetic oligonucleotide
  Sense Strand Starting at position 562 of SEQ ID NO: 318907
gauugugaacuuuguccca

SEQ ID NO: 362888 - RNA, 19 nt, Artificial Sequence
  Description of Artificial Sequence: Synthetic oligonucleotide
  Antisense Strand to SEQ ID NO: 362887
ugggacaaaguucacaauc

SEQ ID NO: 362889 - RNA, 19 nt, Artificial Sequence
  Description of Artificial Sequence: Synthetic oligonucleotide
  Sense Strand Starting at position 562 of SEQ ID NO: 318909
uugugaacuuugucccaug

SEQ ID NO: 362890 - RNA, 19 nt, Artificial Sequence
  Description of Artificial Sequence: Synthetic oligonucleotide
  Antisense Strand to SEQ ID NO: 362889
caugggacaaaguucacaa

SEQ ID NO: 362891 - RNA, 19 nt, Artificial Sequence
  Description of Artificial Sequence: Synthetic oligonucleotide
  Sense Strand Starting at position 562 of SEQ ID NO: 318948
aggcuuaaauggucaucca

SEQ ID NO: 362892 - RNA, 19 nt, Artificial Sequence
  Description of Artificial Sequence: Synthetic oligonucleotide
  Antisense Strand to SEQ ID NO: 362891
uggaugaccauuuaagccu

SEQ ID NO: 362893 - RNA, 19 nt, Artificial Sequence
  Description of Artificial Sequence: Synthetic oligonucleotide
  Sense Strand Starting at position 562 of SEQ ID NO: 318949
ggcuuaaauggucauccau

SEQ ID NO: 362894 - RNA, 19 nt, Artificial Sequence
  Description of Artificial Sequence: Synthetic oligonucleotide
  Antisense Strand to SEQ ID NO: 362893
auggaugaccauuuaagcc

SEQ ID NO: 362895 - RNA, 19 nt, Artificial Sequence
  Description of Artificial Sequence: Synthetic oligonucleotide
  Sense Strand Starting at position 562 of SEQ ID NO: 319074
gugaguaucugauucugug

SEQ ID NO: 362896 - RNA, 19 nt, Artificial Sequence
  Description of Artificial Sequence: Synthetic oligonucleotide
  Antisense Strand to SEQ ID NO: 362895
cacagaaucagauacucac

SEQ ID NO: 362897 - RNA, 19 nt, Artificial Sequence
  Description of Artificial Sequence: Synthetic oligonucleotide
  Sense Strand Starting at position 562 of SEQ ID NO: 319202
gagguuaggccuggagaca

SEQ ID NO: 362898 - RNA, 19 nt, Artificial Sequence
  Description of Artificial Sequence: Synthetic oligonucleotide
  Antisense Strand to SEQ ID NO: 362897
ugucuccaggccuaaccuc

SEQ ID NO: 362899 - RNA, 19 nt, Artificial Sequence
  Description of Artificial Sequence: Synthetic oligonucleotide
  Sense Strand Starting at position 563 of SEQ ID NO: 315239
cauggagggucccauauau

SEQ ID NO: 362900 - RNA, 19 nt, Artificial Sequence
  Description of Artificial Sequence: Synthetic oligonucleotide
  Antisense Strand to SEQ ID NO: 362899
auauaugggacccuccaug

SEQ ID NO: 362901 - RNA, 19 nt, Artificial Sequence
  Description of Artificial Sequence: Synthetic oligonucleotide
  Sense Strand Starting at position 563 of SEQ ID NO: 315301
accaucaaguguuggcaaa

SEQ ID NO: 362902 - RNA, 19 nt, Artificial Sequence
  Description of Artificial Sequence: Synthetic oligonucleotide
  Antisense Strand to SEQ ID NO: 362901
uuugccaacacuugauggu

SEQ ID NO: 362903 - RNA, 19 nt, Artificial Sequence
  Description of Artificial Sequence: Synthetic oligonucleotide
  Sense Strand Starting at position 563 of SEQ ID NO: 315391
cuuggugauuucucgcagu

SEQ ID NO: 362904 - RNA, 19 nt, Artificial Sequence
  Description of Artificial Sequence: Synthetic oligonucleotide
  Antisense Strand to SEQ ID NO: 362903
acugcgagaaaucaccaag

SEQ ID NO: 362905 - RNA, 19 nt, Artificial Sequence
  Description of Artificial Sequence: Synthetic oligonucleotide
  Sense Strand Starting at position 563 of SEQ ID NO: 315394
ggugauuucucgcagucaa

SEQ ID NO: 362906 - RNA, 19 nt, Artificial Sequence
  Description of Artificial Sequence: Synthetic oligonucleotide
  Antisense Strand to SEQ ID NO: 362905
uugacugcgagaaaucacc

SEQ ID NO: 362907 - RNA, 19 nt, Artificial Sequence
  Description of Artificial Sequence: Synthetic oligonucleotide
  Sense Strand Starting at position 563 of SEQ ID NO: 315574
ggcuguaaugccugguacu

SEQ ID NO: 362908 - RNA, 19 nt, Artificial Sequence
  Description of Artificial Sequence: Synthetic oligonucleotide
  Antisense Strand to SEQ ID NO: 362907
aguaccaggcauuacagcc

SEQ ID NO: 362909 - RNA, 19 nt, Artificial Sequence
  Description of Artificial Sequence: Synthetic oligonucleotide
  Sense Strand Starting at position 563 of SEQ ID NO: 315575
gcuguaaugccugguacug

SEQ ID NO: 362910 - RNA, 19 nt, Artificial Sequence
  Description of Artificial Sequence: Synthetic oligonucleotide
  Antisense Strand to SEQ ID NO: 362909
caguaccaggcauuacagc

SEQ ID NO: 362911 - RNA, 19 nt, Artificial Sequence
  Description of Artificial Sequence: Synthetic oligonucleotide
  Sense Strand Starting at position 563 of SEQ ID NO: 315632
agagauaaugcaugugaaa

SEQ ID NO: 362912 - RNA, 19 nt, Artificial Sequence
  Description of Artificial Sequence: Synthetic oligonucleotide
  Antisense Strand to SEQ ID NO: 362911
uuucacaugcauuaucucu

SEQ ID NO: 362913 - RNA, 19 nt, Artificial Sequence
  Description of Artificial Sequence: Synthetic oligonucleotide
  Sense Strand Starting at position 563 of SEQ ID NO: 315665
uuagguuuagaaggugauu

SEQ ID NO: 362914 - RNA, 19 nt, Artificial Sequence
  Description of Artificial Sequence: Synthetic oligonucleotide
  Antisense Strand to SEQ ID NO: 362913
aaucaccuucuaaaccuaa

SEQ ID NO: 362915 - RNA, 19 nt, Artificial Sequence
  Description of Artificial Sequence: Synthetic oligonucleotide
  Sense Strand Starting at position 563 of SEQ ID NO: 315667
agguuuagaaggugauuau

SEQ ID NO: 362916 - RNA, 19 nt, Artificial Sequence
  Description of Artificial Sequence: Synthetic oligonucleotide
  Antisense Strand to SEQ ID NO: 362915
auaaucaccuucuaaaccu

SEQ ID NO: 362917 - RNA, 19 nt, Artificial Sequence
  Description of Artificial Sequence: Synthetic oligonucleotide
  Sense Strand Starting at position 563 of SEQ ID NO: 315668
gguuuagaaggugauuauu

SEQ ID NO: 362918 - RNA, 19 nt, Artificial Sequence
  Description of Artificial Sequence: Synthetic oligonucleotide
  Antisense Strand to SEQ ID NO: 362917
aauaaucaccuucuaaacc

SEQ ID NO: 362919 - RNA, 19 nt, Artificial Sequence
  Description of Artificial Sequence: Synthetic oligonucleotide
  Sense Strand Starting at position 563 of SEQ ID NO: 315886
ccagguucuccucaccauu

SEQ ID NO: 362920 - RNA, 19 nt, Artificial Sequence
  Description of Artificial Sequence: Synthetic oligonucleotide
  Antisense Strand to SEQ ID NO: 362919
aauggugaggagaaccugg

SEQ ID NO: 362921 - RNA, 19 nt, Artificial Sequence
  Description of Artificial Sequence: Synthetic oligonucleotide
  Sense Strand Starting at position 563 of SEQ ID NO: 316040
uuggcuuccuucuggaaag

SEQ ID NO: 362922 - RNA, 19 nt, Artificial Sequence
  Description of Artificial Sequence: Synthetic oligonucleotide
  Antisense Strand to SEQ ID NO: 362921
cuuuccagaaggaagccaa

SEQ ID NO: 362923 - RNA, 19 nt, Artificial Sequence
  Description of Artificial Sequence: Synthetic oligonucleotide
  Sense Strand Starting at position 563 of SEQ ID NO: 316113
gcugguguccuccaggaga

SEQ ID NO: 362924 - RNA, 19 nt, Artificial Sequence
  Description of Artificial Sequence: Synthetic oligonucleotide
  Antisense Strand to SEQ ID NO: 362923
ucuccuggaggacaccagc

SEQ ID NO: 362925 - RNA, 19 nt, Artificial Sequence
  Description of Artificial Sequence: Synthetic oligonucleotide
  Sense Strand Starting at position 563 of SEQ ID NO: 316115
ugguguccuccaggagaac

SEQ ID NO: 362926 - RNA, 19 nt, Artificial Sequence
  Description of Artificial Sequence: Synthetic oligonucleotide
  Antisense Strand to SEQ ID NO: 362925
guucuccuggaggacacca

SEQ ID NO: 362927 - RNA, 19 nt, Artificial Sequence
  Description of Artificial Sequence: Synthetic oligonucleotide
  Sense Strand Starting at position 563 of SEQ ID NO: 316116
gguguccuccaggagaaca

SEQ ID NO: 362928 - RNA, 19 nt, Artificial Sequence
  Description of Artificial Sequence: Synthetic oligonucleotide
  Antisense Strand to SEQ ID NO: 362927
uguucuccuggaggacacc

SEQ ID NO: 362929 - RNA, 19 nt, Artificial Sequence
  Description of Artificial Sequence: Synthetic oligonucleotide
  Sense Strand Starting at position 563 of SEQ ID NO: 316144
ccuagcacugcuugagaga

SEQ ID NO: 362930 - RNA, 19 nt, Artificial Sequence
  Description of Artificial Sequence: Synthetic oligonucleotide
  Antisense Strand to SEQ ID NO: 362929
ucucucaagcagugcuagg

SEQ ID NO: 362931 - RNA, 19 nt, Artificial Sequence
  Description of Artificial Sequence: Synthetic oligonucleotide
  Sense Strand Starting at position 563 of SEQ ID NO: 316145
cuagcacugcuugagagau

SEQ ID NO: 362932 - RNA, 19 nt, Artificial Sequence
  Description of Artificial Sequence: Synthetic oligonucleotide
  Antisense Strand to SEQ ID NO: 362931
aucucucaagcagugcuag

SEQ ID NO: 362933 - RNA, 19 nt, Artificial Sequence
  Description of Artificial Sequence: Synthetic oligonucleotide
  Sense Strand Starting at position 563 of SEQ ID NO: 316220
ggaugacuugcucaccaug

SEQ ID NO: 362934 - RNA, 19 nt, Artificial Sequence
  Description of Artificial Sequence: Synthetic oligonucleotide
  Antisense Strand to SEQ ID NO: 362933
cauggugagcaagucaucc

SEQ ID NO: 362935 - RNA, 19 nt, Artificial Sequence
  Description of Artificial Sequence: Synthetic oligonucleotide
  Sense Strand Starting at position 563 of SEQ ID NO: 316373
agaguaugucacugucugu

SEQ ID NO: 362936 - RNA, 19 nt, Artificial Sequence
  Description of Artificial Sequence: Synthetic oligonucleotide
  Antisense Strand to SEQ ID NO: 362935
acagacagugacauacucu

SEQ ID NO: 362937 - RNA, 19 nt, Artificial Sequence
  Description of Artificial Sequence: Synthetic oligonucleotide
  Sense Strand Starting at position 563 of SEQ ID NO: 316436
uuugguggcaccugacaua

SEQ ID NO: 362938 - RNA, 19 nt, Artificial Sequence
  Description of Artificial Sequence: Synthetic oligonucleotide
  Antisense Strand to SEQ ID NO: 362937
uaugucaggugccaccaaa

SEQ ID NO: 362939 - RNA, 19 nt, Artificial Sequence
  Description of Artificial Sequence: Synthetic oligonucleotide
  Sense Strand Starting at position 563 of SEQ ID NO: 316466
aaagaacuuggcuguccua

SEQ ID NO: 362940 - RNA, 19 nt, Artificial Sequence
  Description of Artificial Sequence: Synthetic oligonucleotide
  Antisense Strand to SEQ ID NO: 362939
uaggacagccaaguucuuu

SEQ ID NO: 362941 - RNA, 19 nt, Artificial Sequence
  Description of Artificial Sequence: Synthetic oligonucleotide
  Sense Strand Starting at position 563 of SEQ ID NO: 316611
aaaggagagucagaauuug

SEQ ID NO: 362942 - RNA, 19 nt, Artificial Sequence
  Description of Artificial Sequence: Synthetic oligonucleotide
  Antisense Strand to SEQ ID NO: 362941
caaauucugacucuccuuu

SEQ ID NO: 362943 - RNA, 19 nt, Artificial Sequence
  Description of Artificial Sequence: Synthetic oligonucleotide
  Sense Strand Starting at position 563 of SEQ ID NO: 316645
ggcacuguucucugccuaa

SEQ ID NO: 362944 - RNA, 19 nt, Artificial Sequence
  Description of Artificial Sequence: Synthetic oligonucleotide
  Antisense Strand to SEQ ID NO: 362943
uuaggcagagaacagugcc

SEQ ID NO: 362945 - RNA, 19 nt, Artificial Sequence
  Description of Artificial Sequence: Synthetic oligonucleotide
  Sense Strand Starting at position 563 of SEQ ID NO: 316648
acuguucucugccuaagac

SEQ ID NO: 362946 - RNA, 19 nt, Artificial Sequence
  Description of Artificial Sequence: Synthetic oligonucleotide
  Antisense Strand to SEQ ID NO: 362945
gucuuaggcagagaacagu

SEQ ID NO: 362947 - RNA, 19 nt, Artificial Sequence
  Description of Artificial Sequence: Synthetic oligonucleotide
  Sense Strand Starting at position 563 of SEQ ID NO: 317383
augcaucacggcugaguaa

SEQ ID NO: 362948 - RNA, 19 nt, Artificial Sequence
  Description of Artificial Sequence: Synthetic oligonucleotide
  Antisense Strand to SEQ ID NO: 362947
uuacucagccgugaugcau

SEQ ID NO: 362949 - RNA, 19 nt, Artificial Sequence
  Description of Artificial Sequence: Synthetic oligonucleotide
  Sense Strand Starting at position 563 of SEQ ID NO: 317514
ucgguaacccuuuguggga

SEQ ID NO: 362950 - RNA, 19 nt, Artificial Sequence
  Description of Artificial Sequence: Synthetic oligonucleotide
  Antisense Strand to SEQ ID NO: 362949
ucccacaaaggguuaccga

SEQ ID NO: 362951 - RNA, 19 nt, Artificial Sequence
  Description of Artificial Sequence: Synthetic oligonucleotide
  Sense Strand Starting at position 563 of SEQ ID NO: 317680
cugugugaugauggacaca

SEQ ID NO: 362952 - RNA, 19 nt, Artificial Sequence
  Description of Artificial Sequence: Synthetic oligonucleotide
  Antisense Strand to SEQ ID NO: 362951
uguguccaucaucacacag

SEQ ID NO: 362953 - RNA, 19 nt, Artificial Sequence
  Description of Artificial Sequence: Synthetic oligonucleotide
  Sense Strand Starting at position 563 of SEQ ID NO: 317785
ggaggcauugcuuguaaga

SEQ ID NO: 362954 - RNA, 19 nt, Artificial Sequence
  Description of Artificial Sequence: Synthetic oligonucleotide
  Antisense Strand to SEQ ID NO: 362953
ucuuacaagcaaugccucc

SEQ ID NO: 362955 - RNA, 19 nt, Artificial Sequence
  Description of Artificial Sequence: Synthetic oligonucleotide
  Sense Strand Starting at position 563 of SEQ ID NO: 317787
aggcauugcuuguaagaau

SEQ ID NO: 362956 - RNA, 19 nt, Artificial Sequence
  Description of Artificial Sequence: Synthetic oligonucleotide
  Antisense Strand to SEQ ID NO: 362955
auucuuacaagcaaugccu

SEQ ID NO: 362957 - RNA, 19 nt, Artificial Sequence
  Description of Artificial Sequence: Synthetic oligonucleotide
  Sense Strand Starting at position 563 of SEQ ID NO: 317795
cuuguaagaaugugacgga

SEQ ID NO: 362958 - RNA, 19 nt, Artificial Sequence
  Description of Artificial Sequence: Synthetic oligonucleotide
  Antisense Strand to SEQ ID NO: 362957
uccgucacauucuuacaag

SEQ ID NO: 362959 - RNA, 19 nt, Artificial Sequence
  Description of Artificial Sequence: Synthetic oligonucleotide
  Sense Strand Starting at position 563 of SEQ ID NO: 317796
uuguaagaaugugacggau

SEQ ID NO: 362960 - RNA, 19 nt, Artificial Sequence
  Description of Artificial Sequence: Synthetic oligonucleotide
  Antisense Strand to SEQ ID NO: 362959
auccgucacauucuuacaa

SEQ ID NO: 362961 - RNA, 19 nt, Artificial Sequence
  Description of Artificial Sequence: Synthetic oligonucleotide
  Sense Strand Starting at position 563 of SEQ ID NO: 317892
agagaagcacacuguguuu

SEQ ID NO: 362962 - RNA, 19 nt, Artificial Sequence
  Description of Artificial Sequence: Synthetic oligonucleotide
  Antisense Strand to SEQ ID NO: 362961
aaacacagugugcuucucu

SEQ ID NO: 362963 - RNA, 19 nt, Artificial Sequence
  Description of Artificial Sequence: Synthetic oligonucleotide
  Sense Strand Starting at position 564 of SEQ ID NO: 315263
cauggagggucccauauau

SEQ ID NO: 362964 - RNA, 19 nt, Artificial Sequence
  Description of Artificial Sequence: Synthetic oligonucleotide
  Antisense Strand to SEQ ID NO: 362963
auauaugggacccuccaug

SEQ ID NO: 362965 - RNA, 19 nt, Artificial Sequence
  Description of Artificial Sequence: Synthetic oligonucleotide
  Sense Strand Starting at position 564 of SEQ ID NO: 315325
accaucaaguguuggcaaa

SEQ ID NO: 362966 - RNA, 19 nt, Artificial Sequence
  Description of Artificial Sequence: Synthetic oligonucleotide
  Antisense Strand to SEQ ID NO: 362965
uuugccaacacuugauggu

SEQ ID NO: 362967 - RNA, 19 nt, Artificial Sequence
  Description of Artificial Sequence: Synthetic oligonucleotide
  Sense Strand Starting at position 564 of SEQ ID NO: 315415
cuuggugauuucucgcagu

SEQ ID NO: 362968 - RNA, 19 nt, Artificial Sequence
  Description of Artificial Sequence: Synthetic oligonucleotide
  Antisense Strand to SEQ ID NO: 362967
acugcgagaaaucaccaag

SEQ ID NO: 362969 - RNA, 19 nt, Artificial Sequence
  Description of Artificial Sequence: Synthetic oligonucleotide
  Sense Strand Starting at position 564 of SEQ ID NO: 315418
ggugauuucucgcagucaa

SEQ ID NO: 362970 - RNA, 19 nt, Artificial Sequence
  Description of Artificial Sequence: Synthetic oligonucleotide
  Antisense Strand to SEQ ID NO: 362969
uugacugcgagaaaucacc

SEQ ID NO: 362971 - RNA, 19 nt, Artificial Sequence
  Description of Artificial Sequence: Synthetic oligonucleotide
  Sense Strand Starting at position 564 of SEQ ID NO: 315598
ggcuguaaugccugguacu

SEQ ID NO: 362972 - RNA, 19 nt, Artificial Sequence
  Description of Artificial Sequence: Synthetic oligonucleotide
  Antisense Strand to SEQ ID NO: 362971
aguaccaggcauuacagcc

SEQ ID NO: 362973 - RNA, 19 nt, Artificial Sequence
  Description of Artificial Sequence: Synthetic oligonucleotide
  Sense Strand Starting at position 564 of SEQ ID NO: 315599
gcuguaaugccugguacug

SEQ ID NO: 362974 - RNA, 19 nt, Artificial Sequence
  Description of Artificial Sequence: Synthetic oligonucleotide
  Antisense Strand to SEQ ID NO: 362973
caguaccaggcauuacagc

SEQ ID NO: 362975 - RNA, 19 nt, Artificial Sequence
  Description of Artificial Sequence: Synthetic oligonucleotide
  Sense Strand Starting at position 564 of SEQ ID NO: 315656
agagauaaugcaugugaaa

SEQ ID NO: 362976 - RNA, 19 nt, Artificial Sequence
  Description of Artificial Sequence: Synthetic oligonucleotide
  Antisense Strand to SEQ ID NO: 362975
uuucacaugcauuaucucu

SEQ ID NO: 362977 - RNA, 19 nt, Artificial Sequence
  Description of Artificial Sequence: Synthetic oligonucleotide
  Sense Strand Starting at position 564 of SEQ ID NO: 315689
uuagguuuagaaggugauu

SEQ ID NO: 362978 - RNA, 19 nt, Artificial Sequence
  Description of Artificial Sequence: Synthetic oligonucleotide
  Antisense Strand to SEQ ID NO: 362977
aaucaccuucuaaaccuaa

SEQ ID NO: 362979 - RNA, 19 nt, Artificial Sequence
  Description of Artificial Sequence: Synthetic oligonucleotide
  Sense Strand Starting at position 564 of SEQ ID NO: 315691
agguuuagaaggugauuau

SEQ ID NO: 362980 - RNA, 19 nt, Artificial Sequence
  Description of Artificial Sequence: Synthetic oligonucleotide
  Antisense Strand to SEQ ID NO: 362979
auaaucaccuucuaaaccu

SEQ ID NO: 362981 - RNA, 19 nt, Artificial Sequence
  Description of Artificial Sequence: Synthetic oligonucleotide
  Sense Strand Starting at position 564 of SEQ ID NO: 315692
gguuuagaaggugauuauu

SEQ ID NO: 362982 - RNA, 19 nt, Artificial Sequence
  Description of Artificial Sequence: Synthetic oligonucleotide
  Antisense Strand to SEQ ID NO: 362981
aauaaucaccuucuaaacc

SEQ ID NO: 362983 - RNA, 19 nt, Artificial Sequence
  Description of Artificial Sequence: Synthetic oligonucleotide
  Sense Strand Starting at position 564 of SEQ ID NO: 315910
ccagguucuccucaccauu

SEQ ID NO: 362984 - RNA, 19 nt, Artificial Sequence
  Description of Artificial Sequence: Synthetic oligonucleotide
  Antisense Strand to SEQ ID NO: 362983
aauggugaggagaaccugg

SEQ ID NO: 362985 - RNA, 19 nt, Artificial Sequence
  Description of Artificial Sequence: Synthetic oligonucleotide
  Sense Strand Starting at position 564 of SEQ ID NO: 316064
uuggcuuccuucuggaaag

SEQ ID NO: 362986 - RNA, 19 nt, Artificial Sequence
  Description of Artificial Sequence: Synthetic oligonucleotide
  Antisense Strand to SEQ ID NO: 362985
cuuuccagaaggaagccaa

SEQ ID NO: 362987 - RNA, 19 nt, Artificial Sequence
  Description of Artificial Sequence: Synthetic oligonucleotide
  Sense Strand Starting at position 564 of SEQ ID NO: 316137
gcugguguccuccaggaga

SEQ ID NO: 362988 - RNA, 19 nt, Artificial Sequence
  Description of Artificial Sequence: Synthetic oligonucleotide
  Antisense Strand to SEQ ID NO: 362987
ucuccuggaggacaccagc

SEQ ID NO: 362989 - RNA, 19 nt, Artificial Sequence
  Description of Artificial Sequence: Synthetic oligonucleotide
  Sense Strand Starting at position 564 of SEQ ID NO: 316139
ugguguccuccaggagaac

SEQ ID NO: 362990 - RNA, 19 nt, Artificial Sequence
  Description of Artificial Sequence: Synthetic oligonucleotide
  Antisense Strand to SEQ ID NO: 362989
guucuccuggaggacacca

SEQ ID NO: 362991 - RNA, 19 nt, Artificial Sequence
  Description of Artificial Sequence: Synthetic oligonucleotide
  Sense Strand Starting at position 564 of SEQ ID NO: 316140
gguguccuccaggagaaca

SEQ ID NO: 362992 - RNA, 19 nt, Artificial Sequence
  Description of Artificial Sequence: Synthetic oligonucleotide
  Antisense Strand to SEQ ID NO: 362991
uguucuccuggaggacacc

SEQ ID NO: 362993 - RNA, 19 nt, Artificial Sequence
  Description of Artificial Sequence: Synthetic oligonucleotide
  Sense Strand Starting at position 564 of SEQ ID NO: 316168
ccuagcacugcuugagaga

SEQ ID NO: 362994 - RNA, 19 nt, Artificial Sequence
  Description of Artificial Sequence: Synthetic oligonucleotide
  Antisense Strand to SEQ ID NO: 362993
ucucucaagcagugcuagg

SEQ ID NO: 362995 - RNA, 19 nt, Artificial Sequence
  Description of Artificial Sequence: Synthetic oligonucleotide
  Sense Strand Starting at position 564 of SEQ ID NO: 316169
cuagcacugcuugagagau

SEQ ID NO: 362996 - RNA, 19 nt, Artificial Sequence
  Description of Artificial Sequence: Synthetic oligonucleotide
  Antisense Strand to SEQ ID NO: 362995
aucucucaagcagugcuag

SEQ ID NO: 362997 - RNA, 19 nt, Artificial Sequence
  Description of Artificial Sequence: Synthetic oligonucleotide
  Sense Strand Starting at position 564 of SEQ ID NO: 316244
ggaugacuugcucaccaug

SEQ ID NO: 362998 - RNA, 19 nt, Artificial Sequence
  Description of Artificial Sequence: Synthetic oligonucleotide
  Antisense Strand to SEQ ID NO: 362997
cauggugagcaagucaucc

SEQ ID NO: 362999 - RNA, 19 nt, Artificial Sequence
  Description of Artificial Sequence: Synthetic oligonucleotide
  Sense Strand Starting at position 564 of SEQ ID NO: 316397
agaguaugucacugucugu

SEQ ID NO: 363000 - RNA, 19 nt, Artificial Sequence
  Description of Artificial Sequence: Synthetic oligonucleotide
  Antisense Strand to SEQ ID NO: 362999
acagacagugacauacucu

SEQ ID NO: 363001 - RNA, 19 nt, Artificial Sequence
  Description of Artificial Sequence: Synthetic oligonucleotide
  Sense Strand Starting at position 564 of SEQ ID NO: 316460
uuugguggcaccugacaua

SEQ ID NO: 363002 - RNA, 19 nt, Artificial Sequence
  Description of Artificial Sequence: Synthetic oligonucleotide
  Antisense Strand to SEQ ID NO: 363001
uaugucaggugccaccaaa

SEQ ID NO: 363003 - RNA, 19 nt, Artificial Sequence
  Description of Artificial Sequence: Synthetic oligonucleotide
  Sense Strand Starting at position 564 of SEQ ID NO: 316490
aaagaacuuggcuguccua

SEQ ID NO: 363004 - RNA, 19 nt, Artificial Sequence
  Description of Artificial Sequence: Synthetic oligonucleotide
  Antisense Strand to SEQ ID NO: 363003
uaggacagccaaguucuuu

SEQ ID NO: 363005 - RNA, 19 nt, Artificial Sequence
  Description of Artificial Sequence: Synthetic oligonucleotide
  Sense Strand Starting at position 564 of SEQ ID NO: 316635
aaaggagagucagaauuug

SEQ ID NO: 363006 - RNA, 19 nt, Artificial Sequence
  Description of Artificial Sequence: Synthetic oligonucleotide
  Antisense Strand to SEQ ID NO: 363005
caaauucugacucuccuuu

SEQ ID NO: 363007 - RNA, 19 nt, Artificial Sequence
  Description of Artificial Sequence: Synthetic oligonucleotide
  Sense Strand Starting at position 564 of SEQ ID NO: 316669
ggcacuguucucugccuaa

SEQ ID NO: 363008 - RNA, 19 nt, Artificial Sequence
  Description of Artificial Sequence: Synthetic oligonucleotide
  Antisense Strand to SEQ ID NO: 363007
uuaggcagagaacagugcc

SEQ ID NO: 363009 - RNA, 19 nt, Artificial Sequence
  Description of Artificial Sequence: Synthetic oligonucleotide
  Sense Strand Starting at position 564 of SEQ ID NO: 316672
acuguucucugccuaagac

SEQ ID NO: 363010 - RNA, 19 nt, Artificial Sequence
  Description of Artificial Sequence: Synthetic oligonucleotide
  Antisense Strand to SEQ ID NO: 363009
gucuuaggcagagaacagu

SEQ ID NO: 363011 - RNA, 19 nt, Artificial Sequence
  Description of Artificial Sequence: Synthetic oligonucleotide
  Sense Strand Starting at position 564 of SEQ ID NO: 317407
augcaucacggcugaguaa

SEQ ID NO: 363012 - RNA, 19 nt, Artificial Sequence
  Description of Artificial Sequence: Synthetic oligonucleotide
  Antisense Strand to SEQ ID NO: 363011
uuacucagccgugaugcau

SEQ ID NO: 363013 - RNA, 19 nt, Artificial Sequence
  Description of Artificial Sequence: Synthetic oligonucleotide
  Sense Strand Starting at position 564 of SEQ ID NO: 317538
ucgguaacccuuuguggga

SEQ ID NO: 363014 - RNA, 19 nt, Artificial Sequence
  Description of Artificial Sequence: Synthetic oligonucleotide
  Antisense Strand to SEQ ID NO: 363013
ucccacaaaggguuaccga

SEQ ID NO: 363015 - RNA, 19 nt, Artificial Sequence
  Description of Artificial Sequence: Synthetic oligonucleotide
  Sense Strand Starting at position 564 of SEQ ID NO: 317704
cugugugaugauggacaca

SEQ ID NO: 363016 - RNA, 19 nt, Artificial Sequence
  Description of Artificial Sequence: Synthetic oligonucleotide
  Antisense Strand to SEQ ID NO: 363015
uguguccaucaucacacag

SEQ ID NO: 363017 - RNA, 19 nt, Artificial Sequence
  Description of Artificial Sequence: Synthetic oligonucleotide
  Sense Strand Starting at position 564 of SEQ ID NO: 317809
ggaggcauugcuuguaaga

SEQ ID NO: 363018 - RNA, 19 nt, Artificial Sequence
  Description of Artificial Sequence: Synthetic oligonucleotide
  Antisense Strand to SEQ ID NO: 363017
ucuuacaagcaaugccucc

SEQ ID NO: 363019 - RNA, 19 nt, Artificial Sequence
  Description of Artificial Sequence: Synthetic oligonucleotide
  Sense Strand Starting at position 564 of SEQ ID NO: 317811
aggcauugcuuguaagaau

SEQ ID NO: 363020 - RNA, 19 nt, Artificial Sequence
  Description of Artificial Sequence: Synthetic oligonucleotide
  Antisense Strand to SEQ ID NO: 363019
auucuuacaagcaaugccu

SEQ ID NO: 363021 - RNA, 19 nt, Artificial Sequence
  Description of Artificial Sequence: Synthetic oligonucleotide
  Sense Strand Starting at position 564 of SEQ ID NO: 317819
cuuguaagaaugugacgga

SEQ ID NO: 363022 - RNA, 19 nt, Artificial Sequence
  Description of Artificial Sequence: Synthetic oligonucleotide
  Antisense Strand to SEQ ID NO: 363021
uccgucacauucuuacaag

SEQ ID NO: 363023 - RNA, 19 nt, Artificial Sequence
  Description of Artificial Sequence: Synthetic oligonucleotide
  Sense Strand Starting at position 564 of SEQ ID NO: 317820
uuguaagaaugugacggau

SEQ ID NO: 363024 - RNA, 19 nt, Artificial Sequence
  Description of Artificial Sequence: Synthetic oligonucleotide
  Antisense Strand to SEQ ID NO: 363023
auccgucacauucuuacaa

SEQ ID NO: 363025 - RNA, 19 nt, Artificial Sequence
  Description of Artificial Sequence: Synthetic oligonucleotide
  Sense Strand Starting at position 564 of SEQ ID NO: 317916
agagaagcacacuguguuu

SEQ ID NO: 363026 - RNA, 19 nt, Artificial Sequence
  Description of Artificial Sequence: Synthetic oligonucleotide
  Antisense Strand to SEQ ID NO: 363025
aaacacagugugcuucucu

SEQ ID NO: 363027 - RNA, 19 nt, Artificial Sequence
  Description of Artificial Sequence: Synthetic oligonucleotide
  Sense Strand Starting at position 565 of SEQ ID NO: 315478
cuaguaggauccuuaaguc

SEQ ID NO: 363028 - RNA, 19 nt, Artificial Sequence
  Description of Artificial Sequence: Synthetic oligonucleotide
  Antisense Strand to SEQ ID NO: 363027
gacuuaaggauccuacuag

SEQ ID NO: 363029 - RNA, 19 nt, Artificial Sequence
  Description of Artificial Sequence: Synthetic oligonucleotide
  Sense Strand Starting at position 565 of SEQ ID NO: 315487
uccuuaagucaacacgaga

SEQ ID NO: 363030 - RNA, 19 nt, Artificial Sequence
  Description of Artificial Sequence: Synthetic oligonucleotide
  Antisense Strand to SEQ ID NO: 363029
ucucguguugacuuaagga

SEQ ID NO: 363031 - RNA, 19 nt, Artificial Sequence
  Description of Artificial Sequence: Synthetic oligonucleotide
  Sense Strand Starting at position 565 of SEQ ID NO: 315500
acgagauccuccuugagga

SEQ ID NO: 363032 - RNA, 19 nt, Artificial Sequence
  Description of Artificial Sequence: Synthetic oligonucleotide
  Antisense Strand to SEQ ID NO: 363031
uccucaaggaggaucucgu

SEQ ID NO: 363033 - RNA, 19 nt, Artificial Sequence
  Description of Artificial Sequence: Synthetic oligonucleotide
  Sense Strand Starting at position 565 of SEQ ID NO: 315501
cgagauccuccuugaggaa

SEQ ID NO: 363034 - RNA, 19 nt, Artificial Sequence
  Description of Artificial Sequence: Synthetic oligonucleotide
  Antisense Strand to SEQ ID NO: 363033
uuccucaaggaggaucucg

SEQ ID NO: 363035 - RNA, 19 nt, Artificial Sequence
  Description of Artificial Sequence: Synthetic oligonucleotide
  Sense Strand Starting at position 565 of SEQ ID NO: 315513
ugaggaaacuugcuagcua

SEQ ID NO: 363036 - RNA, 19 nt, Artificial Sequence
  Description of Artificial Sequence: Synthetic oligonucleotide
  Antisense Strand to SEQ ID NO: 363035
uagcuagcaaguuuccuca

SEQ ID NO: 363037 - RNA, 19 nt, Artificial Sequence
  Description of Artificial Sequence: Synthetic oligonucleotide
  Sense Strand Starting at position 565 of SEQ ID NO: 315553
aaacaagagcaguaauguu

SEQ ID NO: 363038 - RNA, 19 nt, Artificial Sequence
  Description of Artificial Sequence: Synthetic oligonucleotide
  Antisense Strand to SEQ ID NO: 363037
aacauuacugcucuuguuu

SEQ ID NO: 363039 - RNA, 19 nt, Artificial Sequence
  Description of Artificial Sequence: Synthetic oligonucleotide
  Sense Strand Starting at position 565 of SEQ ID NO: 315599
ugugaugcuuuacucaacu

SEQ ID NO: 363040 - RNA, 19 nt, Artificial Sequence
  Description of Artificial Sequence: Synthetic oligonucleotide
  Antisense Strand to SEQ ID NO: 363039
aguugaguaaagcaucaca

SEQ ID NO: 363041 - RNA, 19 nt, Artificial Sequence
  Description of Artificial Sequence: Synthetic oligonucleotide
  Sense Strand Starting at position 565 of SEQ ID NO: 315821
ugccuaagggaguguuaug

SEQ ID NO: 363042 - RNA, 19 nt, Artificial Sequence
  Description of Artificial Sequence: Synthetic oligonucleotide
  Antisense Strand to SEQ ID NO: 363041
cauaacacucccuuaggca

SEQ ID NO: 363043 - RNA, 19 nt, Artificial Sequence
  Description of Artificial Sequence: Synthetic oligonucleotide
  Sense Strand Starting at position 565 of SEQ ID NO: 315888
cugagucaacguucgccua

SEQ ID NO: 363044 - RNA, 19 nt, Artificial Sequence
  Description of Artificial Sequence: Synthetic oligonucleotide
  Antisense Strand to SEQ ID NO: 363043
uaggcgaacguugacucag

SEQ ID NO: 363045 - RNA, 19 nt, Artificial Sequence
  Description of Artificial Sequence: Synthetic oligonucleotide
  Sense Strand Starting at position 565 of SEQ ID NO: 316131
cggacaucaucuccagguu

SEQ ID NO: 363046 - RNA, 19 nt, Artificial Sequence
  Description of Artificial Sequence: Synthetic oligonucleotide
  Antisense Strand to SEQ ID NO: 363045
aaccuggagaugauguccg

SEQ ID NO: 363047 - RNA, 19 nt, Artificial Sequence
  Description of Artificial Sequence: Synthetic oligonucleotide
  Sense Strand Starting at position 565 of SEQ ID NO: 316385
gaggauaucagccgcgaga

SEQ ID NO: 363048 - RNA, 19 nt, Artificial Sequence
  Description of Artificial Sequence: Synthetic oligonucleotide
  Antisense Strand to SEQ ID NO: 363047
ucucgcggcugauauccuc

SEQ ID NO: 363049 - RNA, 19 nt, Artificial Sequence
  Description of Artificial Sequence: Synthetic oligonucleotide
  Sense Strand Starting at position 565 of SEQ ID NO: 316580
aggguuguggacugaaagu

SEQ ID NO: 363050 - RNA, 19 nt, Artificial Sequence
  Description of Artificial Sequence: Synthetic oligonucleotide
  Antisense Strand to SEQ ID NO: 363049
acuuucaguccacaacccu

SEQ ID NO: 363051 - RNA, 19 nt, Artificial Sequence
  Description of Artificial Sequence: Synthetic oligonucleotide
  Sense Strand Starting at position 565 of SEQ ID NO: 316590
acugaaaguccgggagaau

SEQ ID NO: 363052 - RNA, 19 nt, Artificial Sequence
  Description of Artificial Sequence: Synthetic oligonucleotide
  Antisense Strand to SEQ ID NO: 363051
auucucccggacuuucagu

SEQ ID NO: 363053 - RNA, 19 nt, Artificial Sequence
  Description of Artificial Sequence: Synthetic oligonucleotide
  Sense Strand Starting at position 565 of SEQ ID NO: 317098
aggcguugaccguaaagaa

SEQ ID NO: 363054 - RNA, 19 nt, Artificial Sequence
  Description of Artificial Sequence: Synthetic oligonucleotide
  Antisense Strand to SEQ ID NO: 363053
uucuuuacggucaacgccu

SEQ ID NO: 363055 - RNA, 19 nt, Artificial Sequence
  Description of Artificial Sequence: Synthetic oligonucleotide
  Sense Strand Starting at position 565 of SEQ ID NO: 317467
aagugaugcucacucuaug

SEQ ID NO: 363056 - RNA, 19 nt, Artificial Sequence
  Description of Artificial Sequence: Synthetic oligonucleotide
  Antisense Strand to SEQ ID NO: 363055
cauagagugagcaucacuu

SEQ ID NO: 363057 - RNA, 19 nt, Artificial Sequence
  Description of Artificial Sequence: Synthetic oligonucleotide
  Sense Strand Starting at position 565 of SEQ ID NO: 317470
ugaugcucacucuaugcaa

SEQ ID NO: 363058 - RNA, 19 nt, Artificial Sequence
  Description of Artificial Sequence: Synthetic oligonucleotide
  Antisense Strand to SEQ ID NO: 363057
uugcauagagugagcauca

SEQ ID NO: 363059 - RNA, 19 nt, Artificial Sequence
  Description of Artificial Sequence: Synthetic oligonucleotide
  Sense Strand Starting at position 565 of SEQ ID NO: 317673
cuaguaggacuuuggacaa

SEQ ID NO: 363060 - RNA, 19 nt, Artificial Sequence
  Description of Artificial Sequence: Synthetic oligonucleotide
  Antisense Strand to SEQ ID NO: 363059
uuguccaaaguccuacuag

SEQ ID NO: 363061 - RNA, 19 nt, Artificial Sequence
  Description of Artificial Sequence: Synthetic oligonucleotide
  Sense Strand Starting at position 565 of SEQ ID NO: 317695
gcuugcugucuccacaaua

SEQ ID NO: 363062 - RNA, 19 nt, Artificial Sequence
  Description of Artificial Sequence: Synthetic oligonucleotide
  Antisense Strand to SEQ ID NO: 363061
uauuguggagacagcaagc

SEQ ID NO: 363063 - RNA, 19 nt, Artificial Sequence
  Description of Artificial Sequence: Synthetic oligonucleotide
  Sense Strand Starting at position 565 of SEQ ID NO: 317780
gagaguucuguugguugaa

SEQ ID NO: 363064 - RNA, 19 nt, Artificial Sequence
  Description of Artificial Sequence: Synthetic oligonucleotide
  Antisense Strand to SEQ ID NO: 363063
uucaaccaacagaacucuc

SEQ ID NO: 363065 - RNA, 19 nt, Artificial Sequence
  Description of Artificial Sequence: Synthetic oligonucleotide
  Sense Strand Starting at position 565 of SEQ ID NO: 317781
agaguucuguugguugaaa

SEQ ID NO: 363066 - RNA, 19 nt, Artificial Sequence
  Description of Artificial Sequence: Synthetic oligonucleotide
  Antisense Strand to SEQ ID NO: 363065
uuucaaccaacagaacucu

SEQ ID NO: 363067 - RNA, 19 nt, Artificial Sequence
  Description of Artificial Sequence: Synthetic oligonucleotide
  Sense Strand Starting at position 565 of SEQ ID NO: 317782
gaguucuguugguugaaac

SEQ ID NO: 363068 - RNA, 19 nt, Artificial Sequence
  Description of Artificial Sequence: Synthetic oligonucleotide
  Antisense Strand to SEQ ID NO: 363067
guuucaaccaacagaacuc

SEQ ID NO: 363069 - RNA, 19 nt, Artificial Sequence
  Description of Artificial Sequence: Synthetic oligonucleotide
  Sense Strand Starting at position 565 of SEQ ID NO: 317783
aguucuguugguugaaaca

SEQ ID NO: 363070 - RNA, 19 nt, Artificial Sequence
  Description of Artificial Sequence: Synthetic oligonucleotide
  Antisense Strand to SEQ ID NO: 363069
uguuucaaccaacagaacu

SEQ ID NO: 363071 - RNA, 19 nt, Artificial Sequence
  Description of Artificial Sequence: Synthetic oligonucleotide
  Sense Strand Starting at position 565 of SEQ ID NO: 317984
ggcucagagaaguggagua

SEQ ID NO: 363072 - RNA, 19 nt, Artificial Sequence
  Description of Artificial Sequence: Synthetic oligonucleotide
  Antisense Strand to SEQ ID NO: 363071
uacuccacuucucugagcc

SEQ ID NO: 363073 - RNA, 19 nt, Artificial Sequence
  Description of Artificial Sequence: Synthetic oligonucleotide
  Sense Strand Starting at position 565 of SEQ ID NO: 318265
ccuagaggaucgcuugagu

SEQ ID NO: 363074 - RNA, 19 nt, Artificial Sequence
  Description of Artificial Sequence: Synthetic oligonucleotide
  Antisense Strand to SEQ ID NO: 363073
acucaagcgauccucuagg

SEQ ID NO: 363075 - RNA, 19 nt, Artificial Sequence
  Description of Artificial Sequence: Synthetic oligonucleotide
  Sense Strand Starting at position 565 of SEQ ID NO: 318284
ucaggaguuagagguaaca

SEQ ID NO: 363076 - RNA, 19 nt, Artificial Sequence
  Description of Artificial Sequence: Synthetic oligonucleotide
  Antisense Strand to SEQ ID NO: 363075
uguuaccucuaacuccuga

SEQ ID NO: 363077 - RNA, 19 nt, Artificial Sequence
  Description of Artificial Sequence: Synthetic oligonucleotide
  Sense Strand Starting at position 565 of SEQ ID NO: 318443
cuguguuuggaggaggauu

SEQ ID NO: 363078 - RNA, 19 nt, Artificial Sequence
  Description of Artificial Sequence: Synthetic oligonucleotide
  Antisense Strand to SEQ ID NO: 363077
aauccuccuccaaacacag

SEQ ID NO: 363079 - RNA, 19 nt, Artificial Sequence
  Description of Artificial Sequence: Synthetic oligonucleotide
  Sense Strand Starting at position 565 of SEQ ID NO: 318445
guguuuggaggaggauuaa

SEQ ID NO: 363080 - RNA, 19 nt, Artificial Sequence
  Description of Artificial Sequence: Synthetic oligonucleotide
  Antisense Strand to SEQ ID NO: 363079
uuaauccuccuccaaacac

SEQ ID NO: 363081 - RNA, 19 nt, Artificial Sequence
  Description of Artificial Sequence: Synthetic oligonucleotide
  Sense Strand Starting at position 565 of SEQ ID NO: 318636
uggaaauugucaccuccgu

SEQ ID NO: 363082 - RNA, 19 nt, Artificial Sequence
  Description of Artificial Sequence: Synthetic oligonucleotide
  Antisense Strand to SEQ ID NO: 363081
acggaggugacaauuucca

SEQ ID NO: 363083 - RNA, 19 nt, Artificial Sequence
  Description of Artificial Sequence: Synthetic oligonucleotide
  Sense Strand Starting at position 565 of SEQ ID NO: 318664
agggcagccuccucuauau

SEQ ID NO: 363084 - RNA, 19 nt, Artificial Sequence
  Description of Artificial Sequence: Synthetic oligonucleotide
  Antisense Strand to SEQ ID NO: 363083
auauagaggaggcugcccu

SEQ ID NO: 363085 - RNA, 19 nt, Artificial Sequence
  Description of Artificial Sequence: Synthetic oligonucleotide
  Sense Strand Starting at position 565 of SEQ ID NO: 318666
ggcagccuccucuauauga

SEQ ID NO: 363086 - RNA, 19 nt, Artificial Sequence
  Description of Artificial Sequence: Synthetic oligonucleotide
  Antisense Strand to SEQ ID NO: 363085
ucauauagaggaggcugcc

SEQ ID NO: 363087 - RNA, 19 nt, Artificial Sequence
  Description of Artificial Sequence: Synthetic oligonucleotide
  Sense Strand Starting at position 565 of SEQ ID NO: 318818
gggcuuaaguggaggaaga

SEQ ID NO: 363088 - RNA, 19 nt, Artificial Sequence
  Description of Artificial Sequence: Synthetic oligonucleotide
  Antisense Strand to SEQ ID NO: 363087
ucuuccuccacuuaagccc

SEQ ID NO: 363089 - RNA, 19 nt, Artificial Sequence
  Description of Artificial Sequence: Synthetic oligonucleotide
  Sense Strand Starting at position 565 of SEQ ID NO: 318834
agagaacucuucuugguaa

SEQ ID NO: 363090 - RNA, 19 nt, Artificial Sequence
  Description of Artificial Sequence: Synthetic oligonucleotide
  Antisense Strand to SEQ ID NO: 363089
uuaccaagaagaguucucu

SEQ ID NO: 363091 - RNA, 19 nt, Artificial Sequence
  Description of Artificial Sequence: Synthetic oligonucleotide
  Sense Strand Starting at position 565 of SEQ ID NO: 318836
agaacucuucuugguaaug

SEQ ID NO: 363092 - RNA, 19 nt, Artificial Sequence
  Description of Artificial Sequence: Synthetic oligonucleotide
  Antisense Strand to SEQ ID NO: 363091
cauuaccaagaagaguucu

SEQ ID NO: 363093 - RNA, 19 nt, Artificial Sequence
  Description of Artificial Sequence: Synthetic oligonucleotide
  Sense Strand Starting at position 565 of SEQ ID NO: 318870
gggauuugcuuggaaguag

SEQ ID NO: 363094 - RNA, 19 nt, Artificial Sequence
  Description of Artificial Sequence: Synthetic oligonucleotide
  Antisense Strand to SEQ ID NO: 363093
cuacuuccaagcaaauccc

SEQ ID NO: 363095 - RNA, 19 nt, Artificial Sequence
  Description of Artificial Sequence: Synthetic oligonucleotide
  Sense Strand Starting at position 565 of SEQ ID NO: 318973
cugacauuauugccaggga

SEQ ID NO: 363096 - RNA, 19 nt, Artificial Sequence
  Description of Artificial Sequence: Synthetic oligonucleotide
  Antisense Strand to SEQ ID NO: 363095
ucccuggcaauaaugucag

SEQ ID NO: 363097 - RNA, 19 nt, Artificial Sequence
  Description of Artificial Sequence: Synthetic oligonucleotide
  Sense Strand Starting at position 565 of SEQ ID NO: 318976
acauuauugccagggagag

SEQ ID NO: 363098 - RNA, 19 nt, Artificial Sequence
  Description of Artificial Sequence: Synthetic oligonucleotide
  Antisense Strand to SEQ ID NO: 363097
cucucccuggcaauaaugu

SEQ ID NO: 363099 - RNA, 19 nt, Artificial Sequence
  Description of Artificial Sequence: Synthetic oligonucleotide
  Sense Strand Starting at position 565 of SEQ ID NO: 319042
ccagaugcugggcagaauu

SEQ ID NO: 363100 - RNA, 19 nt, Artificial Sequence
  Description of Artificial Sequence: Synthetic oligonucleotide
  Antisense Strand to SEQ ID NO: 363099
aauucugcccagcaucugg

SEQ ID NO: 363101 - RNA, 19 nt, Artificial Sequence
  Description of Artificial Sequence: Synthetic oligonucleotide
  Sense Strand Starting at position 565 of SEQ ID NO: 319107
cccagugagguuuaccaua

SEQ ID NO: 363102 - RNA, 19 nt, Artificial Sequence
  Description of Artificial Sequence: Synthetic oligonucleotide
  Antisense Strand to SEQ ID NO: 363101
uaugguaaaccucacuggg

SEQ ID NO: 363103 - RNA, 19 nt, Artificial Sequence
  Description of Artificial Sequence: Synthetic oligonucleotide
  Sense Strand Starting at position 565 of SEQ ID NO: 319174
aguagccuucugugaauag

SEQ ID NO: 363104 - RNA, 19 nt, Artificial Sequence
  Description of Artificial Sequence: Synthetic oligonucleotide
  Antisense Strand to SEQ ID NO: 363103
cuauucacagaaggcuacu

SEQ ID NO: 363105 - RNA, 19 nt, Artificial Sequence
  Description of Artificial Sequence: Synthetic oligonucleotide
  Sense Strand Starting at position 565 of SEQ ID NO: 319205
acaucacuccuuuggagga

SEQ ID NO: 363106 - RNA, 19 nt, Artificial Sequence
  Description of Artificial Sequence: Synthetic oligonucleotide
  Antisense Strand to SEQ ID NO: 363105
uccuccaaaggagugaugu

SEQ ID NO: 363107 - RNA, 19 nt, Artificial Sequence
  Description of Artificial Sequence: Synthetic oligonucleotide
  Sense Strand Starting at position 566 of SEQ ID NO: 315496
aggugaucaggcugcuuca

SEQ ID NO: 363108 - RNA, 19 nt, Artificial Sequence
  Description of Artificial Sequence: Synthetic oligonucleotide
  Antisense Strand to SEQ ID NO: 363107
ugaagcagccugaucaccu

SEQ ID NO: 363109 - RNA, 19 nt, Artificial Sequence
  Description of Artificial Sequence: Synthetic oligonucleotide
  Sense Strand Starting at position 566 of SEQ ID NO: 315570
gccaauucuuaagcaaugu

SEQ ID NO: 363110 - RNA, 19 nt, Artificial Sequence
  Description of Artificial Sequence: Synthetic oligonucleotide
  Antisense Strand to SEQ ID NO: 363109
acauugcuuaagaauuggc

SEQ ID NO: 363111 - RNA, 19 nt, Artificial Sequence
  Description of Artificial Sequence: Synthetic oligonucleotide
  Sense Strand Starting at position 566 of SEQ ID NO: 315646
agaagauccugcucuacaa

SEQ ID NO: 363112 - RNA, 19 nt, Artificial Sequence
  Description of Artificial Sequence: Synthetic oligonucleotide
  Antisense Strand to SEQ ID NO: 363111
uuguagagcaggaucuucu

SEQ ID NO: 363113 - RNA, 19 nt, Artificial Sequence
  Description of Artificial Sequence: Synthetic oligonucleotide
  Sense Strand Starting at position 566 of SEQ ID NO: 315661
acaaauagaugguaauaac

SEQ ID NO: 363114 - RNA, 19 nt, Artificial Sequence
  Description of Artificial Sequence: Synthetic oligonucleotide
  Antisense Strand to SEQ ID NO: 363113
guuauuaccaucuauuugu

SEQ ID NO: 363115 - RNA, 19 nt, Artificial Sequence
  Description of Artificial Sequence: Synthetic oligonucleotide
  Sense Strand Starting at position 566 of SEQ ID NO: 315702
ccaagaaucucagcugaaa

SEQ ID NO: 363116 - RNA, 19 nt, Artificial Sequence
  Description of Artificial Sequence: Synthetic oligonucleotide
  Antisense Strand to SEQ ID NO: 363115
uuucagcugagauucuugg

SEQ ID NO: 363117 - RNA, 19 nt, Artificial Sequence
  Description of Artificial Sequence: Synthetic oligonucleotide
  Sense Strand Starting at position 566 of SEQ ID NO: 315749
auuugugaauaucagucau

SEQ ID NO: 363118 - RNA, 19 nt, Artificial Sequence
  Description of Artificial Sequence: Synthetic oligonucleotide
  Antisense Strand to SEQ ID NO: 363117
augacugauauucacaaau

SEQ ID NO: 363119 - RNA, 19 nt, Artificial Sequence
  Description of Artificial Sequence: Synthetic oligonucleotide
  Sense Strand Starting at position 566 of SEQ ID NO: 315751
uugugaauaucagucauag

SEQ ID NO: 363120 - RNA, 19 nt, Artificial Sequence
  Description of Artificial Sequence: Synthetic oligonucleotide
  Antisense Strand to SEQ ID NO: 363119
cuaugacugauauucacaa

SEQ ID NO: 363121 - RNA, 19 nt, Artificial Sequence
  Description of Artificial Sequence: Synthetic oligonucleotide
  Sense Strand Starting at position 566 of SEQ ID NO: 315759
aucagucauagcgugcuau

SEQ ID NO: 363122 - RNA, 19 nt, Artificial Sequence
  Description of Artificial Sequence: Synthetic oligonucleotide
  Antisense Strand to SEQ ID NO: 363121
auagcacgcuaugacugau

SEQ ID NO: 363123 - RNA, 19 nt, Artificial Sequence
  Description of Artificial Sequence: Synthetic oligonucleotide
  Sense Strand Starting at position 566 of SEQ ID NO: 315814
agacaaauaucuguucuag

SEQ ID NO: 363124 - RNA, 19 nt, Artificial Sequence
  Description of Artificial Sequence: Synthetic oligonucleotide
  Antisense Strand to SEQ ID NO: 363123
cuagaacagauauuugucu

SEQ ID NO: 363125 - RNA, 19 nt, Artificial Sequence
  Description of Artificial Sequence: Synthetic oligonucleotide
  Sense Strand Starting at position 566 of SEQ ID NO: 315816
acaaauaucuguucuagua

SEQ ID NO: 363126 - RNA, 19 nt, Artificial Sequence
  Description of Artificial Sequence: Synthetic oligonucleotide
  Antisense Strand to SEQ ID NO: 363125
uacuagaacagauauuugu

SEQ ID NO: 363127 - RNA, 19 nt, Artificial Sequence
  Description of Artificial Sequence: Synthetic oligonucleotide
  Sense Strand Starting at position 566 of SEQ ID NO: 316023
gcagaacuuccugggaaag

SEQ ID NO: 363128 - RNA, 19 nt, Artificial Sequence
  Description of Artificial Sequence: Synthetic oligonucleotide
  Antisense Strand to SEQ ID NO: 363127
cuuucccaggaaguucugc

SEQ ID NO: 363129 - RNA, 19 nt, Artificial Sequence
  Description of Artificial Sequence: Synthetic oligonucleotide
  Sense Strand Starting at position 566 of SEQ ID NO: 316025
agaacuuccugggaaagau

SEQ ID NO: 363130 - RNA, 19 nt, Artificial Sequence
  Description of Artificial Sequence: Synthetic oligonucleotide
  Antisense Strand to SEQ ID NO: 363129
aucuuucccaggaaguucu

SEQ ID NO: 363131 - RNA, 19 nt, Artificial Sequence
  Description of Artificial Sequence: Synthetic oligonucleotide
  Sense Strand Starting at position 566 of SEQ ID NO: 316116
cugucacauccuggaagua

SEQ ID NO: 363132 - RNA, 19 nt, Artificial Sequence
  Description of Artificial Sequence: Synthetic oligonucleotide
  Antisense Strand to SEQ ID NO: 363131
uacuuccaggaugugacag

SEQ ID NO: 363133 - RNA, 19 nt, Artificial Sequence
  Description of Artificial Sequence: Synthetic oligonucleotide
  Sense Strand Starting at position 566 of SEQ ID NO: 316117
ugucacauccuggaaguau

SEQ ID NO: 363134 - RNA, 19 nt, Artificial Sequence
  Description of Artificial Sequence: Synthetic oligonucleotide
  Antisense Strand to SEQ ID NO: 363133
auacuuccaggaugugaca

SEQ ID NO: 363135 - RNA, 19 nt, Artificial Sequence
  Description of Artificial Sequence: Synthetic oligonucleotide
  Sense Strand Starting at position 566 of SEQ ID NO: 316145
gguuacaggaccugucuaa

SEQ ID NO: 363136 - RNA, 19 nt, Artificial Sequence
  Description of Artificial Sequence: Synthetic oligonucleotide
  Antisense Strand to SEQ ID NO: 363135
uuagacagguccuguaacc

SEQ ID NO: 363137 - RNA, 19 nt, Artificial Sequence
  Description of Artificial Sequence: Synthetic oligonucleotide
  Sense Strand Starting at position 566 of SEQ ID NO: 316183
uaaagcgggucuguuauaa

SEQ ID NO: 363138 - RNA, 19 nt, Artificial Sequence
  Description of Artificial Sequence: Synthetic oligonucleotide
  Antisense Strand to SEQ ID NO: 363137
uuauaacagacccgcuuua

SEQ ID NO: 363139 - RNA, 19 nt, Artificial Sequence
  Description of Artificial Sequence: Synthetic oligonucleotide
  Sense Strand Starting at position 566 of SEQ ID NO: 316209
aauuguaguguaugggaaa

SEQ ID NO: 363140 - RNA, 19 nt, Artificial Sequence
  Description of Artificial Sequence: Synthetic oligonucleotide
  Antisense Strand to SEQ ID NO: 363139
uuucccauacacuacaauu

SEQ ID NO: 363141 - RNA, 19 nt, Artificial Sequence
  Description of Artificial Sequence: Synthetic oligonucleotide
  Sense Strand Starting at position 566 of SEQ ID NO: 316229
ugucuugugaaguagaaca

SEQ ID NO: 363142 - RNA, 19 nt, Artificial Sequence
  Description of Artificial Sequence: Synthetic oligonucleotide
  Antisense Strand to SEQ ID NO: 363141
uguucuacuucacaagaca

SEQ ID NO: 363143 - RNA, 19 nt, Artificial Sequence
  Description of Artificial Sequence: Synthetic oligonucleotide
  Sense Strand Starting at position 566 of SEQ ID NO: 316261
gaaggauuauuguuguauu

SEQ ID NO: 363144 - RNA, 19 nt, Artificial Sequence
  Description of Artificial Sequence: Synthetic oligonucleotide
  Antisense Strand to SEQ ID NO: 363143
aauacaacaauaauccuuc

SEQ ID NO: 363145 - RNA, 19 nt, Artificial Sequence
  Description of Artificial Sequence: Synthetic oligonucleotide
  Sense Strand Starting at position 566 of SEQ ID NO: 316389
gccuuuaguguacaaucau

SEQ ID NO: 363146 - RNA, 19 nt, Artificial Sequence
  Description of Artificial Sequence: Synthetic oligonucleotide
  Antisense Strand to SEQ ID NO: 363145
augauuguacacuaaaggc

SEQ ID NO: 363147 - RNA, 19 nt, Artificial Sequence
  Description of Artificial Sequence: Synthetic oligonucleotide
  Sense Strand Starting at position 566 of SEQ ID NO: 316489
gcagaacugcaaugugaac

SEQ ID NO: 363148 - RNA, 19 nt, Artificial Sequence
  Description of Artificial Sequence: Synthetic oligonucleotide
  Antisense Strand to SEQ ID NO: 363147
guucacauugcaguucugc

SEQ ID NO: 363149 - RNA, 19 nt, Artificial Sequence
  Description of Artificial Sequence: Synthetic oligonucleotide
  Sense Strand Starting at position 566 of SEQ ID NO: 316505
aacccaggcuugucaugau

SEQ ID NO: 363150 - RNA, 19 nt, Artificial Sequence
  Description of Artificial Sequence: Synthetic oligonucleotide
  Antisense Strand to SEQ ID NO: 363149
aucaugacaagccuggguu

SEQ ID NO: 363151 - RNA, 19 nt, Artificial Sequence
  Description of Artificial Sequence: Synthetic oligonucleotide
  Sense Strand Starting at position 566 of SEQ ID NO: 316509
caggcuugucaugauucca

SEQ ID NO: 363152 - RNA, 19 nt, Artificial Sequence
  Description of Artificial Sequence: Synthetic oligonucleotide
  Antisense Strand to SEQ ID NO: 363151
uggaaucaugacaagccug

SEQ ID NO: 363153 - RNA, 19 nt, Artificial Sequence
  Description of Artificial Sequence: Synthetic oligonucleotide
  Sense Strand Starting at position 566 of SEQ ID NO: 316586
gcuugcuaggcaucugcaa

SEQ ID NO: 363154 - RNA, 19 nt, Artificial Sequence
  Description of Artificial Sequence: Synthetic oligonucleotide
  Antisense Strand to SEQ ID NO: 363153
uugcagaugccuagcaagc

SEQ ID NO: 363155 - RNA, 19 nt, Artificial Sequence
  Description of Artificial Sequence: Synthetic oligonucleotide
  Sense Strand Starting at position 566 of SEQ ID NO: 316643
gcgacucaccagugaaacu

SEQ ID NO: 363156 - RNA, 19 nt, Artificial Sequence
  Description of Artificial Sequence: Synthetic oligonucleotide
  Antisense Strand to SEQ ID NO: 363155
aguuucacuggugagucgc

SEQ ID NO: 363157 - RNA, 19 nt, Artificial Sequence
  Description of Artificial Sequence: Synthetic oligonucleotide
  Sense Strand Starting at position 566 of SEQ ID NO: 316654
gugaaacugucauccugag

SEQ ID NO: 363158 - RNA, 19 nt, Artificial Sequence
  Description of Artificial Sequence: Synthetic oligonucleotide
  Antisense Strand to SEQ ID NO: 363157
cucaggaugacaguuucac

SEQ ID NO: 363159 - RNA, 19 nt, Artificial Sequence
  Description of Artificial Sequence: Synthetic oligonucleotide
  Sense Strand Starting at position 566 of SEQ ID NO: 317263
cccgaaagcuccuccuuga

SEQ ID NO: 363160 - RNA, 19 nt, Artificial Sequence
  Description of Artificial Sequence: Synthetic oligonucleotide
  Antisense Strand to SEQ ID NO: 363159
ucaaggaggagcuuucggg

SEQ ID NO: 363161 - RNA, 19 nt, Artificial Sequence
  Description of Artificial Sequence: Synthetic oligonucleotide
  Sense Strand Starting at position 566 of SEQ ID NO: 317511
gaacuugugucucccauag

SEQ ID NO: 363162 - RNA, 19 nt, Artificial Sequence
  Description of Artificial Sequence: Synthetic oligonucleotide
  Antisense Strand to SEQ ID NO: 363161
cuaugggagacacaaguuc

SEQ ID NO: 363163 - RNA, 19 nt, Artificial Sequence
  Description of Artificial Sequence: Synthetic oligonucleotide
  Sense Strand Starting at position 566 of SEQ ID NO: 317515
uugugucucccauagacau

SEQ ID NO: 363164 - RNA, 19 nt, Artificial Sequence
  Description of Artificial Sequence: Synthetic oligonucleotide
  Antisense Strand to SEQ ID NO: 363163
augucuaugggagacacaa

SEQ ID NO: 363165 - RNA, 19 nt, Artificial Sequence
  Description of Artificial Sequence: Synthetic oligonucleotide
  Sense Strand Starting at position 566 of SEQ ID NO: 317553
agagaauuagccgagcucu

SEQ ID NO: 363166 - RNA, 19 nt, Artificial Sequence
  Description of Artificial Sequence: Synthetic oligonucleotide
  Antisense Strand to SEQ ID NO: 363165
agagcucggcuaauucucu

SEQ ID NO: 363167 - RNA, 19 nt, Artificial Sequence
  Description of Artificial Sequence: Synthetic oligonucleotide
  Sense Strand Starting at position 566 of SEQ ID NO: 317715
ccgaguucucucuacccau

SEQ ID NO: 363168 - RNA, 19 nt, Artificial Sequence
  Description of Artificial Sequence: Synthetic oligonucleotide
  Antisense Strand to SEQ ID NO: 363167
auggguagagagaacucgg

SEQ ID NO: 363169 - RNA, 19 nt, Artificial Sequence
  Description of Artificial Sequence: Synthetic oligonucleotide
  Sense Strand Starting at position 566 of SEQ ID NO: 317922
ggcuccaucuuugugggaa

SEQ ID NO: 363170 - RNA, 19 nt, Artificial Sequence
  Description of Artificial Sequence: Synthetic oligonucleotide
  Antisense Strand to SEQ ID NO: 363169
uucccacaaagauggagcc

SEQ ID NO: 363171 - RNA, 19 nt, Artificial Sequence
  Description of Artificial Sequence: Synthetic oligonucleotide
  Sense Strand Starting at position 566 of SEQ ID NO: 318288
cgaacuccugacuauguga

SEQ ID NO: 363172 - RNA, 19 nt, Artificial Sequence
  Description of Artificial Sequence: Synthetic oligonucleotide
  Antisense Strand to SEQ ID NO: 363171
ucacauagucaggaguucg

SEQ ID NO: 363173 - RNA, 19 nt, Artificial Sequence
  Description of Artificial Sequence: Synthetic oligonucleotide
  Sense Strand Starting at position 566 of SEQ ID NO: 318370
gcaucuugagauuguuauu

SEQ ID NO: 363174 - RNA, 19 nt, Artificial Sequence
  Description of Artificial Sequence: Synthetic oligonucleotide
  Antisense Strand to SEQ ID NO: 363173
aauaacaaucucaagaugc

SEQ ID NO: 363175 - RNA, 19 nt, Artificial Sequence
  Description of Artificial Sequence: Synthetic oligonucleotide
  Sense Strand Starting at position 566 of SEQ ID NO: 318570
caagccuagcaguagauau

SEQ ID NO: 363176 - RNA, 19 nt, Artificial Sequence
  Description of Artificial Sequence: Synthetic oligonucleotide
  Antisense Strand to SEQ ID NO: 363175
auaucuacugcuaggcuug

SEQ ID NO: 363177 - RNA, 19 nt, Artificial Sequence
  Description of Artificial Sequence: Synthetic oligonucleotide
  Sense Strand Starting at position 566 of SEQ ID NO: 318572
agccuagcaguagauauua

SEQ ID NO: 363178 - RNA, 19 nt, Artificial Sequence
  Description of Artificial Sequence: Synthetic oligonucleotide
  Antisense Strand to SEQ ID NO: 363177
uaauaucuacugcuaggcu

SEQ ID NO: 363179 - RNA, 19 nt, Artificial Sequence
  Description of Artificial Sequence: Synthetic oligonucleotide
  Sense Strand Starting at position 566 of SEQ ID NO: 318698
accugugagacagguaagu

SEQ ID NO: 363180 - RNA, 19 nt, Artificial Sequence
  Description of Artificial Sequence: Synthetic oligonucleotide
  Antisense Strand to SEQ ID NO: 363179
acuuaccugucucacaggu

SEQ ID NO: 363181 - RNA, 19 nt, Artificial Sequence
  Description of Artificial Sequence: Synthetic oligonucleotide
  Sense Strand Starting at position 566 of SEQ ID NO: 318700
cugugagacagguaagugu

SEQ ID NO: 363182 - RNA, 19 nt, Artificial Sequence
  Description of Artificial Sequence: Synthetic oligonucleotide
  Antisense Strand to SEQ ID NO: 363181
acacuuaccugucucacag

SEQ ID NO: 363183 - RNA, 19 nt, Artificial Sequence
  Description of Artificial Sequence: Synthetic oligonucleotide
  Sense Strand Starting at position 566 of SEQ ID NO: 318704
gagacagguaaguguuaau

SEQ ID NO: 363184 - RNA, 19 nt, Artificial Sequence
  Description of Artificial Sequence: Synthetic oligonucleotide
  Antisense Strand to SEQ ID NO: 363183
auuaacacuuaccugucuc

SEQ ID NO: 363185 - RNA, 19 nt, Artificial Sequence
  Description of Artificial Sequence: Synthetic oligonucleotide
  Sense Strand Starting at position 566 of SEQ ID NO: 318760
ggauaaugauuuggacaag

SEQ ID NO: 363186 - RNA, 19 nt, Artificial Sequence
  Description of Artificial Sequence: Synthetic oligonucleotide
  Antisense Strand to SEQ ID NO: 363185
cuuguccaaaucauuaucc

SEQ ID NO: 363187 - RNA, 19 nt, Artificial Sequence
  Description of Artificial Sequence: Synthetic oligonucleotide
  Sense Strand Starting at position 567 of SEQ ID NO: 315280
aggugaucaggcugcuuca

SEQ ID NO: 363188 - RNA, 19 nt, Artificial Sequence
  Description of Artificial Sequence: Synthetic oligonucleotide
  Antisense Strand to SEQ ID NO: 363187
ugaagcagccugaucaccu

SEQ ID NO: 363189 - RNA, 19 nt, Artificial Sequence
  Description of Artificial Sequence: Synthetic oligonucleotide
  Sense Strand Starting at position 567 of SEQ ID NO: 315354
gccaauucuuaagcaaugu

SEQ ID NO: 363190 - RNA, 19 nt, Artificial Sequence
  Description of Artificial Sequence: Synthetic oligonucleotide
  Antisense Strand to SEQ ID NO: 363189
acauugcuuaagaauuggc

SEQ ID NO: 363191 - RNA, 19 nt, Artificial Sequence
  Description of Artificial Sequence: Synthetic oligonucleotide
  Sense Strand Starting at position 567 of SEQ ID NO: 315430
agaagauccugcucuacaa

SEQ ID NO: 363192 - RNA, 19 nt, Artificial Sequence
  Description of Artificial Sequence: Synthetic oligonucleotide
  Antisense Strand to SEQ ID NO: 363191
uuguagagcaggaucuucu

SEQ ID NO: 363193 - RNA, 19 nt, Artificial Sequence
  Description of Artificial Sequence: Synthetic oligonucleotide
  Sense Strand Starting at position 567 of SEQ ID NO: 315445
acaaauagaugguaauaac

SEQ ID NO: 363194 - RNA, 19 nt, Artificial Sequence
  Description of Artificial Sequence: Synthetic oligonucleotide
  Antisense Strand to SEQ ID NO: 363193
guuauuaccaucuauuugu

SEQ ID NO: 363195 - RNA, 19 nt, Artificial Sequence
  Description of Artificial Sequence: Synthetic oligonucleotide
  Sense Strand Starting at position 567 of SEQ ID NO: 315486
ccaagaaucucagcugaaa

SEQ ID NO: 363196 - RNA, 19 nt, Artificial Sequence
  Description of Artificial Sequence: Synthetic oligonucleotide
  Antisense Strand to SEQ ID NO: 363195
uuucagcugagauucuugg

SEQ ID NO: 363197 - RNA, 19 nt, Artificial Sequence
  Description of Artificial Sequence: Synthetic oligonucleotide
  Sense Strand Starting at position 567 of SEQ ID NO: 315533
auuugugaauaucagucau

SEQ ID NO: 363198 - RNA, 19 nt, Artificial Sequence
  Description of Artificial Sequence: Synthetic oligonucleotide
  Antisense Strand to SEQ ID NO: 363197
augacugauauucacaaau

SEQ ID NO: 363199 - RNA, 19 nt, Artificial Sequence
  Description of Artificial Sequence: Synthetic oligonucleotide
  Sense Strand Starting at position 567 of SEQ ID NO: 315535
uugugaauaucagucauag

SEQ ID NO: 363200 - RNA, 19 nt, Artificial Sequence
  Description of Artificial Sequence: Synthetic oligonucleotide
  Antisense Strand to SEQ ID NO: 363199
cuaugacugauauucacaa

SEQ ID NO: 363201 - RNA, 19 nt, Artificial Sequence
  Description of Artificial Sequence: Synthetic oligonucleotide
  Sense Strand Starting at position 567 of SEQ ID NO: 315543
aucagucauagcgugcuau

SEQ ID NO: 363202 - RNA, 19 nt, Artificial Sequence
  Description of Artificial Sequence: Synthetic oligonucleotide
  Antisense Strand to SEQ ID NO: 363201
auagcacgcuaugacugau

SEQ ID NO: 363203 - RNA, 19 nt, Artificial Sequence
  Description of Artificial Sequence: Synthetic oligonucleotide
  Sense Strand Starting at position 567 of SEQ ID NO: 315598
agacaaauaucuguucuag

SEQ ID NO: 363204 - RNA, 19 nt, Artificial Sequence
  Description of Artificial Sequence: Synthetic oligonucleotide
  Antisense Strand to SEQ ID NO: 363203
cuagaacagauauuugucu

SEQ ID NO: 363205 - RNA, 19 nt, Artificial Sequence
  Description of Artificial Sequence: Synthetic oligonucleotide
  Sense Strand Starting at position 567 of SEQ ID NO: 315600
acaaauaucuguucuagua

SEQ ID NO: 363206 - RNA, 19 nt, Artificial Sequence
  Description of Artificial Sequence: Synthetic oligonucleotide
  Antisense Strand to SEQ ID NO: 363205
uacuagaacagauauuugu

SEQ ID NO: 363207 - RNA, 19 nt, Artificial Sequence
  Description of Artificial Sequence: Synthetic oligonucleotide
  Sense Strand Starting at position 567 of SEQ ID NO: 315807
gcagaacuuccugggaaag

SEQ ID NO: 363208 - RNA, 19 nt, Artificial Sequence
  Description of Artificial Sequence: Synthetic oligonucleotide
  Antisense Strand to SEQ ID NO: 363207
cuuucccaggaaguucugc

SEQ ID NO: 363209 - RNA, 19 nt, Artificial Sequence
  Description of Artificial Sequence: Synthetic oligonucleotide
  Sense Strand Starting at position 567 of SEQ ID NO: 315809
agaacuuccugggaaagau

SEQ ID NO: 363210 - RNA, 19 nt, Artificial Sequence
  Description of Artificial Sequence: Synthetic oligonucleotide
  Antisense Strand to SEQ ID NO: 363209
aucuuucccaggaaguucu

SEQ ID NO: 363211 - RNA, 19 nt, Artificial Sequence
  Description of Artificial Sequence: Synthetic oligonucleotide
  Sense Strand Starting at position 567 of SEQ ID NO: 315900
cugucacauccuggaagua

SEQ ID NO: 363212 - RNA, 19 nt, Artificial Sequence
  Description of Artificial Sequence: Synthetic oligonucleotide
  Antisense Strand to SEQ ID NO: 363211
uacuuccaggaugugacag

SEQ ID NO: 363213 - RNA, 19 nt, Artificial Sequence
  Description of Artificial Sequence: Synthetic oligonucleotide
  Sense Strand Starting at position 567 of SEQ ID NO: 315901
ugucacauccuggaaguau

SEQ ID NO: 363214 - RNA, 19 nt, Artificial Sequence
  Description of Artificial Sequence: Synthetic oligonucleotide
  Antisense Strand to SEQ ID NO: 363213
auacuuccaggaugugaca

SEQ ID NO: 363215 - RNA, 19 nt, Artificial Sequence
  Description of Artificial Sequence: Synthetic oligonucleotide
  Sense Strand Starting at position 567 of SEQ ID NO: 315929
gguuacaggaccugucuaa

SEQ ID NO: 363216 - RNA, 19 nt, Artificial Sequence
  Description of Artificial Sequence: Synthetic oligonucleotide
  Antisense Strand to SEQ ID NO: 363215
uuagacagguccuguaacc

SEQ ID NO: 363217 - RNA, 19 nt, Artificial Sequence
  Description of Artificial Sequence: Synthetic oligonucleotide
  Sense Strand Starting at position 567 of SEQ ID NO: 315967
uaaagcgggucuguuauaa

SEQ ID NO: 363218 - RNA, 19 nt, Artificial Sequence
  Description of Artificial Sequence: Synthetic oligonucleotide
  Antisense Strand to SEQ ID NO: 363217
uuauaacagacccgcuuua

SEQ ID NO: 363219 - RNA, 19 nt, Artificial Sequence
  Description of Artificial Sequence: Synthetic oligonucleotide
  Sense Strand Starting at position 567 of SEQ ID NO: 315993
aauuguaguguaugggaaa

SEQ ID NO: 363220 - RNA, 19 nt, Artificial Sequence
  Description of Artificial Sequence: Synthetic oligonucleotide
  Antisense Strand to SEQ ID NO: 363219
uuucccauacacuacaauu

SEQ ID NO: 363221 - RNA, 19 nt, Artificial Sequence
  Description of Artificial Sequence: Synthetic oligonucleotide
  Sense Strand Starting at position 567 of SEQ ID NO: 316013
ugucuugugaaguagaaca

SEQ ID NO: 363222 - RNA, 19 nt, Artificial Sequence
  Description of Artificial Sequence: Synthetic oligonucleotide
  Antisense Strand to SEQ ID NO: 363221
uguucuacuucacaagaca

SEQ ID NO: 363223 - RNA, 19 nt, Artificial Sequence
  Description of Artificial Sequence: Synthetic oligonucleotide
  Sense Strand Starting at position 567 of SEQ ID NO: 316045
gaaggauuauuguuguauu

SEQ ID NO: 363224 - RNA, 19 nt, Artificial Sequence
  Description of Artificial Sequence: Synthetic oligonucleotide
  Antisense Strand to SEQ ID NO: 363223
aauacaacaauaauccuuc

SEQ ID NO: 363225 - RNA, 19 nt, Artificial Sequence
  Description of Artificial Sequence: Synthetic oligonucleotide
  Sense Strand Starting at position 567 of SEQ ID NO: 316173
gccuuuaguguacaaucau

SEQ ID NO: 363226 - RNA, 19 nt, Artificial Sequence
  Description of Artificial Sequence: Synthetic oligonucleotide
  Antisense Strand to SEQ ID NO: 363225
augauuguacacuaaaggc

SEQ ID NO: 363227 - RNA, 19 nt, Artificial Sequence
  Description of Artificial Sequence: Synthetic oligonucleotide
  Sense Strand Starting at position 567 of SEQ ID NO: 316273
gcagaacugcaaugugaac

SEQ ID NO: 363228 - RNA, 19 nt, Artificial Sequence
  Description of Artificial Sequence: Synthetic oligonucleotide
  Antisense Strand to SEQ ID NO: 363227
guucacauugcaguucugc

SEQ ID NO: 363229 - RNA, 19 nt, Artificial Sequence
  Description of Artificial Sequence: Synthetic oligonucleotide
  Sense Strand Starting at position 567 of SEQ ID NO: 316289
aacccaggcuugucaugau

SEQ ID NO: 363230 - RNA, 19 nt, Artificial Sequence
  Description of Artificial Sequence: Synthetic oligonucleotide
  Antisense Strand to SEQ ID NO: 363229
aucaugacaagccuggguu

SEQ ID NO: 363231 - RNA, 19 nt, Artificial Sequence
  Description of Artificial Sequence: Synthetic oligonucleotide
  Sense Strand Starting at position 567 of SEQ ID NO: 316293
caggcuugucaugauucca

SEQ ID NO: 363232 - RNA, 19 nt, Artificial Sequence
  Description of Artificial Sequence: Synthetic oligonucleotide
  Antisense Strand to SEQ ID NO: 363231
uggaaucaugacaagccug

SEQ ID NO: 363233 - RNA, 19 nt, Artificial Sequence
  Description of Artificial Sequence: Synthetic oligonucleotide
  Sense Strand Starting at position 567 of SEQ ID NO: 316370
gcuugcuaggcaucugcaa

SEQ ID NO: 363234 - RNA, 19 nt, Artificial Sequence
  Description of Artificial Sequence: Synthetic oligonucleotide
  Antisense Strand to SEQ ID NO: 363233
uugcagaugccuagcaagc

SEQ ID NO: 363235 - RNA, 19 nt, Artificial Sequence
  Description of Artificial Sequence: Synthetic oligonucleotide
  Sense Strand Starting at position 567 of SEQ ID NO: 316427
gcgacucaccagugaaacu

SEQ ID NO: 363236 - RNA, 19 nt, Artificial Sequence
  Description of Artificial Sequence: Synthetic oligonucleotide
  Antisense Strand to SEQ ID NO: 363235
aguuucacuggugagucgc

SEQ ID NO: 363237 - RNA, 19 nt, Artificial Sequence
  Description of Artificial Sequence: Synthetic oligonucleotide
  Sense Strand Starting at position 567 of SEQ ID NO: 316438
gugaaacugucauccugag

SEQ ID NO: 363238 - RNA, 19 nt, Artificial Sequence
  Description of Artificial Sequence: Synthetic oligonucleotide
  Antisense Strand to SEQ ID NO: 363237
cucaggaugacaguuucac

SEQ ID NO: 363239 - RNA, 19 nt, Artificial Sequence
  Description of Artificial Sequence: Synthetic oligonucleotide
  Sense Strand Starting at position 567 of SEQ ID NO: 317047
cccgaaagcuccuccuuga

SEQ ID NO: 363240 - RNA, 19 nt, Artificial Sequence
  Description of Artificial Sequence: Synthetic oligonucleotide
  Antisense Strand to SEQ ID NO: 363239
ucaaggaggagcuuucggg

SEQ ID NO: 363241 - RNA, 19 nt, Artificial Sequence
  Description of Artificial Sequence: Synthetic oligonucleotide
  Sense Strand Starting at position 567 of SEQ ID NO: 317295
gaacuugugucucccauag

SEQ ID NO: 363242 - RNA, 19 nt, Artificial Sequence
  Description of Artificial Sequence: Synthetic oligonucleotide
  Antisense Strand to SEQ ID NO: 363241
cuaugggagacacaaguuc

SEQ ID NO: 363243 - RNA, 19 nt, Artificial Sequence
  Description of Artificial Sequence: Synthetic oligonucleotide
  Sense Strand Starting at position 567 of SEQ ID NO: 317299
uugugucucccauagacau

SEQ ID NO: 363244 - RNA, 19 nt, Artificial Sequence
  Description of Artificial Sequence: Synthetic oligonucleotide
  Antisense Strand to SEQ ID NO: 363243
augucuaugggagacacaa

SEQ ID NO: 363245 - RNA, 19 nt, Artificial Sequence
  Description of Artificial Sequence: Synthetic oligonucleotide
  Sense Strand Starting at position 567 of SEQ ID NO: 317337
agagaauuagccgagcucu

SEQ ID NO: 363246 - RNA, 19 nt, Artificial Sequence
  Description of Artificial Sequence: Synthetic oligonucleotide
  Antisense Strand to SEQ ID NO: 363245
agagcucggcuaauucucu

SEQ ID NO: 363247 - RNA, 19 nt, Artificial Sequence
  Description of Artificial Sequence: Synthetic oligonucleotide
  Sense Strand Starting at position 567 of SEQ ID NO: 317499
ccgaguucucucuacccau

SEQ ID NO: 363248 - RNA, 19 nt, Artificial Sequence
  Description of Artificial Sequence: Synthetic oligonucleotide
  Antisense Strand to SEQ ID NO: 363247
auggguagagagaacucgg

SEQ ID NO: 363249 - RNA, 19 nt, Artificial Sequence
  Description of Artificial Sequence: Synthetic oligonucleotide
  Sense Strand Starting at position 567 of SEQ ID NO: 317706
ggcuccaucuuugugggaa

SEQ ID NO: 363250 - RNA, 19 nt, Artificial Sequence
  Description of Artificial Sequence: Synthetic oligonucleotide
  Antisense Strand to SEQ ID NO: 363249
uucccacaaagauggagcc

SEQ ID NO: 363251 - RNA, 19 nt, Artificial Sequence
  Description of Artificial Sequence: Synthetic oligonucleotide
  Sense Strand Starting at position 567 of SEQ ID NO: 318072
cgaacuccugacuauguga

SEQ ID NO: 363252 - RNA, 19 nt, Artificial Sequence
  Description of Artificial Sequence: Synthetic oligonucleotide
  Antisense Strand to SEQ ID NO: 363251
ucacauagucaggaguucg

SEQ ID NO: 363253 - RNA, 19 nt, Artificial Sequence
  Description of Artificial Sequence: Synthetic oligonucleotide
  Sense Strand Starting at position 567 of SEQ ID NO: 318154
gcaucuugagauuguuauu

SEQ ID NO: 363254 - RNA, 19 nt, Artificial Sequence
  Description of Artificial Sequence: Synthetic oligonucleotide
  Antisense Strand to SEQ ID NO: 363253
aauaacaaucucaagaugc

SEQ ID NO: 363255 - RNA, 19 nt, Artificial Sequence
  Description of Artificial Sequence: Synthetic oligonucleotide
  Sense Strand Starting at position 567 of SEQ ID NO: 318354
caagccuagcaguagauau

SEQ ID NO: 363256 - RNA, 19 nt, Artificial Sequence
  Description of Artificial Sequence: Synthetic oligonucleotide
  Antisense Strand to SEQ ID NO: 363255
auaucuacugcuaggcuug

SEQ ID NO: 363257 - RNA, 19 nt, Artificial Sequence
  Description of Artificial Sequence: Synthetic oligonucleotide
  Sense Strand Starting at position 567 of SEQ ID NO: 318356
agccuagcaguagauauua

SEQ ID NO: 363258 - RNA, 19 nt, Artificial Sequence
  Description of Artificial Sequence: Synthetic oligonucleotide
  Antisense Strand to SEQ ID NO: 363257
uaauaucuacugcuaggcu

SEQ ID NO: 363259 - RNA, 19 nt, Artificial Sequence
  Description of Artificial Sequence: Synthetic oligonucleotide
  Sense Strand Starting at position 567 of SEQ ID NO: 318482
accugugagacagguaagu

SEQ ID NO: 363260 - RNA, 19 nt, Artificial Sequence
  Description of Artificial Sequence: Synthetic oligonucleotide
  Antisense Strand to SEQ ID NO: 363259
acuuaccugucucacaggu

SEQ ID NO: 363261 - RNA, 19 nt, Artificial Sequence
  Description of Artificial Sequence: Synthetic oligonucleotide
  Sense Strand Starting at position 567 of SEQ ID NO: 318484
cugugagacagguaagugu

SEQ ID NO: 363262 - RNA, 19 nt, Artificial Sequence
  Description of Artificial Sequence: Synthetic oligonucleotide
  Antisense Strand to SEQ ID NO: 363261
acacuuaccugucucacag

SEQ ID NO: 363263 - RNA, 19 nt, Artificial Sequence
  Description of Artificial Sequence: Synthetic oligonucleotide
  Sense Strand Starting at position 567 of SEQ ID NO: 318488
gagacagguaaguguuaau

SEQ ID NO: 363264 - RNA, 19 nt, Artificial Sequence
  Description of Artificial Sequence: Synthetic oligonucleotide
  Antisense Strand to SEQ ID NO: 363263
auuaacacuuaccugucuc

SEQ ID NO: 363265 - RNA, 19 nt, Artificial Sequence
  Description of Artificial Sequence: Synthetic oligonucleotide
  Sense Strand Starting at position 567 of SEQ ID NO: 318544
ggauaaugauuuggacaag

SEQ ID NO: 363266 - RNA, 19 nt, Artificial Sequence
  Description of Artificial Sequence: Synthetic oligonucleotide
  Antisense Strand to SEQ ID NO: 363265
cuuguccaaaucauuaucc

SEQ ID NO: 363267 - RNA, 19 nt, Artificial Sequence
  Description of Artificial Sequence: Synthetic oligonucleotide
  Sense Strand Starting at position 568 of SEQ ID NO: 315269
uugucaugagaaggguuaa

SEQ ID NO: 363268 - RNA, 19 nt, Artificial Sequence
  Description of Artificial Sequence: Synthetic oligonucleotide
  Antisense Strand to SEQ ID NO: 363267
uuaacccuucucaugacaa

SEQ ID NO: 363269 - RNA, 19 nt, Artificial Sequence
  Description of Artificial Sequence: Synthetic oligonucleotide
  Sense Strand Starting at position 568 of SEQ ID NO: 315270
ugucaugagaaggguuaag

SEQ ID NO: 363270 - RNA, 19 nt, Artificial Sequence
  Description of Artificial Sequence: Synthetic oligonucleotide
  Antisense Strand to SEQ ID NO: 363269
cuuaacccuucucaugaca

SEQ ID NO: 363271 - RNA, 19 nt, Artificial Sequence
  Description of Artificial Sequence: Synthetic oligonucleotide
  Sense Strand Starting at position 568 of SEQ ID NO: 315333
ggaagacuagugugggcau

SEQ ID NO: 363272 - RNA, 19 nt, Artificial Sequence
  Description of Artificial Sequence: Synthetic oligonucleotide
  Antisense Strand to SEQ ID NO: 363271
augcccacacuagucuucc

SEQ ID NO: 363273 - RNA, 19 nt, Artificial Sequence
  Description of Artificial Sequence: Synthetic oligonucleotide
  Sense Strand Starting at position 568 of SEQ ID NO: 315360
cuguguguucguguuuaaa

SEQ ID NO: 363274 - RNA, 19 nt, Artificial Sequence
  Description of Artificial Sequence: Synthetic oligonucleotide
  Antisense Strand to SEQ ID NO: 363273
uuuaaacacgaacacacag

SEQ ID NO: 363275 - RNA, 19 nt, Artificial Sequence
  Description of Artificial Sequence: Synthetic oligonucleotide
  Sense Strand Starting at position 568 of SEQ ID NO: 315383
gcaaguuuguguccagaaa

SEQ ID NO: 363276 - RNA, 19 nt, Artificial Sequence
  Description of Artificial Sequence: Synthetic oligonucleotide
  Antisense Strand to SEQ ID NO: 363275
uuucuggacacaaacuugc

SEQ ID NO: 363277 - RNA, 19 nt, Artificial Sequence
  Description of Artificial Sequence: Synthetic oligonucleotide
  Sense Strand Starting at position 568 of SEQ ID NO: 315384
caaguuuguguccagaaag

SEQ ID NO: 363278 - RNA, 19 nt, Artificial Sequence
  Description of Artificial Sequence: Synthetic oligonucleotide
  Antisense Strand to SEQ ID NO: 363277
cuuucuggacacaaacuug

SEQ ID NO: 363279 - RNA, 19 nt, Artificial Sequence
  Description of Artificial Sequence: Synthetic oligonucleotide
  Sense Strand Starting at position 568 of SEQ ID NO: 315414
gcagcaucucuguacaauc

SEQ ID NO: 363280 - RNA, 19 nt, Artificial Sequence
  Description of Artificial Sequence: Synthetic oligonucleotide
  Antisense Strand to SEQ ID NO: 363279
gauuguacagagaugcugc

SEQ ID NO: 363281 - RNA, 19 nt, Artificial Sequence
  Description of Artificial Sequence: Synthetic oligonucleotide
  Sense Strand Starting at position 568 of SEQ ID NO: 315492
gcucgacugaccuaagaga

SEQ ID NO: 363282 - RNA, 19 nt, Artificial Sequence
  Description of Artificial Sequence: Synthetic oligonucleotide
  Antisense Strand to SEQ ID NO: 363281
ucucuuaggucagucgagc

SEQ ID NO: 363283 - RNA, 19 nt, Artificial Sequence
  Description of Artificial Sequence: Synthetic oligonucleotide
  Sense Strand Starting at position 568 of SEQ ID NO: 315523
ggcuuagaauaaucuguaa

SEQ ID NO: 363284 - RNA, 19 nt, Artificial Sequence
  Description of Artificial Sequence: Synthetic oligonucleotide
  Antisense Strand to SEQ ID NO: 363283
uuacagauuauucuaagcc

SEQ ID NO: 363285 - RNA, 19 nt, Artificial Sequence
  Description of Artificial Sequence: Synthetic oligonucleotide
  Sense Strand Starting at position 568 of SEQ ID NO: 315608
gucaauaaaggaugucuca

SEQ ID NO: 363286 - RNA, 19 nt, Artificial Sequence
  Description of Artificial Sequence: Synthetic oligonucleotide
  Antisense Strand to SEQ ID NO: 363285
ugagacauccuuuauugac

SEQ ID NO: 363287 - RNA, 19 nt, Artificial Sequence
  Description of Artificial Sequence: Synthetic oligonucleotide
  Sense Strand Starting at position 568 of SEQ ID NO: 315643
aggccugagguuugaccua

SEQ ID NO: 363288 - RNA, 19 nt, Artificial Sequence
  Description of Artificial Sequence: Synthetic oligonucleotide
  Antisense Strand to SEQ ID NO: 363287
uaggucaaaccucaggccu

SEQ ID NO: 363289 - RNA, 19 nt, Artificial Sequence
  Description of Artificial Sequence: Synthetic oligonucleotide
  Sense Strand Starting at position 568 of SEQ ID NO: 316002
ggcucauugugaccauuau

SEQ ID NO: 363290 - RNA, 19 nt, Artificial Sequence
  Description of Artificial Sequence: Synthetic oligonucleotide
  Antisense Strand to SEQ ID NO: 363289
auaauggucacaaugagcc

SEQ ID NO: 363291 - RNA, 19 nt, Artificial Sequence
  Description of Artificial Sequence: Synthetic oligonucleotide
  Sense Strand Starting at position 568 of SEQ ID NO: 316003
gcucauugugaccauuaua

SEQ ID NO: 363292 - RNA, 19 nt, Artificial Sequence
  Description of Artificial Sequence: Synthetic oligonucleotide
  Antisense Strand to SEQ ID NO: 363291
uauaauggucacaaugagc

SEQ ID NO: 363293 - RNA, 19 nt, Artificial Sequence
  Description of Artificial Sequence: Synthetic oligonucleotide
  Sense Strand Starting at position 568 of SEQ ID NO: 316094
gagauaacuugcccaaguu

SEQ ID NO: 363294 - RNA, 19 nt, Artificial Sequence
  Description of Artificial Sequence: Synthetic oligonucleotide
  Antisense Strand to SEQ ID NO: 363293
aacuugggcaaguuaucuc

SEQ ID NO: 363295 - RNA, 19 nt, Artificial Sequence
  Description of Artificial Sequence: Synthetic oligonucleotide
  Sense Strand Starting at position 568 of SEQ ID NO: 316341
ugcucccucucaguauuua

SEQ ID NO: 363296 - RNA, 19 nt, Artificial Sequence
  Description of Artificial Sequence: Synthetic oligonucleotide
  Antisense Strand to SEQ ID NO: 363295
uaaauacugagagggagca

SEQ ID NO: 363297 - RNA, 19 nt, Artificial Sequence
  Description of Artificial Sequence: Synthetic oligonucleotide
  Sense Strand Starting at position 568 of SEQ ID NO: 316829
ccacaaccgcguuacuuaa

SEQ ID NO: 363298 - RNA, 19 nt, Artificial Sequence
  Description of Artificial Sequence: Synthetic oligonucleotide
  Antisense Strand to SEQ ID NO: 363297
uuaaguaacgcgguugugg

SEQ ID NO: 363299 - RNA, 19 nt, Artificial Sequence
  Description of Artificial Sequence: Synthetic oligonucleotide
  Sense Strand Starting at position 568 of SEQ ID NO: 316972
guaggaggguuuaacgaua

SEQ ID NO: 363300 - RNA, 19 nt, Artificial Sequence
  Description of Artificial Sequence: Synthetic oligonucleotide
  Antisense Strand to SEQ ID NO: 363299
uaucguuaaacccuccuac

SEQ ID NO: 363301 - RNA, 19 nt, Artificial Sequence
  Description of Artificial Sequence: Synthetic oligonucleotide
  Sense Strand Starting at position 568 of SEQ ID NO: 317001
gaauccgucuacccugaga

SEQ ID NO: 363302 - RNA, 19 nt, Artificial Sequence
  Description of Artificial Sequence: Synthetic oligonucleotide
  Antisense Strand to SEQ ID NO: 363301
ucucaggguagacggauuc

SEQ ID NO: 363303 - RNA, 19 nt, Artificial Sequence
  Description of Artificial Sequence: Synthetic oligonucleotide
  Sense Strand Starting at position 568 of SEQ ID NO: 317003
auccgucuacccugagauu

SEQ ID NO: 363304 - RNA, 19 nt, Artificial Sequence
  Description of Artificial Sequence: Synthetic oligonucleotide
  Antisense Strand to SEQ ID NO: 363303
aaucucaggguagacggau

SEQ ID NO: 363305 - RNA, 19 nt, Artificial Sequence
  Description of Artificial Sequence: Synthetic oligonucleotide
  Sense Strand Starting at position 568 of SEQ ID NO: 317587
cgugcucucgcaguugaga

SEQ ID NO: 363306 - RNA, 19 nt, Artificial Sequence
  Description of Artificial Sequence: Synthetic oligonucleotide
  Antisense Strand to SEQ ID NO: 363305
ucucaacugcgagagcacg

SEQ ID NO: 363307 - RNA, 19 nt, Artificial Sequence
  Description of Artificial Sequence: Synthetic oligonucleotide
  Sense Strand Starting at position 568 of SEQ ID NO: 317588
gugcucucgcaguugagau

SEQ ID NO: 363308 - RNA, 19 nt, Artificial Sequence
  Description of Artificial Sequence: Synthetic oligonucleotide
  Antisense Strand to SEQ ID NO: 363307
aucucaacugcgagagcac

SEQ ID NO: 363309 - RNA, 19 nt, Artificial Sequence
  Description of Artificial Sequence: Synthetic oligonucleotide
  Sense Strand Starting at position 568 of SEQ ID NO: 317633
ucucgacguauuuagcaau

SEQ ID NO: 363310 - RNA, 19 nt, Artificial Sequence
  Description of Artificial Sequence: Synthetic oligonucleotide
  Antisense Strand to SEQ ID NO: 363309
auugcuaaauacgucgaga

SEQ ID NO: 363311 - RNA, 19 nt, Artificial Sequence
  Description of Artificial Sequence: Synthetic oligonucleotide
  Sense Strand Starting at position 568 of SEQ ID NO: 317656
cugcaaggccuugaaucaa

SEQ ID NO: 363312 - RNA, 19 nt, Artificial Sequence
  Description of Artificial Sequence: Synthetic oligonucleotide
  Antisense Strand to SEQ ID NO: 363311
uugauucaaggccuugcag

SEQ ID NO: 363313 - RNA, 19 nt, Artificial Sequence
  Description of Artificial Sequence: Synthetic oligonucleotide
  Sense Strand Starting at position 568 of SEQ ID NO: 317757
ucuugcugucuugaacuga

SEQ ID NO: 363314 - RNA, 19 nt, Artificial Sequence
  Description of Artificial Sequence: Synthetic oligonucleotide
  Antisense Strand to SEQ ID NO: 363313
ucaguucaagacagcaaga

SEQ ID NO: 363315 - RNA, 19 nt, Artificial Sequence
  Description of Artificial Sequence: Synthetic oligonucleotide
  Sense Strand Starting at position 568 of SEQ ID NO: 317810
agacuaaaucuguauuguc

SEQ ID NO: 363316 - RNA, 19 nt, Artificial Sequence
  Description of Artificial Sequence: Synthetic oligonucleotide
  Antisense Strand to SEQ ID NO: 363315
gacaauacagauuuagucu

SEQ ID NO: 363317 - RNA, 19 nt, Artificial Sequence
  Description of Artificial Sequence: Synthetic oligonucleotide
  Sense Strand Starting at position 568 of SEQ ID NO: 318018
uguagaugguagucuguaa

SEQ ID NO: 363318 - RNA, 19 nt, Artificial Sequence
  Description of Artificial Sequence: Synthetic oligonucleotide
  Antisense Strand to SEQ ID NO: 363317
uuacagacuaccaucuaca

SEQ ID NO: 363319 - RNA, 19 nt, Artificial Sequence
  Description of Artificial Sequence: Synthetic oligonucleotide
  Sense Strand Starting at position 568 of SEQ ID NO: 318022
gaugguagucuguaauaua

SEQ ID NO: 363320 - RNA, 19 nt, Artificial Sequence
  Description of Artificial Sequence: Synthetic oligonucleotide
  Antisense Strand to SEQ ID NO: 363319
uauauuacagacuaccauc

SEQ ID NO: 363321 - RNA, 19 nt, Artificial Sequence
  Description of Artificial Sequence: Synthetic oligonucleotide
  Sense Strand Starting at position 568 of SEQ ID NO: 318033
guaauauaucccgggaagc

SEQ ID NO: 363322 - RNA, 19 nt, Artificial Sequence
  Description of Artificial Sequence: Synthetic oligonucleotide
  Antisense Strand to SEQ ID NO: 363321
gcuucccgggauauauuac

SEQ ID NO: 363323 - RNA, 19 nt, Artificial Sequence
  Description of Artificial Sequence: Synthetic oligonucleotide
  Sense Strand Starting at position 568 of SEQ ID NO: 318035
aauauaucccgggaagcgu

SEQ ID NO: 363324 - RNA, 19 nt, Artificial Sequence
  Description of Artificial Sequence: Synthetic oligonucleotide
  Antisense Strand to SEQ ID NO: 363323
acgcuucccgggauauauu

SEQ ID NO: 363325 - RNA, 19 nt, Artificial Sequence
  Description of Artificial Sequence: Synthetic oligonucleotide
  Sense Strand Starting at position 568 of SEQ ID NO: 318111
cugcuagugccucaugauu

SEQ ID NO: 363326 - RNA, 19 nt, Artificial Sequence
  Description of Artificial Sequence: Synthetic oligonucleotide
  Antisense Strand to SEQ ID NO: 363325
aaucaugaggcacuagcag

SEQ ID NO: 363327 - RNA, 19 nt, Artificial Sequence
  Description of Artificial Sequence: Synthetic oligonucleotide
  Sense Strand Starting at position 568 of SEQ ID NO: 318461
ggugaaauaucaguguaau

SEQ ID NO: 363328 - RNA, 19 nt, Artificial Sequence
  Description of Artificial Sequence: Synthetic oligonucleotide
  Antisense Strand to SEQ ID NO: 363327
auuacacugauauuucacc

SEQ ID NO: 363329 - RNA, 19 nt, Artificial Sequence
  Description of Artificial Sequence: Synthetic oligonucleotide
  Sense Strand Starting at position 568 of SEQ ID NO: 318462
gugaaauaucaguguaauu

SEQ ID NO: 363330 - RNA, 19 nt, Artificial Sequence
  Description of Artificial Sequence: Synthetic oligonucleotide
  Antisense Strand to SEQ ID NO: 363329
aauuacacugauauuucac

SEQ ID NO: 363331 - RNA, 19 nt, Artificial Sequence
  Description of Artificial Sequence: Synthetic oligonucleotide
  Sense Strand Starting at position 568 of SEQ ID NO: 318776
uaaggacuuuguguauauu

SEQ ID NO: 363332 - RNA, 19 nt, Artificial Sequence
  Description of Artificial Sequence: Synthetic oligonucleotide
  Antisense Strand to SEQ ID NO: 363331
aauauacacaaaguccuua

SEQ ID NO: 363333 - RNA, 19 nt, Artificial Sequence
  Description of Artificial Sequence: Synthetic oligonucleotide
  Sense Strand Starting at position 568 of SEQ ID NO: 318777
aaggacuuuguguauauua

SEQ ID NO: 363334 - RNA, 19 nt, Artificial Sequence
  Description of Artificial Sequence: Synthetic oligonucleotide
  Antisense Strand to SEQ ID NO: 363333
uaauauacacaaaguccuu

SEQ ID NO: 363335 - RNA, 19 nt, Artificial Sequence
  Description of Artificial Sequence: Synthetic oligonucleotide
  Sense Strand Starting at position 568 of SEQ ID NO: 318779
ggacuuuguguauauuaau

SEQ ID NO: 363336 - RNA, 19 nt, Artificial Sequence
  Description of Artificial Sequence: Synthetic oligonucleotide
  Antisense Strand to SEQ ID NO: 363335
auuaauauacacaaagucc

SEQ ID NO: 363337 - RNA, 19 nt, Artificial Sequence
  Description of Artificial Sequence: Synthetic oligonucleotide
  Sense Strand Starting at position 568 of SEQ ID NO: 319013
agauguauauucccggaca

SEQ ID NO: 363338 - RNA, 19 nt, Artificial Sequence
  Description of Artificial Sequence: Synthetic oligonucleotide
  Antisense Strand to SEQ ID NO: 363337
uguccgggaauauacaucu

SEQ ID NO: 363339 - RNA, 19 nt, Artificial Sequence
  Description of Artificial Sequence: Synthetic oligonucleotide
  Sense Strand Starting at position 568 of SEQ ID NO: 319015
auguauauucccggacauu

SEQ ID NO: 363340 - RNA, 19 nt, Artificial Sequence
  Description of Artificial Sequence: Synthetic oligonucleotide
  Antisense Strand to SEQ ID NO: 363339
aauguccgggaauauacau

SEQ ID NO: 363341 - RNA, 19 nt, Artificial Sequence
  Description of Artificial Sequence: Synthetic oligonucleotide
  Sense Strand Starting at position 568 of SEQ ID NO: 319016
uguauauucccggacauug

SEQ ID NO: 363342 - RNA, 19 nt, Artificial Sequence
  Description of Artificial Sequence: Synthetic oligonucleotide
  Antisense Strand to SEQ ID NO: 363341
caauguccgggaauauaca

SEQ ID NO: 363343 - RNA, 19 nt, Artificial Sequence
  Description of Artificial Sequence: Synthetic oligonucleotide
  Sense Strand Starting at position 568 of SEQ ID NO: 319099
aguauauuguaguuugaac

SEQ ID NO: 363344 - RNA, 19 nt, Artificial Sequence
  Description of Artificial Sequence: Synthetic oligonucleotide
  Antisense Strand to SEQ ID NO: 363343
guucaaacuacaauauacu

SEQ ID NO: 363345 - RNA, 19 nt, Artificial Sequence
  Description of Artificial Sequence: Synthetic oligonucleotide
  Sense Strand Starting at position 568 of SEQ ID NO: 319160
gcugucuacgcacagaaua

SEQ ID NO: 363346 - RNA, 19 nt, Artificial Sequence
  Description of Artificial Sequence: Synthetic oligonucleotide
  Antisense Strand to SEQ ID NO: 363345
uauucugugcguagacagc

SEQ ID NO: 363347 - RNA, 19 nt, Artificial Sequence
  Description of Artificial Sequence: Synthetic oligonucleotide
  Sense Strand Starting at position 569 of SEQ ID NO: 315260
acugacguuacaugauuga

SEQ ID NO: 363348 - RNA, 19 nt, Artificial Sequence
  Description of Artificial Sequence: Synthetic oligonucleotide
  Antisense Strand to SEQ ID NO: 363347
ucaaucauguaacgucagu

SEQ ID NO: 363349 - RNA, 19 nt, Artificial Sequence
  Description of Artificial Sequence: Synthetic oligonucleotide
  Sense Strand Starting at position 569 of SEQ ID NO: 315267
uuacaugauugaguccuga

SEQ ID NO: 363350 - RNA, 19 nt, Artificial Sequence
  Description of Artificial Sequence: Synthetic oligonucleotide
  Antisense Strand to SEQ ID NO: 363349
ucaggacucaaucauguaa

SEQ ID NO: 363351 - RNA, 19 nt, Artificial Sequence
  Description of Artificial Sequence: Synthetic oligonucleotide
  Sense Strand Starting at position 569 of SEQ ID NO: 315283
ugagcuagugaguaacaga

SEQ ID NO: 363352 - RNA, 19 nt, Artificial Sequence
  Description of Artificial Sequence: Synthetic oligonucleotide
  Antisense Strand to SEQ ID NO: 363351
ucuguuacucacuagcuca

SEQ ID NO: 363353 - RNA, 19 nt, Artificial Sequence
  Description of Artificial Sequence: Synthetic oligonucleotide
  Sense Strand Starting at position 569 of SEQ ID NO: 315319
ggucuuucuggcuaugaca

SEQ ID NO: 363354 - RNA, 19 nt, Artificial Sequence
  Description of Artificial Sequence: Synthetic oligonucleotide
  Antisense Strand to SEQ ID NO: 363353
ugucauagccagaaagacc

SEQ ID NO: 363355 - RNA, 19 nt, Artificial Sequence
  Description of Artificial Sequence: Synthetic oligonucleotide
  Sense Strand Starting at position 569 of SEQ ID NO: 315330
cuaugacauccuugugauu

SEQ ID NO: 363356 - RNA, 19 nt, Artificial Sequence
  Description of Artificial Sequence: Synthetic oligonucleotide
  Antisense Strand to SEQ ID NO: 363355
aaucacaaggaugucauag

SEQ ID NO: 363357 - RNA, 19 nt, Artificial Sequence
  Description of Artificial Sequence: Synthetic oligonucleotide
  Sense Strand Starting at position 569 of SEQ ID NO: 315467
acgggcgucauugaagaaa

SEQ ID NO: 363358 - RNA, 19 nt, Artificial Sequence
  Description of Artificial Sequence: Synthetic oligonucleotide
  Antisense Strand to SEQ ID NO: 363357
uuucuucaaugacgcccgu

SEQ ID NO: 363359 - RNA, 19 nt, Artificial Sequence
  Description of Artificial Sequence: Synthetic oligonucleotide
  Sense Strand Starting at position 569 of SEQ ID NO: 315690
caggucagugcuggaaaga

SEQ ID NO: 363360 - RNA, 19 nt, Artificial Sequence
  Description of Artificial Sequence: Synthetic oligonucleotide
  Antisense Strand to SEQ ID NO: 363359
ucuuuccagcacugaccug

SEQ ID NO: 363361 - RNA, 19 nt, Artificial Sequence
  Description of Artificial Sequence: Synthetic oligonucleotide
  Sense Strand Starting at position 569 of SEQ ID NO: 315839
auaauaugcugacuguuaa

SEQ ID NO: 363362 - RNA, 19 nt, Artificial Sequence
  Description of Artificial Sequence: Synthetic oligonucleotide
  Antisense Strand to SEQ ID NO: 363361
uuaacagucagcauauuau

SEQ ID NO: 363363 - RNA, 19 nt, Artificial Sequence
  Description of Artificial Sequence: Synthetic oligonucleotide
  Sense Strand Starting at position 569 of SEQ ID NO: 315840
uaauaugcugacuguuaag

SEQ ID NO: 363364 - RNA, 19 nt, Artificial Sequence
  Description of Artificial Sequence: Synthetic oligonucleotide
  Antisense Strand to SEQ ID NO: 363363
cuuaacagucagcauauua

SEQ ID NO: 363365 - RNA, 19 nt, Artificial Sequence
  Description of Artificial Sequence: Synthetic oligonucleotide
  Sense Strand Starting at position 569 of SEQ ID NO: 315934
cugaauaugcugggugaug

SEQ ID NO: 363366 - RNA, 19 nt, Artificial Sequence
  Description of Artificial Sequence: Synthetic oligonucleotide
  Antisense Strand to SEQ ID NO: 363365
caucacccagcauauucag

SEQ ID NO: 363367 - RNA, 19 nt, Artificial Sequence
  Description of Artificial Sequence: Synthetic oligonucleotide
  Sense Strand Starting at position 569 of SEQ ID NO: 315935
ugaauaugcugggugauga

SEQ ID NO: 363368 - RNA, 19 nt, Artificial Sequence
  Description of Artificial Sequence: Synthetic oligonucleotide
  Antisense Strand to SEQ ID NO: 363367
ucaucacccagcauauuca

SEQ ID NO: 363369 - RNA, 19 nt, Artificial Sequence
  Description of Artificial Sequence: Synthetic oligonucleotide
  Sense Strand Starting at position 569 of SEQ ID NO: 316221
gugccuagugucuuggagu

SEQ ID NO: 363370 - RNA, 19 nt, Artificial Sequence
  Description of Artificial Sequence: Synthetic oligonucleotide
  Antisense Strand to SEQ ID NO: 363369
acuccaagacacuaggcac

SEQ ID NO: 363371 - RNA, 19 nt, Artificial Sequence
  Description of Artificial Sequence: Synthetic oligonucleotide
  Sense Strand Starting at position 569 of SEQ ID NO: 316227
agugucuuggaguaucaaa

SEQ ID NO: 363372 - RNA, 19 nt, Artificial Sequence
  Description of Artificial Sequence: Synthetic oligonucleotide
  Antisense Strand to SEQ ID NO: 363371
uuugauacuccaagacacu

SEQ ID NO: 363373 - RNA, 19 nt, Artificial Sequence
  Description of Artificial Sequence: Synthetic oligonucleotide
  Sense Strand Starting at position 569 of SEQ ID NO: 316407
uuuagaaugcuauggagua

SEQ ID NO: 363374 - RNA, 19 nt, Artificial Sequence
  Description of Artificial Sequence: Synthetic oligonucleotide
  Antisense Strand to SEQ ID NO: 363373
uacuccauagcauucuaaa

SEQ ID NO: 363375 - RNA, 19 nt, Artificial Sequence
  Description of Artificial Sequence: Synthetic oligonucleotide
  Sense Strand Starting at position 569 of SEQ ID NO: 316680
gauuguuguguggacauua

SEQ ID NO: 363376 - RNA, 19 nt, Artificial Sequence
  Description of Artificial Sequence: Synthetic oligonucleotide
  Antisense Strand to SEQ ID NO: 363375
uaauguccacacaacaauc

SEQ ID NO: 363377 - RNA, 19 nt, Artificial Sequence
  Description of Artificial Sequence: Synthetic oligonucleotide
  Sense Strand Starting at position 569 of SEQ ID NO: 316732
uucuuugggaugugggaau

SEQ ID NO: 363378 - RNA, 19 nt, Artificial Sequence
  Description of Artificial Sequence: Synthetic oligonucleotide
  Antisense Strand to SEQ ID NO: 363377
auucccacaucccaaagaa

SEQ ID NO: 363379 - RNA, 19 nt, Artificial Sequence
  Description of Artificial Sequence: Synthetic oligonucleotide
  Sense Strand Starting at position 569 of SEQ ID NO: 316751
agagguuuaggaggugaua

SEQ ID NO: 363380 - RNA, 19 nt, Artificial Sequence
  Description of Artificial Sequence: Synthetic oligonucleotide
  Antisense Strand to SEQ ID NO: 363379
uaucaccuccuaaaccucu

SEQ ID NO: 363381 - RNA, 19 nt, Artificial Sequence
  Description of Artificial Sequence: Synthetic oligonucleotide
  Sense Strand Starting at position 569 of SEQ ID NO: 316753
agguuuaggaggugauaaa

SEQ ID NO: 363382 - RNA, 19 nt, Artificial Sequence
  Description of Artificial Sequence: Synthetic oligonucleotide
  Antisense Strand to SEQ ID NO: 363381
uuuaucaccuccuaaaccu

SEQ ID NO: 363383 - RNA, 19 nt, Artificial Sequence
  Description of Artificial Sequence: Synthetic oligonucleotide
  Sense Strand Starting at position 569 of SEQ ID NO: 316895
cuuaccugugagcaaacau

SEQ ID NO: 363384 - RNA, 19 nt, Artificial Sequence
  Description of Artificial Sequence: Synthetic oligonucleotide
  Antisense Strand to SEQ ID NO: 363383
auguuugcucacagguaag

SEQ ID NO: 363385 - RNA, 19 nt, Artificial Sequence
  Description of Artificial Sequence: Synthetic oligonucleotide
  Sense Strand Starting at position 569 of SEQ ID NO: 317244
uugagaaucugccuaugag

SEQ ID NO: 363386 - RNA, 19 nt, Artificial Sequence
  Description of Artificial Sequence: Synthetic oligonucleotide
  Antisense Strand to SEQ ID NO: 363385
cucauaggcagauucucaa

SEQ ID NO: 363387 - RNA, 19 nt, Artificial Sequence
  Description of Artificial Sequence: Synthetic oligonucleotide
  Sense Strand Starting at position 569 of SEQ ID NO: 317245
ugagaaucugccuaugagc

SEQ ID NO: 363388 - RNA, 19 nt, Artificial Sequence
  Description of Artificial Sequence: Synthetic oligonucleotide
  Antisense Strand to SEQ ID NO: 363387
gcucauaggcagauucuca

SEQ ID NO: 363389 - RNA, 19 nt, Artificial Sequence
  Description of Artificial Sequence: Synthetic oligonucleotide
  Sense Strand Starting at position 569 of SEQ ID NO: 317247
agaaucugccuaugagcaa

SEQ ID NO: 363390 - RNA, 19 nt, Artificial Sequence
  Description of Artificial Sequence: Synthetic oligonucleotide
  Antisense Strand to SEQ ID NO: 363389
uugcucauaggcagauucu

SEQ ID NO: 363391 - RNA, 19 nt, Artificial Sequence
  Description of Artificial Sequence: Synthetic oligonucleotide
  Sense Strand Starting at position 569 of SEQ ID NO: 317260
gagcaauacccggaccaca

SEQ ID NO: 363392 - RNA, 19 nt, Artificial Sequence
  Description of Artificial Sequence: Synthetic oligonucleotide
  Antisense Strand to SEQ ID NO: 363391
ugugguccggguauugcuc

SEQ ID NO: 363393 - RNA, 19 nt, Artificial Sequence
  Description of Artificial Sequence: Synthetic oligonucleotide
  Sense Strand Starting at position 569 of SEQ ID NO: 317564
gaacaagauugguuaccuu

SEQ ID NO: 363394 - RNA, 19 nt, Artificial Sequence
  Description of Artificial Sequence: Synthetic oligonucleotide
  Antisense Strand to SEQ ID NO: 363393
aagguaaccaaucuuguuc

SEQ ID NO: 363395 - RNA, 19 nt, Artificial Sequence
  Description of Artificial Sequence: Synthetic oligonucleotide
  Sense Strand Starting at position 569 of SEQ ID NO: 317638
uugacugaauaucuuugua

SEQ ID NO: 363396 - RNA, 19 nt, Artificial Sequence
  Description of Artificial Sequence: Synthetic oligonucleotide
  Antisense Strand to SEQ ID NO: 363395
uacaaagauauucagucaa

SEQ ID NO: 363397 - RNA, 19 nt, Artificial Sequence
  Description of Artificial Sequence: Synthetic oligonucleotide
  Sense Strand Starting at position 569 of SEQ ID NO: 317664
ugauuacugagucacguga

SEQ ID NO: 363398 - RNA, 19 nt, Artificial Sequence
  Description of Artificial Sequence: Synthetic oligonucleotide
  Antisense Strand to SEQ ID NO: 363397
ucacgugacucaguaauca

SEQ ID NO: 363399 - RNA, 19 nt, Artificial Sequence
  Description of Artificial Sequence: Synthetic oligonucleotide
  Sense Strand Starting at position 569 of SEQ ID NO: 317816
uggguucuagaguauaaug

SEQ ID NO: 363400 - RNA, 19 nt, Artificial Sequence
  Description of Artificial Sequence: Synthetic oligonucleotide
  Antisense Strand to SEQ ID NO: 363399
cauuauacucuagaaccca

SEQ ID NO: 363401 - RNA, 19 nt, Artificial Sequence
  Description of Artificial Sequence: Synthetic oligonucleotide
  Sense Strand Starting at position 569 of SEQ ID NO: 317818
gguucuagaguauaaugua

SEQ ID NO: 363402 - RNA, 19 nt, Artificial Sequence
  Description of Artificial Sequence: Synthetic oligonucleotide
  Antisense Strand to SEQ ID NO: 363401
uacauuauacucuagaacc

SEQ ID NO: 363403 - RNA, 19 nt, Artificial Sequence
  Description of Artificial Sequence: Synthetic oligonucleotide
  Sense Strand Starting at position 569 of SEQ ID NO: 318036
acagcaauauucguaagga

SEQ ID NO: 363404 - RNA, 19 nt, Artificial Sequence
  Description of Artificial Sequence: Synthetic oligonucleotide
  Antisense Strand to SEQ ID NO: 363403
uccuuacgaauauugcugu

SEQ ID NO: 363405 - RNA, 19 nt, Artificial Sequence
  Description of Artificial Sequence: Synthetic oligonucleotide
  Sense Strand Starting at position 569 of SEQ ID NO: 318226
gguugaaauggcgagaaau

SEQ ID NO: 363406 - RNA, 19 nt, Artificial Sequence
  Description of Artificial Sequence: Synthetic oligonucleotide
  Antisense Strand to SEQ ID NO: 363405
auuucucgccauuucaacc

SEQ ID NO: 363407 - RNA, 19 nt, Artificial Sequence
  Description of Artificial Sequence: Synthetic oligonucleotide
  Sense Strand Starting at position 569 of SEQ ID NO: 318247
ggcuuaguggcagacagaa

SEQ ID NO: 363408 - RNA, 19 nt, Artificial Sequence
  Description of Artificial Sequence: Synthetic oligonucleotide
  Antisense Strand to SEQ ID NO: 363407
uucugucugccacuaagcc

SEQ ID NO: 363409 - RNA, 19 nt, Artificial Sequence
  Description of Artificial Sequence: Synthetic oligonucleotide
  Sense Strand Starting at position 569 of SEQ ID NO: 318284
uugaaugccuuauugagga

SEQ ID NO: 363410 - RNA, 19 nt, Artificial Sequence
  Description of Artificial Sequence: Synthetic oligonucleotide
  Antisense Strand to SEQ ID NO: 363409
uccucaauaaggcauucaa

SEQ ID NO: 363411 - RNA, 19 nt, Artificial Sequence
  Description of Artificial Sequence: Synthetic oligonucleotide
  Sense Strand Starting at position 569 of SEQ ID NO: 318294
uauugaggagcuuggaauu

SEQ ID NO: 363412 - RNA, 19 nt, Artificial Sequence
  Description of Artificial Sequence: Synthetic oligonucleotide
  Antisense Strand to SEQ ID NO: 363411
aauuccaagcuccucaaua

SEQ ID NO: 363413 - RNA, 19 nt, Artificial Sequence
  Description of Artificial Sequence: Synthetic oligonucleotide
  Sense Strand Starting at position 569 of SEQ ID NO: 318306
uggaauuuauccugagagg

SEQ ID NO: 363414 - RNA, 19 nt, Artificial Sequence
  Description of Artificial Sequence: Synthetic oligonucleotide
  Antisense Strand to SEQ ID NO: 363413
ccucucaggauaaauucca

SEQ ID NO: 363415 - RNA, 19 nt, Artificial Sequence
  Description of Artificial Sequence: Synthetic oligonucleotide
  Sense Strand Starting at position 569 of SEQ ID NO: 318373
cccugcauuugagcuuuaa

SEQ ID NO: 363416 - RNA, 19 nt, Artificial Sequence
  Description of Artificial Sequence: Synthetic oligonucleotide
  Antisense Strand to SEQ ID NO: 363415
uuaaagcucaaaugcaggg

SEQ ID NO: 363417 - RNA, 19 nt, Artificial Sequence
  Description of Artificial Sequence: Synthetic oligonucleotide
  Sense Strand Starting at position 569 of SEQ ID NO: 318450
ccaugagggagcuauggua

SEQ ID NO: 363418 - RNA, 19 nt, Artificial Sequence
  Description of Artificial Sequence: Synthetic oligonucleotide
  Antisense Strand to SEQ ID NO: 363417
uaccauagcucccucaugg

SEQ ID NO: 363419 - RNA, 19 nt, Artificial Sequence
  Description of Artificial Sequence: Synthetic oligonucleotide
  Sense Strand Starting at position 569 of SEQ ID NO: 318463
augguagugauccagguga

SEQ ID NO: 363420 - RNA, 19 nt, Artificial Sequence
  Description of Artificial Sequence: Synthetic oligonucleotide
  Antisense Strand to SEQ ID NO: 363419
ucaccuggaucacuaccau

SEQ ID NO: 363421 - RNA, 19 nt, Artificial Sequence
  Description of Artificial Sequence: Synthetic oligonucleotide
  Sense Strand Starting at position 569 of SEQ ID NO: 318465
gguagugauccaggugaca

SEQ ID NO: 363422 - RNA, 19 nt, Artificial Sequence
  Description of Artificial Sequence: Synthetic oligonucleotide
  Antisense Strand to SEQ ID NO: 363421
ugucaccuggaucacuacc

SEQ ID NO: 363423 - RNA, 19 nt, Artificial Sequence
  Description of Artificial Sequence: Synthetic oligonucleotide
  Sense Strand Starting at position 569 of SEQ ID NO: 318474
ccaggugacagacauuguu

SEQ ID NO: 363424 - RNA, 19 nt, Artificial Sequence
  Description of Artificial Sequence: Synthetic oligonucleotide
  Antisense Strand to SEQ ID NO: 363423
aacaaugucugucaccugg

SEQ ID NO: 363425 - RNA, 19 nt, Artificial Sequence
  Description of Artificial Sequence: Synthetic oligonucleotide
  Sense Strand Starting at position 569 of SEQ ID NO: 318733
gcaaauguucagcuugcga

SEQ ID NO: 363426 - RNA, 19 nt, Artificial Sequence
  Description of Artificial Sequence: Synthetic oligonucleotide
  Antisense Strand to SEQ ID NO: 363425
ucgcaagcugaacauuugc

SEQ ID NO: 363427 - RNA, 19 nt, Artificial Sequence
  Description of Artificial Sequence: Synthetic oligonucleotide
  Sense Strand Starting at position 570 of SEQ ID NO: 315313
gaagaaagaguuugcuaca

SEQ ID NO: 363428 - RNA, 19 nt, Artificial Sequence
  Description of Artificial Sequence: Synthetic oligonucleotide
  Antisense Strand to SEQ ID NO: 363427
uguagcaaacucuuucuuc

SEQ ID NO: 363429 - RNA, 19 nt, Artificial Sequence
  Description of Artificial Sequence: Synthetic oligonucleotide
  Sense Strand Starting at position 570 of SEQ ID NO: 315599
ugcggugaaaccuaacaga

SEQ ID NO: 363430 - RNA, 19 nt, Artificial Sequence
  Description of Artificial Sequence: Synthetic oligonucleotide
  Antisense Strand to SEQ ID NO: 363429
ucuguuagguuucaccgca

SEQ ID NO: 363431 - RNA, 19 nt, Artificial Sequence
  Description of Artificial Sequence: Synthetic oligonucleotide
  Sense Strand Starting at position 570 of SEQ ID NO: 315845
gaaaucaugccagguaaua

SEQ ID NO: 363432 - RNA, 19 nt, Artificial Sequence
  Description of Artificial Sequence: Synthetic oligonucleotide
  Antisense Strand to SEQ ID NO: 363431
uauuaccuggcaugauuuc

SEQ ID NO: 363433 - RNA, 19 nt, Artificial Sequence
  Description of Artificial Sequence: Synthetic oligonucleotide
  Sense Strand Starting at position 570 of SEQ ID NO: 316035
uucugucuacauggaaaua

SEQ ID NO: 363434 - RNA, 19 nt, Artificial Sequence
  Description of Artificial Sequence: Synthetic oligonucleotide
  Antisense Strand to SEQ ID NO: 363433
uauuuccauguagacagaa

SEQ ID NO: 363435 - RNA, 19 nt, Artificial Sequence
  Description of Artificial Sequence: Synthetic oligonucleotide
  Sense Strand Starting at position 570 of SEQ ID NO: 316046
uggaaauaugcuuaccuug

SEQ ID NO: 363436 - RNA, 19 nt, Artificial Sequence
  Description of Artificial Sequence: Synthetic oligonucleotide
  Antisense Strand to SEQ ID NO: 363435
caagguaagcauauuucca

SEQ ID NO: 363437 - RNA, 19 nt, Artificial Sequence
  Description of Artificial Sequence: Synthetic oligonucleotide
  Sense Strand Starting at position 570 of SEQ ID NO: 316071
guaaauacauuagugaaca

SEQ ID NO: 363438 - RNA, 19 nt, Artificial Sequence
  Description of Artificial Sequence: Synthetic oligonucleotide
  Antisense Strand to SEQ ID NO: 363437
uguucacuaauguauuuac

SEQ ID NO: 363439 - RNA, 19 nt, Artificial Sequence
  Description of Artificial Sequence: Synthetic oligonucleotide
  Sense Strand Starting at position 570 of SEQ ID NO: 316244
uuuguagauuucuugcuua

SEQ ID NO: 363440 - RNA, 19 nt, Artificial Sequence
  Description of Artificial Sequence: Synthetic oligonucleotide
  Antisense Strand to SEQ ID NO: 363439
uaagcaagaaaucuacaaa

SEQ ID NO: 363441 - RNA, 19 nt, Artificial Sequence
  Description of Artificial Sequence: Synthetic oligonucleotide
  Sense Strand Starting at position 570 of SEQ ID NO: 316247
guagauuucuugcuuaacu

SEQ ID NO: 363442 - RNA, 19 nt, Artificial Sequence
  Description of Artificial Sequence: Synthetic oligonucleotide
  Antisense Strand to SEQ ID NO: 363441
aguuaagcaagaaaucuac

SEQ ID NO: 363443 - RNA, 19 nt, Artificial Sequence
  Description of Artificial Sequence: Synthetic oligonucleotide
  Sense Strand Starting at position 570 of SEQ ID NO: 316264
cucugaaacuuccugagau

SEQ ID NO: 363444 - RNA, 19 nt, Artificial Sequence
  Description of Artificial Sequence: Synthetic oligonucleotide
  Antisense Strand to SEQ ID NO: 363443
aucucaggaaguuucagag

SEQ ID NO: 363445 - RNA, 19 nt, Artificial Sequence
  Description of Artificial Sequence: Synthetic oligonucleotide
  Sense Strand Starting at position 570 of SEQ ID NO: 316327
cuaagaaaucuuggcagaa

SEQ ID NO: 363446 - RNA, 19 nt, Artificial Sequence
  Description of Artificial Sequence: Synthetic oligonucleotide
  Antisense Strand to SEQ ID NO: 363445
uucugccaagauuucuuag

SEQ ID NO: 363447 - RNA, 19 nt, Artificial Sequence
  Description of Artificial Sequence: Synthetic oligonucleotide
  Sense Strand Starting at position 570 of SEQ ID NO: 316339
ggcagaauauauguucuca

SEQ ID NO: 363448 - RNA, 19 nt, Artificial Sequence
  Description of Artificial Sequence: Synthetic oligonucleotide
  Antisense Strand to SEQ ID NO: 363447
ugagaacauauauucugcc

SEQ ID NO: 363449 - RNA, 19 nt, Artificial Sequence
  Description of Artificial Sequence: Synthetic oligonucleotide
  Sense Strand Starting at position 570 of SEQ ID NO: 316523
acaugaccugccuaaugau

SEQ ID NO: 363450 - RNA, 19 nt, Artificial Sequence
  Description of Artificial Sequence: Synthetic oligonucleotide
  Antisense Strand to SEQ ID NO: 363449
aucauuaggcaggucaugu

SEQ ID NO: 363451 - RNA, 19 nt, Artificial Sequence
  Description of Artificial Sequence: Synthetic oligonucleotide
  Sense Strand Starting at position 570 of SEQ ID NO: 316542
gcaaguuuaaugggaccau

SEQ ID NO: 363452 - RNA, 19 nt, Artificial Sequence
  Description of Artificial Sequence: Synthetic oligonucleotide
  Antisense Strand to SEQ ID NO: 363451
auggucccauuaaacuugc

SEQ ID NO: 363453 - RNA, 19 nt, Artificial Sequence
  Description of Artificial Sequence: Synthetic oligonucleotide
  Sense Strand Starting at position 570 of SEQ ID NO: 316635
gucauauauuuagaaguca

SEQ ID NO: 363454 - RNA, 19 nt, Artificial Sequence
  Description of Artificial Sequence: Synthetic oligonucleotide
  Antisense Strand to SEQ ID NO: 363453
ugacuucuaaauauaugac

SEQ ID NO: 363455 - RNA, 19 nt, Artificial Sequence
  Description of Artificial Sequence: Synthetic oligonucleotide
  Sense Strand Starting at position 570 of SEQ ID NO: 316643
uuuagaagucauuguuucu

SEQ ID NO: 363456 - RNA, 19 nt, Artificial Sequence
  Description of Artificial Sequence: Synthetic oligonucleotide
  Antisense Strand to SEQ ID NO: 363455
agaaacaaugacuucuaaa

SEQ ID NO: 363457 - RNA, 19 nt, Artificial Sequence
  Description of Artificial Sequence: Synthetic oligonucleotide
  Sense Strand Starting at position 570 of SEQ ID NO: 316768
uuacucuguggugagugaa

SEQ ID NO: 363458 - RNA, 19 nt, Artificial Sequence
  Description of Artificial Sequence: Synthetic oligonucleotide
  Antisense Strand to SEQ ID NO: 363457
uucacucaccacagaguaa

SEQ ID NO: 363459 - RNA, 19 nt, Artificial Sequence
  Description of Artificial Sequence: Synthetic oligonucleotide
  Sense Strand Starting at position 570 of SEQ ID NO: 316845
ggcauugagaacgaaccuu

SEQ ID NO: 363460 - RNA, 19 nt, Artificial Sequence
  Description of Artificial Sequence: Synthetic oligonucleotide
  Antisense Strand to SEQ ID NO: 363459
aagguucguucucaaugcc

SEQ ID NO: 363461 - RNA, 19 nt, Artificial Sequence
  Description of Artificial Sequence: Synthetic oligonucleotide
  Sense Strand Starting at position 570 of SEQ ID NO: 317051
acugcugucaaacgaaaga

SEQ ID NO: 363462 - RNA, 19 nt, Artificial Sequence
  Description of Artificial Sequence: Synthetic oligonucleotide
  Antisense Strand to SEQ ID NO: 363461
ucuuucguuugacagcagu

SEQ ID NO: 363463 - RNA, 19 nt, Artificial Sequence
  Description of Artificial Sequence: Synthetic oligonucleotide
  Sense Strand Starting at position 570 of SEQ ID NO: 317066
aagaaucucucguccagau

SEQ ID NO: 363464 - RNA, 19 nt, Artificial Sequence
  Description of Artificial Sequence: Synthetic oligonucleotide
  Antisense Strand to SEQ ID NO: 363463
aucuggacgagagauucuu

SEQ ID NO: 363465 - RNA, 19 nt, Artificial Sequence
  Description of Artificial Sequence: Synthetic oligonucleotide
  Sense Strand Starting at position 570 of SEQ ID NO: 317068
gaaucucucguccagauag

SEQ ID NO: 363466 - RNA, 19 nt, Artificial Sequence
  Description of Artificial Sequence: Synthetic oligonucleotide
  Antisense Strand to SEQ ID NO: 363465
cuaucuggacgagagauuc

SEQ ID NO: 363467 - RNA, 19 nt, Artificial Sequence
  Description of Artificial Sequence: Synthetic oligonucleotide
  Sense Strand Starting at position 570 of SEQ ID NO: 317079
ccagauagccauuaucuga

SEQ ID NO: 363468 - RNA, 19 nt, Artificial Sequence
  Description of Artificial Sequence: Synthetic oligonucleotide
  Antisense Strand to SEQ ID NO: 363467
ucagauaauggcuaucugg

SEQ ID NO: 363469 - RNA, 19 nt, Artificial Sequence
  Description of Artificial Sequence: Synthetic oligonucleotide
  Sense Strand Starting at position 570 of SEQ ID NO: 317145
ucuucaggagugggaauua

SEQ ID NO: 363470 - RNA, 19 nt, Artificial Sequence
  Description of Artificial Sequence: Synthetic oligonucleotide
  Antisense Strand to SEQ ID NO: 363469
uaauucccacuccugaaga

SEQ ID NO: 363471 - RNA, 19 nt, Artificial Sequence
  Description of Artificial Sequence: Synthetic oligonucleotide
  Sense Strand Starting at position 570 of SEQ ID NO: 317206
acucuaaagcguugcauuu

SEQ ID NO: 363472 - RNA, 19 nt, Artificial Sequence
  Description of Artificial Sequence: Synthetic oligonucleotide
  Antisense Strand to SEQ ID NO: 363471
aaaugcaacgcuuuagagu

SEQ ID NO: 363473 - RNA, 19 nt, Artificial Sequence
  Description of Artificial Sequence: Synthetic oligonucleotide
  Sense Strand Starting at position 570 of SEQ ID NO: 317295
augauuugauaggaaguaa

SEQ ID NO: 363474 - RNA, 19 nt, Artificial Sequence
  Description of Artificial Sequence: Synthetic oligonucleotide
  Antisense Strand to SEQ ID NO: 363473
uuacuuccuaucaaaucau

SEQ ID NO: 363475 - RNA, 19 nt, Artificial Sequence
  Description of Artificial Sequence: Synthetic oligonucleotide
  Sense Strand Starting at position 570 of SEQ ID NO: 317307
gaaguaaggccugaggagu

SEQ ID NO: 363476 - RNA, 19 nt, Artificial Sequence
  Description of Artificial Sequence: Synthetic oligonucleotide
  Antisense Strand to SEQ ID NO: 363475
acuccucaggccuuacuuc

SEQ ID NO: 363477 - RNA, 19 nt, Artificial Sequence
  Description of Artificial Sequence: Synthetic oligonucleotide
  Sense Strand Starting at position 570 of SEQ ID NO: 317358
auucucugcccuuagagaa

SEQ ID NO: 363478 - RNA, 19 nt, Artificial Sequence
  Description of Artificial Sequence: Synthetic oligonucleotide
  Antisense Strand to SEQ ID NO: 363477
uucucuaagggcagagaau

SEQ ID NO: 363479 - RNA, 19 nt, Artificial Sequence
  Description of Artificial Sequence: Synthetic oligonucleotide
  Sense Strand Starting at position 570 of SEQ ID NO: 317628
uguuccauuucuguuugau

SEQ ID NO: 363480 - RNA, 19 nt, Artificial Sequence
  Description of Artificial Sequence: Synthetic oligonucleotide
  Antisense Strand to SEQ ID NO: 363479
aucaaacagaaauggaaca

SEQ ID NO: 363481 - RNA, 19 nt, Artificial Sequence
  Description of Artificial Sequence: Synthetic oligonucleotide
  Sense Strand Starting at position 570 of SEQ ID NO: 317698
guagcuuagcgugugaaua

SEQ ID NO: 363482 - RNA, 19 nt, Artificial Sequence
  Description of Artificial Sequence: Synthetic oligonucleotide
  Antisense Strand to SEQ ID NO: 363481
uauucacacgcuaagcuac

SEQ ID NO: 363483 - RNA, 19 nt, Artificial Sequence
  Description of Artificial Sequence: Synthetic oligonucleotide
  Sense Strand Starting at position 570 of SEQ ID NO: 317720
aagaguagugcuuauugua

SEQ ID NO: 363484 - RNA, 19 nt, Artificial Sequence
  Description of Artificial Sequence: Synthetic oligonucleotide
  Antisense Strand to SEQ ID NO: 363483
uacaauaagcacuacucuu

SEQ ID NO: 363485 - RNA, 19 nt, Artificial Sequence
  Description of Artificial Sequence: Synthetic oligonucleotide
  Sense Strand Starting at position 570 of SEQ ID NO: 317793
agccuaagcgaugagugau

SEQ ID NO: 363486 - RNA, 19 nt, Artificial Sequence
  Description of Artificial Sequence: Synthetic oligonucleotide
  Antisense Strand to SEQ ID NO: 363485
aucacucaucgcuuaggcu

SEQ ID NO: 363487 - RNA, 19 nt, Artificial Sequence
  Description of Artificial Sequence: Synthetic oligonucleotide
  Sense Strand Starting at position 570 of SEQ ID NO: 317801
cgaugagugaugcaggauu

SEQ ID NO: 363488 - RNA, 19 nt, Artificial Sequence
  Description of Artificial Sequence: Synthetic oligonucleotide
  Antisense Strand to SEQ ID NO: 363487
aauccugcaucacucaucg

SEQ ID NO: 363489 - RNA, 19 nt, Artificial Sequence
  Description of Artificial Sequence: Synthetic oligonucleotide
  Sense Strand Starting at position 570 of SEQ ID NO: 317902
cuguuugugagaugagaga

SEQ ID NO: 363490 - RNA, 19 nt, Artificial Sequence
  Description of Artificial Sequence: Synthetic oligonucleotide
  Antisense Strand to SEQ ID NO: 363489
ucucucaucucacaaacag

SEQ ID NO: 363491 - RNA, 19 nt, Artificial Sequence
  Description of Artificial Sequence: Synthetic oligonucleotide
  Sense Strand Starting at position 570 of SEQ ID NO: 318037
gagcaauuguuaucagguu

SEQ ID NO: 363492 - RNA, 19 nt, Artificial Sequence
  Description of Artificial Sequence: Synthetic oligonucleotide
  Antisense Strand to SEQ ID NO: 363491
aaccugauaacaauugcuc

SEQ ID NO: 363493 - RNA, 19 nt, Artificial Sequence
  Description of Artificial Sequence: Synthetic oligonucleotide
  Sense Strand Starting at position 570 of SEQ ID NO: 318204
ugcccaucuguuuauacau

SEQ ID NO: 363494 - RNA, 19 nt, Artificial Sequence
  Description of Artificial Sequence: Synthetic oligonucleotide
  Antisense Strand to SEQ ID NO: 363493
auguauaaacagaugggca

SEQ ID NO: 363495 - RNA, 19 nt, Artificial Sequence
  Description of Artificial Sequence: Synthetic oligonucleotide
  Sense Strand Starting at position 570 of SEQ ID NO: 318261
auuaaucauugggaagaca

SEQ ID NO: 363496 - RNA, 19 nt, Artificial Sequence
  Description of Artificial Sequence: Synthetic oligonucleotide
  Antisense Strand to SEQ ID NO: 363495
ugucuucccaaugauuaau

SEQ ID NO: 363497 - RNA, 19 nt, Artificial Sequence
  Description of Artificial Sequence: Synthetic oligonucleotide
  Sense Strand Starting at position 570 of SEQ ID NO: 318742
accaccuuccuggguauau

SEQ ID NO: 363498 - RNA, 19 nt, Artificial Sequence
  Description of Artificial Sequence: Synthetic oligonucleotide
  Antisense Strand to SEQ ID NO: 363497
auauacccaggaagguggu

SEQ ID NO: 363499 - RNA, 19 nt, Artificial Sequence
  Description of Artificial Sequence: Synthetic oligonucleotide
  Sense Strand Starting at position 570 of SEQ ID NO: 318744
caccuuccuggguauauga

SEQ ID NO: 363500 - RNA, 19 nt, Artificial Sequence
  Description of Artificial Sequence: Synthetic oligonucleotide
  Antisense Strand to SEQ ID NO: 363499
ucauauacccaggaaggug

SEQ ID NO: 363501 - RNA, 19 nt, Artificial Sequence
  Description of Artificial Sequence: Synthetic oligonucleotide
  Sense Strand Starting at position 570 of SEQ ID NO: 318751
cuggguauaugaucuuuaa

SEQ ID NO: 363502 - RNA, 19 nt, Artificial Sequence
  Description of Artificial Sequence: Synthetic oligonucleotide
  Antisense Strand to SEQ ID NO: 363501
uuaaagaucauauacccag

SEQ ID NO: 363503 - RNA, 19 nt, Artificial Sequence
  Description of Artificial Sequence: Synthetic oligonucleotide
  Sense Strand Starting at position 570 of SEQ ID NO: 318834
cucuauguuucuguauaag

SEQ ID NO: 363504 - RNA, 19 nt, Artificial Sequence
  Description of Artificial Sequence: Synthetic oligonucleotide
  Antisense Strand to SEQ ID NO: 363503
cuuauacagaaacauagag

SEQ ID NO: 363505 - RNA, 19 nt, Artificial Sequence
  Description of Artificial Sequence: Synthetic oligonucleotide
  Sense Strand Starting at position 570 of SEQ ID NO: 319201
gagcgaggccuguuugguu

SEQ ID NO: 363506 - RNA, 19 nt, Artificial Sequence
  Description of Artificial Sequence: Synthetic oligonucleotide
  Antisense Strand to SEQ ID NO: 363505
aaccaaacaggccucgcuc

SEQ ID NO: 363507 - RNA, 19 nt, Artificial Sequence
  Description of Artificial Sequence: Synthetic oligonucleotide
  Sense Strand Starting at position 571 of SEQ ID NO: 315237
agcuguaugagauauguac

SEQ ID NO: 363508 - RNA, 19 nt, Artificial Sequence
  Description of Artificial Sequence: Synthetic oligonucleotide
  Antisense Strand to SEQ ID NO: 363507
guacauaucucauacagcu

SEQ ID NO: 363509 - RNA, 19 nt, Artificial Sequence
  Description of Artificial Sequence: Synthetic oligonucleotide
  Sense Strand Starting at position 571 of SEQ ID NO: 315345
agcugaauguaguuuauuu

SEQ ID NO: 363510 - RNA, 19 nt, Artificial Sequence
  Description of Artificial Sequence: Synthetic oligonucleotide
  Antisense Strand to SEQ ID NO: 363509
aaauaaacuacauucagcu

SEQ ID NO: 363511 - RNA, 19 nt, Artificial Sequence
  Description of Artificial Sequence: Synthetic oligonucleotide
  Sense Strand Starting at position 571 of SEQ ID NO: 315414
aaguguuggagucaaacag

SEQ ID NO: 363512 - RNA, 19 nt, Artificial Sequence
  Description of Artificial Sequence: Synthetic oligonucleotide
  Antisense Strand to SEQ ID NO: 363511
cuguuugacuccaacacuu

SEQ ID NO: 363513 - RNA, 19 nt, Artificial Sequence
  Description of Artificial Sequence: Synthetic oligonucleotide
  Sense Strand Starting at position 571 of SEQ ID NO: 315418
guuggagucaaacaguuga

SEQ ID NO: 363514 - RNA, 19 nt, Artificial Sequence
  Description of Artificial Sequence: Synthetic oligonucleotide
  Antisense Strand to SEQ ID NO: 363513
ucaacuguuugacuccaac

SEQ ID NO: 363515 - RNA, 19 nt, Artificial Sequence
  Description of Artificial Sequence: Synthetic oligonucleotide
  Sense Strand Starting at position 571 of SEQ ID NO: 315456
uaaagugaacgugaguuua

SEQ ID NO: 363516 - RNA, 19 nt, Artificial Sequence
  Description of Artificial Sequence: Synthetic oligonucleotide
  Antisense Strand to SEQ ID NO: 363515
uaaacucacguucacuuua

SEQ ID NO: 363517 - RNA, 19 nt, Artificial Sequence
  Description of Artificial Sequence: Synthetic oligonucleotide
  Sense Strand Starting at position 571 of SEQ ID NO: 315681
uaagaugguguuuggugaa

SEQ ID NO: 363518 - RNA, 19 nt, Artificial Sequence
  Description of Artificial Sequence: Synthetic oligonucleotide
  Antisense Strand to SEQ ID NO: 363517
uucaccaaacaccaucuua

SEQ ID NO: 363519 - RNA, 19 nt, Artificial Sequence
  Description of Artificial Sequence: Synthetic oligonucleotide
  Sense Strand Starting at position 571 of SEQ ID NO: 315708
cacaaauugaggugagguu

SEQ ID NO: 363520 - RNA, 19 nt, Artificial Sequence
  Description of Artificial Sequence: Synthetic oligonucleotide
  Antisense Strand to SEQ ID NO: 363519
aaccucaccucaauuugug

SEQ ID NO: 363521 - RNA, 19 nt, Artificial Sequence
  Description of Artificial Sequence: Synthetic oligonucleotide
  Sense Strand Starting at position 571 of SEQ ID NO: 315715
ugaggugagguuuaguuau

SEQ ID NO: 363522 - RNA, 19 nt, Artificial Sequence
  Description of Artificial Sequence: Synthetic oligonucleotide
  Antisense Strand to SEQ ID NO: 363521
auaacuaaaccucaccuca

SEQ ID NO: 363523 - RNA, 19 nt, Artificial Sequence
  Description of Artificial Sequence: Synthetic oligonucleotide
  Sense Strand Starting at position 571 of SEQ ID NO: 315726
uuaguuauuucccugugca

SEQ ID NO: 363524 - RNA, 19 nt, Artificial Sequence
  Description of Artificial Sequence: Synthetic oligonucleotide
  Antisense Strand to SEQ ID NO: 363523
ugcacagggaaauaacuaa

SEQ ID NO: 363525 - RNA, 19 nt, Artificial Sequence
  Description of Artificial Sequence: Synthetic oligonucleotide
  Sense Strand Starting at position 571 of SEQ ID NO: 315904
uaaguuaugguagaauccu

SEQ ID NO: 363526 - RNA, 19 nt, Artificial Sequence
  Description of Artificial Sequence: Synthetic oligonucleotide
  Antisense Strand to SEQ ID NO: 363525
aggauucuaccauaacuua

SEQ ID NO: 363527 - RNA, 19 nt, Artificial Sequence
  Description of Artificial Sequence: Synthetic oligonucleotide
  Sense Strand Starting at position 571 of SEQ ID NO: 315913
guagaauccugucugaaua

SEQ ID NO: 363528 - RNA, 19 nt, Artificial Sequence
  Description of Artificial Sequence: Synthetic oligonucleotide
  Antisense Strand to SEQ ID NO: 363527
uauucagacaggauucuac

SEQ ID NO: 363529 - RNA, 19 nt, Artificial Sequence
  Description of Artificial Sequence: Synthetic oligonucleotide
  Sense Strand Starting at position 571 of SEQ ID NO: 315921
cugucugaauaagauuuga

SEQ ID NO: 363530 - RNA, 19 nt, Artificial Sequence
  Description of Artificial Sequence: Synthetic oligonucleotide
  Antisense Strand to SEQ ID NO: 363529
ucaaaucuuauucagacag

SEQ ID NO: 363531 - RNA, 19 nt, Artificial Sequence
  Description of Artificial Sequence: Synthetic oligonucleotide
  Sense Strand Starting at position 571 of SEQ ID NO: 315944
accugagaaauucguuaug

SEQ ID NO: 363532 - RNA, 19 nt, Artificial Sequence
  Description of Artificial Sequence: Synthetic oligonucleotide
  Antisense Strand to SEQ ID NO: 363531
cauaacgaauuucucaggu

SEQ ID NO: 363533 - RNA, 19 nt, Artificial Sequence
  Description of Artificial Sequence: Synthetic oligonucleotide
  Sense Strand Starting at position 571 of SEQ ID NO: 315947
ugagaaauucguuaugucu

SEQ ID NO: 363534 - RNA, 19 nt, Artificial Sequence
  Description of Artificial Sequence: Synthetic oligonucleotide
  Antisense Strand to SEQ ID NO: 363533
agacauaacgaauuucuca

SEQ ID NO: 363535 - RNA, 19 nt, Artificial Sequence
  Description of Artificial Sequence: Synthetic oligonucleotide
  Sense Strand Starting at position 571 of SEQ ID NO: 316038
gacucaaauuggucuguga

SEQ ID NO: 363536 - RNA, 19 nt, Artificial Sequence
  Description of Artificial Sequence: Synthetic oligonucleotide
  Antisense Strand to SEQ ID NO: 363535
ucacagaccaauuugaguc

SEQ ID NO: 363537 - RNA, 19 nt, Artificial Sequence
  Description of Artificial Sequence: Synthetic oligonucleotide
  Sense Strand Starting at position 571 of SEQ ID NO: 316098
gagggcagcuauucugaaa

SEQ ID NO: 363538 - RNA, 19 nt, Artificial Sequence
  Description of Artificial Sequence: Synthetic oligonucleotide
  Antisense Strand to SEQ ID NO: 363537
uuucagaauagcugcccuc

SEQ ID NO: 363539 - RNA, 19 nt, Artificial Sequence
  Description of Artificial Sequence: Synthetic oligonucleotide
  Sense Strand Starting at position 571 of SEQ ID NO: 316151
ggagcuuccaagggaacuu

SEQ ID NO: 363540 - RNA, 19 nt, Artificial Sequence
  Description of Artificial Sequence: Synthetic oligonucleotide
  Antisense Strand to SEQ ID NO: 363539
aaguucccuuggaagcucc

SEQ ID NO: 363541 - RNA, 19 nt, Artificial Sequence
  Description of Artificial Sequence: Synthetic oligonucleotide
  Sense Strand Starting at position 571 of SEQ ID NO: 316265
guuucacucguggagauac

SEQ ID NO: 363542 - RNA, 19 nt, Artificial Sequence
  Description of Artificial Sequence: Synthetic oligonucleotide
  Antisense Strand to SEQ ID NO: 363541
guaucuccacgagugaaac

SEQ ID NO: 363543 - RNA, 19 nt, Artificial Sequence
  Description of Artificial Sequence: Synthetic oligonucleotide
  Sense Strand Starting at position 571 of SEQ ID NO: 316280
auacacacuucugucagau

SEQ ID NO: 363544 - RNA, 19 nt, Artificial Sequence
  Description of Artificial Sequence: Synthetic oligonucleotide
  Antisense Strand to SEQ ID NO: 363543
aucugacagaaguguguau

SEQ ID NO: 363545 - RNA, 19 nt, Artificial Sequence
  Description of Artificial Sequence: Synthetic oligonucleotide
  Sense Strand Starting at position 571 of SEQ ID NO: 316522
ucagauucuggccaaacau

SEQ ID NO: 363546 - RNA, 19 nt, Artificial Sequence
  Description of Artificial Sequence: Synthetic oligonucleotide
  Antisense Strand to SEQ ID NO: 363545
auguuuggccagaaucuga

SEQ ID NO: 363547 - RNA, 19 nt, Artificial Sequence
  Description of Artificial Sequence: Synthetic oligonucleotide
  Sense Strand Starting at position 571 of SEQ ID NO: 317349
cccgcugacggagaagauu

SEQ ID NO: 363548 - RNA, 19 nt, Artificial Sequence
  Description of Artificial Sequence: Synthetic oligonucleotide
  Antisense Strand to SEQ ID NO: 363547
aaucuucuccgucagcggg

SEQ ID NO: 363549 - RNA, 19 nt, Artificial Sequence
  Description of Artificial Sequence: Synthetic oligonucleotide
  Sense Strand Starting at position 571 of SEQ ID NO: 317357
cggagaagauucccacuuu

SEQ ID NO: 363550 - RNA, 19 nt, Artificial Sequence
  Description of Artificial Sequence: Synthetic oligonucleotide
  Antisense Strand to SEQ ID NO: 363549
aaagugggaaucuucuccg

SEQ ID NO: 363551 - RNA, 19 nt, Artificial Sequence
  Description of Artificial Sequence: Synthetic oligonucleotide
  Sense Strand Starting at position 571 of SEQ ID NO: 317379
ccagaaguucucgggaaau

SEQ ID NO: 363552 - RNA, 19 nt, Artificial Sequence
  Description of Artificial Sequence: Synthetic oligonucleotide
  Antisense Strand to SEQ ID NO: 363551
auuucccgagaacuucugg

SEQ ID NO: 363553 - RNA, 19 nt, Artificial Sequence
  Description of Artificial Sequence: Synthetic oligonucleotide
  Sense Strand Starting at position 571 of SEQ ID NO: 317442
ggauauaacuuucuagggu

SEQ ID NO: 363554 - RNA, 19 nt, Artificial Sequence
  Description of Artificial Sequence: Synthetic oligonucleotide
  Antisense Strand to SEQ ID NO: 363553
acccuagaaaguuauaucc

SEQ ID NO: 363555 - RNA, 19 nt, Artificial Sequence
  Description of Artificial Sequence: Synthetic oligonucleotide
  Sense Strand Starting at position 571 of SEQ ID NO: 317461
guguuuccugcguuauauu

SEQ ID NO: 363556 - RNA, 19 nt, Artificial Sequence
  Description of Artificial Sequence: Synthetic oligonucleotide
  Antisense Strand to SEQ ID NO: 363555
aauauaacgcaggaaacac

SEQ ID NO: 363557 - RNA, 19 nt, Artificial Sequence
  Description of Artificial Sequence: Synthetic oligonucleotide
  Sense Strand Starting at position 571 of SEQ ID NO: 317462
uguuuccugcguuauauuu

SEQ ID NO: 363558 - RNA, 19 nt, Artificial Sequence
  Description of Artificial Sequence: Synthetic oligonucleotide
  Antisense Strand to SEQ ID NO: 363557
aaauauaacgcaggaaaca

SEQ ID NO: 363559 - RNA, 19 nt, Artificial Sequence
  Description of Artificial Sequence: Synthetic oligonucleotide
  Sense Strand Starting at position 571 of SEQ ID NO: 317765
cgcugaggcccgagaguua

SEQ ID NO: 363560 - RNA, 19 nt, Artificial Sequence
  Description of Artificial Sequence: Synthetic oligonucleotide
  Antisense Strand to SEQ ID NO: 363559
uaacucucgggccucagcg

SEQ ID NO: 363561 - RNA, 19 nt, Artificial Sequence
  Description of Artificial Sequence: Synthetic oligonucleotide
  Sense Strand Starting at position 571 of SEQ ID NO: 317911
aauauuuguuucuagaagg

SEQ ID NO: 363562 - RNA, 19 nt, Artificial Sequence
  Description of Artificial Sequence: Synthetic oligonucleotide
  Antisense Strand to SEQ ID NO: 363561
ccuucuagaaacaaauauu

SEQ ID NO: 363563 - RNA, 19 nt, Artificial Sequence
  Description of Artificial Sequence: Synthetic oligonucleotide
  Sense Strand Starting at position 571 of SEQ ID NO: 317941
uagagaaguugacucaagu

SEQ ID NO: 363564 - RNA, 19 nt, Artificial Sequence
  Description of Artificial Sequence: Synthetic oligonucleotide
  Antisense Strand to SEQ ID NO: 363563
acuugagucaacuucucua

SEQ ID NO: 363565 - RNA, 19 nt, Artificial Sequence
  Description of Artificial Sequence: Synthetic oligonucleotide
  Sense Strand Starting at position 571 of SEQ ID NO: 318416
ucuggucacuaaccuuaga

SEQ ID NO: 363566 - RNA, 19 nt, Artificial Sequence
  Description of Artificial Sequence: Synthetic oligonucleotide
  Antisense Strand to SEQ ID NO: 363565
ucuaagguuagugaccaga

SEQ ID NO: 363567 - RNA, 19 nt, Artificial Sequence
  Description of Artificial Sequence: Synthetic oligonucleotide
  Sense Strand Starting at position 571 of SEQ ID NO: 318419
ggucacuaaccuuagaagu

SEQ ID NO: 363568 - RNA, 19 nt, Artificial Sequence
  Description of Artificial Sequence: Synthetic oligonucleotide
  Antisense Strand to SEQ ID NO: 363567
acuucuaagguuagugacc

SEQ ID NO: 363569 - RNA, 19 nt, Artificial Sequence
  Description of Artificial Sequence: Synthetic oligonucleotide
  Sense Strand Starting at position 571 of SEQ ID NO: 318541
auccuuguccuagaucuga

SEQ ID NO: 363570 - RNA, 19 nt, Artificial Sequence
  Description of Artificial Sequence: Synthetic oligonucleotide
  Antisense Strand to SEQ ID NO: 363569
ucagaucuaggacaaggau

SEQ ID NO: 363571 - RNA, 19 nt, Artificial Sequence
  Description of Artificial Sequence: Synthetic oligonucleotide
  Sense Strand Starting at position 571 of SEQ ID NO: 318646
ucuucucuuccagagagua

SEQ ID NO: 363572 - RNA, 19 nt, Artificial Sequence
  Description of Artificial Sequence: Synthetic oligonucleotide
  Antisense Strand to SEQ ID NO: 363571
uacucucuggaagagaaga

SEQ ID NO: 363573 - RNA, 19 nt, Artificial Sequence
  Description of Artificial Sequence: Synthetic oligonucleotide
  Sense Strand Starting at position 571 of SEQ ID NO: 318671
ggaaguaaguggccaaaga

SEQ ID NO: 363574 - RNA, 19 nt, Artificial Sequence
  Description of Artificial Sequence: Synthetic oligonucleotide
  Antisense Strand to SEQ ID NO: 363573
ucuuuggccacuuacuucc

SEQ ID NO: 363575 - RNA, 19 nt, Artificial Sequence
  Description of Artificial Sequence: Synthetic oligonucleotide
  Sense Strand Starting at position 571 of SEQ ID NO: 318682
gccaaagauagaugguaaa

SEQ ID NO: 363576 - RNA, 19 nt, Artificial Sequence
  Description of Artificial Sequence: Synthetic oligonucleotide
  Antisense Strand to SEQ ID NO: 363575
uuuaccaucuaucuuuggc

SEQ ID NO: 363577 - RNA, 19 nt, Artificial Sequence
  Description of Artificial Sequence: Synthetic oligonucleotide
  Sense Strand Starting at position 571 of SEQ ID NO: 318718
aggucuuccguggagggau

SEQ ID NO: 363578 - RNA, 19 nt, Artificial Sequence
  Description of Artificial Sequence: Synthetic oligonucleotide
  Antisense Strand to SEQ ID NO: 363577
aucccuccacggaagaccu

SEQ ID NO: 363579 - RNA, 19 nt, Artificial Sequence
  Description of Artificial Sequence: Synthetic oligonucleotide
  Sense Strand Starting at position 571 of SEQ ID NO: 318860
ggaugucugugauccugag

SEQ ID NO: 363580 - RNA, 19 nt, Artificial Sequence
  Description of Artificial Sequence: Synthetic oligonucleotide
  Antisense Strand to SEQ ID NO: 363579
cucaggaucacagacaucc

SEQ ID NO: 363581 - RNA, 19 nt, Artificial Sequence
  Description of Artificial Sequence: Synthetic oligonucleotide
  Sense Strand Starting at position 571 of SEQ ID NO: 318864
gucugugauccugagggau

SEQ ID NO: 363582 - RNA, 19 nt, Artificial Sequence
  Description of Artificial Sequence: Synthetic oligonucleotide
  Antisense Strand to SEQ ID NO: 363581
aucccucaggaucacagac

SEQ ID NO: 363583 - RNA, 19 nt, Artificial Sequence
  Description of Artificial Sequence: Synthetic oligonucleotide
  Sense Strand Starting at position 571 of SEQ ID NO: 319033
gcauuucucccauguuugu

SEQ ID NO: 363584 - RNA, 19 nt, Artificial Sequence
  Description of Artificial Sequence: Synthetic oligonucleotide
  Antisense Strand to SEQ ID NO: 363583
acaaacaugggagaaaugc

SEQ ID NO: 363585 - RNA, 19 nt, Artificial Sequence
  Description of Artificial Sequence: Synthetic oligonucleotide
  Sense Strand Starting at position 571 of SEQ ID NO: 319123
ucaagaaaugcuggauuaa

SEQ ID NO: 363586 - RNA, 19 nt, Artificial Sequence
  Description of Artificial Sequence: Synthetic oligonucleotide
  Antisense Strand to SEQ ID NO: 363585
uuaauccagcauuucuuga

SEQ ID NO: 363587 - RNA, 19 nt, Artificial Sequence
  Description of Artificial Sequence: Synthetic oligonucleotide
  Sense Strand Starting at position 572 of SEQ ID NO: 315313
gcaagcauuugggcaguuu

SEQ ID NO: 363588 - RNA, 19 nt, Artificial Sequence
  Description of Artificial Sequence: Synthetic oligonucleotide
  Antisense Strand to SEQ ID NO: 363587
aaacugcccaaaugcuugc

SEQ ID NO: 363589 - RNA, 19 nt, Artificial Sequence
  Description of Artificial Sequence: Synthetic oligonucleotide
  Sense Strand Starting at position 572 of SEQ ID NO: 315373
gagucagaaacuugguuug

SEQ ID NO: 363590 - RNA, 19 nt, Artificial Sequence
  Description of Artificial Sequence: Synthetic oligonucleotide
  Antisense Strand to SEQ ID NO: 363589
caaaccaaguuucugacuc

SEQ ID NO: 363591 - RNA, 19 nt, Artificial Sequence
  Description of Artificial Sequence: Synthetic oligonucleotide
  Sense Strand Starting at position 572 of SEQ ID NO: 315375
gucagaaacuugguuugac

SEQ ID NO: 363592 - RNA, 19 nt, Artificial Sequence
  Description of Artificial Sequence: Synthetic oligonucleotide
  Antisense Strand to SEQ ID NO: 363591
gucaaaccaaguuucugac

SEQ ID NO: 363593 - RNA, 19 nt, Artificial Sequence
  Description of Artificial Sequence: Synthetic oligonucleotide
  Sense Strand Starting at position 572 of SEQ ID NO: 315378
agaaacuugguuugacacu

SEQ ID NO: 363594 - RNA, 19 nt, Artificial Sequence
  Description of Artificial Sequence: Synthetic oligonucleotide
  Antisense Strand to SEQ ID NO: 363593
agugucaaaccaaguuucu

SEQ ID NO: 363595 - RNA, 19 nt, Artificial Sequence
  Description of Artificial Sequence: Synthetic oligonucleotide
  Sense Strand Starting at position 572 of SEQ ID NO: 315387
guuugacacuccuuuccca

SEQ ID NO: 363596 - RNA, 19 nt, Artificial Sequence
  Description of Artificial Sequence: Synthetic oligonucleotide
  Antisense Strand to SEQ ID NO: 363595
ugggaaaggagugucaaac

SEQ ID NO: 363597 - RNA, 19 nt, Artificial Sequence
  Description of Artificial Sequence: Synthetic oligonucleotide
  Sense Strand Starting at position 572 of SEQ ID NO: 315415
ggcuaucagagaugucuua

SEQ ID NO: 363598 - RNA, 19 nt, Artificial Sequence
  Description of Artificial Sequence: Synthetic oligonucleotide
  Antisense Strand to SEQ ID NO: 363597
uaagacaucucugauagcc

SEQ ID NO: 363599 - RNA, 19 nt, Artificial Sequence
  Description of Artificial Sequence: Synthetic oligonucleotide
  Sense Strand Starting at position 572 of SEQ ID NO: 315522
uguuccuccucuuugagaa

SEQ ID NO: 363600 - RNA, 19 nt, Artificial Sequence
  Description of Artificial Sequence: Synthetic oligonucleotide
  Antisense Strand to SEQ ID NO: 363599
uucucaaagaggaggaaca

SEQ ID NO: 363601 - RNA, 19 nt, Artificial Sequence
  Description of Artificial Sequence: Synthetic oligonucleotide
  Sense Strand Starting at position 572 of SEQ ID NO: 315523
guuccuccucuuugagaaa

SEQ ID NO: 363602 - RNA, 19 nt, Artificial Sequence
  Description of Artificial Sequence: Synthetic oligonucleotide
  Antisense Strand to SEQ ID NO: 363601
uuucucaaagaggaggaac

SEQ ID NO: 363603 - RNA, 19 nt, Artificial Sequence
  Description of Artificial Sequence: Synthetic oligonucleotide
  Sense Strand Starting at position 572 of SEQ ID NO: 315541
aaucaaugucccuggagga

SEQ ID NO: 363604 - RNA, 19 nt, Artificial Sequence
  Description of Artificial Sequence: Synthetic oligonucleotide
  Antisense Strand to SEQ ID NO: 363603
uccuccagggacauugauu

SEQ ID NO: 363605 - RNA, 19 nt, Artificial Sequence
  Description of Artificial Sequence: Synthetic oligonucleotide
  Sense Strand Starting at position 572 of SEQ ID NO: 315593
ugugucugugauugggaua

SEQ ID NO: 363606 - RNA, 19 nt, Artificial Sequence
  Description of Artificial Sequence: Synthetic oligonucleotide
  Antisense Strand to SEQ ID NO: 363605
uaucccaaucacagacaca

SEQ ID NO: 363607 - RNA, 19 nt, Artificial Sequence
  Description of Artificial Sequence: Synthetic oligonucleotide
  Sense Strand Starting at position 572 of SEQ ID NO: 315760
aggcucuugaucugaagca

SEQ ID NO: 363608 - RNA, 19 nt, Artificial Sequence
  Description of Artificial Sequence: Synthetic oligonucleotide
  Antisense Strand to SEQ ID NO: 363607
ugcuucagaucaagagccu

SEQ ID NO: 363609 - RNA, 19 nt, Artificial Sequence
  Description of Artificial Sequence: Synthetic oligonucleotide
  Sense Strand Starting at position 572 of SEQ ID NO: 315911
gggucuucucaguaacuga

SEQ ID NO: 363610 - RNA, 19 nt, Artificial Sequence
  Description of Artificial Sequence: Synthetic oligonucleotide
  Antisense Strand to SEQ ID NO: 363609
ucaguuacugagaagaccc

SEQ ID NO: 363611 - RNA, 19 nt, Artificial Sequence
  Description of Artificial Sequence: Synthetic oligonucleotide
  Sense Strand Starting at position 572 of SEQ ID NO: 316067
ggaauucagguguacaguu

SEQ ID NO: 363612 - RNA, 19 nt, Artificial Sequence
  Description of Artificial Sequence: Synthetic oligonucleotide
  Antisense Strand to SEQ ID NO: 363611
aacuguacaccugaauucc

SEQ ID NO: 363613 - RNA, 19 nt, Artificial Sequence
  Description of Artificial Sequence: Synthetic oligonucleotide
  Sense Strand Starting at position 572 of SEQ ID NO: 316079
uacaguugugguggaugaa

SEQ ID NO: 363614 - RNA, 19 nt, Artificial Sequence
  Description of Artificial Sequence: Synthetic oligonucleotide
  Antisense Strand to SEQ ID NO: 363613
uucauccaccacaacugua

SEQ ID NO: 363615 - RNA, 19 nt, Artificial Sequence
  Description of Artificial Sequence: Synthetic oligonucleotide
  Sense Strand Starting at position 572 of SEQ ID NO: 316107
gccuguaagcuacaggaua

SEQ ID NO: 363616 - RNA, 19 nt, Artificial Sequence
  Description of Artificial Sequence: Synthetic oligonucleotide
  Antisense Strand to SEQ ID NO: 363615
uauccuguagcuuacaggc

SEQ ID NO: 363617 - RNA, 19 nt, Artificial Sequence
  Description of Artificial Sequence: Synthetic oligonucleotide
  Sense Strand Starting at position 572 of SEQ ID NO: 316364
cuuacaccucaagguguua

SEQ ID NO: 363618 - RNA, 19 nt, Artificial Sequence
  Description of Artificial Sequence: Synthetic oligonucleotide
  Antisense Strand to SEQ ID NO: 363617
uaacaccuugagguguaag

SEQ ID NO: 363619 - RNA, 19 nt, Artificial Sequence
  Description of Artificial Sequence: Synthetic oligonucleotide
  Sense Strand Starting at position 572 of SEQ ID NO: 316408
uuguaugaccugcaugcua

SEQ ID NO: 363620 - RNA, 19 nt, Artificial Sequence
  Description of Artificial Sequence: Synthetic oligonucleotide
  Antisense Strand to SEQ ID NO: 363619
uagcaugcaggucauacaa

SEQ ID NO: 363621 - RNA, 19 nt, Artificial Sequence
  Description of Artificial Sequence: Synthetic oligonucleotide
  Sense Strand Starting at position 572 of SEQ ID NO: 316472
ugaguuagcccagagacca

SEQ ID NO: 363622 - RNA, 19 nt, Artificial Sequence
  Description of Artificial Sequence: Synthetic oligonucleotide
  Antisense Strand to SEQ ID NO: 363621
uggucucugggcuaacuca

SEQ ID NO: 363623 - RNA, 19 nt, Artificial Sequence
  Description of Artificial Sequence: Synthetic oligonucleotide
  Sense Strand Starting at position 572 of SEQ ID NO: 316571
cgauguacccagggagaau

SEQ ID NO: 363624 - RNA, 19 nt, Artificial Sequence
  Description of Artificial Sequence: Synthetic oligonucleotide
  Antisense Strand to SEQ ID NO: 363623
auucucccuggguacaucg

SEQ ID NO: 363625 - RNA, 19 nt, Artificial Sequence
  Description of Artificial Sequence: Synthetic oligonucleotide
  Sense Strand Starting at position 572 of SEQ ID NO: 316615
gugaauugggaguaaagcu

SEQ ID NO: 363626 - RNA, 19 nt, Artificial Sequence
  Description of Artificial Sequence: Synthetic oligonucleotide
  Antisense Strand to SEQ ID NO: 363625
agcuuuacucccaauucac

SEQ ID NO: 363627 - RNA, 19 nt, Artificial Sequence
  Description of Artificial Sequence: Synthetic oligonucleotide
  Sense Strand Starting at position 572 of SEQ ID NO: 316803
cugacaauuccaugugucu

SEQ ID NO: 363628 - RNA, 19 nt, Artificial Sequence
  Description of Artificial Sequence: Synthetic oligonucleotide
  Antisense Strand to SEQ ID NO: 363627
agacacauggaauugucag

SEQ ID NO: 363629 - RNA, 19 nt, Artificial Sequence
  Description of Artificial Sequence: Synthetic oligonucleotide
  Sense Strand Starting at position 572 of SEQ ID NO: 316830
gaaucuccggccugagauu

SEQ ID NO: 363630 - RNA, 19 nt, Artificial Sequence
  Description of Artificial Sequence: Synthetic oligonucleotide
  Antisense Strand to SEQ ID NO: 363629
aaucucaggccggagauuc

SEQ ID NO: 363631 - RNA, 19 nt, Artificial Sequence
  Description of Artificial Sequence: Synthetic oligonucleotide
  Sense Strand Starting at position 572 of SEQ ID NO: 316923
uggccaauucccgaaaccu

SEQ ID NO: 363632 - RNA, 19 nt, Artificial Sequence
  Description of Artificial Sequence: Synthetic oligonucleotide
  Antisense Strand to SEQ ID NO: 363631
agguuucgggaauuggcca

SEQ ID NO: 363633 - RNA, 19 nt, Artificial Sequence
  Description of Artificial Sequence: Synthetic oligonucleotide
  Sense Strand Starting at position 572 of SEQ ID NO: 317314
ggagcuggcgcugaagaaa

SEQ ID NO: 363634 - RNA, 19 nt, Artificial Sequence
  Description of Artificial Sequence: Synthetic oligonucleotide
  Antisense Strand to SEQ ID NO: 363633
uuucuucagcgccagcucc

SEQ ID NO: 363635 - RNA, 19 nt, Artificial Sequence
  Description of Artificial Sequence: Synthetic oligonucleotide
  Sense Strand Starting at position 572 of SEQ ID NO: 317580
gauacacaaguguauguua

SEQ ID NO: 363636 - RNA, 19 nt, Artificial Sequence
  Description of Artificial Sequence: Synthetic oligonucleotide
  Antisense Strand to SEQ ID NO: 363635
uaacauacacuuguguauc

SEQ ID NO: 363637 - RNA, 19 nt, Artificial Sequence
  Description of Artificial Sequence: Synthetic oligonucleotide
  Sense Strand Starting at position 572 of SEQ ID NO: 317583
acacaaguguauguuacaa

SEQ ID NO: 363638 - RNA, 19 nt, Artificial Sequence
  Description of Artificial Sequence: Synthetic oligonucleotide
  Antisense Strand to SEQ ID NO: 363637
uuguaacauacacuugugu

SEQ ID NO: 363639 - RNA, 19 nt, Artificial Sequence
  Description of Artificial Sequence: Synthetic oligonucleotide
  Sense Strand Starting at position 572 of SEQ ID NO: 317780
uuaagaugcuaaguuuaug

SEQ ID NO: 363640 - RNA, 19 nt, Artificial Sequence
  Description of Artificial Sequence: Synthetic oligonucleotide
  Antisense Strand to SEQ ID NO: 363639
cauaaacuuagcaucuuaa

SEQ ID NO: 363641 - RNA, 19 nt, Artificial Sequence
  Description of Artificial Sequence: Synthetic oligonucleotide
  Sense Strand Starting at position 572 of SEQ ID NO: 317788
cuaaguuuaugucugauca

SEQ ID NO: 363642 - RNA, 19 nt, Artificial Sequence
  Description of Artificial Sequence: Synthetic oligonucleotide
  Antisense Strand to SEQ ID NO: 363641
ugaucagacauaaacuuag

SEQ ID NO: 363643 - RNA, 19 nt, Artificial Sequence
  Description of Artificial Sequence: Synthetic oligonucleotide
  Sense Strand Starting at position 572 of SEQ ID NO: 317792
guuuaugucugaucaugaa

SEQ ID NO: 363644 - RNA, 19 nt, Artificial Sequence
  Description of Artificial Sequence: Synthetic oligonucleotide
  Antisense Strand to SEQ ID NO: 363643
uucaugaucagacauaaac

SEQ ID NO: 363645 - RNA, 19 nt, Artificial Sequence
  Description of Artificial Sequence: Synthetic oligonucleotide
  Sense Strand Starting at position 572 of SEQ ID NO: 317889
ggguccauccaucauuaau

SEQ ID NO: 363646 - RNA, 19 nt, Artificial Sequence
  Description of Artificial Sequence: Synthetic oligonucleotide
  Antisense Strand to SEQ ID NO: 363645
auuaaugauggauggaccc

SEQ ID NO: 363647 - RNA, 19 nt, Artificial Sequence
  Description of Artificial Sequence: Synthetic oligonucleotide
  Sense Strand Starting at position 572 of SEQ ID NO: 318066
gguuuaugaagaugcaaag

SEQ ID NO: 363648 - RNA, 19 nt, Artificial Sequence
  Description of Artificial Sequence: Synthetic oligonucleotide
  Antisense Strand to SEQ ID NO: 363647
cuuugcaucuucauaaacc

SEQ ID NO: 363649 - RNA, 19 nt, Artificial Sequence
  Description of Artificial Sequence: Synthetic oligonucleotide
  Sense Strand Starting at position 572 of SEQ ID NO: 318123
cugaaaggcuucguaacua

SEQ ID NO: 363650 - RNA, 19 nt, Artificial Sequence
  Description of Artificial Sequence: Synthetic oligonucleotide
  Antisense Strand to SEQ ID NO: 363649
uaguuacgaagccuuucag

SEQ ID NO: 363651 - RNA, 19 nt, Artificial Sequence
  Description of Artificial Sequence: Synthetic oligonucleotide
  Sense Strand Starting at position 572 of SEQ ID NO: 318301
ccaggauccgcgucagcau

SEQ ID NO: 363652 - RNA, 19 nt, Artificial Sequence
  Description of Artificial Sequence: Synthetic oligonucleotide
  Antisense Strand to SEQ ID NO: 363651
augcugacgcggauccugg

SEQ ID NO: 363653 - RNA, 19 nt, Artificial Sequence
  Description of Artificial Sequence: Synthetic oligonucleotide
  Sense Strand Starting at position 572 of SEQ ID NO: 318437
gcugaagaauaugcggaua

SEQ ID NO: 363654 - RNA, 19 nt, Artificial Sequence
  Description of Artificial Sequence: Synthetic oligonucleotide
  Antisense Strand to SEQ ID NO: 363653
uauccgcauauucuucagc

SEQ ID NO: 363655 - RNA, 19 nt, Artificial Sequence
  Description of Artificial Sequence: Synthetic oligonucleotide
  Sense Strand Starting at position 572 of SEQ ID NO: 318507
gacagaugcugucugcaaa

SEQ ID NO: 363656 - RNA, 19 nt, Artificial Sequence
  Description of Artificial Sequence: Synthetic oligonucleotide
  Antisense Strand to SEQ ID NO: 363655
uuugcagacagcaucuguc

SEQ ID NO: 363657 - RNA, 19 nt, Artificial Sequence
  Description of Artificial Sequence: Synthetic oligonucleotide
  Sense Strand Starting at position 572 of SEQ ID NO: 318620
cccaaauguuggguuacuu

SEQ ID NO: 363658 - RNA, 19 nt, Artificial Sequence
  Description of Artificial Sequence: Synthetic oligonucleotide
  Antisense Strand to SEQ ID NO: 363657
aaguaacccaacauuuggg

SEQ ID NO: 363659 - RNA, 19 nt, Artificial Sequence
  Description of Artificial Sequence: Synthetic oligonucleotide
  Sense Strand Starting at position 572 of SEQ ID NO: 318714
augugagucuauccuuauc

SEQ ID NO: 363660 - RNA, 19 nt, Artificial Sequence
  Description of Artificial Sequence: Synthetic oligonucleotide
  Antisense Strand to SEQ ID NO: 363659
gauaaggauagacucacau

SEQ ID NO: 363661 - RNA, 19 nt, Artificial Sequence
  Description of Artificial Sequence: Synthetic oligonucleotide
  Sense Strand Starting at position 572 of SEQ ID NO: 318717
ugagucuauccuuauccua

SEQ ID NO: 363662 - RNA, 19 nt, Artificial Sequence
  Description of Artificial Sequence: Synthetic oligonucleotide
  Antisense Strand to SEQ ID NO: 363661
uaggauaaggauagacuca

SEQ ID NO: 363663 - RNA, 19 nt, Artificial Sequence
  Description of Artificial Sequence: Synthetic oligonucleotide
  Sense Strand Starting at position 572 of SEQ ID NO: 319170
ucuauuaaguacuuggcau

SEQ ID NO: 363664 - RNA, 19 nt, Artificial Sequence
  Description of Artificial Sequence: Synthetic oligonucleotide
  Antisense Strand to SEQ ID NO: 363663
augccaaguacuuaauaga

SEQ ID NO: 363665 - RNA, 19 nt, Artificial Sequence
  Description of Artificial Sequence: Synthetic oligonucleotide
  Sense Strand Starting at position 572 of SEQ ID NO: 319188
ugcuguauccucuaacagu

SEQ ID NO: 363666 - RNA, 19 nt, Artificial Sequence
  Description of Artificial Sequence: Synthetic oligonucleotide
  Antisense Strand to SEQ ID NO: 363665
acuguuagaggauacagca

SEQ ID NO: 363667 - RNA, 19 nt, Artificial Sequence
  Description of Artificial Sequence: Synthetic oligonucleotide
  Sense Strand Starting at position 573 of SEQ ID NO: 315420
uugguucuugagcaguaaa

SEQ ID NO: 363668 - RNA, 19 nt, Artificial Sequence
  Description of Artificial Sequence: Synthetic oligonucleotide
  Antisense Strand to SEQ ID NO: 363667
uuuacugcucaagaaccaa

SEQ ID NO: 363669 - RNA, 19 nt, Artificial Sequence
  Description of Artificial Sequence: Synthetic oligonucleotide
  Sense Strand Starting at position 573 of SEQ ID NO: 315646
ugugaaucugcagaauauc

SEQ ID NO: 363670 - RNA, 19 nt, Artificial Sequence
  Description of Artificial Sequence: Synthetic oligonucleotide
  Antisense Strand to SEQ ID NO: 363669
gauauucugcagauucaca

SEQ ID NO: 363671 - RNA, 19 nt, Artificial Sequence
  Description of Artificial Sequence: Synthetic oligonucleotide
  Sense Strand Starting at position 573 of SEQ ID NO: 315870
cugaauauguuguugaaau

SEQ ID NO: 363672 - RNA, 19 nt, Artificial Sequence
  Description of Artificial Sequence: Synthetic oligonucleotide
  Antisense Strand to SEQ ID NO: 363671
auuucaacaacauauucag

SEQ ID NO: 363673 - RNA, 19 nt, Artificial Sequence
  Description of Artificial Sequence: Synthetic oligonucleotide
  Sense Strand Starting at position 573 of SEQ ID NO: 315996
agugcaugucauuauuaaa

SEQ ID NO: 363674 - RNA, 19 nt, Artificial Sequence
  Description of Artificial Sequence: Synthetic oligonucleotide
  Antisense Strand to SEQ ID NO: 363673
uuuaauaaugacaugcacu

SEQ ID NO: 363675 - RNA, 19 nt, Artificial Sequence
  Description of Artificial Sequence: Synthetic oligonucleotide
  Sense Strand Starting at position 573 of SEQ ID NO: 316071
uguaaacuguucucugaag

SEQ ID NO: 363676 - RNA, 19 nt, Artificial Sequence
  Description of Artificial Sequence: Synthetic oligonucleotide
  Antisense Strand to SEQ ID NO: 363675
cuucagagaacaguuuaca

SEQ ID NO: 363677 - RNA, 19 nt, Artificial Sequence
  Description of Artificial Sequence: Synthetic oligonucleotide
  Sense Strand Starting at position 573 of SEQ ID NO: 316105
uauucuuagcaguagaaag

SEQ ID NO: 363678 - RNA, 19 nt, Artificial Sequence
  Description of Artificial Sequence: Synthetic oligonucleotide
  Antisense Strand to SEQ ID NO: 363677
cuuucuacugcuaagaaua

SEQ ID NO: 363679 - RNA, 19 nt, Artificial Sequence
  Description of Artificial Sequence: Synthetic oligonucleotide
  Sense Strand Starting at position 573 of SEQ ID NO: 316134
cucaguccugucuaaauua

SEQ ID NO: 363680 - RNA, 19 nt, Artificial Sequence
  Description of Artificial Sequence: Synthetic oligonucleotide
  Antisense Strand to SEQ ID NO: 363679
uaauuuagacaggacugag

SEQ ID NO: 363681 - RNA, 19 nt, Artificial Sequence
  Description of Artificial Sequence: Synthetic oligonucleotide
  Sense Strand Starting at position 573 of SEQ ID NO: 316208
ucauuauggagcugaagga

SEQ ID NO: 363682 - RNA, 19 nt, Artificial Sequence
  Description of Artificial Sequence: Synthetic oligonucleotide
  Antisense Strand to SEQ ID NO: 363681
uccuucagcuccauaauga

SEQ ID NO: 363683 - RNA, 19 nt, Artificial Sequence
  Description of Artificial Sequence: Synthetic oligonucleotide
  Sense Strand Starting at position 573 of SEQ ID NO: 316405
agagaaaggucuguugauu

SEQ ID NO: 363684 - RNA, 19 nt, Artificial Sequence
  Description of Artificial Sequence: Synthetic oligonucleotide
  Antisense Strand to SEQ ID NO: 363683
aaucaacagaccuuucucu

SEQ ID NO: 363685 - RNA, 19 nt, Artificial Sequence
  Description of Artificial Sequence: Synthetic oligonucleotide
  Sense Strand Starting at position 573 of SEQ ID NO: 316490
gugcuacagagugaaagua

SEQ ID NO: 363686 - RNA, 19 nt, Artificial Sequence
  Description of Artificial Sequence: Synthetic oligonucleotide
  Antisense Strand to SEQ ID NO: 363685
uacuuucacucuguagcac

SEQ ID NO: 363687 - RNA, 19 nt, Artificial Sequence
  Description of Artificial Sequence: Synthetic oligonucleotide
  Sense Strand Starting at position 573 of SEQ ID NO: 316512
ucaagucuucgauaaugaa

SEQ ID NO: 363688 - RNA, 19 nt, Artificial Sequence
  Description of Artificial Sequence: Synthetic oligonucleotide
  Antisense Strand to SEQ ID NO: 363687
uucauuaucgaagacuuga

SEQ ID NO: 363689 - RNA, 19 nt, Artificial Sequence
  Description of Artificial Sequence: Synthetic oligonucleotide
  Sense Strand Starting at position 573 of SEQ ID NO: 316565
ugacacuugggcuacauua

SEQ ID NO: 363690 - RNA, 19 nt, Artificial Sequence
  Description of Artificial Sequence: Synthetic oligonucleotide
  Antisense Strand to SEQ ID NO: 363689
uaauguagcccaaguguca

SEQ ID NO: 363691 - RNA, 19 nt, Artificial Sequence
  Description of Artificial Sequence: Synthetic oligonucleotide
  Sense Strand Starting at position 573 of SEQ ID NO: 316947
ccuguuaaugauggaaagu

SEQ ID NO: 363692 - RNA, 19 nt, Artificial Sequence
  Description of Artificial Sequence: Synthetic oligonucleotide
  Antisense Strand to SEQ ID NO: 363691
acuuuccaucauuaacagg

SEQ ID NO: 363693 - RNA, 19 nt, Artificial Sequence
  Description of Artificial Sequence: Synthetic oligonucleotide
  Sense Strand Starting at position 573 of SEQ ID NO: 316956
gauggaaagucuccuucua

SEQ ID NO: 363694 - RNA, 19 nt, Artificial Sequence
  Description of Artificial Sequence: Synthetic oligonucleotide
  Antisense Strand to SEQ ID NO: 363693
uagaaggagacuuuccauc

SEQ ID NO: 363695 - RNA, 19 nt, Artificial Sequence
  Description of Artificial Sequence: Synthetic oligonucleotide
  Sense Strand Starting at position 573 of SEQ ID NO: 316958
uggaaagucuccuucuauc

SEQ ID NO: 363696 - RNA, 19 nt, Artificial Sequence
  Description of Artificial Sequence: Synthetic oligonucleotide
  Antisense Strand to SEQ ID NO: 363695
gauagaaggagacuuucca

SEQ ID NO: 363697 - RNA, 19 nt, Artificial Sequence
  Description of Artificial Sequence: Synthetic oligonucleotide
  Sense Strand Starting at position 573 of SEQ ID NO: 317072
uuaauugaguguccaaauc

SEQ ID NO: 363698 - RNA, 19 nt, Artificial Sequence
  Description of Artificial Sequence: Synthetic oligonucleotide
  Antisense Strand to SEQ ID NO: 363697
gauuuggacacucaauuaa

SEQ ID NO: 363699 - RNA, 19 nt, Artificial Sequence
  Description of Artificial Sequence: Synthetic oligonucleotide
  Sense Strand Starting at position 573 of SEQ ID NO: 317080
guguccaaauccuugaaac

SEQ ID NO: 363700 - RNA, 19 nt, Artificial Sequence
  Description of Artificial Sequence: Synthetic oligonucleotide
  Antisense Strand to SEQ ID NO: 363699
guuucaaggauuuggacac

SEQ ID NO: 363701 - RNA, 19 nt, Artificial Sequence
  Description of Artificial Sequence: Synthetic oligonucleotide
  Sense Strand Starting at position 573 of SEQ ID NO: 317138
aaagucuauguuugagaau

SEQ ID NO: 363702 - RNA, 19 nt, Artificial Sequence
  Description of Artificial Sequence: Synthetic oligonucleotide
  Antisense Strand to SEQ ID NO: 363701
auucucaaacauagacuuu

SEQ ID NO: 363703 - RNA, 19 nt, Artificial Sequence
  Description of Artificial Sequence: Synthetic oligonucleotide
  Sense Strand Starting at position 573 of SEQ ID NO: 317235
ugaaauaaccagcaugcua

SEQ ID NO: 363704 - RNA, 19 nt, Artificial Sequence
  Description of Artificial Sequence: Synthetic oligonucleotide
  Antisense Strand to SEQ ID NO: 363703
uagcaugcugguuauuuca

SEQ ID NO: 363705 - RNA, 19 nt, Artificial Sequence
  Description of Artificial Sequence: Synthetic oligonucleotide
  Sense Strand Starting at position 573 of SEQ ID NO: 317616
uaguaaacucaugguagag

SEQ ID NO: 363706 - RNA, 19 nt, Artificial Sequence
  Description of Artificial Sequence: Synthetic oligonucleotide
  Antisense Strand to SEQ ID NO: 363705
cucuaccaugaguuuacua

SEQ ID NO: 363707 - RNA, 19 nt, Artificial Sequence
  Description of Artificial Sequence: Synthetic oligonucleotide
  Sense Strand Starting at position 573 of SEQ ID NO: 317699
ggaacauauuaagcacuua

SEQ ID NO: 363708 - RNA, 19 nt, Artificial Sequence
  Description of Artificial Sequence: Synthetic oligonucleotide
  Antisense Strand to SEQ ID NO: 363707
uaagugcuuaauauguucc

SEQ ID NO: 363709 - RNA, 19 nt, Artificial Sequence
  Description of Artificial Sequence: Synthetic oligonucleotide
  Sense Strand Starting at position 573 of SEQ ID NO: 317746
guugcuuaauuugccauua

SEQ ID NO: 363710 - RNA, 19 nt, Artificial Sequence
  Description of Artificial Sequence: Synthetic oligonucleotide
  Antisense Strand to SEQ ID NO: 363709
uaauggcaaauuaagcaac

SEQ ID NO: 363711 - RNA, 19 nt, Artificial Sequence
  Description of Artificial Sequence: Synthetic oligonucleotide
  Sense Strand Starting at position 573 of SEQ ID NO: 317911
uggauuuacuaucaaauag

SEQ ID NO: 363712 - RNA, 19 nt, Artificial Sequence
  Description of Artificial Sequence: Synthetic oligonucleotide
  Antisense Strand to SEQ ID NO: 363711
cuauuugauaguaaaucca

SEQ ID NO: 363713 - RNA, 19 nt, Artificial Sequence
  Description of Artificial Sequence: Synthetic oligonucleotide
  Sense Strand Starting at position 573 of SEQ ID NO: 318013
ucuugagaauccuugacua

SEQ ID NO: 363714 - RNA, 19 nt, Artificial Sequence
  Description of Artificial Sequence: Synthetic oligonucleotide
  Antisense Strand to SEQ ID NO: 363713
uagucaaggauucucaaga

SEQ ID NO: 363715 - RNA, 19 nt, Artificial Sequence
  Description of Artificial Sequence: Synthetic oligonucleotide
  Sense Strand Starting at position 573 of SEQ ID NO: 318260
uuuauuagcugagucaaag

SEQ ID NO: 363716 - RNA, 19 nt, Artificial Sequence
  Description of Artificial Sequence: Synthetic oligonucleotide
  Antisense Strand to SEQ ID NO: 363715
cuuugacucagcuaauaaa

SEQ ID NO: 363717 - RNA, 19 nt, Artificial Sequence
  Description of Artificial Sequence: Synthetic oligonucleotide
  Sense Strand Starting at position 573 of SEQ ID NO: 318269
ugagucaaaguuuaaucuu

SEQ ID NO: 363718 - RNA, 19 nt, Artificial Sequence
  Description of Artificial Sequence: Synthetic oligonucleotide
  Antisense Strand to SEQ ID NO: 363717
aagauuaaacuuugacuca

SEQ ID NO: 363719 - RNA, 19 nt, Artificial Sequence
  Description of Artificial Sequence: Synthetic oligonucleotide
  Sense Strand Starting at position 573 of SEQ ID NO: 318272
gucaaaguuuaaucuuaag

SEQ ID NO: 363720 - RNA, 19 nt, Artificial Sequence
  Description of Artificial Sequence: Synthetic oligonucleotide
  Antisense Strand to SEQ ID NO: 363719
cuuaagauuaaacuuugac

SEQ ID NO: 363721 - RNA, 19 nt, Artificial Sequence
  Description of Artificial Sequence: Synthetic oligonucleotide
  Sense Strand Starting at position 573 of SEQ ID NO: 318415
cuagaaagauuccuguauu

SEQ ID NO: 363722 - RNA, 19 nt, Artificial Sequence
  Description of Artificial Sequence: Synthetic oligonucleotide
  Antisense Strand to SEQ ID NO: 363721
aauacaggaaucuuucuag

SEQ ID NO: 363723 - RNA, 19 nt, Artificial Sequence
  Description of Artificial Sequence: Synthetic oligonucleotide
  Sense Strand Starting at position 573 of SEQ ID NO: 318513
ccgguuuacucaccaaaga

SEQ ID NO: 363724 - RNA, 19 nt, Artificial Sequence
  Description of Artificial Sequence: Synthetic oligonucleotide
  Antisense Strand to SEQ ID NO: 363723
ucuuuggugaguaaaccgg

SEQ ID NO: 363725 - RNA, 19 nt, Artificial Sequence
  Description of Artificial Sequence: Synthetic oligonucleotide
  Sense Strand Starting at position 573 of SEQ ID NO: 318514
cgguuuacucaccaaagaa

SEQ ID NO: 363726 - RNA, 19 nt, Artificial Sequence
  Description of Artificial Sequence: Synthetic oligonucleotide
  Antisense Strand to SEQ ID NO: 363725
uucuuuggugaguaaaccg

SEQ ID NO: 363727 - RNA, 19 nt, Artificial Sequence
  Description of Artificial Sequence: Synthetic oligonucleotide
  Sense Strand Starting at position 573 of SEQ ID NO: 318538
augugauaaucucuaccug

SEQ ID NO: 363728 - RNA, 19 nt, Artificial Sequence
  Description of Artificial Sequence: Synthetic oligonucleotide
  Antisense Strand to SEQ ID NO: 363727
cagguagagauuaucacau

SEQ ID NO: 363729 - RNA, 19 nt, Artificial Sequence
  Description of Artificial Sequence: Synthetic oligonucleotide
  Sense Strand Starting at position 573 of SEQ ID NO: 318539
ugugauaaucucuaccugu

SEQ ID NO: 363730 - RNA, 19 nt, Artificial Sequence
  Description of Artificial Sequence: Synthetic oligonucleotide
  Antisense Strand to SEQ ID NO: 363729
acagguagagauuaucaca

SEQ ID NO: 363731 - RNA, 19 nt, Artificial Sequence
  Description of Artificial Sequence: Synthetic oligonucleotide
  Sense Strand Starting at position 573 of SEQ ID NO: 318587
acaugaaaguucucuguaa

SEQ ID NO: 363732 - RNA, 19 nt, Artificial Sequence
  Description of Artificial Sequence: Synthetic oligonucleotide
  Antisense Strand to SEQ ID NO: 363731
uuacagagaacuuucaugu

SEQ ID NO: 363733 - RNA, 19 nt, Artificial Sequence
  Description of Artificial Sequence: Synthetic oligonucleotide
  Sense Strand Starting at position 573 of SEQ ID NO: 318616
uuguauuaccaguaaacuu

SEQ ID NO: 363734 - RNA, 19 nt, Artificial Sequence
  Description of Artificial Sequence: Synthetic oligonucleotide
  Antisense Strand to SEQ ID NO: 363733
aaguuuacugguaauacaa

SEQ ID NO: 363735 - RNA, 19 nt, Artificial Sequence
  Description of Artificial Sequence: Synthetic oligonucleotide
  Sense Strand Starting at position 573 of SEQ ID NO: 318623
accaguaaacuuuguaaau

SEQ ID NO: 363736 - RNA, 19 nt, Artificial Sequence
  Description of Artificial Sequence: Synthetic oligonucleotide
  Antisense Strand to SEQ ID NO: 363735
auuuacaaaguuuacuggu

SEQ ID NO: 363737 - RNA, 19 nt, Artificial Sequence
  Description of Artificial Sequence: Synthetic oligonucleotide
  Sense Strand Starting at position 573 of SEQ ID NO: 318624
ccaguaaacuuuguaaaua

SEQ ID NO: 363738 - RNA, 19 nt, Artificial Sequence
  Description of Artificial Sequence: Synthetic oligonucleotide
  Antisense Strand to SEQ ID NO: 363737
uauuuacaaaguuuacugg

SEQ ID NO: 363739 - RNA, 19 nt, Artificial Sequence
  Description of Artificial Sequence: Synthetic oligonucleotide
  Sense Strand Starting at position 573 of SEQ ID NO: 319115
ggcagaaguaaggauuguu

SEQ ID NO: 363740 - RNA, 19 nt, Artificial Sequence
  Description of Artificial Sequence: Synthetic oligonucleotide
  Antisense Strand to SEQ ID NO: 363739
aacaauccuuacuucugcc

SEQ ID NO: 363741 - RNA, 19 nt, Artificial Sequence
  Description of Artificial Sequence: Synthetic oligonucleotide
  Sense Strand Starting at position 573 of SEQ ID NO: 319118
agaaguaaggauuguuagu

SEQ ID NO: 363742 - RNA, 19 nt, Artificial Sequence
  Description of Artificial Sequence: Synthetic oligonucleotide
  Antisense Strand to SEQ ID NO: 363741
acuaacaauccuuacuucu

SEQ ID NO: 363743 - RNA, 19 nt, Artificial Sequence
  Description of Artificial Sequence: Synthetic oligonucleotide
  Sense Strand Starting at position 573 of SEQ ID NO: 319123
uaaggauuguuagugggaa

SEQ ID NO: 363744 - RNA, 19 nt, Artificial Sequence
  Description of Artificial Sequence: Synthetic oligonucleotide
  Antisense Strand to SEQ ID NO: 363743
uucccacuaacaauccuua

SEQ ID NO: 363745 - RNA, 19 nt, Artificial Sequence
  Description of Artificial Sequence: Synthetic oligonucleotide
  Sense Strand Starting at position 573 of SEQ ID NO: 319125
aggauuguuagugggaaga

SEQ ID NO: 363746 - RNA, 19 nt, Artificial Sequence
  Description of Artificial Sequence: Synthetic oligonucleotide
  Antisense Strand to SEQ ID NO: 363745
ucuucccacuaacaauccu

SEQ ID NO: 363747 - RNA, 19 nt, Artificial Sequence
  Description of Artificial Sequence: Synthetic oligonucleotide
  Sense Strand Starting at position 574 of SEQ ID NO: 315678
aaaguauugucgcuugacu

SEQ ID NO: 363748 - RNA, 19 nt, Artificial Sequence
  Description of Artificial Sequence: Synthetic oligonucleotide
  Antisense Strand to SEQ ID NO: 363747
agucaagcgacaauacuuu

SEQ ID NO: 363749 - RNA, 19 nt, Artificial Sequence
  Description of Artificial Sequence: Synthetic oligonucleotide
  Sense Strand Starting at position 574 of SEQ ID NO: 315680
aguauugucgcuugacuuc

SEQ ID NO: 363750 - RNA, 19 nt, Artificial Sequence
  Description of Artificial Sequence: Synthetic oligonucleotide
  Antisense Strand to SEQ ID NO: 363749
gaagucaagcgacaauacu

SEQ ID NO: 363751 - RNA, 19 nt, Artificial Sequence
  Description of Artificial Sequence: Synthetic oligonucleotide
  Sense Strand Starting at position 574 of SEQ ID NO: 315685
ugucgcuugacuucuuagu

SEQ ID NO: 363752 - RNA, 19 nt, Artificial Sequence
  Description of Artificial Sequence: Synthetic oligonucleotide
  Antisense Strand to SEQ ID NO: 363751
acuaagaagucaagcgaca

SEQ ID NO: 363753 - RNA, 19 nt, Artificial Sequence
  Description of Artificial Sequence: Synthetic oligonucleotide
  Sense Strand Starting at position 574 of SEQ ID NO: 315687
ucgcuugacuucuuaguca

SEQ ID NO: 363754 - RNA, 19 nt, Artificial Sequence
  Description of Artificial Sequence: Synthetic oligonucleotide
  Antisense Strand to SEQ ID NO: 363753
ugacuaagaagucaagcga

SEQ ID NO: 363755 - RNA, 19 nt, Artificial Sequence
  Description of Artificial Sequence: Synthetic oligonucleotide
  Sense Strand Starting at position 574 of SEQ ID NO: 315694
acuucuuagucaucucaug

SEQ ID NO: 363756 - RNA, 19 nt, Artificial Sequence
  Description of Artificial Sequence: Synthetic oligonucleotide
  Antisense Strand to SEQ ID NO: 363755
caugagaugacuaagaagu

SEQ ID NO: 363757 - RNA, 19 nt, Artificial Sequence
  Description of Artificial Sequence: Synthetic oligonucleotide
  Sense Strand Starting at position 574 of SEQ ID NO: 315714
aggcauauucuaugaccac

SEQ ID NO: 363758 - RNA, 19 nt, Artificial Sequence
  Description of Artificial Sequence: Synthetic oligonucleotide
  Antisense Strand to SEQ ID NO: 363757
guggucauagaauaugccu

SEQ ID NO: 363759 - RNA, 19 nt, Artificial Sequence
  Description of Artificial Sequence: Synthetic oligonucleotide
  Sense Strand Starting at position 574 of SEQ ID NO: 315715
ggcauauucuaugaccaca

SEQ ID NO: 363760 - RNA, 19 nt, Artificial Sequence
  Description of Artificial Sequence: Synthetic oligonucleotide
  Antisense Strand to SEQ ID NO: 363759
uguggucauagaauaugcc

SEQ ID NO: 363761 - RNA, 19 nt, Artificial Sequence
  Description of Artificial Sequence: Synthetic oligonucleotide
  Sense Strand Starting at position 574 of SEQ ID NO: 315770
ggucaagagaaauguguuu

SEQ ID NO: 363762 - RNA, 19 nt, Artificial Sequence
  Description of Artificial Sequence: Synthetic oligonucleotide
  Antisense Strand to SEQ ID NO: 363761
aaacacauuucucuugacc

SEQ ID NO: 363763 - RNA, 19 nt, Artificial Sequence
  Description of Artificial Sequence: Synthetic oligonucleotide
  Sense Strand Starting at position 574 of SEQ ID NO: 315913
uuaauuugcgccgggcaua

SEQ ID NO: 363764 - RNA, 19 nt, Artificial Sequence
  Description of Artificial Sequence: Synthetic oligonucleotide
  Antisense Strand to SEQ ID NO: 363763
uaugcccggcgcaaauuaa

SEQ ID NO: 363765 - RNA, 19 nt, Artificial Sequence
  Description of Artificial Sequence: Synthetic oligonucleotide
  Sense Strand Starting at position 574 of SEQ ID NO: 316233
uugccaguuccauaucauc

SEQ ID NO: 363766 - RNA, 19 nt, Artificial Sequence
  Description of Artificial Sequence: Synthetic oligonucleotide
  Antisense Strand to SEQ ID NO: 363765
gaugauauggaacuggcaa

SEQ ID NO: 363767 - RNA, 19 nt, Artificial Sequence
  Description of Artificial Sequence: Synthetic oligonucleotide
  Sense Strand Starting at position 574 of SEQ ID NO: 316317
cgagcaucccuuuaggaga

SEQ ID NO: 363768 - RNA, 19 nt, Artificial Sequence
  Description of Artificial Sequence: Synthetic oligonucleotide
  Antisense Strand to SEQ ID NO: 363767
ucuccuaaagggaugcucg

SEQ ID NO: 363769 - RNA, 19 nt, Artificial Sequence
  Description of Artificial Sequence: Synthetic oligonucleotide
  Sense Strand Starting at position 574 of SEQ ID NO: 316319
agcaucccuuuaggagaua

SEQ ID NO: 363770 - RNA, 19 nt, Artificial Sequence
  Description of Artificial Sequence: Synthetic oligonucleotide
  Antisense Strand to SEQ ID NO: 363769
uaucuccuaaagggaugcu

SEQ ID NO: 363771 - RNA, 19 nt, Artificial Sequence
  Description of Artificial Sequence: Synthetic oligonucleotide
  Sense Strand Starting at position 574 of SEQ ID NO: 316320
gcaucccuuuaggagauaa

SEQ ID NO: 363772 - RNA, 19 nt, Artificial Sequence
  Description of Artificial Sequence: Synthetic oligonucleotide
  Antisense Strand to SEQ ID NO: 363771
uuaucuccuaaagggaugc

SEQ ID NO: 363773 - RNA, 19 nt, Artificial Sequence
  Description of Artificial Sequence: Synthetic oligonucleotide
  Sense Strand Starting at position 574 of SEQ ID NO: 316492
aacggugagcuucgaggua

SEQ ID NO: 363774 - RNA, 19 nt, Artificial Sequence
  Description of Artificial Sequence: Synthetic oligonucleotide
  Antisense Strand to SEQ ID NO: 363773
uaccucgaagcucaccguu

SEQ ID NO: 363775 - RNA, 19 nt, Artificial Sequence
  Description of Artificial Sequence: Synthetic oligonucleotide
  Sense Strand Starting at position 574 of SEQ ID NO: 316494
cggugagcuucgagguaca

SEQ ID NO: 363776 - RNA, 19 nt, Artificial Sequence
  Description of Artificial Sequence: Synthetic oligonucleotide
  Antisense Strand to SEQ ID NO: 363775
uguaccucgaagcucaccg

SEQ ID NO: 363777 - RNA, 19 nt, Artificial Sequence
  Description of Artificial Sequence: Synthetic oligonucleotide
  Sense Strand Starting at position 574 of SEQ ID NO: 316571
uaaucauagggccgugaca

SEQ ID NO: 363778 - RNA, 19 nt, Artificial Sequence
  Description of Artificial Sequence: Synthetic oligonucleotide
  Antisense Strand to SEQ ID NO: 363777
ugucacggcccuaugauua

SEQ ID NO: 363779 - RNA, 19 nt, Artificial Sequence
  Description of Artificial Sequence: Synthetic oligonucleotide
  Sense Strand Starting at position 574 of SEQ ID NO: 316618
gcuugcuucgucuagucuu

SEQ ID NO: 363780 - RNA, 19 nt, Artificial Sequence
  Description of Artificial Sequence: Synthetic oligonucleotide
  Antisense Strand to SEQ ID NO: 363779
aagacuagacgaagcaagc

SEQ ID NO: 363781 - RNA, 19 nt, Artificial Sequence
  Description of Artificial Sequence: Synthetic oligonucleotide
  Sense Strand Starting at position 574 of SEQ ID NO: 316626
cgucuagucuuagcaucca

SEQ ID NO: 363782 - RNA, 19 nt, Artificial Sequence
  Description of Artificial Sequence: Synthetic oligonucleotide
  Antisense Strand to SEQ ID NO: 363781
uggaugcuaagacuagacg

SEQ ID NO: 363783 - RNA, 19 nt, Artificial Sequence
  Description of Artificial Sequence: Synthetic oligonucleotide
  Sense Strand Starting at position 574 of SEQ ID NO: 316664
caggaacgcuaucuaagaa

SEQ ID NO: 363784 - RNA, 19 nt, Artificial Sequence
  Description of Artificial Sequence: Synthetic oligonucleotide
  Antisense Strand to SEQ ID NO: 363783
uucuuagauagcguuccug

SEQ ID NO: 363785 - RNA, 19 nt, Artificial Sequence
  Description of Artificial Sequence: Synthetic oligonucleotide
  Sense Strand Starting at position 574 of SEQ ID NO: 316779
cagagcuucggucagagaa

SEQ ID NO: 363786 - RNA, 19 nt, Artificial Sequence
  Description of Artificial Sequence: Synthetic oligonucleotide
  Antisense Strand to SEQ ID NO: 363785
uucucugaccgaagcucug

SEQ ID NO: 363787 - RNA, 19 nt, Artificial Sequence
  Description of Artificial Sequence: Synthetic oligonucleotide
  Sense Strand Starting at position 574 of SEQ ID NO: 316919
gcucgagcgauguuccagu

SEQ ID NO: 363788 - RNA, 19 nt, Artificial Sequence
  Description of Artificial Sequence: Synthetic oligonucleotide
  Antisense Strand to SEQ ID NO: 363787
acuggaacaucgcucgagc

SEQ ID NO: 363789 - RNA, 19 nt, Artificial Sequence
  Description of Artificial Sequence: Synthetic oligonucleotide
  Sense Strand Starting at position 574 of SEQ ID NO: 317586
gaaucucagcggugugcua

SEQ ID NO: 363790 - RNA, 19 nt, Artificial Sequence
  Description of Artificial Sequence: Synthetic oligonucleotide
  Antisense Strand to SEQ ID NO: 363789
uagcacaccgcugagauuc

SEQ ID NO: 363791 - RNA, 19 nt, Artificial Sequence
  Description of Artificial Sequence: Synthetic oligonucleotide
  Sense Strand Starting at position 574 of SEQ ID NO: 317588
aucucagcggugugcuauu

SEQ ID NO: 363792 - RNA, 19 nt, Artificial Sequence
  Description of Artificial Sequence: Synthetic oligonucleotide
  Antisense Strand to SEQ ID NO: 363791
aauagcacaccgcugagau

SEQ ID NO: 363793 - RNA, 19 nt, Artificial Sequence
  Description of Artificial Sequence: Synthetic oligonucleotide
  Sense Strand Starting at position 574 of SEQ ID NO: 317593
agcggugugcuauucguuu

SEQ ID NO: 363794 - RNA, 19 nt, Artificial Sequence
  Description of Artificial Sequence: Synthetic oligonucleotide
  Antisense Strand to SEQ ID NO: 363793
aaacgaauagcacaccgcu

SEQ ID NO: 363795 - RNA, 19 nt, Artificial Sequence
  Description of Artificial Sequence: Synthetic oligonucleotide
  Sense Strand Starting at position 574 of SEQ ID NO: 317703
ucacgccaccucuagaaau

SEQ ID NO: 363796 - RNA, 19 nt, Artificial Sequence
  Description of Artificial Sequence: Synthetic oligonucleotide
  Antisense Strand to SEQ ID NO: 363795
auuucuagagguggcguga

SEQ ID NO: 363797 - RNA, 19 nt, Artificial Sequence
  Description of Artificial Sequence: Synthetic oligonucleotide
  Sense Strand Starting at position 574 of SEQ ID NO: 317800
ccuuacuagccucgaggua

SEQ ID NO: 363798 - RNA, 19 nt, Artificial Sequence
  Description of Artificial Sequence: Synthetic oligonucleotide
  Antisense Strand to SEQ ID NO: 363797
uaccucgaggcuaguaagg

SEQ ID NO: 363799 - RNA, 19 nt, Artificial Sequence
  Description of Artificial Sequence: Synthetic oligonucleotide
  Sense Strand Starting at position 574 of SEQ ID NO: 317861
ugcuuuccugccugagguu

SEQ ID NO: 363800 - RNA, 19 nt, Artificial Sequence
  Description of Artificial Sequence: Synthetic oligonucleotide
  Antisense Strand to SEQ ID NO: 363799
aaccucaggcaggaaagca

SEQ ID NO: 363801 - RNA, 19 nt, Artificial Sequence
  Description of Artificial Sequence: Synthetic oligonucleotide
  Sense Strand Starting at position 574 of SEQ ID NO: 317875
agguuuagagccuagcaca

SEQ ID NO: 363802 - RNA, 19 nt, Artificial Sequence
  Description of Artificial Sequence: Synthetic oligonucleotide
  Antisense Strand to SEQ ID NO: 363801
ugugcuaggcucuaaaccu

SEQ ID NO: 363803 - RNA, 19 nt, Artificial Sequence
  Description of Artificial Sequence: Synthetic oligonucleotide
  Sense Strand Starting at position 574 of SEQ ID NO: 317933
agagcaucuugucuugaga

SEQ ID NO: 363804 - RNA, 19 nt, Artificial Sequence
  Description of Artificial Sequence: Synthetic oligonucleotide
  Antisense Strand to SEQ ID NO: 363803
ucucaagacaagaugcucu

SEQ ID NO: 363805 - RNA, 19 nt, Artificial Sequence
  Description of Artificial Sequence: Synthetic oligonucleotide
  Sense Strand Starting at position 574 of SEQ ID NO: 317946
uugagauccugugacagca

SEQ ID NO: 363806 - RNA, 19 nt, Artificial Sequence
  Description of Artificial Sequence: Synthetic oligonucleotide
  Antisense Strand to SEQ ID NO: 363805
ugcugucacaggaucucaa

SEQ ID NO: 363807 - RNA, 19 nt, Artificial Sequence
  Description of Artificial Sequence: Synthetic oligonucleotide
  Sense Strand Starting at position 574 of SEQ ID NO: 318003
gacuaauggucccaggaag

SEQ ID NO: 363808 - RNA, 19 nt, Artificial Sequence
  Description of Artificial Sequence: Synthetic oligonucleotide
  Antisense Strand to SEQ ID NO: 363807
cuuccugggaccauuaguc

SEQ ID NO: 363809 - RNA, 19 nt, Artificial Sequence
  Description of Artificial Sequence: Synthetic oligonucleotide
  Sense Strand Starting at position 574 of SEQ ID NO: 318402
ucuuccuggcccugggaua

SEQ ID NO: 363810 - RNA, 19 nt, Artificial Sequence
  Description of Artificial Sequence: Synthetic oligonucleotide
  Antisense Strand to SEQ ID NO: 363809
uaucccagggccaggaaga

SEQ ID NO: 363811 - RNA, 19 nt, Artificial Sequence
  Description of Artificial Sequence: Synthetic oligonucleotide
  Sense Strand Starting at position 574 of SEQ ID NO: 318782
agacucaacagacgaguaa

SEQ ID NO: 363812 - RNA, 19 nt, Artificial Sequence
  Description of Artificial Sequence: Synthetic oligonucleotide
  Antisense Strand to SEQ ID NO: 363811
uuacucgucuguugagucu

SEQ ID NO: 363813 - RNA, 19 nt, Artificial Sequence
  Description of Artificial Sequence: Synthetic oligonucleotide
  Sense Strand Starting at position 574 of SEQ ID NO: 318793
acgaguaaagacugugaua

SEQ ID NO: 363814 - RNA, 19 nt, Artificial Sequence
  Description of Artificial Sequence: Synthetic oligonucleotide
  Antisense Strand to SEQ ID NO: 363813
uaucacagucuuuacucgu

SEQ ID NO: 363815 - RNA, 19 nt, Artificial Sequence
  Description of Artificial Sequence: Synthetic oligonucleotide
  Sense Strand Starting at position 574 of SEQ ID NO: 318805
ugugauaacuuggauuuac

SEQ ID NO: 363816 - RNA, 19 nt, Artificial Sequence
  Description of Artificial Sequence: Synthetic oligonucleotide
  Antisense Strand to SEQ ID NO: 363815
guaaauccaaguuaucaca

SEQ ID NO: 363817 - RNA, 19 nt, Artificial Sequence
  Description of Artificial Sequence: Synthetic oligonucleotide
  Sense Strand Starting at position 574 of SEQ ID NO: 318825
acaguaagguccucuugga

SEQ ID NO: 363818 - RNA, 19 nt, Artificial Sequence
  Description of Artificial Sequence: Synthetic oligonucleotide
  Antisense Strand to SEQ ID NO: 363817
uccaagaggaccuuacugu

SEQ ID NO: 363819 - RNA, 19 nt, Artificial Sequence
  Description of Artificial Sequence: Synthetic oligonucleotide
  Sense Strand Starting at position 574 of SEQ ID NO: 319003
agaaacagaucaggaagaa

SEQ ID NO: 363820 - RNA, 19 nt, Artificial Sequence
  Description of Artificial Sequence: Synthetic oligonucleotide
  Antisense Strand to SEQ ID NO: 363819
uucuuccugaucuguuucu

SEQ ID NO: 363821 - RNA, 19 nt, Artificial Sequence
  Description of Artificial Sequence: Synthetic oligonucleotide
  Sense Strand Starting at position 574 of SEQ ID NO: 319158
ggcaaauugcccugaaguu

SEQ ID NO: 363822 - RNA, 19 nt, Artificial Sequence
  Description of Artificial Sequence: Synthetic oligonucleotide
  Antisense Strand to SEQ ID NO: 363821
aacuucagggcaauuugcc

SEQ ID NO: 363823 - RNA, 19 nt, Artificial Sequence
  Description of Artificial Sequence: Synthetic oligonucleotide
  Sense Strand Starting at position 574 of SEQ ID NO: 319159
gcaaauugcccugaaguuu

SEQ ID NO: 363824 - RNA, 19 nt, Artificial Sequence
  Description of Artificial Sequence: Synthetic oligonucleotide
  Antisense Strand to SEQ ID NO: 363823
aaacuucagggcaauuugc

SEQ ID NO: 363825 - RNA, 19 nt, Artificial Sequence
  Description of Artificial Sequence: Synthetic oligonucleotide
  Sense Strand Starting at position 574 of SEQ ID NO: 319193
aagcaacagugguauaacu

SEQ ID NO: 363826 - RNA, 19 nt, Artificial Sequence
  Description of Artificial Sequence: Synthetic oligonucleotide
  Antisense Strand to SEQ ID NO: 363825
aguuauaccacuguugcuu

SEQ ID NO: 363827 - RNA, 19 nt, Artificial Sequence
  Description of Artificial Sequence: Synthetic oligonucleotide
  Sense Strand Starting at position 575 of SEQ ID NO: 315241
uggauaggcuaaucucuua

SEQ ID NO: 363828 - RNA, 19 nt, Artificial Sequence
  Description of Artificial Sequence: Synthetic oligonucleotide
  Antisense Strand to SEQ ID NO: 363827
uaagagauuagccuaucca

SEQ ID NO: 363829 - RNA, 19 nt, Artificial Sequence
  Description of Artificial Sequence: Synthetic oligonucleotide
  Sense Strand Starting at position 575 of SEQ ID NO: 315362
gugacaagauccugauaga

SEQ ID NO: 363830 - RNA, 19 nt, Artificial Sequence
  Description of Artificial Sequence: Synthetic oligonucleotide
  Antisense Strand to SEQ ID NO: 363829
ucuaucaggaucuugucac

SEQ ID NO: 363831 - RNA, 19 nt, Artificial Sequence
  Description of Artificial Sequence: Synthetic oligonucleotide
  Sense Strand Starting at position 575 of SEQ ID NO: 315365
acaagauccugauagaagu

SEQ ID NO: 363832 - RNA, 19 nt, Artificial Sequence
  Description of Artificial Sequence: Synthetic oligonucleotide
  Antisense Strand to SEQ ID NO: 363831
acuucuaucaggaucuugu

SEQ ID NO: 363833 - RNA, 19 nt, Artificial Sequence
  Description of Artificial Sequence: Synthetic oligonucleotide
  Sense Strand Starting at position 575 of SEQ ID NO: 316024
aaaguauugucgcuugacu

SEQ ID NO: 363834 - RNA, 19 nt, Artificial Sequence
  Description of Artificial Sequence: Synthetic oligonucleotide
  Antisense Strand to SEQ ID NO: 363833
agucaagcgacaauacuuu

SEQ ID NO: 363835 - RNA, 19 nt, Artificial Sequence
  Description of Artificial Sequence: Synthetic oligonucleotide
  Sense Strand Starting at position 575 of SEQ ID NO: 316026
aguauugucgcuugacuuc

SEQ ID NO: 363836 - RNA, 19 nt, Artificial Sequence
  Description of Artificial Sequence: Synthetic oligonucleotide
  Antisense Strand to SEQ ID NO: 363835
gaagucaagcgacaauacu

SEQ ID NO: 363837 - RNA, 19 nt, Artificial Sequence
  Description of Artificial Sequence: Synthetic oligonucleotide
  Sense Strand Starting at position 575 of SEQ ID NO: 316031
ugucgcuugacuucuuagu

SEQ ID NO: 363838 - RNA, 19 nt, Artificial Sequence
  Description of Artificial Sequence: Synthetic oligonucleotide
  Antisense Strand to SEQ ID NO: 363837
acuaagaagucaagcgaca

SEQ ID NO: 363839 - RNA, 19 nt, Artificial Sequence
  Description of Artificial Sequence: Synthetic oligonucleotide
  Sense Strand Starting at position 575 of SEQ ID NO: 316033
ucgcuugacuucuuaguca

SEQ ID NO: 363840 - RNA, 19 nt, Artificial Sequence
  Description of Artificial Sequence: Synthetic oligonucleotide
  Antisense Strand to SEQ ID NO: 363839
ugacuaagaagucaagcga

SEQ ID NO: 363841 - RNA, 19 nt, Artificial Sequence
  Description of Artificial Sequence: Synthetic oligonucleotide
  Sense Strand Starting at position 575 of SEQ ID NO: 316040
acuucuuagucaucucaug

SEQ ID NO: 363842 - RNA, 19 nt, Artificial Sequence
  Description of Artificial Sequence: Synthetic oligonucleotide
  Antisense Strand to SEQ ID NO: 363841
caugagaugacuaagaagu

SEQ ID NO: 363843 - RNA, 19 nt, Artificial Sequence
  Description of Artificial Sequence: Synthetic oligonucleotide
  Sense Strand Starting at position 575 of SEQ ID NO: 316060
aggcauauucuaugaccac

SEQ ID NO: 363844 - RNA, 19 nt, Artificial Sequence
  Description of Artificial Sequence: Synthetic oligonucleotide
  Antisense Strand to SEQ ID NO: 363843
guggucauagaauaugccu

SEQ ID NO: 363845 - RNA, 19 nt, Artificial Sequence
  Description of Artificial Sequence: Synthetic oligonucleotide
  Sense Strand Starting at position 575 of SEQ ID NO: 316061
ggcauauucuaugaccaca

SEQ ID NO: 363846 - RNA, 19 nt, Artificial Sequence
  Description of Artificial Sequence: Synthetic oligonucleotide
  Antisense Strand to SEQ ID NO: 363845
uguggucauagaauaugcc

SEQ ID NO: 363847 - RNA, 19 nt, Artificial Sequence
  Description of Artificial Sequence: Synthetic oligonucleotide
  Sense Strand Starting at position 575 of SEQ ID NO: 316116
ggucaagagaaauguguuu

SEQ ID NO: 363848 - RNA, 19 nt, Artificial Sequence
  Description of Artificial Sequence: Synthetic oligonucleotide
  Antisense Strand to SEQ ID NO: 363847
aaacacauuucucuugacc

SEQ ID NO: 363849 - RNA, 19 nt, Artificial Sequence
  Description of Artificial Sequence: Synthetic oligonucleotide
  Sense Strand Starting at position 575 of SEQ ID NO: 316259
uuaauuugcgccgggcaua

SEQ ID NO: 363850 - RNA, 19 nt, Artificial Sequence
  Description of Artificial Sequence: Synthetic oligonucleotide
  Antisense Strand to SEQ ID NO: 363849
uaugcccggcgcaaauuaa

SEQ ID NO: 363851 - RNA, 19 nt, Artificial Sequence
  Description of Artificial Sequence: Synthetic oligonucleotide
  Sense Strand Starting at position 575 of SEQ ID NO: 316579
uugccaguuccauaucauc

SEQ ID NO: 363852 - RNA, 19 nt, Artificial Sequence
  Description of Artificial Sequence: Synthetic oligonucleotide
  Antisense Strand to SEQ ID NO: 363851
gaugauauggaacuggcaa

SEQ ID NO: 363853 - RNA, 19 nt, Artificial Sequence
  Description of Artificial Sequence: Synthetic oligonucleotide
  Sense Strand Starting at position 575 of SEQ ID NO: 316663
cgagcaucccuuuaggaga

SEQ ID NO: 363854 - RNA, 19 nt, Artificial Sequence
  Description of Artificial Sequence: Synthetic oligonucleotide
  Antisense Strand to SEQ ID NO: 363853
ucuccuaaagggaugcucg

SEQ ID NO: 363855 - RNA, 19 nt, Artificial Sequence
  Description of Artificial Sequence: Synthetic oligonucleotide
  Sense Strand Starting at position 575 of SEQ ID NO: 316665
agcaucccuuuaggagaua

SEQ ID NO: 363856 - RNA, 19 nt, Artificial Sequence
  Description of Artificial Sequence: Synthetic oligonucleotide
  Antisense Strand to SEQ ID NO: 363855
uaucuccuaaagggaugcu

SEQ ID NO: 363857 - RNA, 19 nt, Artificial Sequence
  Description of Artificial Sequence: Synthetic oligonucleotide
  Sense Strand Starting at position 575 of SEQ ID NO: 316666
gcaucccuuuaggagauaa

SEQ ID NO: 363858 - RNA, 19 nt, Artificial Sequence
  Description of Artificial Sequence: Synthetic oligonucleotide
  Antisense Strand to SEQ ID NO: 363857
uuaucuccuaaagggaugc

SEQ ID NO: 363859 - RNA, 19 nt, Artificial Sequence
  Description of Artificial Sequence: Synthetic oligonucleotide
  Sense Strand Starting at position 575 of SEQ ID NO: 316838
aacggugagcuucgaggua

SEQ ID NO: 363860 - RNA, 19 nt, Artificial Sequence
  Description of Artificial Sequence: Synthetic oligonucleotide
  Antisense Strand to SEQ ID NO: 363859
uaccucgaagcucaccguu

SEQ ID NO: 363861 - RNA, 19 nt, Artificial Sequence
  Description of Artificial Sequence: Synthetic oligonucleotide
  Sense Strand Starting at position 575 of SEQ ID NO: 316840
cggugagcuucgagguaca

SEQ ID NO: 363862 - RNA, 19 nt, Artificial Sequence
  Description of Artificial Sequence: Synthetic oligonucleotide
  Antisense Strand to SEQ ID NO: 363861
uguaccucgaagcucaccg

SEQ ID NO: 363863 - RNA, 19 nt, Artificial Sequence
  Description of Artificial Sequence: Synthetic oligonucleotide
  Sense Strand Starting at position 575 of SEQ ID NO: 316917
uaaucauagggccgugaca

SEQ ID NO: 363864 - RNA, 19 nt, Artificial Sequence
  Description of Artificial Sequence: Synthetic oligonucleotide
  Antisense Strand to SEQ ID NO: 363863
ugucacggcccuaugauua

SEQ ID NO: 363865 - RNA, 19 nt, Artificial Sequence
  Description of Artificial Sequence: Synthetic oligonucleotide
  Sense Strand Starting at position 575 of SEQ ID NO: 316964
gcuugcuucgucuagucuu

SEQ ID NO: 363866 - RNA, 19 nt, Artificial Sequence
  Description of Artificial Sequence: Synthetic oligonucleotide
  Antisense Strand to SEQ ID NO: 363865
aagacuagacgaagcaagc

SEQ ID NO: 363867 - RNA, 19 nt, Artificial Sequence
  Description of Artificial Sequence: Synthetic oligonucleotide
  Sense Strand Starting at position 575 of SEQ ID NO: 316972
cgucuagucuuagcaucca

SEQ ID NO: 363868 - RNA, 19 nt, Artificial Sequence
  Description of Artificial Sequence: Synthetic oligonucleotide
  Antisense Strand to SEQ ID NO: 363867
uggaugcuaagacuagacg

SEQ ID NO: 363869 - RNA, 19 nt, Artificial Sequence
  Description of Artificial Sequence: Synthetic oligonucleotide
  Sense Strand Starting at position 575 of SEQ ID NO: 317010
caggaacgcuaucuaagaa

SEQ ID NO: 363870 - RNA, 19 nt, Artificial Sequence
  Description of Artificial Sequence: Synthetic oligonucleotide
  Antisense Strand to SEQ ID NO: 363869
uucuuagauagcguuccug

SEQ ID NO: 363871 - RNA, 19 nt, Artificial Sequence
  Description of Artificial Sequence: Synthetic oligonucleotide
  Sense Strand Starting at position 575 of SEQ ID NO: 317125
cagagcuucggucagagaa

SEQ ID NO: 363872 - RNA, 19 nt, Artificial Sequence
  Description of Artificial Sequence: Synthetic oligonucleotide
  Antisense Strand to SEQ ID NO: 363871
uucucugaccgaagcucug

SEQ ID NO: 363873 - RNA, 19 nt, Artificial Sequence
  Description of Artificial Sequence: Synthetic oligonucleotide
  Sense Strand Starting at position 575 of SEQ ID NO: 317265
gcucgagcgauguuccagu

SEQ ID NO: 363874 - RNA, 19 nt, Artificial Sequence
  Description of Artificial Sequence: Synthetic oligonucleotide
  Antisense Strand to SEQ ID NO: 363873
acuggaacaucgcucgagc

SEQ ID NO: 363875 - RNA, 19 nt, Artificial Sequence
  Description of Artificial Sequence: Synthetic oligonucleotide
  Sense Strand Starting at position 575 of SEQ ID NO: 317897
ggcggcgucuugucauaca

SEQ ID NO: 363876 - RNA, 19 nt, Artificial Sequence
  Description of Artificial Sequence: Synthetic oligonucleotide
  Antisense Strand to SEQ ID NO: 363875
uguaugacaagacgccgcc

SEQ ID NO: 363877 - RNA, 19 nt, Artificial Sequence
  Description of Artificial Sequence: Synthetic oligonucleotide
  Sense Strand Starting at position 575 of SEQ ID NO: 317932
gaaucucagcggugugcua

SEQ ID NO: 363878 - RNA, 19 nt, Artificial Sequence
  Description of Artificial Sequence: Synthetic oligonucleotide
  Antisense Strand to SEQ ID NO: 363877
uagcacaccgcugagauuc

SEQ ID NO: 363879 - RNA, 19 nt, Artificial Sequence
  Description of Artificial Sequence: Synthetic oligonucleotide
  Sense Strand Starting at position 575 of SEQ ID NO: 317934
aucucagcggugugcuauu

SEQ ID NO: 363880 - RNA, 19 nt, Artificial Sequence
  Description of Artificial Sequence: Synthetic oligonucleotide
  Antisense Strand to SEQ ID NO: 363879
aauagcacaccgcugagau

SEQ ID NO: 363881 - RNA, 19 nt, Artificial Sequence
  Description of Artificial Sequence: Synthetic oligonucleotide
  Sense Strand Starting at position 575 of SEQ ID NO: 317939
agcggugugcuauucguuu

SEQ ID NO: 363882 - RNA, 19 nt, Artificial Sequence
  Description of Artificial Sequence: Synthetic oligonucleotide
  Antisense Strand to SEQ ID NO: 363881
aaacgaauagcacaccgcu

SEQ ID NO: 363883 - RNA, 19 nt, Artificial Sequence
  Description of Artificial Sequence: Synthetic oligonucleotide
  Sense Strand Starting at position 575 of SEQ ID NO: 318049
ucacgccaccucuagaaau

SEQ ID NO: 363884 - RNA, 19 nt, Artificial Sequence
  Description of Artificial Sequence: Synthetic oligonucleotide
  Antisense Strand to SEQ ID NO: 363883
auuucuagagguggcguga

SEQ ID NO: 363885 - RNA, 19 nt, Artificial Sequence
  Description of Artificial Sequence: Synthetic oligonucleotide
  Sense Strand Starting at position 575 of SEQ ID NO: 318146
ccuuacuagccucgaggua

SEQ ID NO: 363886 - RNA, 19 nt, Artificial Sequence
  Description of Artificial Sequence: Synthetic oligonucleotide
  Antisense Strand to SEQ ID NO: 363885
uaccucgaggcuaguaagg

SEQ ID NO: 363887 - RNA, 19 nt, Artificial Sequence
  Description of Artificial Sequence: Synthetic oligonucleotide
  Sense Strand Starting at position 575 of SEQ ID NO: 318207
ugcuuuccugccugagguu

SEQ ID NO: 363888 - RNA, 19 nt, Artificial Sequence
  Description of Artificial Sequence: Synthetic oligonucleotide
  Antisense Strand to SEQ ID NO: 363887
aaccucaggcaggaaagca

SEQ ID NO: 363889 - RNA, 19 nt, Artificial Sequence
  Description of Artificial Sequence: Synthetic oligonucleotide
  Sense Strand Starting at position 575 of SEQ ID NO: 318221
agguuuagagccuagcaca

SEQ ID NO: 363890 - RNA, 19 nt, Artificial Sequence
  Description of Artificial Sequence: Synthetic oligonucleotide
  Antisense Strand to SEQ ID NO: 363889
ugugcuaggcucuaaaccu

SEQ ID NO: 363891 - RNA, 19 nt, Artificial Sequence
  Description of Artificial Sequence: Synthetic oligonucleotide
  Sense Strand Starting at position 575 of SEQ ID NO: 318279
agagcaucuugucuugaga

SEQ ID NO: 363892 - RNA, 19 nt, Artificial Sequence
  Description of Artificial Sequence: Synthetic oligonucleotide
  Antisense Strand to SEQ ID NO: 363891
ucucaagacaagaugcucu

SEQ ID NO: 363893 - RNA, 19 nt, Artificial Sequence
  Description of Artificial Sequence: Synthetic oligonucleotide
  Sense Strand Starting at position 575 of SEQ ID NO: 318292
uugagauccugugacagca

SEQ ID NO: 363894 - RNA, 19 nt, Artificial Sequence
  Description of Artificial Sequence: Synthetic oligonucleotide
  Antisense Strand to SEQ ID NO: 363893
ugcugucacaggaucucaa

SEQ ID NO: 363895 - RNA, 19 nt, Artificial Sequence
  Description of Artificial Sequence: Synthetic oligonucleotide
  Sense Strand Starting at position 575 of SEQ ID NO: 318349
gacuaauggucccaggaag

SEQ ID NO: 363896 - RNA, 19 nt, Artificial Sequence
  Description of Artificial Sequence: Synthetic oligonucleotide
  Antisense Strand to SEQ ID NO: 363895
cuuccugggaccauuaguc

SEQ ID NO: 363897 - RNA, 19 nt, Artificial Sequence
  Description of Artificial Sequence: Synthetic oligonucleotide
  Sense Strand Starting at position 575 of SEQ ID NO: 318748
ucuuccuggcccugggaua

SEQ ID NO: 363898 - RNA, 19 nt, Artificial Sequence
  Description of Artificial Sequence: Synthetic oligonucleotide
  Antisense Strand to SEQ ID NO: 363897
uaucccagggccaggaaga

SEQ ID NO: 363899 - RNA, 19 nt, Artificial Sequence
  Description of Artificial Sequence: Synthetic oligonucleotide
  Sense Strand Starting at position 575 of SEQ ID NO: 319128
agacucaacagacgaguaa

SEQ ID NO: 363900 - RNA, 19 nt, Artificial Sequence
  Description of Artificial Sequence: Synthetic oligonucleotide
  Antisense Strand to SEQ ID NO: 363899
uuacucgucuguugagucu

SEQ ID NO: 363901 - RNA, 19 nt, Artificial Sequence
  Description of Artificial Sequence: Synthetic oligonucleotide
  Sense Strand Starting at position 575 of SEQ ID NO: 319139
acgaguaaagacugugaua

SEQ ID NO: 363902 - RNA, 19 nt, Artificial Sequence
  Description of Artificial Sequence: Synthetic oligonucleotide
  Antisense Strand to SEQ ID NO: 363901
uaucacagucuuuacucgu

SEQ ID NO: 363903 - RNA, 19 nt, Artificial Sequence
  Description of Artificial Sequence: Synthetic oligonucleotide
  Sense Strand Starting at position 575 of SEQ ID NO: 319151
ugugauaacuuggauuuac

SEQ ID NO: 363904 - RNA, 19 nt, Artificial Sequence
  Description of Artificial Sequence: Synthetic oligonucleotide
  Antisense Strand to SEQ ID NO: 363903
guaaauccaaguuaucaca

SEQ ID NO: 363905 - RNA, 19 nt, Artificial Sequence
  Description of Artificial Sequence: Synthetic oligonucleotide
  Sense Strand Starting at position 575 of SEQ ID NO: 319171
acaguaagguccucuugga

SEQ ID NO: 363906 - RNA, 19 nt, Artificial Sequence
  Description of Artificial Sequence: Synthetic oligonucleotide
  Antisense Strand to SEQ ID NO: 363905
uccaagaggaccuuacugu

SEQ ID NO: 363907 - RNA, 19 nt, Artificial Sequence
  Description of Artificial Sequence: Synthetic oligonucleotide
  Sense Strand Starting at position 576 of SEQ ID NO: 315307
cccuguugccuagauacca

SEQ ID NO: 363908 - RNA, 19 nt, Artificial Sequence
  Description of Artificial Sequence: Synthetic oligonucleotide
  Antisense Strand to SEQ ID NO: 363907
ugguaucuaggcaacaggg

SEQ ID NO: 363909 - RNA, 19 nt, Artificial Sequence
  Description of Artificial Sequence: Synthetic oligonucleotide
  Sense Strand Starting at position 576 of SEQ ID NO: 315315
ccuagauaccagugacauc

SEQ ID NO: 363910 - RNA, 19 nt, Artificial Sequence
  Description of Artificial Sequence: Synthetic oligonucleotide
  Antisense Strand to SEQ ID NO: 363909
gaugucacugguaucuagg

SEQ ID NO: 363911 - RNA, 19 nt, Artificial Sequence
  Description of Artificial Sequence: Synthetic oligonucleotide
  Sense Strand Starting at position 576 of SEQ ID NO: 315326
gugacaucucaggagcuua

SEQ ID NO: 363912 - RNA, 19 nt, Artificial Sequence
  Description of Artificial Sequence: Synthetic oligonucleotide
  Antisense Strand to SEQ ID NO: 363911
uaagcuccugagaugucac

SEQ ID NO: 363913 - RNA, 19 nt, Artificial Sequence
  Description of Artificial Sequence: Synthetic oligonucleotide
  Sense Strand Starting at position 576 of SEQ ID NO: 315762
ucuaacaaugccugugaau

SEQ ID NO: 363914 - RNA, 19 nt, Artificial Sequence
  Description of Artificial Sequence: Synthetic oligonucleotide
  Antisense Strand to SEQ ID NO: 363913
auucacaggcauuguuaga

SEQ ID NO: 363915 - RNA, 19 nt, Artificial Sequence
  Description of Artificial Sequence: Synthetic oligonucleotide
  Sense Strand Starting at position 576 of SEQ ID NO: 315808
ucgaaaugacaaugucaga

SEQ ID NO: 363916 - RNA, 19 nt, Artificial Sequence
  Description of Artificial Sequence: Synthetic oligonucleotide
  Antisense Strand to SEQ ID NO: 363915
ucugacauugucauuucga

SEQ ID NO: 363917 - RNA, 19 nt, Artificial Sequence
  Description of Artificial Sequence: Synthetic oligonucleotide
  Sense Strand Starting at position 576 of SEQ ID NO: 315953
ggcccuuucuaacucugau

SEQ ID NO: 363918 - RNA, 19 nt, Artificial Sequence
  Description of Artificial Sequence: Synthetic oligonucleotide
  Antisense Strand to SEQ ID NO: 363917
aucagaguuagaaagggcc

SEQ ID NO: 363919 - RNA, 19 nt, Artificial Sequence
  Description of Artificial Sequence: Synthetic oligonucleotide
  Sense Strand Starting at position 576 of SEQ ID NO: 315966
ucugauaguggcuaaaguu

SEQ ID NO: 363920 - RNA, 19 nt, Artificial Sequence
  Description of Artificial Sequence: Synthetic oligonucleotide
  Antisense Strand to SEQ ID NO: 363919
aacuuuagccacuaucaga

SEQ ID NO: 363921 - RNA, 19 nt, Artificial Sequence
  Description of Artificial Sequence: Synthetic oligonucleotide
  Sense Strand Starting at position 576 of SEQ ID NO: 316025
caaguuacacgaugcaauu

SEQ ID NO: 363922 - RNA, 19 nt, Artificial Sequence
  Description of Artificial Sequence: Synthetic oligonucleotide
  Antisense Strand to SEQ ID NO: 363921
aauugcaucguguaacuug

SEQ ID NO: 363923 - RNA, 19 nt, Artificial Sequence
  Description of Artificial Sequence: Synthetic oligonucleotide
  Sense Strand Starting at position 576 of SEQ ID NO: 316160
cuguaaucaugguccucua

SEQ ID NO: 363924 - RNA, 19 nt, Artificial Sequence
  Description of Artificial Sequence: Synthetic oligonucleotide
  Antisense Strand to SEQ ID NO: 363923
uagaggaccaugauuacag

SEQ ID NO: 363925 - RNA, 19 nt, Artificial Sequence
  Description of Artificial Sequence: Synthetic oligonucleotide
  Sense Strand Starting at position 576 of SEQ ID NO: 316295
ggaaauguuuaauuccaag

SEQ ID NO: 363926 - RNA, 19 nt, Artificial Sequence
  Description of Artificial Sequence: Synthetic oligonucleotide
  Antisense Strand to SEQ ID NO: 363925
cuuggaauuaaacauuucc

SEQ ID NO: 363927 - RNA, 19 nt, Artificial Sequence
  Description of Artificial Sequence: Synthetic oligonucleotide
  Sense Strand Starting at position 576 of SEQ ID NO: 316400
uguagcuuaguugauauau

SEQ ID NO: 363928 - RNA, 19 nt, Artificial Sequence
  Description of Artificial Sequence: Synthetic oligonucleotide
  Antisense Strand to SEQ ID NO: 363927
auauaucaacuaagcuaca

SEQ ID NO: 363929 - RNA, 19 nt, Artificial Sequence
  Description of Artificial Sequence: Synthetic oligonucleotide
  Sense Strand Starting at position 576 of SEQ ID NO: 316486
aaacguaaagaguggaaau

SEQ ID NO: 363930 - RNA, 19 nt, Artificial Sequence
  Description of Artificial Sequence: Synthetic oligonucleotide
  Antisense Strand to SEQ ID NO: 363929
auuuccacucuuuacguuu

SEQ ID NO: 363931 - RNA, 19 nt, Artificial Sequence
  Description of Artificial Sequence: Synthetic oligonucleotide
  Sense Strand Starting at position 576 of SEQ ID NO: 316509
cuauaaagguguccucuua

SEQ ID NO: 363932 - RNA, 19 nt, Artificial Sequence
  Description of Artificial Sequence: Synthetic oligonucleotide
  Antisense Strand to SEQ ID NO: 363931
uaagaggacaccuuuauag

SEQ ID NO: 363933 - RNA, 19 nt, Artificial Sequence
  Description of Artificial Sequence: Synthetic oligonucleotide
  Sense Strand Starting at position 576 of SEQ ID NO: 316516
gguguccucuuauccauuu

SEQ ID NO: 363934 - RNA, 19 nt, Artificial Sequence
  Description of Artificial Sequence: Synthetic oligonucleotide
  Antisense Strand to SEQ ID NO: 363933
aaauggauaagaggacacc

SEQ ID NO: 363935 - RNA, 19 nt, Artificial Sequence
  Description of Artificial Sequence: Synthetic oligonucleotide
  Sense Strand Starting at position 576 of SEQ ID NO: 316517
guguccucuuauccauuua

SEQ ID NO: 363936 - RNA, 19 nt, Artificial Sequence
  Description of Artificial Sequence: Synthetic oligonucleotide
  Antisense Strand to SEQ ID NO: 363935
uaaauggauaagaggacac

SEQ ID NO: 363937 - RNA, 19 nt, Artificial Sequence
  Description of Artificial Sequence: Synthetic oligonucleotide
  Sense Strand Starting at position 576 of SEQ ID NO: 316548
cuauaauaagguuaagugu

SEQ ID NO: 363938 - RNA, 19 nt, Artificial Sequence
  Description of Artificial Sequence: Synthetic oligonucleotide
  Antisense Strand to SEQ ID NO: 363937
acacuuaaccuuauuauag

SEQ ID NO: 363939 - RNA, 19 nt, Artificial Sequence
  Description of Artificial Sequence: Synthetic oligonucleotide
  Sense Strand Starting at position 576 of SEQ ID NO: 316555
aagguuaaguguguagauu

SEQ ID NO: 363940 - RNA, 19 nt, Artificial Sequence
  Description of Artificial Sequence: Synthetic oligonucleotide
  Antisense Strand to SEQ ID NO: 363939
aaucuacacacuuaaccuu

SEQ ID NO: 363941 - RNA, 19 nt, Artificial Sequence
  Description of Artificial Sequence: Synthetic oligonucleotide
  Sense Strand Starting at position 576 of SEQ ID NO: 316556
agguuaaguguguagauuc

SEQ ID NO: 363942 - RNA, 19 nt, Artificial Sequence
  Description of Artificial Sequence: Synthetic oligonucleotide
  Antisense Strand to SEQ ID NO: 363941
gaaucuacacacuuaaccu

SEQ ID NO: 363943 - RNA, 19 nt, Artificial Sequence
  Description of Artificial Sequence: Synthetic oligonucleotide
  Sense Strand Starting at position 576 of SEQ ID NO: 316566
uguagauucccucaucgaa

SEQ ID NO: 363944 - RNA, 19 nt, Artificial Sequence
  Description of Artificial Sequence: Synthetic oligonucleotide
  Antisense Strand to SEQ ID NO: 363943
uucgaugagggaaucuaca

SEQ ID NO: 363945 - RNA, 19 nt, Artificial Sequence
  Description of Artificial Sequence: Synthetic oligonucleotide
  Sense Strand Starting at position 576 of SEQ ID NO: 316757
ccucaaugacaccguagau

SEQ ID NO: 363946 - RNA, 19 nt, Artificial Sequence
  Description of Artificial Sequence: Synthetic oligonucleotide
  Antisense Strand to SEQ ID NO: 363945
aucuacggugucauugagg

SEQ ID NO: 363947 - RNA, 19 nt, Artificial Sequence
  Description of Artificial Sequence: Synthetic oligonucleotide
  Sense Strand Starting at position 576 of SEQ ID NO: 317137
ggcguuuccguccuauugu

SEQ ID NO: 363948 - RNA, 19 nt, Artificial Sequence
  Description of Artificial Sequence: Synthetic oligonucleotide
  Antisense Strand to SEQ ID NO: 363947
acaauaggacggaaacgcc

SEQ ID NO: 363949 - RNA, 19 nt, Artificial Sequence
  Description of Artificial Sequence: Synthetic oligonucleotide
  Sense Strand Starting at position 576 of SEQ ID NO: 317475
ugguuuguucaguagugag

SEQ ID NO: 363950 - RNA, 19 nt, Artificial Sequence
  Description of Artificial Sequence: Synthetic oligonucleotide
  Antisense Strand to SEQ ID NO: 363949
cucacuacugaacaaacca

SEQ ID NO: 363951 - RNA, 19 nt, Artificial Sequence
  Description of Artificial Sequence: Synthetic oligonucleotide
  Sense Strand Starting at position 576 of SEQ ID NO: 317489
gugagcgauuucgcaggau

SEQ ID NO: 363952 - RNA, 19 nt, Artificial Sequence
  Description of Artificial Sequence: Synthetic oligonucleotide
  Antisense Strand to SEQ ID NO: 363951
auccugcgaaaucgcucac

SEQ ID NO: 363953 - RNA, 19 nt, Artificial Sequence
  Description of Artificial Sequence: Synthetic oligonucleotide
  Sense Strand Starting at position 576 of SEQ ID NO: 317492
agcgauuucgcaggaugca

SEQ ID NO: 363954 - RNA, 19 nt, Artificial Sequence
  Description of Artificial Sequence: Synthetic oligonucleotide
  Antisense Strand to SEQ ID NO: 363953
ugcauccugcgaaaucgcu

SEQ ID NO: 363955 - RNA, 19 nt, Artificial Sequence
  Description of Artificial Sequence: Synthetic oligonucleotide
  Sense Strand Starting at position 576 of SEQ ID NO: 317550
ugggaaguuggucacucua

SEQ ID NO: 363956 - RNA, 19 nt, Artificial Sequence
  Description of Artificial Sequence: Synthetic oligonucleotide
  Antisense Strand to SEQ ID NO: 363955
uagagugaccaacuuccca

SEQ ID NO: 363957 - RNA, 19 nt, Artificial Sequence
  Description of Artificial Sequence: Synthetic oligonucleotide
  Sense Strand Starting at position 576 of SEQ ID NO: 317816
agggcucucaccugaguga

SEQ ID NO: 363958 - RNA, 19 nt, Artificial Sequence
  Description of Artificial Sequence: Synthetic oligonucleotide
  Antisense Strand to SEQ ID NO: 363957
ucacucaggugagagcccu

SEQ ID NO: 363959 - RNA, 19 nt, Artificial Sequence
  Description of Artificial Sequence: Synthetic oligonucleotide
  Sense Strand Starting at position 576 of SEQ ID NO: 317817
gggcucucaccugagugaa

SEQ ID NO: 363960 - RNA, 19 nt, Artificial Sequence
  Description of Artificial Sequence: Synthetic oligonucleotide
  Antisense Strand to SEQ ID NO: 363959
uucacucaggugagagccc

SEQ ID NO: 363961 - RNA, 19 nt, Artificial Sequence
  Description of Artificial Sequence: Synthetic oligonucleotide
  Sense Strand Starting at position 576 of SEQ ID NO: 317819
gcucucaccugagugaaug

SEQ ID NO: 363962 - RNA, 19 nt, Artificial Sequence
  Description of Artificial Sequence: Synthetic oligonucleotide
  Antisense Strand to SEQ ID NO: 363961
cauucacucaggugagagc

SEQ ID NO: 363963 - RNA, 19 nt, Artificial Sequence
  Description of Artificial Sequence: Synthetic oligonucleotide
  Sense Strand Starting at position 576 of SEQ ID NO: 317830
agugaaugucagcauagcu

SEQ ID NO: 363964 - RNA, 19 nt, Artificial Sequence
  Description of Artificial Sequence: Synthetic oligonucleotide
  Antisense Strand to SEQ ID NO: 363963
agcuaugcugacauucacu

SEQ ID NO: 363965 - RNA, 19 nt, Artificial Sequence
  Description of Artificial Sequence: Synthetic oligonucleotide
  Sense Strand Starting at position 576 of SEQ ID NO: 317868
guuagugccacugagaaug

SEQ ID NO: 363966 - RNA, 19 nt, Artificial Sequence
  Description of Artificial Sequence: Synthetic oligonucleotide
  Antisense Strand to SEQ ID NO: 363965
cauucucaguggcacuaac

SEQ ID NO: 363967 - RNA, 19 nt, Artificial Sequence
  Description of Artificial Sequence: Synthetic oligonucleotide
  Sense Strand Starting at position 576 of SEQ ID NO: 317909
cugcucuuucuguaaagga

SEQ ID NO: 363968 - RNA, 19 nt, Artificial Sequence
  Description of Artificial Sequence: Synthetic oligonucleotide
  Antisense Strand to SEQ ID NO: 363967
uccuuuacagaaagagcag

SEQ ID NO: 363969 - RNA, 19 nt, Artificial Sequence
  Description of Artificial Sequence: Synthetic oligonucleotide
  Sense Strand Starting at position 576 of SEQ ID NO: 317954
ggcauuugcaaagguguaa

SEQ ID NO: 363970 - RNA, 19 nt, Artificial Sequence
  Description of Artificial Sequence: Synthetic oligonucleotide
  Antisense Strand to SEQ ID NO: 363969
uuacaccuuugcaaaugcc

SEQ ID NO: 363971 - RNA, 19 nt, Artificial Sequence
  Description of Artificial Sequence: Synthetic oligonucleotide
  Sense Strand Starting at position 576 of SEQ ID NO: 318019
acacucgguauuggaaaua

SEQ ID NO: 363972 - RNA, 19 nt, Artificial Sequence
  Description of Artificial Sequence: Synthetic oligonucleotide
  Antisense Strand to SEQ ID NO: 363971
uauuuccaauaccgagugu

SEQ ID NO: 363973 - RNA, 19 nt, Artificial Sequence
  Description of Artificial Sequence: Synthetic oligonucleotide
  Sense Strand Starting at position 576 of SEQ ID NO: 318096
gagagacuucugugagcag

SEQ ID NO: 363974 - RNA, 19 nt, Artificial Sequence
  Description of Artificial Sequence: Synthetic oligonucleotide
  Antisense Strand to SEQ ID NO: 363973
cugcucacagaagucucuc

SEQ ID NO: 363975 - RNA, 19 nt, Artificial Sequence
  Description of Artificial Sequence: Synthetic oligonucleotide
  Sense Strand Starting at position 576 of SEQ ID NO: 318624
gccaccauuucucuugagu

SEQ ID NO: 363976 - RNA, 19 nt, Artificial Sequence
  Description of Artificial Sequence: Synthetic oligonucleotide
  Antisense Strand to SEQ ID NO: 363975
acucaagagaaaugguggc

SEQ ID NO: 363977 - RNA, 19 nt, Artificial Sequence
  Description of Artificial Sequence: Synthetic oligonucleotide
  Sense Strand Starting at position 576 of SEQ ID NO: 318717
gugaauacaugagucagau

SEQ ID NO: 363978 - RNA, 19 nt, Artificial Sequence
  Description of Artificial Sequence: Synthetic oligonucleotide
  Antisense Strand to SEQ ID NO: 363977
aucugacucauguauucac

SEQ ID NO: 363979 - RNA, 19 nt, Artificial Sequence
  Description of Artificial Sequence: Synthetic oligonucleotide
  Sense Strand Starting at position 576 of SEQ ID NO: 318726
ugagucagauccucccauu

SEQ ID NO: 363980 - RNA, 19 nt, Artificial Sequence
  Description of Artificial Sequence: Synthetic oligonucleotide
  Antisense Strand to SEQ ID NO: 363979
aaugggaggaucugacuca

SEQ ID NO: 363981 - RNA, 19 nt, Artificial Sequence
  Description of Artificial Sequence: Synthetic oligonucleotide
  Sense Strand Starting at position 576 of SEQ ID NO: 318748
ugcucagaacccuggagua

SEQ ID NO: 363982 - RNA, 19 nt, Artificial Sequence
  Description of Artificial Sequence: Synthetic oligonucleotide
  Antisense Strand to SEQ ID NO: 363981
uacuccaggguucugagca

SEQ ID NO: 363983 - RNA, 19 nt, Artificial Sequence
  Description of Artificial Sequence: Synthetic oligonucleotide
  Sense Strand Starting at position 576 of SEQ ID NO: 318870
cccaguguuccucacacau

SEQ ID NO: 363984 - RNA, 19 nt, Artificial Sequence
  Description of Artificial Sequence: Synthetic oligonucleotide
  Antisense Strand to SEQ ID NO: 363983
augugugaggaacacuggg

SEQ ID NO: 363985 - RNA, 19 nt, Artificial Sequence
  Description of Artificial Sequence: Synthetic oligonucleotide
  Sense Strand Starting at position 576 of SEQ ID NO: 318912
caguguaugaguuaugguu

SEQ ID NO: 363986 - RNA, 19 nt, Artificial Sequence
  Description of Artificial Sequence: Synthetic oligonucleotide
  Antisense Strand to SEQ ID NO: 363985
aaccauaacucauacacug

SEQ ID NO: 363987 - RNA, 19 nt, Artificial Sequence
  Description of Artificial Sequence: Synthetic oligonucleotide
  Sense Strand Starting at position 577 of SEQ ID NO: 315474
cuaaauacagguugaaagu

SEQ ID NO: 363988 - RNA, 19 nt, Artificial Sequence
  Description of Artificial Sequence: Synthetic oligonucleotide
  Antisense Strand to SEQ ID NO: 363987
acuuucaaccuguauuuag

SEQ ID NO: 363989 - RNA, 19 nt, Artificial Sequence
  Description of Artificial Sequence: Synthetic oligonucleotide
  Sense Strand Starting at position 577 of SEQ ID NO: 315480
acagguugaaaguaugagu

SEQ ID NO: 363990 - RNA, 19 nt, Artificial Sequence
  Description of Artificial Sequence: Synthetic oligonucleotide
  Antisense Strand to SEQ ID NO: 363989
acucauacuuucaaccugu

SEQ ID NO: 363991 - RNA, 19 nt, Artificial Sequence
  Description of Artificial Sequence: Synthetic oligonucleotide
  Sense Strand Starting at position 577 of SEQ ID NO: 315485
uugaaaguaugaguaaaug

SEQ ID NO: 363992 - RNA, 19 nt, Artificial Sequence
  Description of Artificial Sequence: Synthetic oligonucleotide
  Antisense Strand to SEQ ID NO: 363991
cauuuacucauacuuucaa

SEQ ID NO: 363993 - RNA, 19 nt, Artificial Sequence
  Description of Artificial Sequence: Synthetic oligonucleotide
  Sense Strand Starting at position 577 of SEQ ID NO: 315678
caaauaugugcagagcagu

SEQ ID NO: 363994 - RNA, 19 nt, Artificial Sequence
  Description of Artificial Sequence: Synthetic oligonucleotide
  Antisense Strand to SEQ ID NO: 363993
acugcucugcacauauuug

SEQ ID NO: 363995 - RNA, 19 nt, Artificial Sequence
  Description of Artificial Sequence: Synthetic oligonucleotide
  Sense Strand Starting at position 577 of SEQ ID NO: 315746
uauuguucugguugggaaa

SEQ ID NO: 363996 - RNA, 19 nt, Artificial Sequence
  Description of Artificial Sequence: Synthetic oligonucleotide
  Antisense Strand to SEQ ID NO: 363995
uuucccaaccagaacaaua

SEQ ID NO: 363997 - RNA, 19 nt, Artificial Sequence
  Description of Artificial Sequence: Synthetic oligonucleotide
  Sense Strand Starting at position 577 of SEQ ID NO: 315946
cuagaaugauucuauuuag

SEQ ID NO: 363998 - RNA, 19 nt, Artificial Sequence
  Description of Artificial Sequence: Synthetic oligonucleotide
  Antisense Strand to SEQ ID NO: 363997
cuaaauagaaucauucuag

SEQ ID NO: 363999 - RNA, 19 nt, Artificial Sequence
  Description of Artificial Sequence: Synthetic oligonucleotide
  Sense Strand Starting at position 577 of SEQ ID NO: 315952
ugauucuauuuagaagaga

SEQ ID NO: 364000 - RNA, 19 nt, Artificial Sequence
  Description of Artificial Sequence: Synthetic oligonucleotide
  Antisense Strand to SEQ ID NO: 363999
ucucuucuaaauagaauca

SEQ ID NO: 364001 - RNA, 19 nt, Artificial Sequence
  Description of Artificial Sequence: Synthetic oligonucleotide
  Sense Strand Starting at position 577 of SEQ ID NO: 315977
ccaccaagauggucuuaaa

SEQ ID NO: 364002 - RNA, 19 nt, Artificial Sequence
  Description of Artificial Sequence: Synthetic oligonucleotide
  Antisense Strand to SEQ ID NO: 364001
uuuaagaccaucuuggugg

SEQ ID NO: 364003 - RNA, 19 nt, Artificial Sequence
  Description of Artificial Sequence: Synthetic oligonucleotide
  Sense Strand Starting at position 577 of SEQ ID NO: 316011
agagcugggccuuaaauaa

SEQ ID NO: 364004 - RNA, 19 nt, Artificial Sequence
  Description of Artificial Sequence: Synthetic oligonucleotide
  Antisense Strand to SEQ ID NO: 364003
uuauuuaaggcccagcucu

SEQ ID NO: 364005 - RNA, 19 nt, Artificial Sequence
  Description of Artificial Sequence: Synthetic oligonucleotide
  Sense Strand Starting at position 577 of SEQ ID NO: 316044
cuuaucaugcuccaggaau

SEQ ID NO: 364006 - RNA, 19 nt, Artificial Sequence
  Description of Artificial Sequence: Synthetic oligonucleotide
  Antisense Strand to SEQ ID NO: 364005
auuccuggagcaugauaag

SEQ ID NO: 364007 - RNA, 19 nt, Artificial Sequence
  Description of Artificial Sequence: Synthetic oligonucleotide
  Sense Strand Starting at position 577 of SEQ ID NO: 316196
ucacacuguuaaguauaaa

SEQ ID NO: 364008 - RNA, 19 nt, Artificial Sequence
  Description of Artificial Sequence: Synthetic oligonucleotide
  Antisense Strand to SEQ ID NO: 364007
uuuauacuuaacaguguga

SEQ ID NO: 364009 - RNA, 19 nt, Artificial Sequence
  Description of Artificial Sequence: Synthetic oligonucleotide
  Sense Strand Starting at position 577 of SEQ ID NO: 316351
gacaaaugugccuaaggca

SEQ ID NO: 364010 - RNA, 19 nt, Artificial Sequence
  Description of Artificial Sequence: Synthetic oligonucleotide
  Antisense Strand to SEQ ID NO: 364009
ugccuuaggcacauuuguc

SEQ ID NO: 364011 - RNA, 19 nt, Artificial Sequence
  Description of Artificial Sequence: Synthetic oligonucleotide
  Sense Strand Starting at position 577 of SEQ ID NO: 316424
uggaaaccaucuguaaacu

SEQ ID NO: 364012 - RNA, 19 nt, Artificial Sequence
  Description of Artificial Sequence: Synthetic oligonucleotide
  Antisense Strand to SEQ ID NO: 364011
aguuuacagaugguuucca

SEQ ID NO: 364013 - RNA, 19 nt, Artificial Sequence
  Description of Artificial Sequence: Synthetic oligonucleotide
  Sense Strand Starting at position 577 of SEQ ID NO: 316579
uugauucuucgggaaucac

SEQ ID NO: 364014 - RNA, 19 nt, Artificial Sequence
  Description of Artificial Sequence: Synthetic oligonucleotide
  Antisense Strand to SEQ ID NO: 364013
gugauucccgaagaaucaa

SEQ ID NO: 364015 - RNA, 19 nt, Artificial Sequence
  Description of Artificial Sequence: Synthetic oligonucleotide
  Sense Strand Starting at position 577 of SEQ ID NO: 316627
cacggaucacugugaggaa

SEQ ID NO: 364016 - RNA, 19 nt, Artificial Sequence
  Description of Artificial Sequence: Synthetic oligonucleotide
  Antisense Strand to SEQ ID NO: 364015
uuccucacagugauccgug

SEQ ID NO: 364017 - RNA, 19 nt, Artificial Sequence
  Description of Artificial Sequence: Synthetic oligonucleotide
  Sense Strand Starting at position 577 of SEQ ID NO: 316766
acaagaaacuuccucuggu

SEQ ID NO: 364018 - RNA, 19 nt, Artificial Sequence
  Description of Artificial Sequence: Synthetic oligonucleotide
  Antisense Strand to SEQ ID NO: 364017
accagaggaaguuucuugu

SEQ ID NO: 364019 - RNA, 19 nt, Artificial Sequence
  Description of Artificial Sequence: Synthetic oligonucleotide
  Sense Strand Starting at position 577 of SEQ ID NO: 316769
agaaacuuccucugguaca

SEQ ID NO: 364020 - RNA, 19 nt, Artificial Sequence
  Description of Artificial Sequence: Synthetic oligonucleotide
  Antisense Strand to SEQ ID NO: 364019
uguaccagaggaaguuucu

SEQ ID NO: 364021 - RNA, 19 nt, Artificial Sequence
  Description of Artificial Sequence: Synthetic oligonucleotide
  Sense Strand Starting at position 577 of SEQ ID NO: 316829
aagucuaaggaccgagauu

SEQ ID NO: 364022 - RNA, 19 nt, Artificial Sequence
  Description of Artificial Sequence: Synthetic oligonucleotide
  Antisense Strand to SEQ ID NO: 364021
aaucucgguccuuagacuu

SEQ ID NO: 364023 - RNA, 19 nt, Artificial Sequence
  Description of Artificial Sequence: Synthetic oligonucleotide
  Sense Strand Starting at position 577 of SEQ ID NO: 317132
cuucgcguucuuccacuaa

SEQ ID NO: 364024 - RNA, 19 nt, Artificial Sequence
  Description of Artificial Sequence: Synthetic oligonucleotide
  Antisense Strand to SEQ ID NO: 364023
uuaguggaagaacgcgaag

SEQ ID NO: 364025 - RNA, 19 nt, Artificial Sequence
  Description of Artificial Sequence: Synthetic oligonucleotide
  Sense Strand Starting at position 577 of SEQ ID NO: 317136
gcguucuuccacuaaagaa

SEQ ID NO: 364026 - RNA, 19 nt, Artificial Sequence
  Description of Artificial Sequence: Synthetic oligonucleotide
  Antisense Strand to SEQ ID NO: 364025
uucuuuaguggaagaacgc

SEQ ID NO: 364027 - RNA, 19 nt, Artificial Sequence
  Description of Artificial Sequence: Synthetic oligonucleotide
  Sense Strand Starting at position 577 of SEQ ID NO: 317718
gguggaaggaaucggagua

SEQ ID NO: 364028 - RNA, 19 nt, Artificial Sequence
  Description of Artificial Sequence: Synthetic oligonucleotide
  Antisense Strand to SEQ ID NO: 364027
uacuccgauuccuuccacc

SEQ ID NO: 364029 - RNA, 19 nt, Artificial Sequence
  Description of Artificial Sequence: Synthetic oligonucleotide
  Sense Strand Starting at position 577 of SEQ ID NO: 317985
gaggguucuuauuuggugu

SEQ ID NO: 364030 - RNA, 19 nt, Artificial Sequence
  Description of Artificial Sequence: Synthetic oligonucleotide
  Antisense Strand to SEQ ID NO: 364029
acaccaaauaagaacccuc

SEQ ID NO: 364031 - RNA, 19 nt, Artificial Sequence
  Description of Artificial Sequence: Synthetic oligonucleotide
  Sense Strand Starting at position 577 of SEQ ID NO: 317988
gguucuuauuugguguguu

SEQ ID NO: 364032 - RNA, 19 nt, Artificial Sequence
  Description of Artificial Sequence: Synthetic oligonucleotide
  Antisense Strand to SEQ ID NO: 364031
aacacaccaaauaagaacc

SEQ ID NO: 364033 - RNA, 19 nt, Artificial Sequence
  Description of Artificial Sequence: Synthetic oligonucleotide
  Sense Strand Starting at position 577 of SEQ ID NO: 317991
ucuuauuugguguguucuu

SEQ ID NO: 364034 - RNA, 19 nt, Artificial Sequence
  Description of Artificial Sequence: Synthetic oligonucleotide
  Antisense Strand to SEQ ID NO: 364033
aagaacacaccaaauaaga

SEQ ID NO: 364035 - RNA, 19 nt, Artificial Sequence
  Description of Artificial Sequence: Synthetic oligonucleotide
  Sense Strand Starting at position 577 of SEQ ID NO: 318004
guucuuugcaaagggagaa

SEQ ID NO: 364036 - RNA, 19 nt, Artificial Sequence
  Description of Artificial Sequence: Synthetic oligonucleotide
  Antisense Strand to SEQ ID NO: 364035
uucucccuuugcaaagaac

SEQ ID NO: 364037 - RNA, 19 nt, Artificial Sequence
  Description of Artificial Sequence: Synthetic oligonucleotide
  Sense Strand Starting at position 577 of SEQ ID NO: 318042
aucuguauaucucuuugga

SEQ ID NO: 364038 - RNA, 19 nt, Artificial Sequence
  Description of Artificial Sequence: Synthetic oligonucleotide
  Antisense Strand to SEQ ID NO: 364037
uccaaagagauauacagau

SEQ ID NO: 364039 - RNA, 19 nt, Artificial Sequence
  Description of Artificial Sequence: Synthetic oligonucleotide
  Sense Strand Starting at position 577 of SEQ ID NO: 318122
uuucuuuauuuggaagaug

SEQ ID NO: 364040 - RNA, 19 nt, Artificial Sequence
  Description of Artificial Sequence: Synthetic oligonucleotide
  Antisense Strand to SEQ ID NO: 364039
caucuuccaaauaaagaaa

SEQ ID NO: 364041 - RNA, 19 nt, Artificial Sequence
  Description of Artificial Sequence: Synthetic oligonucleotide
  Sense Strand Starting at position 577 of SEQ ID NO: 318251
uuagcaguuggaugauaua

SEQ ID NO: 364042 - RNA, 19 nt, Artificial Sequence
  Description of Artificial Sequence: Synthetic oligonucleotide
  Antisense Strand to SEQ ID NO: 364041
uauaucauccaacugcuaa

SEQ ID NO: 364043 - RNA, 19 nt, Artificial Sequence
  Description of Artificial Sequence: Synthetic oligonucleotide
  Sense Strand Starting at position 577 of SEQ ID NO: 318336
cugucauagaauuguagag

SEQ ID NO: 364044 - RNA, 19 nt, Artificial Sequence
  Description of Artificial Sequence: Synthetic oligonucleotide
  Antisense Strand to SEQ ID NO: 364043
cucuacaauucuaugacag

SEQ ID NO: 364045 - RNA, 19 nt, Artificial Sequence
  Description of Artificial Sequence: Synthetic oligonucleotide
  Sense Strand Starting at position 577 of SEQ ID NO: 318502
uuuagagaccuuuaugguu

SEQ ID NO: 364046 - RNA, 19 nt, Artificial Sequence
  Description of Artificial Sequence: Synthetic oligonucleotide
  Antisense Strand to SEQ ID NO: 364045
aaccauaaaggucucuaaa

SEQ ID NO: 364047 - RNA, 19 nt, Artificial Sequence
  Description of Artificial Sequence: Synthetic oligonucleotide
  Sense Strand Starting at position 577 of SEQ ID NO: 318608
aguuauaguuacucaaagu

SEQ ID NO: 364048 - RNA, 19 nt, Artificial Sequence
  Description of Artificial Sequence: Synthetic oligonucleotide
  Antisense Strand to SEQ ID NO: 364047
acuuugaguaacuauaacu

SEQ ID NO: 364049 - RNA, 19 nt, Artificial Sequence
  Description of Artificial Sequence: Synthetic oligonucleotide
  Sense Strand Starting at position 577 of SEQ ID NO: 318717
auaaaugggugagauauuu

SEQ ID NO: 364050 - RNA, 19 nt, Artificial Sequence
  Description of Artificial Sequence: Synthetic oligonucleotide
  Antisense Strand to SEQ ID NO: 364049
aaauaucucacccauuuau

SEQ ID NO: 364051 - RNA, 19 nt, Artificial Sequence
  Description of Artificial Sequence: Synthetic oligonucleotide
  Sense Strand Starting at position 577 of SEQ ID NO: 318726
ugagauauuugugaacaga

SEQ ID NO: 364052 - RNA, 19 nt, Artificial Sequence
  Description of Artificial Sequence: Synthetic oligonucleotide
  Antisense Strand to SEQ ID NO: 364051
ucuguucacaaauaucuca

SEQ ID NO: 364053 - RNA, 19 nt, Artificial Sequence
  Description of Artificial Sequence: Synthetic oligonucleotide
  Sense Strand Starting at position 577 of SEQ ID NO: 318870
gugugauaugcgucuuuau

SEQ ID NO: 364054 - RNA, 19 nt, Artificial Sequence
  Description of Artificial Sequence: Synthetic oligonucleotide
  Antisense Strand to SEQ ID NO: 364053
auaaagacgcauaucacac

SEQ ID NO: 364055 - RNA, 19 nt, Artificial Sequence
  Description of Artificial Sequence: Synthetic oligonucleotide
  Sense Strand Starting at position 577 of SEQ ID NO: 318947
ucagguaugcaauagucuu

SEQ ID NO: 364056 - RNA, 19 nt, Artificial Sequence
  Description of Artificial Sequence: Synthetic oligonucleotide
  Antisense Strand to SEQ ID NO: 364055
aagacuauugcauaccuga

SEQ ID NO: 364057 - RNA, 19 nt, Artificial Sequence
  Description of Artificial Sequence: Synthetic oligonucleotide
  Sense Strand Starting at position 577 of SEQ ID NO: 318982
guuacaagggcuuaagauu

SEQ ID NO: 364058 - RNA, 19 nt, Artificial Sequence
  Description of Artificial Sequence: Synthetic oligonucleotide
  Antisense Strand to SEQ ID NO: 364057
aaucuuaagcccuuguaac

SEQ ID NO: 364059 - RNA, 19 nt, Artificial Sequence
  Description of Artificial Sequence: Synthetic oligonucleotide
  Sense Strand Starting at position 577 of SEQ ID NO: 319036
uuggguauauauucucuua

SEQ ID NO: 364060 - RNA, 19 nt, Artificial Sequence
  Description of Artificial Sequence: Synthetic oligonucleotide
  Antisense Strand to SEQ ID NO: 364059
uaagagaauauauacccaa

SEQ ID NO: 364061 - RNA, 19 nt, Artificial Sequence
  Description of Artificial Sequence: Synthetic oligonucleotide
  Sense Strand Starting at position 577 of SEQ ID NO: 319038
ggguauauauucucuuaug

SEQ ID NO: 364062 - RNA, 19 nt, Artificial Sequence
  Description of Artificial Sequence: Synthetic oligonucleotide
  Antisense Strand to SEQ ID NO: 364061
cauaagagaauauauaccc

SEQ ID NO: 364063 - RNA, 19 nt, Artificial Sequence
  Description of Artificial Sequence: Synthetic oligonucleotide
  Sense Strand Starting at position 577 of SEQ ID NO: 319050
ucuuauguagggcacaaau

SEQ ID NO: 364064 - RNA, 19 nt, Artificial Sequence
  Description of Artificial Sequence: Synthetic oligonucleotide
  Antisense Strand to SEQ ID NO: 364063
auuugugcccuacauaaga

SEQ ID NO: 364065 - RNA, 19 nt, Artificial Sequence
  Description of Artificial Sequence: Synthetic oligonucleotide
  Sense Strand Starting at position 577 of SEQ ID NO: 319059
gggcacaaaucccaauuua

SEQ ID NO: 364066 - RNA, 19 nt, Artificial Sequence
  Description of Artificial Sequence: Synthetic oligonucleotide
  Antisense Strand to SEQ ID NO: 364065
uaaauugggauuugugccc

SEQ ID NO: 364067 - RNA, 19 nt, Artificial Sequence
  Description of Artificial Sequence: Synthetic oligonucleotide
  Sense Strand Starting at position 578 of SEQ ID NO: 315391
cgcucugaugaauaucuga

SEQ ID NO: 364068 - RNA, 19 nt, Artificial Sequence
  Description of Artificial Sequence: Synthetic oligonucleotide
  Antisense Strand to SEQ ID NO: 364067
ucagauauucaucagagcg

SEQ ID NO: 364069 - RNA, 19 nt, Artificial Sequence
  Description of Artificial Sequence: Synthetic oligonucleotide
  Sense Strand Starting at position 578 of SEQ ID NO: 315394
ucugaugaauaucugaagu

SEQ ID NO: 364070 - RNA, 19 nt, Artificial Sequence
  Description of Artificial Sequence: Synthetic oligonucleotide
  Antisense Strand to SEQ ID NO: 364069
acuucagauauucaucaga

SEQ ID NO: 364071 - RNA, 19 nt, Artificial Sequence
  Description of Artificial Sequence: Synthetic oligonucleotide
  Sense Strand Starting at position 578 of SEQ ID NO: 315407
ugaaguggcacuuguguuu

SEQ ID NO: 364072 - RNA, 19 nt, Artificial Sequence
  Description of Artificial Sequence: Synthetic oligonucleotide
  Antisense Strand to SEQ ID NO: 364071
aaacacaagugccacuuca

SEQ ID NO: 364073 - RNA, 19 nt, Artificial Sequence
  Description of Artificial Sequence: Synthetic oligonucleotide
  Sense Strand Starting at position 578 of SEQ ID NO: 315550
uggagucuagcagggaaua

SEQ ID NO: 364074 - RNA, 19 nt, Artificial Sequence
  Description of Artificial Sequence: Synthetic oligonucleotide
  Antisense Strand to SEQ ID NO: 364073
uauucccugcuagacucca

SEQ ID NO: 364075 - RNA, 19 nt, Artificial Sequence
  Description of Artificial Sequence: Synthetic oligonucleotide
  Sense Strand Starting at position 578 of SEQ ID NO: 315695
uacacuagagaugguguua

SEQ ID NO: 364076 - RNA, 19 nt, Artificial Sequence
  Description of Artificial Sequence: Synthetic oligonucleotide
  Antisense Strand to SEQ ID NO: 364075
uaacaccaucucuagugua

SEQ ID NO: 364077 - RNA, 19 nt, Artificial Sequence
  Description of Artificial Sequence: Synthetic oligonucleotide
  Sense Strand Starting at position 578 of SEQ ID NO: 315700
uagagaugguguuaaagga

SEQ ID NO: 364078 - RNA, 19 nt, Artificial Sequence
  Description of Artificial Sequence: Synthetic oligonucleotide
  Antisense Strand to SEQ ID NO: 364077
uccuuuaacaccaucucua

SEQ ID NO: 364079 - RNA, 19 nt, Artificial Sequence
  Description of Artificial Sequence: Synthetic oligonucleotide
  Sense Strand Starting at position 578 of SEQ ID NO: 315704
gaugguguuaaaggaauag

SEQ ID NO: 364080 - RNA, 19 nt, Artificial Sequence
  Description of Artificial Sequence: Synthetic oligonucleotide
  Antisense Strand to SEQ ID NO: 364079
cuauuccuuuaacaccauc

SEQ ID NO: 364081 - RNA, 19 nt, Artificial Sequence
  Description of Artificial Sequence: Synthetic oligonucleotide
  Sense Strand Starting at position 578 of SEQ ID NO: 315708
guguuaaaggaauagcuga

SEQ ID NO: 364082 - RNA, 19 nt, Artificial Sequence
  Description of Artificial Sequence: Synthetic oligonucleotide
  Antisense Strand to SEQ ID NO: 364081
ucagcuauuccuuuaacac

SEQ ID NO: 364083 - RNA, 19 nt, Artificial Sequence
  Description of Artificial Sequence: Synthetic oligonucleotide
  Sense Strand Starting at position 578 of SEQ ID NO: 315764
aggauaggcuuagacauga

SEQ ID NO: 364084 - RNA, 19 nt, Artificial Sequence
  Description of Artificial Sequence: Synthetic oligonucleotide
  Antisense Strand to SEQ ID NO: 364083
ucaugucuaagccuauccu

SEQ ID NO: 364085 - RNA, 19 nt, Artificial Sequence
  Description of Artificial Sequence: Synthetic oligonucleotide
  Sense Strand Starting at position 578 of SEQ ID NO: 315797
ggaggaguuugccucauga

SEQ ID NO: 364086 - RNA, 19 nt, Artificial Sequence
  Description of Artificial Sequence: Synthetic oligonucleotide
  Antisense Strand to SEQ ID NO: 364085
ucaugaggcaaacuccucc

SEQ ID NO: 364087 - RNA, 19 nt, Artificial Sequence
  Description of Artificial Sequence: Synthetic oligonucleotide
  Sense Strand Starting at position 578 of SEQ ID NO: 315799
aggaguuugccucaugauu

SEQ ID NO: 364088 - RNA, 19 nt, Artificial Sequence
  Description of Artificial Sequence: Synthetic oligonucleotide
  Antisense Strand to SEQ ID NO: 364087
aaucaugaggcaaacuccu

SEQ ID NO: 364089 - RNA, 19 nt, Artificial Sequence
  Description of Artificial Sequence: Synthetic oligonucleotide
  Sense Strand Starting at position 578 of SEQ ID NO: 316014
ccgcaauggguguauuuau

SEQ ID NO: 364090 - RNA, 19 nt, Artificial Sequence
  Description of Artificial Sequence: Synthetic oligonucleotide
  Antisense Strand to SEQ ID NO: 364089
auaaauacacccauugcgg

SEQ ID NO: 364091 - RNA, 19 nt, Artificial Sequence
  Description of Artificial Sequence: Synthetic oligonucleotide
  Sense Strand Starting at position 578 of SEQ ID NO: 316021
ggguguauuuauucuuguu

SEQ ID NO: 364092 - RNA, 19 nt, Artificial Sequence
  Description of Artificial Sequence: Synthetic oligonucleotide
  Antisense Strand to SEQ ID NO: 364091
aacaagaauaaauacaccc

SEQ ID NO: 364093 - RNA, 19 nt, Artificial Sequence
  Description of Artificial Sequence: Synthetic oligonucleotide
  Sense Strand Starting at position 578 of SEQ ID NO: 316234
gaaguuguuagguaugagu

SEQ ID NO: 364094 - RNA, 19 nt, Artificial Sequence
  Description of Artificial Sequence: Synthetic oligonucleotide
  Antisense Strand to SEQ ID NO: 364093
acucauaccuaacaacuuc

SEQ ID NO: 364095 - RNA, 19 nt, Artificial Sequence
  Description of Artificial Sequence: Synthetic oligonucleotide
  Sense Strand Starting at position 578 of SEQ ID NO: 316814
ugggaucaaugacauccaa

SEQ ID NO: 364096 - RNA, 19 nt, Artificial Sequence
  Description of Artificial Sequence: Synthetic oligonucleotide
  Antisense Strand to SEQ ID NO: 364095
uuggaugucauugauccca

SEQ ID NO: 364097 - RNA, 19 nt, Artificial Sequence
  Description of Artificial Sequence: Synthetic oligonucleotide
  Sense Strand Starting at position 578 of SEQ ID NO: 316854
gccuuugacucugcuccua

SEQ ID NO: 364098 - RNA, 19 nt, Artificial Sequence
  Description of Artificial Sequence: Synthetic oligonucleotide
  Antisense Strand to SEQ ID NO: 364097
uaggagcagagucaaaggc

SEQ ID NO: 364099 - RNA, 19 nt, Artificial Sequence
  Description of Artificial Sequence: Synthetic oligonucleotide
  Sense Strand Starting at position 578 of SEQ ID NO: 316874
ggacaaauggguuggcauc

SEQ ID NO: 364100 - RNA, 19 nt, Artificial Sequence
  Description of Artificial Sequence: Synthetic oligonucleotide
  Antisense Strand to SEQ ID NO: 364099
gaugccaacccauuugucc

SEQ ID NO: 364101 - RNA, 19 nt, Artificial Sequence
  Description of Artificial Sequence: Synthetic oligonucleotide
  Sense Strand Starting at position 578 of SEQ ID NO: 317129
ucuuaccauuggucacaua

SEQ ID NO: 364102 - RNA, 19 nt, Artificial Sequence
  Description of Artificial Sequence: Synthetic oligonucleotide
  Antisense Strand to SEQ ID NO: 364101
uaugugaccaaugguaaga

SEQ ID NO: 364103 - RNA, 19 nt, Artificial Sequence
  Description of Artificial Sequence: Synthetic oligonucleotide
  Sense Strand Starting at position 578 of SEQ ID NO: 317130
cuuaccauuggucacauau

SEQ ID NO: 364104 - RNA, 19 nt, Artificial Sequence
  Description of Artificial Sequence: Synthetic oligonucleotide
  Antisense Strand to SEQ ID NO: 364103
auaugugaccaaugguaag

SEQ ID NO: 364105 - RNA, 19 nt, Artificial Sequence
  Description of Artificial Sequence: Synthetic oligonucleotide
  Sense Strand Starting at position 578 of SEQ ID NO: 317141
ucacauauggauugauugu

SEQ ID NO: 364106 - RNA, 19 nt, Artificial Sequence
  Description of Artificial Sequence: Synthetic oligonucleotide
  Antisense Strand to SEQ ID NO: 364105
acaaucaauccauauguga

SEQ ID NO: 364107 - RNA, 19 nt, Artificial Sequence
  Description of Artificial Sequence: Synthetic oligonucleotide
  Sense Strand Starting at position 578 of SEQ ID NO: 317222
ggaagaaaggccugugaug

SEQ ID NO: 364108 - RNA, 19 nt, Artificial Sequence
  Description of Artificial Sequence: Synthetic oligonucleotide
  Antisense Strand to SEQ ID NO: 364107
caucacaggccuuucuucc

SEQ ID NO: 364109 - RNA, 19 nt, Artificial Sequence
  Description of Artificial Sequence: Synthetic oligonucleotide
  Sense Strand Starting at position 578 of SEQ ID NO: 317267
ccagauggcuccuaacaag

SEQ ID NO: 364110 - RNA, 19 nt, Artificial Sequence
  Description of Artificial Sequence: Synthetic oligonucleotide
  Antisense Strand to SEQ ID NO: 364109
cuuguuaggagccaucugg

SEQ ID NO: 364111 - RNA, 19 nt, Artificial Sequence
  Description of Artificial Sequence: Synthetic oligonucleotide
  Sense Strand Starting at position 578 of SEQ ID NO: 317360
aaggcaagaugccagaaau

SEQ ID NO: 364112 - RNA, 19 nt, Artificial Sequence
  Description of Artificial Sequence: Synthetic oligonucleotide
  Antisense Strand to SEQ ID NO: 364111
auuucuggcaucuugccuu

SEQ ID NO: 364113 - RNA, 19 nt, Artificial Sequence
  Description of Artificial Sequence: Synthetic oligonucleotide
  Sense Strand Starting at position 578 of SEQ ID NO: 317382
ggcccauugcuguaagguu

SEQ ID NO: 364114 - RNA, 19 nt, Artificial Sequence
  Description of Artificial Sequence: Synthetic oligonucleotide
  Antisense Strand to SEQ ID NO: 364113
aaccuuacagcaaugggcc

SEQ ID NO: 364115 - RNA, 19 nt, Artificial Sequence
  Description of Artificial Sequence: Synthetic oligonucleotide
  Sense Strand Starting at position 578 of SEQ ID NO: 317786
ggauuaauuuaaugaugca

SEQ ID NO: 364116 - RNA, 19 nt, Artificial Sequence
  Description of Artificial Sequence: Synthetic oligonucleotide
  Antisense Strand to SEQ ID NO: 364115
ugcaucauuaaauuaaucc

SEQ ID NO: 364117 - RNA, 19 nt, Artificial Sequence
  Description of Artificial Sequence: Synthetic oligonucleotide
  Sense Strand Starting at position 578 of SEQ ID NO: 317858
cuauauuacuaaugaggaa

SEQ ID NO: 364118 - RNA, 19 nt, Artificial Sequence
  Description of Artificial Sequence: Synthetic oligonucleotide
  Antisense Strand to SEQ ID NO: 364117
uuccucauuaguaauauag

SEQ ID NO: 364119 - RNA, 19 nt, Artificial Sequence
  Description of Artificial Sequence: Synthetic oligonucleotide
  Sense Strand Starting at position 578 of SEQ ID NO: 317968
uugaauaauuuaugccaga

SEQ ID NO: 364120 - RNA, 19 nt, Artificial Sequence
  Description of Artificial Sequence: Synthetic oligonucleotide
  Antisense Strand to SEQ ID NO: 364119
ucuggcauaaauuauucaa

SEQ ID NO: 364121 - RNA, 19 nt, Artificial Sequence
  Description of Artificial Sequence: Synthetic oligonucleotide
  Sense Strand Starting at position 578 of SEQ ID NO: 317988
guuauuacaugauacacau

SEQ ID NO: 364122 - RNA, 19 nt, Artificial Sequence
  Description of Artificial Sequence: Synthetic oligonucleotide
  Antisense Strand to SEQ ID NO: 364121
auguguaucauguaauaac

SEQ ID NO: 364123 - RNA, 19 nt, Artificial Sequence
  Description of Artificial Sequence: Synthetic oligonucleotide
  Sense Strand Starting at position 578 of SEQ ID NO: 318065
ugauuaccuuuggagagga

SEQ ID NO: 364124 - RNA, 19 nt, Artificial Sequence
  Description of Artificial Sequence: Synthetic oligonucleotide
  Antisense Strand to SEQ ID NO: 364123
uccucuccaaagguaauca

SEQ ID NO: 364125 - RNA, 19 nt, Artificial Sequence
  Description of Artificial Sequence: Synthetic oligonucleotide
  Sense Strand Starting at position 578 of SEQ ID NO: 318085
aguuaaauugcugacucau

SEQ ID NO: 364126 - RNA, 19 nt, Artificial Sequence
  Description of Artificial Sequence: Synthetic oligonucleotide
  Antisense Strand to SEQ ID NO: 364125
augagucagcaauuuaacu

SEQ ID NO: 364127 - RNA, 19 nt, Artificial Sequence
  Description of Artificial Sequence: Synthetic oligonucleotide
  Sense Strand Starting at position 578 of SEQ ID NO: 318219
gccacaaucagauggauga

SEQ ID NO: 364128 - RNA, 19 nt, Artificial Sequence
  Description of Artificial Sequence: Synthetic oligonucleotide
  Antisense Strand to SEQ ID NO: 364127
ucauccaucugauuguggc

SEQ ID NO: 364129 - RNA, 19 nt, Artificial Sequence
  Description of Artificial Sequence: Synthetic oligonucleotide
  Sense Strand Starting at position 578 of SEQ ID NO: 318342
agaagugcacuugaaaugu

SEQ ID NO: 364130 - RNA, 19 nt, Artificial Sequence
  Description of Artificial Sequence: Synthetic oligonucleotide
  Antisense Strand to SEQ ID NO: 364129
acauuucaagugcacuucu

SEQ ID NO: 364131 - RNA, 19 nt, Artificial Sequence
  Description of Artificial Sequence: Synthetic oligonucleotide
  Sense Strand Starting at position 578 of SEQ ID NO: 318346
gugcacuugaaauguauag

SEQ ID NO: 364132 - RNA, 19 nt, Artificial Sequence
  Description of Artificial Sequence: Synthetic oligonucleotide
  Antisense Strand to SEQ ID NO: 364131
cuauacauuucaagugcac

SEQ ID NO: 364133 - RNA, 19 nt, Artificial Sequence
  Description of Artificial Sequence: Synthetic oligonucleotide
  Sense Strand Starting at position 578 of SEQ ID NO: 318355
aaauguauagggugaguau

SEQ ID NO: 364134 - RNA, 19 nt, Artificial Sequence
  Description of Artificial Sequence: Synthetic oligonucleotide
  Antisense Strand to SEQ ID NO: 364133
auacucacccuauacauuu

SEQ ID NO: 364135 - RNA, 19 nt, Artificial Sequence
  Description of Artificial Sequence: Synthetic oligonucleotide
  Sense Strand Starting at position 578 of SEQ ID NO: 318462
gguggagaauaugggaaua

SEQ ID NO: 364136 - RNA, 19 nt, Artificial Sequence
  Description of Artificial Sequence: Synthetic oligonucleotide
  Antisense Strand to SEQ ID NO: 364135
uauucccauauucuccacc

SEQ ID NO: 364137 - RNA, 19 nt, Artificial Sequence
  Description of Artificial Sequence: Synthetic oligonucleotide
  Sense Strand Starting at position 578 of SEQ ID NO: 318464
uggagaauaugggaauaca

SEQ ID NO: 364138 - RNA, 19 nt, Artificial Sequence
  Description of Artificial Sequence: Synthetic oligonucleotide
  Antisense Strand to SEQ ID NO: 364137
uguauucccauauucucca

SEQ ID NO: 364139 - RNA, 19 nt, Artificial Sequence
  Description of Artificial Sequence: Synthetic oligonucleotide
  Sense Strand Starting at position 578 of SEQ ID NO: 318483
uugaaagaugugggaaguu

SEQ ID NO: 364140 - RNA, 19 nt, Artificial Sequence
  Description of Artificial Sequence: Synthetic oligonucleotide
  Antisense Strand to SEQ ID NO: 364139
aacuucccacaucuuucaa

SEQ ID NO: 364141 - RNA, 19 nt, Artificial Sequence
  Description of Artificial Sequence: Synthetic oligonucleotide
  Sense Strand Starting at position 578 of SEQ ID NO: 318494
gggaaguugugggugugau

SEQ ID NO: 364142 - RNA, 19 nt, Artificial Sequence
  Description of Artificial Sequence: Synthetic oligonucleotide
  Antisense Strand to SEQ ID NO: 364141
aucacacccacaacuuccc

SEQ ID NO: 364143 - RNA, 19 nt, Artificial Sequence
  Description of Artificial Sequence: Synthetic oligonucleotide
  Sense Strand Starting at position 578 of SEQ ID NO: 318495
ggaaguugugggugugaua

SEQ ID NO: 364144 - RNA, 19 nt, Artificial Sequence
  Description of Artificial Sequence: Synthetic oligonucleotide
  Antisense Strand to SEQ ID NO: 364143
uaucacacccacaacuucc

SEQ ID NO: 364145 - RNA, 19 nt, Artificial Sequence
  Description of Artificial Sequence: Synthetic oligonucleotide
  Sense Strand Starting at position 578 of SEQ ID NO: 318648
gugaaugaaucucaagaga

SEQ ID NO: 364146 - RNA, 19 nt, Artificial Sequence
  Description of Artificial Sequence: Synthetic oligonucleotide
  Antisense Strand to SEQ ID NO: 364145
ucucuugagauucauucac

SEQ ID NO: 364147 - RNA, 19 nt, Artificial Sequence
  Description of Artificial Sequence: Synthetic oligonucleotide
  Sense Strand Starting at position 579 of SEQ ID NO: 315258
gauuucuggcucugucaua

SEQ ID NO: 364148 - RNA, 19 nt, Artificial Sequence
  Description of Artificial Sequence: Synthetic oligonucleotide
  Antisense Strand to SEQ ID NO: 364147
uaugacagagccagaaauc

SEQ ID NO: 364149 - RNA, 19 nt, Artificial Sequence
  Description of Artificial Sequence: Synthetic oligonucleotide
  Sense Strand Starting at position 579 of SEQ ID NO: 315259
auuucuggcucugucauau

SEQ ID NO: 364150 - RNA, 19 nt, Artificial Sequence
  Description of Artificial Sequence: Synthetic oligonucleotide
  Antisense Strand to SEQ ID NO: 364149
auaugacagagccagaaau

SEQ ID NO: 364151 - RNA, 19 nt, Artificial Sequence
  Description of Artificial Sequence: Synthetic oligonucleotide
  Sense Strand Starting at position 579 of SEQ ID NO: 315341
gggcaaaccucacugaaau

SEQ ID NO: 364152 - RNA, 19 nt, Artificial Sequence
  Description of Artificial Sequence: Synthetic oligonucleotide
  Antisense Strand to SEQ ID NO: 364151
auuucagugagguuugccc

SEQ ID NO: 364153 - RNA, 19 nt, Artificial Sequence
  Description of Artificial Sequence: Synthetic oligonucleotide
  Sense Strand Starting at position 579 of SEQ ID NO: 315342
ggcaaaccucacugaaauu

SEQ ID NO: 364154 - RNA, 19 nt, Artificial Sequence
  Description of Artificial Sequence: Synthetic oligonucleotide
  Antisense Strand to SEQ ID NO: 364153
aauuucagugagguuugcc

SEQ ID NO: 364155 - RNA, 19 nt, Artificial Sequence
  Description of Artificial Sequence: Synthetic oligonucleotide
  Sense Strand Starting at position 579 of SEQ ID NO: 315354
ugaaauucuuucucaggga

SEQ ID NO: 364156 - RNA, 19 nt, Artificial Sequence
  Description of Artificial Sequence: Synthetic oligonucleotide
  Antisense Strand to SEQ ID NO: 364155
ucccugagaaagaauuuca

SEQ ID NO: 364157 - RNA, 19 nt, Artificial Sequence
  Description of Artificial Sequence: Synthetic oligonucleotide
  Sense Strand Starting at position 579 of SEQ ID NO: 316083
cagaguucuucugcagacu

SEQ ID NO: 364158 - RNA, 19 nt, Artificial Sequence
  Description of Artificial Sequence: Synthetic oligonucleotide
  Antisense Strand to SEQ ID NO: 364157
agucugcagaagaacucug

SEQ ID NO: 364159 - RNA, 19 nt, Artificial Sequence
  Description of Artificial Sequence: Synthetic oligonucleotide
  Sense Strand Starting at position 579 of SEQ ID NO: 316084
agaguucuucugcagacua

SEQ ID NO: 364160 - RNA, 19 nt, Artificial Sequence
  Description of Artificial Sequence: Synthetic oligonucleotide
  Antisense Strand to SEQ ID NO: 364159
uagucugcagaagaacucu

SEQ ID NO: 364161 - RNA, 19 nt, Artificial Sequence
  Description of Artificial Sequence: Synthetic oligonucleotide
  Sense Strand Starting at position 579 of SEQ ID NO: 316086
aguucuucugcagacuauu

SEQ ID NO: 364162 - RNA, 19 nt, Artificial Sequence
  Description of Artificial Sequence: Synthetic oligonucleotide
  Antisense Strand to SEQ ID NO: 364161
aauagucugcagaagaacu

SEQ ID NO: 364163 - RNA, 19 nt, Artificial Sequence
  Description of Artificial Sequence: Synthetic oligonucleotide
  Sense Strand Starting at position 579 of SEQ ID NO: 316139
uaacuagaagggugcaaua

SEQ ID NO: 364164 - RNA, 19 nt, Artificial Sequence
  Description of Artificial Sequence: Synthetic oligonucleotide
  Antisense Strand to SEQ ID NO: 364163
uauugcacccuucuaguua

SEQ ID NO: 364165 - RNA, 19 nt, Artificial Sequence
  Description of Artificial Sequence: Synthetic oligonucleotide
  Sense Strand Starting at position 579 of SEQ ID NO: 316168
ggaccuuguuagucacacu

SEQ ID NO: 364166 - RNA, 19 nt, Artificial Sequence
  Description of Artificial Sequence: Synthetic oligonucleotide
  Antisense Strand to SEQ ID NO: 364165
agugugacuaacaaggucc

SEQ ID NO: 364167 - RNA, 19 nt, Artificial Sequence
  Description of Artificial Sequence: Synthetic oligonucleotide
  Sense Strand Starting at position 579 of SEQ ID NO: 316223
auaaccuucugccugguaa

SEQ ID NO: 364168 - RNA, 19 nt, Artificial Sequence
  Description of Artificial Sequence: Synthetic oligonucleotide
  Antisense Strand to SEQ ID NO: 364167
uuaccaggcagaagguuau

SEQ ID NO: 364169 - RNA, 19 nt, Artificial Sequence
  Description of Artificial Sequence: Synthetic oligonucleotide
  Sense Strand Starting at position 579 of SEQ ID NO: 316234
ccugguaauuaucugcuaa

SEQ ID NO: 364170 - RNA, 19 nt, Artificial Sequence
  Description of Artificial Sequence: Synthetic oligonucleotide
  Antisense Strand to SEQ ID NO: 364169
uuagcagauaauuaccagg

SEQ ID NO: 364171 - RNA, 19 nt, Artificial Sequence
  Description of Artificial Sequence: Synthetic oligonucleotide
  Sense Strand Starting at position 579 of SEQ ID NO: 316236
ugguaauuaucugcuaauu

SEQ ID NO: 364172 - RNA, 19 nt, Artificial Sequence
  Description of Artificial Sequence: Synthetic oligonucleotide
  Antisense Strand to SEQ ID NO: 364171
aauuagcagauaauuacca

SEQ ID NO: 364173 - RNA, 19 nt, Artificial Sequence
  Description of Artificial Sequence: Synthetic oligonucleotide
  Sense Strand Starting at position 579 of SEQ ID NO: 316275
gcugauuucugucugcuau

SEQ ID NO: 364174 - RNA, 19 nt, Artificial Sequence
  Description of Artificial Sequence: Synthetic oligonucleotide
  Antisense Strand to SEQ ID NO: 364173
auagcagacagaaaucagc

SEQ ID NO: 364175 - RNA, 19 nt, Artificial Sequence
  Description of Artificial Sequence: Synthetic oligonucleotide
  Sense Strand Starting at position 579 of SEQ ID NO: 316276
cugauuucugucugcuaug

SEQ ID NO: 364176 - RNA, 19 nt, Artificial Sequence
  Description of Artificial Sequence: Synthetic oligonucleotide
  Antisense Strand to SEQ ID NO: 364175
cauagcagacagaaaucag

SEQ ID NO: 364177 - RNA, 19 nt, Artificial Sequence
  Description of Artificial Sequence: Synthetic oligonucleotide
  Sense Strand Starting at position 579 of SEQ ID NO: 316277
ugauuucugucugcuauga

SEQ ID NO: 364178 - RNA, 19 nt, Artificial Sequence
  Description of Artificial Sequence: Synthetic oligonucleotide
  Antisense Strand to SEQ ID NO: 364177
ucauagcagacagaaauca

SEQ ID NO: 364179 - RNA, 19 nt, Artificial Sequence
  Description of Artificial Sequence: Synthetic oligonucleotide
  Sense Strand Starting at position 579 of SEQ ID NO: 316817
cuaauuagacccuggauug

SEQ ID NO: 364180 - RNA, 19 nt, Artificial Sequence
  Description of Artificial Sequence: Synthetic oligonucleotide
  Antisense Strand to SEQ ID NO: 364179
caauccagggucuaauuag

SEQ ID NO: 364181 - RNA, 19 nt, Artificial Sequence
  Description of Artificial Sequence: Synthetic oligonucleotide
  Sense Strand Starting at position 579 of SEQ ID NO: 316842
ggcaaaguccuacaccuua

SEQ ID NO: 364182 - RNA, 19 nt, Artificial Sequence
  Description of Artificial Sequence: Synthetic oligonucleotide
  Antisense Strand to SEQ ID NO: 364181
uaagguguaggacuuugcc

SEQ ID NO: 364183 - RNA, 19 nt, Artificial Sequence
  Description of Artificial Sequence: Synthetic oligonucleotide
  Sense Strand Starting at position 579 of SEQ ID NO: 316867
aguuauaaauguucuggau

SEQ ID NO: 364184 - RNA, 19 nt, Artificial Sequence
  Description of Artificial Sequence: Synthetic oligonucleotide
  Antisense Strand to SEQ ID NO: 364183
auccagaacauuuauaacu

SEQ ID NO: 364185 - RNA, 19 nt, Artificial Sequence
  Description of Artificial Sequence: Synthetic oligonucleotide
  Sense Strand Starting at position 579 of SEQ ID NO: 317002
uuuggucugucaucagaau

SEQ ID NO: 364186 - RNA, 19 nt, Artificial Sequence
  Description of Artificial Sequence: Synthetic oligonucleotide
  Antisense Strand to SEQ ID NO: 364185
auucugaugacagaccaaa

SEQ ID NO: 364187 - RNA, 19 nt, Artificial Sequence
  Description of Artificial Sequence: Synthetic oligonucleotide
  Sense Strand Starting at position 579 of SEQ ID NO: 317039
augaguuaagacuguuucu

SEQ ID NO: 364188 - RNA, 19 nt, Artificial Sequence
  Description of Artificial Sequence: Synthetic oligonucleotide
  Antisense Strand to SEQ ID NO: 364187
agaaacagucuuaacucau

SEQ ID NO: 364189 - RNA, 19 nt, Artificial Sequence
  Description of Artificial Sequence: Synthetic oligonucleotide
  Sense Strand Starting at position 579 of SEQ ID NO: 317115
cuguaaagcccagggagau

SEQ ID NO: 364190 - RNA, 19 nt, Artificial Sequence
  Description of Artificial Sequence: Synthetic oligonucleotide
  Antisense Strand to SEQ ID NO: 364189
aucucccugggcuuuacag

SEQ ID NO: 364191 - RNA, 19 nt, Artificial Sequence
  Description of Artificial Sequence: Synthetic oligonucleotide
  Sense Strand Starting at position 579 of SEQ ID NO: 317116
uguaaagcccagggagaua

SEQ ID NO: 364192 - RNA, 19 nt, Artificial Sequence
  Description of Artificial Sequence: Synthetic oligonucleotide
  Antisense Strand to SEQ ID NO: 364191
uaucucccugggcuuuaca

SEQ ID NO: 364193 - RNA, 19 nt, Artificial Sequence
  Description of Artificial Sequence: Synthetic oligonucleotide
  Sense Strand Starting at position 579 of SEQ ID NO: 317157
aauagaucuggccaugucu

SEQ ID NO: 364194 - RNA, 19 nt, Artificial Sequence
  Description of Artificial Sequence: Synthetic oligonucleotide
  Antisense Strand to SEQ ID NO: 364193
agacauggccagaucuauu

SEQ ID NO: 364195 - RNA, 19 nt, Artificial Sequence
  Description of Artificial Sequence: Synthetic oligonucleotide
  Sense Strand Starting at position 579 of SEQ ID NO: 317243
caaggucuggcaugaguaa

SEQ ID NO: 364196 - RNA, 19 nt, Artificial Sequence
  Description of Artificial Sequence: Synthetic oligonucleotide
  Antisense Strand to SEQ ID NO: 364195
uuacucaugccagaccuug

SEQ ID NO: 364197 - RNA, 19 nt, Artificial Sequence
  Description of Artificial Sequence: Synthetic oligonucleotide
  Sense Strand Starting at position 579 of SEQ ID NO: 317270
aggagagagcucugaauuc

SEQ ID NO: 364198 - RNA, 19 nt, Artificial Sequence
  Description of Artificial Sequence: Synthetic oligonucleotide
  Antisense Strand to SEQ ID NO: 364197
gaauucagagcucucuccu

SEQ ID NO: 364199 - RNA, 19 nt, Artificial Sequence
  Description of Artificial Sequence: Synthetic oligonucleotide
  Sense Strand Starting at position 579 of SEQ ID NO: 317330
agaugugucucugucagaa

SEQ ID NO: 364200 - RNA, 19 nt, Artificial Sequence
  Description of Artificial Sequence: Synthetic oligonucleotide
  Antisense Strand to SEQ ID NO: 364199
uucugacagagacacaucu

SEQ ID NO: 364201 - RNA, 19 nt, Artificial Sequence
  Description of Artificial Sequence: Synthetic oligonucleotide
  Sense Strand Starting at position 579 of SEQ ID NO: 317488
aagaguuccuggcccuuua

SEQ ID NO: 364202 - RNA, 19 nt, Artificial Sequence
  Description of Artificial Sequence: Synthetic oligonucleotide
  Antisense Strand to SEQ ID NO: 364201
uaaagggccaggaacucuu

SEQ ID NO: 364203 - RNA, 19 nt, Artificial Sequence
  Description of Artificial Sequence: Synthetic oligonucleotide
  Sense Strand Starting at position 579 of SEQ ID NO: 317584
aguguugugauagauugag

SEQ ID NO: 364204 - RNA, 19 nt, Artificial Sequence
  Description of Artificial Sequence: Synthetic oligonucleotide
  Antisense Strand to SEQ ID NO: 364203
cucaaucuaucacaacacu

SEQ ID NO: 364205 - RNA, 19 nt, Artificial Sequence
  Description of Artificial Sequence: Synthetic oligonucleotide
  Sense Strand Starting at position 579 of SEQ ID NO: 317790
ccuccugucagagaugugu

SEQ ID NO: 364206 - RNA, 19 nt, Artificial Sequence
  Description of Artificial Sequence: Synthetic oligonucleotide
  Antisense Strand to SEQ ID NO: 364205
acacaucucugacaggagg

SEQ ID NO: 364207 - RNA, 19 nt, Artificial Sequence
  Description of Artificial Sequence: Synthetic oligonucleotide
  Sense Strand Starting at position 579 of SEQ ID NO: 317794
cugucagagaugugucaga

SEQ ID NO: 364208 - RNA, 19 nt, Artificial Sequence
  Description of Artificial Sequence: Synthetic oligonucleotide
  Antisense Strand to SEQ ID NO: 364207
ucugacacaucucugacag

SEQ ID NO: 364209 - RNA, 19 nt, Artificial Sequence
  Description of Artificial Sequence: Synthetic oligonucleotide
  Sense Strand Starting at position 579 of SEQ ID NO: 317855
cagggcucuccucauguga

SEQ ID NO: 364210 - RNA, 19 nt, Artificial Sequence
  Description of Artificial Sequence: Synthetic oligonucleotide
  Antisense Strand to SEQ ID NO: 364209
ucacaugaggagagcccug

SEQ ID NO: 364211 - RNA, 19 nt, Artificial Sequence
  Description of Artificial Sequence: Synthetic oligonucleotide
  Sense Strand Starting at position 579 of SEQ ID NO: 317897
uuaucaucagcauggcaaa

SEQ ID NO: 364212 - RNA, 19 nt, Artificial Sequence
  Description of Artificial Sequence: Synthetic oligonucleotide
  Antisense Strand to SEQ ID NO: 364211
uuugccaugcugaugauaa

SEQ ID NO: 364213 - RNA, 19 nt, Artificial Sequence
  Description of Artificial Sequence: Synthetic oligonucleotide
  Sense Strand Starting at position 579 of SEQ ID NO: 318131
guauucugacaagaccagu

SEQ ID NO: 364214 - RNA, 19 nt, Artificial Sequence
  Description of Artificial Sequence: Synthetic oligonucleotide
  Antisense Strand to SEQ ID NO: 364213
acuggucuugucagaauac

SEQ ID NO: 364215 - RNA, 19 nt, Artificial Sequence
  Description of Artificial Sequence: Synthetic oligonucleotide
  Sense Strand Starting at position 579 of SEQ ID NO: 318249
uauugauggugacaaauuu

SEQ ID NO: 364216 - RNA, 19 nt, Artificial Sequence
  Description of Artificial Sequence: Synthetic oligonucleotide
  Antisense Strand to SEQ ID NO: 364215
aaauuugucaccaucaaua

SEQ ID NO: 364217 - RNA, 19 nt, Artificial Sequence
  Description of Artificial Sequence: Synthetic oligonucleotide
  Sense Strand Starting at position 579 of SEQ ID NO: 318832
auagauauauggguuucuu

SEQ ID NO: 364218 - RNA, 19 nt, Artificial Sequence
  Description of Artificial Sequence: Synthetic oligonucleotide
  Antisense Strand to SEQ ID NO: 364217
aagaaacccauauaucuau

SEQ ID NO: 364219 - RNA, 19 nt, Artificial Sequence
  Description of Artificial Sequence: Synthetic oligonucleotide
  Sense Strand Starting at position 579 of SEQ ID NO: 318888
guguuugugccuguaccaa

SEQ ID NO: 364220 - RNA, 19 nt, Artificial Sequence
  Description of Artificial Sequence: Synthetic oligonucleotide
  Antisense Strand to SEQ ID NO: 364219
uugguacaggcacaaacac

SEQ ID NO: 364221 - RNA, 19 nt, Artificial Sequence
  Description of Artificial Sequence: Synthetic oligonucleotide
  Sense Strand Starting at position 579 of SEQ ID NO: 319087
augcuaaaucuguagauca

SEQ ID NO: 364222 - RNA, 19 nt, Artificial Sequence
  Description of Artificial Sequence: Synthetic oligonucleotide
  Antisense Strand to SEQ ID NO: 364221
ugaucuacagauuuagcau

SEQ ID NO: 364223 - RNA, 19 nt, Artificial Sequence
  Description of Artificial Sequence: Synthetic oligonucleotide
  Sense Strand Starting at position 579 of SEQ ID NO: 319089
gcuaaaucuguagaucaau

SEQ ID NO: 364224 - RNA, 19 nt, Artificial Sequence
  Description of Artificial Sequence: Synthetic oligonucleotide
  Antisense Strand to SEQ ID NO: 364223
auugaucuacagauuuagc

SEQ ID NO: 364225 - RNA, 19 nt, Artificial Sequence
  Description of Artificial Sequence: Synthetic oligonucleotide
  Sense Strand Starting at position 579 of SEQ ID NO: 319153
agacacagaugucuuuauu

SEQ ID NO: 364226 - RNA, 19 nt, Artificial Sequence
  Description of Artificial Sequence: Synthetic oligonucleotide
  Antisense Strand to SEQ ID NO: 364225
aauaaagacaucugugucu

SEQ ID NO: 364227 - RNA, 19 nt, Artificial Sequence
  Description of Artificial Sequence: Synthetic oligonucleotide
  Sense Strand Starting at position 580 of SEQ ID NO: 316031
gacauuauauuagucgguu

SEQ ID NO: 364228 - RNA, 19 nt, Artificial Sequence
  Description of Artificial Sequence: Synthetic oligonucleotide
  Antisense Strand to SEQ ID NO: 364227
aaccgacuaauauaauguc

SEQ ID NO: 364229 - RNA, 19 nt, Artificial Sequence
  Description of Artificial Sequence: Synthetic oligonucleotide
  Sense Strand Starting at position 580 of SEQ ID NO: 316034
auuauauuagucgguucuu

SEQ ID NO: 364230 - RNA, 19 nt, Artificial Sequence
  Description of Artificial Sequence: Synthetic oligonucleotide
  Antisense Strand to SEQ ID NO: 364229
aagaaccgacuaauauaau

SEQ ID NO: 364231 - RNA, 19 nt, Artificial Sequence
  Description of Artificial Sequence: Synthetic oligonucleotide
  Sense Strand Starting at position 580 of SEQ ID NO: 316161
gacucauaguggcuuagua

SEQ ID NO: 364232 - RNA, 19 nt, Artificial Sequence
  Description of Artificial Sequence: Synthetic oligonucleotide
  Antisense Strand to SEQ ID NO: 364231
uacuaagccacuaugaguc

SEQ ID NO: 364233 - RNA, 19 nt, Artificial Sequence
  Description of Artificial Sequence: Synthetic oligonucleotide
  Sense Strand Starting at position 580 of SEQ ID NO: 316163
cucauaguggcuuaguaaa

SEQ ID NO: 364234 - RNA, 19 nt, Artificial Sequence
  Description of Artificial Sequence: Synthetic oligonucleotide
  Antisense Strand to SEQ ID NO: 364233
uuuacuaagccacuaugag

SEQ ID NO: 364235 - RNA, 19 nt, Artificial Sequence
  Description of Artificial Sequence: Synthetic oligonucleotide
  Sense Strand Starting at position 580 of SEQ ID NO: 316231
ggaacugaauaaugagaau

SEQ ID NO: 364236 - RNA, 19 nt, Artificial Sequence
  Description of Artificial Sequence: Synthetic oligonucleotide
  Antisense Strand to SEQ ID NO: 364235
auucucauuauucaguucc

SEQ ID NO: 364237 - RNA, 19 nt, Artificial Sequence
  Description of Artificial Sequence: Synthetic oligonucleotide
  Sense Strand Starting at position 580 of SEQ ID NO: 316703
guauauuucuccuaugauu

SEQ ID NO: 364238 - RNA, 19 nt, Artificial Sequence
  Description of Artificial Sequence: Synthetic oligonucleotide
  Antisense Strand to SEQ ID NO: 364237
aaucauaggagaaauauac

SEQ ID NO: 364239 - RNA, 19 nt, Artificial Sequence
  Description of Artificial Sequence: Synthetic oligonucleotide
  Sense Strand Starting at position 580 of SEQ ID NO: 317278
aacauaugcgauugugcaa

SEQ ID NO: 364240 - RNA, 19 nt, Artificial Sequence
  Description of Artificial Sequence: Synthetic oligonucleotide
  Antisense Strand to SEQ ID NO: 364239
uugcacaaucgcauauguu

SEQ ID NO: 364241 - RNA, 19 nt, Artificial Sequence
  Description of Artificial Sequence: Synthetic oligonucleotide
  Sense Strand Starting at position 580 of SEQ ID NO: 317609
guucuacuuucuguuagag

SEQ ID NO: 364242 - RNA, 19 nt, Artificial Sequence
  Description of Artificial Sequence: Synthetic oligonucleotide
  Antisense Strand to SEQ ID NO: 364241
cucuaacagaaaguagaac

SEQ ID NO: 364243 - RNA, 19 nt, Artificial Sequence
  Description of Artificial Sequence: Synthetic oligonucleotide
  Sense Strand Starting at position 580 of SEQ ID NO: 317619
cuguuagagguuuggaucu

SEQ ID NO: 364244 - RNA, 19 nt, Artificial Sequence
  Description of Artificial Sequence: Synthetic oligonucleotide
  Antisense Strand to SEQ ID NO: 364243
agauccaaaccucuaacag

SEQ ID NO: 364245 - RNA, 19 nt, Artificial Sequence
  Description of Artificial Sequence: Synthetic oligonucleotide
  Sense Strand Starting at position 580 of SEQ ID NO: 317720
gugguuucucaagguauaa

SEQ ID NO: 364246 - RNA, 19 nt, Artificial Sequence
  Description of Artificial Sequence: Synthetic oligonucleotide
  Antisense Strand to SEQ ID NO: 364245
uuauaccuugagaaaccac

SEQ ID NO: 364247 - RNA, 19 nt, Artificial Sequence
  Description of Artificial Sequence: Synthetic oligonucleotide
  Sense Strand Starting at position 580 of SEQ ID NO: 317763
ggcaguagugagugaguga

SEQ ID NO: 364248 - RNA, 19 nt, Artificial Sequence
  Description of Artificial Sequence: Synthetic oligonucleotide
  Antisense Strand to SEQ ID NO: 364247
ucacucacucacuacugcc

SEQ ID NO: 364249 - RNA, 19 nt, Artificial Sequence
  Description of Artificial Sequence: Synthetic oligonucleotide
  Sense Strand Starting at position 580 of SEQ ID NO: 317767
guagugagugagugaguua

SEQ ID NO: 364250 - RNA, 19 nt, Artificial Sequence
  Description of Artificial Sequence: Synthetic oligonucleotide
  Antisense Strand to SEQ ID NO: 364249
uaacucacucacucacuac

SEQ ID NO: 364251 - RNA, 19 nt, Artificial Sequence
  Description of Artificial Sequence: Synthetic oligonucleotide
  Sense Strand Starting at position 580 of SEQ ID NO: 317868
ccgucugcaauguuuguaa

SEQ ID NO: 364252 - RNA, 19 nt, Artificial Sequence
  Description of Artificial Sequence: Synthetic oligonucleotide
  Antisense Strand to SEQ ID NO: 364251
uuacaaacauugcagacgg

SEQ ID NO: 364253 - RNA, 19 nt, Artificial Sequence
  Description of Artificial Sequence: Synthetic oligonucleotide
  Sense Strand Starting at position 580 of SEQ ID NO: 317879
guuuguaaguuucccaaug

SEQ ID NO: 364254 - RNA, 19 nt, Artificial Sequence
  Description of Artificial Sequence: Synthetic oligonucleotide
  Antisense Strand to SEQ ID NO: 364253
cauugggaaacuuacaaac

SEQ ID NO: 364255 - RNA, 19 nt, Artificial Sequence
  Description of Artificial Sequence: Synthetic oligonucleotide
  Sense Strand Starting at position 580 of SEQ ID NO: 318023
agugcaagaaccgacaaau

SEQ ID NO: 364256 - RNA, 19 nt, Artificial Sequence
  Description of Artificial Sequence: Synthetic oligonucleotide
  Antisense Strand to SEQ ID NO: 364255
auuugucgguucuugcacu

SEQ ID NO: 364257 - RNA, 19 nt, Artificial Sequence
  Description of Artificial Sequence: Synthetic oligonucleotide
  Sense Strand Starting at position 580 of SEQ ID NO: 318034
cgacaaauacaaugucuuu

SEQ ID NO: 364258 - RNA, 19 nt, Artificial Sequence
  Description of Artificial Sequence: Synthetic oligonucleotide
  Antisense Strand to SEQ ID NO: 364257
aaagacauuguauuugucg

SEQ ID NO: 364259 - RNA, 19 nt, Artificial Sequence
  Description of Artificial Sequence: Synthetic oligonucleotide
  Sense Strand Starting at position 580 of SEQ ID NO: 318107
cuccucuuucccugauguu

SEQ ID NO: 364260 - RNA, 19 nt, Artificial Sequence
  Description of Artificial Sequence: Synthetic oligonucleotide
  Antisense Strand to SEQ ID NO: 364259
aacaucagggaaagaggag

SEQ ID NO: 364261 - RNA, 19 nt, Artificial Sequence
  Description of Artificial Sequence: Synthetic oligonucleotide
  Sense Strand Starting at position 580 of SEQ ID NO: 318113
uuucccugauguucugaaa

SEQ ID NO: 364262 - RNA, 19 nt, Artificial Sequence
  Description of Artificial Sequence: Synthetic oligonucleotide
  Antisense Strand to SEQ ID NO: 364261
uuucagaacaucagggaaa

SEQ ID NO: 364263 - RNA, 19 nt, Artificial Sequence
  Description of Artificial Sequence: Synthetic oligonucleotide
  Sense Strand Starting at position 580 of SEQ ID NO: 318220
caugucauuuacugggaaa

SEQ ID NO: 364264 - RNA, 19 nt, Artificial Sequence
  Description of Artificial Sequence: Synthetic oligonucleotide
  Antisense Strand to SEQ ID NO: 364263
uuucccaguaaaugacaug

SEQ ID NO: 364265 - RNA, 19 nt, Artificial Sequence
  Description of Artificial Sequence: Synthetic oligonucleotide
  Sense Strand Starting at position 580 of SEQ ID NO: 318223
gucauuuacugggaaacuu

SEQ ID NO: 364266 - RNA, 19 nt, Artificial Sequence
  Description of Artificial Sequence: Synthetic oligonucleotide
  Antisense Strand to SEQ ID NO: 364265
aaguuucccaguaaaugac

SEQ ID NO: 364267 - RNA, 19 nt, Artificial Sequence
  Description of Artificial Sequence: Synthetic oligonucleotide
  Sense Strand Starting at position 580 of SEQ ID NO: 318231
cugggaaacuuuguuguau

SEQ ID NO: 364268 - RNA, 19 nt, Artificial Sequence
  Description of Artificial Sequence: Synthetic oligonucleotide
  Antisense Strand to SEQ ID NO: 364267
auacaacaaaguuucccag

SEQ ID NO: 364269 - RNA, 19 nt, Artificial Sequence
  Description of Artificial Sequence: Synthetic oligonucleotide
  Sense Strand Starting at position 580 of SEQ ID NO: 318232
ugggaaacuuuguuguauu

SEQ ID NO: 364270 - RNA, 19 nt, Artificial Sequence
  Description of Artificial Sequence: Synthetic oligonucleotide
  Antisense Strand to SEQ ID NO: 364269
aauacaacaaaguuuccca

SEQ ID NO: 364271 - RNA, 19 nt, Artificial Sequence
  Description of Artificial Sequence: Synthetic oligonucleotide
  Sense Strand Starting at position 580 of SEQ ID NO: 318291
uuagcuuucuauguuuaga

SEQ ID NO: 364272 - RNA, 19 nt, Artificial Sequence
  Description of Artificial Sequence: Synthetic oligonucleotide
  Antisense Strand to SEQ ID NO: 364271
ucuaaacauagaaagcuaa

SEQ ID NO: 364273 - RNA, 19 nt, Artificial Sequence
  Description of Artificial Sequence: Synthetic oligonucleotide
  Sense Strand Starting at position 580 of SEQ ID NO: 318293
agcuuucuauguuuagaaa

SEQ ID NO: 364274 - RNA, 19 nt, Artificial Sequence
  Description of Artificial Sequence: Synthetic oligonucleotide
  Antisense Strand to SEQ ID NO: 364273
uuucuaaacauagaaagcu

SEQ ID NO: 364275 - RNA, 19 nt, Artificial Sequence
  Description of Artificial Sequence: Synthetic oligonucleotide
  Sense Strand Starting at position 580 of SEQ ID NO: 318294
gcuuucuauguuuagaaau

SEQ ID NO: 364276 - RNA, 19 nt, Artificial Sequence
  Description of Artificial Sequence: Synthetic oligonucleotide
  Antisense Strand to SEQ ID NO: 364275
auuucuaaacauagaaagc

SEQ ID NO: 364277 - RNA, 19 nt, Artificial Sequence
  Description of Artificial Sequence: Synthetic oligonucleotide
  Sense Strand Starting at position 580 of SEQ ID NO: 318325
aucauagauugauccucga

SEQ ID NO: 364278 - RNA, 19 nt, Artificial Sequence
  Description of Artificial Sequence: Synthetic oligonucleotide
  Antisense Strand to SEQ ID NO: 364277
ucgaggaucaaucuaugau

SEQ ID NO: 364279 - RNA, 19 nt, Artificial Sequence
  Description of Artificial Sequence: Synthetic oligonucleotide
  Sense Strand Starting at position 580 of SEQ ID NO: 318328
auagauugauccucgaagu

SEQ ID NO: 364280 - RNA, 19 nt, Artificial Sequence
  Description of Artificial Sequence: Synthetic oligonucleotide
  Antisense Strand to SEQ ID NO: 364279
acuucgaggaucaaucuau

SEQ ID NO: 364281 - RNA, 19 nt, Artificial Sequence
  Description of Artificial Sequence: Synthetic oligonucleotide
  Sense Strand Starting at position 580 of SEQ ID NO: 318329
uagauugauccucgaaguu

SEQ ID NO: 364282 - RNA, 19 nt, Artificial Sequence
  Description of Artificial Sequence: Synthetic oligonucleotide
  Antisense Strand to SEQ ID NO: 364281
aacuucgaggaucaaucua

SEQ ID NO: 364283 - RNA, 19 nt, Artificial Sequence
  Description of Artificial Sequence: Synthetic oligonucleotide
  Sense Strand Starting at position 580 of SEQ ID NO: 318383
gucaguuucucccuguaag

SEQ ID NO: 364284 - RNA, 19 nt, Artificial Sequence
  Description of Artificial Sequence: Synthetic oligonucleotide
  Antisense Strand to SEQ ID NO: 364283
cuuacagggagaaacugac

SEQ ID NO: 364285 - RNA, 19 nt, Artificial Sequence
  Description of Artificial Sequence: Synthetic oligonucleotide
  Sense Strand Starting at position 580 of SEQ ID NO: 318395
cuguaaggugauggaauau

SEQ ID NO: 364286 - RNA, 19 nt, Artificial Sequence
  Description of Artificial Sequence: Synthetic oligonucleotide
  Antisense Strand to SEQ ID NO: 364285
auauuccaucaccuuacag

SEQ ID NO: 364287 - RNA, 19 nt, Artificial Sequence
  Description of Artificial Sequence: Synthetic oligonucleotide
  Sense Strand Starting at position 580 of SEQ ID NO: 318451
uggccaauagaauagugua

SEQ ID NO: 364288 - RNA, 19 nt, Artificial Sequence
  Description of Artificial Sequence: Synthetic oligonucleotide
  Antisense Strand to SEQ ID NO: 364287
uacacuauucuauuggcca

SEQ ID NO: 364289 - RNA, 19 nt, Artificial Sequence
  Description of Artificial Sequence: Synthetic oligonucleotide
  Sense Strand Starting at position 580 of SEQ ID NO: 318467
guagaaugacaguaugcaa

SEQ ID NO: 364290 - RNA, 19 nt, Artificial Sequence
  Description of Artificial Sequence: Synthetic oligonucleotide
  Antisense Strand to SEQ ID NO: 364289
uugcauacugucauucuac

SEQ ID NO: 364291 - RNA, 19 nt, Artificial Sequence
  Description of Artificial Sequence: Synthetic oligonucleotide
  Sense Strand Starting at position 580 of SEQ ID NO: 318470
gaaugacaguaugcaaguu

SEQ ID NO: 364292 - RNA, 19 nt, Artificial Sequence
  Description of Artificial Sequence: Synthetic oligonucleotide
  Antisense Strand to SEQ ID NO: 364291
aacuugcauacugucauuc

SEQ ID NO: 364293 - RNA, 19 nt, Artificial Sequence
  Description of Artificial Sequence: Synthetic oligonucleotide
  Sense Strand Starting at position 580 of SEQ ID NO: 318499
cuuuaagaggcuuguccau

SEQ ID NO: 364294 - RNA, 19 nt, Artificial Sequence
  Description of Artificial Sequence: Synthetic oligonucleotide
  Antisense Strand to SEQ ID NO: 364293
auggacaagccucuuaaag

SEQ ID NO: 364295 - RNA, 19 nt, Artificial Sequence
  Description of Artificial Sequence: Synthetic oligonucleotide
  Sense Strand Starting at position 580 of SEQ ID NO: 318512
guccauuuauguuugccau

SEQ ID NO: 364296 - RNA, 19 nt, Artificial Sequence
  Description of Artificial Sequence: Synthetic oligonucleotide
  Antisense Strand to SEQ ID NO: 364295
auggcaaacauaaauggac

SEQ ID NO: 364297 - RNA, 19 nt, Artificial Sequence
  Description of Artificial Sequence: Synthetic oligonucleotide
  Sense Strand Starting at position 580 of SEQ ID NO: 318514
ccauuuauguuugccaucu

SEQ ID NO: 364298 - RNA, 19 nt, Artificial Sequence
  Description of Artificial Sequence: Synthetic oligonucleotide
  Antisense Strand to SEQ ID NO: 364297
agauggcaaacauaaaugg

SEQ ID NO: 364299 - RNA, 19 nt, Artificial Sequence
  Description of Artificial Sequence: Synthetic oligonucleotide
  Sense Strand Starting at position 580 of SEQ ID NO: 318545
ucuacuuucugguagauuu

SEQ ID NO: 364300 - RNA, 19 nt, Artificial Sequence
  Description of Artificial Sequence: Synthetic oligonucleotide
  Antisense Strand to SEQ ID NO: 364299
aaaucuaccagaaaguaga

SEQ ID NO: 364301 - RNA, 19 nt, Artificial Sequence
  Description of Artificial Sequence: Synthetic oligonucleotide
  Sense Strand Starting at position 580 of SEQ ID NO: 318945
gaccuuuagugauuugccu

SEQ ID NO: 364302 - RNA, 19 nt, Artificial Sequence
  Description of Artificial Sequence: Synthetic oligonucleotide
  Antisense Strand to SEQ ID NO: 364301
aggcaaaucacuaaagguc

SEQ ID NO: 364303 - RNA, 19 nt, Artificial Sequence
  Description of Artificial Sequence: Synthetic oligonucleotide
  Sense Strand Starting at position 580 of SEQ ID NO: 319111
aucccagaaccuuggguaa

SEQ ID NO: 364304 - RNA, 19 nt, Artificial Sequence
  Description of Artificial Sequence: Synthetic oligonucleotide
  Antisense Strand to SEQ ID NO: 364303
uuacccaagguucugggau

SEQ ID NO: 364305 - RNA, 19 nt, Artificial Sequence
  Description of Artificial Sequence: Synthetic oligonucleotide
  Sense Strand Starting at position 580 of SEQ ID NO: 319188
gcuggaggcuucucuauuu

SEQ ID NO: 364306 - RNA, 19 nt, Artificial Sequence
  Description of Artificial Sequence: Synthetic oligonucleotide
  Antisense Strand to SEQ ID NO: 364305
aaauagagaagccuccagc

SEQ ID NO: 364307 - RNA, 19 nt, Artificial Sequence
  Description of Artificial Sequence: Synthetic oligonucleotide
  Sense Strand Starting at position 581 of SEQ ID NO: 315452
guugaauauuaaguugguu

SEQ ID NO: 364308 - RNA, 19 nt, Artificial Sequence
  Description of Artificial Sequence: Synthetic oligonucleotide
  Antisense Strand to SEQ ID NO: 364307
aaccaacuuaauauucaac

SEQ ID NO: 364309 - RNA, 19 nt, Artificial Sequence
  Description of Artificial Sequence: Synthetic oligonucleotide
  Sense Strand Starting at position 581 of SEQ ID NO: 315997
ucacuugaccucugaguuu

SEQ ID NO: 364310 - RNA, 19 nt, Artificial Sequence
  Description of Artificial Sequence: Synthetic oligonucleotide
  Antisense Strand to SEQ ID NO: 364309
aaacucagaggucaaguga

SEQ ID NO: 364311 - RNA, 19 nt, Artificial Sequence
  Description of Artificial Sequence: Synthetic oligonucleotide
  Sense Strand Starting at position 581 of SEQ ID NO: 317458
uaacuauuagaauggguuu

SEQ ID NO: 364312 - RNA, 19 nt, Artificial Sequence
  Description of Artificial Sequence: Synthetic oligonucleotide
  Antisense Strand to SEQ ID NO: 364311
aaacccauucuaauaguua

SEQ ID NO: 364313 - RNA, 19 nt, Artificial Sequence
  Description of Artificial Sequence: Synthetic oligonucleotide
  Sense Strand Starting at position 581 of SEQ ID NO: 317470
uggguuugcucucuaugua

SEQ ID NO: 364314 - RNA, 19 nt, Artificial Sequence
  Description of Artificial Sequence: Synthetic oligonucleotide
  Antisense Strand to SEQ ID NO: 364313
uacauagagagcaaaccca

SEQ ID NO: 364315 - RNA, 19 nt, Artificial Sequence
  Description of Artificial Sequence: Synthetic oligonucleotide
  Sense Strand Starting at position 581 of SEQ ID NO: 317477
gcucucuauguacagauau

SEQ ID NO: 364316 - RNA, 19 nt, Artificial Sequence
  Description of Artificial Sequence: Synthetic oligonucleotide
  Antisense Strand to SEQ ID NO: 364315
auaucuguacauagagagc

SEQ ID NO: 364317 - RNA, 19 nt, Artificial Sequence
  Description of Artificial Sequence: Synthetic oligonucleotide
  Sense Strand Starting at position 581 of SEQ ID NO: 317581
cuguaaaggcauuaucuua

SEQ ID NO: 364318 - RNA, 19 nt, Artificial Sequence
  Description of Artificial Sequence: Synthetic oligonucleotide
  Antisense Strand to SEQ ID NO: 364317
uaagauaaugccuuuacag

SEQ ID NO: 364319 - RNA, 19 nt, Artificial Sequence
  Description of Artificial Sequence: Synthetic oligonucleotide
  Sense Strand Starting at position 581 of SEQ ID NO: 317644
ugaugaggacgguggaauu

SEQ ID NO: 364320 - RNA, 19 nt, Artificial Sequence
  Description of Artificial Sequence: Synthetic oligonucleotide
  Antisense Strand to SEQ ID NO: 364319
aauuccaccguccucauca

SEQ ID NO: 364321 - RNA, 19 nt, Artificial Sequence
  Description of Artificial Sequence: Synthetic oligonucleotide
  Sense Strand Starting at position 581 of SEQ ID NO: 317710
gaccuaucugcaggucagu

SEQ ID NO: 364322 - RNA, 19 nt, Artificial Sequence
  Description of Artificial Sequence: Synthetic oligonucleotide
  Antisense Strand to SEQ ID NO: 364321
acugaccugcagauagguc

SEQ ID NO: 364323 - RNA, 19 nt, Artificial Sequence
  Description of Artificial Sequence: Synthetic oligonucleotide
  Sense Strand Starting at position 581 of SEQ ID NO: 317815
gcucaaauggguuaaagug

SEQ ID NO: 364324 - RNA, 19 nt, Artificial Sequence
  Description of Artificial Sequence: Synthetic oligonucleotide
  Antisense Strand to SEQ ID NO: 364323
cacuuuaacccauuugagc

SEQ ID NO: 364325 - RNA, 19 nt, Artificial Sequence
  Description of Artificial Sequence: Synthetic oligonucleotide
  Sense Strand Starting at position 581 of SEQ ID NO: 317867
aggccacgaucagauagau

SEQ ID NO: 364326 - RNA, 19 nt, Artificial Sequence
  Description of Artificial Sequence: Synthetic oligonucleotide
  Antisense Strand to SEQ ID NO: 364325
aucuaucugaucguggccu

SEQ ID NO: 364327 - RNA, 19 nt, Artificial Sequence
  Description of Artificial Sequence: Synthetic oligonucleotide
  Sense Strand Starting at position 581 of SEQ ID NO: 317886
gaggguggccucugcagaa

SEQ ID NO: 364328 - RNA, 19 nt, Artificial Sequence
  Description of Artificial Sequence: Synthetic oligonucleotide
  Antisense Strand to SEQ ID NO: 364327
uucugcagaggccacccuc

SEQ ID NO: 364329 - RNA, 19 nt, Artificial Sequence
  Description of Artificial Sequence: Synthetic oligonucleotide
  Sense Strand Starting at position 581 of SEQ ID NO: 317980
ugaggaaugcacugggaau

SEQ ID NO: 364330 - RNA, 19 nt, Artificial Sequence
  Description of Artificial Sequence: Synthetic oligonucleotide
  Antisense Strand to SEQ ID NO: 364329
auucccagugcauuccuca

SEQ ID NO: 364331 - RNA, 19 nt, Artificial Sequence
  Description of Artificial Sequence: Synthetic oligonucleotide
  Sense Strand Starting at position 581 of SEQ ID NO: 317995
gaauguguagggugaguau

SEQ ID NO: 364332 - RNA, 19 nt, Artificial Sequence
  Description of Artificial Sequence: Synthetic oligonucleotide
  Antisense Strand to SEQ ID NO: 364331
auacucacccuacacauuc

SEQ ID NO: 364333 - RNA, 19 nt, Artificial Sequence
  Description of Artificial Sequence: Synthetic oligonucleotide
  Sense Strand Starting at position 581 of SEQ ID NO: 318081
gggugucaguuugaaguua

SEQ ID NO: 364334 - RNA, 19 nt, Artificial Sequence
  Description of Artificial Sequence: Synthetic oligonucleotide
  Antisense Strand to SEQ ID NO: 364333
uaacuucaaacugacaccc

SEQ ID NO: 364335 - RNA, 19 nt, Artificial Sequence
  Description of Artificial Sequence: Synthetic oligonucleotide
  Sense Strand Starting at position 581 of SEQ ID NO: 318089
guuugaaguuaauggaaug

SEQ ID NO: 364336 - RNA, 19 nt, Artificial Sequence
  Description of Artificial Sequence: Synthetic oligonucleotide
  Antisense Strand to SEQ ID NO: 364335
cauuccauuaacuucaaac

SEQ ID NO: 364337 - RNA, 19 nt, Artificial Sequence
  Description of Artificial Sequence: Synthetic oligonucleotide
  Sense Strand Starting at position 581 of SEQ ID NO: 318156
guacaauguguaggacaga

SEQ ID NO: 364338 - RNA, 19 nt, Artificial Sequence
  Description of Artificial Sequence: Synthetic oligonucleotide
  Antisense Strand to SEQ ID NO: 364337
ucuguccuacacauuguac

SEQ ID NO: 364339 - RNA, 19 nt, Artificial Sequence
  Description of Artificial Sequence: Synthetic oligonucleotide
  Sense Strand Starting at position 581 of SEQ ID NO: 318223
ccgggagaccucugucaau

SEQ ID NO: 364340 - RNA, 19 nt, Artificial Sequence
  Description of Artificial Sequence: Synthetic oligonucleotide
  Antisense Strand to SEQ ID NO: 364339
auugacagaggucucccgg

SEQ ID NO: 364341 - RNA, 19 nt, Artificial Sequence
  Description of Artificial Sequence: Synthetic oligonucleotide
  Sense Strand Starting at position 581 of SEQ ID NO: 318226
ggagaccucugucaauuua

SEQ ID NO: 364342 - RNA, 19 nt, Artificial Sequence
  Description of Artificial Sequence: Synthetic oligonucleotide
  Antisense Strand to SEQ ID NO: 364341
uaaauugacagaggucucc

SEQ ID NO: 364343 - RNA, 19 nt, Artificial Sequence
  Description of Artificial Sequence: Synthetic oligonucleotide
  Sense Strand Starting at position 581 of SEQ ID NO: 318274
agccacuagucaccacauu

SEQ ID NO: 364344 - RNA, 19 nt, Artificial Sequence
  Description of Artificial Sequence: Synthetic oligonucleotide
  Antisense Strand to SEQ ID NO: 364343
aauguggugacuaguggcu

SEQ ID NO: 364345 - RNA, 19 nt, Artificial Sequence
  Description of Artificial Sequence: Synthetic oligonucleotide
  Sense Strand Starting at position 581 of SEQ ID NO: 318288
acauuccuguccgugguaa

SEQ ID NO: 364346 - RNA, 19 nt, Artificial Sequence
  Description of Artificial Sequence: Synthetic oligonucleotide
  Antisense Strand to SEQ ID NO: 364345
uuaccacggacaggaaugu

SEQ ID NO: 364347 - RNA, 19 nt, Artificial Sequence
  Description of Artificial Sequence: Synthetic oligonucleotide
  Sense Strand Starting at position 581 of SEQ ID NO: 318289
cauuccuguccgugguaau

SEQ ID NO: 364348 - RNA, 19 nt, Artificial Sequence
  Description of Artificial Sequence: Synthetic oligonucleotide
  Antisense Strand to SEQ ID NO: 364347
auuaccacggacaggaaug

SEQ ID NO: 364349 - RNA, 19 nt, Artificial Sequence
  Description of Artificial Sequence: Synthetic oligonucleotide
  Sense Strand Starting at position 581 of SEQ ID NO: 318290
auuccuguccgugguaaua

SEQ ID NO: 364350 - RNA, 19 nt, Artificial Sequence
  Description of Artificial Sequence: Synthetic oligonucleotide
  Antisense Strand to SEQ ID NO: 364349
uauuaccacggacaggaau

SEQ ID NO: 364351 - RNA, 19 nt, Artificial Sequence
  Description of Artificial Sequence: Synthetic oligonucleotide
  Sense Strand Starting at position 581 of SEQ ID NO: 318303
guaauagcaaugcagugau

SEQ ID NO: 364352 - RNA, 19 nt, Artificial Sequence
  Description of Artificial Sequence: Synthetic oligonucleotide
  Antisense Strand to SEQ ID NO: 364351
aucacugcauugcuauuac

SEQ ID NO: 364353 - RNA, 19 nt, Artificial Sequence
  Description of Artificial Sequence: Synthetic oligonucleotide
  Sense Strand Starting at position 581 of SEQ ID NO: 318306
auagcaaugcagugauauu

SEQ ID NO: 364354 - RNA, 19 nt, Artificial Sequence
  Description of Artificial Sequence: Synthetic oligonucleotide
  Antisense Strand to SEQ ID NO: 364353
aauaucacugcauugcuau

SEQ ID NO: 364355 - RNA, 19 nt, Artificial Sequence
  Description of Artificial Sequence: Synthetic oligonucleotide
  Sense Strand Starting at position 581 of SEQ ID NO: 318349
agagaucaugccuggcuca

SEQ ID NO: 364356 - RNA, 19 nt, Artificial Sequence
  Description of Artificial Sequence: Synthetic oligonucleotide
  Antisense Strand to SEQ ID NO: 364355
ugagccaggcaugaucucu

SEQ ID NO: 364357 - RNA, 19 nt, Artificial Sequence
  Description of Artificial Sequence: Synthetic oligonucleotide
  Sense Strand Starting at position 581 of SEQ ID NO: 318429
cccugagccuuggcucuaa

SEQ ID NO: 364358 - RNA, 19 nt, Artificial Sequence
  Description of Artificial Sequence: Synthetic oligonucleotide
  Antisense Strand to SEQ ID NO: 364357
uuagagccaaggcucaggg

SEQ ID NO: 364359 - RNA, 19 nt, Artificial Sequence
  Description of Artificial Sequence: Synthetic oligonucleotide
  Sense Strand Starting at position 581 of SEQ ID NO: 318496
ccgguucucaucguuucua

SEQ ID NO: 364360 - RNA, 19 nt, Artificial Sequence
  Description of Artificial Sequence: Synthetic oligonucleotide
  Antisense Strand to SEQ ID NO: 364359
uagaaacgaugagaaccgg

SEQ ID NO: 364361 - RNA, 19 nt, Artificial Sequence
  Description of Artificial Sequence: Synthetic oligonucleotide
  Sense Strand Starting at position 581 of SEQ ID NO: 318500
uucucaucguuucuagaaa

SEQ ID NO: 364362 - RNA, 19 nt, Artificial Sequence
  Description of Artificial Sequence: Synthetic oligonucleotide
  Antisense Strand to SEQ ID NO: 364361
uuucuagaaacgaugagaa

SEQ ID NO: 364363 - RNA, 19 nt, Artificial Sequence
  Description of Artificial Sequence: Synthetic oligonucleotide
  Sense Strand Starting at position 581 of SEQ ID NO: 318678
gagacugaaugggaacuau

SEQ ID NO: 364364 - RNA, 19 nt, Artificial Sequence
  Description of Artificial Sequence: Synthetic oligonucleotide
  Antisense Strand to SEQ ID NO: 364363
auaguucccauucagucuc

SEQ ID NO: 364365 - RNA, 19 nt, Artificial Sequence
  Description of Artificial Sequence: Synthetic oligonucleotide
  Sense Strand Starting at position 581 of SEQ ID NO: 318686
augggaacuauguggguaa

SEQ ID NO: 364366 - RNA, 19 nt, Artificial Sequence
  Description of Artificial Sequence: Synthetic oligonucleotide
  Antisense Strand to SEQ ID NO: 364365
uuacccacauaguucccau

SEQ ID NO: 364367 - RNA, 19 nt, Artificial Sequence
  Description of Artificial Sequence: Synthetic oligonucleotide
  Sense Strand Starting at position 581 of SEQ ID NO: 318687
ugggaacuauguggguaau

SEQ ID NO: 364368 - RNA, 19 nt, Artificial Sequence
  Description of Artificial Sequence: Synthetic oligonucleotide
  Antisense Strand to SEQ ID NO: 364367
auuacccacauaguuccca

SEQ ID NO: 364369 - RNA, 19 nt, Artificial Sequence
  Description of Artificial Sequence: Synthetic oligonucleotide
  Sense Strand Starting at position 581 of SEQ ID NO: 318698
uggguaauggaauguucua

SEQ ID NO: 364370 - RNA, 19 nt, Artificial Sequence
  Description of Artificial Sequence: Synthetic oligonucleotide
  Antisense Strand to SEQ ID NO: 364369
uagaacauuccauuaccca

SEQ ID NO: 364371 - RNA, 19 nt, Artificial Sequence
  Description of Artificial Sequence: Synthetic oligonucleotide
  Sense Strand Starting at position 581 of SEQ ID NO: 318703
aauggaauguucuagauuu

SEQ ID NO: 364372 - RNA, 19 nt, Artificial Sequence
  Description of Artificial Sequence: Synthetic oligonucleotide
  Antisense Strand to SEQ ID NO: 364371
aaaucuagaacauuccauu

SEQ ID NO: 364373 - RNA, 19 nt, Artificial Sequence
  Description of Artificial Sequence: Synthetic oligonucleotide
  Sense Strand Starting at position 581 of SEQ ID NO: 318789
agcugugucaccuaggcua

SEQ ID NO: 364374 - RNA, 19 nt, Artificial Sequence
  Description of Artificial Sequence: Synthetic oligonucleotide
  Antisense Strand to SEQ ID NO: 364373
uagccuaggugacacagcu

SEQ ID NO: 364375 - RNA, 19 nt, Artificial Sequence
  Description of Artificial Sequence: Synthetic oligonucleotide
  Sense Strand Starting at position 581 of SEQ ID NO: 319033
gccugcaauguucuguauu

SEQ ID NO: 364376 - RNA, 19 nt, Artificial Sequence
  Description of Artificial Sequence: Synthetic oligonucleotide
  Antisense Strand to SEQ ID NO: 364375
aauacagaacauugcaggc

SEQ ID NO: 364377 - RNA, 19 nt, Artificial Sequence
  Description of Artificial Sequence: Synthetic oligonucleotide
  Sense Strand Starting at position 581 of SEQ ID NO: 319034
ccugcaauguucuguauuu

SEQ ID NO: 364378 - RNA, 19 nt, Artificial Sequence
  Description of Artificial Sequence: Synthetic oligonucleotide
  Antisense Strand to SEQ ID NO: 364377
aaauacagaacauugcagg

SEQ ID NO: 364379 - RNA, 19 nt, Artificial Sequence
  Description of Artificial Sequence: Synthetic oligonucleotide
  Sense Strand Starting at position 581 of SEQ ID NO: 319065
uggucacacagguguauaa

SEQ ID NO: 364380 - RNA, 19 nt, Artificial Sequence
  Description of Artificial Sequence: Synthetic oligonucleotide
  Antisense Strand to SEQ ID NO: 364379
uuauacaccugugugacca

SEQ ID NO: 364381 - RNA, 19 nt, Artificial Sequence
  Description of Artificial Sequence: Synthetic oligonucleotide
  Sense Strand Starting at position 581 of SEQ ID NO: 319210
cuaggauccaaguguguuu

SEQ ID NO: 364382 - RNA, 19 nt, Artificial Sequence
  Description of Artificial Sequence: Synthetic oligonucleotide
  Antisense Strand to SEQ ID NO: 364381
aaacacacuuggauccuag

SEQ ID NO: 364383 - RNA, 19 nt, Artificial Sequence
  Description of Artificial Sequence: Synthetic oligonucleotide
  Sense Strand Starting at position 582 of SEQ ID NO: 315276
auggguucccuuggaagag

SEQ ID NO: 364384 - RNA, 19 nt, Artificial Sequence
  Description of Artificial Sequence: Synthetic oligonucleotide
  Antisense Strand to SEQ ID NO: 364383
cucuuccaagggaacccau

SEQ ID NO: 364385 - RNA, 19 nt, Artificial Sequence
  Description of Artificial Sequence: Synthetic oligonucleotide
  Sense Strand Starting at position 582 of SEQ ID NO: 315829
ugcuucugaggacauuaua

SEQ ID NO: 364386 - RNA, 19 nt, Artificial Sequence
  Description of Artificial Sequence: Synthetic oligonucleotide
  Antisense Strand to SEQ ID NO: 364385
uauaauguccucagaagca

SEQ ID NO: 364387 - RNA, 19 nt, Artificial Sequence
  Description of Artificial Sequence: Synthetic oligonucleotide
  Sense Strand Starting at position 582 of SEQ ID NO: 316313
cugaucuucugaucugaau

SEQ ID NO: 364388 - RNA, 19 nt, Artificial Sequence
  Description of Artificial Sequence: Synthetic oligonucleotide
  Antisense Strand to SEQ ID NO: 364387
auucagaucagaagaucag

SEQ ID NO: 364389 - RNA, 19 nt, Artificial Sequence
  Description of Artificial Sequence: Synthetic oligonucleotide
  Sense Strand Starting at position 582 of SEQ ID NO: 316405
ggcugacugaggcaucauu

SEQ ID NO: 364390 - RNA, 19 nt, Artificial Sequence
  Description of Artificial Sequence: Synthetic oligonucleotide
  Antisense Strand to SEQ ID NO: 364389
aaugaugccucagucagcc

SEQ ID NO: 364391 - RNA, 19 nt, Artificial Sequence
  Description of Artificial Sequence: Synthetic oligonucleotide
  Sense Strand Starting at position 582 of SEQ ID NO: 316443
gucucucuuggaugcaaga

SEQ ID NO: 364392 - RNA, 19 nt, Artificial Sequence
  Description of Artificial Sequence: Synthetic oligonucleotide
  Antisense Strand to SEQ ID NO: 364391
ucuugcauccaagagagac

SEQ ID NO: 364393 - RNA, 19 nt, Artificial Sequence
  Description of Artificial Sequence: Synthetic oligonucleotide
  Sense Strand Starting at position 582 of SEQ ID NO: 316604
gcaaguguauggucaguaa

SEQ ID NO: 364394 - RNA, 19 nt, Artificial Sequence
  Description of Artificial Sequence: Synthetic oligonucleotide
  Antisense Strand to SEQ ID NO: 364393
uuacugaccauacacuugc

SEQ ID NO: 364395 - RNA, 19 nt, Artificial Sequence
  Description of Artificial Sequence: Synthetic oligonucleotide
  Sense Strand Starting at position 582 of SEQ ID NO: 316608
guguauggucaguaagggu

SEQ ID NO: 364396 - RNA, 19 nt, Artificial Sequence
  Description of Artificial Sequence: Synthetic oligonucleotide
  Antisense Strand to SEQ ID NO: 364395
acccuuacugaccauacac

SEQ ID NO: 364397 - RNA, 19 nt, Artificial Sequence
  Description of Artificial Sequence: Synthetic oligonucleotide
  Sense Strand Starting at position 582 of SEQ ID NO: 316623
gggucuuuauuggaagaga

SEQ ID NO: 364398 - RNA, 19 nt, Artificial Sequence
  Description of Artificial Sequence: Synthetic oligonucleotide
  Antisense Strand to SEQ ID NO: 364397
ucucuuccaauaaagaccc

SEQ ID NO: 364399 - RNA, 19 nt, Artificial Sequence
  Description of Artificial Sequence: Synthetic oligonucleotide
  Sense Strand Starting at position 582 of SEQ ID NO: 316668
gcccuaggucaugaggauu

SEQ ID NO: 364400 - RNA, 19 nt, Artificial Sequence
  Description of Artificial Sequence: Synthetic oligonucleotide
  Antisense Strand to SEQ ID NO: 364399
aauccucaugaccuagggc

SEQ ID NO: 364401 - RNA, 19 nt, Artificial Sequence
  Description of Artificial Sequence: Synthetic oligonucleotide
  Sense Strand Starting at position 582 of SEQ ID NO: 316766
gccagugagacuggaugau

SEQ ID NO: 364402 - RNA, 19 nt, Artificial Sequence
  Description of Artificial Sequence: Synthetic oligonucleotide
  Antisense Strand to SEQ ID NO: 364401
aucauccagucucacuggc

SEQ ID NO: 364403 - RNA, 19 nt, Artificial Sequence
  Description of Artificial Sequence: Synthetic oligonucleotide
  Sense Strand Starting at position 582 of SEQ ID NO: 316898
gccgucuuugcuccaacau

SEQ ID NO: 364404 - RNA, 19 nt, Artificial Sequence
  Description of Artificial Sequence: Synthetic oligonucleotide
  Antisense Strand to SEQ ID NO: 364403
auguuggagcaaagacggc

SEQ ID NO: 364405 - RNA, 19 nt, Artificial Sequence
  Description of Artificial Sequence: Synthetic oligonucleotide
  Sense Strand Starting at position 582 of SEQ ID NO: 317023
auggcugucuucucuaacu

SEQ ID NO: 364406 - RNA, 19 nt, Artificial Sequence
  Description of Artificial Sequence: Synthetic oligonucleotide
  Antisense Strand to SEQ ID NO: 364405
aguuagagaagacagccau

SEQ ID NO: 364407 - RNA, 19 nt, Artificial Sequence
  Description of Artificial Sequence: Synthetic oligonucleotide
  Sense Strand Starting at position 582 of SEQ ID NO: 317025
ggcugucuucucuaacuga

SEQ ID NO: 364408 - RNA, 19 nt, Artificial Sequence
  Description of Artificial Sequence: Synthetic oligonucleotide
  Antisense Strand to SEQ ID NO: 364407
ucaguuagagaagacagcc

SEQ ID NO: 364409 - RNA, 19 nt, Artificial Sequence
  Description of Artificial Sequence: Synthetic oligonucleotide
  Sense Strand Starting at position 582 of SEQ ID NO: 317028
ugucuucucuaacugauug

SEQ ID NO: 364410 - RNA, 19 nt, Artificial Sequence
  Description of Artificial Sequence: Synthetic oligonucleotide
  Antisense Strand to SEQ ID NO: 364409
caaucaguuagagaagaca

SEQ ID NO: 364411 - RNA, 19 nt, Artificial Sequence
  Description of Artificial Sequence: Synthetic oligonucleotide
  Sense Strand Starting at position 582 of SEQ ID NO: 317109
cucugaucuugggaggaaa

SEQ ID NO: 364412 - RNA, 19 nt, Artificial Sequence
  Description of Artificial Sequence: Synthetic oligonucleotide
  Antisense Strand to SEQ ID NO: 364411
uuuccucccaagaucagag

SEQ ID NO: 364413 - RNA, 19 nt, Artificial Sequence
  Description of Artificial Sequence: Synthetic oligonucleotide
  Sense Strand Starting at position 582 of SEQ ID NO: 317289
guccacuuaucugucacuu

SEQ ID NO: 364414 - RNA, 19 nt, Artificial Sequence
  Description of Artificial Sequence: Synthetic oligonucleotide
  Antisense Strand to SEQ ID NO: 364413
aagugacagauaaguggac

SEQ ID NO: 364415 - RNA, 19 nt, Artificial Sequence
  Description of Artificial Sequence: Synthetic oligonucleotide
  Sense Strand Starting at position 582 of SEQ ID NO: 317575
gcagcuuaccuacaaggaa

SEQ ID NO: 364416 - RNA, 19 nt, Artificial Sequence
  Description of Artificial Sequence: Synthetic oligonucleotide
  Antisense Strand to SEQ ID NO: 364415
uuccuuguagguaagcugc

SEQ ID NO: 364417 - RNA, 19 nt, Artificial Sequence
  Description of Artificial Sequence: Synthetic oligonucleotide
  Sense Strand Starting at position 582 of SEQ ID NO: 317671
cgaggaacguguuuacaga

SEQ ID NO: 364418 - RNA, 19 nt, Artificial Sequence
  Description of Artificial Sequence: Synthetic oligonucleotide
  Antisense Strand to SEQ ID NO: 364417
ucuguaaacacguuccucg

SEQ ID NO: 364419 - RNA, 19 nt, Artificial Sequence
  Description of Artificial Sequence: Synthetic oligonucleotide
  Sense Strand Starting at position 582 of SEQ ID NO: 318164
ggccuagacucaguuuaac

SEQ ID NO: 364420 - RNA, 19 nt, Artificial Sequence
  Description of Artificial Sequence: Synthetic oligonucleotide
  Antisense Strand to SEQ ID NO: 364419
guuaaacugagucuaggcc

SEQ ID NO: 364421 - RNA, 19 nt, Artificial Sequence
  Description of Artificial Sequence: Synthetic oligonucleotide
  Sense Strand Starting at position 582 of SEQ ID NO: 318173
ucaguuuaacagcauagau

SEQ ID NO: 364422 - RNA, 19 nt, Artificial Sequence
  Description of Artificial Sequence: Synthetic oligonucleotide
  Antisense Strand to SEQ ID NO: 364421
aucuaugcuguuaaacuga

SEQ ID NO: 364423 - RNA, 19 nt, Artificial Sequence
  Description of Artificial Sequence: Synthetic oligonucleotide
  Sense Strand Starting at position 582 of SEQ ID NO: 318267
uugcucauggcgugaagau

SEQ ID NO: 364424 - RNA, 19 nt, Artificial Sequence
  Description of Artificial Sequence: Synthetic oligonucleotide
  Antisense Strand to SEQ ID NO: 364423
aucuucacgccaugagcaa

SEQ ID NO: 364425 - RNA, 19 nt, Artificial Sequence
  Description of Artificial Sequence: Synthetic oligonucleotide
  Sense Strand Starting at position 582 of SEQ ID NO: 318300
gcugcuauccaauaagaac

SEQ ID NO: 364426 - RNA, 19 nt, Artificial Sequence
  Description of Artificial Sequence: Synthetic oligonucleotide
  Antisense Strand to SEQ ID NO: 364425
guucuuauuggauagcagc

SEQ ID NO: 364427 - RNA, 19 nt, Artificial Sequence
  Description of Artificial Sequence: Synthetic oligonucleotide
  Sense Strand Starting at position 582 of SEQ ID NO: 318389
agaagccagucuguagaaa

SEQ ID NO: 364428 - RNA, 19 nt, Artificial Sequence
  Description of Artificial Sequence: Synthetic oligonucleotide
  Antisense Strand to SEQ ID NO: 364427
uuucuacagacuggcuucu

SEQ ID NO: 364429 - RNA, 19 nt, Artificial Sequence
  Description of Artificial Sequence: Synthetic oligonucleotide
  Sense Strand Starting at position 582 of SEQ ID NO: 318414
ccuguuauuagauguguaa

SEQ ID NO: 364430 - RNA, 19 nt, Artificial Sequence
  Description of Artificial Sequence: Synthetic oligonucleotide
  Antisense Strand to SEQ ID NO: 364429
uuacacaucuaauaacagg

SEQ ID NO: 364431 - RNA, 19 nt, Artificial Sequence
  Description of Artificial Sequence: Synthetic oligonucleotide
  Sense Strand Starting at position 582 of SEQ ID NO: 318455
ucucauugaugccugauua

SEQ ID NO: 364432 - RNA, 19 nt, Artificial Sequence
  Description of Artificial Sequence: Synthetic oligonucleotide
  Antisense Strand to SEQ ID NO: 364431
uaaucaggcaucaaugaga

SEQ ID NO: 364433 - RNA, 19 nt, Artificial Sequence
  Description of Artificial Sequence: Synthetic oligonucleotide
  Sense Strand Starting at position 582 of SEQ ID NO: 318456
cucauugaugccugauuaa

SEQ ID NO: 364434 - RNA, 19 nt, Artificial Sequence
  Description of Artificial Sequence: Synthetic oligonucleotide
  Antisense Strand to SEQ ID NO: 364433
uuaaucaggcaucaaugag

SEQ ID NO: 364435 - RNA, 19 nt, Artificial Sequence
  Description of Artificial Sequence: Synthetic oligonucleotide
  Sense Strand Starting at position 582 of SEQ ID NO: 318505
uugacaaugcaaugauaca

SEQ ID NO: 364436 - RNA, 19 nt, Artificial Sequence
  Description of Artificial Sequence: Synthetic oligonucleotide
  Antisense Strand to SEQ ID NO: 364435
uguaucauugcauugucaa

SEQ ID NO: 364437 - RNA, 19 nt, Artificial Sequence
  Description of Artificial Sequence: Synthetic oligonucleotide
  Sense Strand Starting at position 582 of SEQ ID NO: 318581
uuaucugaauuccugugau

SEQ ID NO: 364438 - RNA, 19 nt, Artificial Sequence
  Description of Artificial Sequence: Synthetic oligonucleotide
  Antisense Strand to SEQ ID NO: 364437
aucacaggaauucagauaa

SEQ ID NO: 364439 - RNA, 19 nt, Artificial Sequence
  Description of Artificial Sequence: Synthetic oligonucleotide
  Sense Strand Starting at position 582 of SEQ ID NO: 318584
ucugaauuccugugauugu

SEQ ID NO: 364440 - RNA, 19 nt, Artificial Sequence
  Description of Artificial Sequence: Synthetic oligonucleotide
  Antisense Strand to SEQ ID NO: 364439
acaaucacaggaauucaga

SEQ ID NO: 364441 - RNA, 19 nt, Artificial Sequence
  Description of Artificial Sequence: Synthetic oligonucleotide
  Sense Strand Starting at position 582 of SEQ ID NO: 318634
cguggaagucagugugaaa

SEQ ID NO: 364442 - RNA, 19 nt, Artificial Sequence
  Description of Artificial Sequence: Synthetic oligonucleotide
  Antisense Strand to SEQ ID NO: 364441
uuucacacugacuuccacg

SEQ ID NO: 364443 - RNA, 19 nt, Artificial Sequence
  Description of Artificial Sequence: Synthetic oligonucleotide
  Sense Strand Starting at position 582 of SEQ ID NO: 318744
agguuaugcagcugaaaug

SEQ ID NO: 364444 - RNA, 19 nt, Artificial Sequence
  Description of Artificial Sequence: Synthetic oligonucleotide
  Antisense Strand to SEQ ID NO: 364443
cauuucagcugcauaaccu

SEQ ID NO: 364445 - RNA, 19 nt, Artificial Sequence
  Description of Artificial Sequence: Synthetic oligonucleotide
  Sense Strand Starting at position 582 of SEQ ID NO: 318745
gguuaugcagcugaaaugu

SEQ ID NO: 364446 - RNA, 19 nt, Artificial Sequence
  Description of Artificial Sequence: Synthetic oligonucleotide
  Antisense Strand to SEQ ID NO: 364445
acauuucagcugcauaacc

SEQ ID NO: 364447 - RNA, 19 nt, Artificial Sequence
  Description of Artificial Sequence: Synthetic oligonucleotide
  Sense Strand Starting at position 582 of SEQ ID NO: 318751
gcagcugaaauguaggaaa

SEQ ID NO: 364448 - RNA, 19 nt, Artificial Sequence
  Description of Artificial Sequence: Synthetic oligonucleotide
  Antisense Strand to SEQ ID NO: 364447
uuuccuacauuucagcugc

SEQ ID NO: 364449 - RNA, 19 nt, Artificial Sequence
  Description of Artificial Sequence: Synthetic oligonucleotide
  Sense Strand Starting at position 582 of SEQ ID NO: 318774
agaggugggucaguuaauu

SEQ ID NO: 364450 - RNA, 19 nt, Artificial Sequence
  Description of Artificial Sequence: Synthetic oligonucleotide
  Antisense Strand to SEQ ID NO: 364449
aauuaacugacccaccucu

SEQ ID NO: 364451 - RNA, 19 nt, Artificial Sequence
  Description of Artificial Sequence: Synthetic oligonucleotide
  Sense Strand Starting at position 582 of SEQ ID NO: 318835
guauaacuguuguaauuuc

SEQ ID NO: 364452 - RNA, 19 nt, Artificial Sequence
  Description of Artificial Sequence: Synthetic oligonucleotide
  Antisense Strand to SEQ ID NO: 364451
gaaauuacaacaguuauac

SEQ ID NO: 364453 - RNA, 19 nt, Artificial Sequence
  Description of Artificial Sequence: Synthetic oligonucleotide
  Sense Strand Starting at position 582 of SEQ ID NO: 318914
aaaguaggcuuucuaaaug

SEQ ID NO: 364454 - RNA, 19 nt, Artificial Sequence
  Description of Artificial Sequence: Synthetic oligonucleotide
  Antisense Strand to SEQ ID NO: 364453
cauuuagaaagccuacuuu

SEQ ID NO: 364455 - RNA, 19 nt, Artificial Sequence
  Description of Artificial Sequence: Synthetic oligonucleotide
  Sense Strand Starting at position 582 of SEQ ID NO: 318966
ccugccucacuguaagaau

SEQ ID NO: 364456 - RNA, 19 nt, Artificial Sequence
  Description of Artificial Sequence: Synthetic oligonucleotide
  Antisense Strand to SEQ ID NO: 364455
auucuuacagugaggcagg

SEQ ID NO: 364457 - RNA, 19 nt, Artificial Sequence
  Description of Artificial Sequence: Synthetic oligonucleotide
  Sense Strand Starting at position 582 of SEQ ID NO: 318996
agcagaucuccugggagcu

SEQ ID NO: 364458 - RNA, 19 nt, Artificial Sequence
  Description of Artificial Sequence: Synthetic oligonucleotide
  Antisense Strand to SEQ ID NO: 364457
agcucccaggagaucugcu

SEQ ID NO: 364459 - RNA, 19 nt, Artificial Sequence
  Description of Artificial Sequence: Synthetic oligonucleotide
  Sense Strand Starting at position 582 of SEQ ID NO: 319185
gccucauaucauugcuaug

SEQ ID NO: 364460 - RNA, 19 nt, Artificial Sequence
  Description of Artificial Sequence: Synthetic oligonucleotide
  Antisense Strand to SEQ ID NO: 364459
cauagcaaugauaugaggc

SEQ ID NO: 364461 - RNA, 19 nt, Artificial Sequence
  Description of Artificial Sequence: Synthetic oligonucleotide
  Sense Strand Starting at position 582 of SEQ ID NO: 319190
auaucauugcuauggcacu

SEQ ID NO: 364462 - RNA, 19 nt, Artificial Sequence
  Description of Artificial Sequence: Synthetic oligonucleotide
  Antisense Strand to SEQ ID NO: 364461
agugccauagcaaugauau

SEQ ID NO: 364463 - RNA, 19 nt, Artificial Sequence
  Description of Artificial Sequence: Synthetic oligonucleotide
  Sense Strand Starting at position 583 of SEQ ID NO: 315617
cugacacuuguccaaguga

SEQ ID NO: 364464 - RNA, 19 nt, Artificial Sequence
  Description of Artificial Sequence: Synthetic oligonucleotide
  Antisense Strand to SEQ ID NO: 364463
ucacuuggacaagugucag

SEQ ID NO: 364465 - RNA, 19 nt, Artificial Sequence
  Description of Artificial Sequence: Synthetic oligonucleotide
  Sense Strand Starting at position 583 of SEQ ID NO: 315743
cuagacaacuguuccauga

SEQ ID NO: 364466 - RNA, 19 nt, Artificial Sequence
  Description of Artificial Sequence: Synthetic oligonucleotide
  Antisense Strand to SEQ ID NO: 364465
ucauggaacaguugucuag

SEQ ID NO: 364467 - RNA, 19 nt, Artificial Sequence
  Description of Artificial Sequence: Synthetic oligonucleotide
  Sense Strand Starting at position 583 of SEQ ID NO: 315747
acaacuguuccaugaaagc

SEQ ID NO: 364468 - RNA, 19 nt, Artificial Sequence
  Description of Artificial Sequence: Synthetic oligonucleotide
  Antisense Strand to SEQ ID NO: 364467
gcuuucauggaacaguugu

SEQ ID NO: 364469 - RNA, 19 nt, Artificial Sequence
  Description of Artificial Sequence: Synthetic oligonucleotide
  Sense Strand Starting at position 583 of SEQ ID NO: 315789
aguuguaucaggugcuaag

SEQ ID NO: 364470 - RNA, 19 nt, Artificial Sequence
  Description of Artificial Sequence: Synthetic oligonucleotide
  Antisense Strand to SEQ ID NO: 364469
cuuagcaccugauacaacu

SEQ ID NO: 364471 - RNA, 19 nt, Artificial Sequence
  Description of Artificial Sequence: Synthetic oligonucleotide
  Sense Strand Starting at position 583 of SEQ ID NO: 315806
agucucagugcucaauaag

SEQ ID NO: 364472 - RNA, 19 nt, Artificial Sequence
  Description of Artificial Sequence: Synthetic oligonucleotide
  Antisense Strand to SEQ ID NO: 364471
cuuauugagcacugagacu

SEQ ID NO: 364473 - RNA, 19 nt, Artificial Sequence
  Description of Artificial Sequence: Synthetic oligonucleotide
  Sense Strand Starting at position 583 of SEQ ID NO: 315809
cucagugcucaauaaguau

SEQ ID NO: 364474 - RNA, 19 nt, Artificial Sequence
  Description of Artificial Sequence: Synthetic oligonucleotide
  Antisense Strand to SEQ ID NO: 364473
auacuuauugagcacugag

SEQ ID NO: 364475 - RNA, 19 nt, Artificial Sequence
  Description of Artificial Sequence: Synthetic oligonucleotide
  Sense Strand Starting at position 583 of SEQ ID NO: 315847
cgagcaaacgaaugaaacu

SEQ ID NO: 364476 - RNA, 19 nt, Artificial Sequence
  Description of Artificial Sequence: Synthetic oligonucleotide
  Antisense Strand to SEQ ID NO: 364475
aguuucauucguuugcucg

SEQ ID NO: 364477 - RNA, 19 nt, Artificial Sequence
  Description of Artificial Sequence: Synthetic oligonucleotide
  Sense Strand Starting at position 583 of SEQ ID NO: 316011
uguuguauuuaagagagga

SEQ ID NO: 364478 - RNA, 19 nt, Artificial Sequence
  Description of Artificial Sequence: Synthetic oligonucleotide
  Antisense Strand to SEQ ID NO: 364477
uccucucuuaaauacaaca

SEQ ID NO: 364479 - RNA, 19 nt, Artificial Sequence
  Description of Artificial Sequence: Synthetic oligonucleotide
  Sense Strand Starting at position 583 of SEQ ID NO: 316390
uggccucucugcuuaauuu

SEQ ID NO: 364480 - RNA, 19 nt, Artificial Sequence
  Description of Artificial Sequence: Synthetic oligonucleotide
  Antisense Strand to SEQ ID NO: 364479
aaauuaagcagagaggcca

SEQ ID NO: 364481 - RNA, 19 nt, Artificial Sequence
  Description of Artificial Sequence: Synthetic oligonucleotide
  Sense Strand Starting at position 583 of SEQ ID NO: 316430
ucuaacgugucaucuauuu

SEQ ID NO: 364482 - RNA, 19 nt, Artificial Sequence
  Description of Artificial Sequence: Synthetic oligonucleotide
  Antisense Strand to SEQ ID NO: 364481
aaauagaugacacguuaga

SEQ ID NO: 364483 - RNA, 19 nt, Artificial Sequence
  Description of Artificial Sequence: Synthetic oligonucleotide
  Sense Strand Starting at position 583 of SEQ ID NO: 316507
uuguuuacugccgugucau

SEQ ID NO: 364484 - RNA, 19 nt, Artificial Sequence
  Description of Artificial Sequence: Synthetic oligonucleotide
  Antisense Strand to SEQ ID NO: 364483
augacacggcaguaaacaa

SEQ ID NO: 364485 - RNA, 19 nt, Artificial Sequence
  Description of Artificial Sequence: Synthetic oligonucleotide
  Sense Strand Starting at position 583 of SEQ ID NO: 316616
auaauucggaaaugugaau

SEQ ID NO: 364486 - RNA, 19 nt, Artificial Sequence
  Description of Artificial Sequence: Synthetic oligonucleotide
  Antisense Strand to SEQ ID NO: 364485
auucacauuuccgaauuau

SEQ ID NO: 364487 - RNA, 19 nt, Artificial Sequence
  Description of Artificial Sequence: Synthetic oligonucleotide
  Sense Strand Starting at position 583 of SEQ ID NO: 316703
cuaaacgaguucuccuaaa

SEQ ID NO: 364488 - RNA, 19 nt, Artificial Sequence
  Description of Artificial Sequence: Synthetic oligonucleotide
  Antisense Strand to SEQ ID NO: 364487
uuuaggagaacucguuuag

SEQ ID NO: 364489 - RNA, 19 nt, Artificial Sequence
  Description of Artificial Sequence: Synthetic oligonucleotide
  Sense Strand Starting at position 583 of SEQ ID NO: 316948
agucucauuucuugaaaga

SEQ ID NO: 364490 - RNA, 19 nt, Artificial Sequence
  Description of Artificial Sequence: Synthetic oligonucleotide
  Antisense Strand to SEQ ID NO: 364489
ucuuucaagaaaugagacu

SEQ ID NO: 364491 - RNA, 19 nt, Artificial Sequence
  Description of Artificial Sequence: Synthetic oligonucleotide
  Sense Strand Starting at position 583 of SEQ ID NO: 317065
agauuaggaucccagaauu

SEQ ID NO: 364492 - RNA, 19 nt, Artificial Sequence
  Description of Artificial Sequence: Synthetic oligonucleotide
  Antisense Strand to SEQ ID NO: 364491
aauucugggauccuaaucu

SEQ ID NO: 364493 - RNA, 19 nt, Artificial Sequence
  Description of Artificial Sequence: Synthetic oligonucleotide
  Sense Strand Starting at position 583 of SEQ ID NO: 317075
cccagaauuuccguucugu

SEQ ID NO: 364494 - RNA, 19 nt, Artificial Sequence
  Description of Artificial Sequence: Synthetic oligonucleotide
  Antisense Strand to SEQ ID NO: 364493
acagaacggaaauucuggg

SEQ ID NO: 364495 - RNA, 19 nt, Artificial Sequence
  Description of Artificial Sequence: Synthetic oligonucleotide
  Sense Strand Starting at position 583 of SEQ ID NO: 317090
cugucuauugcugugugua

SEQ ID NO: 364496 - RNA, 19 nt, Artificial Sequence
  Description of Artificial Sequence: Synthetic oligonucleotide
  Antisense Strand to SEQ ID NO: 364495
uacacacagcaauagacag

SEQ ID NO: 364497 - RNA, 19 nt, Artificial Sequence
  Description of Artificial Sequence: Synthetic oligonucleotide
  Sense Strand Starting at position 583 of SEQ ID NO: 317150
gucaaucauucuuuaggca

SEQ ID NO: 364498 - RNA, 19 nt, Artificial Sequence
  Description of Artificial Sequence: Synthetic oligonucleotide
  Antisense Strand to SEQ ID NO: 364497
ugccuaaagaaugauugac

SEQ ID NO: 364499 - RNA, 19 nt, Artificial Sequence
  Description of Artificial Sequence: Synthetic oligonucleotide
  Sense Strand Starting at position 583 of SEQ ID NO: 317226
gaaguaaacuaaguuguuu

SEQ ID NO: 364500 - RNA, 19 nt, Artificial Sequence
  Description of Artificial Sequence: Synthetic oligonucleotide
  Antisense Strand to SEQ ID NO: 364499
aaacaacuuaguuuacuuc

SEQ ID NO: 364501 - RNA, 19 nt, Artificial Sequence
  Description of Artificial Sequence: Synthetic oligonucleotide
  Sense Strand Starting at position 583 of SEQ ID NO: 317256
cacagcuuuggcggauuua

SEQ ID NO: 364502 - RNA, 19 nt, Artificial Sequence
  Description of Artificial Sequence: Synthetic oligonucleotide
  Antisense Strand to SEQ ID NO: 364501
uaaauccgccaaagcugug

SEQ ID NO: 364503 - RNA, 19 nt, Artificial Sequence
  Description of Artificial Sequence: Synthetic oligonucleotide
  Sense Strand Starting at position 583 of SEQ ID NO: 317320
gcagccuaccaagaugaaa

SEQ ID NO: 364504 - RNA, 19 nt, Artificial Sequence
  Description of Artificial Sequence: Synthetic oligonucleotide
  Antisense Strand to SEQ ID NO: 364503
uuucaucuugguaggcugc

SEQ ID NO: 364505 - RNA, 19 nt, Artificial Sequence
  Description of Artificial Sequence: Synthetic oligonucleotide
  Sense Strand Starting at position 583 of SEQ ID NO: 317376
uggcuuauuucagugcgaa

SEQ ID NO: 364506 - RNA, 19 nt, Artificial Sequence
  Description of Artificial Sequence: Synthetic oligonucleotide
  Antisense Strand to SEQ ID NO: 364505
uucgcacugaaauaagcca

SEQ ID NO: 364507 - RNA, 19 nt, Artificial Sequence
  Description of Artificial Sequence: Synthetic oligonucleotide
  Sense Strand Starting at position 583 of SEQ ID NO: 317377
ggcuuauuucagugcgaag

SEQ ID NO: 364508 - RNA, 19 nt, Artificial Sequence
  Description of Artificial Sequence: Synthetic oligonucleotide
  Antisense Strand to SEQ ID NO: 364507
cuucgcacugaaauaagcc

SEQ ID NO: 364509 - RNA, 19 nt, Artificial Sequence
  Description of Artificial Sequence: Synthetic oligonucleotide
  Sense Strand Starting at position 583 of SEQ ID NO: 317395
gccgauuuccgaggauugu

SEQ ID NO: 364510 - RNA, 19 nt, Artificial Sequence
  Description of Artificial Sequence: Synthetic oligonucleotide
  Antisense Strand to SEQ ID NO: 364509
acaauccucggaaaucggc

SEQ ID NO: 364511 - RNA, 19 nt, Artificial Sequence
  Description of Artificial Sequence: Synthetic oligonucleotide
  Sense Strand Starting at position 583 of SEQ ID NO: 317426
uggagaagaugccuaaauu

SEQ ID NO: 364512 - RNA, 19 nt, Artificial Sequence
  Description of Artificial Sequence: Synthetic oligonucleotide
  Antisense Strand to SEQ ID NO: 364511
aauuuaggcaucuucucca

SEQ ID NO: 364513 - RNA, 19 nt, Artificial Sequence
  Description of Artificial Sequence: Synthetic oligonucleotide
  Sense Strand Starting at position 583 of SEQ ID NO: 317448
ggcggagucgaaagauguu

SEQ ID NO: 364514 - RNA, 19 nt, Artificial Sequence
  Description of Artificial Sequence: Synthetic oligonucleotide
  Antisense Strand to SEQ ID NO: 364513
aacaucuuucgacuccgcc

SEQ ID NO: 364515 - RNA, 19 nt, Artificial Sequence
  Description of Artificial Sequence: Synthetic oligonucleotide
  Sense Strand Starting at position 583 of SEQ ID NO: 317451
ggagucgaaagauguuuaa

SEQ ID NO: 364516 - RNA, 19 nt, Artificial Sequence
  Description of Artificial Sequence: Synthetic oligonucleotide
  Antisense Strand to SEQ ID NO: 364515
uuaaacaucuuucgacucc

SEQ ID NO: 364517 - RNA, 19 nt, Artificial Sequence
  Description of Artificial Sequence: Synthetic oligonucleotide
  Sense Strand Starting at position 583 of SEQ ID NO: 317742
guuaaauuccugggccuga

SEQ ID NO: 364518 - RNA, 19 nt, Artificial Sequence
  Description of Artificial Sequence: Synthetic oligonucleotide
  Antisense Strand to SEQ ID NO: 364517
ucaggcccaggaauuuaac

SEQ ID NO: 364519 - RNA, 19 nt, Artificial Sequence
  Description of Artificial Sequence: Synthetic oligonucleotide
  Sense Strand Starting at position 583 of SEQ ID NO: 317743
uuaaauuccugggccugaa

SEQ ID NO: 364520 - RNA, 19 nt, Artificial Sequence
  Description of Artificial Sequence: Synthetic oligonucleotide
  Antisense Strand to SEQ ID NO: 364519
uucaggcccaggaauuuaa

SEQ ID NO: 364521 - RNA, 19 nt, Artificial Sequence
  Description of Artificial Sequence: Synthetic oligonucleotide
  Sense Strand Starting at position 583 of SEQ ID NO: 317914
uguguuucucuuuaaggcu

SEQ ID NO: 364522 - RNA, 19 nt, Artificial Sequence
  Description of Artificial Sequence: Synthetic oligonucleotide
  Antisense Strand to SEQ ID NO: 364521
agccuuaaagagaaacaca

SEQ ID NO: 364523 - RNA, 19 nt, Artificial Sequence
  Description of Artificial Sequence: Synthetic oligonucleotide
  Sense Strand Starting at position 583 of SEQ ID NO: 317945
cugaguguugccuacugau

SEQ ID NO: 364524 - RNA, 19 nt, Artificial Sequence
  Description of Artificial Sequence: Synthetic oligonucleotide
  Antisense Strand to SEQ ID NO: 364523
aucaguaggcaacacucag

SEQ ID NO: 364525 - RNA, 19 nt, Artificial Sequence
  Description of Artificial Sequence: Synthetic oligonucleotide
  Sense Strand Starting at position 583 of SEQ ID NO: 317957
uacugauaacggcaugcau

SEQ ID NO: 364526 - RNA, 19 nt, Artificial Sequence
  Description of Artificial Sequence: Synthetic oligonucleotide
  Antisense Strand to SEQ ID NO: 364525
augcaugccguuaucagua

SEQ ID NO: 364527 - RNA, 19 nt, Artificial Sequence
  Description of Artificial Sequence: Synthetic oligonucleotide
  Sense Strand Starting at position 583 of SEQ ID NO: 317959
cugauaacggcaugcauuu

SEQ ID NO: 364528 - RNA, 19 nt, Artificial Sequence
  Description of Artificial Sequence: Synthetic oligonucleotide
  Antisense Strand to SEQ ID NO: 364527
aaaugcaugccguuaucag

SEQ ID NO: 364529 - RNA, 19 nt, Artificial Sequence
  Description of Artificial Sequence: Synthetic oligonucleotide
  Sense Strand Starting at position 583 of SEQ ID NO: 318034
uucugaaguuugcuuagau

SEQ ID NO: 364530 - RNA, 19 nt, Artificial Sequence
  Description of Artificial Sequence: Synthetic oligonucleotide
  Antisense Strand to SEQ ID NO: 364529
aucuaagcaaacuucagaa

SEQ ID NO: 364531 - RNA, 19 nt, Artificial Sequence
  Description of Artificial Sequence: Synthetic oligonucleotide
  Sense Strand Starting at position 583 of SEQ ID NO: 318035
ucugaaguuugcuuagaua

SEQ ID NO: 364532 - RNA, 19 nt, Artificial Sequence
  Description of Artificial Sequence: Synthetic oligonucleotide
  Antisense Strand to SEQ ID NO: 364531
uaucuaagcaaacuucaga

SEQ ID NO: 364533 - RNA, 19 nt, Artificial Sequence
  Description of Artificial Sequence: Synthetic oligonucleotide
  Sense Strand Starting at position 583 of SEQ ID NO: 318061
uucucugagguuugaaugu

SEQ ID NO: 364534 - RNA, 19 nt, Artificial Sequence
  Description of Artificial Sequence: Synthetic oligonucleotide
  Antisense Strand to SEQ ID NO: 364533
acauucaaaccucagagaa

SEQ ID NO: 364535 - RNA, 19 nt, Artificial Sequence
  Description of Artificial Sequence: Synthetic oligonucleotide
  Sense Strand Starting at position 583 of SEQ ID NO: 318324
guuagacgugaacguaaau

SEQ ID NO: 364536 - RNA, 19 nt, Artificial Sequence
  Description of Artificial Sequence: Synthetic oligonucleotide
  Antisense Strand to SEQ ID NO: 364535
auuuacguucacgucuaac

SEQ ID NO: 364537 - RNA, 19 nt, Artificial Sequence
  Description of Artificial Sequence: Synthetic oligonucleotide
  Sense Strand Starting at position 583 of SEQ ID NO: 318372
agauguuugcucugaguaa

SEQ ID NO: 364538 - RNA, 19 nt, Artificial Sequence
  Description of Artificial Sequence: Synthetic oligonucleotide
  Antisense Strand to SEQ ID NO: 364537
uuacucagagcaaacaucu

SEQ ID NO: 364539 - RNA, 19 nt, Artificial Sequence
  Description of Artificial Sequence: Synthetic oligonucleotide
  Sense Strand Starting at position 583 of SEQ ID NO: 318376
guuugcucugaguaacuuu

SEQ ID NO: 364540 - RNA, 19 nt, Artificial Sequence
  Description of Artificial Sequence: Synthetic oligonucleotide
  Antisense Strand to SEQ ID NO: 364539
aaaguuacucagagcaaac

SEQ ID NO: 364541 - RNA, 19 nt, Artificial Sequence
  Description of Artificial Sequence: Synthetic oligonucleotide
  Sense Strand Starting at position 583 of SEQ ID NO: 318997
agcugaaguacuugguauu

SEQ ID NO: 364542 - RNA, 19 nt, Artificial Sequence
  Description of Artificial Sequence: Synthetic oligonucleotide
  Antisense Strand to SEQ ID NO: 364541
aauaccaaguacuucagcu

SEQ ID NO: 364543 - RNA, 19 nt, Artificial Sequence
  Description of Artificial Sequence: Synthetic oligonucleotide
  Sense Strand Starting at position 584 of SEQ ID NO: 315237
aagauuguucuugagugua

SEQ ID NO: 364544 - RNA, 19 nt, Artificial Sequence
  Description of Artificial Sequence: Synthetic oligonucleotide
  Antisense Strand to SEQ ID NO: 364543
uacacucaagaacaaucuu

SEQ ID NO: 364545 - RNA, 19 nt, Artificial Sequence
  Description of Artificial Sequence: Synthetic oligonucleotide
  Sense Strand Starting at position 584 of SEQ ID NO: 315242
uguucuugaguguaauaca

SEQ ID NO: 364546 - RNA, 19 nt, Artificial Sequence
  Description of Artificial Sequence: Synthetic oligonucleotide
  Antisense Strand to SEQ ID NO: 364545
uguauuacacucaagaaca

SEQ ID NO: 364547 - RNA, 19 nt, Artificial Sequence
  Description of Artificial Sequence: Synthetic oligonucleotide
  Sense Strand Starting at position 584 of SEQ ID NO: 315253
guaauacaacgucacugaa

SEQ ID NO: 364548 - RNA, 19 nt, Artificial Sequence
  Description of Artificial Sequence: Synthetic oligonucleotide
  Antisense Strand to SEQ ID NO: 364547
uucagugacguuguauuac

SEQ ID NO: 364549 - RNA, 19 nt, Artificial Sequence
  Description of Artificial Sequence: Synthetic oligonucleotide
  Sense Strand Starting at position 584 of SEQ ID NO: 315256
auacaacgucacugaagaa

SEQ ID NO: 364550 - RNA, 19 nt, Artificial Sequence
  Description of Artificial Sequence: Synthetic oligonucleotide
  Antisense Strand to SEQ ID NO: 364549
uucuucagugacguuguau

SEQ ID NO: 364551 - RNA, 19 nt, Artificial Sequence
  Description of Artificial Sequence: Synthetic oligonucleotide
  Sense Strand Starting at position 584 of SEQ ID NO: 315371
uugaacuucuaggcucaga

SEQ ID NO: 364552 - RNA, 19 nt, Artificial Sequence
  Description of Artificial Sequence: Synthetic oligonucleotide
  Antisense Strand to SEQ ID NO: 364551
ucugagccuagaaguucaa

SEQ ID NO: 364553 - RNA, 19 nt, Artificial Sequence
  Description of Artificial Sequence: Synthetic oligonucleotide
  Sense Strand Starting at position 584 of SEQ ID NO: 315746
gauguuaaccuguggacau

SEQ ID NO: 364554 - RNA, 19 nt, Artificial Sequence
  Description of Artificial Sequence: Synthetic oligonucleotide
  Antisense Strand to SEQ ID NO: 364553
auguccacagguuaacauc

SEQ ID NO: 364555 - RNA, 19 nt, Artificial Sequence
  Description of Artificial Sequence: Synthetic oligonucleotide
  Sense Strand Starting at position 584 of SEQ ID NO: 315748
uguuaaccuguggacauau

SEQ ID NO: 364556 - RNA, 19 nt, Artificial Sequence
  Description of Artificial Sequence: Synthetic oligonucleotide
  Antisense Strand to SEQ ID NO: 364555
auauguccacagguuaaca

SEQ ID NO: 364557 - RNA, 19 nt, Artificial Sequence
  Description of Artificial Sequence: Synthetic oligonucleotide
  Sense Strand Starting at position 584 of SEQ ID NO: 315796
ggguuaggcauauggagaa

SEQ ID NO: 364558 - RNA, 19 nt, Artificial Sequence
  Description of Artificial Sequence: Synthetic oligonucleotide
  Antisense Strand to SEQ ID NO: 364557
uucuccauaugccuaaccc

SEQ ID NO: 364559 - RNA, 19 nt, Artificial Sequence
  Description of Artificial Sequence: Synthetic oligonucleotide
  Sense Strand Starting at position 584 of SEQ ID NO: 315808
uggagaaguggaugguauu

SEQ ID NO: 364560 - RNA, 19 nt, Artificial Sequence
  Description of Artificial Sequence: Synthetic oligonucleotide
  Antisense Strand to SEQ ID NO: 364559
aauaccauccacuucucca

SEQ ID NO: 364561 - RNA, 19 nt, Artificial Sequence
  Description of Artificial Sequence: Synthetic oligonucleotide
  Sense Strand Starting at position 584 of SEQ ID NO: 315819
augguauucugaguggaac

SEQ ID NO: 364562 - RNA, 19 nt, Artificial Sequence
  Description of Artificial Sequence: Synthetic oligonucleotide
  Antisense Strand to SEQ ID NO: 364561
guuccacucagaauaccau

SEQ ID NO: 364563 - RNA, 19 nt, Artificial Sequence
  Description of Artificial Sequence: Synthetic oligonucleotide
  Sense Strand Starting at position 584 of SEQ ID NO: 315820
ugguauucugaguggaaca

SEQ ID NO: 364564 - RNA, 19 nt, Artificial Sequence
  Description of Artificial Sequence: Synthetic oligonucleotide
  Antisense Strand to SEQ ID NO: 364563
uguuccacucagaauacca

SEQ ID NO: 364565 - RNA, 19 nt, Artificial Sequence
  Description of Artificial Sequence: Synthetic oligonucleotide
  Sense Strand Starting at position 584 of SEQ ID NO: 315821
gguauucugaguggaacag

SEQ ID NO: 364566 - RNA, 19 nt, Artificial Sequence
  Description of Artificial Sequence: Synthetic oligonucleotide
  Antisense Strand to SEQ ID NO: 364565
cuguuccacucagaauacc

SEQ ID NO: 364567 - RNA, 19 nt, Artificial Sequence
  Description of Artificial Sequence: Synthetic oligonucleotide
  Sense Strand Starting at position 584 of SEQ ID NO: 315847
guaagugguaggcaucuga

SEQ ID NO: 364568 - RNA, 19 nt, Artificial Sequence
  Description of Artificial Sequence: Synthetic oligonucleotide
  Antisense Strand to SEQ ID NO: 364567
ucagaugccuaccacuuac

SEQ ID NO: 364569 - RNA, 19 nt, Artificial Sequence
  Description of Artificial Sequence: Synthetic oligonucleotide
  Sense Strand Starting at position 584 of SEQ ID NO: 315889
uugagacuuuaacucgagu

SEQ ID NO: 364570 - RNA, 19 nt, Artificial Sequence
  Description of Artificial Sequence: Synthetic oligonucleotide
  Antisense Strand to SEQ ID NO: 364569
acucgaguuaaagucucaa

SEQ ID NO: 364571 - RNA, 19 nt, Artificial Sequence
  Description of Artificial Sequence: Synthetic oligonucleotide
  Sense Strand Starting at position 584 of SEQ ID NO: 315892
agacuuuaacucgaguaac

SEQ ID NO: 364572 - RNA, 19 nt, Artificial Sequence
  Description of Artificial Sequence: Synthetic oligonucleotide
  Antisense Strand to SEQ ID NO: 364571
guuacucgaguuaaagucu

SEQ ID NO: 364573 - RNA, 19 nt, Artificial Sequence
  Description of Artificial Sequence: Synthetic oligonucleotide
  Sense Strand Starting at position 584 of SEQ ID NO: 315895
cuuuaacucgaguaacuua

SEQ ID NO: 364574 - RNA, 19 nt, Artificial Sequence
  Description of Artificial Sequence: Synthetic oligonucleotide
  Antisense Strand to SEQ ID NO: 364573
uaaguuacucgaguuaaag

SEQ ID NO: 364575 - RNA, 19 nt, Artificial Sequence
  Description of Artificial Sequence: Synthetic oligonucleotide
  Sense Strand Starting at position 584 of SEQ ID NO: 316103
ugguaacuuguccacuaca

SEQ ID NO: 364576 - RNA, 19 nt, Artificial Sequence
  Description of Artificial Sequence: Synthetic oligonucleotide
  Antisense Strand to SEQ ID NO: 364575
uguaguggacaaguuacca

SEQ ID NO: 364577 - RNA, 19 nt, Artificial Sequence
  Description of Artificial Sequence: Synthetic oligonucleotide
  Sense Strand Starting at position 584 of SEQ ID NO: 316482
uaggaugacugguuccauu

SEQ ID NO: 364578 - RNA, 19 nt, Artificial Sequence
  Description of Artificial Sequence: Synthetic oligonucleotide
  Antisense Strand to SEQ ID NO: 364577
aauggaaccagucauccua

SEQ ID NO: 364579 - RNA, 19 nt, Artificial Sequence
  Description of Artificial Sequence: Synthetic oligonucleotide
  Sense Strand Starting at position 584 of SEQ ID NO: 316516
caauuuauuugugguauug

SEQ ID NO: 364580 - RNA, 19 nt, Artificial Sequence
  Description of Artificial Sequence: Synthetic oligonucleotide
  Antisense Strand to SEQ ID NO: 364579
caauaccacaaauaaauug

SEQ ID NO: 364581 - RNA, 19 nt, Artificial Sequence
  Description of Artificial Sequence: Synthetic oligonucleotide
  Sense Strand Starting at position 584 of SEQ ID NO: 316588
ccacuaguugugggaugau

SEQ ID NO: 364582 - RNA, 19 nt, Artificial Sequence
  Description of Artificial Sequence: Synthetic oligonucleotide
  Antisense Strand to SEQ ID NO: 364581
aucaucccacaacuagugg

SEQ ID NO: 364583 - RNA, 19 nt, Artificial Sequence
  Description of Artificial Sequence: Synthetic oligonucleotide
  Sense Strand Starting at position 584 of SEQ ID NO: 316591
cuaguugugggaugauaca

SEQ ID NO: 364584 - RNA, 19 nt, Artificial Sequence
  Description of Artificial Sequence: Synthetic oligonucleotide
  Antisense Strand to SEQ ID NO: 364583
uguaucaucccacaacuag

SEQ ID NO: 364585 - RNA, 19 nt, Artificial Sequence
  Description of Artificial Sequence: Synthetic oligonucleotide
  Sense Strand Starting at position 584 of SEQ ID NO: 316734
aguauaguagcuuaccuau

SEQ ID NO: 364586 - RNA, 19 nt, Artificial Sequence
  Description of Artificial Sequence: Synthetic oligonucleotide
  Antisense Strand to SEQ ID NO: 364585
auagguaagcuacuauacu

SEQ ID NO: 364587 - RNA, 19 nt, Artificial Sequence
  Description of Artificial Sequence: Synthetic oligonucleotide
  Sense Strand Starting at position 584 of SEQ ID NO: 316778
cucagugaguucguaauuu

SEQ ID NO: 364588 - RNA, 19 nt, Artificial Sequence
  Description of Artificial Sequence: Synthetic oligonucleotide
  Antisense Strand to SEQ ID NO: 364587
aaauuacgaacucacugag

SEQ ID NO: 364589 - RNA, 19 nt, Artificial Sequence
  Description of Artificial Sequence: Synthetic oligonucleotide
  Sense Strand Starting at position 584 of SEQ ID NO: 316820
ugggauuugucccaauuuc

SEQ ID NO: 364590 - RNA, 19 nt, Artificial Sequence
  Description of Artificial Sequence: Synthetic oligonucleotide
  Antisense Strand to SEQ ID NO: 364589
gaaauugggacaaauccca

SEQ ID NO: 364591 - RNA, 19 nt, Artificial Sequence
  Description of Artificial Sequence: Synthetic oligonucleotide
  Sense Strand Starting at position 584 of SEQ ID NO: 316873
aggcaagguuuccuuaaug

SEQ ID NO: 364592 - RNA, 19 nt, Artificial Sequence
  Description of Artificial Sequence: Synthetic oligonucleotide
  Antisense Strand to SEQ ID NO: 364591
cauuaaggaaaccuugccu

SEQ ID NO: 364593 - RNA, 19 nt, Artificial Sequence
  Description of Artificial Sequence: Synthetic oligonucleotide
  Sense Strand Starting at position 584 of SEQ ID NO: 316963
caguaaacgguguaucaua

SEQ ID NO: 364594 - RNA, 19 nt, Artificial Sequence
  Description of Artificial Sequence: Synthetic oligonucleotide
  Antisense Strand to SEQ ID NO: 364593
uaugauacaccguuuacug

SEQ ID NO: 364595 - RNA, 19 nt, Artificial Sequence
  Description of Artificial Sequence: Synthetic oligonucleotide
  Sense Strand Starting at position 584 of SEQ ID NO: 316991
aggaaauggcguuaguuaa

SEQ ID NO: 364596 - RNA, 19 nt, Artificial Sequence
  Description of Artificial Sequence: Synthetic oligonucleotide
  Antisense Strand to SEQ ID NO: 364595
uuaacuaacgccauuuccu

SEQ ID NO: 364597 - RNA, 19 nt, Artificial Sequence
  Description of Artificial Sequence: Synthetic oligonucleotide
  Sense Strand Starting at position 584 of SEQ ID NO: 317008
aaguaaugggccuaaaguu

SEQ ID NO: 364598 - RNA, 19 nt, Artificial Sequence
  Description of Artificial Sequence: Synthetic oligonucleotide
  Antisense Strand to SEQ ID NO: 364597
aacuuuaggcccauuacuu

SEQ ID NO: 364599 - RNA, 19 nt, Artificial Sequence
  Description of Artificial Sequence: Synthetic oligonucleotide
  Sense Strand Starting at position 584 of SEQ ID NO: 317102
aggguuguauguacgucua

SEQ ID NO: 364600 - RNA, 19 nt, Artificial Sequence
  Description of Artificial Sequence: Synthetic oligonucleotide
  Antisense Strand to SEQ ID NO: 364599
uagacguacauacaacccu

SEQ ID NO: 364601 - RNA, 19 nt, Artificial Sequence
  Description of Artificial Sequence: Synthetic oligonucleotide
  Sense Strand Starting at position 584 of SEQ ID NO: 317333
gcgggugacgcuguccaau

SEQ ID NO: 364602 - RNA, 19 nt, Artificial Sequence
  Description of Artificial Sequence: Synthetic oligonucleotide
  Antisense Strand to SEQ ID NO: 364601
auuggacagcgucacccgc

SEQ ID NO: 364603 - RNA, 19 nt, Artificial Sequence
  Description of Artificial Sequence: Synthetic oligonucleotide
  Sense Strand Starting at position 584 of SEQ ID NO: 317693
aggguaaagucacccagaa

SEQ ID NO: 364604 - RNA, 19 nt, Artificial Sequence
  Description of Artificial Sequence: Synthetic oligonucleotide
  Antisense Strand to SEQ ID NO: 364603
uucugggugacuuuacccu

SEQ ID NO: 364605 - RNA, 19 nt, Artificial Sequence
  Description of Artificial Sequence: Synthetic oligonucleotide
  Sense Strand Starting at position 584 of SEQ ID NO: 317743
agguguccuggaugagaaa

SEQ ID NO: 364606 - RNA, 19 nt, Artificial Sequence
  Description of Artificial Sequence: Synthetic oligonucleotide
  Antisense Strand to SEQ ID NO: 364605
uuucucauccaggacaccu

SEQ ID NO: 364607 - RNA, 19 nt, Artificial Sequence
  Description of Artificial Sequence: Synthetic oligonucleotide
  Sense Strand Starting at position 584 of SEQ ID NO: 317833
gcuguuaggcgcucagaac

SEQ ID NO: 364608 - RNA, 19 nt, Artificial Sequence
  Description of Artificial Sequence: Synthetic oligonucleotide
  Antisense Strand to SEQ ID NO: 364607
guucugagcgccuaacagc

SEQ ID NO: 364609 - RNA, 19 nt, Artificial Sequence
  Description of Artificial Sequence: Synthetic oligonucleotide
  Sense Strand Starting at position 584 of SEQ ID NO: 317842
cgcucagaacaguaucacu

SEQ ID NO: 364610 - RNA, 19 nt, Artificial Sequence
  Description of Artificial Sequence: Synthetic oligonucleotide
  Antisense Strand to SEQ ID NO: 364609
agugauacuguucugagcg

SEQ ID NO: 364611 - RNA, 19 nt, Artificial Sequence
  Description of Artificial Sequence: Synthetic oligonucleotide
  Sense Strand Starting at position 584 of SEQ ID NO: 318175
ucacguuaugucgucacuu

SEQ ID NO: 364612 - RNA, 19 nt, Artificial Sequence
  Description of Artificial Sequence: Synthetic oligonucleotide
  Antisense Strand to SEQ ID NO: 364611
aagugacgacauaacguga

SEQ ID NO: 364613 - RNA, 19 nt, Artificial Sequence
  Description of Artificial Sequence: Synthetic oligonucleotide
  Sense Strand Starting at position 584 of SEQ ID NO: 318382
caaguacugcuaugggaua

SEQ ID NO: 364614 - RNA, 19 nt, Artificial Sequence
  Description of Artificial Sequence: Synthetic oligonucleotide
  Antisense Strand to SEQ ID NO: 364613
uaucccauagcaguacuug

SEQ ID NO: 364615 - RNA, 19 nt, Artificial Sequence
  Description of Artificial Sequence: Synthetic oligonucleotide
  Sense Strand Starting at position 584 of SEQ ID NO: 318384
aguacugcuaugggauaau

SEQ ID NO: 364616 - RNA, 19 nt, Artificial Sequence
  Description of Artificial Sequence: Synthetic oligonucleotide
  Antisense Strand to SEQ ID NO: 364615
auuaucccauagcaguacu

SEQ ID NO: 364617 - RNA, 19 nt, Artificial Sequence
  Description of Artificial Sequence: Synthetic oligonucleotide
  Sense Strand Starting at position 584 of SEQ ID NO: 318444
uaagguuccgugggauaag

SEQ ID NO: 364618 - RNA, 19 nt, Artificial Sequence
  Description of Artificial Sequence: Synthetic oligonucleotide
  Antisense Strand to SEQ ID NO: 364617
cuuaucccacggaaccuua

SEQ ID NO: 364619 - RNA, 19 nt, Artificial Sequence
  Description of Artificial Sequence: Synthetic oligonucleotide
  Sense Strand Starting at position 584 of SEQ ID NO: 318511
gguccacgauaauccauau

SEQ ID NO: 364620 - RNA, 19 nt, Artificial Sequence
  Description of Artificial Sequence: Synthetic oligonucleotide
  Antisense Strand to SEQ ID NO: 364619
auauggauuaucguggacc

SEQ ID NO: 364621 - RNA, 19 nt, Artificial Sequence
  Description of Artificial Sequence: Synthetic oligonucleotide
  Sense Strand Starting at position 584 of SEQ ID NO: 318676
aaauauuaacuucggaguu

SEQ ID NO: 364622 - RNA, 19 nt, Artificial Sequence
  Description of Artificial Sequence: Synthetic oligonucleotide
  Antisense Strand to SEQ ID NO: 364621
aacuccgaaguuaauauuu

SEQ ID NO: 364623 - RNA, 19 nt, Artificial Sequence
  Description of Artificial Sequence: Synthetic oligonucleotide
  Sense Strand Starting at position 585 of SEQ ID NO: 315293
uaaauugaacaugguugau

SEQ ID NO: 364624 - RNA, 19 nt, Artificial Sequence
  Description of Artificial Sequence: Synthetic oligonucleotide
  Antisense Strand to SEQ ID NO: 364623
aucaaccauguucaauuua

SEQ ID NO: 364625 - RNA, 19 nt, Artificial Sequence
  Description of Artificial Sequence: Synthetic oligonucleotide
  Sense Strand Starting at position 585 of SEQ ID NO: 315371
acagcucuauaugugauaa

SEQ ID NO: 364626 - RNA, 19 nt, Artificial Sequence
  Description of Artificial Sequence: Synthetic oligonucleotide
  Antisense Strand to SEQ ID NO: 364625
uuaucacauauagagcugu

SEQ ID NO: 364627 - RNA, 19 nt, Artificial Sequence
  Description of Artificial Sequence: Synthetic oligonucleotide
  Sense Strand Starting at position 585 of SEQ ID NO: 315391
auauuagaucuuggaugcu

SEQ ID NO: 364628 - RNA, 19 nt, Artificial Sequence
  Description of Artificial Sequence: Synthetic oligonucleotide
  Antisense Strand to SEQ ID NO: 364627
agcauccaagaucuaauau

SEQ ID NO: 364629 - RNA, 19 nt, Artificial Sequence
  Description of Artificial Sequence: Synthetic oligonucleotide
  Sense Strand Starting at position 585 of SEQ ID NO: 315394
uuagaucuuggaugcuaaa

SEQ ID NO: 364630 - RNA, 19 nt, Artificial Sequence
  Description of Artificial Sequence: Synthetic oligonucleotide
  Antisense Strand to SEQ ID NO: 364629
uuuagcauccaagaucuaa

SEQ ID NO: 364631 - RNA, 19 nt, Artificial Sequence
  Description of Artificial Sequence: Synthetic oligonucleotide
  Sense Strand Starting at position 585 of SEQ ID NO: 315488
aguuuacaauuguccacaa

SEQ ID NO: 364632 - RNA, 19 nt, Artificial Sequence
  Description of Artificial Sequence: Synthetic oligonucleotide
  Antisense Strand to SEQ ID NO: 364631
uuguggacaauuguaaacu

SEQ ID NO: 364633 - RNA, 19 nt, Artificial Sequence
  Description of Artificial Sequence: Synthetic oligonucleotide
  Sense Strand Starting at position 585 of SEQ ID NO: 315926
agcaauacucaagaucagu

SEQ ID NO: 364634 - RNA, 19 nt, Artificial Sequence
  Description of Artificial Sequence: Synthetic oligonucleotide
  Antisense Strand to SEQ ID NO: 364633
acugaucuugaguauugcu

SEQ ID NO: 364635 - RNA, 19 nt, Artificial Sequence
  Description of Artificial Sequence: Synthetic oligonucleotide
  Sense Strand Starting at position 585 of SEQ ID NO: 316123
gcaagucccaaggauguaa

SEQ ID NO: 364636 - RNA, 19 nt, Artificial Sequence
  Description of Artificial Sequence: Synthetic oligonucleotide
  Antisense Strand to SEQ ID NO: 364635
uuacauccuugggacuugc

SEQ ID NO: 364637 - RNA, 19 nt, Artificial Sequence
  Description of Artificial Sequence: Synthetic oligonucleotide
  Sense Strand Starting at position 585 of SEQ ID NO: 316239
ugugauuuaugagccugca

SEQ ID NO: 364638 - RNA, 19 nt, Artificial Sequence
  Description of Artificial Sequence: Synthetic oligonucleotide
  Antisense Strand to SEQ ID NO: 364637
ugcaggcucauaaaucaca

SEQ ID NO: 364639 - RNA, 19 nt, Artificial Sequence
  Description of Artificial Sequence: Synthetic oligonucleotide
  Sense Strand Starting at position 585 of SEQ ID NO: 316242
gauuuaugagccugcacuc

SEQ ID NO: 364640 - RNA, 19 nt, Artificial Sequence
  Description of Artificial Sequence: Synthetic oligonucleotide
  Antisense Strand to SEQ ID NO: 364639
gagugcaggcucauaaauc

SEQ ID NO: 364641 - RNA, 19 nt, Artificial Sequence
  Description of Artificial Sequence: Synthetic oligonucleotide
  Sense Strand Starting at position 585 of SEQ ID NO: 316318
augugauuccuacaagcca

SEQ ID NO: 364642 - RNA, 19 nt, Artificial Sequence
  Description of Artificial Sequence: Synthetic oligonucleotide
  Antisense Strand to SEQ ID NO: 364641
uggcuuguaggaaucacau

SEQ ID NO: 364643 - RNA, 19 nt, Artificial Sequence
  Description of Artificial Sequence: Synthetic oligonucleotide
  Sense Strand Starting at position 585 of SEQ ID NO: 316733
guaagauauuuacagaucu

SEQ ID NO: 364644 - RNA, 19 nt, Artificial Sequence
  Description of Artificial Sequence: Synthetic oligonucleotide
  Antisense Strand to SEQ ID NO: 364643
agaucuguaaauaucuuac

SEQ ID NO: 364645 - RNA, 19 nt, Artificial Sequence
  Description of Artificial Sequence: Synthetic oligonucleotide
  Sense Strand Starting at position 585 of SEQ ID NO: 316790
caaugagauuccuuuagug

SEQ ID NO: 364646 - RNA, 19 nt, Artificial Sequence
  Description of Artificial Sequence: Synthetic oligonucleotide
  Antisense Strand to SEQ ID NO: 364645
cacuaaaggaaucucauug

SEQ ID NO: 364647 - RNA, 19 nt, Artificial Sequence
  Description of Artificial Sequence: Synthetic oligonucleotide
  Sense Strand Starting at position 585 of SEQ ID NO: 316794
gagauuccuuuagugaaau

SEQ ID NO: 364648 - RNA, 19 nt, Artificial Sequence
  Description of Artificial Sequence: Synthetic oligonucleotide
  Antisense Strand to SEQ ID NO: 364647
auuucacuaaaggaaucuc

SEQ ID NO: 364649 - RNA, 19 nt, Artificial Sequence
  Description of Artificial Sequence: Synthetic oligonucleotide
  Sense Strand Starting at position 585 of SEQ ID NO: 317286
aggaaugaauucucuguaa

SEQ ID NO: 364650 - RNA, 19 nt, Artificial Sequence
  Description of Artificial Sequence: Synthetic oligonucleotide
  Antisense Strand to SEQ ID NO: 364649
uuacagagaauucauuccu

SEQ ID NO: 364651 - RNA, 19 nt, Artificial Sequence
  Description of Artificial Sequence: Synthetic oligonucleotide
  Sense Strand Starting at position 585 of SEQ ID NO: 317305
uuuggagacguauagugau

SEQ ID NO: 364652 - RNA, 19 nt, Artificial Sequence
  Description of Artificial Sequence: Synthetic oligonucleotide
  Antisense Strand to SEQ ID NO: 364651
aucacuauacgucuccaaa

SEQ ID NO: 364653 - RNA, 19 nt, Artificial Sequence
  Description of Artificial Sequence: Synthetic oligonucleotide
  Sense Strand Starting at position 585 of SEQ ID NO: 317312
acguauagugauggaaaug

SEQ ID NO: 364654 - RNA, 19 nt, Artificial Sequence
  Description of Artificial Sequence: Synthetic oligonucleotide
  Antisense Strand to SEQ ID NO: 364653
cauuuccaucacuauacgu

SEQ ID NO: 364655 - RNA, 19 nt, Artificial Sequence
  Description of Artificial Sequence: Synthetic oligonucleotide
  Sense Strand Starting at position 585 of SEQ ID NO: 317313
cguauagugauggaaauga

SEQ ID NO: 364656 - RNA, 19 nt, Artificial Sequence
  Description of Artificial Sequence: Synthetic oligonucleotide
  Antisense Strand to SEQ ID NO: 364655
ucauuuccaucacuauacg

SEQ ID NO: 364657 - RNA, 19 nt, Artificial Sequence
  Description of Artificial Sequence: Synthetic oligonucleotide
  Sense Strand Starting at position 585 of SEQ ID NO: 317521
ggaucauuccaucagcuau

SEQ ID NO: 364658 - RNA, 19 nt, Artificial Sequence
  Description of Artificial Sequence: Synthetic oligonucleotide
  Antisense Strand to SEQ ID NO: 364657
auagcugauggaaugaucc

SEQ ID NO: 364659 - RNA, 19 nt, Artificial Sequence
  Description of Artificial Sequence: Synthetic oligonucleotide
  Sense Strand Starting at position 585 of SEQ ID NO: 317553
uauuaaucccagugcagag

SEQ ID NO: 364660 - RNA, 19 nt, Artificial Sequence
  Description of Artificial Sequence: Synthetic oligonucleotide
  Antisense Strand to SEQ ID NO: 364659
cucugcacugggauuaaua

SEQ ID NO: 364661 - RNA, 19 nt, Artificial Sequence
  Description of Artificial Sequence: Synthetic oligonucleotide
  Sense Strand Starting at position 585 of SEQ ID NO: 317666
ugcagaguucucguuucuc

SEQ ID NO: 364662 - RNA, 19 nt, Artificial Sequence
  Description of Artificial Sequence: Synthetic oligonucleotide
  Antisense Strand to SEQ ID NO: 364661
gagaaacgagaacucugca

SEQ ID NO: 364663 - RNA, 19 nt, Artificial Sequence
  Description of Artificial Sequence: Synthetic oligonucleotide
  Sense Strand Starting at position 585 of SEQ ID NO: 317697
uacuguuugguccagauaa

SEQ ID NO: 364664 - RNA, 19 nt, Artificial Sequence
  Description of Artificial Sequence: Synthetic oligonucleotide
  Antisense Strand to SEQ ID NO: 364663
uuaucuggaccaaacagua

SEQ ID NO: 364665 - RNA, 19 nt, Artificial Sequence
  Description of Artificial Sequence: Synthetic oligonucleotide
  Sense Strand Starting at position 585 of SEQ ID NO: 317781
agcugagcugaguacugau

SEQ ID NO: 364666 - RNA, 19 nt, Artificial Sequence
  Description of Artificial Sequence: Synthetic oligonucleotide
  Antisense Strand to SEQ ID NO: 364665
aucaguacucagcucagcu

SEQ ID NO: 364667 - RNA, 19 nt, Artificial Sequence
  Description of Artificial Sequence: Synthetic oligonucleotide
  Sense Strand Starting at position 585 of SEQ ID NO: 317860
guagcuaagagguacgauu

SEQ ID NO: 364668 - RNA, 19 nt, Artificial Sequence
  Description of Artificial Sequence: Synthetic oligonucleotide
  Antisense Strand to SEQ ID NO: 364667
aaucguaccucuuagcuac

SEQ ID NO: 364669 - RNA, 19 nt, Artificial Sequence
  Description of Artificial Sequence: Synthetic oligonucleotide
  Sense Strand Starting at position 585 of SEQ ID NO: 317902
guggcuuaagucuauaaau

SEQ ID NO: 364670 - RNA, 19 nt, Artificial Sequence
  Description of Artificial Sequence: Synthetic oligonucleotide
  Antisense Strand to SEQ ID NO: 364669
auuuauagacuuaagccac

SEQ ID NO: 364671 - RNA, 19 nt, Artificial Sequence
  Description of Artificial Sequence: Synthetic oligonucleotide
  Sense Strand Starting at position 585 of SEQ ID NO: 318012
cuaauaauuucugaggagu

SEQ ID NO: 364672 - RNA, 19 nt, Artificial Sequence
  Description of Artificial Sequence: Synthetic oligonucleotide
  Antisense Strand to SEQ ID NO: 364671
acuccucagaaauuauuag

SEQ ID NO: 364673 - RNA, 19 nt, Artificial Sequence
  Description of Artificial Sequence: Synthetic oligonucleotide
  Sense Strand Starting at position 585 of SEQ ID NO: 318036
uggacaucaccuugucuga

SEQ ID NO: 364674 - RNA, 19 nt, Artificial Sequence
  Description of Artificial Sequence: Synthetic oligonucleotide
  Antisense Strand to SEQ ID NO: 364673
ucagacaaggugaugucca

SEQ ID NO: 364675 - RNA, 19 nt, Artificial Sequence
  Description of Artificial Sequence: Synthetic oligonucleotide
  Sense Strand Starting at position 585 of SEQ ID NO: 318038
gacaucaccuugucugaag

SEQ ID NO: 364676 - RNA, 19 nt, Artificial Sequence
  Description of Artificial Sequence: Synthetic oligonucleotide
  Antisense Strand to SEQ ID NO: 364675
cuucagacaaggugauguc

SEQ ID NO: 364677 - RNA, 19 nt, Artificial Sequence
  Description of Artificial Sequence: Synthetic oligonucleotide
  Sense Strand Starting at position 585 of SEQ ID NO: 318039
acaucaccuugucugaaga

SEQ ID NO: 364678 - RNA, 19 nt, Artificial Sequence
  Description of Artificial Sequence: Synthetic oligonucleotide
  Antisense Strand to SEQ ID NO: 364677
ucuucagacaaggugaugu

SEQ ID NO: 364679 - RNA, 19 nt, Artificial Sequence
  Description of Artificial Sequence: Synthetic oligonucleotide
  Sense Strand Starting at position 585 of SEQ ID NO: 318080
gagcgaggucgaaggcauu

SEQ ID NO: 364680 - RNA, 19 nt, Artificial Sequence
  Description of Artificial Sequence: Synthetic oligonucleotide
  Antisense Strand to SEQ ID NO: 364679
aaugccuucgaccucgcuc

SEQ ID NO: 364681 - RNA, 19 nt, Artificial Sequence
  Description of Artificial Sequence: Synthetic oligonucleotide
  Sense Strand Starting at position 585 of SEQ ID NO: 318151
ugaagaauguugucauauu

SEQ ID NO: 364682 - RNA, 19 nt, Artificial Sequence
  Description of Artificial Sequence: Synthetic oligonucleotide
  Antisense Strand to SEQ ID NO: 364681
aauaugacaacauucuuca

SEQ ID NO: 364683 - RNA, 19 nt, Artificial Sequence
  Description of Artificial Sequence: Synthetic oligonucleotide
  Sense Strand Starting at position 585 of SEQ ID NO: 318214
ggccauuugccuggacuca

SEQ ID NO: 364684 - RNA, 19 nt, Artificial Sequence
  Description of Artificial Sequence: Synthetic oligonucleotide
  Antisense Strand to SEQ ID NO: 364683
ugaguccaggcaaauggcc

SEQ ID NO: 364685 - RNA, 19 nt, Artificial Sequence
  Description of Artificial Sequence: Synthetic oligonucleotide
  Sense Strand Starting at position 585 of SEQ ID NO: 318342
gggagucauucuguucaag

SEQ ID NO: 364686 - RNA, 19 nt, Artificial Sequence
  Description of Artificial Sequence: Synthetic oligonucleotide
  Antisense Strand to SEQ ID NO: 364685
cuugaacagaaugacuccc

SEQ ID NO: 364687 - RNA, 19 nt, Artificial Sequence
  Description of Artificial Sequence: Synthetic oligonucleotide
  Sense Strand Starting at position 585 of SEQ ID NO: 318471
aagagucaauggucagacu

SEQ ID NO: 364688 - RNA, 19 nt, Artificial Sequence
  Description of Artificial Sequence: Synthetic oligonucleotide
  Antisense Strand to SEQ ID NO: 364687
agucugaccauugacucuu

SEQ ID NO: 364689 - RNA, 19 nt, Artificial Sequence
  Description of Artificial Sequence: Synthetic oligonucleotide
  Sense Strand Starting at position 585 of SEQ ID NO: 318498
aggccagacucaccuuuaa

SEQ ID NO: 364690 - RNA, 19 nt, Artificial Sequence
  Description of Artificial Sequence: Synthetic oligonucleotide
  Antisense Strand to SEQ ID NO: 364689
uuaaaggugagucuggccu

SEQ ID NO: 364691 - RNA, 19 nt, Artificial Sequence
  Description of Artificial Sequence: Synthetic oligonucleotide
  Sense Strand Starting at position 585 of SEQ ID NO: 318523
ucgauugauacguauugac

SEQ ID NO: 364692 - RNA, 19 nt, Artificial Sequence
  Description of Artificial Sequence: Synthetic oligonucleotide
  Antisense Strand to SEQ ID NO: 364691
gucaauacguaucaaucga

SEQ ID NO: 364693 - RNA, 19 nt, Artificial Sequence
  Description of Artificial Sequence: Synthetic oligonucleotide
  Sense Strand Starting at position 585 of SEQ ID NO: 318664
ucagaugcuguguagaaca

SEQ ID NO: 364694 - RNA, 19 nt, Artificial Sequence
  Description of Artificial Sequence: Synthetic oligonucleotide
  Antisense Strand to SEQ ID NO: 364693
uguucuacacagcaucuga

SEQ ID NO: 364695 - RNA, 19 nt, Artificial Sequence
  Description of Artificial Sequence: Synthetic oligonucleotide
  Sense Strand Starting at position 585 of SEQ ID NO: 318811
uguggauuacccuagguag

SEQ ID NO: 364696 - RNA, 19 nt, Artificial Sequence
  Description of Artificial Sequence: Synthetic oligonucleotide
  Antisense Strand to SEQ ID NO: 364695
cuaccuaggguaauccaca

SEQ ID NO: 364697 - RNA, 19 nt, Artificial Sequence
  Description of Artificial Sequence: Synthetic oligonucleotide
  Sense Strand Starting at position 585 of SEQ ID NO: 318814
ggauuacccuagguagcau

SEQ ID NO: 364698 - RNA, 19 nt, Artificial Sequence
  Description of Artificial Sequence: Synthetic oligonucleotide
  Antisense Strand to SEQ ID NO: 364697
augcuaccuaggguaaucc

SEQ ID NO: 364699 - RNA, 19 nt, Artificial Sequence
  Description of Artificial Sequence: Synthetic oligonucleotide
  Sense Strand Starting at position 585 of SEQ ID NO: 318861
ugaaauucucuccaggcga

SEQ ID NO: 364700 - RNA, 19 nt, Artificial Sequence
  Description of Artificial Sequence: Synthetic oligonucleotide
  Antisense Strand to SEQ ID NO: 364699
ucgccuggagagaauuuca

SEQ ID NO: 364701 - RNA, 19 nt, Artificial Sequence
  Description of Artificial Sequence: Synthetic oligonucleotide
  Sense Strand Starting at position 585 of SEQ ID NO: 319036
uguggaucccucuaccaca

SEQ ID NO: 364702 - RNA, 19 nt, Artificial Sequence
  Description of Artificial Sequence: Synthetic oligonucleotide
  Antisense Strand to SEQ ID NO: 364701
ugugguagagggauccaca

SEQ ID NO: 364703 - RNA, 19 nt, Artificial Sequence
  Description of Artificial Sequence: Synthetic oligonucleotide
  Sense Strand Starting at position 586 of SEQ ID NO: 315293
uaaauugaacaugguugau

SEQ ID NO: 364704 - RNA, 19 nt, Artificial Sequence
  Description of Artificial Sequence: Synthetic oligonucleotide
  Antisense Strand to SEQ ID NO: 364703
aucaaccauguucaauuua

SEQ ID NO: 364705 - RNA, 19 nt, Artificial Sequence
  Description of Artificial Sequence: Synthetic oligonucleotide
  Sense Strand Starting at position 586 of SEQ ID NO: 315371
acagcucuauaugugauaa

SEQ ID NO: 364706 - RNA, 19 nt, Artificial Sequence
  Description of Artificial Sequence: Synthetic oligonucleotide
  Antisense Strand to SEQ ID NO: 364705
uuaucacauauagagcugu

SEQ ID NO: 364707 - RNA, 19 nt, Artificial Sequence
  Description of Artificial Sequence: Synthetic oligonucleotide
  Sense Strand Starting at position 586 of SEQ ID NO: 315391
auauuagaucuuggaugcu

SEQ ID NO: 364708 - RNA, 19 nt, Artificial Sequence
  Description of Artificial Sequence: Synthetic oligonucleotide
  Antisense Strand to SEQ ID NO: 364707
agcauccaagaucuaauau

SEQ ID NO: 364709 - RNA, 19 nt, Artificial Sequence
  Description of Artificial Sequence: Synthetic oligonucleotide
  Sense Strand Starting at position 586 of SEQ ID NO: 315394
uuagaucuuggaugcuaaa

SEQ ID NO: 364710 - RNA, 19 nt, Artificial Sequence
  Description of Artificial Sequence: Synthetic oligonucleotide
  Antisense Strand to SEQ ID NO: 364709
uuuagcauccaagaucuaa

SEQ ID NO: 364711 - RNA, 19 nt, Artificial Sequence
  Description of Artificial Sequence: Synthetic oligonucleotide
  Sense Strand Starting at position 586 of SEQ ID NO: 315488
aguuuacaauuguccacaa

SEQ ID NO: 364712 - RNA, 19 nt, Artificial Sequence
  Description of Artificial Sequence: Synthetic oligonucleotide
  Antisense Strand to SEQ ID NO: 364711
uuguggacaauuguaaacu

SEQ ID NO: 364713 - RNA, 19 nt, Artificial Sequence
  Description of Artificial Sequence: Synthetic oligonucleotide
  Sense Strand Starting at position 586 of SEQ ID NO: 315926
agcaauacucaagaucagu

SEQ ID NO: 364714 - RNA, 19 nt, Artificial Sequence
  Description of Artificial Sequence: Synthetic oligonucleotide
  Antisense Strand to SEQ ID NO: 364713
acugaucuugaguauugcu

SEQ ID NO: 364715 - RNA, 19 nt, Artificial Sequence
  Description of Artificial Sequence: Synthetic oligonucleotide
  Sense Strand Starting at position 586 of SEQ ID NO: 316123
gcaagucccaaggauguaa

SEQ ID NO: 364716 - RNA, 19 nt, Artificial Sequence
  Description of Artificial Sequence: Synthetic oligonucleotide
  Antisense Strand to SEQ ID NO: 364715
uuacauccuugggacuugc

SEQ ID NO: 364717 - RNA, 19 nt, Artificial Sequence
  Description of Artificial Sequence: Synthetic oligonucleotide
  Sense Strand Starting at position 586 of SEQ ID NO: 316239
ugugauuuaugagccugca

SEQ ID NO: 364718 - RNA, 19 nt, Artificial Sequence
  Description of Artificial Sequence: Synthetic oligonucleotide
  Antisense Strand to SEQ ID NO: 364717
ugcaggcucauaaaucaca

SEQ ID NO: 364719 - RNA, 19 nt, Artificial Sequence
  Description of Artificial Sequence: Synthetic oligonucleotide
  Sense Strand Starting at position 586 of SEQ ID NO: 316242
gauuuaugagccugcacuc

SEQ ID NO: 364720 - RNA, 19 nt, Artificial Sequence
  Description of Artificial Sequence: Synthetic oligonucleotide
  Antisense Strand to SEQ ID NO: 364719
gagugcaggcucauaaauc

SEQ ID NO: 364721 - RNA, 19 nt, Artificial Sequence
  Description of Artificial Sequence: Synthetic oligonucleotide
  Sense Strand Starting at position 586 of SEQ ID NO: 316318
augugauuccuacaagcca

SEQ ID NO: 364722 - RNA, 19 nt, Artificial Sequence
  Description of Artificial Sequence: Synthetic oligonucleotide
  Antisense Strand to SEQ ID NO: 364721
uggcuuguaggaaucacau

SEQ ID NO: 364723 - RNA, 19 nt, Artificial Sequence
  Description of Artificial Sequence: Synthetic oligonucleotide
  Sense Strand Starting at position 586 of SEQ ID NO: 316733
guaagauauuuacagaucu

SEQ ID NO: 364724 - RNA, 19 nt, Artificial Sequence
  Description of Artificial Sequence: Synthetic oligonucleotide
  Antisense Strand to SEQ ID NO: 364723
agaucuguaaauaucuuac

SEQ ID NO: 364725 - RNA, 19 nt, Artificial Sequence
  Description of Artificial Sequence: Synthetic oligonucleotide
  Sense Strand Starting at position 586 of SEQ ID NO: 316790
caaugagauuccuuuagug

SEQ ID NO: 364726 - RNA, 19 nt, Artificial Sequence
  Description of Artificial Sequence: Synthetic oligonucleotide
  Antisense Strand to SEQ ID NO: 364725
cacuaaaggaaucucauug

SEQ ID NO: 364727 - RNA, 19 nt, Artificial Sequence
  Description of Artificial Sequence: Synthetic oligonucleotide
  Sense Strand Starting at position 586 of SEQ ID NO: 316794
gagauuccuuuagugaaau

SEQ ID NO: 364728 - RNA, 19 nt, Artificial Sequence
  Description of Artificial Sequence: Synthetic oligonucleotide
  Antisense Strand to SEQ ID NO: 364727
auuucacuaaaggaaucuc

SEQ ID NO: 364729 - RNA, 19 nt, Artificial Sequence
  Description of Artificial Sequence: Synthetic oligonucleotide
  Sense Strand Starting at position 586 of SEQ ID NO: 317286
aggaaugaauucucuguaa

SEQ ID NO: 364730 - RNA, 19 nt, Artificial Sequence
  Description of Artificial Sequence: Synthetic oligonucleotide
  Antisense Strand to SEQ ID NO: 364729
uuacagagaauucauuccu

SEQ ID NO: 364731 - RNA, 19 nt, Artificial Sequence
  Description of Artificial Sequence: Synthetic oligonucleotide
  Sense Strand Starting at position 586 of SEQ ID NO: 317305
uuuggagacguauagugau

SEQ ID NO: 364732 - RNA, 19 nt, Artificial Sequence
  Description of Artificial Sequence: Synthetic oligonucleotide
  Antisense Strand to SEQ ID NO: 364731
aucacuauacgucuccaaa

SEQ ID NO: 364733 - RNA, 19 nt, Artificial Sequence
  Description of Artificial Sequence: Synthetic oligonucleotide
  Sense Strand Starting at position 586 of SEQ ID NO: 317312
acguauagugauggaaaug

SEQ ID NO: 364734 - RNA, 19 nt, Artificial Sequence
  Description of Artificial Sequence: Synthetic oligonucleotide
  Antisense Strand to SEQ ID NO: 364733
cauuuccaucacuauacgu

SEQ ID NO: 364735 - RNA, 19 nt, Artificial Sequence
  Description of Artificial Sequence: Synthetic oligonucleotide
  Sense Strand Starting at position 586 of SEQ ID NO: 317313
cguauagugauggaaauga

SEQ ID NO: 364736 - RNA, 19 nt, Artificial Sequence
  Description of Artificial Sequence: Synthetic oligonucleotide
  Antisense Strand to SEQ ID NO: 364735
ucauuuccaucacuauacg

SEQ ID NO: 364737 - RNA, 19 nt, Artificial Sequence
  Description of Artificial Sequence: Synthetic oligonucleotide
  Sense Strand Starting at position 586 of SEQ ID NO: 317521
ggaucauuccaucagcuau

SEQ ID NO: 364738 - RNA, 19 nt, Artificial Sequence
  Description of Artificial Sequence: Synthetic oligonucleotide
  Antisense Strand to SEQ ID NO: 364737
auagcugauggaaugaucc

SEQ ID NO: 364739 - RNA, 19 nt, Artificial Sequence
  Description of Artificial Sequence: Synthetic oligonucleotide
  Sense Strand Starting at position 586 of SEQ ID NO: 317553
uauuaaucccagugcagag

SEQ ID NO: 364740 - RNA, 19 nt, Artificial Sequence
  Description of Artificial Sequence: Synthetic oligonucleotide
  Antisense Strand to SEQ ID NO: 364739
cucugcacugggauuaaua

SEQ ID NO: 364741 - RNA, 19 nt, Artificial Sequence
  Description of Artificial Sequence: Synthetic oligonucleotide
  Sense Strand Starting at position 586 of SEQ ID NO: 317666
ugcagaguucucguuucuc

SEQ ID NO: 364742 - RNA, 19 nt, Artificial Sequence
  Description of Artificial Sequence: Synthetic oligonucleotide
  Antisense Strand to SEQ ID NO: 364741
gagaaacgagaacucugca

SEQ ID NO: 364743 - RNA, 19 nt, Artificial Sequence
  Description of Artificial Sequence: Synthetic oligonucleotide
  Sense Strand Starting at position 586 of SEQ ID NO: 317697
uacuguuugguccagauaa

SEQ ID NO: 364744 - RNA, 19 nt, Artificial Sequence
  Description of Artificial Sequence: Synthetic oligonucleotide
  Antisense Strand to SEQ ID NO: 364743
uuaucuggaccaaacagua

SEQ ID NO: 364745 - RNA, 19 nt, Artificial Sequence
  Description of Artificial Sequence: Synthetic oligonucleotide
  Sense Strand Starting at position 586 of SEQ ID NO: 317781
agcugagcugaguacugau

SEQ ID NO: 364746 - RNA, 19 nt, Artificial Sequence
  Description of Artificial Sequence: Synthetic oligonucleotide
  Antisense Strand to SEQ ID NO: 364745
aucaguacucagcucagcu

SEQ ID NO: 364747 - RNA, 19 nt, Artificial Sequence
  Description of Artificial Sequence: Synthetic oligonucleotide
  Sense Strand Starting at position 586 of SEQ ID NO: 317860
guagcuaagagguacgauu

SEQ ID NO: 364748 - RNA, 19 nt, Artificial Sequence
  Description of Artificial Sequence: Synthetic oligonucleotide
  Antisense Strand to SEQ ID NO: 364747
aaucguaccucuuagcuac

SEQ ID NO: 364749 - RNA, 19 nt, Artificial Sequence
  Description of Artificial Sequence: Synthetic oligonucleotide
  Sense Strand Starting at position 586 of SEQ ID NO: 317902
guggcuuaagucuauaaau

SEQ ID NO: 364750 - RNA, 19 nt, Artificial Sequence
  Description of Artificial Sequence: Synthetic oligonucleotide
  Antisense Strand to SEQ ID NO: 364749
auuuauagacuuaagccac

SEQ ID NO: 364751 - RNA, 19 nt, Artificial Sequence
  Description of Artificial Sequence: Synthetic oligonucleotide
  Sense Strand Starting at position 586 of SEQ ID NO: 318012
cuaauaauuucugaggagu

SEQ ID NO: 364752 - RNA, 19 nt, Artificial Sequence
  Description of Artificial Sequence: Synthetic oligonucleotide
  Antisense Strand to SEQ ID NO: 364751
acuccucagaaauuauuag

SEQ ID NO: 364753 - RNA, 19 nt, Artificial Sequence
  Description of Artificial Sequence: Synthetic oligonucleotide
  Sense Strand Starting at position 586 of SEQ ID NO: 318036
uggacaucaccuugucuga

SEQ ID NO: 364754 - RNA, 19 nt, Artificial Sequence
  Description of Artificial Sequence: Synthetic oligonucleotide
  Antisense Strand to SEQ ID NO: 364753
ucagacaaggugaugucca

SEQ ID NO: 364755 - RNA, 19 nt, Artificial Sequence
  Description of Artificial Sequence: Synthetic oligonucleotide
  Sense Strand Starting at position 586 of SEQ ID NO: 318038
gacaucaccuugucugaag

SEQ ID NO: 364756 - RNA, 19 nt, Artificial Sequence
  Description of Artificial Sequence: Synthetic oligonucleotide
  Antisense Strand to SEQ ID NO: 364755
cuucagacaaggugauguc

SEQ ID NO: 364757 - RNA, 19 nt, Artificial Sequence
  Description of Artificial Sequence: Synthetic oligonucleotide
  Sense Strand Starting at position 586 of SEQ ID NO: 318039
acaucaccuugucugaaga

SEQ ID NO: 364758 - RNA, 19 nt, Artificial Sequence
  Description of Artificial Sequence: Synthetic oligonucleotide
  Antisense Strand to SEQ ID NO: 364757
ucuucagacaaggugaugu

SEQ ID NO: 364759 - RNA, 19 nt, Artificial Sequence
  Description of Artificial Sequence: Synthetic oligonucleotide
  Sense Strand Starting at position 586 of SEQ ID NO: 318080
gagcgaggucgaaggcauu

SEQ ID NO: 364760 - RNA, 19 nt, Artificial Sequence
  Description of Artificial Sequence: Synthetic oligonucleotide
  Antisense Strand to SEQ ID NO: 364759
aaugccuucgaccucgcuc

SEQ ID NO: 364761 - RNA, 19 nt, Artificial Sequence
  Description of Artificial Sequence: Synthetic oligonucleotide
  Sense Strand Starting at position 586 of SEQ ID NO: 318151
ugaagaauguugucauauu

SEQ ID NO: 364762 - RNA, 19 nt, Artificial Sequence
  Description of Artificial Sequence: Synthetic oligonucleotide
  Antisense Strand to SEQ ID NO: 364761
aauaugacaacauucuuca

SEQ ID NO: 364763 - RNA, 19 nt, Artificial Sequence
  Description of Artificial Sequence: Synthetic oligonucleotide
  Sense Strand Starting at position 586 of SEQ ID NO: 318214
ggccauuugccuggacuca

SEQ ID NO: 364764 - RNA, 19 nt, Artificial Sequence
  Description of Artificial Sequence: Synthetic oligonucleotide
  Antisense Strand to SEQ ID NO: 364763
ugaguccaggcaaauggcc

SEQ ID NO: 364765 - RNA, 19 nt, Artificial Sequence
  Description of Artificial Sequence: Synthetic oligonucleotide
  Sense Strand Starting at position 586 of SEQ ID NO: 318342
gggagucauucuguucaag

SEQ ID NO: 364766 - RNA, 19 nt, Artificial Sequence
  Description of Artificial Sequence: Synthetic oligonucleotide
  Antisense Strand to SEQ ID NO: 364765
cuugaacagaaugacuccc

SEQ ID NO: 364767 - RNA, 19 nt, Artificial Sequence
  Description of Artificial Sequence: Synthetic oligonucleotide
  Sense Strand Starting at position 586 of SEQ ID NO: 318471
aagagucaauggucagacu

SEQ ID NO: 364768 - RNA, 19 nt, Artificial Sequence
  Description of Artificial Sequence: Synthetic oligonucleotide
  Antisense Strand to SEQ ID NO: 364767
agucugaccauugacucuu

SEQ ID NO: 364769 - RNA, 19 nt, Artificial Sequence
  Description of Artificial Sequence: Synthetic oligonucleotide
  Sense Strand Starting at position 586 of SEQ ID NO: 318498
aggccagacucaccuuuaa

SEQ ID NO: 364770 - RNA, 19 nt, Artificial Sequence
  Description of Artificial Sequence: Synthetic oligonucleotide
  Antisense Strand to SEQ ID NO: 364769
uuaaaggugagucuggccu

SEQ ID NO: 364771 - RNA, 19 nt, Artificial Sequence
  Description of Artificial Sequence: Synthetic oligonucleotide
  Sense Strand Starting at position 586 of SEQ ID NO: 318523
ucgauugauacguauugac

SEQ ID NO: 364772 - RNA, 19 nt, Artificial Sequence
  Description of Artificial Sequence: Synthetic oligonucleotide
  Antisense Strand to SEQ ID NO: 364771
gucaauacguaucaaucga

SEQ ID NO: 364773 - RNA, 19 nt, Artificial Sequence
  Description of Artificial Sequence: Synthetic oligonucleotide
  Sense Strand Starting at position 586 of SEQ ID NO: 318664
ucagaugcuguguagaaca

SEQ ID NO: 364774 - RNA, 19 nt, Artificial Sequence
  Description of Artificial Sequence: Synthetic oligonucleotide
  Antisense Strand to SEQ ID NO: 364773
uguucuacacagcaucuga

SEQ ID NO: 364775 - RNA, 19 nt, Artificial Sequence
  Description of Artificial Sequence: Synthetic oligonucleotide
  Sense Strand Starting at position 586 of SEQ ID NO: 318811
uguggauuacccuagguag

SEQ ID NO: 364776 - RNA, 19 nt, Artificial Sequence
  Description of Artificial Sequence: Synthetic oligonucleotide
  Antisense Strand to SEQ ID NO: 364775
cuaccuaggguaauccaca

SEQ ID NO: 364777 - RNA, 19 nt, Artificial Sequence
  Description of Artificial Sequence: Synthetic oligonucleotide
  Sense Strand Starting at position 586 of SEQ ID NO: 318814
ggauuacccuagguagcau

SEQ ID NO: 364778 - RNA, 19 nt, Artificial Sequence
  Description of Artificial Sequence: Synthetic oligonucleotide
  Antisense Strand to SEQ ID NO: 364777
augcuaccuaggguaaucc

SEQ ID NO: 364779 - RNA, 19 nt, Artificial Sequence
  Description of Artificial Sequence: Synthetic oligonucleotide
  Sense Strand Starting at position 586 of SEQ ID NO: 318861
ugaaauucucuccaggcga

SEQ ID NO: 364780 - RNA, 19 nt, Artificial Sequence
  Description of Artificial Sequence: Synthetic oligonucleotide
  Antisense Strand to SEQ ID NO: 364779
ucgccuggagagaauuuca

SEQ ID NO: 364781 - RNA, 19 nt, Artificial Sequence
  Description of Artificial Sequence: Synthetic oligonucleotide
  Sense Strand Starting at position 586 of SEQ ID NO: 319036
uguggaucccucuaccaca

SEQ ID NO: 364782 - RNA, 19 nt, Artificial Sequence
  Description of Artificial Sequence: Synthetic oligonucleotide
  Antisense Strand to SEQ ID NO: 364781
ugugguagagggauccaca

SEQ ID NO: 364783 - RNA, 19 nt, Artificial Sequence
  Description of Artificial Sequence: Synthetic oligonucleotide
  Sense Strand Starting at position 587 of SEQ ID NO: 315295
uuaacugcuccucaaguga

SEQ ID NO: 364784 - RNA, 19 nt, Artificial Sequence
  Description of Artificial Sequence: Synthetic oligonucleotide
  Antisense Strand to SEQ ID NO: 364783
ucacuugaggagcaguuaa

SEQ ID NO: 364785 - RNA, 19 nt, Artificial Sequence
  Description of Artificial Sequence: Synthetic oligonucleotide
  Sense Strand Starting at position 587 of SEQ ID NO: 315308
aagugauuccaguauagcu

SEQ ID NO: 364786 - RNA, 19 nt, Artificial Sequence
  Description of Artificial Sequence: Synthetic oligonucleotide
  Antisense Strand to SEQ ID NO: 364785
agcuauacuggaaucacuu

SEQ ID NO: 364787 - RNA, 19 nt, Artificial Sequence
  Description of Artificial Sequence: Synthetic oligonucleotide
  Sense Strand Starting at position 587 of SEQ ID NO: 315351
gcuaguauacuccaggguu

SEQ ID NO: 364788 - RNA, 19 nt, Artificial Sequence
  Description of Artificial Sequence: Synthetic oligonucleotide
  Antisense Strand to SEQ ID NO: 364787
aacccuggaguauacuagc

SEQ ID NO: 364789 - RNA, 19 nt, Artificial Sequence
  Description of Artificial Sequence: Synthetic oligonucleotide
  Sense Strand Starting at position 587 of SEQ ID NO: 315439
ggccuuugugaggaugaca

SEQ ID NO: 364790 - RNA, 19 nt, Artificial Sequence
  Description of Artificial Sequence: Synthetic oligonucleotide
  Antisense Strand to SEQ ID NO: 364789
ugucauccucacaaaggcc

SEQ ID NO: 364791 - RNA, 19 nt, Artificial Sequence
  Description of Artificial Sequence: Synthetic oligonucleotide
  Sense Strand Starting at position 587 of SEQ ID NO: 315486
ugggccaaguaaucugaau

SEQ ID NO: 364792 - RNA, 19 nt, Artificial Sequence
  Description of Artificial Sequence: Synthetic oligonucleotide
  Antisense Strand to SEQ ID NO: 364791
auucagauuacuuggccca

SEQ ID NO: 364793 - RNA, 19 nt, Artificial Sequence
  Description of Artificial Sequence: Synthetic oligonucleotide
  Sense Strand Starting at position 587 of SEQ ID NO: 315547
auguaacagcccugagagu

SEQ ID NO: 364794 - RNA, 19 nt, Artificial Sequence
  Description of Artificial Sequence: Synthetic oligonucleotide
  Antisense Strand to SEQ ID NO: 364793
acucucagggcuguuacau

SEQ ID NO: 364795 - RNA, 19 nt, Artificial Sequence
  Description of Artificial Sequence: Synthetic oligonucleotide
  Sense Strand Starting at position 587 of SEQ ID NO: 315548
uguaacagcccugagaguu

SEQ ID NO: 364796 - RNA, 19 nt, Artificial Sequence
  Description of Artificial Sequence: Synthetic oligonucleotide
  Antisense Strand to SEQ ID NO: 364795
aacucucagggcuguuaca

SEQ ID NO: 364797 - RNA, 19 nt, Artificial Sequence
  Description of Artificial Sequence: Synthetic oligonucleotide
  Sense Strand Starting at position 587 of SEQ ID NO: 315663
gaaguuccacgcugggaaa

SEQ ID NO: 364798 - RNA, 19 nt, Artificial Sequence
  Description of Artificial Sequence: Synthetic oligonucleotide
  Antisense Strand to SEQ ID NO: 364797
uuucccagcguggaacuuc

SEQ ID NO: 364799 - RNA, 19 nt, Artificial Sequence
  Description of Artificial Sequence: Synthetic oligonucleotide
  Sense Strand Starting at position 587 of SEQ ID NO: 315729
gagugagaacuuuggugug

SEQ ID NO: 364800 - RNA, 19 nt, Artificial Sequence
  Description of Artificial Sequence: Synthetic oligonucleotide
  Antisense Strand to SEQ ID NO: 364799
cacaccaaaguucucacuc

SEQ ID NO: 364801 - RNA, 19 nt, Artificial Sequence
  Description of Artificial Sequence: Synthetic oligonucleotide
  Sense Strand Starting at position 587 of SEQ ID NO: 315772
cugugagcuucuccacuaa

SEQ ID NO: 364802 - RNA, 19 nt, Artificial Sequence
  Description of Artificial Sequence: Synthetic oligonucleotide
  Antisense Strand to SEQ ID NO: 364801
uuaguggagaagcucacag

SEQ ID NO: 364803 - RNA, 19 nt, Artificial Sequence
  Description of Artificial Sequence: Synthetic oligonucleotide
  Sense Strand Starting at position 587 of SEQ ID NO: 316376
aaagguugcuccuccuaga

SEQ ID NO: 364804 - RNA, 19 nt, Artificial Sequence
  Description of Artificial Sequence: Synthetic oligonucleotide
  Antisense Strand to SEQ ID NO: 364803
ucuaggaggagcaaccuuu

SEQ ID NO: 364805 - RNA, 19 nt, Artificial Sequence
  Description of Artificial Sequence: Synthetic oligonucleotide
  Sense Strand Starting at position 587 of SEQ ID NO: 316482
aggcuuugguuuccauaaa

SEQ ID NO: 364806 - RNA, 19 nt, Artificial Sequence
  Description of Artificial Sequence: Synthetic oligonucleotide
  Antisense Strand to SEQ ID NO: 364805
uuuauggaaaccaaagccu

SEQ ID NO: 364807 - RNA, 19 nt, Artificial Sequence
  Description of Artificial Sequence: Synthetic oligonucleotide
  Sense Strand Starting at position 587 of SEQ ID NO: 316755
ggcagagauucucuuccua

SEQ ID NO: 364808 - RNA, 19 nt, Artificial Sequence
  Description of Artificial Sequence: Synthetic oligonucleotide
  Antisense Strand to SEQ ID NO: 364807
uaggaagagaaucucugcc

SEQ ID NO: 364809 - RNA, 19 nt, Artificial Sequence
  Description of Artificial Sequence: Synthetic oligonucleotide
  Sense Strand Starting at position 587 of SEQ ID NO: 316856
ugcucucacaguugggaau

SEQ ID NO: 364810 - RNA, 19 nt, Artificial Sequence
  Description of Artificial Sequence: Synthetic oligonucleotide
  Antisense Strand to SEQ ID NO: 364809
auucccaacugugagagca

SEQ ID NO: 364811 - RNA, 19 nt, Artificial Sequence
  Description of Artificial Sequence: Synthetic oligonucleotide
  Sense Strand Starting at position 587 of SEQ ID NO: 316857
gcucucacaguugggaauu

SEQ ID NO: 364812 - RNA, 19 nt, Artificial Sequence
  Description of Artificial Sequence: Synthetic oligonucleotide
  Antisense Strand to SEQ ID NO: 364811
aauucccaacugugagagc

SEQ ID NO: 364813 - RNA, 19 nt, Artificial Sequence
  Description of Artificial Sequence: Synthetic oligonucleotide
  Sense Strand Starting at position 587 of SEQ ID NO: 317527
ggguuugcucucgcagcau

SEQ ID NO: 364814 - RNA, 19 nt, Artificial Sequence
  Description of Artificial Sequence: Synthetic oligonucleotide
  Antisense Strand to SEQ ID NO: 364813
augcugcgagagcaaaccc

SEQ ID NO: 364815 - RNA, 19 nt, Artificial Sequence
  Description of Artificial Sequence: Synthetic oligonucleotide
  Sense Strand Starting at position 587 of SEQ ID NO: 317744
gcuggaaaccuggaagucu

SEQ ID NO: 364816 - RNA, 19 nt, Artificial Sequence
  Description of Artificial Sequence: Synthetic oligonucleotide
  Antisense Strand to SEQ ID NO: 364815
agacuuccagguuuccagc

SEQ ID NO: 364817 - RNA, 19 nt, Artificial Sequence
  Description of Artificial Sequence: Synthetic oligonucleotide
  Sense Strand Starting at position 587 of SEQ ID NO: 317795
cgaugacacuacuuuccaa

SEQ ID NO: 364818 - RNA, 19 nt, Artificial Sequence
  Description of Artificial Sequence: Synthetic oligonucleotide
  Antisense Strand to SEQ ID NO: 364817
uuggaaaguagugucaucg

SEQ ID NO: 364819 - RNA, 19 nt, Artificial Sequence
  Description of Artificial Sequence: Synthetic oligonucleotide
  Sense Strand Starting at position 587 of SEQ ID NO: 317953
gggagucuugauuaugcua

SEQ ID NO: 364820 - RNA, 19 nt, Artificial Sequence
  Description of Artificial Sequence: Synthetic oligonucleotide
  Antisense Strand to SEQ ID NO: 364819
uagcauaaucaagacuccc

SEQ ID NO: 364821 - RNA, 19 nt, Artificial Sequence
  Description of Artificial Sequence: Synthetic oligonucleotide
  Sense Strand Starting at position 587 of SEQ ID NO: 318102
gggagaauuucuggucuag

SEQ ID NO: 364822 - RNA, 19 nt, Artificial Sequence
  Description of Artificial Sequence: Synthetic oligonucleotide
  Antisense Strand to SEQ ID NO: 364821
cuagaccagaaauucuccc

SEQ ID NO: 364823 - RNA, 19 nt, Artificial Sequence
  Description of Artificial Sequence: Synthetic oligonucleotide
  Sense Strand Starting at position 587 of SEQ ID NO: 318174
cccucaugauguuuacagu

SEQ ID NO: 364824 - RNA, 19 nt, Artificial Sequence
  Description of Artificial Sequence: Synthetic oligonucleotide
  Antisense Strand to SEQ ID NO: 364823
acuguaaacaucaugaggg

SEQ ID NO: 364825 - RNA, 19 nt, Artificial Sequence
  Description of Artificial Sequence: Synthetic oligonucleotide
  Sense Strand Starting at position 587 of SEQ ID NO: 318207
ggaaguaagugugcagaua

SEQ ID NO: 364826 - RNA, 19 nt, Artificial Sequence
  Description of Artificial Sequence: Synthetic oligonucleotide
  Antisense Strand to SEQ ID NO: 364825
uaucugcacacuuacuucc

SEQ ID NO: 364827 - RNA, 19 nt, Artificial Sequence
  Description of Artificial Sequence: Synthetic oligonucleotide
  Sense Strand Starting at position 587 of SEQ ID NO: 318208
gaaguaagugugcagauau

SEQ ID NO: 364828 - RNA, 19 nt, Artificial Sequence
  Description of Artificial Sequence: Synthetic oligonucleotide
  Antisense Strand to SEQ ID NO: 364827
auaucugcacacuuacuuc

SEQ ID NO: 364829 - RNA, 19 nt, Artificial Sequence
  Description of Artificial Sequence: Synthetic oligonucleotide
  Sense Strand Starting at position 587 of SEQ ID NO: 318431
gguguauuugacuggccca

SEQ ID NO: 364830 - RNA, 19 nt, Artificial Sequence
  Description of Artificial Sequence: Synthetic oligonucleotide
  Antisense Strand to SEQ ID NO: 364829
ugggccagucaaauacacc

SEQ ID NO: 364831 - RNA, 19 nt, Artificial Sequence
  Description of Artificial Sequence: Synthetic oligonucleotide
  Sense Strand Starting at position 587 of SEQ ID NO: 318491
gggagaagcgcacauccau

SEQ ID NO: 364832 - RNA, 19 nt, Artificial Sequence
  Description of Artificial Sequence: Synthetic oligonucleotide
  Antisense Strand to SEQ ID NO: 364831
auggaugugcgcuucuccc

SEQ ID NO: 364833 - RNA, 19 nt, Artificial Sequence
  Description of Artificial Sequence: Synthetic oligonucleotide
  Sense Strand Starting at position 587 of SEQ ID NO: 318525
ccgccuuucccacacagau

SEQ ID NO: 364834 - RNA, 19 nt, Artificial Sequence
  Description of Artificial Sequence: Synthetic oligonucleotide
  Antisense Strand to SEQ ID NO: 364833
aucugugugggaaaggcgg

SEQ ID NO: 364835 - RNA, 19 nt, Artificial Sequence
  Description of Artificial Sequence: Synthetic oligonucleotide
  Sense Strand Starting at position 587 of SEQ ID NO: 318615
aucucagaggcauguagau

SEQ ID NO: 364836 - RNA, 19 nt, Artificial Sequence
  Description of Artificial Sequence: Synthetic oligonucleotide
  Antisense Strand to SEQ ID NO: 364835
aucuacaugccucugagau

SEQ ID NO: 364837 - RNA, 19 nt, Artificial Sequence
  Description of Artificial Sequence: Synthetic oligonucleotide
  Sense Strand Starting at position 587 of SEQ ID NO: 318648
cacgguaauccucaagaca

SEQ ID NO: 364838 - RNA, 19 nt, Artificial Sequence
  Description of Artificial Sequence: Synthetic oligonucleotide
  Antisense Strand to SEQ ID NO: 364837
ugucuugaggauuaccgug

SEQ ID NO: 364839 - RNA, 19 nt, Artificial Sequence
  Description of Artificial Sequence: Synthetic oligonucleotide
  Sense Strand Starting at position 587 of SEQ ID NO: 318669
cccaaugaggccuaauacu

SEQ ID NO: 364840 - RNA, 19 nt, Artificial Sequence
  Description of Artificial Sequence: Synthetic oligonucleotide
  Antisense Strand to SEQ ID NO: 364839
aguauuaggccucauuggg

SEQ ID NO: 364841 - RNA, 19 nt, Artificial Sequence
  Description of Artificial Sequence: Synthetic oligonucleotide
  Sense Strand Starting at position 587 of SEQ ID NO: 318711
gcauuaaagccagagguuc

SEQ ID NO: 364842 - RNA, 19 nt, Artificial Sequence
  Description of Artificial Sequence: Synthetic oligonucleotide
  Antisense Strand to SEQ ID NO: 364841
gaaccucuggcuuuaaugc

SEQ ID NO: 364843 - RNA, 19 nt, Artificial Sequence
  Description of Artificial Sequence: Synthetic oligonucleotide
  Sense Strand Starting at position 587 of SEQ ID NO: 318782
guucuugacugcuugaaag

SEQ ID NO: 364844 - RNA, 19 nt, Artificial Sequence
  Description of Artificial Sequence: Synthetic oligonucleotide
  Antisense Strand to SEQ ID NO: 364843
cuuucaagcagucaagaac

SEQ ID NO: 364845 - RNA, 19 nt, Artificial Sequence
  Description of Artificial Sequence: Synthetic oligonucleotide
  Sense Strand Starting at position 587 of SEQ ID NO: 318784
ucuugacugcuugaaagcu

SEQ ID NO: 364846 - RNA, 19 nt, Artificial Sequence
  Description of Artificial Sequence: Synthetic oligonucleotide
  Antisense Strand to SEQ ID NO: 364845
agcuuucaagcagucaaga

SEQ ID NO: 364847 - RNA, 19 nt, Artificial Sequence
  Description of Artificial Sequence: Synthetic oligonucleotide
  Sense Strand Starting at position 587 of SEQ ID NO: 318803
gccucacugggaggaauaa

SEQ ID NO: 364848 - RNA, 19 nt, Artificial Sequence
  Description of Artificial Sequence: Synthetic oligonucleotide
  Antisense Strand to SEQ ID NO: 364847
uuauuccucccagugaggc

SEQ ID NO: 364849 - RNA, 19 nt, Artificial Sequence
  Description of Artificial Sequence: Synthetic oligonucleotide
  Sense Strand Starting at position 587 of SEQ ID NO: 318833
aguaguugagacugggaau

SEQ ID NO: 364850 - RNA, 19 nt, Artificial Sequence
  Description of Artificial Sequence: Synthetic oligonucleotide
  Antisense Strand to SEQ ID NO: 364849
auucccagucucaacuacu

SEQ ID NO: 364851 - RNA, 19 nt, Artificial Sequence
  Description of Artificial Sequence: Synthetic oligonucleotide
  Sense Strand Starting at position 587 of SEQ ID NO: 318834
guaguugagacugggaauc

SEQ ID NO: 364852 - RNA, 19 nt, Artificial Sequence
  Description of Artificial Sequence: Synthetic oligonucleotide
  Antisense Strand to SEQ ID NO: 364851
gauucccagucucaacuac

SEQ ID NO: 364853 - RNA, 19 nt, Artificial Sequence
  Description of Artificial Sequence: Synthetic oligonucleotide
  Sense Strand Starting at position 587 of SEQ ID NO: 318997
gggugagcgauuugccuaa

SEQ ID NO: 364854 - RNA, 19 nt, Artificial Sequence
  Description of Artificial Sequence: Synthetic oligonucleotide
  Antisense Strand to SEQ ID NO: 364853
uuaggcaaaucgcucaccc

SEQ ID NO: 364855 - RNA, 19 nt, Artificial Sequence
  Description of Artificial Sequence: Synthetic oligonucleotide
  Sense Strand Starting at position 587 of SEQ ID NO: 318999
gugagcgauuugccuaaag

SEQ ID NO: 364856 - RNA, 19 nt, Artificial Sequence
  Description of Artificial Sequence: Synthetic oligonucleotide
  Antisense Strand to SEQ ID NO: 364855
cuuuaggcaaaucgcucac

SEQ ID NO: 364857 - RNA, 19 nt, Artificial Sequence
  Description of Artificial Sequence: Synthetic oligonucleotide
  Sense Strand Starting at position 587 of SEQ ID NO: 319118
aggugaggcaucgaacaga

SEQ ID NO: 364858 - RNA, 19 nt, Artificial Sequence
  Description of Artificial Sequence: Synthetic oligonucleotide
  Antisense Strand to SEQ ID NO: 364857
ucuguucgaugccucaccu

SEQ ID NO: 364859 - RNA, 19 nt, Artificial Sequence
  Description of Artificial Sequence: Synthetic oligonucleotide
  Sense Strand Starting at position 587 of SEQ ID NO: 319169
ggugaauccauaugcauga

SEQ ID NO: 364860 - RNA, 19 nt, Artificial Sequence
  Description of Artificial Sequence: Synthetic oligonucleotide
  Antisense Strand to SEQ ID NO: 364859
ucaugcauauggauucacc

SEQ ID NO: 364861 - RNA, 19 nt, Artificial Sequence
  Description of Artificial Sequence: Synthetic oligonucleotide
  Sense Strand Starting at position 587 of SEQ ID NO: 319216
cccugagucaugugaggaa

SEQ ID NO: 364862 - RNA, 19 nt, Artificial Sequence
  Description of Artificial Sequence: Synthetic oligonucleotide
  Antisense Strand to SEQ ID NO: 364861
uuccucacaugacucaggg

SEQ ID NO: 364863 - RNA, 19 nt, Artificial Sequence
  Description of Artificial Sequence: Synthetic oligonucleotide
  Sense Strand Starting at position 588 of SEQ ID NO: 315254
gacugagaaguaugcaaga

SEQ ID NO: 364864 - RNA, 19 nt, Artificial Sequence
  Description of Artificial Sequence: Synthetic oligonucleotide
  Antisense Strand to SEQ ID NO: 364863
ucuugcauacuucucaguc

SEQ ID NO: 364865 - RNA, 19 nt, Artificial Sequence
  Description of Artificial Sequence: Synthetic oligonucleotide
  Sense Strand Starting at position 588 of SEQ ID NO: 315294
cuggaaugguccuaaugga

SEQ ID NO: 364866 - RNA, 19 nt, Artificial Sequence
  Description of Artificial Sequence: Synthetic oligonucleotide
  Antisense Strand to SEQ ID NO: 364865
uccauuaggaccauuccag

SEQ ID NO: 364867 - RNA, 19 nt, Artificial Sequence
  Description of Artificial Sequence: Synthetic oligonucleotide
  Sense Strand Starting at position 588 of SEQ ID NO: 315410
cugguuccaugaggacaaa

SEQ ID NO: 364868 - RNA, 19 nt, Artificial Sequence
  Description of Artificial Sequence: Synthetic oligonucleotide
  Antisense Strand to SEQ ID NO: 364867
uuuguccucauggaaccag

SEQ ID NO: 364869 - RNA, 19 nt, Artificial Sequence
  Description of Artificial Sequence: Synthetic oligonucleotide
  Sense Strand Starting at position 588 of SEQ ID NO: 315502
accacagagcuuuaguacu

SEQ ID NO: 364870 - RNA, 19 nt, Artificial Sequence
  Description of Artificial Sequence: Synthetic oligonucleotide
  Antisense Strand to SEQ ID NO: 364869
aguacuaaagcucuguggu

SEQ ID NO: 364871 - RNA, 19 nt, Artificial Sequence
  Description of Artificial Sequence: Synthetic oligonucleotide
  Sense Strand Starting at position 588 of SEQ ID NO: 315504
cacagagcuuuaguacuga

SEQ ID NO: 364872 - RNA, 19 nt, Artificial Sequence
  Description of Artificial Sequence: Synthetic oligonucleotide
  Antisense Strand to SEQ ID NO: 364871
ucaguacuaaagcucugug

SEQ ID NO: 364873 - RNA, 19 nt, Artificial Sequence
  Description of Artificial Sequence: Synthetic oligonucleotide
  Sense Strand Starting at position 588 of SEQ ID NO: 315508
gagcuuuaguacugacaag

SEQ ID NO: 364874 - RNA, 19 nt, Artificial Sequence
  Description of Artificial Sequence: Synthetic oligonucleotide
  Antisense Strand to SEQ ID NO: 364873
cuugucaguacuaaagcuc

SEQ ID NO: 364875 - RNA, 19 nt, Artificial Sequence
  Description of Artificial Sequence: Synthetic oligonucleotide
  Sense Strand Starting at position 588 of SEQ ID NO: 315542
ucgauuugcucuccugcaa

SEQ ID NO: 364876 - RNA, 19 nt, Artificial Sequence
  Description of Artificial Sequence: Synthetic oligonucleotide
  Antisense Strand to SEQ ID NO: 364875
uugcaggagagcaaaucga

SEQ ID NO: 364877 - RNA, 19 nt, Artificial Sequence
  Description of Artificial Sequence: Synthetic oligonucleotide
  Sense Strand Starting at position 588 of SEQ ID NO: 315642
gugugugggauaugaauaa

SEQ ID NO: 364878 - RNA, 19 nt, Artificial Sequence
  Description of Artificial Sequence: Synthetic oligonucleotide
  Antisense Strand to SEQ ID NO: 364877
uuauucauaucccacacac

SEQ ID NO: 364879 - RNA, 19 nt, Artificial Sequence
  Description of Artificial Sequence: Synthetic oligonucleotide
  Sense Strand Starting at position 588 of SEQ ID NO: 315698
gacagauggucuugcagcu

SEQ ID NO: 364880 - RNA, 19 nt, Artificial Sequence
  Description of Artificial Sequence: Synthetic oligonucleotide
  Antisense Strand to SEQ ID NO: 364879
agcugcaagaccaucuguc

SEQ ID NO: 364881 - RNA, 19 nt, Artificial Sequence
  Description of Artificial Sequence: Synthetic oligonucleotide
  Sense Strand Starting at position 588 of SEQ ID NO: 315838
gagacauaugcauguucuc

SEQ ID NO: 364882 - RNA, 19 nt, Artificial Sequence
  Description of Artificial Sequence: Synthetic oligonucleotide
  Antisense Strand to SEQ ID NO: 364881
gagaacaugcauaugucuc

SEQ ID NO: 364883 - RNA, 19 nt, Artificial Sequence
  Description of Artificial Sequence: Synthetic oligonucleotide
  Sense Strand Starting at position 588 of SEQ ID NO: 315841
acauaugcauguucucagu

SEQ ID NO: 364884 - RNA, 19 nt, Artificial Sequence
  Description of Artificial Sequence: Synthetic oligonucleotide
  Antisense Strand to SEQ ID NO: 364883
acugagaacaugcauaugu

SEQ ID NO: 364885 - RNA, 19 nt, Artificial Sequence
  Description of Artificial Sequence: Synthetic oligonucleotide
  Sense Strand Starting at position 588 of SEQ ID NO: 315847
gcauguucucagugcaacu

SEQ ID NO: 364886 - RNA, 19 nt, Artificial Sequence
  Description of Artificial Sequence: Synthetic oligonucleotide
  Antisense Strand to SEQ ID NO: 364885
aguugcacugagaacaugc

SEQ ID NO: 364887 - RNA, 19 nt, Artificial Sequence
  Description of Artificial Sequence: Synthetic oligonucleotide
  Sense Strand Starting at position 588 of SEQ ID NO: 315869
ggacaugcgcugcacaauu

SEQ ID NO: 364888 - RNA, 19 nt, Artificial Sequence
  Description of Artificial Sequence: Synthetic oligonucleotide
  Antisense Strand to SEQ ID NO: 364887
aauugugcagcgcaugucc

SEQ ID NO: 364889 - RNA, 19 nt, Artificial Sequence
  Description of Artificial Sequence: Synthetic oligonucleotide
  Sense Strand Starting at position 588 of SEQ ID NO: 316299
ggcagaguacccgacagaa

SEQ ID NO: 364890 - RNA, 19 nt, Artificial Sequence
  Description of Artificial Sequence: Synthetic oligonucleotide
  Antisense Strand to SEQ ID NO: 364889
uucugucggguacucugcc

SEQ ID NO: 364891 - RNA, 19 nt, Artificial Sequence
  Description of Artificial Sequence: Synthetic oligonucleotide
  Sense Strand Starting at position 588 of SEQ ID NO: 316415
aggcccaaugucuggaaua

SEQ ID NO: 364892 - RNA, 19 nt, Artificial Sequence
  Description of Artificial Sequence: Synthetic oligonucleotide
  Antisense Strand to SEQ ID NO: 364891
uauuccagacauugggccu
